United States Patent Application Publication US 2020/0040061 A1 - sequence listing, part 5

SEQ ID NO: 59701 - DNA, 20 bp, Artificial Sequence
  Description of Artificial Sequence: Synthetic oligonucleotide
  Target: SCNA; (-) strand; PAM type: YTN; PAM sequence: CTG
cttactccttaccagctgtg

SEQ ID NO: 59702 - DNA, 20 bp, Artificial Sequence
  Description of Artificial Sequence: Synthetic oligonucleotide
  Target: SCNA; (-) strand; PAM type: YTN; PAM sequence: TTC
ctgcttactccttaccagct

SEQ ID NO: 59703 - DNA, 20 bp, Artificial Sequence
  Description of Artificial Sequence: Synthetic oligonucleotide
  Target: SCNA; (-) strand; PAM type: YTN; PAM sequence: CTT
cctgcttactccttaccagc

SEQ ID NO: 59704 - DNA, 20 bp, Artificial Sequence
  Description of Artificial Sequence: Synthetic oligonucleotide
  Target: SCNA; (-) strand; PAM type: YTN; PAM sequence: TTC
aacttcctgcttactcctta

SEQ ID NO: 59705 - DNA, 20 bp, Artificial Sequence
  Description of Artificial Sequence: Synthetic oligonucleotide
  Target: SCNA; (-) strand; PAM type: YTN; PAM sequence: TTG
gttcaacttcctgcttactc

SEQ ID NO: 59706 - DNA, 20 bp, Artificial Sequence
  Description of Artificial Sequence: Synthetic oligonucleotide
  Target: SCNA; (-) strand; PAM type: YTN; PAM sequence: CTT
ggttcaacttcctgcttact

SEQ ID NO: 59707 - DNA, 20 bp, Artificial Sequence
  Description of Artificial Sequence: Synthetic oligonucleotide
  Target: SCNA; (-) strand; PAM type: YTN; PAM sequence: TTC
ttggttcaacttcctgctta

SEQ ID NO: 59708 - DNA, 20 bp, Artificial Sequence
  Description of Artificial Sequence: Synthetic oligonucleotide
  Target: SCNA; (-) strand; PAM type: YTN; PAM sequence: CTT
cttggttcaacttcctgctt

SEQ ID NO: 59709 - DNA, 20 bp, Artificial Sequence
  Description of Artificial Sequence: Synthetic oligonucleotide
  Target: SCNA; (-) strand; PAM type: YTN; PAM sequence: CTA
aaaacacaggagtcagatct

SEQ ID NO: 59710 - DNA, 20 bp, Artificial Sequence
  Description of Artificial Sequence: Synthetic oligonucleotide
  Target: SCNA; (-) strand; PAM type: YTN; PAM sequence: TTG
tggatatgactaaaaacaca

SEQ ID NO: 59711 - DNA, 20 bp, Artificial Sequence
  Description of Artificial Sequence: Synthetic oligonucleotide
  Target: SCNA; (-) strand; PAM type: YTN; PAM sequence: TTA
atacagtgttgtggatatga

SEQ ID NO: 59712 - DNA, 20 bp, Artificial Sequence
  Description of Artificial Sequence: Synthetic oligonucleotide
  Target: SCNA; (-) strand; PAM type: YTN; PAM sequence: CTT
aatacagtgttgtggatatg

SEQ ID NO: 59713 - DNA, 20 bp, Artificial Sequence
  Description of Artificial Sequence: Synthetic oligonucleotide
  Target: SCNA; (-) strand; PAM type: YTN; PAM sequence: CTA
aaatggaaatgaggacaatg

SEQ ID NO: 59714 - DNA, 20 bp, Artificial Sequence
  Description of Artificial Sequence: Synthetic oligonucleotide
  Target: SCNA; (-) strand; PAM type: YTN; PAM sequence: TTC
taaaatggaaatgaggacaa

SEQ ID NO: 59715 - DNA, 20 bp, Artificial Sequence
  Description of Artificial Sequence: Synthetic oligonucleotide
  Target: SCNA; (-) strand; PAM type: YTN; PAM sequence: CTT
ctaaaatggaaatgaggaca

SEQ ID NO: 59716 - DNA, 20 bp, Artificial Sequence
  Description of Artificial Sequence: Synthetic oligonucleotide
  Target: SCNA; (-) strand; PAM type: YTN; PAM sequence: CTG
acttctaaaatggaaatgag

SEQ ID NO: 59717 - DNA, 20 bp, Artificial Sequence
  Description of Artificial Sequence: Synthetic oligonucleotide
  Target: SCNA; (-) strand; PAM type: YTN; PAM sequence: CTA
tcactgacttctaaaatgga

SEQ ID NO: 59718 - DNA, 20 bp, Artificial Sequence
  Description of Artificial Sequence: Synthetic oligonucleotide
  Target: SCNA; (-) strand; PAM type: YTN; PAM sequence: TTC
ctatcactgacttctaaaat

SEQ ID NO: 59719 - DNA, 20 bp, Artificial Sequence
  Description of Artificial Sequence: Synthetic oligonucleotide
  Target: SCNA; (-) strand; PAM type: YTN; PAM sequence: CTA
tacaaataaaatgttcctat

SEQ ID NO: 59720 - DNA, 20 bp, Artificial Sequence
  Description of Artificial Sequence: Synthetic oligonucleotide
  Target: SCNA; (-) strand; PAM type: YTN; PAM sequence: TTA
aacacaatagtgcctataca

SEQ ID NO: 59721 - DNA, 20 bp, Artificial Sequence
  Description of Artificial Sequence: Synthetic oligonucleotide
  Target: SCNA; (-) strand; PAM type: YTN; PAM sequence: TTA
tataatcggaaagcattaaa

SEQ ID NO: 59722 - DNA, 20 bp, Artificial Sequence
  Description of Artificial Sequence: Synthetic oligonucleotide
  Target: SCNA; (-) strand; PAM type: YTN; PAM sequence: TTT
atataatcggaaagcattaa

SEQ ID NO: 59723 - DNA, 20 bp, Artificial Sequence
  Description of Artificial Sequence: Synthetic oligonucleotide
  Target: SCNA; (-) strand; PAM type: YTN; PAM sequence: CTG
gcagatgtggtgaagcaaaa

SEQ ID NO: 59724 - DNA, 20 bp, Artificial Sequence
  Description of Artificial Sequence: Synthetic oligonucleotide
  Target: SCNA; (-) strand; PAM type: YTN; PAM sequence: TTC
ctggcagatgtggtgaagca

SEQ ID NO: 59725 - DNA, 20 bp, Artificial Sequence
  Description of Artificial Sequence: Synthetic oligonucleotide
  Target: SCNA; (-) strand; PAM type: YTN; PAM sequence: TTT
cctggcagatgtggtgaagc

SEQ ID NO: 59726 - DNA, 20 bp, Artificial Sequence
  Description of Artificial Sequence: Synthetic oligonucleotide
  Target: SCNA; (-) strand; PAM type: YTN; PAM sequence: CTC
cacgtttcctggcagatgtg

SEQ ID NO: 59727 - DNA, 20 bp, Artificial Sequence
  Description of Artificial Sequence: Synthetic oligonucleotide
  Target: SCNA; (-) strand; PAM type: YTN; PAM sequence: TTG
taagtactccacgtttcctg

SEQ ID NO: 59728 - DNA, 20 bp, Artificial Sequence
  Description of Artificial Sequence: Synthetic oligonucleotide
  Target: SCNA; (-) strand; PAM type: YTN; PAM sequence: CTG
ttgtaagtactccacgtttc

SEQ ID NO: 59729 - DNA, 20 bp, Artificial Sequence
  Description of Artificial Sequence: Synthetic oligonucleotide
  Target: SCNA; (-) strand; PAM type: YTN; PAM sequence: TTC
tgttgtaagtactccacgtt

SEQ ID NO: 59730 - DNA, 20 bp, Artificial Sequence
  Description of Artificial Sequence: Synthetic oligonucleotide
  Target: SCNA; (-) strand; PAM type: YTN; PAM sequence: TTT
ctgttgtaagtactccacgt

SEQ ID NO: 59731 - DNA, 20 bp, Artificial Sequence
  Description of Artificial Sequence: Synthetic oligonucleotide
  Target: SCNA; (-) strand; PAM type: YTN; PAM sequence: TTT
tctgttgtaagtactccacg

SEQ ID NO: 59732 - DNA, 20 bp, Artificial Sequence
  Description of Artificial Sequence: Synthetic oligonucleotide
  Target: SCNA; (-) strand; PAM type: YTN; PAM sequence: TTA
agttttctgttgtaagtact

SEQ ID NO: 59733 - DNA, 20 bp, Artificial Sequence
  Description of Artificial Sequence: Synthetic oligonucleotide
  Target: SCNA; (-) strand; PAM type: YTN; PAM sequence: CTG
taattaagttttctgttgta

SEQ ID NO: 59734 - DNA, 20 bp, Artificial Sequence
  Description of Artificial Sequence: Synthetic oligonucleotide
  Target: SCNA; (-) strand; PAM type: YTN; PAM sequence: TTG
ctgtaattaagttttctgtt

SEQ ID NO: 59735 - DNA, 20 bp, Artificial Sequence
  Description of Artificial Sequence: Synthetic oligonucleotide
  Target: SCNA; (-) strand; PAM type: YTN; PAM sequence: CTT
gctgtaattaagttttctgt

SEQ ID NO: 59736 - DNA, 20 bp, Artificial Sequence
  Description of Artificial Sequence: Synthetic oligonucleotide
  Target: SCNA; (-) strand; PAM type: YTN; PAM sequence: TTA
aaagcccacagacttgctgt

SEQ ID NO: 59737 - DNA, 20 bp, Artificial Sequence
  Description of Artificial Sequence: Synthetic oligonucleotide
  Target: SCNA; (-) strand; PAM type: YTN; PAM sequence: TTA
acaaattaaaagcccacaga

SEQ ID NO: 59738 - DNA, 20 bp, Artificial Sequence
  Description of Artificial Sequence: Synthetic oligonucleotide
  Target: SCNA; (-) strand; PAM type: YTN; PAM sequence: TTT
aacaaattaaaagcccacag

SEQ ID NO: 59739 - DNA, 20 bp, Artificial Sequence
  Description of Artificial Sequence: Synthetic oligonucleotide
  Target: SCNA; (-) strand; PAM type: YTN; PAM sequence: TTG
aggaagatgaggatgagagt

SEQ ID NO: 59740 - DNA, 20 bp, Artificial Sequence
  Description of Artificial Sequence: Synthetic oligonucleotide
  Target: SCNA; (-) strand; PAM type: YTN; PAM sequence: TTA
caatcaagaaatatcaaaaa

SEQ ID NO: 59741 - DNA, 20 bp, Artificial Sequence
  Description of Artificial Sequence: Synthetic oligonucleotide
  Target: SCNA; (-) strand; PAM type: YTN; PAM sequence: TTT
acaatcaagaaatatcaaaa

SEQ ID NO: 59742 - DNA, 20 bp, Artificial Sequence
  Description of Artificial Sequence: Synthetic oligonucleotide
  Target: SCNA; (-) strand; PAM type: YTN; PAM sequence: TTA
ggtttacaatcaagaaatat

SEQ ID NO: 59743 - DNA, 20 bp, Artificial Sequence
  Description of Artificial Sequence: Synthetic oligonucleotide
  Target: SCNA; (-) strand; PAM type: YTN; PAM sequence: TTG
aacaagtcaattaggtttac

SEQ ID NO: 59744 - DNA, 20 bp, Artificial Sequence
  Description of Artificial Sequence: Synthetic oligonucleotide
  Target: SCNA; (-) strand; PAM type: YTN; PAM sequence: TTT
gaacaagtcaattaggttta

SEQ ID NO: 59745 - DNA, 20 bp, Artificial Sequence
  Description of Artificial Sequence: Synthetic oligonucleotide
  Target: SCNA; (-) strand; PAM type: YTN; PAM sequence: TTA
ccgagaatttgaacaagtca

SEQ ID NO: 59746 - DNA, 20 bp, Artificial Sequence
  Description of Artificial Sequence: Synthetic oligonucleotide
  Target: SCNA; (-) strand; PAM type: YTN; PAM sequence: TTT
accgagaatttgaacaagtc

SEQ ID NO: 59747 - DNA, 20 bp, Artificial Sequence
  Description of Artificial Sequence: Synthetic oligonucleotide
  Target: SCNA; (-) strand; PAM type: YTN; PAM sequence: CTA
aatttaccgagaatttgaac

SEQ ID NO: 59748 - DNA, 20 bp, Artificial Sequence
  Description of Artificial Sequence: Synthetic oligonucleotide
  Target: SCNA; (-) strand; PAM type: YTN; PAM sequence: TTG
gcctaaatttaccgagaatt

SEQ ID NO: 59749 - DNA, 20 bp, Artificial Sequence
  Description of Artificial Sequence: Synthetic oligonucleotide
  Target: SCNA; (-) strand; PAM type: YTN; PAM sequence: TTT
ggcctaaatttaccgagaat

SEQ ID NO: 59750 - DNA, 20 bp, Artificial Sequence
  Description of Artificial Sequence: Synthetic oligonucleotide
  Target: SCNA; (-) strand; PAM type: YTN; PAM sequence: TTC
atttggcctaaatttaccga

SEQ ID NO: 59751 - DNA, 20 bp, Artificial Sequence
  Description of Artificial Sequence: Synthetic oligonucleotide
  Target: SCNA; (-) strand; PAM type: YTN; PAM sequence: TTA
ttcatttggcctaaatttac

SEQ ID NO: 59752 - DNA, 20 bp, Artificial Sequence
  Description of Artificial Sequence: Synthetic oligonucleotide
  Target: SCNA; (-) strand; PAM type: YTN; PAM sequence: TTA
tattattcatttggcctaaa

SEQ ID NO: 59753 - DNA, 20 bp, Artificial Sequence
  Description of Artificial Sequence: Synthetic oligonucleotide
  Target: SCNA; (-) strand; PAM type: YTN; PAM sequence: CTG
attatattattcatttggcc

SEQ ID NO: 59754 - DNA, 20 bp, Artificial Sequence
  Description of Artificial Sequence: Synthetic oligonucleotide
  Target: SCNA; (-) strand; PAM type: YTN; PAM sequence: TTC
tgattatattattcatttgg

SEQ ID NO: 59755 - DNA, 20 bp, Artificial Sequence
  Description of Artificial Sequence: Synthetic oligonucleotide
  Target: SCNA; (-) strand; PAM type: YTN; PAM sequence: TTT
ctgattatattattcatttg

SEQ ID NO: 59756 - DNA, 20 bp, Artificial Sequence
  Description of Artificial Sequence: Synthetic oligonucleotide
  Target: SCNA; (-) strand; PAM type: YTN; PAM sequence: TTA
catttctgattatattattc

SEQ ID NO: 59757 - DNA, 20 bp, Artificial Sequence
  Description of Artificial Sequence: Synthetic oligonucleotide
  Target: SCNA; (-) strand; PAM type: YTN; PAM sequence: TTA
ttacatttctgattatatta

SEQ ID NO: 59758 - DNA, 20 bp, Artificial Sequence
  Description of Artificial Sequence: Synthetic oligonucleotide
  Target: SCNA; (-) strand; PAM type: YTN; PAM sequence: TTG
tgcaattattacatttctga

SEQ ID NO: 59759 - DNA, 20 bp, Artificial Sequence
  Description of Artificial Sequence: Synthetic oligonucleotide
  Target: SCNA; (-) strand; PAM type: YTN; PAM sequence: TTA
ttgtgcaattattacatttc

SEQ ID NO: 59760 - DNA, 20 bp, Artificial Sequence
  Description of Artificial Sequence: Synthetic oligonucleotide
  Target: SCNA; (-) strand; PAM type: YTN; PAM sequence: TTG
tacaaatattattgtgcaat

SEQ ID NO: 59761 - DNA, 20 bp, Artificial Sequence
  Description of Artificial Sequence: Synthetic oligonucleotide
  Target: SCNA; (-) strand; PAM type: YTN; PAM sequence: TTT
gtacaaatattattgtgcaa

SEQ ID NO: 59762 - DNA, 20 bp, Artificial Sequence
  Description of Artificial Sequence: Synthetic oligonucleotide
  Target: SCNA; (-) strand; PAM type: YTN; PAM sequence: CTA
tttgtacaaatattattgtg

SEQ ID NO: 59763 - DNA, 20 bp, Artificial Sequence
  Description of Artificial Sequence: Synthetic oligonucleotide
  Target: SCNA; (-) strand; PAM type: YTN; PAM sequence: TTA
tggtatagctatttgtacaa

SEQ ID NO: 59764 - DNA, 20 bp, Artificial Sequence
  Description of Artificial Sequence: Synthetic oligonucleotide
  Target: SCNA; (-) strand; PAM type: YTN; PAM sequence: TTG
ttatggtatagctatttgta

SEQ ID NO: 59765 - DNA, 20 bp, Artificial Sequence
  Description of Artificial Sequence: Synthetic oligonucleotide
  Target: SCNA; (-) strand; PAM type: YTN; PAM sequence: TTG
tattgttatggtatagctat

SEQ ID NO: 59766 - DNA, 20 bp, Artificial Sequence
  Description of Artificial Sequence: Synthetic oligonucleotide
  Target: SCNA; (-) strand; PAM type: YTN; PAM sequence: TTT
gtattgttatggtatagcta

SEQ ID NO: 59767 - DNA, 20 bp, Artificial Sequence
  Description of Artificial Sequence: Synthetic oligonucleotide
  Target: SCNA; (-) strand; PAM type: YTN; PAM sequence: CTT
tgtattgttatggtatagct

SEQ ID NO: 59768 - DNA, 20 bp, Artificial Sequence
  Description of Artificial Sequence: Synthetic oligonucleotide
  Target: SCNA; (-) strand; PAM type: YTN; PAM sequence: TTA
tctttgtattgttatggtat

SEQ ID NO: 59769 - DNA, 20 bp, Artificial Sequence
  Description of Artificial Sequence: Synthetic oligonucleotide
  Target: SCNA; (-) strand; PAM type: YTN; PAM sequence: TTT
atctttgtattgttatggta

SEQ ID NO: 59770 - DNA, 20 bp, Artificial Sequence
  Description of Artificial Sequence: Synthetic oligonucleotide
  Target: SCNA; (-) strand; PAM type: YTN; PAM sequence: TTG
tatttatctttgtattgtta

SEQ ID NO: 59771 - DNA, 20 bp, Artificial Sequence
  Description of Artificial Sequence: Synthetic oligonucleotide
  Target: SCNA; (-) strand; PAM type: YTN; PAM sequence: TTA
ttgtatttatctttgtattg

SEQ ID NO: 59772 - DNA, 20 bp, Artificial Sequence
  Description of Artificial Sequence: Synthetic oligonucleotide
  Target: SCNA; (-) strand; PAM type: YTN; PAM sequence: TTT
attgtatttatctttgtatt

SEQ ID NO: 59773 - DNA, 20 bp, Artificial Sequence
  Description of Artificial Sequence: Synthetic oligonucleotide
  Target: SCNA; (-) strand; PAM type: YTN; PAM sequence: TTG
gacagtcagtaaaatgttta

SEQ ID NO: 59774 - DNA, 20 bp, Artificial Sequence
  Description of Artificial Sequence: Synthetic oligonucleotide
  Target: SCNA; (-) strand; PAM type: YTN; PAM sequence: CTT
ggacagtcagtaaaatgttt

SEQ ID NO: 59775 - DNA, 20 bp, Artificial Sequence
  Description of Artificial Sequence: Synthetic oligonucleotide
  Target: SCNA; (-) strand; PAM type: YTN; PAM sequence: TTC
aggaaacacccttggacagt

SEQ ID NO: 59776 - DNA, 20 bp, Artificial Sequence
  Description of Artificial Sequence: Synthetic oligonucleotide
  Target: SCNA; (-) strand; PAM type: YTN; PAM sequence: TTT
caggaaacacccttggacag

SEQ ID NO: 59777 - DNA, 20 bp, Artificial Sequence
  Description of Artificial Sequence: Synthetic oligonucleotide
  Target: SCNA; (-) strand; PAM type: YTN; PAM sequence: TTC
agagtgcatttcaggaaaca

SEQ ID NO: 59778 - DNA, 20 bp, Artificial Sequence
  Description of Artificial Sequence: Synthetic oligonucleotide
  Target: SCNA; (-) strand; PAM type: YTN; PAM sequence: TTG
ataattcagagtgcatttca

SEQ ID NO: 59779 - DNA, 20 bp, Artificial Sequence
  Description of Artificial Sequence: Synthetic oligonucleotide
  Target: SCNA; (-) strand; PAM type: YTN; PAM sequence: TTT
gataattcagagtgcatttc

SEQ ID NO: 59780 - DNA, 20 bp, Artificial Sequence
  Description of Artificial Sequence: Synthetic oligonucleotide
  Target: SCNA; (-) strand; PAM type: YTN; PAM sequence: CTT
tgataattcagagtgcattt

SEQ ID NO: 59781 - DNA, 20 bp, Artificial Sequence
  Description of Artificial Sequence: Synthetic oligonucleotide
  Target: SCNA; (-) strand; PAM type: YTN; PAM sequence: TTC
ctttgataattcagagtgca

SEQ ID NO: 59782 - DNA, 20 bp, Artificial Sequence
  Description of Artificial Sequence: Synthetic oligonucleotide
  Target: SCNA; (-) strand; PAM type: YTN; PAM sequence: TTA
caatattcctttgataattc

SEQ ID NO: 59783 - DNA, 20 bp, Artificial Sequence
  Description of Artificial Sequence: Synthetic oligonucleotide
  Target: SCNA; (-) strand; PAM type: YTN; PAM sequence: TTG
attacaatattcctttgata

SEQ ID NO: 59784 - DNA, 20 bp, Artificial Sequence
  Description of Artificial Sequence: Synthetic oligonucleotide
  Target: SCNA; (-) strand; PAM type: YTN; PAM sequence: TTA
tgttgattacaatattcctt

SEQ ID NO: 59785 - DNA, 20 bp, Artificial Sequence
  Description of Artificial Sequence: Synthetic oligonucleotide
  Target: SCNA; (-) strand; PAM type: YTN; PAM sequence: TTA
aattatgttgattacaatat

SEQ ID NO: 59786 - DNA, 20 bp, Artificial Sequence
  Description of Artificial Sequence: Synthetic oligonucleotide
  Target: SCNA; (-) strand; PAM type: YTN; PAM sequence: CTT
aaattatgttgattacaata

SEQ ID NO: 59787 - DNA, 20 bp, Artificial Sequence
  Description of Artificial Sequence: Synthetic oligonucleotide
  Target: SCNA; (-) strand; PAM type: YTN; PAM sequence: TTG
accttaaattatgttgatta

SEQ ID NO: 59788 - DNA, 20 bp, Artificial Sequence
  Description of Artificial Sequence: Synthetic oligonucleotide
  Target: SCNA; (-) strand; PAM type: YTN; PAM sequence: TTT
gaccttaaattatgttgatt

SEQ ID NO: 59789 - DNA, 20 bp, Artificial Sequence
  Description of Artificial Sequence: Synthetic oligonucleotide
  Target: SCNA; (-) strand; PAM type: YTN; PAM sequence: TTT
tgaccttaaattatgttgat

SEQ ID NO: 59790 - DNA, 20 bp, Artificial Sequence
  Description of Artificial Sequence: Synthetic oligonucleotide
  Target: SCNA; (-) strand; PAM type: YTN; PAM sequence: TTA
cagtaaaatattttgacctt

SEQ ID NO: 59791 - DNA, 20 bp, Artificial Sequence
  Description of Artificial Sequence: Synthetic oligonucleotide
  Target: SCNA; (-) strand; PAM type: YTN; PAM sequence: TTG
attacagtaaaatattttga

SEQ ID NO: 59792 - DNA, 20 bp, Artificial Sequence
  Description of Artificial Sequence: Synthetic oligonucleotide
  Target: SCNA; (-) strand; PAM type: YTN; PAM sequence: CTG
ttgattacagtaaaatattt

SEQ ID NO: 59793 - DNA, 20 bp, Artificial Sequence
  Description of Artificial Sequence: Synthetic oligonucleotide
  Target: SCNA; (-) strand; PAM type: YTN; PAM sequence: TTC
tgttgattacagtaaaatat

SEQ ID NO: 59794 - DNA, 20 bp, Artificial Sequence
  Description of Artificial Sequence: Synthetic oligonucleotide
  Target: SCNA; (-) strand; PAM type: YTN; PAM sequence: TTT
ctgttgattacagtaaaata

SEQ ID NO: 59795 - DNA, 20 bp, Artificial Sequence
  Description of Artificial Sequence: Synthetic oligonucleotide
  Target: SCNA; (-) strand; PAM type: YTN; PAM sequence: TTA
aaaaaagtaaaatttctgtt

SEQ ID NO: 59796 - DNA, 20 bp, Artificial Sequence
  Description of Artificial Sequence: Synthetic oligonucleotide
  Target: SCNA; (-) strand; PAM type: YTN; PAM sequence: TTT
aaaaaaagtaaaatttctgt

SEQ ID NO: 59797 - DNA, 20 bp, Artificial Sequence
  Description of Artificial Sequence: Synthetic oligonucleotide
  Target: SCNA; (-) strand; PAM type: YTN; PAM sequence: TTT
taaaaaaagtaaaatttctg

SEQ ID NO: 59798 - DNA, 20 bp, Artificial Sequence
  Description of Artificial Sequence: Synthetic oligonucleotide
  Target: SCNA; (-) strand; PAM type: YTN; PAM sequence: TTG
ccataattttaaaaaaagta

SEQ ID NO: 59799 - DNA, 20 bp, Artificial Sequence
  Description of Artificial Sequence: Synthetic oligonucleotide
  Target: SCNA; (-) strand; PAM type: YTN; PAM sequence: CTG
acaaaaataaaatgtgaata

SEQ ID NO: 59800 - DNA, 20 bp, Artificial Sequence
  Description of Artificial Sequence: Synthetic oligonucleotide
  Target: SCNA; (-) strand; PAM type: YTN; PAM sequence: CTG
ctgacaaaaataaaatgtga

SEQ ID NO: 59801 - DNA, 20 bp, Artificial Sequence
  Description of Artificial Sequence: Synthetic oligonucleotide
  Target: SCNA; (-) strand; PAM type: YTN; PAM sequence: TTG
acaaactgctgacaaaaata

SEQ ID NO: 59802 - DNA, 20 bp, Artificial Sequence
  Description of Artificial Sequence: Synthetic oligonucleotide
  Target: SCNA; (-) strand; PAM type: YTN; PAM sequence: CTG
accaaaaatgtattgacaaa

SEQ ID NO: 59803 - DNA, 20 bp, Artificial Sequence
  Description of Artificial Sequence: Synthetic oligonucleotide
  Target: SCNA; (-) strand; PAM type: YTN; PAM sequence: TTC
tgaccaaaaatgtattgaca

SEQ ID NO: 59804 - DNA, 20 bp, Artificial Sequence
  Description of Artificial Sequence: Synthetic oligonucleotide
  Target: SCNA; (-) strand; PAM type: YTN; PAM sequence: TTA
aatattctgaccaaaaatgt

SEQ ID NO: 59805 - DNA, 20 bp, Artificial Sequence
  Description of Artificial Sequence: Synthetic oligonucleotide
  Target: SCNA; (-) strand; PAM type: YTN; PAM sequence: TTT
aaatattctgaccaaaaatg

SEQ ID NO: 59806 - DNA, 20 bp, Artificial Sequence
  Description of Artificial Sequence: Synthetic oligonucleotide
  Target: SCNA; (-) strand; PAM type: YTN; PAM sequence: TTA
tagtaagtgggcatttaaat

SEQ ID NO: 59807 - DNA, 20 bp, Artificial Sequence
  Description of Artificial Sequence: Synthetic oligonucleotide
  Target: SCNA; (-) strand; PAM type: YTN; PAM sequence: TTT
atagtaagtgggcatttaaa

SEQ ID NO: 59808 - DNA, 20 bp, Artificial Sequence
  Description of Artificial Sequence: Synthetic oligonucleotide
  Target: SCNA; (-) strand; PAM type: YTN; PAM sequence: TTA
atttatagtaagtgggcatt

SEQ ID NO: 59809 - DNA, 20 bp, Artificial Sequence
  Description of Artificial Sequence: Synthetic oligonucleotide
  Target: SCNA; (-) strand; PAM type: YTN; PAM sequence: TTT
aatttatagtaagtgggcat

SEQ ID NO: 59810 - DNA, 20 bp, Artificial Sequence
  Description of Artificial Sequence: Synthetic oligonucleotide
  Target: SCNA; (-) strand; PAM type: YTN; PAM sequence: CTA
tgtttaatttatagtaagtg

SEQ ID NO: 59811 - DNA, 20 bp, Artificial Sequence
  Description of Artificial Sequence: Synthetic oligonucleotide
  Target: SCNA; (-) strand; PAM type: YTN; PAM sequence: TTG
ataagctatgtttaatttat

SEQ ID NO: 59812 - DNA, 20 bp, Artificial Sequence
  Description of Artificial Sequence: Synthetic oligonucleotide
  Target: SCNA; (-) strand; PAM type: YTN; PAM sequence: TTG
aattgataagctatgtttaa

SEQ ID NO: 59813 - DNA, 20 bp, Artificial Sequence
  Description of Artificial Sequence: Synthetic oligonucleotide
  Target: SCNA; (-) strand; PAM type: YTN; PAM sequence: TTT
gaattgataagctatgttta

SEQ ID NO: 59814 - DNA, 20 bp, Artificial Sequence
  Description of Artificial Sequence: Synthetic oligonucleotide
  Target: SCNA; (-) strand; PAM type: YTN; PAM sequence: CTT
tgaattgataagctatgttt

SEQ ID NO: 59815 - DNA, 20 bp, Artificial Sequence
  Description of Artificial Sequence: Synthetic oligonucleotide
  Target: SCNA; (-) strand; PAM type: YTN; PAM sequence: TTG
ccaagaataatgagggcttt

SEQ ID NO: 59816 - DNA, 20 bp, Artificial Sequence
  Description of Artificial Sequence: Synthetic oligonucleotide
  Target: SCNA; (-) strand; PAM type: YTN; PAM sequence: CTT
gccaagaataatgagggctt

SEQ ID NO: 59817 - DNA, 20 bp, Artificial Sequence
  Description of Artificial Sequence: Synthetic oligonucleotide
  Target: SCNA; (-) strand; PAM type: YTN; PAM sequence: TTA
taaataaaaaatatacttgc

SEQ ID NO: 59818 - DNA, 20 bp, Artificial Sequence
  Description of Artificial Sequence: Synthetic oligonucleotide
  Target: SCNA; (-) strand; PAM type: YTN; PAM sequence: TTG
attataaataaaaaatatac

SEQ ID NO: 59819 - DNA, 20 bp, Artificial Sequence
  Description of Artificial Sequence: Synthetic oligonucleotide
  Target: SCNA; (-) strand; PAM type: YTN; PAM sequence: TTA
aataggtaaatattgattat

SEQ ID NO: 59820 - DNA, 20 bp, Artificial Sequence
  Description of Artificial Sequence: Synthetic oligonucleotide
  Target: SCNA; (-) strand; PAM type: YTN; PAM sequence: TTT
aaataggtaaatattgatta

SEQ ID NO: 59821 - DNA, 20 bp, Artificial Sequence
  Description of Artificial Sequence: Synthetic oligonucleotide
  Target: SCNA; (-) strand; PAM type: YTN; PAM sequence: TTT
taaataggtaaatattgatt

SEQ ID NO: 59822 - DNA, 20 bp, Artificial Sequence
  Description of Artificial Sequence: Synthetic oligonucleotide
  Target: SCNA; (-) strand; PAM type: YTN; PAM sequence: TTT
ttaaataggtaaatattgat

SEQ ID NO: 59823 - DNA, 20 bp, Artificial Sequence
  Description of Artificial Sequence: Synthetic oligonucleotide
  Target: SCNA; (-) strand; PAM type: YTN; PAM sequence: TTA
taaagtatttttaaataggt

SEQ ID NO: 59824 - DNA, 20 bp, Artificial Sequence
  Description of Artificial Sequence: Synthetic oligonucleotide
  Target: SCNA; (-) strand; PAM type: YTN; PAM sequence: TTT
ataaagtatttttaaatagg

SEQ ID NO: 59825 - DNA, 20 bp, Artificial Sequence
  Description of Artificial Sequence: Synthetic oligonucleotide
  Target: SCNA; (-) strand; PAM type: YTN; PAM sequence: CTT
tataaagtatttttaaatag

SEQ ID NO: 59826 - DNA, 20 bp, Artificial Sequence
  Description of Artificial Sequence: Synthetic oligonucleotide
  Target: SCNA; (-) strand; PAM type: YTN; PAM sequence: TTC
tttataaagtatttttaaat

SEQ ID NO: 59827 - DNA, 20 bp, Artificial Sequence
  Description of Artificial Sequence: Synthetic oligonucleotide
  Target: SCNA; (-) strand; PAM type: YTN; PAM sequence: CTG
aattctttataaagtatttt

SEQ ID NO: 59828 - DNA, 20 bp, Artificial Sequence
  Description of Artificial Sequence: Synthetic oligonucleotide
  Target: SCNA; (-) strand; PAM type: YTN; PAM sequence: TTG
aaactgaattctttataaag

SEQ ID NO: 59829 - DNA, 20 bp, Artificial Sequence
  Description of Artificial Sequence: Synthetic oligonucleotide
  Target: SCNA; (-) strand; PAM type: YTN; PAM sequence: TTA
ttgaaactgaattctttata

SEQ ID NO: 59830 - DNA, 20 bp, Artificial Sequence
  Description of Artificial Sequence: Synthetic oligonucleotide
  Target: SCNA; (-) strand; PAM type: YTN; PAM sequence: CTT
attgaaactgaattctttat

SEQ ID NO: 59831 - DNA, 20 bp, Artificial Sequence
  Description of Artificial Sequence: Synthetic oligonucleotide
  Target: SCNA; (-) strand; PAM type: YTN; PAM sequence: CTA
agaacatatcagtcttattg

SEQ ID NO: 59832 - DNA, 20 bp, Artificial Sequence
  Description of Artificial Sequence: Synthetic oligonucleotide
  Target: SCNA; (-) strand; PAM type: YTN; PAM sequence: TTC
taagaacatatcagtcttat

SEQ ID NO: 59833 - DNA, 20 bp, Artificial Sequence
  Description of Artificial Sequence: Synthetic oligonucleotide
  Target: SCNA; (-) strand; PAM type: YTN; PAM sequence: CTG
agcattctaagaacatatca

SEQ ID NO: 59834 - DNA, 20 bp, Artificial Sequence
  Description of Artificial Sequence: Synthetic oligonucleotide
  Target: SCNA; (-) strand; PAM type: YTN; PAM sequence: TTG
taaaacaatcactgagcatt

SEQ ID NO: 59835 - DNA, 20 bp, Artificial Sequence
  Description of Artificial Sequence: Synthetic oligonucleotide
  Target: SCNA; (-) strand; PAM type: YTN; PAM sequence: CTA
tgaaattgtaaaacaatcac

SEQ ID NO: 59836 - DNA, 20 bp, Artificial Sequence
  Description of Artificial Sequence: Synthetic oligonucleotide
  Target: SCNA; (-) strand; PAM type: YTN; PAM sequence: TTC
ctatgaaattgtaaaacaat

SEQ ID NO: 59837 - DNA, 20 bp, Artificial Sequence
  Description of Artificial Sequence: Synthetic oligonucleotide
  Target: SCNA; (-) strand; PAM type: YTN; PAM sequence: TTC
aagattcctatgaaattgta

SEQ ID NO: 59838 - DNA, 20 bp, Artificial Sequence
  Description of Artificial Sequence: Synthetic oligonucleotide
  Target: SCNA; (-) strand; PAM type: YTN; PAM sequence: TTA
gtgtggcccagtattcaaga

SEQ ID NO: 59839 - DNA, 20 bp, Artificial Sequence
  Description of Artificial Sequence: Synthetic oligonucleotide
  Target: SCNA; (-) strand; PAM type: YTN; PAM sequence: CTA
gtgattagtgtggcccagta

SEQ ID NO: 59840 - DNA, 20 bp, Artificial Sequence
  Description of Artificial Sequence: Synthetic oligonucleotide
  Target: SCNA; (-) strand; PAM type: YTN; PAM sequence: TTA
aagtatctagtgattagtgt

SEQ ID NO: 59841 - DNA, 20 bp, Artificial Sequence
  Description of Artificial Sequence: Synthetic oligonucleotide
  Target: SCNA; (-) strand; PAM type: YTN; PAM sequence: TTT
aaagtatctagtgattagtg

SEQ ID NO: 59842 - DNA, 20 bp, Artificial Sequence
  Description of Artificial Sequence: Synthetic oligonucleotide
  Target: SCNA; (-) strand; PAM type: YTN; PAM sequence: TTA
tatccaaagatgatatttaa

SEQ ID NO: 59843 - DNA, 20 bp, Artificial Sequence
  Description of Artificial Sequence: Synthetic oligonucleotide
  Target: SCNA; (-) strand; PAM type: YTN; PAM sequence: CTT
atatccaaagatgatattta

SEQ ID NO: 59844 - DNA, 20 bp, Artificial Sequence
  Description of Artificial Sequence: Synthetic oligonucleotide
  Target: SCNA; (-) strand; PAM type: YTN; PAM sequence: TTG
tgcttatatccaaagatgat

SEQ ID NO: 59845 - DNA, 20 bp, Artificial Sequence
  Description of Artificial Sequence: Synthetic oligonucleotide
  Target: SCNA; (-) strand; PAM type: YTN; PAM sequence: CTC
cattgtgcttatatccaaag

SEQ ID NO: 59846 - DNA, 20 bp, Artificial Sequence
  Description of Artificial Sequence: Synthetic oligonucleotide
  Target: SCNA; (-) strand; PAM type: YTN; PAM sequence: CTC
caaaaccaaggagggagtgg

SEQ ID NO: 59847 - DNA, 20 bp, Artificial Sequence
  Description of Artificial Sequence: Synthetic oligonucleotide
  Target: SCNA; (-) strand; PAM type: YTN; PAM sequence: TTG
taggctccaaaaccaaggag

SEQ ID NO: 59848 - DNA, 20 bp, Artificial Sequence
  Description of Artificial Sequence: Synthetic oligonucleotide
  Target: SCNA; (-) strand; PAM type: YTN; PAM sequence: TTT
gtaggctccaaaaccaagga

SEQ ID NO: 59849 - DNA, 20 bp, Artificial Sequence
  Description of Artificial Sequence: Synthetic oligonucleotide
  Target: SCNA; (-) strand; PAM type: YTN; PAM sequence: TTT
tgtaggctccaaaaccaagg

SEQ ID NO: 59850 - DNA, 20 bp, Artificial Sequence
  Description of Artificial Sequence: Synthetic oligonucleotide
  Target: SCNA; (-) strand; PAM type: YTN; PAM sequence: TTT
ttgtaggctccaaaaccaag

SEQ ID NO: 59851 - DNA, 20 bp, Artificial Sequence
  Description of Artificial Sequence: Synthetic oligonucleotide
  Target: SCNA; (-) strand; PAM type: YTN; PAM sequence: TTG
tttttgtaggctccaaaacc

SEQ ID NO: 59852 - DNA, 20 bp, Artificial Sequence
  Description of Artificial Sequence: Synthetic oligonucleotide
  Target: SCNA; (-) strand; PAM type: YTN; PAM sequence: TTT
gtttttgtaggctccaaaac

SEQ ID NO: 59853 - DNA, 20 bp, Artificial Sequence
  Description of Artificial Sequence: Synthetic oligonucleotide
  Target: SCNA; (-) strand; PAM type: YTN; PAM sequence: TTG
aatttgtttttgtaggctcc

SEQ ID NO: 59854 - DNA, 20 bp, Artificial Sequence
  Description of Artificial Sequence: Synthetic oligonucleotide
  Target: SCNA; (-) strand; PAM type: YTN; PAM sequence: CTT
gaatttgtttttgtaggctc

SEQ ID NO: 59855 - DNA, 20 bp, Artificial Sequence
  Description of Artificial Sequence: Synthetic oligonucleotide
  Target: SCNA; (-) strand; PAM type: YTN; PAM sequence: TTA
tgtcttgaatttgtttttgt

SEQ ID NO: 59856 - DNA, 20 bp, Artificial Sequence
  Description of Artificial Sequence: Synthetic oligonucleotide
  Target: SCNA; (-) strand; PAM type: YTN; PAM sequence: CTT
atgtcttgaatttgtttttg

SEQ ID NO: 59857 - DNA, 20 bp, Artificial Sequence
  Description of Artificial Sequence: Synthetic oligonucleotide
  Target: SCNA; (-) strand; PAM type: YTN; PAM sequence: TTG
agacttatgtcttgaatttg

SEQ ID NO: 59858 - DNA, 20 bp, Artificial Sequence
  Description of Artificial Sequence: Synthetic oligonucleotide
  Target: SCNA; (-) strand; PAM type: YTN; PAM sequence: CTT
gagacttatgtcttgaattt

SEQ ID NO: 59859 - DNA, 20 bp, Artificial Sequence
  Description of Artificial Sequence: Synthetic oligonucleotide
  Target: SCNA; (-) strand; PAM type: YTN; PAM sequence: CTA
gcttgagacttatgtcttga

SEQ ID NO: 59860 - DNA, 20 bp, Artificial Sequence
  Description of Artificial Sequence: Synthetic oligonucleotide
  Target: SCNA; (-) strand; PAM type: YTN; PAM sequence: TTA
aggctagcttgagacttatg

SEQ ID NO: 59861 - DNA, 20 bp, Artificial Sequence
  Description of Artificial Sequence: Synthetic oligonucleotide
  Target: SCNA; (-) strand; PAM type: YTN; PAM sequence: TTT
aaggctagcttgagacttat

SEQ ID NO: 59862 - DNA, 20 bp, Artificial Sequence
  Description of Artificial Sequence: Synthetic oligonucleotide
  Target: SCNA; (-) strand; PAM type: YTN; PAM sequence: CTA
atcagcaatttaaggctagc

SEQ ID NO: 59863 - DNA, 20 bp, Artificial Sequence
  Description of Artificial Sequence: Synthetic oligonucleotide
  Target: SCNA; (-) strand; PAM type: YTN; PAM sequence: CTA
gctaatcagcaatttaaggc

SEQ ID NO: 59864 - DNA, 20 bp, Artificial Sequence
  Description of Artificial Sequence: Synthetic oligonucleotide
  Target: SCNA; (-) strand; PAM type: YTN; PAM sequence: TTG
aaaactagctaatcagcaat

SEQ ID NO: 59865 - DNA, 20 bp, Artificial Sequence
  Description of Artificial Sequence: Synthetic oligonucleotide
  Target: SCNA; (-) strand; PAM type: YTN; PAM sequence: TTG
tattgaaaactagctaatca

SEQ ID NO: 59866 - DNA, 20 bp, Artificial Sequence
  Description of Artificial Sequence: Synthetic oligonucleotide
  Target: SCNA; (-) strand; PAM type: YTN; PAM sequence: TTA
gttgtattgaaaactagcta

SEQ ID NO: 59867 - DNA, 20 bp, Artificial Sequence
  Description of Artificial Sequence: Synthetic oligonucleotide
  Target: SCNA; (-) strand; PAM type: YTN; PAM sequence: TTA
aattagttgtattgaaaact

SEQ ID NO: 59868 - DNA, 20 bp, Artificial Sequence
  Description of Artificial Sequence: Synthetic oligonucleotide
  Target: SCNA; (-) strand; PAM type: YTN; PAM sequence: TTT
aaattagttgtattgaaaac

SEQ ID NO: 59869 - DNA, 20 bp, Artificial Sequence
  Description of Artificial Sequence: Synthetic oligonucleotide
  Target: SCNA; (-) strand; PAM type: YTN; PAM sequence: TTT
taaattagttgtattgaaaa

SEQ ID NO: 59870 - DNA, 20 bp, Artificial Sequence
  Description of Artificial Sequence: Synthetic oligonucleotide
  Target: SCNA; (-) strand; PAM type: YTN; PAM sequence: TTT
ttaaattagttgtattgaaa

SEQ ID NO: 59871 - DNA, 20 bp, Artificial Sequence
  Description of Artificial Sequence: Synthetic oligonucleotide
  Target: SCNA; (-) strand; PAM type: YTN; PAM sequence: TTG
agatttttaaattagttgta

SEQ ID NO: 59872 - DNA, 20 bp, Artificial Sequence
  Description of Artificial Sequence: Synthetic oligonucleotide
  Target: SCNA; (-) strand; PAM type: YTN; PAM sequence: CTG
aagattgagatttttaaatt

SEQ ID NO: 59873 - DNA, 20 bp, Artificial Sequence
  Description of Artificial Sequence: Synthetic oligonucleotide
  Target: SCNA; (-) strand; PAM type: YTN; PAM sequence: TTC
tgaagattgagatttttaaa

SEQ ID NO: 59874 - DNA, 20 bp, Artificial Sequence
  Description of Artificial Sequence: Synthetic oligonucleotide
  Target: SCNA; (-) strand; PAM type: YTN; PAM sequence: CTT
ctgaagattgagatttttaa

SEQ ID NO: 59875 - DNA, 20 bp, Artificial Sequence
  Description of Artificial Sequence: Synthetic oligonucleotide
  Target: SCNA; (-) strand; PAM type: YTN; PAM sequence: CTG
aagatataataatatatata

SEQ ID NO: 59876 - DNA, 20 bp, Artificial Sequence
  Description of Artificial Sequence: Synthetic oligonucleotide
  Target: SCNA; (-) strand; PAM type: YTN; PAM sequence: TTC
cctgaagatataataatata

SEQ ID NO: 59877 - DNA, 20 bp, Artificial Sequence
  Description of Artificial Sequence: Synthetic oligonucleotide
  Target: SCNA; (-) strand; PAM type: YTN; PAM sequence: TTT
ccctgaagatataataatat

SEQ ID NO: 59878 - DNA, 20 bp, Artificial Sequence
  Description of Artificial Sequence: Synthetic oligonucleotide
  Target: SCNA; (-) strand; PAM type: YTN; PAM sequence: CTT
tccctgaagatataataata

SEQ ID NO: 59879 - DNA, 20 bp, Artificial Sequence
  Description of Artificial Sequence: Synthetic oligonucleotide
  Target: SCNA; (-) strand; PAM type: YTN; PAM sequence: TTC
tttccctgaagatataataa

SEQ ID NO: 59880 - DNA, 20 bp, Artificial Sequence
  Description of Artificial Sequence: Synthetic oligonucleotide
  Target: SCNA; (-) strand; PAM type: YTN; PAM sequence: TTT
ctttccctgaagatataata

SEQ ID NO: 59881 - DNA, 20 bp, Artificial Sequence
  Description of Artificial Sequence: Synthetic oligonucleotide
  Target: SCNA; (-) strand; PAM type: YTN; PAM sequence: TTT
tctttccctgaagatataat

SEQ ID NO: 59882 - DNA, 20 bp, Artificial Sequence
  Description of Artificial Sequence: Synthetic oligonucleotide
  Target: SCNA; (-) strand; PAM type: YTN; PAM sequence: TTT
ttctttccctgaagatataa

SEQ ID NO: 59883 - DNA, 20 bp, Artificial Sequence
  Description of Artificial Sequence: Synthetic oligonucleotide
  Target: SCNA; (-) strand; PAM type: YTN; PAM sequence: TTT
tttctttccctgaagatata

SEQ ID NO: 59884 - DNA, 20 bp, Artificial Sequence
  Description of Artificial Sequence: Synthetic oligonucleotide
  Target: SCNA; (-) strand; PAM type: YTN; PAM sequence: TTT
ttttctttccctgaagatat

SEQ ID NO: 59885 - DNA, 20 bp, Artificial Sequence
  Description of Artificial Sequence: Synthetic oligonucleotide
  Target: SCNA; (-) strand; PAM type: YTN; PAM sequence: TTA
ggatatatatatatattttt

SEQ ID NO: 59886 - DNA, 20 bp, Artificial Sequence
  Description of Artificial Sequence: Synthetic oligonucleotide
  Target: SCNA; (-) strand; PAM type: YTN; PAM sequence: TTT
aggatatatatatatatttt

SEQ ID NO: 59887 - DNA, 20 bp, Artificial Sequence
  Description of Artificial Sequence: Synthetic oligonucleotide
  Target: SCNA; (-) strand; PAM type: YTN; PAM sequence: TTT
taggatatatatatatattt

SEQ ID NO: 59888 - DNA, 20 bp, Artificial Sequence
  Description of Artificial Sequence: Synthetic oligonucleotide
  Target: SCNA; (-) strand; PAM type: YTN; PAM sequence: CTA
gttttaggatatatatatat

SEQ ID NO: 59889 - DNA, 20 bp, Artificial Sequence
  Description of Artificial Sequence: Synthetic oligonucleotide
  Target: SCNA; (-) strand; PAM type: YTN; PAM sequence: TTC
tagttttaggatatatatat

SEQ ID NO: 59890 - DNA, 20 bp, Artificial Sequence
  Description of Artificial Sequence: Synthetic oligonucleotide
  Target: SCNA; (-) strand; PAM type: YTN; PAM sequence: CTT
ctagttttaggatatatata

SEQ ID NO: 59891 - DNA, 20 bp, Artificial Sequence
  Description of Artificial Sequence: Synthetic oligonucleotide
  Target: SCNA; (-) strand; PAM type: YTN; PAM sequence: TTC
ttctagttttaggatatata

SEQ ID NO: 59892 - DNA, 20 bp, Artificial Sequence
  Description of Artificial Sequence: Synthetic oligonucleotide
  Target: SCNA; (-) strand; PAM type: YTN; PAM sequence: CTT
cttctagttttaggatatat

SEQ ID NO: 59893 - DNA, 20 bp, Artificial Sequence
  Description of Artificial Sequence: Synthetic oligonucleotide
  Target: SCNA; (-) strand; PAM type: YTN; PAM sequence: TTC
cttcttctagttttaggata

SEQ ID NO: 59894 - DNA, 20 bp, Artificial Sequence
  Description of Artificial Sequence: Synthetic oligonucleotide
  Target: SCNA; (-) strand; PAM type: YTN; PAM sequence: CTG
gagttccttcttctagtttt

SEQ ID NO: 59895 - DNA, 20 bp, Artificial Sequence
  Description of Artificial Sequence: Synthetic oligonucleotide
  Target: SCNA; (-) strand; PAM type: YTN; PAM sequence: TTA
ctggagttccttcttctagt

SEQ ID NO: 59896 - DNA, 20 bp, Artificial Sequence
  Description of Artificial Sequence: Synthetic oligonucleotide
  Target: SCNA; (-) strand; PAM type: YTN; PAM sequence: TTG
tggtggttactggagttcct

SEQ ID NO: 59897 - DNA, 20 bp, Artificial Sequence
  Description of Artificial Sequence: Synthetic oligonucleotide
  Target: SCNA; (-) strand; PAM type: YTN; PAM sequence: TTA
ttgtggtggttactggagtt

SEQ ID NO: 59898 - DNA, 20 bp, Artificial Sequence
  Description of Artificial Sequence: Synthetic oligonucleotide
  Target: SCNA; (-) strand; PAM type: YTN; PAM sequence: TTT
attgtggtggttactggagt

SEQ ID NO: 59899 - DNA, 20 bp, Artificial Sequence
  Description of Artificial Sequence: Synthetic oligonucleotide
  Target: SCNA; (-) strand; PAM type: YTN; PAM sequence: CTA
tttattgtggtggttactgg

SEQ ID NO: 59900 - DNA, 20 bp, Artificial Sequence
  Description of Artificial Sequence: Synthetic oligonucleotide
  Target: SCNA; (-) strand; PAM type: YTN; PAM sequence: TTC
tatttattgtggtggttact

SEQ ID NO: 59901 - DNA, 20 bp, Artificial Sequence
  Description of Artificial Sequence: Synthetic oligonucleotide
  Target: SCNA; (-) strand; PAM type: YTN; PAM sequence: CTT
ctatttattgtggtggttac

SEQ ID NO: 59902 - DNA, 20 bp, Artificial Sequence
  Description of Artificial Sequence: Synthetic oligonucleotide
  Target: SCNA; (-) strand; PAM type: YTN; PAM sequence: TTC
ttctatttattgtggtggtt

SEQ ID NO: 59903 - DNA, 20 bp, Artificial Sequence
  Description of Artificial Sequence: Synthetic oligonucleotide
  Target: SCNA; (-) strand; PAM type: YTN; PAM sequence: TTT
cttctatttattgtggtggt

SEQ ID NO: 59904 - DNA, 20 bp, Artificial Sequence
  Description of Artificial Sequence: Synthetic oligonucleotide
  Target: SCNA; (-) strand; PAM type: YTN; PAM sequence: CTT
tcttctatttattgtggtgg

SEQ ID NO: 59905 - DNA, 20 bp, Artificial Sequence
  Description of Artificial Sequence: Synthetic oligonucleotide
  Target: SCNA; (-) strand; PAM type: YTN; PAM sequence: CTG
ggctttcttctatttattgt

SEQ ID NO: 59906 - DNA, 20 bp, Artificial Sequence
  Description of Artificial Sequence: Synthetic oligonucleotide
  Target: SCNA; (-) strand; PAM type: YTN; PAM sequence: TTA
gctgggctttcttctattta

SEQ ID NO: 59907 - DNA, 20 bp, Artificial Sequence
  Description of Artificial Sequence: Synthetic oligonucleotide
  Target: SCNA; (-) strand; PAM type: YTN; PAM sequence: CTG
ttagctgggctttcttctat

SEQ ID NO: 59908 - DNA, 20 bp, Artificial Sequence
  Description of Artificial Sequence: Synthetic oligonucleotide
  Target: SCNA; (-) strand; PAM type: YTN; PAM sequence: CTC
ctgttagctgggctttcttc

SEQ ID NO: 59909 - DNA, 20 bp, Artificial Sequence
  Description of Artificial Sequence: Synthetic oligonucleotide
  Target: SCNA; (-) strand; PAM type: YTN; PAM sequence: TTG
gagaggacctcctgttagct

SEQ ID NO: 59910 - DNA, 20 bp, Artificial Sequence
  Description of Artificial Sequence: Synthetic oligonucleotide
  Target: SCNA; (-) strand; PAM type: YTN; PAM sequence: CTA
aaatcgtaattggagaggac

SEQ ID NO: 59911 - DNA, 20 bp, Artificial Sequence
  Description of Artificial Sequence: Synthetic oligonucleotide
  Target: SCNA; (-) strand; PAM type: YTN; PAM sequence: TTG
tgctaaaatcgtaattggag

SEQ ID NO: 59912 - DNA, 20 bp, Artificial Sequence
  Description of Artificial Sequence: Synthetic oligonucleotide
  Target: SCNA; (-) strand; PAM type: YTN; PAM sequence: TTT
gtgctaaaatcgtaattgga

SEQ ID NO: 59913 - DNA, 20 bp, Artificial Sequence
  Description of Artificial Sequence: Synthetic oligonucleotide
  Target: SCNA; (-) strand; PAM type: YTN; PAM sequence: TTT
tgtgctaaaatcgtaattgg

SEQ ID NO: 59914 - DNA, 20 bp, Artificial Sequence
  Description of Artificial Sequence: Synthetic oligonucleotide
  Target: SCNA; (-) strand; PAM type: YTN; PAM sequence: TTA
ttttgtgctaaaatcgtaat

SEQ ID NO: 59915 - DNA, 20 bp, Artificial Sequence
  Description of Artificial Sequence: Synthetic oligonucleotide
  Target: SCNA; (-) strand; PAM type: YTN; PAM sequence: TTG
acatgtgatgtgggaacaaa

SEQ ID NO: 59916 - DNA, 20 bp, Artificial Sequence
  Description of Artificial Sequence: Synthetic oligonucleotide
  Target: SCNA; (-) strand; PAM type: YTN; PAM sequence: CTG
taagttgacatgtgatgtgg

SEQ ID NO: 59917 - DNA, 20 bp, Artificial Sequence
  Description of Artificial Sequence: Synthetic oligonucleotide
  Target: SCNA; (-) strand; PAM type: YTN; PAM sequence: CTC
tgtaagttgacatgtgatgt

SEQ ID NO: 59918 - DNA, 20 bp, Artificial Sequence
  Description of Artificial Sequence: Synthetic oligonucleotide
  Target: SCNA; (-) strand; PAM type: YTN; PAM sequence: CTC
ctctgtaagttgacatgtga

SEQ ID NO: 59919 - DNA, 20 bp, Artificial Sequence
  Description of Artificial Sequence: Synthetic oligonucleotide
  Target: SCNA; (-) strand; PAM type: YTN; PAM sequence: TTC
tcctctgtaagttgacatgt

SEQ ID NO: 59920 - DNA, 20 bp, Artificial Sequence
  Description of Artificial Sequence: Synthetic oligonucleotide
  Target: SCNA; (-) strand; PAM type: YTN; PAM sequence: TTT
ctcctctgtaagttgacatg

SEQ ID NO: 59921 - DNA, 20 bp, Artificial Sequence
  Description of Artificial Sequence: Synthetic oligonucleotide
  Target: SCNA; (-) strand; PAM type: YTN; PAM sequence: TTT
tctcctctgtaagttgacat

SEQ ID NO: 59922 - DNA, 20 bp, Artificial Sequence
  Description of Artificial Sequence: Synthetic oligonucleotide
  Target: SCNA; (-) strand; PAM type: YTN; PAM sequence: TTT
ttctcctctgtaagttgaca

SEQ ID NO: 59923 - DNA, 20 bp, Artificial Sequence
  Description of Artificial Sequence: Synthetic oligonucleotide
  Target: SCNA; (-) strand; PAM type: YTN; PAM sequence: TTT
tttctcctctgtaagttgac

SEQ ID NO: 59924 - DNA, 20 bp, Artificial Sequence
  Description of Artificial Sequence: Synthetic oligonucleotide
  Target: SCNA; (-) strand; PAM type: YTN; PAM sequence: CTT
ttttctcctctgtaagttga

SEQ ID NO: 59925 - DNA, 20 bp, Artificial Sequence
  Description of Artificial Sequence: Synthetic oligonucleotide
  Target: SCNA; (-) strand; PAM type: YTN; PAM sequence: TTC
ttttttctcctctgtaagtt

SEQ ID NO: 59926 - DNA, 20 bp, Artificial Sequence
  Description of Artificial Sequence: Synthetic oligonucleotide
  Target: SCNA; (-) strand; PAM type: YTN; PAM sequence: CTC
attcttttttctcctctgta

SEQ ID NO: 59927 - DNA, 20 bp, Artificial Sequence
  Description of Artificial Sequence: Synthetic oligonucleotide
  Target: SCNA; (-) strand; PAM type: YTN; PAM sequence: TTA
tctcattcttttttctcctc

SEQ ID NO: 59928 - DNA, 20 bp, Artificial Sequence
  Description of Artificial Sequence: Synthetic oligonucleotide
  Target: SCNA; (-) strand; PAM type: YTN; PAM sequence: CTG
ggccccggtgttatctcatt

SEQ ID NO: 59929 - DNA, 20 bp, Artificial Sequence
  Description of Artificial Sequence: Synthetic oligonucleotide
  Target: SCNA; (-) strand; PAM type: YTN; PAM sequence: CTC
actgggccccggtgttatct

SEQ ID NO: 59930 - DNA, 20 bp, Artificial Sequence
  Description of Artificial Sequence: Synthetic oligonucleotide
  Target: SCNA; (-) strand; PAM type: YTN; PAM sequence: TTC
tcactgggccccggtgttat

SEQ ID NO: 59931 - DNA, 20 bp, Artificial Sequence
  Description of Artificial Sequence: Synthetic oligonucleotide
  Target: SCNA; (-) strand; PAM type: YTN; PAM sequence: CTT
ctcactgggccccggtgtta

SEQ ID NO: 59932 - DNA, 20 bp, Artificial Sequence
  Description of Artificial Sequence: Synthetic oligonucleotide
  Target: SCNA; (-) strand; PAM type: YTN; PAM sequence: TTA
tcttctcactgggccccggt

SEQ ID NO: 59933 - DNA, 20 bp, Artificial Sequence
  Description of Artificial Sequence: Synthetic oligonucleotide
  Target: SCNA; (-) strand; PAM type: YTN; PAM sequence: TTC
aaaattatcttctcactggg

SEQ ID NO: 59934 - DNA, 20 bp, Artificial Sequence
  Description of Artificial Sequence: Synthetic oligonucleotide
  Target: SCNA; (-) strand; PAM type: YTN; PAM sequence: CTG
aattcaaaattatcttctca

SEQ ID NO: 59935 - DNA, 20 bp, Artificial Sequence
  Description of Artificial Sequence: Synthetic oligonucleotide
  Target: SCNA; (-) strand; PAM type: YTN; PAM sequence: TTC
tgaattcaaaattatcttct

SEQ ID NO: 59936 - DNA, 20 bp, Artificial Sequence
  Description of Artificial Sequence: Synthetic oligonucleotide
  Target: SCNA; (-) strand; PAM type: YTN; PAM sequence: CTA
cagttctgaattcaaaatta

SEQ ID NO: 59937 - DNA, 20 bp, Artificial Sequence
  Description of Artificial Sequence: Synthetic oligonucleotide
  Target: SCNA; (-) strand; PAM type: YTN; PAM sequence: TTC
tacagttctgaattcaaaat

SEQ ID NO: 59938 - DNA, 20 bp, Artificial Sequence
  Description of Artificial Sequence: Synthetic oligonucleotide
  Target: SCNA; (-) strand; PAM type: YTN; PAM sequence: CTT
ctacagttctgaattcaaaa

SEQ ID NO: 59939 - DNA, 20 bp, Artificial Sequence
  Description of Artificial Sequence: Synthetic oligonucleotide
  Target: SCNA; (-) strand; PAM type: YTN; PAM sequence: TTA
aagcttctacagttctgaat

SEQ ID NO: 59940 - DNA, 20 bp, Artificial Sequence
  Description of Artificial Sequence: Synthetic oligonucleotide
  Target: SCNA; (-) strand; PAM type: YTN; PAM sequence: TTT
aaagcttctacagttctgaa

SEQ ID NO: 59941 - DNA, 20 bp, Artificial Sequence
  Description of Artificial Sequence: Synthetic oligonucleotide
  Target: SCNA; (-) strand; PAM type: YTN; PAM sequence: TTT
taaagcttctacagttctga

SEQ ID NO: 59942 - DNA, 20 bp, Artificial Sequence
  Description of Artificial Sequence: Synthetic oligonucleotide
  Target: SCNA; (-) strand; PAM type: YTN; PAM sequence: CTT
ttaaagcttctacagttctg

SEQ ID NO: 59943 - DNA, 20 bp, Artificial Sequence
  Description of Artificial Sequence: Synthetic oligonucleotide
  Target: SCNA; (-) strand; PAM type: YTN; PAM sequence: CTG
tacttttaaagcttctacag

SEQ ID NO: 59944 - DNA, 20 bp, Artificial Sequence
  Description of Artificial Sequence: Synthetic oligonucleotide
  Target: SCNA; (-) strand; PAM type: YTN; PAM sequence: CTA
gtgctgtacttttaaagctt

SEQ ID NO: 59945 - DNA, 20 bp, Artificial Sequence
  Description of Artificial Sequence: Synthetic oligonucleotide
  Target: SCNA; (-) strand; PAM type: YTN; PAM sequence: CTC
tagtgctgtacttttaaagc

SEQ ID NO: 59946 - DNA, 20 bp, Artificial Sequence
  Description of Artificial Sequence: Synthetic oligonucleotide
  Target: SCNA; (-) strand; PAM type: YTN; PAM sequence: CTG
tctctagtgctgtactttta

SEQ ID NO: 59947 - DNA, 20 bp, Artificial Sequence
  Description of Artificial Sequence: Synthetic oligonucleotide
  Target: SCNA; (-) strand; PAM type: YTN; PAM sequence: CTG
atctgtctctagtgctgtac

SEQ ID NO: 59948 - DNA, 20 bp, Artificial Sequence
  Description of Artificial Sequence: Synthetic oligonucleotide
  Target: SCNA; (-) strand; PAM type: YTN; PAM sequence: TTG
actgatctgtctctagtgct

SEQ ID NO: 59949 - DNA, 20 bp, Artificial Sequence
  Description of Artificial Sequence: Synthetic oligonucleotide
  Target: SCNA; (-) strand; PAM type: YTN; PAM sequence: TTC
atgggttgactgatctgtct

SEQ ID NO: 59950 - DNA, 20 bp, Artificial Sequence
  Description of Artificial Sequence: Synthetic oligonucleotide
  Target: SCNA; (-) strand; PAM type: YTN; PAM sequence: TTT
catgggttgactgatctgtc

SEQ ID NO: 59951 - DNA, 20 bp, Artificial Sequence
  Description of Artificial Sequence: Synthetic oligonucleotide
  Target: SCNA; (-) strand; PAM type: YTN; PAM sequence: TTG
tttcatgggttgactgatct

SEQ ID NO: 59952 - DNA, 20 bp, Artificial Sequence
  Description of Artificial Sequence: Synthetic oligonucleotide
  Target: SCNA; (-) strand; PAM type: YTN; PAM sequence: TTT
gtttcatgggttgactgatc

SEQ ID NO: 59953 - DNA, 20 bp, Artificial Sequence
  Description of Artificial Sequence: Synthetic oligonucleotide
  Target: SCNA; (-) strand; PAM type: YTN; PAM sequence: TTT
tgtttcatgggttgactgat

SEQ ID NO: 59954 - DNA, 20 bp, Artificial Sequence
  Description of Artificial Sequence: Synthetic oligonucleotide
  Target: SCNA; (-) strand; PAM type: YTN; PAM sequence: CTT
ttgtttcatgggttgactga

SEQ ID NO: 59955 - DNA, 20 bp, Artificial Sequence
  Description of Artificial Sequence: Synthetic oligonucleotide
  Target: SCNA; (-) strand; PAM type: YTN; PAM sequence: TTC
ccttttgtttcatgggttga

SEQ ID NO: 59956 - DNA, 20 bp, Artificial Sequence
  Description of Artificial Sequence: Synthetic oligonucleotide
  Target: SCNA; (-) strand; PAM type: YTN; PAM sequence: CTT
cccttttgtttcatgggttg

SEQ ID NO: 59957 - DNA, 20 bp, Artificial Sequence
  Description of Artificial Sequence: Synthetic oligonucleotide
  Target: SCNA; (-) strand; PAM type: YTN; PAM sequence: TTC
ttcccttttgtttcatgggt

SEQ ID NO: 59958 - DNA, 20 bp, Artificial Sequence
  Description of Artificial Sequence: Synthetic oligonucleotide
  Target: SCNA; (-) strand; PAM type: YTN; PAM sequence: CTT
cttcccttttgtttcatggg

SEQ ID NO: 59959 - DNA, 20 bp, Artificial Sequence
  Description of Artificial Sequence: Synthetic oligonucleotide
  Target: SCNA; (-) strand; PAM type: YTN; PAM sequence: CTC
catccttcttcccttttgtt

SEQ ID NO: 59960 - DNA, 20 bp, Artificial Sequence
  Description of Artificial Sequence: Synthetic oligonucleotide
  Target: SCNA; (-) strand; PAM type: YTN; PAM sequence: CTC
tccatccttcttcccttttg

SEQ ID NO: 59961 - DNA, 20 bp, Artificial Sequence
  Description of Artificial Sequence: Synthetic oligonucleotide
  Target: SCNA; (-) strand; PAM type: YTN; PAM sequence: TTC
tctccatccttcttcccttt

SEQ ID NO: 59962 - DNA, 20 bp, Artificial Sequence
  Description of Artificial Sequence: Synthetic oligonucleotide
  Target: SCNA; (-) strand; PAM type: YTN; PAM sequence: CTT
ctctccatccttcttccctt

SEQ ID NO: 59963 - DNA, 20 bp, Artificial Sequence
  Description of Artificial Sequence: Synthetic oligonucleotide
  Target: SCNA; (-) strand; PAM type: YTN; PAM sequence: TTA
aagccttctctccatccttc

SEQ ID NO: 59964 - DNA, 20 bp, Artificial Sequence
  Description of Artificial Sequence: Synthetic oligonucleotide
  Target: SCNA; (-) strand; PAM type: YTN; PAM sequence: TTC
agcacatgttaaagccttct

SEQ ID NO: 59965 - DNA, 20 bp, Artificial Sequence
  Description of Artificial Sequence: Synthetic oligonucleotide
  Target: SCNA; (-) strand; PAM type: YTN; PAM sequence: TTA
cataatgggtgttcagcaca

SEQ ID NO: 59966 - DNA, 20 bp, Artificial Sequence
  Description of Artificial Sequence: Synthetic oligonucleotide
  Target: SCNA; (-) strand; PAM type: YTN; PAM sequence: TTT
acataatgggtgttcagcac

SEQ ID NO: 59967 - DNA, 20 bp, Artificial Sequence
  Description of Artificial Sequence: Synthetic oligonucleotide
  Target: SCNA; (-) strand; PAM type: YTN; PAM sequence: TTT
tacataatgggtgttcagca

SEQ ID NO: 59968 - DNA, 20 bp, Artificial Sequence
  Description of Artificial Sequence: Synthetic oligonucleotide
  Target: SCNA; (-) strand; PAM type: YTN; PAM sequence: TTT
ttacataatgggtgttcagc

SEQ ID NO: 59969 - DNA, 20 bp, Artificial Sequence
  Description of Artificial Sequence: Synthetic oligonucleotide
  Target: SCNA; (-) strand; PAM type: YTN; PAM sequence: TTT
tttacataatgggtgttcag

SEQ ID NO: 59970 - DNA, 20 bp, Artificial Sequence
  Description of Artificial Sequence: Synthetic oligonucleotide
  Target: SCNA; (-) strand; PAM type: YTN; PAM sequence: TTT
ttttacataatgggtgttca

SEQ ID NO: 59971 - DNA, 20 bp, Artificial Sequence
  Description of Artificial Sequence: Synthetic oligonucleotide
  Target: SCNA; (-) strand; PAM type: YTN; PAM sequence: TTT
tttttacataatgggtgttc

SEQ ID NO: 59972 - DNA, 20 bp, Artificial Sequence
  Description of Artificial Sequence: Synthetic oligonucleotide
  Target: SCNA; (-) strand; PAM type: YTN; PAM sequence: CTA
aaatgttttttttacataat

SEQ ID NO: 59973 - DNA, 20 bp, Artificial Sequence
  Description of Artificial Sequence: Synthetic oligonucleotide
  Target: SCNA; (-) strand; PAM type: YTN; PAM sequence: CTG
cgcccagcctaaaatgtttt

SEQ ID NO: 59974 - DNA, 20 bp, Artificial Sequence
  Description of Artificial Sequence: Synthetic oligonucleotide
  Target: SCNA; (-) strand; PAM type: YTN; PAM sequence: TTA
caggcatgagccactgcgcc

SEQ ID NO: 59975 - DNA, 20 bp, Artificial Sequence
  Description of Artificial Sequence: Synthetic oligonucleotide
  Target: SCNA; (-) strand; PAM type: YTN; PAM sequence: CTG
ggattacaggcatgagccac

SEQ ID NO: 59976 - DNA, 20 bp, Artificial Sequence
  Description of Artificial Sequence: Synthetic oligonucleotide
  Target: SCNA; (-) strand; PAM type: YTN; PAM sequence: TTG
ctgggattacaggcatgagc

SEQ ID NO: 59977 - DNA, 20 bp, Artificial Sequence
  Description of Artificial Sequence: Synthetic oligonucleotide
  Target: SCNA; (-) strand; PAM type: YTN; PAM sequence: CTC
ccaaattgctgggattacag

SEQ ID NO: 59978 - DNA, 20 bp, Artificial Sequence
  Description of Artificial Sequence: Synthetic oligonucleotide
  Target: SCNA; (-) strand; PAM type: YTN; PAM sequence: CTC
ggcctcccaaattgctggga

SEQ ID NO: 59979 - DNA, 20 bp, Artificial Sequence
  Description of Artificial Sequence: Synthetic oligonucleotide
  Target: SCNA; (-) strand; PAM type: YTN; PAM sequence: CTG
cccacctcggcctcccaaat

SEQ ID NO: 59980 - DNA, 20 bp, Artificial Sequence
  Description of Artificial Sequence: Synthetic oligonucleotide
  Target: SCNA; (-) strand; PAM type: YTN; PAM sequence: CTC
gtgatctgcccacctcggcc

SEQ ID NO: 59981 - DNA, 20 bp, Artificial Sequence
  Description of Artificial Sequence: Synthetic oligonucleotide
  Target: SCNA; (-) strand; PAM type: YTN; PAM sequence: CTG
acctcgtgatctgcccacct

SEQ ID NO: 59982 - DNA, 20 bp, Artificial Sequence
  Description of Artificial Sequence: Synthetic oligonucleotide
  Target: SCNA; (-) strand; PAM type: YTN; PAM sequence: CTC
ctgacctcgtgatctgccca

SEQ ID NO: 59983 - DNA, 20 bp, Artificial Sequence
  Description of Artificial Sequence: Synthetic oligonucleotide
  Target: SCNA; (-) strand; PAM type: YTN; PAM sequence: CTC
gatctcctgacctcgtgatc

SEQ ID NO: 59984 - DNA, 20 bp, Artificial Sequence
  Description of Artificial Sequence: Synthetic oligonucleotide
  Target: SCNA; (-) strand; PAM type: YTN; PAM sequence: TTA
gccaggatggtctcgatctc

SEQ ID NO: 59985 - DNA, 20 bp, Artificial Sequence
  Description of Artificial Sequence: Synthetic oligonucleotide
  Target: SCNA; (-) strand; PAM type: YTN; PAM sequence: TTC
accatattagccaggatggt

SEQ ID NO: 59986 - DNA, 20 bp, Artificial Sequence
  Description of Artificial Sequence: Synthetic oligonucleotide
  Target: SCNA; (-) strand; PAM type: YTN; PAM sequence: TTT
caccatattagccaggatgg

SEQ ID NO: 59987 - DNA, 20 bp, Artificial Sequence
  Description of Artificial Sequence: Synthetic oligonucleotide
  Target: SCNA; (-) strand; PAM type: YTN; PAM sequence: TTG
gtagagatggggtttcacca

SEQ ID NO: 59988 - DNA, 20 bp, Artificial Sequence
  Description of Artificial Sequence: Synthetic oligonucleotide
  Target: SCNA; (-) strand; PAM type: YTN; PAM sequence: TTT
ggtagagatggggtttcacc

SEQ ID NO: 59989 - DNA, 20 bp, Artificial Sequence
  Description of Artificial Sequence: Synthetic oligonucleotide
  Target: SCNA; (-) strand; PAM type: YTN; PAM sequence: TTT
tggtagagatggggtttcac

SEQ ID NO: 59990 - DNA, 20 bp, Artificial Sequence
  Description of Artificial Sequence: Synthetic oligonucleotide
  Target: SCNA; (-) strand; PAM type: YTN; PAM sequence: TTT
ttggtagagatggggtttca

SEQ ID NO: 59991 - DNA, 20 bp, Artificial Sequence
  Description of Artificial Sequence: Synthetic oligonucleotide
  Target: SCNA; (-) strand; PAM type: YTN; PAM sequence: TTG
tatttttggtagagatgggg

SEQ ID NO: 59992 - DNA, 20 bp, Artificial Sequence
  Description of Artificial Sequence: Synthetic oligonucleotide
  Target: SCNA; (-) strand; PAM type: YTN; PAM sequence: TTT
gtatttttggtagagatggg

SEQ ID NO: 59993 - DNA, 20 bp, Artificial Sequence
  Description of Artificial Sequence: Synthetic oligonucleotide
  Target: SCNA; (-) strand; PAM type: YTN; PAM sequence: TTT
tgtatttttggtagagatgg

SEQ ID NO: 59994 - DNA, 20 bp, Artificial Sequence
  Description of Artificial Sequence: Synthetic oligonucleotide
  Target: SCNA; (-) strand; PAM type: YTN; PAM sequence: TTT
ttgtatttttggtagagatg

SEQ ID NO: 59995 - DNA, 20 bp, Artificial Sequence
  Description of Artificial Sequence: Synthetic oligonucleotide
  Target: SCNA; (-) strand; PAM type: YTN; PAM sequence: TTT
tttgtatttttggtagagat

SEQ ID NO: 59996 - DNA, 20 bp, Artificial Sequence
  Description of Artificial Sequence: Synthetic oligonucleotide
  Target: SCNA; (-) strand; PAM type: YTN; PAM sequence: CTA
attttttgtatttttggtag

SEQ ID NO: 59997 - DNA, 20 bp, Artificial Sequence
  Description of Artificial Sequence: Synthetic oligonucleotide
  Target: SCNA; (-) strand; PAM type: YTN; PAM sequence: CTG
gctaattttttgtatttttg

SEQ ID NO: 59998 - DNA, 20 bp, Artificial Sequence
  Description of Artificial Sequence: Synthetic oligonucleotide
  Target: SCNA; (-) strand; PAM type: YTN; PAM sequence: CTA
caggcacccgccaccacgcc

SEQ ID NO: 59999 - DNA, 20 bp, Artificial Sequence
  Description of Artificial Sequence: Synthetic oligonucleotide
  Target: SCNA; (-) strand; PAM type: YTN; PAM sequence: CTG
ggactacaggcacccgccac

SEQ ID NO: 60000 - DNA, 20 bp, Artificial Sequence
  Description of Artificial Sequence: Synthetic oligonucleotide
  Target: SCNA; (-) strand; PAM type: YTN; PAM sequence: CTC
ccaagtagctgggactacag

SEQ ID NO: 60001 - DNA, 20 bp, Artificial Sequence
  Description of Artificial Sequence: Synthetic oligonucleotide
  Target: SCNA; (-) strand; PAM type: YTN; PAM sequence: CTC
agcccctcccaagtagctgg

SEQ ID NO: 60002 - DNA, 20 bp, Artificial Sequence
  Description of Artificial Sequence: Synthetic oligonucleotide
  Target: SCNA; (-) strand; PAM type: YTN; PAM sequence: CTG
cctcagcccctcccaagtag

SEQ ID NO: 60003 - DNA, 20 bp, Artificial Sequence
  Description of Artificial Sequence: Synthetic oligonucleotide
  Target: SCNA; (-) strand; PAM type: YTN; PAM sequence: CTC
ctgcctcagcccctcccaag

SEQ ID NO: 60004 - DNA, 20 bp, Artificial Sequence
  Description of Artificial Sequence: Synthetic oligonucleotide
  Target: SCNA; (-) strand; PAM type: YTN; PAM sequence: TTC
tcctgcctcagcccctccca

SEQ ID NO: 60005 - DNA, 20 bp, Artificial Sequence
  Description of Artificial Sequence: Synthetic oligonucleotide
  Target: SCNA; (-) strand; PAM type: YTN; PAM sequence: TTC
atgccattctcctgcctcag

SEQ ID NO: 60006 - DNA, 20 bp, Artificial Sequence
  Description of Artificial Sequence: Synthetic oligonucleotide
  Target: SCNA; (-) strand; PAM type: YTN; PAM sequence: CTC
ccgagttcatgccattctcc

SEQ ID NO: 60007 - DNA, 20 bp, Artificial Sequence
  Description of Artificial Sequence: Synthetic oligonucleotide
  Target: SCNA; (-) strand; PAM type: YTN; PAM sequence: CTG
cctcccgagttcatgccatt

SEQ ID NO: 60008 - DNA, 20 bp, Artificial Sequence
  Description of Artificial Sequence: Synthetic oligonucleotide
  Target: SCNA; (-) strand; PAM type: YTN; PAM sequence: TTC
tgcctcccgagttcatgcca

SEQ ID NO: 60009 - DNA, 20 bp, Artificial Sequence
  Description of Artificial Sequence: Synthetic oligonucleotide
  Target: SCNA; (-) strand; PAM type: YTN; PAM sequence: CTG
caagttctgcctcccgagtt

SEQ ID NO: 60010 - DNA, 20 bp, Artificial Sequence
  Description of Artificial Sequence: Synthetic oligonucleotide
  Target: SCNA; (-) strand; PAM type: YTN; PAM sequence: CTC
actgcaagttctgcctcccg

SEQ ID NO: 60011 - DNA, 20 bp, Artificial Sequence
  Description of Artificial Sequence: Synthetic oligonucleotide
  Target: SCNA; (-) strand; PAM type: YTN; PAM sequence: TTG
gctcactgcaagttctgcct

SEQ ID NO: 60012 - DNA, 20 bp, Artificial Sequence
  Description of Artificial Sequence: Synthetic oligonucleotide
  Target: SCNA; (-) strand; PAM type: YTN; PAM sequence: CTT
ggctcactgcaagttctgcc

SEQ ID NO: 60013 - DNA, 20 bp, Artificial Sequence
  Description of Artificial Sequence: Synthetic oligonucleotide
  Target: SCNA; (-) strand; PAM type: YTN; PAM sequence: CTG
gagtgcagtggcacaatctt

SEQ ID NO: 60014 - DNA, 20 bp, Artificial Sequence
  Description of Artificial Sequence: Synthetic oligonucleotide
  Target: SCNA; (-) strand; PAM type: YTN; PAM sequence: TTA
cccaggctggagtgcagtgg

SEQ ID NO: 60015 - DNA, 20 bp, Artificial Sequence
  Description of Artificial Sequence: Synthetic oligonucleotide
  Target: SCNA; (-) strand; PAM type: YTN; PAM sequence: CTG
ttacccaggctggagtgcag

SEQ ID NO: 60016 - DNA, 20 bp, Artificial Sequence
  Description of Artificial Sequence: Synthetic oligonucleotide
  Target: SCNA; (-) strand; PAM type: YTN; PAM sequence: CTC
tgttacccaggctggagtgc

SEQ ID NO: 60017 - DNA, 20 bp, Artificial Sequence
  Description of Artificial Sequence: Synthetic oligonucleotide
  Target: SCNA; (-) strand; PAM type: YTN; PAM sequence: TTG
ctctgttacccaggctggag

SEQ ID NO: 60018 - DNA, 20 bp, Artificial Sequence
  Description of Artificial Sequence: Synthetic oligonucleotide
  Target: SCNA; (-) strand; PAM type: YTN; PAM sequence: CTT
gctctgttacccaggctgga

SEQ ID NO: 60019 - DNA, 20 bp, Artificial Sequence
  Description of Artificial Sequence: Synthetic oligonucleotide
  Target: SCNA; (-) strand; PAM type: YTN; PAM sequence: TTG
agacagagtcttgctctgtt

SEQ ID NO: 60020 - DNA, 20 bp, Artificial Sequence
  Description of Artificial Sequence: Synthetic oligonucleotide
  Target: SCNA; (-) strand; PAM type: YTN; PAM sequence: TTT
gagacagagtcttgctctgt

SEQ ID NO: 60021 - DNA, 20 bp, Artificial Sequence
  Description of Artificial Sequence: Synthetic oligonucleotide
  Target: SCNA; (-) strand; PAM type: YTN; PAM sequence: TTT
tgagacagagtcttgctctg

SEQ ID NO: 60022 - DNA, 20 bp, Artificial Sequence
  Description of Artificial Sequence: Synthetic oligonucleotide
  Target: SCNA; (-) strand; PAM type: YTN; PAM sequence: TTT
ttgagacagagtcttgctct

SEQ ID NO: 60023 - DNA, 20 bp, Artificial Sequence
  Description of Artificial Sequence: Synthetic oligonucleotide
  Target: SCNA; (-) strand; PAM type: YTN; PAM sequence: TTT
tttgagacagagtcttgctc

SEQ ID NO: 60024 - DNA, 20 bp, Artificial Sequence
  Description of Artificial Sequence: Synthetic oligonucleotide
  Target: SCNA; (-) strand; PAM type: YTN; PAM sequence: TTT
ttttgagacagagtcttgct

SEQ ID NO: 60025 - DNA, 20 bp, Artificial Sequence
  Description of Artificial Sequence: Synthetic oligonucleotide
  Target: SCNA; (-) strand; PAM type: YTN; PAM sequence: TTG
tttttttgagacagagtctt

SEQ ID NO: 60026 - DNA, 20 bp, Artificial Sequence
  Description of Artificial Sequence: Synthetic oligonucleotide
  Target: SCNA; (-) strand; PAM type: YTN; PAM sequence: TTT
gtttttttgagacagagtct

SEQ ID NO: 60027 - DNA, 20 bp, Artificial Sequence
  Description of Artificial Sequence: Synthetic oligonucleotide
  Target: SCNA; (-) strand; PAM type: YTN; PAM sequence: CTG
tttgtttttttgagacagag

SEQ ID NO: 60028 - DNA, 20 bp, Artificial Sequence
  Description of Artificial Sequence: Synthetic oligonucleotide
  Target: SCNA; (-) strand; PAM type: YTN; PAM sequence: TTG
tctgtttgtttttttgagac

SEQ ID NO: 60029 - DNA, 20 bp, Artificial Sequence
  Description of Artificial Sequence: Synthetic oligonucleotide
  Target: SCNA; (-) strand; PAM type: YTN; PAM sequence: TTT
gtctgtttgtttttttgaga

SEQ ID NO: 60030 - DNA, 20 bp, Artificial Sequence
  Description of Artificial Sequence: Synthetic oligonucleotide
  Target: SCNA; (-) strand; PAM type: YTN; PAM sequence: TTG
tttgtctgtttgtttttttg

SEQ ID NO: 60031 - DNA, 20 bp, Artificial Sequence
  Description of Artificial Sequence: Synthetic oligonucleotide
  Target: SCNA; (-) strand; PAM type: YTN; PAM sequence: TTT
gtttgtctgtttgttttttt

SEQ ID NO: 60032 - DNA, 20 bp, Artificial Sequence
  Description of Artificial Sequence: Synthetic oligonucleotide
  Target: SCNA; (-) strand; PAM type: YTN; PAM sequence: TTG
tttgtttgtctgtttgtttt

SEQ ID NO: 60033 - DNA, 20 bp, Artificial Sequence
  Description of Artificial Sequence: Synthetic oligonucleotide
  Target: SCNA; (-) strand; PAM type: YTN; PAM sequence: TTT
gtttgtttgtctgtttgttt

SEQ ID NO: 60034 - DNA, 20 bp, Artificial Sequence
  Description of Artificial Sequence: Synthetic oligonucleotide
  Target: SCNA; (-) strand; PAM type: YTN; PAM sequence: TTG
tttgtttgtttgtctgtttg

SEQ ID NO: 60035 - DNA, 20 bp, Artificial Sequence
  Description of Artificial Sequence: Synthetic oligonucleotide
  Target: SCNA; (-) strand; PAM type: YTN; PAM sequence: TTT
gtttgtttgtttgtctgttt

SEQ ID NO: 60036 - DNA, 20 bp, Artificial Sequence
  Description of Artificial Sequence: Synthetic oligonucleotide
  Target: SCNA; (-) strand; PAM type: YTN; PAM sequence: TTG
tttgtttgtttgtttgtctg

SEQ ID NO: 60037 - DNA, 20 bp, Artificial Sequence
  Description of Artificial Sequence: Synthetic oligonucleotide
  Target: SCNA; (-) strand; PAM type: YTN; PAM sequence: TTT
gtttgtttgtttgtttgtct

SEQ ID NO: 60038 - DNA, 20 bp, Artificial Sequence
  Description of Artificial Sequence: Synthetic oligonucleotide
  Target: SCNA; (-) strand; PAM type: YTN; PAM sequence: TTT
tgtttgtttgtttgtttgtc

SEQ ID NO: 60039 - DNA, 20 bp, Artificial Sequence
  Description of Artificial Sequence: Synthetic oligonucleotide
  Target: SCNA; (-) strand; PAM type: YTN; PAM sequence: TTT
ttgtttgtttgtttgtttgt

SEQ ID NO: 60040 - DNA, 20 bp, Artificial Sequence
  Description of Artificial Sequence: Synthetic oligonucleotide
  Target: SCNA; (-) strand; PAM type: YTN; PAM sequence: TTT
tttgtttgtttgtttgtttg

SEQ ID NO: 60041 - DNA, 20 bp, Artificial Sequence
  Description of Artificial Sequence: Synthetic oligonucleotide
  Target: SCNA; (-) strand; PAM type: YTN; PAM sequence: TTA
aataagatgatatgtaaaat

SEQ ID NO: 60042 - DNA, 20 bp, Artificial Sequence
  Description of Artificial Sequence: Synthetic oligonucleotide
  Target: SCNA; (-) strand; PAM type: YTN; PAM sequence: TTA
tgaagattaaataagatgat

SEQ ID NO: 60043 - DNA, 20 bp, Artificial Sequence
  Description of Artificial Sequence: Synthetic oligonucleotide
  Target: SCNA; (-) strand; PAM type: YTN; PAM sequence: CTG
ttatgaagattaaataagat

SEQ ID NO: 60044 - DNA, 20 bp, Artificial Sequence
  Description of Artificial Sequence: Synthetic oligonucleotide
  Target: SCNA; (-) strand; PAM type: YTN; PAM sequence: TTA
aatggctgttatgaagatta

SEQ ID NO: 60045 - DNA, 20 bp, Artificial Sequence
  Description of Artificial Sequence: Synthetic oligonucleotide
  Target: SCNA; (-) strand; PAM type: YTN; PAM sequence: CTA
tattaaatggctgttatgaa

SEQ ID NO: 60046 - DNA, 20 bp, Artificial Sequence
  Description of Artificial Sequence: Synthetic oligonucleotide
  Target: SCNA; (-) strand; PAM type: YTN; PAM sequence: TTA
aaatgggcataatataacta

SEQ ID NO: 60047 - DNA, 20 bp, Artificial Sequence
  Description of Artificial Sequence: Synthetic oligonucleotide
  Target: SCNA; (-) strand; PAM type: YTN; PAM sequence: TTT
aaaatgggcataatataact

SEQ ID NO: 60048 - DNA, 20 bp, Artificial Sequence
  Description of Artificial Sequence: Synthetic oligonucleotide
  Target: SCNA; (-) strand; PAM type: YTN; PAM sequence: CTA
tttaaaatgggcataatata

SEQ ID NO: 60049 - DNA, 20 bp, Artificial Sequence
  Description of Artificial Sequence: Synthetic oligonucleotide
  Target: SCNA; (-) strand; PAM type: YTN; PAM sequence: TTC
atcagctatttaaaatgggc

SEQ ID NO: 60050 - DNA, 20 bp, Artificial Sequence
  Description of Artificial Sequence: Synthetic oligonucleotide
  Target: SCNA; (-) strand; PAM type: YTN; PAM sequence: TTT
catcagctatttaaaatggg

SEQ ID NO: 60051 - DNA, 20 bp, Artificial Sequence
  Description of Artificial Sequence: Synthetic oligonucleotide
  Target: SCNA; (-) strand; PAM type: YTN; PAM sequence: TTA
atttcatcagctatttaaaa

SEQ ID NO: 60052 - DNA, 20 bp, Artificial Sequence
  Description of Artificial Sequence: Synthetic oligonucleotide
  Target: SCNA; (-) strand; PAM type: YTN; PAM sequence: TTT
aatttcatcagctatttaaa

SEQ ID NO: 60053 - DNA, 20 bp, Artificial Sequence
  Description of Artificial Sequence: Synthetic oligonucleotide
  Target: SCNA; (-) strand; PAM type: YTN; PAM sequence: TTT
taatttcatcagctatttaa

SEQ ID NO: 60054 - DNA, 20 bp, Artificial Sequence
  Description of Artificial Sequence: Synthetic oligonucleotide
  Target: SCNA; (-) strand; PAM type: YTN; PAM sequence: TTT
ttaatttcatcagctattta

SEQ ID NO: 60055 - DNA, 20 bp, Artificial Sequence
  Description of Artificial Sequence: Synthetic oligonucleotide
  Target: SCNA; (-) strand; PAM type: YTN; PAM sequence: CTC
ggatttttaatttcatcagc

SEQ ID NO: 60056 - DNA, 20 bp, Artificial Sequence
  Description of Artificial Sequence: Synthetic oligonucleotide
  Target: SCNA; (-) strand; PAM type: YTN; PAM sequence: TTA
actcggatttttaatttcat

SEQ ID NO: 60057 - DNA, 20 bp, Artificial Sequence
  Description of Artificial Sequence: Synthetic oligonucleotide
  Target: SCNA; (-) strand; PAM type: YTN; PAM sequence: CTT
aactcggatttttaatttca

SEQ ID NO: 60058 - DNA, 20 bp, Artificial Sequence
  Description of Artificial Sequence: Synthetic oligonucleotide
  Target: SCNA; (-) strand; PAM type: YTN; PAM sequence: TTA
cttaactcggatttttaatt

SEQ ID NO: 60059 - DNA, 20 bp, Artificial Sequence
  Description of Artificial Sequence: Synthetic oligonucleotide
  Target: SCNA; (-) strand; PAM type: YTN; PAM sequence: TTA
cataaattacttaactcgga

SEQ ID NO: 60060 - DNA, 20 bp, Artificial Sequence
  Description of Artificial Sequence: Synthetic oligonucleotide
  Target: SCNA; (-) strand; PAM type: YTN; PAM sequence: TTA
catgtgtaatgttacataaa

SEQ ID NO: 60061 - DNA, 20 bp, Artificial Sequence
  Description of Artificial Sequence: Synthetic oligonucleotide
  Target: SCNA; (-) strand; PAM type: YTN; PAM sequence: TTA
ttacatgtgtaatgttacat

SEQ ID NO: 60062 - DNA, 20 bp, Artificial Sequence
  Description of Artificial Sequence: Synthetic oligonucleotide
  Target: SCNA; (-) strand; PAM type: YTN; PAM sequence: CTA
ttattacatgtgtaatgtta

SEQ ID NO: 60063 - DNA, 20 bp, Artificial Sequence
  Description of Artificial Sequence: Synthetic oligonucleotide
  Target: SCNA; (-) strand; PAM type: YTN; PAM sequence: TTA
tagcctattattacatgtgt

SEQ ID NO: 60064 - DNA, 20 bp, Artificial Sequence
  Description of Artificial Sequence: Synthetic oligonucleotide
  Target: SCNA; (-) strand; PAM type: YTN; PAM sequence: CTT
atagcctattattacatgtg

SEQ ID NO: 60065 - DNA, 20 bp, Artificial Sequence
  Description of Artificial Sequence: Synthetic oligonucleotide
  Target: SCNA; (-) strand; PAM type: YTN; PAM sequence: TTG
aatgtgcttatagcctatta

SEQ ID NO: 60066 - DNA, 20 bp, Artificial Sequence
  Description of Artificial Sequence: Synthetic oligonucleotide
  Target: SCNA; (-) strand; PAM type: YTN; PAM sequence: TTT
gaatgtgcttatagcctatt

SEQ ID NO: 60067 - DNA, 20 bp, Artificial Sequence
  Description of Artificial Sequence: Synthetic oligonucleotide
  Target: SCNA; (-) strand; PAM type: YTN; PAM sequence: CTA
gtttgaatgtgcttatagcc

SEQ ID NO: 60068 - DNA, 20 bp, Artificial Sequence
  Description of Artificial Sequence: Synthetic oligonucleotide
  Target: SCNA; (-) strand; PAM type: YTN; PAM sequence: CTG
tgtagagaccctagtttgaa

SEQ ID NO: 60069 - DNA, 20 bp, Artificial Sequence
  Description of Artificial Sequence: Synthetic oligonucleotide
  Target: SCNA; (-) strand; PAM type: YTN; PAM sequence: CTG
atcctgtgtagagaccctag

SEQ ID NO: 60070 - DNA, 20 bp, Artificial Sequence
  Description of Artificial Sequence: Synthetic oligonucleotide
  Target: SCNA; (-) strand; PAM type: YTN; PAM sequence: TTC
tgatcctgtgtagagaccct

SEQ ID NO: 60071 - DNA, 20 bp, Artificial Sequence
  Description of Artificial Sequence: Synthetic oligonucleotide
  Target: SCNA; (-) strand; PAM type: YTN; PAM sequence: TTG
gaagaaattctgatcctgtg

SEQ ID NO: 60072 - DNA, 20 bp, Artificial Sequence
  Description of Artificial Sequence: Synthetic oligonucleotide
  Target: SCNA; (-) strand; PAM type: YTN; PAM sequence: TTT
ggaagaaattctgatcctgt

SEQ ID NO: 60073 - DNA, 20 bp, Artificial Sequence
  Description of Artificial Sequence: Synthetic oligonucleotide
  Target: SCNA; (-) strand; PAM type: YTN; PAM sequence: TTC
aaggtttggaagaaattctg

SEQ ID NO: 60074 - DNA, 20 bp, Artificial Sequence
  Description of Artificial Sequence: Synthetic oligonucleotide
  Target: SCNA; (-) strand; PAM type: YTN; PAM sequence: TTA
gtaatgttcaaggtttggaa

SEQ ID NO: 60075 - DNA, 20 bp, Artificial Sequence
  Description of Artificial Sequence: Synthetic oligonucleotide
  Target: SCNA; (-) strand; PAM type: YTN; PAM sequence: TTT
agtaatgttcaaggtttgga

SEQ ID NO: 60076 - DNA, 20 bp, Artificial Sequence
  Description of Artificial Sequence: Synthetic oligonucleotide
  Target: SCNA; (-) strand; PAM type: YTN; PAM sequence: TTC
aagtttagtaatgttcaagg

SEQ ID NO: 60077 - DNA, 20 bp, Artificial Sequence
  Description of Artificial Sequence: Synthetic oligonucleotide
  Target: SCNA; (-) strand; PAM type: YTN; PAM sequence: TTG
tattcaagtttagtaatgtt

SEQ ID NO: 60078 - DNA, 20 bp, Artificial Sequence
  Description of Artificial Sequence: Synthetic oligonucleotide
  Target: SCNA; (-) strand; PAM type: YTN; PAM sequence: TTT
gtattcaagtttagtaatgt

SEQ ID NO: 60079 - DNA, 20 bp, Artificial Sequence
  Description of Artificial Sequence: Synthetic oligonucleotide
  Target: SCNA; (-) strand; PAM type: YTN; PAM sequence: TTA
tttgtattcaagtttagtaa

SEQ ID NO: 60080 - DNA, 20 bp, Artificial Sequence
  Description of Artificial Sequence: Synthetic oligonucleotide
  Target: SCNA; (-) strand; PAM type: YTN; PAM sequence: TTA
ataatacacataataattat

SEQ ID NO: 60081 - DNA, 20 bp, Artificial Sequence
  Description of Artificial Sequence: Synthetic oligonucleotide
  Target: SCNA; (-) strand; PAM type: YTN; PAM sequence: TTT
aataatacacataataatta

SEQ ID NO: 60082 - DNA, 20 bp, Artificial Sequence
  Description of Artificial Sequence: Synthetic oligonucleotide
  Target: SCNA; (-) strand; PAM type: YTN; PAM sequence: TTT
taataatacacataataatt

SEQ ID NO: 60083 - DNA, 20 bp, Artificial Sequence
  Description of Artificial Sequence: Synthetic oligonucleotide
  Target: SCNA; (-) strand; PAM type: YTN; PAM sequence: TTA
caagcataattttaataata

SEQ ID NO: 60084 - DNA, 20 bp, Artificial Sequence
  Description of Artificial Sequence: Synthetic oligonucleotide
  Target: SCNA; (-) strand; PAM type: YTN; PAM sequence: TTT
acaagcataattttaataat

SEQ ID NO: 60085 - DNA, 20 bp, Artificial Sequence
  Description of Artificial Sequence: Synthetic oligonucleotide
  Target: SCNA; (-) strand; PAM type: YTN; PAM sequence: TTT
tacaagcataattttaataa

SEQ ID NO: 60086 - DNA, 20 bp, Artificial Sequence
  Description of Artificial Sequence: Synthetic oligonucleotide
  Target: SCNA; (-) strand; PAM type: YTN; PAM sequence: TTT
ttacaagcataattttaata

SEQ ID NO: 60087 - DNA, 20 bp, Artificial Sequence
  Description of Artificial Sequence: Synthetic oligonucleotide
  Target: SCNA; (-) strand; PAM type: YTN; PAM sequence: TTT
tttacaagcataattttaat

SEQ ID NO: 60088 - DNA, 20 bp, Artificial Sequence
  Description of Artificial Sequence: Synthetic oligonucleotide
  Target: SCNA; (-) strand; PAM type: YTN; PAM sequence: TTA
gagaggatatgaatacaatt

SEQ ID NO: 60089 - DNA, 20 bp, Artificial Sequence
  Description of Artificial Sequence: Synthetic oligonucleotide
  Target: SCNA; (-) strand; PAM type: YTN; PAM sequence: CTG
aaaaatccaacattagagag

SEQ ID NO: 60090 - DNA, 20 bp, Artificial Sequence
  Description of Artificial Sequence: Synthetic oligonucleotide
  Target: SCNA; (-) strand; PAM type: YTN; PAM sequence: TTA
cactgaaaaatccaacatta

SEQ ID NO: 60091 - DNA, 20 bp, Artificial Sequence
  Description of Artificial Sequence: Synthetic oligonucleotide
  Target: SCNA; (-) strand; PAM type: YTN; PAM sequence: TTA
tacagtgtgaattacactga

SEQ ID NO: 60092 - DNA, 20 bp, Artificial Sequence
  Description of Artificial Sequence: Synthetic oligonucleotide
  Target: SCNA; (-) strand; PAM type: YTN; PAM sequence: TTC
cataaattatacagtgtgaa

SEQ ID NO: 60093 - DNA, 20 bp, Artificial Sequence
  Description of Artificial Sequence: Synthetic oligonucleotide
  Target: SCNA; (-) strand; PAM type: YTN; PAM sequence: CTG
taaaacataaaaatcatgcc

SEQ ID NO: 60094 - DNA, 20 bp, Artificial Sequence
  Description of Artificial Sequence: Synthetic oligonucleotide
  Target: SCNA; (-) strand; PAM type: YTN; PAM sequence: TTC
tgtaaaacataaaaatcatg

SEQ ID NO: 60095 - DNA, 20 bp, Artificial Sequence
  Description of Artificial Sequence: Synthetic oligonucleotide
  Target: SCNA; (-) strand; PAM type: YTN; PAM sequence: TTA
aaaaggagtatgataattct

SEQ ID NO: 60096 - DNA, 20 bp, Artificial Sequence
  Description of Artificial Sequence: Synthetic oligonucleotide
  Target: SCNA; (-) strand; PAM type: YTN; PAM sequence: CTT
aaaaaggagtatgataattc

SEQ ID NO: 60097 - DNA, 20 bp, Artificial Sequence
  Description of Artificial Sequence: Synthetic oligonucleotide
  Target: SCNA; (-) strand; PAM type: YTN; PAM sequence: CTG
atccaaacttaaaaaggagt

SEQ ID NO: 60098 - DNA, 20 bp, Artificial Sequence
  Description of Artificial Sequence: Synthetic oligonucleotide
  Target: SCNA; (-) strand; PAM type: YTN; PAM sequence: TTG
taaactgatccaaacttaaa

SEQ ID NO: 60099 - DNA, 20 bp, Artificial Sequence
  Description of Artificial Sequence: Synthetic oligonucleotide
  Target: SCNA; (-) strand; PAM type: YTN; PAM sequence: TTT
gtaaactgatccaaacttaa

SEQ ID NO: 60100 - DNA, 20 bp, Artificial Sequence
  Description of Artificial Sequence: Synthetic oligonucleotide
  Target: SCNA; (-) strand; PAM type: YTN; PAM sequence: TTT
tgtaaactgatccaaactta

SEQ ID NO: 60101 - DNA, 20 bp, Artificial Sequence
  Description of Artificial Sequence: Synthetic oligonucleotide
  Target: SCNA; (-) strand; PAM type: YTN; PAM sequence: TTA
aagtgcaaatgataacattt

SEQ ID NO: 60102 - DNA, 20 bp, Artificial Sequence
  Description of Artificial Sequence: Synthetic oligonucleotide
  Target: SCNA; (-) strand; PAM type: YTN; PAM sequence: CTG
tcagtatatcatgacattaa

SEQ ID NO: 60103 - DNA, 20 bp, Artificial Sequence
  Description of Artificial Sequence: Synthetic oligonucleotide
  Target: SCNA; (-) strand; PAM type: YTN; PAM sequence: TTA
aatacactgtcagtatatca

SEQ ID NO: 60104 - DNA, 20 bp, Artificial Sequence
  Description of Artificial Sequence: Synthetic oligonucleotide
  Target: SCNA; (-) strand; PAM type: YTN; PAM sequence: TTA
tgttaaatacactgtcagta

SEQ ID NO: 60105 - DNA, 20 bp, Artificial Sequence
  Description of Artificial Sequence: Synthetic oligonucleotide
  Target: SCNA; (-) strand; PAM type: YTN; PAM sequence: CTT
atgttaaatacactgtcagt

SEQ ID NO: 60106 - DNA, 20 bp, Artificial Sequence
  Description of Artificial Sequence: Synthetic oligonucleotide
  Target: SCNA; (-) strand; PAM type: YTN; PAM sequence: CTG
aaaaatacaccttatgttaa

SEQ ID NO: 60107 - DNA, 20 bp, Artificial Sequence
  Description of Artificial Sequence: Synthetic oligonucleotide
  Target: SCNA; (-) strand; PAM type: YTN; PAM sequence: TTG
ctgaaaaatacaccttatgt

SEQ ID NO: 60108 - DNA, 20 bp, Artificial Sequence
  Description of Artificial Sequence: Synthetic oligonucleotide
  Target: SCNA; (-) strand; PAM type: YTN; PAM sequence: TTG
tgataaagagtgaaggtgtc

SEQ ID NO: 60109 - DNA, 20 bp, Artificial Sequence
  Description of Artificial Sequence: Synthetic oligonucleotide
  Target: SCNA; (-) strand; PAM type: YTN; PAM sequence: CTA
aatatgcagtcagaggaacg

SEQ ID NO: 60110 - DNA, 20 bp, Artificial Sequence
  Description of Artificial Sequence: Synthetic oligonucleotide
  Target: SCNA; (-) strand; PAM type: YTN; PAM sequence: CTC
taaatatgcagtcagaggaa

SEQ ID NO: 60111 - DNA, 20 bp, Artificial Sequence
  Description of Artificial Sequence: Synthetic oligonucleotide
  Target: SCNA; (-) strand; PAM type: YTN; PAM sequence: TTC
aggagactctaaatatgcag

SEQ ID NO: 60112 - DNA, 20 bp, Artificial Sequence
  Description of Artificial Sequence: Synthetic oligonucleotide
  Target: SCNA; (-) strand; PAM type: YTN; PAM sequence: CTG
caattcaggagactctaaat

SEQ ID NO: 60113 - DNA, 20 bp, Artificial Sequence
  Description of Artificial Sequence: Synthetic oligonucleotide
  Target: SCNA; (-) strand; PAM type: YTN; PAM sequence: CTG
ctgcaattcaggagactcta

SEQ ID NO: 60114 - DNA, 20 bp, Artificial Sequence
  Description of Artificial Sequence: Synthetic oligonucleotide
  Target: SCNA; (-) strand; PAM type: YTN; PAM sequence: TTG
tcactgctgcaattcaggag

SEQ ID NO: 60115 - DNA, 20 bp, Artificial Sequence
  Description of Artificial Sequence: Synthetic oligonucleotide
  Target: SCNA; (-) strand; PAM type: YTN; PAM sequence: CTG
aggatgttgtcactgctgca

SEQ ID NO: 60116 - DNA, 20 bp, Artificial Sequence
  Description of Artificial Sequence: Synthetic oligonucleotide
  Target: SCNA; (-) strand; PAM type: YTN; PAM sequence: CTA
ccctgaggatgttgtcactg

SEQ ID NO: 60117 - DNA, 20 bp, Artificial Sequence
  Description of Artificial Sequence: Synthetic oligonucleotide
  Target: SCNA; (-) strand; PAM type: YTN; PAM sequence: TTG
atgtatacaggaagtagcta

SEQ ID NO: 60118 - DNA, 20 bp, Artificial Sequence
  Description of Artificial Sequence: Synthetic oligonucleotide
  Target: SCNA; (-) strand; PAM type: YTN; PAM sequence: TTG
aatcaaacataagttgatgt

SEQ ID NO: 60119 - DNA, 20 bp, Artificial Sequence
  Description of Artificial Sequence: Synthetic oligonucleotide
  Target: SCNA; (-) strand; PAM type: YTN; PAM sequence: TTT
gaatcaaacataagttgatg

SEQ ID NO: 60120 - DNA, 20 bp, Artificial Sequence
  Description of Artificial Sequence: Synthetic oligonucleotide
  Target: SCNA; (-) strand; PAM type: YTN; PAM sequence: CTG
gaagtaaaatttgaatcaaa

SEQ ID NO: 60121 - DNA, 20 bp, Artificial Sequence
  Description of Artificial Sequence: Synthetic oligonucleotide
  Target: SCNA; (-) strand; PAM type: YTN; PAM sequence: TTC
tggaagtaaaatttgaatca

SEQ ID NO: 60122 - DNA, 20 bp, Artificial Sequence
  Description of Artificial Sequence: Synthetic oligonucleotide
  Target: SCNA; (-) strand; PAM type: YTN; PAM sequence: CTG
gccagcaaagatgaaagagt

SEQ ID NO: 60123 - DNA, 20 bp, Artificial Sequence
  Description of Artificial Sequence: Synthetic oligonucleotide
  Target: SCNA; (-) strand; PAM type: YTN; PAM sequence: TTC
acgaaaatgcgcaatcaaaa

SEQ ID NO: 60124 - DNA, 20 bp, Artificial Sequence
  Description of Artificial Sequence: Synthetic oligonucleotide
  Target: SCNA; (-) strand; PAM type: YTN; PAM sequence: TTT
cacgaaaatgcgcaatcaaa

SEQ ID NO: 60125 - DNA, 20 bp, Artificial Sequence
  Description of Artificial Sequence: Synthetic oligonucleotide
  Target: SCNA; (-) strand; PAM type: YTN; PAM sequence: CTC
ccagtggtgagcccatgtga

SEQ ID NO: 60126 - DNA, 20 bp, Artificial Sequence
  Description of Artificial Sequence: Synthetic oligonucleotide
  Target: SCNA; (-) strand; PAM type: YTN; PAM sequence: TTG
tctcccagtggtgagcccat

SEQ ID NO: 60127 - DNA, 20 bp, Artificial Sequence
  Description of Artificial Sequence: Synthetic oligonucleotide
  Target: SCNA; (-) strand; PAM type: YTN; PAM sequence: TTG
tgtggccacattgtctccca

SEQ ID NO: 60128 - DNA, 20 bp, Artificial Sequence
  Description of Artificial Sequence: Synthetic oligonucleotide
  Target: SCNA; (-) strand; PAM type: YTN; PAM sequence: CTT
gtgtggccacattgtctccc

SEQ ID NO: 60129 - DNA, 20 bp, Artificial Sequence
  Description of Artificial Sequence: Synthetic oligonucleotide
  Target: SCNA; (-) strand; PAM type: YTN; PAM sequence: TTC
atacagacagcaatgcccgg

SEQ ID NO: 60130 - DNA, 20 bp, Artificial Sequence
  Description of Artificial Sequence: Synthetic oligonucleotide
  Target: SCNA; (-) strand; PAM type: YTN; PAM sequence: TTA
tgcagttcatacagacagca

SEQ ID NO: 60131 - DNA, 20 bp, Artificial Sequence
  Description of Artificial Sequence: Synthetic oligonucleotide
  Target: SCNA; (-) strand; PAM type: YTN; PAM sequence: CTG
ttatgcagttcatacagaca

SEQ ID NO: 60132 - DNA, 20 bp, Artificial Sequence
  Description of Artificial Sequence: Synthetic oligonucleotide
  Target: SCNA; (-) strand; PAM type: YTN; PAM sequence: TTC
acatctgttatgcagttcat

SEQ ID NO: 60133 - DNA, 20 bp, Artificial Sequence
  Description of Artificial Sequence: Synthetic oligonucleotide
  Target: SCNA; (-) strand; PAM type: YTN; PAM sequence: CTT
cacatctgttatgcagttca

SEQ ID NO: 60134 - DNA, 20 bp, Artificial Sequence
  Description of Artificial Sequence: Synthetic oligonucleotide
  Target: SCNA; (-) strand; PAM type: YTN; PAM sequence: TTG
cttcacatctgttatgcagt

SEQ ID NO: 60135 - DNA, 20 bp, Artificial Sequence
  Description of Artificial Sequence: Synthetic oligonucleotide
  Target: SCNA; (-) strand; PAM type: YTN; PAM sequence: TTG
gttgcttcacatctgttatg

SEQ ID NO: 60136 - DNA, 20 bp, Artificial Sequence
  Description of Artificial Sequence: Synthetic oligonucleotide
  Target: SCNA; (-) strand; PAM type: YTN; PAM sequence: TTG
gagattggttgcttcacatc

SEQ ID NO: 60137 - DNA, 20 bp, Artificial Sequence
  Description of Artificial Sequence: Synthetic oligonucleotide
  Target: SCNA; (-) strand; PAM type: YTN; PAM sequence: TTT
ggagattggttgcttcacat

SEQ ID NO: 60138 - DNA, 20 bp, Artificial Sequence
  Description of Artificial Sequence: Synthetic oligonucleotide
  Target: SCNA; (-) strand; PAM type: YTN; PAM sequence: TTT
tggagattggttgcttcaca

SEQ ID NO: 60139 - DNA, 20 bp, Artificial Sequence
  Description of Artificial Sequence: Synthetic oligonucleotide
  Target: SCNA; (-) strand; PAM type: YTN; PAM sequence: TTT
ttggagattggttgcttcac

SEQ ID NO: 60140 - DNA, 20 bp, Artificial Sequence
  Description of Artificial Sequence: Synthetic oligonucleotide
  Target: SCNA; (-) strand; PAM type: YTN; PAM sequence: CTT
tttggagattggttgcttca

SEQ ID NO: 60141 - DNA, 20 bp, Artificial Sequence
  Description of Artificial Sequence: Synthetic oligonucleotide
  Target: SCNA; (-) strand; PAM type: YTN; PAM sequence: TTC
aaagctttttggagattggt

SEQ ID NO: 60142 - DNA, 20 bp, Artificial Sequence
  Description of Artificial Sequence: Synthetic oligonucleotide
  Target: SCNA; (-) strand; PAM type: YTN; PAM sequence: TTT
caaagctttttggagattgg

SEQ ID NO: 60143 - DNA, 20 bp, Artificial Sequence
  Description of Artificial Sequence: Synthetic oligonucleotide
  Target: SCNA; (-) strand; PAM type: YTN; PAM sequence: CTT
tcaaagctttttggagattg

SEQ ID NO: 60144 - DNA, 20 bp, Artificial Sequence
  Description of Artificial Sequence: Synthetic oligonucleotide
  Target: SCNA; (-) strand; PAM type: YTN; PAM sequence: TTC
tttcaaagctttttggagat

SEQ ID NO: 60145 - DNA, 20 bp, Artificial Sequence
  Description of Artificial Sequence: Synthetic oligonucleotide
  Target: SCNA; (-) strand; PAM type: YTN; PAM sequence: CTT
ctttcaaagctttttggaga

SEQ ID NO: 60146 - DNA, 20 bp, Artificial Sequence
  Description of Artificial Sequence: Synthetic oligonucleotide
  Target: SCNA; (-) strand; PAM type: YTN; PAM sequence: TTA
taatcagtgacaaaaccaca

SEQ ID NO: 60147 - DNA, 20 bp, Artificial Sequence
  Description of Artificial Sequence: Synthetic oligonucleotide
  Target: SCNA; (-) strand; PAM type: YTN; PAM sequence: TTA
cataaataacagaaacccat

SEQ ID NO: 60148 - DNA, 20 bp, Artificial Sequence
  Description of Artificial Sequence: Synthetic oligonucleotide
  Target: SCNA; (-) strand; PAM type: YTN; PAM sequence: TTC
aaatcattacataaataaca

SEQ ID NO: 60149 - DNA, 20 bp, Artificial Sequence
  Description of Artificial Sequence: Synthetic oligonucleotide
  Target: SCNA; (-) strand; PAM type: YTN; PAM sequence: CTT
caaatcattacataaataac

SEQ ID NO: 60150 - DNA, 20 bp, Artificial Sequence
  Description of Artificial Sequence: Synthetic oligonucleotide
  Target: SCNA; (-) strand; PAM type: YTN; PAM sequence: TTC
agccttcaaatcattacata

SEQ ID NO: 60151 - DNA, 20 bp, Artificial Sequence
  Description of Artificial Sequence: Synthetic oligonucleotide
  Target: SCNA; (-) strand; PAM type: YTN; PAM sequence: CTT
cagccttcaaatcattacat

SEQ ID NO: 60152 - DNA, 20 bp, Artificial Sequence
  Description of Artificial Sequence: Synthetic oligonucleotide
  Target: SCNA; (-) strand; PAM type: YTN; PAM sequence: CTC
ttcagccttcaaatcattac

SEQ ID NO: 60153 - DNA, 20 bp, Artificial Sequence
  Description of Artificial Sequence: Synthetic oligonucleotide
  Target: SCNA; (-) strand; PAM type: YTN; PAM sequence: CTA
actcttcagccttcaaatca

SEQ ID NO: 60154 - DNA, 20 bp, Artificial Sequence
  Description of Artificial Sequence: Synthetic oligonucleotide
  Target: SCNA; (-) strand; PAM type: YTN; PAM sequence: CTG
ctaactcttcagccttcaaa

SEQ ID NO: 60155 - DNA, 20 bp, Artificial Sequence
  Description of Artificial Sequence: Synthetic oligonucleotide
  Target: SCNA; (-) strand; PAM type: YTN; PAM sequence: TTG
ctgctaactcttcagccttc

SEQ ID NO: 60156 - DNA, 20 bp, Artificial Sequence
  Description of Artificial Sequence: Synthetic oligonucleotide
  Target: SCNA; (-) strand; PAM type: YTN; PAM sequence: TTT
gctgctaactcttcagcctt

SEQ ID NO: 60157 - DNA, 20 bp, Artificial Sequence
  Description of Artificial Sequence: Synthetic oligonucleotide
  Target: SCNA; (-) strand; PAM type: YTN; PAM sequence: CTT
tgctgctaactcttcagcct

SEQ ID NO: 60158 - DNA, 20 bp, Artificial Sequence
  Description of Artificial Sequence: Synthetic oligonucleotide
  Target: SCNA; (-) strand; PAM type: YTN; PAM sequence: TTG
cataaagtacaaactttgct

SEQ ID NO: 60159 - DNA, 20 bp, Artificial Sequence
  Description of Artificial Sequence: Synthetic oligonucleotide
  Target: SCNA; (-) strand; PAM type: YTN; PAM sequence: TTA
ccacagtataccgaaagtca

SEQ ID NO: 60160 - DNA, 20 bp, Artificial Sequence
  Description of Artificial Sequence: Synthetic oligonucleotide
  Target: SCNA; (-) strand; PAM type: YTN; PAM sequence: CTG
ttaccacagtataccgaaag

SEQ ID NO: 60161 - DNA, 20 bp, Artificial Sequence
  Description of Artificial Sequence: Synthetic oligonucleotide
  Target: SCNA; (-) strand; PAM type: YTN; PAM sequence: TTC
tgttaccacagtataccgaa

SEQ ID NO: 60162 - DNA, 20 bp, Artificial Sequence
  Description of Artificial Sequence: Synthetic oligonucleotide
  Target: SCNA; (-) strand; PAM type: YTN; PAM sequence: TTT
ctgttaccacagtataccga

SEQ ID NO: 60163 - DNA, 20 bp, Artificial Sequence
  Description of Artificial Sequence: Synthetic oligonucleotide
  Target: SCNA; (-) strand; PAM type: YTN; PAM sequence: TTC
aaatttctgttaccacagta

SEQ ID NO: 60164 - DNA, 20 bp, Artificial Sequence
  Description of Artificial Sequence: Synthetic oligonucleotide
  Target: SCNA; (-) strand; PAM type: YTN; PAM sequence: CTA
acaacacaattcaaatttct

SEQ ID NO: 60165 - DNA, 20 bp, Artificial Sequence
  Description of Artificial Sequence: Synthetic oligonucleotide
  Target: SCNA; (-) strand; PAM type: YTN; PAM sequence: TTA
aataacaccagccactaaca

SEQ ID NO: 60166 - DNA, 20 bp, Artificial Sequence
  Description of Artificial Sequence: Synthetic oligonucleotide
  Target: SCNA; (-) strand; PAM type: YTN; PAM sequence: TTA
gttaaataacaccagccact

SEQ ID NO: 60167 - DNA, 20 bp, Artificial Sequence
  Description of Artificial Sequence: Synthetic oligonucleotide
  Target: SCNA; (-) strand; PAM type: YTN; PAM sequence: CTA
tggttagttaaataacacca

SEQ ID NO: 60168 - DNA, 20 bp, Artificial Sequence
  Description of Artificial Sequence: Synthetic oligonucleotide
  Target: SCNA; (-) strand; PAM type: YTN; PAM sequence: TTC
caggtactatggttagttaa

SEQ ID NO: 60169 - DNA, 20 bp, Artificial Sequence
  Description of Artificial Sequence: Synthetic oligonucleotide
  Target: SCNA; (-) strand; PAM type: YTN; PAM sequence: TTC
cagcacaaacaaattccagg

SEQ ID NO: 60170 - DNA, 20 bp, Artificial Sequence
  Description of Artificial Sequence: Synthetic oligonucleotide
  Target: SCNA; (-) strand; PAM type: YTN; PAM sequence: CTG
catagttccagcacaaacaa

SEQ ID NO: 60171 - DNA, 20 bp, Artificial Sequence
  Description of Artificial Sequence: Synthetic oligonucleotide
  Target: SCNA; (-) strand; PAM type: YTN; PAM sequence: CTC
tgcatagttccagcacaaac

SEQ ID NO: 60172 - DNA, 20 bp, Artificial Sequence
  Description of Artificial Sequence: Synthetic oligonucleotide
  Target: SCNA; (-) strand; PAM type: YTN; PAM sequence: CTC
actctgcatagttccagcac

SEQ ID NO: 60173 - DNA, 20 bp, Artificial Sequence
  Description of Artificial Sequence: Synthetic oligonucleotide
  Target: SCNA; (-) strand; PAM type: YTN; PAM sequence: TTC
tcactctgcatagttccagc

SEQ ID NO: 60174 - DNA, 20 bp, Artificial Sequence
  Description of Artificial Sequence: Synthetic oligonucleotide
  Target: SCNA; (-) strand; PAM type: YTN; PAM sequence: CTG
ttctcactctgcatagttcc

SEQ ID NO: 60175 - DNA, 20 bp, Artificial Sequence
  Description of Artificial Sequence: Synthetic oligonucleotide
  Target: SCNA; (-) strand; PAM type: YTN; PAM sequence: TTA
aatatcagctgttctcactc

SEQ ID NO: 60176 - DNA, 20 bp, Artificial Sequence
  Description of Artificial Sequence: Synthetic oligonucleotide
  Target: SCNA; (-) strand; PAM type: YTN; PAM sequence: CTT
aaatatcagctgttctcact

SEQ ID NO: 60177 - DNA, 20 bp, Artificial Sequence
  Description of Artificial Sequence: Synthetic oligonucleotide
  Target: SCNA; (-) strand; PAM type: YTN; PAM sequence: CTC
ttaaatatcagctgttctca

SEQ ID NO: 60178 - DNA, 20 bp, Artificial Sequence
  Description of Artificial Sequence: Synthetic oligonucleotide
  Target: SCNA; (-) strand; PAM type: YTN; PAM sequence: TTC
tcttaaatatcagctgttct

SEQ ID NO: 60179 - DNA, 20 bp, Artificial Sequence
  Description of Artificial Sequence: Synthetic oligonucleotide
  Target: SCNA; (-) strand; PAM type: YTN; PAM sequence: TTG
aaacatattctcttaaatat

SEQ ID NO: 60180 - DNA, 20 bp, Artificial Sequence
  Description of Artificial Sequence: Synthetic oligonucleotide
  Target: SCNA; (-) strand; PAM type: YTN; PAM sequence: TTA
agacaacatggggtgcaggt

SEQ ID NO: 60181 - DNA, 20 bp, Artificial Sequence
  Description of Artificial Sequence: Synthetic oligonucleotide
  Target: SCNA; (-) strand; PAM type: YTN; PAM sequence: TTT
aagacaacatggggtgcagg

SEQ ID NO: 60182 - DNA, 20 bp, Artificial Sequence
  Description of Artificial Sequence: Synthetic oligonucleotide
  Target: SCNA; (-) strand; PAM type: YTN; PAM sequence: TTT
taagacaacatggggtgcag

SEQ ID NO: 60183 - DNA, 20 bp, Artificial Sequence
  Description of Artificial Sequence: Synthetic oligonucleotide
  Target: SCNA; (-) strand; PAM type: YTN; PAM sequence: TTT
ttaagacaacatggggtgca

SEQ ID NO: 60184 - DNA, 20 bp, Artificial Sequence
  Description of Artificial Sequence: Synthetic oligonucleotide
  Target: SCNA; (-) strand; PAM type: YTN; PAM sequence: CTA
gtcatttttaagacaacatg

SEQ ID NO: 60185 - DNA, 20 bp, Artificial Sequence
  Description of Artificial Sequence: Synthetic oligonucleotide
  Target: SCNA; (-) strand; PAM type: YTN; PAM sequence: CTA
ctagtcatttttaagacaac

SEQ ID NO: 60186 - DNA, 20 bp, Artificial Sequence
  Description of Artificial Sequence: Synthetic oligonucleotide
  Target: SCNA; (-) strand; PAM type: YTN; PAM sequence: TTA
ctactagtcatttttaagac

SEQ ID NO: 60187 - DNA, 20 bp, Artificial Sequence
  Description of Artificial Sequence: Synthetic oligonucleotide
  Target: SCNA; (-) strand; PAM type: YTN; PAM sequence: CTT
actactagtcatttttaaga

SEQ ID NO: 60188 - DNA, 20 bp, Artificial Sequence
  Description of Artificial Sequence: Synthetic oligonucleotide
  Target: SCNA; (-) strand; PAM type: YTN; PAM sequence: TTC
ttactactagtcatttttaa

SEQ ID NO: 60189 - DNA, 20 bp, Artificial Sequence
  Description of Artificial Sequence: Synthetic oligonucleotide
  Target: SCNA; (-) strand; PAM type: YTN; PAM sequence: TTT
cttactactagtcattttta

SEQ ID NO: 60190 - DNA, 20 bp, Artificial Sequence
  Description of Artificial Sequence: Synthetic oligonucleotide
  Target: SCNA; (-) strand; PAM type: YTN; PAM sequence: TTA
gacatttcttactactagtc

SEQ ID NO: 60191 - DNA, 20 bp, Artificial Sequence
  Description of Artificial Sequence: Synthetic oligonucleotide
  Target: SCNA; (-) strand; PAM type: YTN; PAM sequence: CTG
ttagacatttcttactacta

SEQ ID NO: 60192 - DNA, 20 bp, Artificial Sequence
  Description of Artificial Sequence: Synthetic oligonucleotide
  Target: SCNA; (-) strand; PAM type: YTN; PAM sequence: TTC
cagctgttagacatttctta

SEQ ID NO: 60193 - DNA, 20 bp, Artificial Sequence
  Description of Artificial Sequence: Synthetic oligonucleotide
  Target: SCNA; (-) strand; PAM type: YTN; PAM sequence: CTA
aggcaaagaacaaagatcgc

SEQ ID NO: 60194 - DNA, 20 bp, Artificial Sequence
  Description of Artificial Sequence: Synthetic oligonucleotide
  Target: SCNA; (-) strand; PAM type: YTN; PAM sequence: CTG
ctaaggcaaagaacaaagat

SEQ ID NO: 60195 - DNA, 20 bp, Artificial Sequence
  Description of Artificial Sequence: Synthetic oligonucleotide
  Target: SCNA; (-) strand; PAM type: YTN; PAM sequence: TTA
ggtactgctaaggcaaagaa

SEQ ID NO: 60196 - DNA, 20 bp, Artificial Sequence
  Description of Artificial Sequence: Synthetic oligonucleotide
  Target: SCNA; (-) strand; PAM type: YTN; PAM sequence: CTT
aggtactgctaaggcaaaga

SEQ ID NO: 60197 - DNA, 20 bp, Artificial Sequence
  Description of Artificial Sequence: Synthetic oligonucleotide
  Target: SCNA; (-) strand; PAM type: YTN; PAM sequence: TTC
ttaggtactgctaaggcaaa

SEQ ID NO: 60198 - DNA, 20 bp, Artificial Sequence
  Description of Artificial Sequence: Synthetic oligonucleotide
  Target: SCNA; (-) strand; PAM type: YTN; PAM sequence: TTA
accaaaggtcaaattcttag

SEQ ID NO: 60199 - DNA, 20 bp, Artificial Sequence
  Description of Artificial Sequence: Synthetic oligonucleotide
  Target: SCNA; (-) strand; PAM type: YTN; PAM sequence: TTT
aaccaaaggtcaaattctta

SEQ ID NO: 60200 - DNA, 20 bp, Artificial Sequence
  Description of Artificial Sequence: Synthetic oligonucleotide
  Target: SCNA; (-) strand; PAM type: YTN; PAM sequence: TTC
ataatttaaccaaaggtcaa

SEQ ID NO: 60201 - DNA, 20 bp, Artificial Sequence
  Description of Artificial Sequence: Synthetic oligonucleotide
  Target: SCNA; (-) strand; PAM type: YTN; PAM sequence: TTT
cataatttaaccaaaggtca

SEQ ID NO: 60202 - DNA, 20 bp, Artificial Sequence
  Description of Artificial Sequence: Synthetic oligonucleotide
  Target: SCNA; (-) strand; PAM type: YTN; PAM sequence: TTA
gaatatgtttcataatttaa

SEQ ID NO: 60203 - DNA, 20 bp, Artificial Sequence
  Description of Artificial Sequence: Synthetic oligonucleotide
  Target: SCNA; (-) strand; PAM type: YTN; PAM sequence: TTT
agaatatgtttcataattta

SEQ ID NO: 60204 - DNA, 20 bp, Artificial Sequence
  Description of Artificial Sequence: Synthetic oligonucleotide
  Target: SCNA; (-) strand; PAM type: YTN; PAM sequence: TTG
atttagaatatgtttcataa

SEQ ID NO: 60205 - DNA, 20 bp, Artificial Sequence
  Description of Artificial Sequence: Synthetic oligonucleotide
  Target: SCNA; (-) strand; PAM type: YTN; PAM sequence: TTT
gatttagaatatgtttcata

SEQ ID NO: 60206 - DNA, 20 bp, Artificial Sequence
  Description of Artificial Sequence: Synthetic oligonucleotide
  Target: SCNA; (-) strand; PAM type: YTN; PAM sequence: CTT
tgatttagaatatgtttcat

SEQ ID NO: 60207 - DNA, 20 bp, Artificial Sequence
  Description of Artificial Sequence: Synthetic oligonucleotide
  Target: SCNA; (-) strand; PAM type: YTN; PAM sequence: TTG
tctttgatttagaatatgtt

SEQ ID NO: 60208 - DNA, 20 bp, Artificial Sequence
  Description of Artificial Sequence: Synthetic oligonucleotide
  Target: SCNA; (-) strand; PAM type: YTN; PAM sequence: CTC
attgtctttgatttagaata

SEQ ID NO: 60209 - DNA, 20 bp, Artificial Sequence
  Description of Artificial Sequence: Synthetic oligonucleotide
  Target: SCNA; (-) strand; PAM type: YTN; PAM sequence: CTA
tctcattgtctttgatttag

SEQ ID NO: 60210 - DNA, 20 bp, Artificial Sequence
  Description of Artificial Sequence: Synthetic oligonucleotide
  Target: SCNA; (-) strand; PAM type: YTN; PAM sequence: TTC
tatctcattgtctttgattt

SEQ ID NO: 60211 - DNA, 20 bp, Artificial Sequence
  Description of Artificial Sequence: Synthetic oligonucleotide
  Target: SCNA; (-) strand; PAM type: YTN; PAM sequence: CTT
ctatctcattgtctttgatt

SEQ ID NO: 60212 - DNA, 20 bp, Artificial Sequence
  Description of Artificial Sequence: Synthetic oligonucleotide
  Target: SCNA; (-) strand; PAM type: YTN; PAM sequence: CTA
cttctatctcattgtctttg

SEQ ID NO: 60213 - DNA, 20 bp, Artificial Sequence
  Description of Artificial Sequence: Synthetic oligonucleotide
  Target: SCNA; (-) strand; PAM type: YTN; PAM sequence: CTC
tacttctatctcattgtctt

SEQ ID NO: 60214 - DNA, 20 bp, Artificial Sequence
  Description of Artificial Sequence: Synthetic oligonucleotide
  Target: SCNA; (-) strand; PAM type: YTN; PAM sequence: CTC
tctacttctatctcattgtc

SEQ ID NO: 60215 - DNA, 20 bp, Artificial Sequence
  Description of Artificial Sequence: Synthetic oligonucleotide
  Target: SCNA; (-) strand; PAM type: YTN; PAM sequence: CTA
ctctctacttctatctcatt

SEQ ID NO: 60216 - DNA, 20 bp, Artificial Sequence
  Description of Artificial Sequence: Synthetic oligonucleotide
  Target: SCNA; (-) strand; PAM type: YTN; PAM sequence: TTC
tactctctacttctatctca

SEQ ID NO: 60217 - DNA, 20 bp, Artificial Sequence
  Description of Artificial Sequence: Synthetic oligonucleotide
  Target: SCNA; (-) strand; PAM type: YTN; PAM sequence: CTA
ataatcataattctactctc

SEQ ID NO: 60218 - DNA, 20 bp, Artificial Sequence
  Description of Artificial Sequence: Synthetic oligonucleotide
  Target: SCNA; (-) strand; PAM type: YTN; PAM sequence: CTC
taataatcataattctactc

SEQ ID NO: 60219 - DNA, 20 bp, Artificial Sequence
  Description of Artificial Sequence: Synthetic oligonucleotide
  Target: SCNA; (-) strand; PAM type: YTN; PAM sequence: TTG
tcagcctctaataatcataa

SEQ ID NO: 60220 - DNA, 20 bp, Artificial Sequence
  Description of Artificial Sequence: Synthetic oligonucleotide
  Target: SCNA; (-) strand; PAM type: YTN; PAM sequence: TTA
ccgttgtcagcctctaataa

SEQ ID NO: 60221 - DNA, 20 bp, Artificial Sequence
  Description of Artificial Sequence: Synthetic oligonucleotide
  Target: SCNA; (-) strand; PAM type: YTN; PAM sequence: CTT
accgttgtcagcctctaata

SEQ ID NO: 60222 - DNA, 20 bp, Artificial Sequence
  Description of Artificial Sequence: Synthetic oligonucleotide
  Target: SCNA; (-) strand; PAM type: YTN; PAM sequence: CTC
ttaccgttgtcagcctctaa

SEQ ID NO: 60223 - DNA, 20 bp, Artificial Sequence
  Description of Artificial Sequence: Synthetic oligonucleotide
  Target: SCNA; (-) strand; PAM type: YTN; PAM sequence: CTC
cctcttaccgttgtcagcct

SEQ ID NO: 60224 - DNA, 20 bp, Artificial Sequence
  Description of Artificial Sequence: Synthetic oligonucleotide
  Target: SCNA; (-) strand; PAM type: YTN; PAM sequence: CTC
ccctccctcttaccgttgtc

SEQ ID NO: 60225 - DNA, 20 bp, Artificial Sequence
  Description of Artificial Sequence: Synthetic oligonucleotide
  Target: SCNA; (-) strand; PAM type: YTN; PAM sequence: CTC
catatcctcccctccctctt

SEQ ID NO: 60226 - DNA, 20 bp, Artificial Sequence
  Description of Artificial Sequence: Synthetic oligonucleotide
  Target: SCNA; (-) strand; PAM type: YTN; PAM sequence: CTC
tccatatcctcccctccctc

SEQ ID NO: 60227 - DNA, 20 bp, Artificial Sequence
  Description of Artificial Sequence: Synthetic oligonucleotide
  Target: SCNA; (-) strand; PAM type: YTN; PAM sequence: TTA
accaacctctccatatcctc

SEQ ID NO: 60228 - DNA, 20 bp, Artificial Sequence
  Description of Artificial Sequence: Synthetic oligonucleotide
  Target: SCNA; (-) strand; PAM type: YTN; PAM sequence: TTT
aaccaacctctccatatcct

SEQ ID NO: 60229 - DNA, 20 bp, Artificial Sequence
  Description of Artificial Sequence: Synthetic oligonucleotide
  Target: SCNA; (-) strand; PAM type: YTN; PAM sequence: CTT
taaccaacctctccatatcc

SEQ ID NO: 60230 - DNA, 20 bp, Artificial Sequence
  Description of Artificial Sequence: Synthetic oligonucleotide
  Target: SCNA; (-) strand; PAM type: YTN; PAM sequence: TTC
tttaaccaacctctccatat

SEQ ID NO: 60231 - DNA, 20 bp, Artificial Sequence
  Description of Artificial Sequence: Synthetic oligonucleotide
  Target: SCNA; (-) strand; PAM type: YTN; PAM sequence: TTC
atattctttaaccaacctct

SEQ ID NO: 60232 - DNA, 20 bp, Artificial Sequence
  Description of Artificial Sequence: Synthetic oligonucleotide
  Target: SCNA; (-) strand; PAM type: YTN; PAM sequence: TTT
catattctttaaccaacctc

SEQ ID NO: 60233 - DNA, 20 bp, Artificial Sequence
  Description of Artificial Sequence: Synthetic oligonucleotide
  Target: SCNA; (-) strand; PAM type: YTN; PAM sequence: CTC
caatttcatattctttaacc

SEQ ID NO: 60234 - DNA, 20 bp, Artificial Sequence
  Description of Artificial Sequence: Synthetic oligonucleotide
  Target: SCNA; (-) strand; PAM type: YTN; PAM sequence: TTG
gctccaatttcatattcttt

SEQ ID NO: 60235 - DNA, 20 bp, Artificial Sequence
  Description of Artificial Sequence: Synthetic oligonucleotide
  Target: SCNA; (-) strand; PAM type: YTN; PAM sequence: TTT
ggctccaatttcatattctt

SEQ ID NO: 60236 - DNA, 20 bp, Artificial Sequence
  Description of Artificial Sequence: Synthetic oligonucleotide
  Target: SCNA; (-) strand; PAM type: YTN; PAM sequence: CTC
atatttggctccaatttcat

SEQ ID NO: 60237 - DNA, 20 bp, Artificial Sequence
  Description of Artificial Sequence: Synthetic oligonucleotide
  Target: SCNA; (-) strand; PAM type: YTN; PAM sequence: TTC
ctcatatttggctccaattt

SEQ ID NO: 60238 - DNA, 20 bp, Artificial Sequence
  Description of Artificial Sequence: Synthetic oligonucleotide
  Target: SCNA; (-) strand; PAM type: YTN; PAM sequence: CTC
attcctcatatttggctcca

SEQ ID NO: 60239 - DNA, 20 bp, Artificial Sequence
  Description of Artificial Sequence: Synthetic oligonucleotide
  Target: SCNA; (-) strand; PAM type: YTN; PAM sequence: CTA
gaactcattcctcatatttg

SEQ ID NO: 60240 - DNA, 20 bp, Artificial Sequence
  Description of Artificial Sequence: Synthetic oligonucleotide
  Target: SCNA; (-) strand; PAM type: YTN; PAM sequence: CTA
cagaatgctagaactcattc

SEQ ID NO: 60241 - DNA, 20 bp, Artificial Sequence
  Description of Artificial Sequence: Synthetic oligonucleotide
  Target: SCNA; (-) strand; PAM type: YTN; PAM sequence: CTA
cagtactacagaatgctaga

SEQ ID NO: 60242 - DNA, 20 bp, Artificial Sequence
  Description of Artificial Sequence: Synthetic oligonucleotide
  Target: SCNA; (-) strand; PAM type: YTN; PAM sequence: TTA
agtatatcaccctacagtac

SEQ ID NO: 60243 - DNA, 20 bp, Artificial Sequence
  Description of Artificial Sequence: Synthetic oligonucleotide
  Target: SCNA; (-) strand; PAM type: YTN; PAM sequence: TTG
ttaagtatatcaccctacag

SEQ ID NO: 60244 - DNA, 20 bp, Artificial Sequence
  Description of Artificial Sequence: Synthetic oligonucleotide
  Target: SCNA; (-) strand; PAM type: YTN; PAM sequence: CTA
ttgttaagtatatcacccta

SEQ ID NO: 60245 - DNA, 20 bp, Artificial Sequence
  Description of Artificial Sequence: Synthetic oligonucleotide
  Target: SCNA; (-) strand; PAM type: YTN; PAM sequence: TTG
aacatatgcaataaactatt

SEQ ID NO: 60246 - DNA, 20 bp, Artificial Sequence
  Description of Artificial Sequence: Synthetic oligonucleotide
  Target: SCNA; (-) strand; PAM type: YTN; PAM sequence: TTT
gaacatatgcaataaactat

SEQ ID NO: 60247 - DNA, 20 bp, Artificial Sequence
  Description of Artificial Sequence: Synthetic oligonucleotide
  Target: SCNA; (-) strand; PAM type: YTN; PAM sequence: TTT
tgaacatatgcaataaacta

SEQ ID NO: 60248 - DNA, 20 bp, Artificial Sequence
  Description of Artificial Sequence: Synthetic oligonucleotide
  Target: SCNA; (-) strand; PAM type: YTN; PAM sequence: TTT
ttgaacatatgcaataaact

SEQ ID NO: 60249 - DNA, 20 bp, Artificial Sequence
  Description of Artificial Sequence: Synthetic oligonucleotide
  Target: SCNA; (-) strand; PAM type: YTN; PAM sequence: CTA
gatttttgaacatatgcaat

SEQ ID NO: 60250 - DNA, 20 bp, Artificial Sequence
  Description of Artificial Sequence: Synthetic oligonucleotide
  Target: SCNA; (-) strand; PAM type: YTN; PAM sequence: TTC
tagatttttgaacatatgca

SEQ ID NO: 60251 - DNA, 20 bp, Artificial Sequence
  Description of Artificial Sequence: Synthetic oligonucleotide
  Target: SCNA; (-) strand; PAM type: YTN; PAM sequence: CTT
ctagatttttgaacatatgc

SEQ ID NO: 60252 - DNA, 20 bp, Artificial Sequence
  Description of Artificial Sequence: Synthetic oligonucleotide
  Target: SCNA; (-) strand; PAM type: YTN; PAM sequence: CTC
ttctagatttttgaacatat

SEQ ID NO: 60253 - DNA, 20 bp, Artificial Sequence
  Description of Artificial Sequence: Synthetic oligonucleotide
  Target: SCNA; (-) strand; PAM type: YTN; PAM sequence: CTC
tcttctagatttttgaacat

SEQ ID NO: 60254 - DNA, 20 bp, Artificial Sequence
  Description of Artificial Sequence: Synthetic oligonucleotide
  Target: SCNA; (-) strand; PAM type: YTN; PAM sequence: TTC
tctcttctagatttttgaac

SEQ ID NO: 60255 - DNA, 20 bp, Artificial Sequence
  Description of Artificial Sequence: Synthetic oligonucleotide
  Target: SCNA; (-) strand; PAM type: YTN; PAM sequence: TTA
aaaattctctcttctagatt

SEQ ID NO: 60256 - DNA, 20 bp, Artificial Sequence
  Description of Artificial Sequence: Synthetic oligonucleotide
  Target: SCNA; (-) strand; PAM type: YTN; PAM sequence: TTG
tggtgggaacagtaaaaatt

SEQ ID NO: 60257 - DNA, 20 bp, Artificial Sequence
  Description of Artificial Sequence: Synthetic oligonucleotide
  Target: SCNA; (-) strand; PAM type: YTN; PAM sequence: TTT
gtggtgggaacagtaaaaat

SEQ ID NO: 60258 - DNA, 20 bp, Artificial Sequence
  Description of Artificial Sequence: Synthetic oligonucleotide
  Target: SCNA; (-) strand; PAM type: YTN; PAM sequence: CTT
tgtggtgggaacagtaaaaa

SEQ ID NO: 60259 - DNA, 20 bp, Artificial Sequence
  Description of Artificial Sequence: Synthetic oligonucleotide
  Target: SCNA; (-) strand; PAM type: YTN; PAM sequence: TTC
ctttgtggtgggaacagtaa

SEQ ID NO: 60260 - DNA, 20 bp, Artificial Sequence
  Description of Artificial Sequence: Synthetic oligonucleotide
  Target: SCNA; (-) strand; PAM type: YTN; PAM sequence: TTA
tcattcctttgtggtgggaa

SEQ ID NO: 60261 - DNA, 20 bp, Artificial Sequence
  Description of Artificial Sequence: Synthetic oligonucleotide
  Target: SCNA; (-) strand; PAM type: YTN; PAM sequence: TTT
atcattcctttgtggtggga

SEQ ID NO: 60262 - DNA, 20 bp, Artificial Sequence
  Description of Artificial Sequence: Synthetic oligonucleotide
  Target: SCNA; (-) strand; PAM type: YTN; PAM sequence: CTG
aaacatttatcattcctttg

SEQ ID NO: 60263 - DNA, 20 bp, Artificial Sequence
  Description of Artificial Sequence: Synthetic oligonucleotide
  Target: SCNA; (-) strand; PAM type: YTN; PAM sequence: TTA
cctgaaacatttatcattcc

SEQ ID NO: 60264 - DNA, 20 bp, Artificial Sequence
  Description of Artificial Sequence: Synthetic oligonucleotide
  Target: SCNA; (-) strand; PAM type: YTN; PAM sequence: TTA
acatatccattacctgaaac

SEQ ID NO: 60265 - DNA, 20 bp, Artificial Sequence
  Description of Artificial Sequence: Synthetic oligonucleotide
  Target: SCNA; (-) strand; PAM type: YTN; PAM sequence: TTA
gggtaattaacatatccatt

SEQ ID NO: 60266 - DNA, 20 bp, Artificial Sequence
  Description of Artificial Sequence: Synthetic oligonucleotide
  Target: SCNA; (-) strand; PAM type: YTN; PAM sequence: TTC
catacatgtatacaatgtgt

SEQ ID NO: 60267 - DNA, 20 bp, Artificial Sequence
  Description of Artificial Sequence: Synthetic oligonucleotide
  Target: SCNA; (-) strand; PAM type: YTN; PAM sequence: TTT
ccatacatgtatacaatgtg

SEQ ID NO: 60268 - DNA, 20 bp, Artificial Sequence
  Description of Artificial Sequence: Synthetic oligonucleotide
  Target: SCNA; (-) strand; PAM type: YTN; PAM sequence: TTA
tatttccatacatgtataca

SEQ ID NO: 60269 - DNA, 20 bp, Artificial Sequence
  Description of Artificial Sequence: Synthetic oligonucleotide
  Target: SCNA; (-) strand; PAM type: YTN; PAM sequence: TTG
tgggatccagaattatattt

SEQ ID NO: 60270 - DNA, 20 bp, Artificial Sequence
  Description of Artificial Sequence: Synthetic oligonucleotide
  Target: SCNA; (-) strand; PAM type: YTN; PAM sequence: TTG
tatataattgtgggatccag

SEQ ID NO: 60271 - DNA, 20 bp, Artificial Sequence
  Description of Artificial Sequence: Synthetic oligonucleotide
  Target: SCNA; (-) strand; PAM type: YTN; PAM sequence: TTA
gtgaatatgtaataattgta

SEQ ID NO: 60272 - DNA, 20 bp, Artificial Sequence
  Description of Artificial Sequence: Synthetic oligonucleotide
  Target: SCNA; (-) strand; PAM type: YTN; PAM sequence: TTT
agtgaatatgtaataattgt

SEQ ID NO: 60273 - DNA, 20 bp, Artificial Sequence
  Description of Artificial Sequence: Synthetic oligonucleotide
  Target: SCNA; (-) strand; PAM type: YTN; PAM sequence: TTT
tagtgaatatgtaataattg

SEQ ID NO: 60274 - DNA, 20 bp, Artificial Sequence
  Description of Artificial Sequence: Synthetic oligonucleotide
  Target: SCNA; (-) strand; PAM type: YTN; PAM sequence: TTT
ttagtgaatatgtaataatt

SEQ ID NO: 60275 - DNA, 20 bp, Artificial Sequence
  Description of Artificial Sequence: Synthetic oligonucleotide
  Target: SCNA; (-) strand; PAM type: YTN; PAM sequence: TTA
tttttagtgaatatgtaata

SEQ ID NO: 60276 - DNA, 20 bp, Artificial Sequence
  Description of Artificial Sequence: Synthetic oligonucleotide
  Target: SCNA; (-) strand; PAM type: YTN; PAM sequence: TTT
atttttagtgaatatgtaat

SEQ ID NO: 60277 - DNA, 20 bp, Artificial Sequence
  Description of Artificial Sequence: Synthetic oligonucleotide
  Target: SCNA; (-) strand; PAM type: YTN; PAM sequence: TTT
tatttttagtgaatatgtaa

SEQ ID NO: 60278 - DNA, 20 bp, Artificial Sequence
  Description of Artificial Sequence: Synthetic oligonucleotide
  Target: SCNA; (-) strand; PAM type: YTN; PAM sequence: CTT
ttatttttagtgaatatgta

SEQ ID NO: 60279 - DNA, 20 bp, Artificial Sequence
  Description of Artificial Sequence: Synthetic oligonucleotide
  Target: SCNA; (-) strand; PAM type: YTN; PAM sequence: TTC
ttttatttttagtgaatatg

SEQ ID NO: 60280 - DNA, 20 bp, Artificial Sequence
  Description of Artificial Sequence: Synthetic oligonucleotide
  Target: SCNA; (-) strand; PAM type: YTN; PAM sequence: TTT
cttttatttttagtgaatat

SEQ ID NO: 60281 - DNA, 20 bp, Artificial Sequence
  Description of Artificial Sequence: Synthetic oligonucleotide
  Target: SCNA; (-) strand; PAM type: YTN; PAM sequence: TTT
tcttttatttttagtgaata

SEQ ID NO: 60282 - DNA, 20 bp, Artificial Sequence
  Description of Artificial Sequence: Synthetic oligonucleotide
  Target: SCNA; (-) strand; PAM type: YTN; PAM sequence: TTT
ttcttttatttttagtgaat

SEQ ID NO: 60283 - DNA, 20 bp, Artificial Sequence
  Description of Artificial Sequence: Synthetic oligonucleotide
  Target: SCNA; (-) strand; PAM type: YTN; PAM sequence: TTA
atttttcttttatttttagt

SEQ ID NO: 60284 - DNA, 20 bp, Artificial Sequence
  Description of Artificial Sequence: Synthetic oligonucleotide
  Target: SCNA; (-) strand; PAM type: YTN; PAM sequence: TTT
aatttttcttttatttttag

SEQ ID NO: 60285 - DNA, 20 bp, Artificial Sequence
  Description of Artificial Sequence: Synthetic oligonucleotide
  Target: SCNA; (-) strand; PAM type: YTN; PAM sequence: TTT
taatttttcttttattttta

SEQ ID NO: 60286 - DNA, 20 bp, Artificial Sequence
  Description of Artificial Sequence: Synthetic oligonucleotide
  Target: SCNA; (-) strand; PAM type: YTN; PAM sequence: TTT
ttaatttttcttttattttt

SEQ ID NO: 60287 - DNA, 20 bp, Artificial Sequence
  Description of Artificial Sequence: Synthetic oligonucleotide
  Target: SCNA; (-) strand; PAM type: YTN; PAM sequence: CTA
tttttaatttttcttttatt

SEQ ID NO: 60288 - DNA, 20 bp, Artificial Sequence
  Description of Artificial Sequence: Synthetic oligonucleotide
  Target: SCNA; (-) strand; PAM type: YTN; PAM sequence: CTC
tatttttaatttttctttta

SEQ ID NO: 60289 - DNA, 20 bp, Artificial Sequence
  Description of Artificial Sequence: Synthetic oligonucleotide
  Target: SCNA; (-) strand; PAM type: YTN; PAM sequence: CTA
ctctatttttaatttttctt

SEQ ID NO: 60290 - DNA, 20 bp, Artificial Sequence
  Description of Artificial Sequence: Synthetic oligonucleotide
  Target: SCNA; (-) strand; PAM type: YTN; PAM sequence: CTG
ggtcatatgctactctattt

SEQ ID NO: 60291 - DNA, 20 bp, Artificial Sequence
  Description of Artificial Sequence: Synthetic oligonucleotide
  Target: SCNA; (-) strand; PAM type: YTN; PAM sequence: TTG
ctgggtcatatgctactcta

SEQ ID NO: 60292 - DNA, 20 bp, Artificial Sequence
  Description of Artificial Sequence: Synthetic oligonucleotide
  Target: SCNA; (-) strand; PAM type: YTN; PAM sequence: CTA
cacccagaagagggattgct

SEQ ID NO: 60293 - DNA, 20 bp, Artificial Sequence
  Description of Artificial Sequence: Synthetic oligonucleotide
  Target: SCNA; (-) strand; PAM type: YTN; PAM sequence: TTG
tggatctacacccagaagag

SEQ ID NO: 60294 - DNA, 20 bp, Artificial Sequence
  Description of Artificial Sequence: Synthetic oligonucleotide
  Target: SCNA; (-) strand; PAM type: YTN; PAM sequence: CTT
gtggatctacacccagaaga

SEQ ID NO: 60295 - DNA, 20 bp, Artificial Sequence
  Description of Artificial Sequence: Synthetic oligonucleotide
  Target: SCNA; (-) strand; PAM type: YTN; PAM sequence: TTC
ttgtggatctacacccagaa

SEQ ID NO: 60296 - DNA, 20 bp, Artificial Sequence
  Description of Artificial Sequence: Synthetic oligonucleotide
  Target: SCNA; (-) strand; PAM type: YTN; PAM sequence: TTT
cttgtggatctacacccaga

SEQ ID NO: 60297 - DNA, 20 bp, Artificial Sequence
  Description of Artificial Sequence: Synthetic oligonucleotide
  Target: SCNA; (-) strand; PAM type: YTN; PAM sequence: TTT
tcttgtggatctacacccag

SEQ ID NO: 60298 - DNA, 20 bp, Artificial Sequence
  Description of Artificial Sequence: Synthetic oligonucleotide
  Target: SCNA; (-) strand; PAM type: YTN; PAM sequence: CTT
ttcttgtggatctacaccca

SEQ ID NO: 60299 - DNA, 20 bp, Artificial Sequence
  Description of Artificial Sequence: Synthetic oligonucleotide
  Target: SCNA; (-) strand; PAM type: YTN; PAM sequence: CTG
aaatcttttcttgtggatct

SEQ ID NO: 60300 - DNA, 20 bp, Artificial Sequence
  Description of Artificial Sequence: Synthetic oligonucleotide
  Target: SCNA; (-) strand; PAM type: YTN; PAM sequence: TTG
gaaacagatatgctgaaatc

SEQ ID NO: 60301 - DNA, 20 bp, Artificial Sequence
  Description of Artificial Sequence: Synthetic oligonucleotide
  Target: SCNA; (-) strand; PAM type: YTN; PAM sequence: CTT
ggaaacagatatgctgaaat

SEQ ID NO: 60302 - DNA, 20 bp, Artificial Sequence
  Description of Artificial Sequence: Synthetic oligonucleotide
  Target: SCNA; (-) strand; PAM type: YTN; PAM sequence: TTG
gggcccttggaaacagatat

SEQ ID NO: 60303 - DNA, 20 bp, Artificial Sequence
  Description of Artificial Sequence: Synthetic oligonucleotide
  Target: SCNA; (-) strand; PAM type: YTN; PAM sequence: CTG
tgttggggcccttggaaaca

SEQ ID NO: 60304 - DNA, 20 bp, Artificial Sequence
  Description of Artificial Sequence: Synthetic oligonucleotide
  Target: SCNA; (-) strand; PAM type: YTN; PAM sequence: TTC
caagcaagagccactgtgtt

SEQ ID NO: 60305 - DNA, 20 bp, Artificial Sequence
  Description of Artificial Sequence: Synthetic oligonucleotide
  Target: SCNA; (-) strand; PAM type: YTN; PAM sequence: CTG
ggattccaagcaagagccac

SEQ ID NO: 60306 - DNA, 20 bp, Artificial Sequence
  Description of Artificial Sequence: Synthetic oligonucleotide
  Target: SCNA; (-) strand; PAM type: YTN; PAM sequence: CTC
ccaaagcactgggattccaa

SEQ ID NO: 60307 - DNA, 20 bp, Artificial Sequence
  Description of Artificial Sequence: Synthetic oligonucleotide
  Target: SCNA; (-) strand; PAM type: YTN; PAM sequence: CTC
agcctcccaaagcactggga

SEQ ID NO: 60308 - DNA, 20 bp, Artificial Sequence
  Description of Artificial Sequence: Synthetic oligonucleotide
  Target: SCNA; (-) strand; PAM type: YTN; PAM sequence: CTG
cctcagcctcccaaagcact

SEQ ID NO: 60309 - DNA, 20 bp, Artificial Sequence
  Description of Artificial Sequence: Synthetic oligonucleotide
  Target: SCNA; (-) strand; PAM type: YTN; PAM sequence: TTC
ctgcctcagcctcccaaagc

SEQ ID NO: 60310 - DNA, 20 bp, Artificial Sequence
  Description of Artificial Sequence: Synthetic oligonucleotide
  Target: SCNA; (-) strand; PAM type: YTN; PAM sequence: CTT
cctgcctcagcctcccaaag

SEQ ID NO: 60311 - DNA, 20 bp, Artificial Sequence
  Description of Artificial Sequence: Synthetic oligonucleotide
  Target: SCNA; (-) strand; PAM type: YTN; PAM sequence: TTA
taagtgatcttcctgcctca

SEQ ID NO: 60312 - DNA, 20 bp, Artificial Sequence
  Description of Artificial Sequence: Synthetic oligonucleotide
  Target: SCNA; (-) strand; PAM type: YTN; PAM sequence: TTA
tatagttataagtgatcttc

SEQ ID NO: 60313 - DNA, 20 bp, Artificial Sequence
  Description of Artificial Sequence: Synthetic oligonucleotide
  Target: SCNA; (-) strand; PAM type: YTN; PAM sequence: CTT
atatagttataagtgatctt

SEQ ID NO: 60314 - DNA, 20 bp, Artificial Sequence
  Description of Artificial Sequence: Synthetic oligonucleotide
  Target: SCNA; (-) strand; PAM type: YTN; PAM sequence: TTC
cttatatagttataagtgat

SEQ ID NO: 60315 - DNA, 20 bp, Artificial Sequence
  Description of Artificial Sequence: Synthetic oligonucleotide
  Target: SCNA; (-) strand; PAM type: YTN; PAM sequence: TTA
aaattccttatatagttata

SEQ ID NO: 60316 - DNA, 20 bp, Artificial Sequence
  Description of Artificial Sequence: Synthetic oligonucleotide
  Target: SCNA; (-) strand; PAM type: YTN; PAM sequence: TTT
aaaattccttatatagttat

SEQ ID NO: 60317 - DNA, 20 bp, Artificial Sequence
  Description of Artificial Sequence: Synthetic oligonucleotide
  Target: SCNA; (-) strand; PAM type: YTN; PAM sequence: TTT
taaaattccttatatagtta

SEQ ID NO: 60318 - DNA, 20 bp, Artificial Sequence
  Description of Artificial Sequence: Synthetic oligonucleotide
  Target: SCNA; (-) strand; PAM type: YTN; PAM sequence: TTT
ttaaaattccttatatagtt

SEQ ID NO: 60319 - DNA, 20 bp, Artificial Sequence
  Description of Artificial Sequence: Synthetic oligonucleotide
  Target: SCNA; (-) strand; PAM type: YTN; PAM sequence: TTA
gtgtttttaaaattccttat

SEQ ID NO: 60320 - DNA, 20 bp, Artificial Sequence
  Description of Artificial Sequence: Synthetic oligonucleotide
  Target: SCNA; (-) strand; PAM type: YTN; PAM sequence: TTT
agtgtttttaaaattcctta

SEQ ID NO: 60321 - DNA, 20 bp, Artificial Sequence
  Description of Artificial Sequence: Synthetic oligonucleotide
  Target: SCNA; (-) strand; PAM type: YTN; PAM sequence: TTT
tagtgtttttaaaattcctt

SEQ ID NO: 60322 - DNA, 20 bp, Artificial Sequence
  Description of Artificial Sequence: Synthetic oligonucleotide
  Target: SCNA; (-) strand; PAM type: YTN; PAM sequence: TTA
gttttagtgtttttaaaatt

SEQ ID NO: 60323 - DNA, 20 bp, Artificial Sequence
  Description of Artificial Sequence: Synthetic oligonucleotide
  Target: SCNA; (-) strand; PAM type: YTN; PAM sequence: CTA
aataaataaatattagtttt

SEQ ID NO: 60324 - DNA, 20 bp, Artificial Sequence
  Description of Artificial Sequence: Synthetic oligonucleotide
  Target: SCNA; (-) strand; PAM type: YTN; PAM sequence: TTG
ctaaataaataaatattagt

SEQ ID NO: 60325 - DNA, 20 bp, Artificial Sequence
  Description of Artificial Sequence: Synthetic oligonucleotide
  Target: SCNA; (-) strand; PAM type: YTN; PAM sequence: TTT
gctaaataaataaatattag

SEQ ID NO: 60326 - DNA, 20 bp, Artificial Sequence
  Description of Artificial Sequence: Synthetic oligonucleotide
  Target: SCNA; (-) strand; PAM type: YTN; PAM sequence: CTG
gtttgctaaataaataaata

SEQ ID NO: 60327 - DNA, 20 bp, Artificial Sequence
  Description of Artificial Sequence: Synthetic oligonucleotide
  Target: SCNA; (-) strand; PAM type: YTN; PAM sequence: TTC
tggtttgctaaataaataaa

SEQ ID NO: 60328 - DNA, 20 bp, Artificial Sequence
  Description of Artificial Sequence: Synthetic oligonucleotide
  Target: SCNA; (-) strand; PAM type: YTN; PAM sequence: TTA
aattctggtttgctaaataa

SEQ ID NO: 60329 - DNA, 20 bp, Artificial Sequence
  Description of Artificial Sequence: Synthetic oligonucleotide
  Target: SCNA; (-) strand; PAM type: YTN; PAM sequence: TTT
aaattctggtttgctaaata

SEQ ID NO: 60330 - DNA, 20 bp, Artificial Sequence
  Description of Artificial Sequence: Synthetic oligonucleotide
  Target: SCNA; (-) strand; PAM type: YTN; PAM sequence: TTT
taaattctggtttgctaaat

SEQ ID NO: 60331 - DNA, 20 bp, Artificial Sequence
  Description of Artificial Sequence: Synthetic oligonucleotide
  Target: SCNA; (-) strand; PAM type: YTN; PAM sequence: CTA
atgttttaaattctggtttg

SEQ ID NO: 60332 - DNA, 20 bp, Artificial Sequence
  Description of Artificial Sequence: Synthetic oligonucleotide
  Target: SCNA; (-) strand; PAM type: YTN; PAM sequence: TTC
taatgttttaaattctggtt

SEQ ID NO: 60333 - DNA, 20 bp, Artificial Sequence
  Description of Artificial Sequence: Synthetic oligonucleotide
  Target: SCNA; (-) strand; PAM type: YTN; PAM sequence: TTT
ctaatgttttaaattctggt

SEQ ID NO: 60334 - DNA, 20 bp, Artificial Sequence
  Description of Artificial Sequence: Synthetic oligonucleotide
  Target: SCNA; (-) strand; PAM type: YTN; PAM sequence: TTA
atttctaatgttttaaattc

SEQ ID NO: 60335 - DNA, 20 bp, Artificial Sequence
  Description of Artificial Sequence: Synthetic oligonucleotide
  Target: SCNA; (-) strand; PAM type: YTN; PAM sequence: TTT
aatttctaatgttttaaatt

SEQ ID NO: 60336 - DNA, 20 bp, Artificial Sequence
  Description of Artificial Sequence: Synthetic oligonucleotide
  Target: SCNA; (-) strand; PAM type: YTN; PAM sequence: CTT
taatttctaatgttttaaat

SEQ ID NO: 60337 - DNA, 20 bp, Artificial Sequence
  Description of Artificial Sequence: Synthetic oligonucleotide
  Target: SCNA; (-) strand; PAM type: YTN; PAM sequence: TTA
caaagaaataaaacacttta

SEQ ID NO: 60338 - DNA, 20 bp, Artificial Sequence
  Description of Artificial Sequence: Synthetic oligonucleotide
  Target: SCNA; (-) strand; PAM type: YTN; PAM sequence: TTT
acaaagaaataaaacacttt

SEQ ID NO: 60339 - DNA, 20 bp, Artificial Sequence
  Description of Artificial Sequence: Synthetic oligonucleotide
  Target: SCNA; (-) strand; PAM type: YTN; PAM sequence: TTT
tacaaagaaataaaacactt

SEQ ID NO: 60340 - DNA, 20 bp, Artificial Sequence
  Description of Artificial Sequence: Synthetic oligonucleotide
  Target: SCNA; (-) strand; PAM type: YTN; PAM sequence: TTT
ttacaaagaaataaaacact

SEQ ID NO: 60341 - DNA, 20 bp, Artificial Sequence
  Description of Artificial Sequence: Synthetic oligonucleotide
  Target: SCNA; (-) strand; PAM type: YTN; PAM sequence: TTT
tttacaaagaaataaaacac

SEQ ID NO: 60342 - DNA, 20 bp, Artificial Sequence
  Description of Artificial Sequence: Synthetic oligonucleotide
  Target: SCNA; (-) strand; PAM type: YTN; PAM sequence: TTG
ataagttttttacaaagaaa

SEQ ID NO: 60343 - DNA, 20 bp, Artificial Sequence
  Description of Artificial Sequence: Synthetic oligonucleotide
  Target: SCNA; (-) strand; PAM type: YTN; PAM sequence: CTT
gataagttttttacaaagaa

SEQ ID NO: 60344 - DNA, 20 bp, Artificial Sequence
  Description of Artificial Sequence: Synthetic oligonucleotide
  Target: SCNA; (-) strand; PAM type: YTN; PAM sequence: CTC
ttgataagttttttacaaag

SEQ ID NO: 60345 - DNA, 20 bp, Artificial Sequence
  Description of Artificial Sequence: Synthetic oligonucleotide
  Target: SCNA; (-) strand; PAM type: YTN; PAM sequence: TTA
ctcttgataagttttttaca

SEQ ID NO: 60346 - DNA, 20 bp, Artificial Sequence
  Description of Artificial Sequence: Synthetic oligonucleotide
  Target: SCNA; (-) strand; PAM type: YTN; PAM sequence: TTA
cattactcttgataagtttt

SEQ ID NO: 60347 - DNA, 20 bp, Artificial Sequence
  Description of Artificial Sequence: Synthetic oligonucleotide
  Target: SCNA; (-) strand; PAM type: YTN; PAM sequence: TTT
acattactcttgataagttt

SEQ ID NO: 60348 - DNA, 20 bp, Artificial Sequence
  Description of Artificial Sequence: Synthetic oligonucleotide
  Target: SCNA; (-) strand; PAM type: YTN; PAM sequence: CTA
tttacattactcttgataag

SEQ ID NO: 60349 - DNA, 20 bp, Artificial Sequence
  Description of Artificial Sequence: Synthetic oligonucleotide
  Target: SCNA; (-) strand; PAM type: YTN; PAM sequence: TTA
tacaatgagaagaagacaaa

SEQ ID NO: 60350 - DNA, 20 bp, Artificial Sequence
  Description of Artificial Sequence: Synthetic oligonucleotide
  Target: SCNA; (-) strand; PAM type: YTN; PAM sequence: CTC
cgtataggaagttatacaat

SEQ ID NO: 60351 - DNA, 20 bp, Artificial Sequence
  Description of Artificial Sequence: Synthetic oligonucleotide
  Target: SCNA; (-) strand; PAM type: YTN; PAM sequence: CTG
taaaatataaaaaacatgtc

SEQ ID NO: 60352 - DNA, 20 bp, Artificial Sequence
  Description of Artificial Sequence: Synthetic oligonucleotide
  Target: SCNA; (-) strand; PAM type: YTN; PAM sequence: TTC
tgtaaaatataaaaaacatg

SEQ ID NO: 60353 - DNA, 20 bp, Artificial Sequence
  Description of Artificial Sequence: Synthetic oligonucleotide
  Target: SCNA; (-) strand; PAM type: YTN; PAM sequence: TTA
gaatagagtatgacaattct

SEQ ID NO: 60354 - DNA, 20 bp, Artificial Sequence
  Description of Artificial Sequence: Synthetic oligonucleotide
  Target: SCNA; (-) strand; PAM type: YTN; PAM sequence: TTT
agaatagagtatgacaattc

SEQ ID NO: 60355 - DNA, 20 bp, Artificial Sequence
  Description of Artificial Sequence: Synthetic oligonucleotide
  Target: SCNA; (-) strand; PAM type: YTN; PAM sequence: TTC
aaatttagaatagagtatga

SEQ ID NO: 60356 - DNA, 20 bp, Artificial Sequence
  Description of Artificial Sequence: Synthetic oligonucleotide
  Target: SCNA; (-) strand; PAM type: YTN; PAM sequence: CTA
attcaaatttagaatagagt

SEQ ID NO: 60357 - DNA, 20 bp, Artificial Sequence
  Description of Artificial Sequence: Synthetic oligonucleotide
  Target: SCNA; (-) strand; PAM type: YTN; PAM sequence: CTC
ctaattcaaatttagaatag

SEQ ID NO: 60358 - DNA, 20 bp, Artificial Sequence
  Description of Artificial Sequence: Synthetic oligonucleotide
  Target: SCNA; (-) strand; PAM type: YTN; PAM sequence: CTC
aaactcctaattcaaattta

SEQ ID NO: 60359 - DNA, 20 bp, Artificial Sequence
  Description of Artificial Sequence: Synthetic oligonucleotide
  Target: SCNA; (-) strand; PAM type: YTN; PAM sequence: CTG
gtctcaaactcctaattcaa

SEQ ID NO: 60360 - DNA, 20 bp, Artificial Sequence
  Description of Artificial Sequence: Synthetic oligonucleotide
  Target: SCNA; (-) strand; PAM type: YTN; PAM sequence: TTG
cccagactggtctcaaactc

SEQ ID NO: 60361 - DNA, 20 bp, Artificial Sequence
  Description of Artificial Sequence: Synthetic oligonucleotide
  Target: SCNA; (-) strand; PAM type: YTN; PAM sequence: CTG
ttgcccagactggtctcaaa

SEQ ID NO: 60362 - DNA, 20 bp, Artificial Sequence
  Description of Artificial Sequence: Synthetic oligonucleotide
  Target: SCNA; (-) strand; PAM type: YTN; PAM sequence: CTC
tgttgcccagactggtctca

SEQ ID NO: 60363 - DNA, 20 bp, Artificial Sequence
  Description of Artificial Sequence: Synthetic oligonucleotide
  Target: SCNA; (-) strand; PAM type: YTN; PAM sequence: CTC
actctgttgcccagactggt

SEQ ID NO: 60364 - DNA, 20 bp, Artificial Sequence
  Description of Artificial Sequence: Synthetic oligonucleotide
  Target: SCNA; (-) strand; PAM type: YTN; PAM sequence: TTG
tagatatagcatctcactct

SEQ ID NO: 60365 - DNA, 20 bp, Artificial Sequence
  Description of Artificial Sequence: Synthetic oligonucleotide
  Target: SCNA; (-) strand; PAM type: YTN; PAM sequence: TTT
gtagatatagcatctcactc

SEQ ID NO: 60366 - DNA, 20 bp, Artificial Sequence
  Description of Artificial Sequence: Synthetic oligonucleotide
  Target: SCNA; (-) strand; PAM type: YTN; PAM sequence: TTT
tgtagatatagcatctcact

SEQ ID NO: 60367 - DNA, 20 bp, Artificial Sequence
  Description of Artificial Sequence: Synthetic oligonucleotide
  Target: SCNA; (-) strand; PAM type: YTN; PAM sequence: TTT
ttgtagatatagcatctcac

SEQ ID NO: 60368 - DNA, 20 bp, Artificial Sequence
  Description of Artificial Sequence: Synthetic oligonucleotide
  Target: SCNA; (-) strand; PAM type: YTN; PAM sequence: TTT
tttgtagatatagcatctca

SEQ ID NO: 60369 - DNA, 20 bp, Artificial Sequence
  Description of Artificial Sequence: Synthetic oligonucleotide
  Target: SCNA; (-) strand; PAM type: YTN; PAM sequence: TTA
atattttttgtagatatagc

SEQ ID NO: 60370 - DNA, 20 bp, Artificial Sequence
  Description of Artificial Sequence: Synthetic oligonucleotide
  Target: SCNA; (-) strand; PAM type: YTN; PAM sequence: TTT
aatattttttgtagatatag

SEQ ID NO: 60371 - DNA, 20 bp, Artificial Sequence
  Description of Artificial Sequence: Synthetic oligonucleotide
  Target: SCNA; (-) strand; PAM type: YTN; PAM sequence: TTT
taatattttttgtagatata

SEQ ID NO: 60372 - DNA, 20 bp, Artificial Sequence
  Description of Artificial Sequence: Synthetic oligonucleotide
  Target: SCNA; (-) strand; PAM type: YTN; PAM sequence: TTT
ttaatattttttgtagatat

SEQ ID NO: 60373 - DNA, 20 bp, Artificial Sequence
  Description of Artificial Sequence: Synthetic oligonucleotide
  Target: SCNA; (-) strand; PAM type: YTN; PAM sequence: CTA
atttttaatattttttgtag

SEQ ID NO: 60374 - DNA, 20 bp, Artificial Sequence
  Description of Artificial Sequence: Synthetic oligonucleotide
  Target: SCNA; (-) strand; PAM type: YTN; PAM sequence: CTG
gctaatttttaatatttttt

SEQ ID NO: 60375 - DNA, 20 bp, Artificial Sequence
  Description of Artificial Sequence: Synthetic oligonucleotide
  Target: SCNA; (-) strand; PAM type: YTN; PAM sequence: TTA
ccatgcctggctaattttta

SEQ ID NO: 60376 - DNA, 20 bp, Artificial Sequence
  Description of Artificial Sequence: Synthetic oligonucleotide
  Target: SCNA; (-) strand; PAM type: YTN; PAM sequence: CTA
caggcatacattaccatgcc

SEQ ID NO: 60377 - DNA, 20 bp, Artificial Sequence
  Description of Artificial Sequence: Synthetic oligonucleotide
  Target: SCNA; (-) strand; PAM type: YTN; PAM sequence: CTG
agactacaggcatacattac

SEQ ID NO: 60378 - DNA, 20 bp, Artificial Sequence
  Description of Artificial Sequence: Synthetic oligonucleotide
  Target: SCNA; (-) strand; PAM type: YTN; PAM sequence: CTC
ccaagtagctgagactacag

SEQ ID NO: 60379 - DNA, 20 bp, Artificial Sequence
  Description of Artificial Sequence: Synthetic oligonucleotide
  Target: SCNA; (-) strand; PAM type: YTN; PAM sequence: TTG
gcctcccaagtagctgagac

SEQ ID NO: 60380 - DNA, 20 bp, Artificial Sequence
  Description of Artificial Sequence: Synthetic oligonucleotide
  Target: SCNA; (-) strand; PAM type: YTN; PAM sequence: CTT
ggcctcccaagtagctgaga

SEQ ID NO: 60381 - DNA, 20 bp, Artificial Sequence
  Description of Artificial Sequence: Synthetic oligonucleotide
  Target: SCNA; (-) strand; PAM type: YTN; PAM sequence: CTG
ccttggcctcccaagtagct

SEQ ID NO: 60382 - DNA, 20 bp, Artificial Sequence
  Description of Artificial Sequence: Synthetic oligonucleotide
  Target: SCNA; (-) strand; PAM type: YTN; PAM sequence: CTC
ctgccttggcctcccaagta

SEQ ID NO: 60383 - DNA, 20 bp, Artificial Sequence
  Description of Artificial Sequence: Synthetic oligonucleotide
  Target: SCNA; (-) strand; PAM type: YTN; PAM sequence: CTC
aagagatcctcctgccttgg

SEQ ID NO: 60384 - DNA, 20 bp, Artificial Sequence
  Description of Artificial Sequence: Synthetic oligonucleotide
  Target: SCNA; (-) strand; PAM type: YTN; PAM sequence: CTG
ggctcaagagatcctcctgc

SEQ ID NO: 60385 - DNA, 20 bp, Artificial Sequence
  Description of Artificial Sequence: Synthetic oligonucleotide
  Target: SCNA; (-) strand; PAM type: YTN; PAM sequence: TTC
tgggctcaagagatcctcct

SEQ ID NO: 60386 - DNA, 20 bp, Artificial Sequence
  Description of Artificial Sequence: Synthetic oligonucleotide
  Target: SCNA; (-) strand; PAM type: YTN; PAM sequence: CTT
ctgggctcaagagatcctcc

SEQ ID NO: 60387 - DNA, 20 bp, Artificial Sequence
  Description of Artificial Sequence: Synthetic oligonucleotide
  Target: SCNA; (-) strand; PAM type: YTN; PAM sequence: CTC
aaacttctgggctcaagaga

SEQ ID NO: 60388 - DNA, 20 bp, Artificial Sequence
  Description of Artificial Sequence: Synthetic oligonucleotide
  Target: SCNA; (-) strand; PAM type: YTN; PAM sequence: CTG
taacctcaaacttctgggct

SEQ ID NO: 60389 - DNA, 20 bp, Artificial Sequence
  Description of Artificial Sequence: Synthetic oligonucleotide
  Target: SCNA; (-) strand; PAM type: YTN; PAM sequence: CTC
actgtaacctcaaacttctg

SEQ ID NO: 60390 - DNA, 20 bp, Artificial Sequence
  Description of Artificial Sequence: Synthetic oligonucleotide
  Target: SCNA; (-) strand; PAM type: YTN; PAM sequence: TTA
tcatagctcactgtaacctc

SEQ ID NO: 60391 - DNA, 20 bp, Artificial Sequence
  Description of Artificial Sequence: Synthetic oligonucleotide
  Target: SCNA; (-) strand; PAM type: YTN; PAM sequence: CTG
caatggagtggtgttatcat

SEQ ID NO: 60392 - DNA, 20 bp, Artificial Sequence
  Description of Artificial Sequence: Synthetic oligonucleotide
  Target: SCNA; (-) strand; PAM type: YTN; PAM sequence: CTG
tcacccaggctgcaatggag

SEQ ID NO: 60393 - DNA, 20 bp, Artificial Sequence
  Description of Artificial Sequence: Synthetic oligonucleotide
  Target: SCNA; (-) strand; PAM type: YTN; PAM sequence: TTG
ctgtcacccaggctgcaatg

SEQ ID NO: 60394 - DNA, 20 bp, Artificial Sequence
  Description of Artificial Sequence: Synthetic oligonucleotide
  Target: SCNA; (-) strand; PAM type: YTN; PAM sequence: CTT
gctgtcacccaggctgcaat

SEQ ID NO: 60395 - DNA, 20 bp, Artificial Sequence
  Description of Artificial Sequence: Synthetic oligonucleotide
  Target: SCNA; (-) strand; PAM type: YTN; PAM sequence: TTG
gagacagggtcttgctgtca

SEQ ID NO: 60396 - DNA, 20 bp, Artificial Sequence
  Description of Artificial Sequence: Synthetic oligonucleotide
  Target: SCNA; (-) strand; PAM type: YTN; PAM sequence: TTT
ggagacagggtcttgctgtc

SEQ ID NO: 60397 - DNA, 20 bp, Artificial Sequence
  Description of Artificial Sequence: Synthetic oligonucleotide
  Target: SCNA; (-) strand; PAM type: YTN; PAM sequence: TTT
tggagacagggtcttgctgt

SEQ ID NO: 60398 - DNA, 20 bp, Artificial Sequence
  Description of Artificial Sequence: Synthetic oligonucleotide
  Target: SCNA; (-) strand; PAM type: YTN; PAM sequence: TTT
ttggagacagggtcttgctg

SEQ ID NO: 60399 - DNA, 20 bp, Artificial Sequence
  Description of Artificial Sequence: Synthetic oligonucleotide
  Target: SCNA; (-) strand; PAM type: YTN; PAM sequence: TTT
tttggagacagggtcttgct

SEQ ID NO: 60400 - DNA, 20 bp, Artificial Sequence
  Description of Artificial Sequence: Synthetic oligonucleotide
  Target: SCNA; (-) strand; PAM type: YTN; PAM sequence: CTT
ttttggagacagggtcttgc

SEQ ID NO: 60401 - DNA, 20 bp, Artificial Sequence
  Description of Artificial Sequence: Synthetic oligonucleotide
  Target: SCNA; (-) strand; PAM type: YTN; PAM sequence: TTC
ttttttggagacagggtctt

SEQ ID NO: 60402 - DNA, 20 bp, Artificial Sequence
  Description of Artificial Sequence: Synthetic oligonucleotide
  Target: SCNA; (-) strand; PAM type: YTN; PAM sequence: TTT
cttttttggagacagggtct

SEQ ID NO: 60403 - DNA, 20 bp, Artificial Sequence
  Description of Artificial Sequence: Synthetic oligonucleotide
  Target: SCNA; (-) strand; PAM type: YTN; PAM sequence: TTT
tcttttttggagacagggtc

SEQ ID NO: 60404 - DNA, 20 bp, Artificial Sequence
  Description of Artificial Sequence: Synthetic oligonucleotide
  Target: SCNA; (-) strand; PAM type: YTN; PAM sequence: TTT
ttcttttttggagacagggt

SEQ ID NO: 60405 - DNA, 20 bp, Artificial Sequence
  Description of Artificial Sequence: Synthetic oligonucleotide
  Target: SCNA; (-) strand; PAM type: YTN; PAM sequence: TTT
tttcttttttggagacaggg

SEQ ID NO: 60406 - DNA, 20 bp, Artificial Sequence
  Description of Artificial Sequence: Synthetic oligonucleotide
  Target: SCNA; (-) strand; PAM type: YTN; PAM sequence: TTT
ttttcttttttggagacagg

SEQ ID NO: 60407 - DNA, 20 bp, Artificial Sequence
  Description of Artificial Sequence: Synthetic oligonucleotide
  Target: SCNA; (-) strand; PAM type: YTN; PAM sequence: CTT
tttttcttttttggagacag

SEQ ID NO: 60408 - DNA, 20 bp, Artificial Sequence
  Description of Artificial Sequence: Synthetic oligonucleotide
  Target: SCNA; (-) strand; PAM type: YTN; PAM sequence: TTC
tttttttcttttttggagac

SEQ ID NO: 60409 - DNA, 20 bp, Artificial Sequence
  Description of Artificial Sequence: Synthetic oligonucleotide
  Target: SCNA; (-) strand; PAM type: YTN; PAM sequence: TTT
ctttttttcttttttggaga

SEQ ID NO: 60410 - DNA, 20 bp, Artificial Sequence
  Description of Artificial Sequence: Synthetic oligonucleotide
  Target: SCNA; (-) strand; PAM type: YTN; PAM sequence: TTT
tctttttttcttttttggag

SEQ ID NO: 60411 - DNA, 20 bp, Artificial Sequence
  Description of Artificial Sequence: Synthetic oligonucleotide
  Target: SCNA; (-) strand; PAM type: YTN; PAM sequence: TTT
ttctttttttcttttttgga

SEQ ID NO: 60412 - DNA, 20 bp, Artificial Sequence
  Description of Artificial Sequence: Synthetic oligonucleotide
  Target: SCNA; (-) strand; PAM type: YTN; PAM sequence: TTA
tgtttttctttttttctttt

SEQ ID NO: 60413 - DNA, 20 bp, Artificial Sequence
  Description of Artificial Sequence: Synthetic oligonucleotide
  Target: SCNA; (-) strand; PAM type: YTN; PAM sequence: CTA
ttatgtttttctttttttct

SEQ ID NO: 60414 - DNA, 20 bp, Artificial Sequence
  Description of Artificial Sequence: Synthetic oligonucleotide
  Target: SCNA; (-) strand; PAM type: YTN; PAM sequence: TTG
tggctattatgtttttcttt

SEQ ID NO: 60415 - DNA, 20 bp, Artificial Sequence
  Description of Artificial Sequence: Synthetic oligonucleotide
  Target: SCNA; (-) strand; PAM type: YTN; PAM sequence: TTA
gttgtggctattatgttttt

SEQ ID NO: 60416 - DNA, 20 bp, Artificial Sequence
  Description of Artificial Sequence: Synthetic oligonucleotide
  Target: SCNA; (-) strand; PAM type: YTN; PAM sequence: TTT
agttgtggctattatgtttt

SEQ ID NO: 60417 - DNA, 20 bp, Artificial Sequence
  Description of Artificial Sequence: Synthetic oligonucleotide
  Target: SCNA; (-) strand; PAM type: YTN; PAM sequence: CTT
tagttgtggctattatgttt

SEQ ID NO: 60418 - DNA, 20 bp, Artificial Sequence
  Description of Artificial Sequence: Synthetic oligonucleotide
  Target: SCNA; (-) strand; PAM type: YTN; PAM sequence: CTA
tcagtagacactttagttgt

SEQ ID NO: 60419 - DNA, 20 bp, Artificial Sequence
  Description of Artificial Sequence: Synthetic oligonucleotide
  Target: SCNA; (-) strand; PAM type: YTN; PAM sequence: CTA
tctatcagtagacactttag

SEQ ID NO: 60420 - DNA, 20 bp, Artificial Sequence
  Description of Artificial Sequence: Synthetic oligonucleotide
  Target: SCNA; (-) strand; PAM type: YTN; PAM sequence: CTA
cctatctatcagtagacact

SEQ ID NO: 60421 - DNA, 20 bp, Artificial Sequence
  Description of Artificial Sequence: Synthetic oligonucleotide
  Target: SCNA; (-) strand; PAM type: YTN; PAM sequence: TTA
tctacctatctatcagtaga

SEQ ID NO: 60422 - DNA, 20 bp, Artificial Sequence
  Description of Artificial Sequence: Synthetic oligonucleotide
  Target: SCNA; (-) strand; PAM type: YTN; PAM sequence: TTT
atctacctatctatcagtag

SEQ ID NO: 60423 - DNA, 20 bp, Artificial Sequence
  Description of Artificial Sequence: Synthetic oligonucleotide
  Target: SCNA; (-) strand; PAM type: YTN; PAM sequence: TTT
tatctacctatctatcagta

SEQ ID NO: 60424 - DNA, 20 bp, Artificial Sequence
  Description of Artificial Sequence: Synthetic oligonucleotide
  Target: SCNA; (-) strand; PAM type: YTN; PAM sequence: TTT
ttatctacctatctatcagt

SEQ ID NO: 60425 - DNA, 20 bp, Artificial Sequence
  Description of Artificial Sequence: Synthetic oligonucleotide
  Target: SCNA; (-) strand; PAM type: YTN; PAM sequence: CTT
tttatctacctatctatcag

SEQ ID NO: 60426 - DNA, 20 bp, Artificial Sequence
  Description of Artificial Sequence: Synthetic oligonucleotide
  Target: SCNA; (-) strand; PAM type: YTN; PAM sequence: CTA
tgtaccacaatctttttatc

SEQ ID NO: 60427 - DNA, 20 bp, Artificial Sequence
  Description of Artificial Sequence: Synthetic oligonucleotide
  Target: SCNA; (-) strand; PAM type: YTN; PAM sequence: TTG
tatctatgtaccacaatctt

SEQ ID NO: 60428 - DNA, 20 bp, Artificial Sequence
  Description of Artificial Sequence: Synthetic oligonucleotide
  Target: SCNA; (-) strand; PAM type: YTN; PAM sequence: TTC
cattgtatctatgtaccaca

SEQ ID NO: 60429 - DNA, 20 bp, Artificial Sequence
  Description of Artificial Sequence: Synthetic oligonucleotide
  Target: SCNA; (-) strand; PAM type: YTN; PAM sequence: CTG
atattccattgtatctatgt

SEQ ID NO: 60430 - DNA, 20 bp, Artificial Sequence
  Description of Artificial Sequence: Synthetic oligonucleotide
  Target: SCNA; (-) strand; PAM type: YTN; PAM sequence: CTG
actgatattccattgtatct

SEQ ID NO: 60431 - DNA, 20 bp, Artificial Sequence
  Description of Artificial Sequence: Synthetic oligonucleotide
  Target: SCNA; (-) strand; PAM type: YTN; PAM sequence: TTA
gggctgactgatattccatt

SEQ ID NO: 60432 - DNA, 20 bp, Artificial Sequence
  Description of Artificial Sequence: Synthetic oligonucleotide
  Target: SCNA; (-) strand; PAM type: YTN; PAM sequence: TTT
agggctgactgatattccat

SEQ ID NO: 60433 - DNA, 20 bp, Artificial Sequence
  Description of Artificial Sequence: Synthetic oligonucleotide
  Target: SCNA; (-) strand; PAM type: YTN; PAM sequence: TTT
tagggctgactgatattcca

SEQ ID NO: 60434 - DNA, 20 bp, Artificial Sequence
  Description of Artificial Sequence: Synthetic oligonucleotide
  Target: SCNA; (-) strand; PAM type: YTN; PAM sequence: TTT
ttagggctgactgatattcc

SEQ ID NO: 60435 - DNA, 20 bp, Artificial Sequence
  Description of Artificial Sequence: Synthetic oligonucleotide
  Target: SCNA; (-) strand; PAM type: YTN; PAM sequence: TTT
tttagggctgactgatattc

SEQ ID NO: 60436 - DNA, 20 bp, Artificial Sequence
  Description of Artificial Sequence: Synthetic oligonucleotide
  Target: SCNA; (-) strand; PAM type: YTN; PAM sequence: TTT
ttttagggctgactgatatt

SEQ ID NO: 60437 - DNA, 20 bp, Artificial Sequence
  Description of Artificial Sequence: Synthetic oligonucleotide
  Target: SCNA; (-) strand; PAM type: YTN; PAM sequence: TTG
tttttttagggctgactgat

SEQ ID NO: 60438 - DNA, 20 bp, Artificial Sequence
  Description of Artificial Sequence: Synthetic oligonucleotide
  Target: SCNA; (-) strand; PAM type: YTN; PAM sequence: CTT
gtttttttagggctgactga

SEQ ID NO: 60439 - DNA, 20 bp, Artificial Sequence
  Description of Artificial Sequence: Synthetic oligonucleotide
  Target: SCNA; (-) strand; PAM type: YTN; PAM sequence: TTG
taaatggtaggatcttgttt

SEQ ID NO: 60440 - DNA, 20 bp, Artificial Sequence
  Description of Artificial Sequence: Synthetic oligonucleotide
  Target: SCNA; (-) strand; PAM type: YTN; PAM sequence: TTC
atccatgttgtaaatggtag

SEQ ID NO: 60441 - DNA, 20 bp, Artificial Sequence
  Description of Artificial Sequence: Synthetic oligonucleotide
  Target: SCNA; (-) strand; PAM type: YTN; PAM sequence: CTG
ggttcatccatgttgtaaat

SEQ ID NO: 60442 - DNA, 20 bp, Artificial Sequence
  Description of Artificial Sequence: Synthetic oligonucleotide
  Target: SCNA; (-) strand; PAM type: YTN; PAM sequence: TTG
tctgggttcatccatgttgt

SEQ ID NO: 60443 - DNA, 20 bp, Artificial Sequence
  Description of Artificial Sequence: Synthetic oligonucleotide
  Target: SCNA; (-) strand; PAM type: YTN; PAM sequence: TTT
gtctgggttcatccatgttg

SEQ ID NO: 60444 - DNA, 20 bp, Artificial Sequence
  Description of Artificial Sequence: Synthetic oligonucleotide
  Target: SCNA; (-) strand; PAM type: YTN; PAM sequence: TTT
tgtctgggttcatccatgtt

SEQ ID NO: 60445 - DNA, 20 bp, Artificial Sequence
  Description of Artificial Sequence: Synthetic oligonucleotide
  Target: SCNA; (-) strand; PAM type: YTN; PAM sequence: TTA
gcataattttgtctgggttc

SEQ ID NO: 60446 - DNA, 20 bp, Artificial Sequence
  Description of Artificial Sequence: Synthetic oligonucleotide
  Target: SCNA; (-) strand; PAM type: YTN; PAM sequence: CTT
agcataattttgtctgggtt

SEQ ID NO: 60447 - DNA, 20 bp, Artificial Sequence
  Description of Artificial Sequence: Synthetic oligonucleotide
  Target: SCNA; (-) strand; PAM type: YTN; PAM sequence: TTC
acttagcataattttgtctg

SEQ ID NO: 60448 - DNA, 20 bp, Artificial Sequence
  Description of Artificial Sequence: Synthetic oligonucleotide
  Target: SCNA; (-) strand; PAM type: YTN; PAM sequence: TTT
cacttagcataattttgtct

SEQ ID NO: 60449 - DNA, 20 bp, Artificial Sequence
  Description of Artificial Sequence: Synthetic oligonucleotide
  Target: SCNA; (-) strand; PAM type: YTN; PAM sequence: TTA
tttcacttagcataattttg

SEQ ID NO: 60450 - DNA, 20 bp, Artificial Sequence
  Description of Artificial Sequence: Synthetic oligonucleotide
  Target: SCNA; (-) strand; PAM type: YTN; PAM sequence: CTT
atttcacttagcataatttt

SEQ ID NO: 60451 - DNA, 20 bp, Artificial Sequence
  Description of Artificial Sequence: Synthetic oligonucleotide
  Target: SCNA; (-) strand; PAM type: YTN; PAM sequence: TTG
gcttatttcacttagcataa

SEQ ID NO: 60452 - DNA, 20 bp, Artificial Sequence
  Description of Artificial Sequence: Synthetic oligonucleotide
  Target: SCNA; (-) strand; PAM type: YTN; PAM sequence: TTT
ggcttatttcacttagcata

SEQ ID NO: 60453 - DNA, 20 bp, Artificial Sequence
  Description of Artificial Sequence: Synthetic oligonucleotide
  Target: SCNA; (-) strand; PAM type: YTN; PAM sequence: CTG
tgtttggcttatttcactta

SEQ ID NO: 60454 - DNA, 20 bp, Artificial Sequence
  Description of Artificial Sequence: Synthetic oligonucleotide
  Target: SCNA; (-) strand; PAM type: YTN; PAM sequence: TTC
tgtgtttggcttatttcact

SEQ ID NO: 60455 - DNA, 20 bp, Artificial Sequence
  Description of Artificial Sequence: Synthetic oligonucleotide
  Target: SCNA; (-) strand; PAM type: YTN; PAM sequence: TTT
ctgtgtttggcttatttcac

SEQ ID NO: 60456 - DNA, 20 bp, Artificial Sequence
  Description of Artificial Sequence: Synthetic oligonucleotide
  Target: SCNA; (-) strand; PAM type: YTN; PAM sequence: CTT
tctgtgtttggcttatttca

SEQ ID NO: 60457 - DNA, 20 bp, Artificial Sequence
  Description of Artificial Sequence: Synthetic oligonucleotide
  Target: SCNA; (-) strand; PAM type: YTN; PAM sequence: TTC
tttctgtgtttggcttattt

SEQ ID NO: 60458 - DNA, 20 bp, Artificial Sequence
  Description of Artificial Sequence: Synthetic oligonucleotide
  Target: SCNA; (-) strand; PAM type: YTN; PAM sequence: TTT
ctttctgtgtttggcttatt

SEQ ID NO: 60459 - DNA, 20 bp, Artificial Sequence
  Description of Artificial Sequence: Synthetic oligonucleotide
  Target: SCNA; (-) strand; PAM type: YTN; PAM sequence: TTT
tctttctgtgtttggcttat

SEQ ID NO: 60460 - DNA, 20 bp, Artificial Sequence
  Description of Artificial Sequence: Synthetic oligonucleotide
  Target: SCNA; (-) strand; PAM type: YTN; PAM sequence: TTT
ttctttctgtgtttggctta

SEQ ID NO: 60461 - DNA, 20 bp, Artificial Sequence
  Description of Artificial Sequence: Synthetic oligonucleotide
  Target: SCNA; (-) strand; PAM type: YTN; PAM sequence: TTC
cacatatatgtgagataatg

SEQ ID NO: 60462 - DNA, 20 bp, Artificial Sequence
  Description of Artificial Sequence: Synthetic oligonucleotide
  Target: SCNA; (-) strand; PAM type: YTN; PAM sequence: CTT
ccacatatatgtgagataat

SEQ ID NO: 60463 - DNA, 20 bp, Artificial Sequence
  Description of Artificial Sequence: Synthetic oligonucleotide
  Target: SCNA; (-) strand; PAM type: YTN; PAM sequence: TTC
aagcttccacatatatgtga

SEQ ID NO: 60464 - DNA, 20 bp, Artificial Sequence
  Description of Artificial Sequence: Synthetic oligonucleotide
  Target: SCNA; (-) strand; PAM type: YTN; PAM sequence: TTT
caagcttccacatatatgtg

SEQ ID NO: 60465 - DNA, 20 bp, Artificial Sequence
  Description of Artificial Sequence: Synthetic oligonucleotide
  Target: SCNA; (-) strand; PAM type: YTN; PAM sequence: TTG
tttcaagcttccacatatat

SEQ ID NO: 60466 - DNA, 20 bp, Artificial Sequence
  Description of Artificial Sequence: Synthetic oligonucleotide
  Target: SCNA; (-) strand; PAM type: YTN; PAM sequence: TTT
gtttcaagcttccacatata

SEQ ID NO: 60467 - DNA, 20 bp, Artificial Sequence
  Description of Artificial Sequence: Synthetic oligonucleotide
  Target: SCNA; (-) strand; PAM type: YTN; PAM sequence: TTT
tgtttcaagcttccacatat

SEQ ID NO: 60468 - DNA, 20 bp, Artificial Sequence
  Description of Artificial Sequence: Synthetic oligonucleotide
  Target: SCNA; (-) strand; PAM type: YTN; PAM sequence: TTG
aattttgtttcaagcttcca

SEQ ID NO: 60469 - DNA, 20 bp, Artificial Sequence
  Description of Artificial Sequence: Synthetic oligonucleotide
  Target: SCNA; (-) strand; PAM type: YTN; PAM sequence: TTT
gaattttgtttcaagcttcc

SEQ ID NO: 60470 - DNA, 20 bp, Artificial Sequence
  Description of Artificial Sequence: Synthetic oligonucleotide
  Target: SCNA; (-) strand; PAM type: YTN; PAM sequence: CTG
tatatttgaattttgtttca

SEQ ID NO: 60471 - DNA, 20 bp, Artificial Sequence
  Description of Artificial Sequence: Synthetic oligonucleotide
  Target: SCNA; (-) strand; PAM type: YTN; PAM sequence: CTC
tgtatatttgaattttgttt

SEQ ID NO: 60472 - DNA, 20 bp, Artificial Sequence
  Description of Artificial Sequence: Synthetic oligonucleotide
  Target: SCNA; (-) strand; PAM type: YTN; PAM sequence: TTA
cgtagtctctgtatatttga

SEQ ID NO: 60473 - DNA, 20 bp, Artificial Sequence
  Description of Artificial Sequence: Synthetic oligonucleotide
  Target: SCNA; (-) strand; PAM type: YTN; PAM sequence: TTT
acgtagtctctgtatatttg

SEQ ID NO: 60474 - DNA, 20 bp, Artificial Sequence
  Description of Artificial Sequence: Synthetic oligonucleotide
  Target: SCNA; (-) strand; PAM type: YTN; PAM sequence: TTT
tacgtagtctctgtatattt

SEQ ID NO: 60475 - DNA, 20 bp, Artificial Sequence
  Description of Artificial Sequence: Synthetic oligonucleotide
  Target: SCNA; (-) strand; PAM type: YTN; PAM sequence: TTT
ttacgtagtctctgtatatt

SEQ ID NO: 60476 - DNA, 20 bp, Artificial Sequence
  Description of Artificial Sequence: Synthetic oligonucleotide
  Target: SCNA; (-) strand; PAM type: YTN; PAM sequence: TTT
tttacgtagtctctgtatat

SEQ ID NO: 60477 - DNA, 20 bp, Artificial Sequence
  Description of Artificial Sequence: Synthetic oligonucleotide
  Target: SCNA; (-) strand; PAM type: YTN; PAM sequence: CTG
ttttttacgtagtctctgta

SEQ ID NO: 60478 - DNA, 20 bp, Artificial Sequence
  Description of Artificial Sequence: Synthetic oligonucleotide
  Target: SCNA; (-) strand; PAM type: YTN; PAM sequence: TTA
accctgttttttacgtagtc

SEQ ID NO: 60479 - DNA, 20 bp, Artificial Sequence
  Description of Artificial Sequence: Synthetic oligonucleotide
  Target: SCNA; (-) strand; PAM type: YTN; PAM sequence: CTA
ttaaccctgttttttacgta

SEQ ID NO: 60480 - DNA, 20 bp, Artificial Sequence
  Description of Artificial Sequence: Synthetic oligonucleotide
  Target: SCNA; (-) strand; PAM type: YTN; PAM sequence: TTC
cacccctattaaccctgttt

SEQ ID NO: 60481 - DNA, 20 bp, Artificial Sequence
  Description of Artificial Sequence: Synthetic oligonucleotide
  Target: SCNA; (-) strand; PAM type: YTN; PAM sequence: TTT
ccacccctattaaccctgtt

SEQ ID NO: 60482 - DNA, 20 bp, Artificial Sequence
  Description of Artificial Sequence: Synthetic oligonucleotide
  Target: SCNA; (-) strand; PAM type: YTN; PAM sequence: TTT
tccacccctattaaccctgt

SEQ ID NO: 60483 - DNA, 20 bp, Artificial Sequence
  Description of Artificial Sequence: Synthetic oligonucleotide
  Target: SCNA; (-) strand; PAM type: YTN; PAM sequence: CTT
ttccacccctattaaccctg

SEQ ID NO: 60484 - DNA, 20 bp, Artificial Sequence
  Description of Artificial Sequence: Synthetic oligonucleotide
  Target: SCNA; (-) strand; PAM type: YTN; PAM sequence: CTA
cttttccacccctattaacc

SEQ ID NO: 60485 - DNA, 20 bp, Artificial Sequence
  Description of Artificial Sequence: Synthetic oligonucleotide
  Target: SCNA; (-) strand; PAM type: YTN; PAM sequence: CTA
cctacttttccacccctatt

SEQ ID NO: 60486 - DNA, 20 bp, Artificial Sequence
  Description of Artificial Sequence: Synthetic oligonucleotide
  Target: SCNA; (-) strand; PAM type: YTN; PAM sequence: TTC
tacctacttttccaccccta

SEQ ID NO: 60487 - DNA, 20 bp, Artificial Sequence
  Description of Artificial Sequence: Synthetic oligonucleotide
  Target: SCNA; (-) strand; PAM type: YTN; PAM sequence: TTT
ctacctacttttccacccct

SEQ ID NO: 60488 - DNA, 20 bp, Artificial Sequence
  Description of Artificial Sequence: Synthetic oligonucleotide
  Target: SCNA; (-) strand; PAM type: YTN; PAM sequence: TTT
tctacctacttttccacccc

SEQ ID NO: 60489 - DNA, 20 bp, Artificial Sequence
  Description of Artificial Sequence: Synthetic oligonucleotide
  Target: SCNA; (-) strand; PAM type: YTN; PAM sequence: CTA
ttttctacctacttttccac

SEQ ID NO: 60490 - DNA, 20 bp, Artificial Sequence
  Description of Artificial Sequence: Synthetic oligonucleotide
  Target: SCNA; (-) strand; PAM type: YTN; PAM sequence: CTA
tatgtccctattttctacct

SEQ ID NO: 60491 - DNA, 20 bp, Artificial Sequence
  Description of Artificial Sequence: Synthetic oligonucleotide
  Target: SCNA; (-) strand; PAM type: YTN; PAM sequence: CTA
tggcctatatgtccctattt

SEQ ID NO: 60492 - DNA, 20 bp, Artificial Sequence
  Description of Artificial Sequence: Synthetic oligonucleotide
  Target: SCNA; (-) strand; PAM type: YTN; PAM sequence: TTG
gatcctatggcctatatgtc

SEQ ID NO: 60493 - DNA, 20 bp, Artificial Sequence
  Description of Artificial Sequence: Synthetic oligonucleotide
  Target: SCNA; (-) strand; PAM type: YTN; PAM sequence: CTT
ggatcctatggcctatatgt

SEQ ID NO: 60494 - DNA, 20 bp, Artificial Sequence
  Description of Artificial Sequence: Synthetic oligonucleotide
  Target: SCNA; (-) strand; PAM type: YTN; PAM sequence: TTG
cttggatcctatggcctata

SEQ ID NO: 60495 - DNA, 20 bp, Artificial Sequence
  Description of Artificial Sequence: Synthetic oligonucleotide
  Target: SCNA; (-) strand; PAM type: YTN; PAM sequence: CTT
gcttggatcctatggcctat

SEQ ID NO: 60496 - DNA, 20 bp, Artificial Sequence
  Description of Artificial Sequence: Synthetic oligonucleotide
  Target: SCNA; (-) strand; PAM type: YTN; PAM sequence: CTA
cttgcttggatcctatggcc

SEQ ID NO: 60497 - DNA, 20 bp, Artificial Sequence
  Description of Artificial Sequence: Synthetic oligonucleotide
  Target: SCNA; (-) strand; PAM type: YTN; PAM sequence: CTG
ctacttgcttggatcctatg

SEQ ID NO: 60498 - DNA, 20 bp, Artificial Sequence
  Description of Artificial Sequence: Synthetic oligonucleotide
  Target: SCNA; (-) strand; PAM type: YTN; PAM sequence: TTA
cacatctgctacttgcttgg

SEQ ID NO: 60499 - DNA, 20 bp, Artificial Sequence
  Description of Artificial Sequence: Synthetic oligonucleotide
  Target: SCNA; (-) strand; PAM type: YTN; PAM sequence: CTT
acacatctgctacttgcttg

SEQ ID NO: 60500 - DNA, 20 bp, Artificial Sequence
  Description of Artificial Sequence: Synthetic oligonucleotide
  Target: SCNA; (-) strand; PAM type: YTN; PAM sequence: TTC
atcttacacatctgctactt

SEQ ID NO: 60501 - DNA, 20 bp, Artificial Sequence
  Description of Artificial Sequence: Synthetic oligonucleotide
  Target: SCNA; (-) strand; PAM type: YTN; PAM sequence: TTT
catcttacacatctgctact

SEQ ID NO: 60502 - DNA, 20 bp, Artificial Sequence
  Description of Artificial Sequence: Synthetic oligonucleotide
  Target: SCNA; (-) strand; PAM type: YTN; PAM sequence: TTT
tcatcttacacatctgctac

SEQ ID NO: 60503 - DNA, 20 bp, Artificial Sequence
  Description of Artificial Sequence: Synthetic oligonucleotide
  Target: SCNA; (-) strand; PAM type: YTN; PAM sequence: TTT
ttcatcttacacatctgcta

SEQ ID NO: 60504 - DNA, 20 bp, Artificial Sequence
  Description of Artificial Sequence: Synthetic oligonucleotide
  Target: SCNA; (-) strand; PAM type: YTN; PAM sequence: CTT
tttcatcttacacatctgct

SEQ ID NO: 60505 - DNA, 20 bp, Artificial Sequence
  Description of Artificial Sequence: Synthetic oligonucleotide
  Target: SCNA; (-) strand; PAM type: YTN; PAM sequence: CTG
tacactttttcatcttacac

SEQ ID NO: 60506 - DNA, 20 bp, Artificial Sequence
  Description of Artificial Sequence: Synthetic oligonucleotide
  Target: SCNA; (-) strand; PAM type: YTN; PAM sequence: TTA
gatctgtacactttttcatc

SEQ ID NO: 60507 - DNA, 20 bp, Artificial Sequence
  Description of Artificial Sequence: Synthetic oligonucleotide
  Target: SCNA; (-) strand; PAM type: YTN; PAM sequence: CTC
atacattagatctgtacact

SEQ ID NO: 60508 - DNA, 20 bp, Artificial Sequence
  Description of Artificial Sequence: Synthetic oligonucleotide
  Target: SCNA; (-) strand; PAM type: YTN; PAM sequence: CTA
cagtcctcatacattagatc

SEQ ID NO: 60509 - DNA, 20 bp, Artificial Sequence
  Description of Artificial Sequence: Synthetic oligonucleotide
  Target: SCNA; (-) strand; PAM type: YTN; PAM sequence: TTA
tcacctacagtcctcataca

SEQ ID NO: 60510 - DNA, 20 bp, Artificial Sequence
  Description of Artificial Sequence: Synthetic oligonucleotide
  Target: SCNA; (-) strand; PAM type: YTN; PAM sequence: TTT
atcacctacagtcctcatac

SEQ ID NO: 60511 - DNA, 20 bp, Artificial Sequence
  Description of Artificial Sequence: Synthetic oligonucleotide
  Target: SCNA; (-) strand; PAM type: YTN; PAM sequence: TTT
tatcacctacagtcctcata

SEQ ID NO: 60512 - DNA, 20 bp, Artificial Sequence
  Description of Artificial Sequence: Synthetic oligonucleotide
  Target: SCNA; (-) strand; PAM type: YTN; PAM sequence: CTC
aaatatagtacaattttatc

SEQ ID NO: 60513 - DNA, 20 bp, Artificial Sequence
  Description of Artificial Sequence: Synthetic oligonucleotide
  Target: SCNA; (-) strand; PAM type: YTN; PAM sequence: TTA
tcatgaatctcaaatatagt

SEQ ID NO: 60514 - DNA, 20 bp, Artificial Sequence
  Description of Artificial Sequence: Synthetic oligonucleotide
  Target: SCNA; (-) strand; PAM type: YTN; PAM sequence: TTT
atcatgaatctcaaatatag

SEQ ID NO: 60515 - DNA, 20 bp, Artificial Sequence
  Description of Artificial Sequence: Synthetic oligonucleotide
  Target: SCNA; (-) strand; PAM type: YTN; PAM sequence: TTA
tttatcatgaatctcaaata

SEQ ID NO: 60516 - DNA, 20 bp, Artificial Sequence
  Description of Artificial Sequence: Synthetic oligonucleotide
  Target: SCNA; (-) strand; PAM type: YTN; PAM sequence: CTT
atttatcatgaatctcaaat

SEQ ID NO: 60517 - DNA, 20 bp, Artificial Sequence
  Description of Artificial Sequence: Synthetic oligonucleotide
  Target: SCNA; (-) strand; PAM type: YTN; PAM sequence: CTA
aaatccacttatttatcatg

SEQ ID NO: 60518 - DNA, 20 bp, Artificial Sequence
  Description of Artificial Sequence: Synthetic oligonucleotide
  Target: SCNA; (-) strand; PAM type: YTN; PAM sequence: TTG
tggcaagggcagctaaaatc

SEQ ID NO: 60519 - DNA, 20 bp, Artificial Sequence
  Description of Artificial Sequence: Synthetic oligonucleotide
  Target: SCNA; (-) strand; PAM type: YTN; PAM sequence: TTT
gtggcaagggcagctaaaat

SEQ ID NO: 60520 - DNA, 20 bp, Artificial Sequence
  Description of Artificial Sequence: Synthetic oligonucleotide
  Target: SCNA; (-) strand; PAM type: YTN; PAM sequence: TTT
tgtggcaagggcagctaaaa

SEQ ID NO: 60521 - DNA, 20 bp, Artificial Sequence
  Description of Artificial Sequence: Synthetic oligonucleotide
  Target: SCNA; (-) strand; PAM type: YTN; PAM sequence: TTT
ttgtggcaagggcagctaaa

SEQ ID NO: 60522 - DNA, 20 bp, Artificial Sequence
  Description of Artificial Sequence: Synthetic oligonucleotide
  Target: SCNA; (-) strand; PAM type: YTN; PAM sequence: TTG
tttttgtggcaagggcagct

SEQ ID NO: 60523 - DNA, 20 bp, Artificial Sequence
  Description of Artificial Sequence: Synthetic oligonucleotide
  Target: SCNA; (-) strand; PAM type: YTN; PAM sequence: TTG
ttgtttttgtggcaagggca

SEQ ID NO: 60524 - DNA, 20 bp, Artificial Sequence
  Description of Artificial Sequence: Synthetic oligonucleotide
  Target: SCNA; (-) strand; PAM type: YTN; PAM sequence: TTT
gttgtttttgtggcaagggc

SEQ ID NO: 60525 - DNA, 20 bp, Artificial Sequence
  Description of Artificial Sequence: Synthetic oligonucleotide
  Target: SCNA; (-) strand; PAM type: YTN; PAM sequence: TTT
tgttgtttttgtggcaaggg

SEQ ID NO: 60526 - DNA, 20 bp, Artificial Sequence
  Description of Artificial Sequence: Synthetic oligonucleotide
  Target: SCNA; (-) strand; PAM type: YTN; PAM sequence: TTT
ttgttgtttttgtggcaagg

SEQ ID NO: 60527 - DNA, 20 bp, Artificial Sequence
  Description of Artificial Sequence: Synthetic oligonucleotide
  Target: SCNA; (-) strand; PAM type: YTN; PAM sequence: TTT
tttgttgtttttgtggcaag

SEQ ID NO: 60528 - DNA, 20 bp, Artificial Sequence
  Description of Artificial Sequence: Synthetic oligonucleotide
  Target: SCNA; (-) strand; PAM type: YTN; PAM sequence: CTT
ttttgttgtttttgtggcaa

SEQ ID NO: 60529 - DNA, 20 bp, Artificial Sequence
  Description of Artificial Sequence: Synthetic oligonucleotide
  Target: SCNA; (-) strand; PAM type: YTN; PAM sequence: TTA
ccttttttgttgtttttgtg

SEQ ID NO: 60530 - DNA, 20 bp, Artificial Sequence
  Description of Artificial Sequence: Synthetic oligonucleotide
  Target: SCNA; (-) strand; PAM type: YTN; PAM sequence: CTC
atagttaccttttttgttgt

SEQ ID NO: 60531 - DNA, 20 bp, Artificial Sequence
  Description of Artificial Sequence: Synthetic oligonucleotide
  Target: SCNA; (-) strand; PAM type: YTN; PAM sequence: CTC
tcatagttaccttttttgtt

SEQ ID NO: 60532 - DNA, 20 bp, Artificial Sequence
  Description of Artificial Sequence: Synthetic oligonucleotide
  Target: SCNA; (-) strand; PAM type: YTN; PAM sequence: TTC
ataatctctcatagttacct

SEQ ID NO: 60533 - DNA, 20 bp, Artificial Sequence
  Description of Artificial Sequence: Synthetic oligonucleotide
  Target: SCNA; (-) strand; PAM type: YTN; PAM sequence: TTA
atatattcataatctctcat

SEQ ID NO: 60534 - DNA, 20 bp, Artificial Sequence
  Description of Artificial Sequence: Synthetic oligonucleotide
  Target: SCNA; (-) strand; PAM type: YTN; PAM sequence: TTG
aagcaaattaatatattcat

SEQ ID NO: 60535 - DNA, 20 bp, Artificial Sequence
  Description of Artificial Sequence: Synthetic oligonucleotide
  Target: SCNA; (-) strand; PAM type: YTN; PAM sequence: CTA
tattgaagcaaattaatata

SEQ ID NO: 60536 - DNA, 20 bp, Artificial Sequence
  Description of Artificial Sequence: Synthetic oligonucleotide
  Target: SCNA; (-) strand; PAM type: YTN; PAM sequence: TTA
ctatattgaagcaaattaat

SEQ ID NO: 60537 - DNA, 20 bp, Artificial Sequence
  Description of Artificial Sequence: Synthetic oligonucleotide
  Target: SCNA; (-) strand; PAM type: YTN; PAM sequence: CTA
aaaaattactatattgaagc

SEQ ID NO: 60538 - DNA, 20 bp, Artificial Sequence
  Description of Artificial Sequence: Synthetic oligonucleotide
  Target: SCNA; (-) strand; PAM type: YTN; PAM sequence: TTA
gacactaaaaaattactata

SEQ ID NO: 60539 - DNA, 20 bp, Artificial Sequence
  Description of Artificial Sequence: Synthetic oligonucleotide
  Target: SCNA; (-) strand; PAM type: YTN; PAM sequence: CTA
tcagatacattagacactaa

SEQ ID NO: 60540 - DNA, 20 bp, Artificial Sequence
  Description of Artificial Sequence: Synthetic oligonucleotide
  Target: SCNA; (-) strand; PAM type: YTN; PAM sequence: TTA
gggtatgcaacatgatgcta

SEQ ID NO: 60541 - DNA, 20 bp, Artificial Sequence
  Description of Artificial Sequence: Synthetic oligonucleotide
  Target: SCNA; (-) strand; PAM type: YTN; PAM sequence: TTT
agggtatgcaacatgatgct

SEQ ID NO: 60542 - DNA, 20 bp, Artificial Sequence
  Description of Artificial Sequence: Synthetic oligonucleotide
  Target: SCNA; (-) strand; PAM type: YTN; PAM sequence: TTG
tgtatatttagggtatgcaa

SEQ ID NO: 60543 - DNA, 20 bp, Artificial Sequence
  Description of Artificial Sequence: Synthetic oligonucleotide
  Target: SCNA; (-) strand; PAM type: YTN; PAM sequence: TTA
attgtgtatatttagggtat

SEQ ID NO: 60544 - DNA, 20 bp, Artificial Sequence
  Description of Artificial Sequence: Synthetic oligonucleotide
  Target: SCNA; (-) strand; PAM type: YTN; PAM sequence: TTT
aattgtgtatatttagggta

SEQ ID NO: 60545 - DNA, 20 bp, Artificial Sequence
  Description of Artificial Sequence: Synthetic oligonucleotide
  Target: SCNA; (-) strand; PAM type: YTN; PAM sequence: TTA
aaaataaatttaattgtgta

SEQ ID NO: 60546 - DNA, 20 bp, Artificial Sequence
  Description of Artificial Sequence: Synthetic oligonucleotide
  Target: SCNA; (-) strand; PAM type: YTN; PAM sequence: TTT
aaaaataaatttaattgtgt

SEQ ID NO: 60547 - DNA, 20 bp, Artificial Sequence
  Description of Artificial Sequence: Synthetic oligonucleotide
  Target: SCNA; (-) strand; PAM type: YTN; PAM sequence: TTT
taaaaataaatttaattgtg

SEQ ID NO: 60548 - DNA, 20 bp, Artificial Sequence
  Description of Artificial Sequence: Synthetic oligonucleotide
  Target: SCNA; (-) strand; PAM type: YTN; PAM sequence: TTT
ttaaaaataaatttaattgt

SEQ ID NO: 60549 - DNA, 20 bp, Artificial Sequence
  Description of Artificial Sequence: Synthetic oligonucleotide
  Target: SCNA; (-) strand; PAM type: YTN; PAM sequence: TTT
tttaaaaataaatttaattg

SEQ ID NO: 60550 - DNA, 20 bp, Artificial Sequence
  Description of Artificial Sequence: Synthetic oligonucleotide
  Target: SCNA; (-) strand; PAM type: YTN; PAM sequence: CTT
ttttaaaaataaatttaatt

SEQ ID NO: 60551 - DNA, 20 bp, Artificial Sequence
  Description of Artificial Sequence: Synthetic oligonucleotide
  Target: SCNA; (-) strand; PAM type: YTN; PAM sequence: TTC
ttttttaaaaataaatttaa

SEQ ID NO: 60552 - DNA, 20 bp, Artificial Sequence
  Description of Artificial Sequence: Synthetic oligonucleotide
  Target: SCNA; (-) strand; PAM type: YTN; PAM sequence: CTA
gtggcattcttttttaaaaa

SEQ ID NO: 60553 - DNA, 20 bp, Artificial Sequence
  Description of Artificial Sequence: Synthetic oligonucleotide
  Target: SCNA; (-) strand; PAM type: YTN; PAM sequence: TTG
cacccggcctagtggcattc

SEQ ID NO: 60554 - DNA, 20 bp, Artificial Sequence
  Description of Artificial Sequence: Synthetic oligonucleotide
  Target: SCNA; (-) strand; PAM type: YTN; PAM sequence: TTA
caggcgtgagccattgcacc

SEQ ID NO: 60555 - DNA, 20 bp, Artificial Sequence
  Description of Artificial Sequence: Synthetic oligonucleotide
  Target: SCNA; (-) strand; PAM type: YTN; PAM sequence: CTG
ggattacaggcgtgagccat

SEQ ID NO: 60556 - DNA, 20 bp, Artificial Sequence
  Description of Artificial Sequence: Synthetic oligonucleotide
  Target: SCNA; (-) strand; PAM type: YTN; PAM sequence: CTC
ccaaaatgctgggattacag

SEQ ID NO: 60557 - DNA, 20 bp, Artificial Sequence
  Description of Artificial Sequence: Synthetic oligonucleotide
  Target: SCNA; (-) strand; PAM type: YTN; PAM sequence: CTC
ggcctcccaaaatgctggga

SEQ ID NO: 60558 - DNA, 20 bp, Artificial Sequence
  Description of Artificial Sequence: Synthetic oligonucleotide
  Target: SCNA; (-) strand; PAM type: YTN; PAM sequence: CTC
atcatccccgacctcggcct

SEQ ID NO: 60559 - DNA, 20 bp, Artificial Sequence
  Description of Artificial Sequence: Synthetic oligonucleotide
  Target: SCNA; (-) strand; PAM type: YTN; PAM sequence: CTG
atctcatcatccccgacctc

SEQ ID NO: 60560 - DNA, 20 bp, Artificial Sequence
  Description of Artificial Sequence: Synthetic oligonucleotide
  Target: SCNA; (-) strand; PAM type: YTN; PAM sequence: CTC
ctgatctcatcatccccgac

SEQ ID NO: 60561 - DNA, 20 bp, Artificial Sequence
  Description of Artificial Sequence: Synthetic oligonucleotide
  Target: SCNA; (-) strand; PAM type: YTN; PAM sequence: CTC
gaactcctgatctcatcatc

SEQ ID NO: 60562 - DNA, 20 bp, Artificial Sequence
  Description of Artificial Sequence: Synthetic oligonucleotide
  Target: SCNA; (-) strand; PAM type: YTN; PAM sequence: TTA
gccaggatggtctcgaactc

SEQ ID NO: 60563 - DNA, 20 bp, Artificial Sequence
  Description of Artificial Sequence: Synthetic oligonucleotide
  Target: SCNA; (-) strand; PAM type: YTN; PAM sequence: TTC
accatgttagccaggatggt

SEQ ID NO: 60564 - DNA, 20 bp, Artificial Sequence
  Description of Artificial Sequence: Synthetic oligonucleotide
  Target: SCNA; (-) strand; PAM type: YTN; PAM sequence: TTT
caccatgttagccaggatgg

SEQ ID NO: 60565 - DNA, 20 bp, Artificial Sequence
  Description of Artificial Sequence: Synthetic oligonucleotide
  Target: SCNA; (-) strand; PAM type: YTN; PAM sequence: TTA
gtagagatggggtttcacca

SEQ ID NO: 60566 - DNA, 20 bp, Artificial Sequence
  Description of Artificial Sequence: Synthetic oligonucleotide
  Target: SCNA; (-) strand; PAM type: YTN; PAM sequence: TTT
agtagagatggggtttcacc

SEQ ID NO: 60567 - DNA, 20 bp, Artificial Sequence
  Description of Artificial Sequence: Synthetic oligonucleotide
  Target: SCNA; (-) strand; PAM type: YTN; PAM sequence: TTT
tagtagagatggggtttcac

SEQ ID NO: 60568 - DNA, 20 bp, Artificial Sequence
  Description of Artificial Sequence: Synthetic oligonucleotide
  Target: SCNA; (-) strand; PAM type: YTN; PAM sequence: TTT
ttagtagagatggggtttca

SEQ ID NO: 60569 - DNA, 20 bp, Artificial Sequence
  Description of Artificial Sequence: Synthetic oligonucleotide
  Target: SCNA; (-) strand; PAM type: YTN; PAM sequence: TTG
tatttttagtagagatgggg

SEQ ID NO: 60570 - DNA, 20 bp, Artificial Sequence
  Description of Artificial Sequence: Synthetic oligonucleotide
  Target: SCNA; (-) strand; PAM type: YTN; PAM sequence: TTT
gtatttttagtagagatggg

SEQ ID NO: 60571 - DNA, 20 bp, Artificial Sequence
  Description of Artificial Sequence: Synthetic oligonucleotide
  Target: SCNA; (-) strand; PAM type: YTN; PAM sequence: TTT
tgtatttttagtagagatgg

SEQ ID NO: 60572 - DNA, 20 bp, Artificial Sequence
  Description of Artificial Sequence: Synthetic oligonucleotide
  Target: SCNA; (-) strand; PAM type: YTN; PAM sequence: TTT
ttgtatttttagtagagatg

SEQ ID NO: 60573 - DNA, 20 bp, Artificial Sequence
  Description of Artificial Sequence: Synthetic oligonucleotide
  Target: SCNA; (-) strand; PAM type: YTN; PAM sequence: CTA
atttttgtatttttagtaga

SEQ ID NO: 60574 - DNA, 20 bp, Artificial Sequence
  Description of Artificial Sequence: Synthetic oligonucleotide
  Target: SCNA; (-) strand; PAM type: YTN; PAM sequence: TTA
caggcatgcaccaccatgcc

SEQ ID NO: 60575 - DNA, 20 bp, Artificial Sequence
  Description of Artificial Sequence: Synthetic oligonucleotide
  Target: SCNA; (-) strand; PAM type: YTN; PAM sequence: CTG
aaattacaggcatgcaccac

SEQ ID NO: 60576 - DNA, 20 bp, Artificial Sequence
  Description of Artificial Sequence: Synthetic oligonucleotide
  Target: SCNA; (-) strand; PAM type: YTN; PAM sequence: CTG
agtagctgaaattacaggca

SEQ ID NO: 60577 - DNA, 20 bp, Artificial Sequence
  Description of Artificial Sequence: Synthetic oligonucleotide
  Target: SCNA; (-) strand; PAM type: YTN; PAM sequence: CTC
ctgagtagctgaaattacag

SEQ ID NO: 60578 - DNA, 20 bp, Artificial Sequence
  Description of Artificial Sequence: Synthetic oligonucleotide
  Target: SCNA; (-) strand; PAM type: YTN; PAM sequence: CTC
agcctcctgagtagctgaaa

SEQ ID NO: 60579 - DNA, 20 bp, Artificial Sequence
  Description of Artificial Sequence: Synthetic oligonucleotide
  Target: SCNA; (-) strand; PAM type: YTN; PAM sequence: CTG
actcagcctcctgagtagct

SEQ ID NO: 60580 - DNA, 20 bp, Artificial Sequence
  Description of Artificial Sequence: Synthetic oligonucleotide
  Target: SCNA; (-) strand; PAM type: YTN; PAM sequence: CTC
ctgactcagcctcctgagta

SEQ ID NO: 60581 - DNA, 20 bp, Artificial Sequence
  Description of Artificial Sequence: Synthetic oligonucleotide
  Target: SCNA; (-) strand; PAM type: YTN; PAM sequence: TTC
tcctgactcagcctcctgag

SEQ ID NO: 60582 - DNA, 20 bp, Artificial Sequence
  Description of Artificial Sequence: Synthetic oligonucleotide
  Target: SCNA; (-) strand; PAM type: YTN; PAM sequence: TTA
ttctcctgactcagcctcct

SEQ ID NO: 60583 - DNA, 20 bp, Artificial Sequence
  Description of Artificial Sequence: Synthetic oligonucleotide
  Target: SCNA; (-) strand; PAM type: YTN; PAM sequence: TTC
aagttattctcctgactcag

SEQ ID NO: 60584 - DNA, 20 bp, Artificial Sequence
  Description of Artificial Sequence: Synthetic oligonucleotide
  Target: SCNA; (-) strand; PAM type: YTN; PAM sequence: CTG
ggttcaagttattctcctga

SEQ ID NO: 60585 - DNA, 20 bp, Artificial Sequence
  Description of Artificial Sequence: Synthetic oligonucleotide
  Target: SCNA; (-) strand; PAM type: YTN; PAM sequence: CTC
ctgggttcaagttattctcc

SEQ ID NO: 60586 - DNA, 20 bp, Artificial Sequence
  Description of Artificial Sequence: Synthetic oligonucleotide
  Target: SCNA; (-) strand; PAM type: YTN; PAM sequence: CTC
cgcctcctgggttcaagtta

SEQ ID NO: 60587 - DNA, 20 bp, Artificial Sequence
  Description of Artificial Sequence: Synthetic oligonucleotide
  Target: SCNA; (-) strand; PAM type: YTN; PAM sequence: CTG
caacctccgcctcctgggtt

SEQ ID NO: 60588 - DNA, 20 bp, Artificial Sequence
  Description of Artificial Sequence: Synthetic oligonucleotide
  Target: SCNA; (-) strand; PAM type: YTN; PAM sequence: CTC
actgcaacctccgcctcctg

SEQ ID NO: 60589 - DNA, 20 bp, Artificial Sequence
  Description of Artificial Sequence: Synthetic oligonucleotide
  Target: SCNA; (-) strand; PAM type: YTN; PAM sequence: CTC
ggctcactgcaacctccgcc

SEQ ID NO: 60590 - DNA, 20 bp, Artificial Sequence
  Description of Artificial Sequence: Synthetic oligonucleotide
  Target: SCNA; (-) strand; PAM type: YTN; PAM sequence: CTG
aagtgcagtggtgtgatctc

SEQ ID NO: 60591 - DNA, 20 bp, Artificial Sequence
  Description of Artificial Sequence: Synthetic oligonucleotide
  Target: SCNA; (-) strand; PAM type: YTN; PAM sequence: CTC
caggctgaagtgcagtggtg

SEQ ID NO: 60592 - DNA, 20 bp, Artificial Sequence
  Description of Artificial Sequence: Synthetic oligonucleotide
  Target: SCNA; (-) strand; PAM type: YTN; PAM sequence: TTC
actccaggctgaagtgcagt

SEQ ID NO: 60593 - DNA, 20 bp, Artificial Sequence
  Description of Artificial Sequence: Synthetic oligonucleotide
  Target: SCNA; (-) strand; PAM type: YTN; PAM sequence: TTT
cactccaggctgaagtgcag

SEQ ID NO: 60594 - DNA, 20 bp, Artificial Sequence
  Description of Artificial Sequence: Synthetic oligonucleotide
  Target: SCNA; (-) strand; PAM type: YTN; PAM sequence: CTG
tcatttcactccaggctgaa

SEQ ID NO: 60595 - DNA, 20 bp, Artificial Sequence
  Description of Artificial Sequence: Synthetic oligonucleotide
  Target: SCNA; (-) strand; PAM type: YTN; PAM sequence: CTC
aatctgtcatttcactccag

SEQ ID NO: 60596 - DNA, 20 bp, Artificial Sequence
  Description of Artificial Sequence: Synthetic oligonucleotide
  Target: SCNA; (-) strand; PAM type: YTN; PAM sequence: CTG
agatagggtctcaatctgtc

SEQ ID NO: 60597 - DNA, 20 bp, Artificial Sequence
  Description of Artificial Sequence: Synthetic oligonucleotide
  Target: SCNA; (-) strand; PAM type: YTN; PAM sequence: TTC
tgagatagggtctcaatctg

SEQ ID NO: 60598 - DNA, 20 bp, Artificial Sequence
  Description of Artificial Sequence: Synthetic oligonucleotide
  Target: SCNA; (-) strand; PAM type: YTN; PAM sequence: TTT
ctgagatagggtctcaatct

SEQ ID NO: 60599 - DNA, 20 bp, Artificial Sequence
  Description of Artificial Sequence: Synthetic oligonucleotide
  Target: SCNA; (-) strand; PAM type: YTN; PAM sequence: TTT
tctgagatagggtctcaatc

SEQ ID NO: 60600 - DNA, 20 bp, Artificial Sequence
  Description of Artificial Sequence: Synthetic oligonucleotide
  Target: SCNA; (-) strand; PAM type: YTN; PAM sequence: TTT
ttctgagatagggtctcaat

SEQ ID NO: 60601 - DNA, 20 bp, Artificial Sequence
  Description of Artificial Sequence: Synthetic oligonucleotide
  Target: SCNA; (-) strand; PAM type: YTN; PAM sequence: TTT
tttctgagatagggtctcaa

SEQ ID NO: 60602 - DNA, 20 bp, Artificial Sequence
  Description of Artificial Sequence: Synthetic oligonucleotide
  Target: SCNA; (-) strand; PAM type: YTN; PAM sequence: TTT
ttttctgagatagggtctca

SEQ ID NO: 60603 - DNA, 20 bp, Artificial Sequence
  Description of Artificial Sequence: Synthetic oligonucleotide
  Target: SCNA; (-) strand; PAM type: YTN; PAM sequence: CTT
tttttctgagatagggtctc

SEQ ID NO: 60604 - DNA, 20 bp, Artificial Sequence
  Description of Artificial Sequence: Synthetic oligonucleotide
  Target: SCNA; (-) strand; PAM type: YTN; PAM sequence: TTC
tttttttctgagatagggtc

SEQ ID NO: 60605 - DNA, 20 bp, Artificial Sequence
  Description of Artificial Sequence: Synthetic oligonucleotide
  Target: SCNA; (-) strand; PAM type: YTN; PAM sequence: TTT
ctttttttctgagatagggt

SEQ ID NO: 60606 - DNA, 20 bp, Artificial Sequence
  Description of Artificial Sequence: Synthetic oligonucleotide
  Target: SCNA; (-) strand; PAM type: YTN; PAM sequence: TTT
tctttttttctgagataggg

SEQ ID NO: 60607 - DNA, 20 bp, Artificial Sequence
  Description of Artificial Sequence: Synthetic oligonucleotide
  Target: SCNA; (-) strand; PAM type: YTN; PAM sequence: TTT
ttctttttttctgagatagg

SEQ ID NO: 60608 - DNA, 20 bp, Artificial Sequence
  Description of Artificial Sequence: Synthetic oligonucleotide
  Target: SCNA; (-) strand; PAM type: YTN; PAM sequence: TTT
tttctttttttctgagatag

SEQ ID NO: 60609 - DNA, 20 bp, Artificial Sequence
  Description of Artificial Sequence: Synthetic oligonucleotide
  Target: SCNA; (-) strand; PAM type: YTN; PAM sequence: TTT
ttttctttttttctgagata

SEQ ID NO: 60610 - DNA, 20 bp, Artificial Sequence
  Description of Artificial Sequence: Synthetic oligonucleotide
  Target: SCNA; (-) strand; PAM type: YTN; PAM sequence: TTT
tttttctttttttctgagat

SEQ ID NO: 60611 - DNA, 20 bp, Artificial Sequence
  Description of Artificial Sequence: Synthetic oligonucleotide
  Target: SCNA; (-) strand; PAM type: YTN; PAM sequence: TTT
ttttttctttttttctgaga

SEQ ID NO: 60612 - DNA, 20 bp, Artificial Sequence
  Description of Artificial Sequence: Synthetic oligonucleotide
  Target: SCNA; (-) strand; PAM type: YTN; PAM sequence: TTT
tttttttctttttttctgag

SEQ ID NO: 60613 - DNA, 20 bp, Artificial Sequence
  Description of Artificial Sequence: Synthetic oligonucleotide
  Target: SCNA; (-) strand; PAM type: YTN; PAM sequence: CTT
ttttttttctttttttctga

SEQ ID NO: 60614 - DNA, 20 bp, Artificial Sequence
  Description of Artificial Sequence: Synthetic oligonucleotide
  Target: SCNA; (-) strand; PAM type: YTN; PAM sequence: TTC
ttttttttttctttttttct

SEQ ID NO: 60615 - DNA, 20 bp, Artificial Sequence
  Description of Artificial Sequence: Synthetic oligonucleotide
  Target: SCNA; (-) strand; PAM type: YTN; PAM sequence: TTA
gtggcattcttttttttttc

SEQ ID NO: 60616 - DNA, 20 bp, Artificial Sequence
  Description of Artificial Sequence: Synthetic oligonucleotide
  Target: SCNA; (-) strand; PAM type: YTN; PAM sequence: TTT
agtggcattctttttttttt

SEQ ID NO: 60617 - DNA, 20 bp, Artificial Sequence
  Description of Artificial Sequence: Synthetic oligonucleotide
  Target: SCNA; (-) strand; PAM type: YTN; PAM sequence: CTA
atggtgtggtttagtggcat

SEQ ID NO: 60618 - DNA, 20 bp, Artificial Sequence
  Description of Artificial Sequence: Synthetic oligonucleotide
  Target: SCNA; (-) strand; PAM type: YTN; PAM sequence: TTC
taatggtgtggtttagtggc

SEQ ID NO: 60619 - DNA, 20 bp, Artificial Sequence
  Description of Artificial Sequence: Synthetic oligonucleotide
  Target: SCNA; (-) strand; PAM type: YTN; PAM sequence: TTA
taagttctaatggtgtggtt

SEQ ID NO: 60620 - DNA, 20 bp, Artificial Sequence
  Description of Artificial Sequence: Synthetic oligonucleotide
  Target: SCNA; (-) strand; PAM type: YTN; PAM sequence: TTA
attataagttctaatggtgt

SEQ ID NO: 60621 - DNA, 20 bp, Artificial Sequence
  Description of Artificial Sequence: Synthetic oligonucleotide
  Target: SCNA; (-) strand; PAM type: YTN; PAM sequence: TTA
taaaaaataattaattataa

SEQ ID NO: 60622 - DNA, 20 bp, Artificial Sequence
  Description of Artificial Sequence: Synthetic oligonucleotide
  Target: SCNA; (-) strand; PAM type: YTN; PAM sequence: TTT
ataaaaaataattaattata

SEQ ID NO: 60623 - DNA, 20 bp, Artificial Sequence
  Description of Artificial Sequence: Synthetic oligonucleotide
  Target: SCNA; (-) strand; PAM type: YTN; PAM sequence: TTG
cataagatatttataaaaaa

SEQ ID NO: 60624 - DNA, 20 bp, Artificial Sequence
  Description of Artificial Sequence: Synthetic oligonucleotide
  Target: SCNA; (-) strand; PAM type: YTN; PAM sequence: CTA
caaaaatataaaatatgttg

SEQ ID NO: 60625 - DNA, 20 bp, Artificial Sequence
  Description of Artificial Sequence: Synthetic oligonucleotide
  Target: SCNA; (-) strand; PAM type: YTN; PAM sequence: TTG
cactacaaaaatataaaata

SEQ ID NO: 60626 - DNA, 20 bp, Artificial Sequence
  Description of Artificial Sequence: Synthetic oligonucleotide
  Target: SCNA; (-) strand; PAM type: YTN; PAM sequence: TTG
gggttgcactacaaaaatat

SEQ ID NO: 60627 - DNA, 20 bp, Artificial Sequence
  Description of Artificial Sequence: Synthetic oligonucleotide
  Target: SCNA; (-) strand; PAM type: YTN; PAM sequence: TTT
ggggttgcactacaaaaata

SEQ ID NO: 60628 - DNA, 20 bp, Artificial Sequence
  Description of Artificial Sequence: Synthetic oligonucleotide
  Target: SCNA; (-) strand; PAM type: YTN; PAM sequence: CTT
tggggttgcactacaaaaat

SEQ ID NO: 60629 - DNA, 20 bp, Artificial Sequence
  Description of Artificial Sequence: Synthetic oligonucleotide
  Target: SCNA; (-) strand; PAM type: YTN; PAM sequence: CTC
tttggggttgcactacaaaa

SEQ ID NO: 60630 - DNA, 20 bp, Artificial Sequence
  Description of Artificial Sequence: Synthetic oligonucleotide
  Target: SCNA; (-) strand; PAM type: YTN; PAM sequence: CTA
tctctttggggttgcactac

SEQ ID NO: 60631 - DNA, 20 bp, Artificial Sequence
  Description of Artificial Sequence: Synthetic oligonucleotide
  Target: SCNA; (-) strand; PAM type: YTN; PAM sequence: TTA
tatacctatctctttggggt

SEQ ID NO: 60632 - DNA, 20 bp, Artificial Sequence
  Description of Artificial Sequence: Synthetic oligonucleotide
  Target: SCNA; (-) strand; PAM type: YTN; PAM sequence: TTA
agttatatacctatctcttt

SEQ ID NO: 60633 - DNA, 20 bp, Artificial Sequence
  Description of Artificial Sequence: Synthetic oligonucleotide
  Target: SCNA; (-) strand; PAM type: YTN; PAM sequence: TTT
aagttatatacctatctctt

SEQ ID NO: 60634 - DNA, 20 bp, Artificial Sequence
  Description of Artificial Sequence: Synthetic oligonucleotide
  Target: SCNA; (-) strand; PAM type: YTN; PAM sequence: TTT
taagttatatacctatctct

SEQ ID NO: 60635 - DNA, 20 bp, Artificial Sequence
  Description of Artificial Sequence: Synthetic oligonucleotide
  Target: SCNA; (-) strand; PAM type: YTN; PAM sequence: TTT
ttaagttatatacctatctc

SEQ ID NO: 60636 - DNA, 20 bp, Artificial Sequence
  Description of Artificial Sequence: Synthetic oligonucleotide
  Target: SCNA; (-) strand; PAM type: YTN; PAM sequence: TTT
tttaagttatatacctatct

SEQ ID NO: 60637 - DNA, 20 bp, Artificial Sequence
  Description of Artificial Sequence: Synthetic oligonucleotide
  Target: SCNA; (-) strand; PAM type: YTN; PAM sequence: TTT
ttttaagttatatacctatc

SEQ ID NO: 60638 - DNA, 20 bp, Artificial Sequence
  Description of Artificial Sequence: Synthetic oligonucleotide
  Target: SCNA; (-) strand; PAM type: YTN; PAM sequence: CTC
gtttttttaagttatatacc

SEQ ID NO: 60639 - DNA, 20 bp, Artificial Sequence
  Description of Artificial Sequence: Synthetic oligonucleotide
  Target: SCNA; (-) strand; PAM type: YTN; PAM sequence: TTA
tctcgtttttttaagttata

SEQ ID NO: 60640 - DNA, 20 bp, Artificial Sequence
  Description of Artificial Sequence: Synthetic oligonucleotide
  Target: SCNA; (-) strand; PAM type: YTN; PAM sequence: TTT
atctcgtttttttaagttat

SEQ ID NO: 60641 - DNA, 20 bp, Artificial Sequence
  Description of Artificial Sequence: Synthetic oligonucleotide
  Target: SCNA; (-) strand; PAM type: YTN; PAM sequence: CTC
atttatctcgtttttttaag

SEQ ID NO: 60642 - DNA, 20 bp, Artificial Sequence
  Description of Artificial Sequence: Synthetic oligonucleotide
  Target: SCNA; (-) strand; PAM type: YTN; PAM sequence: CTC
tcatttatctcgttttttta

SEQ ID NO: 60643 - DNA, 20 bp, Artificial Sequence
  Description of Artificial Sequence: Synthetic oligonucleotide
  Target: SCNA; (-) strand; PAM type: YTN; PAM sequence: TTA
tgaggactctcatttatctc

SEQ ID NO: 60644 - DNA, 20 bp, Artificial Sequence
  Description of Artificial Sequence: Synthetic oligonucleotide
  Target: SCNA; (-) strand; PAM type: YTN; PAM sequence: CTT
atgaggactctcatttatct

SEQ ID NO: 60645 - DNA, 20 bp, Artificial Sequence
  Description of Artificial Sequence: Synthetic oligonucleotide
  Target: SCNA; (-) strand; PAM type: YTN; PAM sequence: TTG
atacatggtaaccttatgag

SEQ ID NO: 60646 - DNA, 20 bp, Artificial Sequence
  Description of Artificial Sequence: Synthetic oligonucleotide
  Target: SCNA; (-) strand; PAM type: YTN; PAM sequence: TTT
gatacatggtaaccttatga

SEQ ID NO: 60647 - DNA, 20 bp, Artificial Sequence
  Description of Artificial Sequence: Synthetic oligonucleotide
  Target: SCNA; (-) strand; PAM type: YTN; PAM sequence: TTG
gtttgatacatggtaacctt

SEQ ID NO: 60648 - DNA, 20 bp, Artificial Sequence
  Description of Artificial Sequence: Synthetic oligonucleotide
  Target: SCNA; (-) strand; PAM type: YTN; PAM sequence: CTG
attggtttgatacatggtaa

SEQ ID NO: 60649 - DNA, 20 bp, Artificial Sequence
  Description of Artificial Sequence: Synthetic oligonucleotide
  Target: SCNA; (-) strand; PAM type: YTN; PAM sequence: CTC
aaagaacaactgattggttt

SEQ ID NO: 60650 - DNA, 20 bp, Artificial Sequence
  Description of Artificial Sequence: Synthetic oligonucleotide
  Target: SCNA; (-) strand; PAM type: YTN; PAM sequence: TTA
tgacctcaaagaacaactga

SEQ ID NO: 60651 - DNA, 20 bp, Artificial Sequence
  Description of Artificial Sequence: Synthetic oligonucleotide
  Target: SCNA; (-) strand; PAM type: YTN; PAM sequence: TTA
gtaaataattatgacctcaa

SEQ ID NO: 60652 - DNA, 20 bp, Artificial Sequence
  Description of Artificial Sequence: Synthetic oligonucleotide
  Target: SCNA; (-) strand; PAM type: YTN; PAM sequence: TTA
ttagtaaataattatgacct

SEQ ID NO: 60653 - DNA, 20 bp, Artificial Sequence
  Description of Artificial Sequence: Synthetic oligonucleotide
  Target: SCNA; (-) strand; PAM type: YTN; PAM sequence: TTA
cagattattagtaaataatt

SEQ ID NO: 60654 - DNA, 20 bp, Artificial Sequence
  Description of Artificial Sequence: Synthetic oligonucleotide
  Target: SCNA; (-) strand; PAM type: YTN; PAM sequence: CTA
accatcaattacagattatt

SEQ ID NO: 60655 - DNA, 20 bp, Artificial Sequence
  Description of Artificial Sequence: Synthetic oligonucleotide
  Target: SCNA; (-) strand; PAM type: YTN; PAM sequence: TTA
aaggctaaccatcaattaca

SEQ ID NO: 60656 - DNA, 20 bp, Artificial Sequence
  Description of Artificial Sequence: Synthetic oligonucleotide
  Target: SCNA; (-) strand; PAM type: YTN; PAM sequence: CTC
ataaattaaaggctaaccat

SEQ ID NO: 60657 - DNA, 20 bp, Artificial Sequence
  Description of Artificial Sequence: Synthetic oligonucleotide
  Target: SCNA; (-) strand; PAM type: YTN; PAM sequence: TTA
ctcataaattaaaggctaac

SEQ ID NO: 60658 - DNA, 20 bp, Artificial Sequence
  Description of Artificial Sequence: Synthetic oligonucleotide
  Target: SCNA; (-) strand; PAM type: YTN; PAM sequence: TTA
cagattactcataaattaaa

SEQ ID NO: 60659 - DNA, 20 bp, Artificial Sequence
  Description of Artificial Sequence: Synthetic oligonucleotide
  Target: SCNA; (-) strand; PAM type: YTN; PAM sequence: TTA
tcaattacagattactcata

SEQ ID NO: 60660 - DNA, 20 bp, Artificial Sequence
  Description of Artificial Sequence: Synthetic oligonucleotide
  Target: SCNA; (-) strand; PAM type: YTN; PAM sequence: TTG
taggtgtacgttatcaatta

SEQ ID NO: 60661 - DNA, 20 bp, Artificial Sequence
  Description of Artificial Sequence: Synthetic oligonucleotide
  Target: SCNA; (-) strand; PAM type: YTN; PAM sequence: TTT
gtaggtgtacgttatcaatt

SEQ ID NO: 60662 - DNA, 20 bp, Artificial Sequence
  Description of Artificial Sequence: Synthetic oligonucleotide
  Target: SCNA; (-) strand; PAM type: YTN; PAM sequence: TTT
tgtaggtgtacgttatcaat

SEQ ID NO: 60663 - DNA, 20 bp, Artificial Sequence
  Description of Artificial Sequence: Synthetic oligonucleotide
  Target: SCNA; (-) strand; PAM type: YTN; PAM sequence: CTA
ttttgtaggtgtacgttatc

SEQ ID NO: 60664 - DNA, 20 bp, Artificial Sequence
  Description of Artificial Sequence: Synthetic oligonucleotide
  Target: SCNA; (-) strand; PAM type: YTN; PAM sequence: TTG
gcacctattttgtaggtgta

SEQ ID NO: 60665 - DNA, 20 bp, Artificial Sequence
  Description of Artificial Sequence: Synthetic oligonucleotide
  Target: SCNA; (-) strand; PAM type: YTN; PAM sequence: CTT
ggcacctattttgtaggtgt

SEQ ID NO: 60666 - DNA, 20 bp, Artificial Sequence
  Description of Artificial Sequence: Synthetic oligonucleotide
  Target: SCNA; (-) strand; PAM type: YTN; PAM sequence: CTA
gtcacataaccacttggcac

SEQ ID NO: 60667 - DNA, 20 bp, Artificial Sequence
  Description of Artificial Sequence: Synthetic oligonucleotide
  Target: SCNA; (-) strand; PAM type: YTN; PAM sequence: TTG
ctagtcacataaccacttgg

SEQ ID NO: 60668 - DNA, 20 bp, Artificial Sequence
  Description of Artificial Sequence: Synthetic oligonucleotide
  Target: SCNA; (-) strand; PAM type: YTN; PAM sequence: CTT
gctagtcacataaccacttg

SEQ ID NO: 60669 - DNA, 20 bp, Artificial Sequence
  Description of Artificial Sequence: Synthetic oligonucleotide
  Target: SCNA; (-) strand; PAM type: YTN; PAM sequence: TTA
taccttgctagtcacataac

SEQ ID NO: 60670 - DNA, 20 bp, Artificial Sequence
  Description of Artificial Sequence: Synthetic oligonucleotide
  Target: SCNA; (-) strand; PAM type: YTN; PAM sequence: TTT
ataccttgctagtcacataa

SEQ ID NO: 60671 - DNA, 20 bp, Artificial Sequence
  Description of Artificial Sequence: Synthetic oligonucleotide
  Target: SCNA; (-) strand; PAM type: YTN; PAM sequence: CTA
cagcatttataccttgctag

SEQ ID NO: 60672 - DNA, 20 bp, Artificial Sequence
  Description of Artificial Sequence: Synthetic oligonucleotide
  Target: SCNA; (-) strand; PAM type: YTN; PAM sequence: CTG
gtgtccctacagcatttata

SEQ ID NO: 60673 - DNA, 20 bp, Artificial Sequence
  Description of Artificial Sequence: Synthetic oligonucleotide
  Target: SCNA; (-) strand; PAM type: YTN; PAM sequence: CTC
tggtgtccctacagcattta

SEQ ID NO: 60674 - DNA, 20 bp, Artificial Sequence
  Description of Artificial Sequence: Synthetic oligonucleotide
  Target: SCNA; (-) strand; PAM type: YTN; PAM sequence: CTC
agggaagccatcagctctgg

SEQ ID NO: 60675 - DNA, 20 bp, Artificial Sequence
  Description of Artificial Sequence: Synthetic oligonucleotide
  Target: SCNA; (-) strand; PAM type: YTN; PAM sequence: CTC
cgctcagggaagccatcagc

SEQ ID NO: 60676 - DNA, 20 bp, Artificial Sequence
  Description of Artificial Sequence: Synthetic oligonucleotide
  Target: SCNA; (-) strand; PAM type: YTN; PAM sequence: TTG
ggaagacaagatagggtgtg

SEQ ID NO: 60677 - DNA, 20 bp, Artificial Sequence
  Description of Artificial Sequence: Synthetic oligonucleotide
  Target: SCNA; (-) strand; PAM type: YTN; PAM sequence: TTG
aggttgggaagacaagatag

SEQ ID NO: 60678 - DNA, 20 bp, Artificial Sequence
  Description of Artificial Sequence: Synthetic oligonucleotide
  Target: SCNA; (-) strand; PAM type: YTN; PAM sequence: TTT
gaggttgggaagacaagata

SEQ ID NO: 60679 - DNA, 20 bp, Artificial Sequence
  Description of Artificial Sequence: Synthetic oligonucleotide
  Target: SCNA; (-) strand; PAM type: YTN; PAM sequence: TTT
tgaggttgggaagacaagat

SEQ ID NO: 60680 - DNA, 20 bp, Artificial Sequence
  Description of Artificial Sequence: Synthetic oligonucleotide
  Target: SCNA; (-) strand; PAM type: YTN; PAM sequence: CTT
ttgaggttgggaagacaaga

SEQ ID NO: 60681 - DNA, 20 bp, Artificial Sequence
  Description of Artificial Sequence: Synthetic oligonucleotide
  Target: SCNA; (-) strand; PAM type: YTN; PAM sequence: CTC
ttttgaggttgggaagacaa

SEQ ID NO: 60682 - DNA, 20 bp, Artificial Sequence
  Description of Artificial Sequence: Synthetic oligonucleotide
  Target: SCNA; (-) strand; PAM type: YTN; PAM sequence: CTG
tgctcttttgaggttgggaa

SEQ ID NO: 60683 - DNA, 20 bp, Artificial Sequence
  Description of Artificial Sequence: Synthetic oligonucleotide
  Target: SCNA; (-) strand; PAM type: YTN; PAM sequence: CTC
tgtgctcttttgaggttggg

SEQ ID NO: 60684 - DNA, 20 bp, Artificial Sequence
  Description of Artificial Sequence: Synthetic oligonucleotide
  Target: SCNA; (-) strand; PAM type: YTN; PAM sequence: CTC
cactctgtgctcttttgagg

SEQ ID NO: 60685 - DNA, 20 bp, Artificial Sequence
  Description of Artificial Sequence: Synthetic oligonucleotide
  Target: SCNA; (-) strand; PAM type: YTN; PAM sequence: TTC
tccactctgtgctcttttga

SEQ ID NO: 60686 - DNA, 20 bp, Artificial Sequence
  Description of Artificial Sequence: Synthetic oligonucleotide
  Target: SCNA; (-) strand; PAM type: YTN; PAM sequence: CTT
ctccactctgtgctcttttg

SEQ ID NO: 60687 - DNA, 20 bp, Artificial Sequence
  Description of Artificial Sequence: Synthetic oligonucleotide
  Target: SCNA; (-) strand; PAM type: YTN; PAM sequence: TTC
ttctccactctgtgctcttt

SEQ ID NO: 60688 - DNA, 20 bp, Artificial Sequence
  Description of Artificial Sequence: Synthetic oligonucleotide
  Target: SCNA; (-) strand; PAM type: YTN; PAM sequence: CTT
cttctccactctgtgctctt

SEQ ID NO: 60689 - DNA, 20 bp, Artificial Sequence
  Description of Artificial Sequence: Synthetic oligonucleotide
  Target: SCNA; (-) strand; PAM type: YTN; PAM sequence: CTG
accttcttctccactctgtg

SEQ ID NO: 60690 - DNA, 20 bp, Artificial Sequence
  Description of Artificial Sequence: Synthetic oligonucleotide
  Target: SCNA; (-) strand; PAM type: YTN; PAM sequence: TTC
tgaccttcttctccactctg

SEQ ID NO: 60691 - DNA, 20 bp, Artificial Sequence
  Description of Artificial Sequence: Synthetic oligonucleotide
  Target: SCNA; (-) strand; PAM type: YTN; PAM sequence: CTT
ctgaccttcttctccactct

SEQ ID NO: 60692 - DNA, 20 bp, Artificial Sequence
  Description of Artificial Sequence: Synthetic oligonucleotide
  Target: SCNA; (-) strand; PAM type: YTN; PAM sequence: TTA
cttctgaccttcttctccac

SEQ ID NO: 60693 - DNA, 20 bp, Artificial Sequence
  Description of Artificial Sequence: Synthetic oligonucleotide
  Target: SCNA; (-) strand; PAM type: YTN; PAM sequence: CTC
aggtattacttctgaccttc

SEQ ID NO: 60694 - DNA, 20 bp, Artificial Sequence
  Description of Artificial Sequence: Synthetic oligonucleotide
  Target: SCNA; (-) strand; PAM type: YTN; PAM sequence: CTC
tcaggtattacttctgacct

SEQ ID NO: 60695 - DNA, 20 bp, Artificial Sequence
  Description of Artificial Sequence: Synthetic oligonucleotide
  Target: SCNA; (-) strand; PAM type: YTN; PAM sequence: CTC
aaaactctcaggtattactt

SEQ ID NO: 60696 - DNA, 20 bp, Artificial Sequence
  Description of Artificial Sequence: Synthetic oligonucleotide
  Target: SCNA; (-) strand; PAM type: YTN; PAM sequence: TTC
tcaaaactctcaggtattac

SEQ ID NO: 60697 - DNA, 20 bp, Artificial Sequence
  Description of Artificial Sequence: Synthetic oligonucleotide
  Target: SCNA; (-) strand; PAM type: YTN; PAM sequence: CTG
agttctcaaaactctcaggt

SEQ ID NO: 60698 - DNA, 20 bp, Artificial Sequence
  Description of Artificial Sequence: Synthetic oligonucleotide
  Target: SCNA; (-) strand; PAM type: YTN; PAM sequence: CTG
acaaagtcaacataacatgc

SEQ ID NO: 60699 - DNA, 20 bp, Artificial Sequence
  Description of Artificial Sequence: Synthetic oligonucleotide
  Target: SCNA; (-) strand; PAM type: YTN; PAM sequence: CTA
agctgacaaagtcaacataa

SEQ ID NO: 60700 - DNA, 20 bp, Artificial Sequence
  Description of Artificial Sequence: Synthetic oligonucleotide
  Target: SCNA; (-) strand; PAM type: YTN; PAM sequence: CTC
actaagctgacaaagtcaac

SEQ ID NO: 60701 - DNA, 20 bp, Artificial Sequence
  Description of Artificial Sequence: Synthetic oligonucleotide
  Target: SCNA; (-) strand; PAM type: YTN; PAM sequence: TTC
acctcactaagctgacaaag

SEQ ID NO: 60702 - DNA, 20 bp, Artificial Sequence
  Description of Artificial Sequence: Synthetic oligonucleotide
  Target: SCNA; (-) strand; PAM type: YTN; PAM sequence: CTT
cacctcactaagctgacaaa

SEQ ID NO: 60703 - DNA, 20 bp, Artificial Sequence
  Description of Artificial Sequence: Synthetic oligonucleotide
  Target: SCNA; (-) strand; PAM type: YTN; PAM sequence: CTC
aagtcaaaatgtgcttcacc

SEQ ID NO: 60704 - DNA, 20 bp, Artificial Sequence
  Description of Artificial Sequence: Synthetic oligonucleotide
  Target: SCNA; (-) strand; PAM type: YTN; PAM sequence: TTC
tcaagtcaaaatgtgcttca

SEQ ID NO: 60705 - DNA, 20 bp, Artificial Sequence
  Description of Artificial Sequence: Synthetic oligonucleotide
  Target: SCNA; (-) strand; PAM type: YTN; PAM sequence: TTG
atagcaaattctcaagtcaa

SEQ ID NO: 60706 - DNA, 20 bp, Artificial Sequence
  Description of Artificial Sequence: Synthetic oligonucleotide
  Target: SCNA; (-) strand; PAM type: YTN; PAM sequence: CTC
aataagcagcagtggccatc

SEQ ID NO: 60707 - DNA, 20 bp, Artificial Sequence
  Description of Artificial Sequence: Synthetic oligonucleotide
  Target: SCNA; (-) strand; PAM type: YTN; PAM sequence: CTG
ctcaataagcagcagtggcc

SEQ ID NO: 60708 - DNA, 20 bp, Artificial Sequence
  Description of Artificial Sequence: Synthetic oligonucleotide
  Target: SCNA; (-) strand; PAM type: YTN; PAM sequence: CTC
tgctcaataagcagcagtgg

SEQ ID NO: 60709 - DNA, 20 bp, Artificial Sequence
  Description of Artificial Sequence: Synthetic oligonucleotide
  Target: SCNA; (-) strand; PAM type: YTN; PAM sequence: TTC
caatgccactctgctcaata

SEQ ID NO: 60710 - DNA, 20 bp, Artificial Sequence
  Description of Artificial Sequence: Synthetic oligonucleotide
  Target: SCNA; (-) strand; PAM type: YTN; PAM sequence: CTT
ccaatgccactctgctcaat

SEQ ID NO: 60711 - DNA, 20 bp, Artificial Sequence
  Description of Artificial Sequence: Synthetic oligonucleotide
  Target: SCNA; (-) strand; PAM type: YTN; PAM sequence: TTG
agtgtcttccaatgccactc

SEQ ID NO: 60712 - DNA, 20 bp, Artificial Sequence
  Description of Artificial Sequence: Synthetic oligonucleotide
  Target: SCNA; (-) strand; PAM type: YTN; PAM sequence: TTT
gagtgtcttccaatgccact

SEQ ID NO: 60713 - DNA, 20 bp, Artificial Sequence
  Description of Artificial Sequence: Synthetic oligonucleotide
  Target: SCNA; (-) strand; PAM type: YTN; PAM sequence: CTT
tgagtgtcttccaatgccac

SEQ ID NO: 60714 - DNA, 20 bp, Artificial Sequence
  Description of Artificial Sequence: Synthetic oligonucleotide
  Target: SCNA; (-) strand; PAM type: YTN; PAM sequence: CTC
agtaatataaatgcaataaa

SEQ ID NO: 60715 - DNA, 20 bp, Artificial Sequence
  Description of Artificial Sequence: Synthetic oligonucleotide
  Target: SCNA; (-) strand; PAM type: YTN; PAM sequence: TTA
tataatgctcagtaatataa

SEQ ID NO: 60716 - DNA, 20 bp, Artificial Sequence
  Description of Artificial Sequence: Synthetic oligonucleotide
  Target: SCNA; (-) strand; PAM type: YTN; PAM sequence: TTT
atataatgctcagtaatata

SEQ ID NO: 60717 - DNA, 20 bp, Artificial Sequence
  Description of Artificial Sequence: Synthetic oligonucleotide
  Target: SCNA; (-) strand; PAM type: YTN; PAM sequence: CTT
tatataatgctcagtaatat

SEQ ID NO: 60718 - DNA, 20 bp, Artificial Sequence
  Description of Artificial Sequence: Synthetic oligonucleotide
  Target: SCNA; (-) strand; PAM type: YTN; PAM sequence: TTA
tctttatataatgctcagta

SEQ ID NO: 60719 - DNA, 20 bp, Artificial Sequence
  Description of Artificial Sequence: Synthetic oligonucleotide
  Target: SCNA; (-) strand; PAM type: YTN; PAM sequence: TTA
attatctttatataatgctc

SEQ ID NO: 60720 - DNA, 20 bp, Artificial Sequence
  Description of Artificial Sequence: Synthetic oligonucleotide
  Target: SCNA; (-) strand; PAM type: YTN; PAM sequence: TTT
aattatctttatataatgct

SEQ ID NO: 60721 - DNA, 20 bp, Artificial Sequence
  Description of Artificial Sequence: Synthetic oligonucleotide
  Target: SCNA; (-) strand; PAM type: YTN; PAM sequence: CTA
aatccaaaagcagaaagatt

SEQ ID NO: 60722 - DNA, 20 bp, Artificial Sequence
  Description of Artificial Sequence: Synthetic oligonucleotide
  Target: SCNA; (-) strand; PAM type: YTN; PAM sequence: TTA
gatctaaatccaaaagcaga

SEQ ID NO: 60723 - DNA, 20 bp, Artificial Sequence
  Description of Artificial Sequence: Synthetic oligonucleotide
  Target: SCNA; (-) strand; PAM type: YTN; PAM sequence: TTA
attagatctaaatccaaaag

SEQ ID NO: 60724 - DNA, 20 bp, Artificial Sequence
  Description of Artificial Sequence: Synthetic oligonucleotide
  Target: SCNA; (-) strand; PAM type: YTN; PAM sequence: CTC
agaaattaattagatctaaa

SEQ ID NO: 60725 - DNA, 20 bp, Artificial Sequence
  Description of Artificial Sequence: Synthetic oligonucleotide
  Target: SCNA; (-) strand; PAM type: YTN; PAM sequence: TTC
aaatgactcagaaattaatt

SEQ ID NO: 60726 - DNA, 20 bp, Artificial Sequence
  Description of Artificial Sequence: Synthetic oligonucleotide
  Target: SCNA; (-) strand; PAM type: YTN; PAM sequence: CTT
caaatgactcagaaattaat

SEQ ID NO: 60727 - DNA, 20 bp, Artificial Sequence
  Description of Artificial Sequence: Synthetic oligonucleotide
  Target: SCNA; (-) strand; PAM type: YTN; PAM sequence: TTC
ttcaaatgactcagaaatta

SEQ ID NO: 60728 - DNA, 20 bp, Artificial Sequence
  Description of Artificial Sequence: Synthetic oligonucleotide
  Target: SCNA; (-) strand; PAM type: YTN; PAM sequence: TTT
cttcaaatgactcagaaatt

SEQ ID NO: 60729 - DNA, 20 bp, Artificial Sequence
  Description of Artificial Sequence: Synthetic oligonucleotide
  Target: SCNA; (-) strand; PAM type: YTN; PAM sequence: TTA
atagacaaaaatttcttcaa

SEQ ID NO: 60730 - DNA, 20 bp, Artificial Sequence
  Description of Artificial Sequence: Synthetic oligonucleotide
  Target: SCNA; (-) strand; PAM type: YTN; PAM sequence: TTT
aatagacaaaaatttcttca

SEQ ID NO: 60731 - DNA, 20 bp, Artificial Sequence
  Description of Artificial Sequence: Synthetic oligonucleotide
  Target: SCNA; (-) strand; PAM type: YTN; PAM sequence: TTC
aatttaatagacaaaaattt

SEQ ID NO: 60732 - DNA, 20 bp, Artificial Sequence
  Description of Artificial Sequence: Synthetic oligonucleotide
  Target: SCNA; (-) strand; PAM type: YTN; PAM sequence: CTT
caatttaatagacaaaaatt

SEQ ID NO: 60733 - DNA, 20 bp, Artificial Sequence
  Description of Artificial Sequence: Synthetic oligonucleotide
  Target: SCNA; (-) strand; PAM type: YTN; PAM sequence: TTC
aatcaacatacttcaattta

SEQ ID NO: 60734 - DNA, 20 bp, Artificial Sequence
  Description of Artificial Sequence: Synthetic oligonucleotide
  Target: SCNA; (-) strand; PAM type: YTN; PAM sequence: TTT
caatcaacatacttcaattt

SEQ ID NO: 60735 - DNA, 20 bp, Artificial Sequence
  Description of Artificial Sequence: Synthetic oligonucleotide
  Target: SCNA; (-) strand; PAM type: YTN; PAM sequence: TTT
tcaatcaacatacttcaatt

SEQ ID NO: 60736 - DNA, 20 bp, Artificial Sequence
  Description of Artificial Sequence: Synthetic oligonucleotide
  Target: SCNA; (-) strand; PAM type: YTN; PAM sequence: CTG
cgtacaccaattttcaatca

SEQ ID NO: 60737 - DNA, 20 bp, Artificial Sequence
  Description of Artificial Sequence: Synthetic oligonucleotide
  Target: SCNA; (-) strand; PAM type: YTN; PAM sequence: TTA
tctgcgtacaccaattttca

SEQ ID NO: 60738 - DNA, 20 bp, Artificial Sequence
  Description of Artificial Sequence: Synthetic oligonucleotide
  Target: SCNA; (-) strand; PAM type: YTN; PAM sequence: TTG
ttatctgcgtacaccaattt

SEQ ID NO: 60739 - DNA, 20 bp, Artificial Sequence
  Description of Artificial Sequence: Synthetic oligonucleotide
  Target: SCNA; (-) strand; PAM type: YTN; PAM sequence: TTT
gttatctgcgtacaccaatt

SEQ ID NO: 60740 - DNA, 20 bp, Artificial Sequence
  Description of Artificial Sequence: Synthetic oligonucleotide
  Target: SCNA; (-) strand; PAM type: YTN; PAM sequence: TTT
tgttatctgcgtacaccaat

SEQ ID NO: 60741 - DNA, 20 bp, Artificial Sequence
  Description of Artificial Sequence: Synthetic oligonucleotide
  Target: SCNA; (-) strand; PAM type: YTN; PAM sequence: TTT
ttgttatctgcgtacaccaa

SEQ ID NO: 60742 - DNA, 20 bp, Artificial Sequence
  Description of Artificial Sequence: Synthetic oligonucleotide
  Target: SCNA; (-) strand; PAM type: YTN; PAM sequence: CTC
catttttgttatctgcgtac

SEQ ID NO: 60743 - DNA, 20 bp, Artificial Sequence
  Description of Artificial Sequence: Synthetic oligonucleotide
  Target: SCNA; (-) strand; PAM type: YTN; PAM sequence: TTC
cctccatttttgttatctgc

SEQ ID NO: 60744 - DNA, 20 bp, Artificial Sequence
  Description of Artificial Sequence: Synthetic oligonucleotide
  Target: SCNA; (-) strand; PAM type: YTN; PAM sequence: TTG
ttccctccatttttgttatc

SEQ ID NO: 60745 - DNA, 20 bp, Artificial Sequence
  Description of Artificial Sequence: Synthetic oligonucleotide
  Target: SCNA; (-) strand; PAM type: YTN; PAM sequence: TTT
gttccctccatttttgttat

SEQ ID NO: 60746 - DNA, 20 bp, Artificial Sequence
  Description of Artificial Sequence: Synthetic oligonucleotide
  Target: SCNA; (-) strand; PAM type: YTN; PAM sequence: TTT
tgttccctccatttttgtta

SEQ ID NO: 60747 - DNA, 20 bp, Artificial Sequence
  Description of Artificial Sequence: Synthetic oligonucleotide
  Target: SCNA; (-) strand; PAM type: YTN; PAM sequence: TTA
tgggttttgttccctccatt

SEQ ID NO: 60748 - DNA, 20 bp, Artificial Sequence
  Description of Artificial Sequence: Synthetic oligonucleotide
  Target: SCNA; (-) strand; PAM type: YTN; PAM sequence: TTT
atgggttttgttccctccat

SEQ ID NO: 60749 - DNA, 20 bp, Artificial Sequence
  Description of Artificial Sequence: Synthetic oligonucleotide
  Target: SCNA; (-) strand; PAM type: YTN; PAM sequence: TTT
tatgggttttgttccctcca

SEQ ID NO: 60750 - DNA, 20 bp, Artificial Sequence
  Description of Artificial Sequence: Synthetic oligonucleotide
  Target: SCNA; (-) strand; PAM type: YTN; PAM sequence: TTT
ttatgggttttgttccctcc

SEQ ID NO: 60751 - DNA, 20 bp, Artificial Sequence
  Description of Artificial Sequence: Synthetic oligonucleotide
  Target: SCNA; (-) strand; PAM type: YTN; PAM sequence: TTA
tttttatgggttttgttccc

SEQ ID NO: 60752 - DNA, 20 bp, Artificial Sequence
  Description of Artificial Sequence: Synthetic oligonucleotide
  Target: SCNA; (-) strand; PAM type: YTN; PAM sequence: TTA
atgatcagtgttatttttat

SEQ ID NO: 60753 - DNA, 20 bp, Artificial Sequence
  Description of Artificial Sequence: Synthetic oligonucleotide
  Target: SCNA; (-) strand; PAM type: YTN; PAM sequence: CTT
aatgatcagtgttattttta

SEQ ID NO: 60754 - DNA, 20 bp, Artificial Sequence
  Description of Artificial Sequence: Synthetic oligonucleotide
  Target: SCNA; (-) strand; PAM type: YTN; PAM sequence: CTA
ccttaatgatcagtgttatt

SEQ ID NO: 60755 - DNA, 20 bp, Artificial Sequence
  Description of Artificial Sequence: Synthetic oligonucleotide
  Target: SCNA; (-) strand; PAM type: YTN; PAM sequence: TTG
aagaactaccttaatgatca

SEQ ID NO: 60756 - DNA, 20 bp, Artificial Sequence
  Description of Artificial Sequence: Synthetic oligonucleotide
  Target: SCNA; (-) strand; PAM type: YTN; PAM sequence: CTC
attgaagaactaccttaatg

SEQ ID NO: 60757 - DNA, 20 bp, Artificial Sequence
  Description of Artificial Sequence: Synthetic oligonucleotide
  Target: SCNA; (-) strand; PAM type: YTN; PAM sequence: TTA
actcattgaagaactacctt

SEQ ID NO: 60758 - DNA, 20 bp, Artificial Sequence
  Description of Artificial Sequence: Synthetic oligonucleotide
  Target: SCNA; (-) strand; PAM type: YTN; PAM sequence: TTT
aactcattgaagaactacct

SEQ ID NO: 60759 - DNA, 20 bp, Artificial Sequence
  Description of Artificial Sequence: Synthetic oligonucleotide
  Target: SCNA; (-) strand; PAM type: YTN; PAM sequence: TTT
taactcattgaagaactacc

SEQ ID NO: 60760 - DNA, 20 bp, Artificial Sequence
  Description of Artificial Sequence: Synthetic oligonucleotide
  Target: SCNA; (-) strand; PAM type: YTN; PAM sequence: TTT
ttaactcattgaagaactac

SEQ ID NO: 60761 - DNA, 20 bp, Artificial Sequence
  Description of Artificial Sequence: Synthetic oligonucleotide
  Target: SCNA; (-) strand; PAM type: YTN; PAM sequence: CTT
tttaactcattgaagaacta

SEQ ID NO: 60762 - DNA, 20 bp, Artificial Sequence
  Description of Artificial Sequence: Synthetic oligonucleotide
  Target: SCNA; (-) strand; PAM type: YTN; PAM sequence: CTA
ctttttaactcattgaagaa

SEQ ID NO: 60763 - DNA, 20 bp, Artificial Sequence
  Description of Artificial Sequence: Synthetic oligonucleotide
  Target: SCNA; (-) strand; PAM type: YTN; PAM sequence: TTA
acaactactttttaactcat

SEQ ID NO: 60764 - DNA, 20 bp, Artificial Sequence
  Description of Artificial Sequence: Synthetic oligonucleotide
  Target: SCNA; (-) strand; PAM type: YTN; PAM sequence: TTT
aacaactactttttaactca

SEQ ID NO: 60765 - DNA, 20 bp, Artificial Sequence
  Description of Artificial Sequence: Synthetic oligonucleotide
  Target: SCNA; (-) strand; PAM type: YTN; PAM sequence: TTT
taacaactactttttaactc

SEQ ID NO: 60766 - DNA, 20 bp, Artificial Sequence
  Description of Artificial Sequence: Synthetic oligonucleotide
  Target: SCNA; (-) strand; PAM type: YTN; PAM sequence: CTT
ttaacaactactttttaact

SEQ ID NO: 60767 - DNA, 20 bp, Artificial Sequence
  Description of Artificial Sequence: Synthetic oligonucleotide
  Target: SCNA; (-) strand; PAM type: YTN; PAM sequence: TTA
taagaatatacttttaacaa

SEQ ID NO: 60768 - DNA, 20 bp, Artificial Sequence
  Description of Artificial Sequence: Synthetic oligonucleotide
  Target: SCNA; (-) strand; PAM type: YTN; PAM sequence: TTT
ataagaatatacttttaaca

SEQ ID NO: 60769 - DNA, 20 bp, Artificial Sequence
  Description of Artificial Sequence: Synthetic oligonucleotide
  Target: SCNA; (-) strand; PAM type: YTN; PAM sequence: CTT
tataagaatatacttttaac

SEQ ID NO: 60770 - DNA, 20 bp, Artificial Sequence
  Description of Artificial Sequence: Synthetic oligonucleotide
  Target: SCNA; (-) strand; PAM type: YTN; PAM sequence: TTC
ctttataagaatatactttt

SEQ ID NO: 60771 - DNA, 20 bp, Artificial Sequence
  Description of Artificial Sequence: Synthetic oligonucleotide
  Target: SCNA; (-) strand; PAM type: YTN; PAM sequence: CTC
attcctttataagaatatac

SEQ ID NO: 60772 - DNA, 20 bp, Artificial Sequence
  Description of Artificial Sequence: Synthetic oligonucleotide
  Target: SCNA; (-) strand; PAM type: YTN; PAM sequence: CTC
ataagaaaagtaatctcatt

SEQ ID NO: 60773 - DNA, 20 bp, Artificial Sequence
  Description of Artificial Sequence: Synthetic oligonucleotide
  Target: SCNA; (-) strand; PAM type: YTN; PAM sequence: TTG
gtagaagcctcataagaaaa

SEQ ID NO: 60774 - DNA, 20 bp, Artificial Sequence
  Description of Artificial Sequence: Synthetic oligonucleotide
  Target: SCNA; (-) strand; PAM type: YTN; PAM sequence: TTT
ggtagaagcctcataagaaa

SEQ ID NO: 60775 - DNA, 20 bp, Artificial Sequence
  Description of Artificial Sequence: Synthetic oligonucleotide
  Target: SCNA; (-) strand; PAM type: YTN; PAM sequence: CTG
aagatgtttggtagaagcct

SEQ ID NO: 60776 - DNA, 20 bp, Artificial Sequence
  Description of Artificial Sequence: Synthetic oligonucleotide
  Target: SCNA; (-) strand; PAM type: YTN; PAM sequence: TTA
tggctgaagatgtttggtag

SEQ ID NO: 60777 - DNA, 20 bp, Artificial Sequence
  Description of Artificial Sequence: Synthetic oligonucleotide
  Target: SCNA; (-) strand; PAM type: YTN; PAM sequence: CTT
atggctgaagatgtttggta

SEQ ID NO: 60778 - DNA, 20 bp, Artificial Sequence
  Description of Artificial Sequence: Synthetic oligonucleotide
  Target: SCNA; (-) strand; PAM type: YTN; PAM sequence: TTC
acttatggctgaagatgttt

SEQ ID NO: 60779 - DNA, 20 bp, Artificial Sequence
  Description of Artificial Sequence: Synthetic oligonucleotide
  Target: SCNA; (-) strand; PAM type: YTN; PAM sequence: TTT
cacttatggctgaagatgtt

SEQ ID NO: 60780 - DNA, 20 bp, Artificial Sequence
  Description of Artificial Sequence: Synthetic oligonucleotide
  Target: SCNA; (-) strand; PAM type: YTN; PAM sequence: TTA
taatttcacttatggctgaa

SEQ ID NO: 60781 - DNA, 20 bp, Artificial Sequence
  Description of Artificial Sequence: Synthetic oligonucleotide
  Target: SCNA; (-) strand; PAM type: YTN; PAM sequence: TTT
ataatttcacttatggctga

SEQ ID NO: 60782 - DNA, 20 bp, Artificial Sequence
  Description of Artificial Sequence: Synthetic oligonucleotide
  Target: SCNA; (-) strand; PAM type: YTN; PAM sequence: TTT
tataatttcacttatggctg

SEQ ID NO: 60783 - DNA, 20 bp, Artificial Sequence
  Description of Artificial Sequence: Synthetic oligonucleotide
  Target: SCNA; (-) strand; PAM type: YTN; PAM sequence: TTG
gaggcgaccaaagaccattt

SEQ ID NO: 60784 - DNA, 20 bp, Artificial Sequence
  Description of Artificial Sequence: Synthetic oligonucleotide
  Target: SCNA; (-) strand; PAM type: YTN; PAM sequence: TTG
aaagattggaggcgaccaaa

SEQ ID NO: 60785 - DNA, 20 bp, Artificial Sequence
  Description of Artificial Sequence: Synthetic oligonucleotide
  Target: SCNA; (-) strand; PAM type: YTN; PAM sequence: TTT
gaaagattggaggcgaccaa

SEQ ID NO: 60786 - DNA, 20 bp, Artificial Sequence
  Description of Artificial Sequence: Synthetic oligonucleotide
  Target: SCNA; (-) strand; PAM type: YTN; PAM sequence: CTA
gtttgaaagattggaggcga

SEQ ID NO: 60787 - DNA, 20 bp, Artificial Sequence
  Description of Artificial Sequence: Synthetic oligonucleotide
  Target: SCNA; (-) strand; PAM type: YTN; PAM sequence: TTA
cataactagtttgaaagatt

SEQ ID NO: 60788 - DNA, 20 bp, Artificial Sequence
  Description of Artificial Sequence: Synthetic oligonucleotide
  Target: SCNA; (-) strand; PAM type: YTN; PAM sequence: TTC
attacataactagtttgaaa

SEQ ID NO: 60789 - DNA, 20 bp, Artificial Sequence
  Description of Artificial Sequence: Synthetic oligonucleotide
  Target: SCNA; (-) strand; PAM type: YTN; PAM sequence: CTT
cattacataactagtttgaa

SEQ ID NO: 60790 - DNA, 20 bp, Artificial Sequence
  Description of Artificial Sequence: Synthetic oligonucleotide
  Target: SCNA; (-) strand; PAM type: YTN; PAM sequence: TTA
tccttcattacataactagt

SEQ ID NO: 60791 - DNA, 20 bp, Artificial Sequence
  Description of Artificial Sequence: Synthetic oligonucleotide
  Target: SCNA; (-) strand; PAM type: YTN; PAM sequence: TTT
atccttcattacataactag

SEQ ID NO: 60792 - DNA, 20 bp, Artificial Sequence
  Description of Artificial Sequence: Synthetic oligonucleotide
  Target: SCNA; (-) strand; PAM type: YTN; PAM sequence: TTT
tatccttcattacataacta

SEQ ID NO: 60793 - DNA, 20 bp, Artificial Sequence
  Description of Artificial Sequence: Synthetic oligonucleotide
  Target: SCNA; (-) strand; PAM type: YTN; PAM sequence: CTT
ttatccttcattacataact

SEQ ID NO: 60794 - DNA, 20 bp, Artificial Sequence
  Description of Artificial Sequence: Synthetic oligonucleotide
  Target: SCNA; (-) strand; PAM type: YTN; PAM sequence: TTC
ttttatccttcattacataa

SEQ ID NO: 60795 - DNA, 20 bp, Artificial Sequence
  Description of Artificial Sequence: Synthetic oligonucleotide
  Target: SCNA; (-) strand; PAM type: YTN; PAM sequence: TTA
ttcttttatccttcattaca

SEQ ID NO: 60796 - DNA, 20 bp, Artificial Sequence
  Description of Artificial Sequence: Synthetic oligonucleotide
  Target: SCNA; (-) strand; PAM type: YTN; PAM sequence: TTT
attcttttatccttcattac

SEQ ID NO: 60797 - DNA, 20 bp, Artificial Sequence
  Description of Artificial Sequence: Synthetic oligonucleotide
  Target: SCNA; (-) strand; PAM type: YTN; PAM sequence: TTC
catttattcttttatccttc

SEQ ID NO: 60798 - DNA, 20 bp, Artificial Sequence
  Description of Artificial Sequence: Synthetic oligonucleotide
  Target: SCNA; (-) strand; PAM type: YTN; PAM sequence: TTT
ccatttattcttttatcctt

SEQ ID NO: 60799 - DNA, 20 bp, Artificial Sequence
  Description of Artificial Sequence: Synthetic oligonucleotide
  Target: SCNA; (-) strand; PAM type: YTN; PAM sequence: TTT
tccatttattcttttatcct

SEQ ID NO: 60800 - DNA, 20 bp, Artificial Sequence
  Description of Artificial Sequence: Synthetic oligonucleotide
  Target: SCNA; (-) strand; PAM type: YTN; PAM sequence: TTG
ccaacacgttttccatttat

SEQ ID NO: 60801 - DNA, 20 bp, Artificial Sequence
  Description of Artificial Sequence: Synthetic oligonucleotide
  Target: SCNA; (-) strand; PAM type: YTN; PAM sequence: TTT
gccaacacgttttccattta

SEQ ID NO: 60802 - DNA, 20 bp, Artificial Sequence
  Description of Artificial Sequence: Synthetic oligonucleotide
  Target: SCNA; (-) strand; PAM type: YTN; PAM sequence: CTT
tgccaacacgttttccattt

SEQ ID NO: 60803 - DNA, 20 bp, Artificial Sequence
  Description of Artificial Sequence: Synthetic oligonucleotide
  Target: SCNA; (-) strand; PAM type: YTN; PAM sequence: TTA
ctttgccaacacgttttcca

SEQ ID NO: 60804 - DNA, 20 bp, Artificial Sequence
  Description of Artificial Sequence: Synthetic oligonucleotide
  Target: SCNA; (-) strand; PAM type: YTN; PAM sequence: CTC
caacggaataattactttgc

SEQ ID NO: 60805 - DNA, 20 bp, Artificial Sequence
  Description of Artificial Sequence: Synthetic oligonucleotide
  Target: SCNA; (-) strand; PAM type: YTN; PAM sequence: CTC
tccaacggaataattacttt

SEQ ID NO: 60806 - DNA, 20 bp, Artificial Sequence
  Description of Artificial Sequence: Synthetic oligonucleotide
  Target: SCNA; (-) strand; PAM type: YTN; PAM sequence: TTA
tcaaataaactctccaacgg

SEQ ID NO: 60807 - DNA, 20 bp, Artificial Sequence
  Description of Artificial Sequence: Synthetic oligonucleotide
  Target: SCNA; (-) strand; PAM type: YTN; PAM sequence: TTA
ttatcaaataaactctccaa

SEQ ID NO: 60808 - DNA, 20 bp, Artificial Sequence
  Description of Artificial Sequence: Synthetic oligonucleotide
  Target: SCNA; (-) strand; PAM type: YTN; PAM sequence: TTA
ttattatcaaataaactctc

SEQ ID NO: 60809 - DNA, 20 bp, Artificial Sequence
  Description of Artificial Sequence: Synthetic oligonucleotide
  Target: SCNA; (-) strand; PAM type: YTN; PAM sequence: TTA
tatataggaaccatggttat

SEQ ID NO: 60810 - DNA, 20 bp, Artificial Sequence
  Description of Artificial Sequence: Synthetic oligonucleotide
  Target: SCNA; (-) strand; PAM type: YTN; PAM sequence: TTT
atatataggaaccatggtta

SEQ ID NO: 60811 - DNA, 20 bp, Artificial Sequence
  Description of Artificial Sequence: Synthetic oligonucleotide
  Target: SCNA; (-) strand; PAM type: YTN; PAM sequence: TTT
tatatataggaaccatggtt

SEQ ID NO: 60812 - DNA, 20 bp, Artificial Sequence
  Description of Artificial Sequence: Synthetic oligonucleotide
  Target: SCNA; (-) strand; PAM type: YTN; PAM sequence: CTT
ttatatataggaaccatggt

SEQ ID NO: 60813 - DNA, 20 bp, Artificial Sequence
  Description of Artificial Sequence: Synthetic oligonucleotide
  Target: SCNA; (-) strand; PAM type: YTN; PAM sequence: TTG
agcacacttttatatatagg

SEQ ID NO: 60814 - DNA, 20 bp, Artificial Sequence
  Description of Artificial Sequence: Synthetic oligonucleotide
  Target: SCNA; (-) strand; PAM type: YTN; PAM sequence: TTG
tgggaatgtcataataagac

SEQ ID NO: 60815 - DNA, 20 bp, Artificial Sequence
  Description of Artificial Sequence: Synthetic oligonucleotide
  Target: SCNA; (-) strand; PAM type: YTN; PAM sequence: TTT
gtgggaatgtcataataaga

SEQ ID NO: 60816 - DNA, 20 bp, Artificial Sequence
  Description of Artificial Sequence: Synthetic oligonucleotide
  Target: SCNA; (-) strand; PAM type: YTN; PAM sequence: TTT
tgtgggaatgtcataataag

SEQ ID NO: 60817 - DNA, 20 bp, Artificial Sequence
  Description of Artificial Sequence: Synthetic oligonucleotide
  Target: SCNA; (-) strand; PAM type: YTN; PAM sequence: TTT
ttgtgggaatgtcataataa

SEQ ID NO: 60818 - DNA, 20 bp, Artificial Sequence
  Description of Artificial Sequence: Synthetic oligonucleotide
  Target: SCNA; (-) strand; PAM type: YTN; PAM sequence: TTG
cagtttttgtgggaatgtca

SEQ ID NO: 60819 - DNA, 20 bp, Artificial Sequence
  Description of Artificial Sequence: Synthetic oligonucleotide
  Target: SCNA; (-) strand; PAM type: YTN; PAM sequence: CTT
gcagtttttgtgggaatgtc

SEQ ID NO: 60820 - DNA, 20 bp, Artificial Sequence
  Description of Artificial Sequence: Synthetic oligonucleotide
  Target: SCNA; (-) strand; PAM type: YTN; PAM sequence: CTA
ccttgcagtttttgtgggaa

SEQ ID NO: 60821 - DNA, 20 bp, Artificial Sequence
  Description of Artificial Sequence: Synthetic oligonucleotide
  Target: SCNA; (-) strand; PAM type: YTN; PAM sequence: CTG
caactaccttgcagtttttg

SEQ ID NO: 60822 - DNA, 20 bp, Artificial Sequence
  Description of Artificial Sequence: Synthetic oligonucleotide
  Target: SCNA; (-) strand; PAM type: YTN; PAM sequence: TTA
gaaaactgcaactaccttgc

SEQ ID NO: 60823 - DNA, 20 bp, Artificial Sequence
  Description of Artificial Sequence: Synthetic oligonucleotide
  Target: SCNA; (-) strand; PAM type: YTN; PAM sequence: TTT
agaaaactgcaactaccttg

SEQ ID NO: 60824 - DNA, 20 bp, Artificial Sequence
  Description of Artificial Sequence: Synthetic oligonucleotide
  Target: SCNA; (-) strand; PAM type: YTN; PAM sequence: TTA
gtaaaaaatatgatttagaa

SEQ ID NO: 60825 - DNA, 20 bp, Artificial Sequence
  Description of Artificial Sequence: Synthetic oligonucleotide
  Target: SCNA; (-) strand; PAM type: YTN; PAM sequence: CTG
attagtaaaaaatatgattt

SEQ ID NO: 60826 - DNA, 20 bp, Artificial Sequence
  Description of Artificial Sequence: Synthetic oligonucleotide
  Target: SCNA; (-) strand; PAM type: YTN; PAM sequence: TTC
cctgattagtaaaaaatatg

SEQ ID NO: 60827 - DNA, 20 bp, Artificial Sequence
  Description of Artificial Sequence: Synthetic oligonucleotide
  Target: SCNA; (-) strand; PAM type: YTN; PAM sequence: CTT
ccctgattagtaaaaaatat

SEQ ID NO: 60828 - DNA, 20 bp, Artificial Sequence
  Description of Artificial Sequence: Synthetic oligonucleotide
  Target: SCNA; (-) strand; PAM type: YTN; PAM sequence: CTG
agcatcacttccctgattag

SEQ ID NO: 60829 - DNA, 20 bp, Artificial Sequence
  Description of Artificial Sequence: Synthetic oligonucleotide
  Target: SCNA; (-) strand; PAM type: YTN; PAM sequence: CTC
tgagcatcacttccctgatt

SEQ ID NO: 60830 - DNA, 20 bp, Artificial Sequence
  Description of Artificial Sequence: Synthetic oligonucleotide
  Target: SCNA; (-) strand; PAM type: YTN; PAM sequence: TTA
acatctctgagcatcacttc

SEQ ID NO: 60831 - DNA, 20 bp, Artificial Sequence
  Description of Artificial Sequence: Synthetic oligonucleotide
  Target: SCNA; (-) strand; PAM type: YTN; PAM sequence: CTT
aacatctctgagcatcactt

SEQ ID NO: 60832 - DNA, 20 bp, Artificial Sequence
  Description of Artificial Sequence: Synthetic oligonucleotide
  Target: SCNA; (-) strand; PAM type: YTN; PAM sequence: TTG
gggaagcgtacttaacatct

SEQ ID NO: 60833 - DNA, 20 bp, Artificial Sequence
  Description of Artificial Sequence: Synthetic oligonucleotide
  Target: SCNA; (-) strand; PAM type: YTN; PAM sequence: CTT
ggggaagcgtacttaacatc

SEQ ID NO: 60834 - DNA, 20 bp, Artificial Sequence
  Description of Artificial Sequence: Synthetic oligonucleotide
  Target: SCNA; (-) strand; PAM type: YTN; PAM sequence: TTA
gggtcttggggaagcgtact

SEQ ID NO: 60835 - DNA, 20 bp, Artificial Sequence
  Description of Artificial Sequence: Synthetic oligonucleotide
  Target: SCNA; (-) strand; PAM type: YTN; PAM sequence: TTT
agggtcttggggaagcgtac

SEQ ID NO: 60836 - DNA, 20 bp, Artificial Sequence
  Description of Artificial Sequence: Synthetic oligonucleotide
  Target: SCNA; (-) strand; PAM type: YTN; PAM sequence: CTT
tagggtcttggggaagcgta

SEQ ID NO: 60837 - DNA, 20 bp, Artificial Sequence
  Description of Artificial Sequence: Synthetic oligonucleotide
  Target: SCNA; (-) strand; PAM type: YTN; PAM sequence: TTA
tcacctttagggtcttgggg

SEQ ID NO: 60838 - DNA, 20 bp, Artificial Sequence
  Description of Artificial Sequence: Synthetic oligonucleotide
  Target: SCNA; (-) strand; PAM type: YTN; PAM sequence: CTT
atcacctttagggtcttggg

SEQ ID NO: 60839 - DNA, 20 bp, Artificial Sequence
  Description of Artificial Sequence: Synthetic oligonucleotide
  Target: SCNA; (-) strand; PAM type: YTN; PAM sequence: CTA
catcacttatcacctttagg

SEQ ID NO: 60840 - DNA, 20 bp, Artificial Sequence
  Description of Artificial Sequence: Synthetic oligonucleotide
  Target: SCNA; (-) strand; PAM type: YTN; PAM sequence: TTG
agactacatcacttatcacc

SEQ ID NO: 60841 - DNA, 20 bp, Artificial Sequence
  Description of Artificial Sequence: Synthetic oligonucleotide
  Target: SCNA; (-) strand; PAM type: YTN; PAM sequence: TTA
gttgagactacatcacttat

SEQ ID NO: 60842 - DNA, 20 bp, Artificial Sequence
  Description of Artificial Sequence: Synthetic oligonucleotide
  Target: SCNA; (-) strand; PAM type: YTN; PAM sequence: TTT
agttgagactacatcactta

SEQ ID NO: 60843 - DNA, 20 bp, Artificial Sequence
  Description of Artificial Sequence: Synthetic oligonucleotide
  Target: SCNA; (-) strand; PAM type: YTN; PAM sequence: TTT
tagttgagactacatcactt

SEQ ID NO: 60844 - DNA, 20 bp, Artificial Sequence
  Description of Artificial Sequence: Synthetic oligonucleotide
  Target: SCNA; (-) strand; PAM type: YTN; PAM sequence: CTA
atcacacaaaccaaagtttt

SEQ ID NO: 60845 - DNA, 20 bp, Artificial Sequence
  Description of Artificial Sequence: Synthetic oligonucleotide
  Target: SCNA; (-) strand; PAM type: YTN; PAM sequence: CTG
atagagtggaaagaacatgc

SEQ ID NO: 60846 - DNA, 20 bp, Artificial Sequence
  Description of Artificial Sequence: Synthetic oligonucleotide
  Target: SCNA; (-) strand; PAM type: YTN; PAM sequence: CTA
ctgatagagtggaaagaaca

SEQ ID NO: 60847 - DNA, 20 bp, Artificial Sequence
  Description of Artificial Sequence: Synthetic oligonucleotide
  Target: SCNA; (-) strand; PAM type: YTN; PAM sequence: CTG
actactgatagagtggaaag

SEQ ID NO: 60848 - DNA, 20 bp, Artificial Sequence
  Description of Artificial Sequence: Synthetic oligonucleotide
  Target: SCNA; (-) strand; PAM type: YTN; PAM sequence: TTG
ctgactactgatagagtgga

SEQ ID NO: 60849 - DNA, 20 bp, Artificial Sequence
  Description of Artificial Sequence: Synthetic oligonucleotide
  Target: SCNA; (-) strand; PAM type: YTN; PAM sequence: CTT
gctgactactgatagagtgg

SEQ ID NO: 60850 - DNA, 20 bp, Artificial Sequence
  Description of Artificial Sequence: Synthetic oligonucleotide
  Target: SCNA; (-) strand; PAM type: YTN; PAM sequence: TTG
tagcttgctgactactgata

SEQ ID NO: 60851 - DNA, 20 bp, Artificial Sequence
  Description of Artificial Sequence: Synthetic oligonucleotide
  Target: SCNA; (-) strand; PAM type: YTN; PAM sequence: TTG
tatgttgtagcttgctgact

SEQ ID NO: 60852 - DNA, 20 bp, Artificial Sequence
  Description of Artificial Sequence: Synthetic oligonucleotide
  Target: SCNA; (-) strand; PAM type: YTN; PAM sequence: CTT
gtatgttgtagcttgctgac

SEQ ID NO: 60853 - DNA, 20 bp, Artificial Sequence
  Description of Artificial Sequence: Synthetic oligonucleotide
  Target: SCNA; (-) strand; PAM type: YTN; PAM sequence: TTG
tcttgtatgttgtagcttgc

SEQ ID NO: 60854 - DNA, 20 bp, Artificial Sequence
  Description of Artificial Sequence: Synthetic oligonucleotide
  Target: SCNA; (-) strand; PAM type: YTN; PAM sequence: CTG
gaattgtcttgtatgttgta

SEQ ID NO: 60855 - DNA, 20 bp, Artificial Sequence
  Description of Artificial Sequence: Synthetic oligonucleotide
  Target: SCNA; (-) strand; PAM type: YTN; PAM sequence: TTA
tcaaaacaggtggtgggctg

SEQ ID NO: 60856 - DNA, 20 bp, Artificial Sequence
  Description of Artificial Sequence: Synthetic oligonucleotide
  Target: SCNA; (-) strand; PAM type: YTN; PAM sequence: TTT
atcaaaacaggtggtgggct

SEQ ID NO: 60857 - DNA, 20 bp, Artificial Sequence
  Description of Artificial Sequence: Synthetic oligonucleotide
  Target: SCNA; (-) strand; PAM type: YTN; PAM sequence: TTC
atttatcaaaacaggtggtg

SEQ ID NO: 60858 - DNA, 20 bp, Artificial Sequence
  Description of Artificial Sequence: Synthetic oligonucleotide
  Target: SCNA; (-) strand; PAM type: YTN; PAM sequence: CTT
catttatcaaaacaggtggt

SEQ ID NO: 60859 - DNA, 20 bp, Artificial Sequence
  Description of Artificial Sequence: Synthetic oligonucleotide
  Target: SCNA; (-) strand; PAM type: YTN; PAM sequence: CTG
tgtcccaataaaacttcatt

SEQ ID NO: 60860 - DNA, 20 bp, Artificial Sequence
  Description of Artificial Sequence: Synthetic oligonucleotide
  Target: SCNA; (-) strand; PAM type: YTN; PAM sequence: CTA
gtgtggctgtgtcccaataa

SEQ ID NO: 60861 - DNA, 20 bp, Artificial Sequence
  Description of Artificial Sequence: Synthetic oligonucleotide
  Target: SCNA; (-) strand; PAM type: YTN; PAM sequence: TTG
aagtgtgaaggtagtcataa

SEQ ID NO: 60862 - DNA, 20 bp, Artificial Sequence
  Description of Artificial Sequence: Synthetic oligonucleotide
  Target: SCNA; (-) strand; PAM type: YTN; PAM sequence: CTG
ttgaagtgtgaaggtagtca

SEQ ID NO: 60863 - DNA, 20 bp, Artificial Sequence
  Description of Artificial Sequence: Synthetic oligonucleotide
  Target: SCNA; (-) strand; PAM type: YTN; PAM sequence: CTG
ctgttgaagtgtgaaggtag

SEQ ID NO: 60864 - DNA, 20 bp, Artificial Sequence
  Description of Artificial Sequence: Synthetic oligonucleotide
  Target: SCNA; (-) strand; PAM type: YTN; PAM sequence: TTC
tgctgttgaagtgtgaaggt

SEQ ID NO: 60865 - DNA, 20 bp, Artificial Sequence
  Description of Artificial Sequence: Synthetic oligonucleotide
  Target: SCNA; (-) strand; PAM type: YTN; PAM sequence: CTC
aattctgctgttgaagtgtg

SEQ ID NO: 60866 - DNA, 20 bp, Artificial Sequence
  Description of Artificial Sequence: Synthetic oligonucleotide
  Target: SCNA; (-) strand; PAM type: YTN; PAM sequence: CTA
tgtctcaattctgctgttga

SEQ ID NO: 60867 - DNA, 20 bp, Artificial Sequence
  Description of Artificial Sequence: Synthetic oligonucleotide
  Target: SCNA; (-) strand; PAM type: YTN; PAM sequence: CTA
aaaaaaagaaaaaaaaatct

SEQ ID NO: 60868 - DNA, 20 bp, Artificial Sequence
  Description of Artificial Sequence: Synthetic oligonucleotide
  Target: SCNA; (-) strand; PAM type: YTN; PAM sequence: CTG
tctaaaaaaaagaaaaaaaa

SEQ ID NO: 60869 - DNA, 20 bp, Artificial Sequence
  Description of Artificial Sequence: Synthetic oligonucleotide
  Target: SCNA; (-) strand; PAM type: YTN; PAM sequence: CTG
ggtggcagagtgataccctg

SEQ ID NO: 60870 - DNA, 20 bp, Artificial Sequence
  Description of Artificial Sequence: Synthetic oligonucleotide
  Target: SCNA; (-) strand; PAM type: YTN; PAM sequence: CTC
cagcctgggtggcagagtga

SEQ ID NO: 60871 - DNA, 20 bp, Artificial Sequence
  Description of Artificial Sequence: Synthetic oligonucleotide
  Target: SCNA; (-) strand; PAM type: YTN; PAM sequence: CTG
cactccagcctgggtggcag

SEQ ID NO: 60872 - DNA, 20 bp, Artificial Sequence
  Description of Artificial Sequence: Synthetic oligonucleotide
  Target: SCNA; (-) strand; PAM type: YTN; PAM sequence: CTG
agatcgagccactgcactcc

SEQ ID NO: 60873 - DNA, 20 bp, Artificial Sequence
  Description of Artificial Sequence: Synthetic oligonucleotide
  Target: SCNA; (-) strand; PAM type: YTN; PAM sequence: TTG
cagtgagctgagatcgagcc

SEQ ID NO: 60874 - DNA, 20 bp, Artificial Sequence
  Description of Artificial Sequence: Synthetic oligonucleotide
  Target: SCNA; (-) strand; PAM type: YTN; PAM sequence: CTG
cagaggttgcagtgagctga

SEQ ID NO: 60875 - DNA, 20 bp, Artificial Sequence
  Description of Artificial Sequence: Synthetic oligonucleotide
  Target: SCNA; (-) strand; PAM type: YTN; PAM sequence: CTC
actgcagaggttgcagtgag

SEQ ID NO: 60876 - DNA, 20 bp, Artificial Sequence
  Description of Artificial Sequence: Synthetic oligonucleotide
  Target: SCNA; (-) strand; PAM type: YTN; PAM sequence: TTG
agccatacagctcactgcag

SEQ ID NO: 60877 - DNA, 20 bp, Artificial Sequence
  Description of Artificial Sequence: Synthetic oligonucleotide
  Target: SCNA; (-) strand; PAM type: YTN; PAM sequence: CTT
gagccatacagctcactgca

SEQ ID NO: 60878 - DNA, 20 bp, Artificial Sequence
  Description of Artificial Sequence: Synthetic oligonucleotide
  Target: SCNA; (-) strand; PAM type: YTN; PAM sequence: CTG
aggtaggaggatggcttgag

SEQ ID NO: 60879 - DNA, 20 bp, Artificial Sequence
  Description of Artificial Sequence: Synthetic oligonucleotide
  Target: SCNA; (-) strand; PAM type: YTN; PAM sequence: CTA
cccaggaggctgaggtagga

SEQ ID NO: 60880 - DNA, 20 bp, Artificial Sequence
  Description of Artificial Sequence: Synthetic oligonucleotide
  Target: SCNA; (-) strand; PAM type: YTN; PAM sequence: TTG
ccagctacccaggaggctga

SEQ ID NO: 60881 - DNA, 20 bp, Artificial Sequence
  Description of Artificial Sequence: Synthetic oligonucleotide
  Target: SCNA; (-) strand; PAM type: YTN; PAM sequence: TTA
gccgggtatggtagcatgca

SEQ ID NO: 60882 - DNA, 20 bp, Artificial Sequence
  Description of Artificial Sequence: Synthetic oligonucleotide
  Target: SCNA; (-) strand; PAM type: YTN; PAM sequence: CTA
caaacaacgcaaaaattagc

SEQ ID NO: 60883 - DNA, 20 bp, Artificial Sequence
  Description of Artificial Sequence: Synthetic oligonucleotide
  Target: SCNA; (-) strand; PAM type: YTN; PAM sequence: CTG
tgtctacaaacaacgcaaaa

SEQ ID NO: 60884 - DNA, 20 bp, Artificial Sequence
  Description of Artificial Sequence: Synthetic oligonucleotide
  Target: SCNA; (-) strand; PAM type: YTN; PAM sequence: CTG
ggccacatggtgaaaccctg

SEQ ID NO: 60885 - DNA, 20 bp, Artificial Sequence
  Description of Artificial Sequence: Synthetic oligonucleotide
  Target: SCNA; (-) strand; PAM type: YTN; PAM sequence: TTG
agaccagcctgggccacatg

SEQ ID NO: 60886 - DNA, 20 bp, Artificial Sequence
  Description of Artificial Sequence: Synthetic oligonucleotide
  Target: SCNA; (-) strand; PAM type: YTN; PAM sequence: TTT
gagaccagcctgggccacat

SEQ ID NO: 60887 - DNA, 20 bp, Artificial Sequence
  Description of Artificial Sequence: Synthetic oligonucleotide
  Target: SCNA; (-) strand; PAM type: YTN; PAM sequence: TTG
agcccaggggtttgagacca

SEQ ID NO: 60888 - DNA, 20 bp, Artificial Sequence
  Description of Artificial Sequence: Synthetic oligonucleotide
  Target: SCNA; (-) strand; PAM type: YTN; PAM sequence: CTT
gagcccaggggtttgagacc

SEQ ID NO: 60889 - DNA, 20 bp, Artificial Sequence
  Description of Artificial Sequence: Synthetic oligonucleotide
  Target: SCNA; (-) strand; PAM type: YTN; PAM sequence: CTG
gtggatcacttgagcccagg

SEQ ID NO: 60890 - DNA, 20 bp, Artificial Sequence
  Description of Artificial Sequence: Synthetic oligonucleotide
  Target: SCNA; (-) strand; PAM type: YTN; PAM sequence: TTG
agagcccgaggctggtggat

SEQ ID NO: 60891 - DNA, 20 bp, Artificial Sequence
  Description of Artificial Sequence: Synthetic oligonucleotide
  Target: SCNA; (-) strand; PAM type: YTN; PAM sequence: TTT
gagagcccgaggctggtgga

SEQ ID NO: 60892 - DNA, 20 bp, Artificial Sequence
  Description of Artificial Sequence: Synthetic oligonucleotide
  Target: SCNA; (-) strand; PAM type: YTN; PAM sequence: CTT
tgagagcccgaggctggtgg

SEQ ID NO: 60893 - DNA, 20 bp, Artificial Sequence
  Description of Artificial Sequence: Synthetic oligonucleotide
  Target: SCNA; (-) strand; PAM type: YTN; PAM sequence: TTA
atcccagcactttgagagcc

SEQ ID NO: 60894 - DNA, 20 bp, Artificial Sequence
  Description of Artificial Sequence: Synthetic oligonucleotide
  Target: SCNA; (-) strand; PAM type: YTN; PAM sequence: TTT
aatcccagcactttgagagc

SEQ ID NO: 60895 - DNA, 20 bp, Artificial Sequence
  Description of Artificial Sequence: Synthetic oligonucleotide
  Target: SCNA; (-) strand; PAM type: YTN; PAM sequence: CTT
taatcccagcactttgagag

SEQ ID NO: 60896 - DNA, 20 bp, Artificial Sequence
  Description of Artificial Sequence: Synthetic oligonucleotide
  Target: SCNA; (-) strand; PAM type: YTN; PAM sequence: CTC
aggtctttaatcccagcact

SEQ ID NO: 60897 - DNA, 20 bp, Artificial Sequence
  Description of Artificial Sequence: Synthetic oligonucleotide
  Target: SCNA; (-) strand; PAM type: YTN; PAM sequence: TTG
gccaggtgccgtggctcagg

SEQ ID NO: 60898 - DNA, 20 bp, Artificial Sequence
  Description of Artificial Sequence: Synthetic oligonucleotide
  Target: SCNA; (-) strand; PAM type: YTN; PAM sequence: CTT
ggccaggtgccgtggctcag

SEQ ID NO: 60899 - DNA, 20 bp, Artificial Sequence
  Description of Artificial Sequence: Synthetic oligonucleotide
  Target: SCNA; (-) strand; PAM type: YTN; PAM sequence: CTA
tgtcttggccaggtgccgtg

SEQ ID NO: 60900 - DNA, 20 bp, Artificial Sequence
  Description of Artificial Sequence: Synthetic oligonucleotide
  Target: SCNA; (-) strand; PAM type: YTN; PAM sequence: TTA
agccatgagatctatgtctt

SEQ ID NO: 60901 - DNA, 20 bp, Artificial Sequence
  Description of Artificial Sequence: Synthetic oligonucleotide
  Target: SCNA; (-) strand; PAM type: YTN; PAM sequence: TTT
aagccatgagatctatgtct

SEQ ID NO: 60902 - DNA, 20 bp, Artificial Sequence
  Description of Artificial Sequence: Synthetic oligonucleotide
  Target: SCNA; (-) strand; PAM type: YTN; PAM sequence: TTT
taagccatgagatctatgtc

SEQ ID NO: 60903 - DNA, 20 bp, Artificial Sequence
  Description of Artificial Sequence: Synthetic oligonucleotide
  Target: SCNA; (-) strand; PAM type: YTN; PAM sequence: TTG
ggtaaggaatcagatagcac

SEQ ID NO: 60904 - DNA, 20 bp, Artificial Sequence
  Description of Artificial Sequence: Synthetic oligonucleotide
  Target: SCNA; (-) strand; PAM type: YTN; PAM sequence: TTT
gggtaaggaatcagatagca

SEQ ID NO: 60905 - DNA, 20 bp, Artificial Sequence
  Description of Artificial Sequence: Synthetic oligonucleotide
  Target: SCNA; (-) strand; PAM type: YTN; PAM sequence: TTT
tgggtaaggaatcagatagc

SEQ ID NO: 60906 - DNA, 20 bp, Artificial Sequence
  Description of Artificial Sequence: Synthetic oligonucleotide
  Target: SCNA; (-) strand; PAM type: YTN; PAM sequence: TTG
gcaaaattttgggtaaggaa

SEQ ID NO: 60907 - DNA, 20 bp, Artificial Sequence
  Description of Artificial Sequence: Synthetic oligonucleotide
  Target: SCNA; (-) strand; PAM type: YTN; PAM sequence: TTA
agataaaaaatgaccatgtg

SEQ ID NO: 60908 - DNA, 20 bp, Artificial Sequence
  Description of Artificial Sequence: Synthetic oligonucleotide
  Target: SCNA; (-) strand; PAM type: YTN; PAM sequence: TTT
aagataaaaaatgaccatgt

SEQ ID NO: 60909 - DNA, 20 bp, Artificial Sequence
  Description of Artificial Sequence: Synthetic oligonucleotide
  Target: SCNA; (-) strand; PAM type: YTN; PAM sequence: TTA
cacacagaatttaagataaa

SEQ ID NO: 60910 - DNA, 20 bp, Artificial Sequence
  Description of Artificial Sequence: Synthetic oligonucleotide
  Target: SCNA; (-) strand; PAM type: YTN; PAM sequence: CTT
acacacagaatttaagataa

SEQ ID NO: 60911 - DNA, 20 bp, Artificial Sequence
  Description of Artificial Sequence: Synthetic oligonucleotide
  Target: SCNA; (-) strand; PAM type: YTN; PAM sequence: TTG
aacttacacacagaatttaa

SEQ ID NO: 60912 - DNA, 20 bp, Artificial Sequence
  Description of Artificial Sequence: Synthetic oligonucleotide
  Target: SCNA; (-) strand; PAM type: YTN; PAM sequence: TTG
agagttgaacttacacacag

SEQ ID NO: 60913 - DNA, 20 bp, Artificial Sequence
  Description of Artificial Sequence: Synthetic oligonucleotide
  Target: SCNA; (-) strand; PAM type: YTN; PAM sequence: CTA
attgagagttgaacttacac

SEQ ID NO: 60914 - DNA, 20 bp, Artificial Sequence
  Description of Artificial Sequence: Synthetic oligonucleotide
  Target: SCNA; (-) strand; PAM type: YTN; PAM sequence: TTC
taattgagagttgaacttac

SEQ ID NO: 60915 - DNA, 20 bp, Artificial Sequence
  Description of Artificial Sequence: Synthetic oligonucleotide
  Target: SCNA; (-) strand; PAM type: YTN; PAM sequence: CTG
agttctaattgagagttgaa

SEQ ID NO: 60916 - DNA, 20 bp, Artificial Sequence
  Description of Artificial Sequence: Synthetic oligonucleotide
  Target: SCNA; (-) strand; PAM type: YTN; PAM sequence: TTC
tgagttctaattgagagttg

SEQ ID NO: 60917 - DNA, 20 bp, Artificial Sequence
  Description of Artificial Sequence: Synthetic oligonucleotide
  Target: SCNA; (-) strand; PAM type: YTN; PAM sequence: TTA
cattctgagttctaattgag

SEQ ID NO: 60918 - DNA, 20 bp, Artificial Sequence
  Description of Artificial Sequence: Synthetic oligonucleotide
  Target: SCNA; (-) strand; PAM type: YTN; PAM sequence: TTG
gttacattctgagttctaat

SEQ ID NO: 60919 - DNA, 20 bp, Artificial Sequence
  Description of Artificial Sequence: Synthetic oligonucleotide
  Target: SCNA; (-) strand; PAM type: YTN; PAM sequence: TTA
ttggttacattctgagttct

SEQ ID NO: 60920 - DNA, 20 bp, Artificial Sequence
  Description of Artificial Sequence: Synthetic oligonucleotide
  Target: SCNA; (-) strand; PAM type: YTN; PAM sequence: TTT
attggttacattctgagttc

SEQ ID NO: 60921 - DNA, 20 bp, Artificial Sequence
  Description of Artificial Sequence: Synthetic oligonucleotide
  Target: SCNA; (-) strand; PAM type: YTN; PAM sequence: TTT
tattggttacattctgagtt

SEQ ID NO: 60922 - DNA, 20 bp, Artificial Sequence
  Description of Artificial Sequence: Synthetic oligonucleotide
  Target: SCNA; (-) strand; PAM type: YTN; PAM sequence: TTT
ttattggttacattctgagt

SEQ ID NO: 60923 - DNA, 20 bp, Artificial Sequence
  Description of Artificial Sequence: Synthetic oligonucleotide
  Target: SCNA; (-) strand; PAM type: YTN; PAM sequence: TTT
tttattggttacattctgag

SEQ ID NO: 60924 - DNA, 20 bp, Artificial Sequence
  Description of Artificial Sequence: Synthetic oligonucleotide
  Target: SCNA; (-) strand; PAM type: YTN; PAM sequence: CTA
taaattttttattggttaca

SEQ ID NO: 60925 - DNA, 20 bp, Artificial Sequence
  Description of Artificial Sequence: Synthetic oligonucleotide
  Target: SCNA; (-) strand; PAM type: YTN; PAM sequence: TTC
tataaattttttattggtta

SEQ ID NO: 60926 - DNA, 20 bp, Artificial Sequence
  Description of Artificial Sequence: Synthetic oligonucleotide
  Target: SCNA; (-) strand; PAM type: YTN; PAM sequence: TTA
acacatagcacattctataa

SEQ ID NO: 60927 - DNA, 20 bp, Artificial Sequence
  Description of Artificial Sequence: Synthetic oligonucleotide
  Target: SCNA; (-) strand; PAM type: YTN; PAM sequence: TTT
aacacatagcacattctata

SEQ ID NO: 60928 - DNA, 20 bp, Artificial Sequence
  Description of Artificial Sequence: Synthetic oligonucleotide
  Target: SCNA; (-) strand; PAM type: YTN; PAM sequence: CTC
atggcatttaacacatagca

SEQ ID NO: 60929 - DNA, 20 bp, Artificial Sequence
  Description of Artificial Sequence: Synthetic oligonucleotide
  Target: SCNA; (-) strand; PAM type: YTN; PAM sequence: CTC
tcatggcatttaacacatag

SEQ ID NO: 60930 - DNA, 20 bp, Artificial Sequence
  Description of Artificial Sequence: Synthetic oligonucleotide
  Target: SCNA; (-) strand; PAM type: YTN; PAM sequence: TTC
aatgtctctcatggcattta

SEQ ID NO: 60931 - DNA, 20 bp, Artificial Sequence
  Description of Artificial Sequence: Synthetic oligonucleotide
  Target: SCNA; (-) strand; PAM type: YTN; PAM sequence: TTT
caatgtctctcatggcattt

SEQ ID NO: 60932 - DNA, 20 bp, Artificial Sequence
  Description of Artificial Sequence: Synthetic oligonucleotide
  Target: SCNA; (-) strand; PAM type: YTN; PAM sequence: TTT
tcaatgtctctcatggcatt

SEQ ID NO: 60933 - DNA, 20 bp, Artificial Sequence
  Description of Artificial Sequence: Synthetic oligonucleotide
  Target: SCNA; (-) strand; PAM type: YTN; PAM sequence: TTG
aaatcattttcaatgtctct

SEQ ID NO: 60934 - DNA, 20 bp, Artificial Sequence
  Description of Artificial Sequence: Synthetic oligonucleotide
  Target: SCNA; (-) strand; PAM type: YTN; PAM sequence: TTC
attgaaatcattttcaatgt

SEQ ID NO: 60935 - DNA, 20 bp, Artificial Sequence
  Description of Artificial Sequence: Synthetic oligonucleotide
  Target: SCNA; (-) strand; PAM type: YTN; PAM sequence: CTG
ttcattgaaatcattttcaa

SEQ ID NO: 60936 - DNA, 20 bp, Artificial Sequence
  Description of Artificial Sequence: Synthetic oligonucleotide
  Target: SCNA; (-) strand; PAM type: YTN; PAM sequence: TTA
actgttcattgaaatcattt

SEQ ID NO: 60937 - DNA, 20 bp, Artificial Sequence
  Description of Artificial Sequence: Synthetic oligonucleotide
  Target: SCNA; (-) strand; PAM type: YTN; PAM sequence: TTT
aactgttcattgaaatcatt

SEQ ID NO: 60938 - DNA, 20 bp, Artificial Sequence
  Description of Artificial Sequence: Synthetic oligonucleotide
  Target: SCNA; (-) strand; PAM type: YTN; PAM sequence: TTT
taactgttcattgaaatcat

SEQ ID NO: 60939 - DNA, 20 bp, Artificial Sequence
  Description of Artificial Sequence: Synthetic oligonucleotide
  Target: SCNA; (-) strand; PAM type: YTN; PAM sequence: CTT
ttaactgttcattgaaatca

SEQ ID NO: 60940 - DNA, 20 bp, Artificial Sequence
  Description of Artificial Sequence: Synthetic oligonucleotide
  Target: SCNA; (-) strand; PAM type: YTN; PAM sequence: TTA
ccttttaactgttcattgaa

SEQ ID NO: 60941 - DNA, 20 bp, Artificial Sequence
  Description of Artificial Sequence: Synthetic oligonucleotide
  Target: SCNA; (-) strand; PAM type: YTN; PAM sequence: TTA
gttaccttttaactgttcat

SEQ ID NO: 60942 - DNA, 20 bp, Artificial Sequence
  Description of Artificial Sequence: Synthetic oligonucleotide
  Target: SCNA; (-) strand; PAM type: YTN; PAM sequence: CTT
agttaccttttaactgttca

SEQ ID NO: 60943 - DNA, 20 bp, Artificial Sequence
  Description of Artificial Sequence: Synthetic oligonucleotide
  Target: SCNA; (-) strand; PAM type: YTN; PAM sequence: TTG
acttagttaccttttaactg

SEQ ID NO: 60944 - DNA, 20 bp, Artificial Sequence
  Description of Artificial Sequence: Synthetic oligonucleotide
  Target: SCNA; (-) strand; PAM type: YTN; PAM sequence: TTT
gacttagttaccttttaact

SEQ ID NO: 60945 - DNA, 20 bp, Artificial Sequence
  Description of Artificial Sequence: Synthetic oligonucleotide
  Target: SCNA; (-) strand; PAM type: YTN; PAM sequence: CTT
tgacttagttaccttttaac

SEQ ID NO: 60946 - DNA, 20 bp, Artificial Sequence
  Description of Artificial Sequence: Synthetic oligonucleotide
  Target: SCNA; (-) strand; PAM type: YTN; PAM sequence: TTC
tttgacttagttacctttta

SEQ ID NO: 60947 - DNA, 20 bp, Artificial Sequence
  Description of Artificial Sequence: Synthetic oligonucleotide
  Target: SCNA; (-) strand; PAM type: YTN; PAM sequence: TTT
ctttgacttagttacctttt

SEQ ID NO: 60948 - DNA, 20 bp, Artificial Sequence
  Description of Artificial Sequence: Synthetic oligonucleotide
  Target: SCNA; (-) strand; PAM type: YTN; PAM sequence: CTG
caagcacaagtttctttgac

SEQ ID NO: 60949 - DNA, 20 bp, Artificial Sequence
  Description of Artificial Sequence: Synthetic oligonucleotide
  Target: SCNA; (-) strand; PAM type: YTN; PAM sequence: TTC
tgcaagcacaagtttctttg

SEQ ID NO: 60950 - DNA, 20 bp, Artificial Sequence
  Description of Artificial Sequence: Synthetic oligonucleotide
  Target: SCNA; (-) strand; PAM type: YTN; PAM sequence: TTC
caagttctgcaagcacaagt

SEQ ID NO: 60951 - DNA, 20 bp, Artificial Sequence
  Description of Artificial Sequence: Synthetic oligonucleotide
  Target: SCNA; (-) strand; PAM type: YTN; PAM sequence: TTT
ccaagttctgcaagcacaag

SEQ ID NO: 60952 - DNA, 20 bp, Artificial Sequence
  Description of Artificial Sequence: Synthetic oligonucleotide
  Target: SCNA; (-) strand; PAM type: YTN; PAM sequence: CTC
agatttccaagttctgcaag

SEQ ID NO: 60953 - DNA, 20 bp, Artificial Sequence
  Description of Artificial Sequence: Synthetic oligonucleotide
  Target: SCNA; (-) strand; PAM type: YTN; PAM sequence: TTG
tcctcagatttccaagttct

SEQ ID NO: 60954 - DNA, 20 bp, Artificial Sequence
  Description of Artificial Sequence: Synthetic oligonucleotide
  Target: SCNA; (-) strand; PAM type: YTN; PAM sequence: TTT
gtcctcagatttccaagttc

SEQ ID NO: 60955 - DNA, 20 bp, Artificial Sequence
  Description of Artificial Sequence: Synthetic oligonucleotide
  Target: SCNA; (-) strand; PAM type: YTN; PAM sequence: TTC
cgtttgtcctcagatttcca

SEQ ID NO: 60956 - DNA, 20 bp, Artificial Sequence
  Description of Artificial Sequence: Synthetic oligonucleotide
  Target: SCNA; (-) strand; PAM type: YTN; PAM sequence: TTT
ccgtttgtcctcagatttcc

SEQ ID NO: 60957 - DNA, 20 bp, Artificial Sequence
  Description of Artificial Sequence: Synthetic oligonucleotide
  Target: SCNA; (-) strand; PAM type: YTN; PAM sequence: CTT
tccgtttgtcctcagatttc

SEQ ID NO: 60958 - DNA, 20 bp, Artificial Sequence
  Description of Artificial Sequence: Synthetic oligonucleotide
  Target: SCNA; (-) strand; PAM type: YTN; PAM sequence: TTA
tcaatatctttccgtttgtc

SEQ ID NO: 60959 - DNA, 20 bp, Artificial Sequence
  Description of Artificial Sequence: Synthetic oligonucleotide
  Target: SCNA; (-) strand; PAM type: YTN; PAM sequence: TTT
atcaatatctttccgtttgt

SEQ ID NO: 60960 - DNA, 20 bp, Artificial Sequence
  Description of Artificial Sequence: Synthetic oligonucleotide
  Target: SCNA; (-) strand; PAM type: YTN; PAM sequence: CTG
aatcagtgacatgcagttta

SEQ ID NO: 60961 - DNA, 20 bp, Artificial Sequence
  Description of Artificial Sequence: Synthetic oligonucleotide
  Target: SCNA; (-) strand; PAM type: YTN; PAM sequence: TTG
gaatactgaatcagtgacat

SEQ ID NO: 60962 - DNA, 20 bp, Artificial Sequence
  Description of Artificial Sequence: Synthetic oligonucleotide
  Target: SCNA; (-) strand; PAM type: YTN; PAM sequence: TTT
ggaatactgaatcagtgaca

SEQ ID NO: 60963 - DNA, 20 bp, Artificial Sequence
  Description of Artificial Sequence: Synthetic oligonucleotide
  Target: SCNA; (-) strand; PAM type: YTN; PAM sequence: TTA
gatggaatttggaatactga

SEQ ID NO: 60964 - DNA, 20 bp, Artificial Sequence
  Description of Artificial Sequence: Synthetic oligonucleotide
  Target: SCNA; (-) strand; PAM type: YTN; PAM sequence: TTT
agatggaatttggaatactg

SEQ ID NO: 60965 - DNA, 20 bp, Artificial Sequence
  Description of Artificial Sequence: Synthetic oligonucleotide
  Target: SCNA; (-) strand; PAM type: YTN; PAM sequence: TTT
tagatggaatttggaatact

SEQ ID NO: 60966 - DNA, 20 bp, Artificial Sequence
  Description of Artificial Sequence: Synthetic oligonucleotide
  Target: SCNA; (-) strand; PAM type: YTN; PAM sequence: TTT
ttagatggaatttggaatac

SEQ ID NO: 60967 - DNA, 20 bp, Artificial Sequence
  Description of Artificial Sequence: Synthetic oligonucleotide
  Target: SCNA; (-) strand; PAM type: YTN; PAM sequence: CTT
tttagatggaatttggaata

SEQ ID NO: 60968 - DNA, 20 bp, Artificial Sequence
  Description of Artificial Sequence: Synthetic oligonucleotide
  Target: SCNA; (-) strand; PAM type: YTN; PAM sequence: TTA
tacctttttagatggaattt

SEQ ID NO: 60969 - DNA, 20 bp, Artificial Sequence
  Description of Artificial Sequence: Synthetic oligonucleotide
  Target: SCNA; (-) strand; PAM type: YTN; PAM sequence: TTA
tgaagtgtgaattatacctt

SEQ ID NO: 60970 - DNA, 20 bp, Artificial Sequence
  Description of Artificial Sequence: Synthetic oligonucleotide
  Target: SCNA; (-) strand; PAM type: YTN; PAM sequence: TTT
atgaagtgtgaattatacct

SEQ ID NO: 60971 - DNA, 20 bp, Artificial Sequence
  Description of Artificial Sequence: Synthetic oligonucleotide
  Target: SCNA; (-) strand; PAM type: YTN; PAM sequence: TTT
tatgaagtgtgaattatacc

SEQ ID NO: 60972 - DNA, 20 bp, Artificial Sequence
  Description of Artificial Sequence: Synthetic oligonucleotide
  Target: SCNA; (-) strand; PAM type: YTN; PAM sequence: TTA
aatattttatgaagtgtgaa

SEQ ID NO: 60973 - DNA, 20 bp, Artificial Sequence
  Description of Artificial Sequence: Synthetic oligonucleotide
  Target: SCNA; (-) strand; PAM type: YTN; PAM sequence: TTT
aaatattttatgaagtgtga

SEQ ID NO: 60974 - DNA, 20 bp, Artificial Sequence
  Description of Artificial Sequence: Synthetic oligonucleotide
  Target: SCNA; (-) strand; PAM type: YTN; PAM sequence: TTT
taaatattttatgaagtgtg

SEQ ID NO: 60975 - DNA, 20 bp, Artificial Sequence
  Description of Artificial Sequence: Synthetic oligonucleotide
  Target: SCNA; (-) strand; PAM type: YTN; PAM sequence: TTA
attttaaatattttatgaag

SEQ ID NO: 60976 - DNA, 20 bp, Artificial Sequence
  Description of Artificial Sequence: Synthetic oligonucleotide
  Target: SCNA; (-) strand; PAM type: YTN; PAM sequence: TTG
atgagttaattttaaatatt

SEQ ID NO: 60977 - DNA, 20 bp, Artificial Sequence
  Description of Artificial Sequence: Synthetic oligonucleotide
  Target: SCNA; (-) strand; PAM type: YTN; PAM sequence: TTA
caagaggaaaaaattgatga

SEQ ID NO: 60978 - DNA, 20 bp, Artificial Sequence
  Description of Artificial Sequence: Synthetic oligonucleotide
  Target: SCNA; (-) strand; PAM type: YTN; PAM sequence: TTG
aaatagggtgttacaagagg

SEQ ID NO: 60979 - DNA, 20 bp, Artificial Sequence
  Description of Artificial Sequence: Synthetic oligonucleotide
  Target: SCNA; (-) strand; PAM type: YTN; PAM sequence: TTC
agaaagtcattgaaataggg

SEQ ID NO: 60980 - DNA, 20 bp, Artificial Sequence
  Description of Artificial Sequence: Synthetic oligonucleotide
  Target: SCNA; (-) strand; PAM type: YTN; PAM sequence: TTT
cagaaagtcattgaaatagg

SEQ ID NO: 60981 - DNA, 20 bp, Artificial Sequence
  Description of Artificial Sequence: Synthetic oligonucleotide
  Target: SCNA; (-) strand; PAM type: YTN; PAM sequence: TTT
tcagaaagtcattgaaatag

SEQ ID NO: 60982 - DNA, 20 bp, Artificial Sequence
  Description of Artificial Sequence: Synthetic oligonucleotide
  Target: SCNA; (-) strand; PAM type: YTN; PAM sequence: TTA
aaacatattttcagaaagtc

SEQ ID NO: 60983 - DNA, 20 bp, Artificial Sequence
  Description of Artificial Sequence: Synthetic oligonucleotide
  Target: SCNA; (-) strand; PAM type: YTN; PAM sequence: CTT
aaaacatattttcagaaagt

SEQ ID NO: 60984 - DNA, 20 bp, Artificial Sequence
  Description of Artificial Sequence: Synthetic oligonucleotide
  Target: SCNA; (-) strand; PAM type: YTN; PAM sequence: CTA
ccttaaaacatattttcaga

SEQ ID NO: 60985 - DNA, 20 bp, Artificial Sequence
  Description of Artificial Sequence: Synthetic oligonucleotide
  Target: SCNA; (-) strand; PAM type: YTN; PAM sequence: TTC
taccttaaaacatattttca

SEQ ID NO: 60986 - DNA, 20 bp, Artificial Sequence
  Description of Artificial Sequence: Synthetic oligonucleotide
  Target: SCNA; (-) strand; PAM type: YTN; PAM sequence: TTT
ctaccttaaaacatattttc

SEQ ID NO: 60987 - DNA, 20 bp, Artificial Sequence
  Description of Artificial Sequence: Synthetic oligonucleotide
  Target: SCNA; (-) strand; PAM type: YTN; PAM sequence: TTT
tctaccttaaaacatatttt

SEQ ID NO: 60988 - DNA, 20 bp, Artificial Sequence
  Description of Artificial Sequence: Synthetic oligonucleotide
  Target: SCNA; (-) strand; PAM type: YTN; PAM sequence: TTT
ttctaccttaaaacatattt

SEQ ID NO: 60989 - DNA, 20 bp, Artificial Sequence
  Description of Artificial Sequence: Synthetic oligonucleotide
  Target: SCNA; (-) strand; PAM type: YTN; PAM sequence: TTT
tttctaccttaaaacatatt

SEQ ID NO: 60990 - DNA, 20 bp, Artificial Sequence
  Description of Artificial Sequence: Synthetic oligonucleotide
  Target: SCNA; (-) strand; PAM type: YTN; PAM sequence: TTT
ttttctaccttaaaacatat

SEQ ID NO: 60991 - DNA, 20 bp, Artificial Sequence
  Description of Artificial Sequence: Synthetic oligonucleotide
  Target: SCNA; (-) strand; PAM type: YTN; PAM sequence: CTT
tttttctaccttaaaacata

SEQ ID NO: 60992 - DNA, 20 bp, Artificial Sequence
  Description of Artificial Sequence: Synthetic oligonucleotide
  Target: SCNA; (-) strand; PAM type: YTN; PAM sequence: TTA
ctttttttctaccttaaaac

SEQ ID NO: 60993 - DNA, 20 bp, Artificial Sequence
  Description of Artificial Sequence: Synthetic oligonucleotide
  Target: SCNA; (-) strand; PAM type: YTN; PAM sequence: TTA
aattactttttttctacctt

SEQ ID NO: 60994 - DNA, 20 bp, Artificial Sequence
  Description of Artificial Sequence: Synthetic oligonucleotide
  Target: SCNA; (-) strand; PAM type: YTN; PAM sequence: TTC
aattaaattactttttttct

SEQ ID NO: 60995 - DNA, 20 bp, Artificial Sequence
  Description of Artificial Sequence: Synthetic oligonucleotide
  Target: SCNA; (-) strand; PAM type: YTN; PAM sequence: CTT
caattaaattactttttttc

SEQ ID NO: 60996 - DNA, 20 bp, Artificial Sequence
  Description of Artificial Sequence: Synthetic oligonucleotide
  Target: SCNA; (-) strand; PAM type: YTN; PAM sequence: TTC
ccacaaatcttcaattaaat

SEQ ID NO: 60997 - DNA, 20 bp, Artificial Sequence
  Description of Artificial Sequence: Synthetic oligonucleotide
  Target: SCNA; (-) strand; PAM type: YTN; PAM sequence: CTT
cccacaaatcttcaattaaa

SEQ ID NO: 60998 - DNA, 20 bp, Artificial Sequence
  Description of Artificial Sequence: Synthetic oligonucleotide
  Target: SCNA; (-) strand; PAM type: YTN; PAM sequence: TTA
atcttcccacaaatcttcaa

SEQ ID NO: 60999 - DNA, 20 bp, Artificial Sequence
  Description of Artificial Sequence: Synthetic oligonucleotide
  Target: SCNA; (-) strand; PAM type: YTN; PAM sequence: CTT
aatcttcccacaaatcttca

SEQ ID NO: 61000 - DNA, 20 bp, Artificial Sequence
  Description of Artificial Sequence: Synthetic oligonucleotide
  Target: SCNA; (-) strand; PAM type: YTN; PAM sequence: TTG
acttaatcttcccacaaatc

SEQ ID NO: 61001 - DNA, 20 bp, Artificial Sequence
  Description of Artificial Sequence: Synthetic oligonucleotide
  Target: SCNA; (-) strand; PAM type: YTN; PAM sequence: TTA
tgttgacttaatcttcccac

SEQ ID NO: 61002 - DNA, 20 bp, Artificial Sequence
  Description of Artificial Sequence: Synthetic oligonucleotide
  Target: SCNA; (-) strand; PAM type: YTN; PAM sequence: CTT
atgttgacttaatcttccca

SEQ ID NO: 61003 - DNA, 20 bp, Artificial Sequence
  Description of Artificial Sequence: Synthetic oligonucleotide
  Target: SCNA; (-) strand; PAM type: YTN; PAM sequence: TTC
ttatgttgacttaatcttcc

SEQ ID NO: 61004 - DNA, 20 bp, Artificial Sequence
  Description of Artificial Sequence: Synthetic oligonucleotide
  Target: SCNA; (-) strand; PAM type: YTN; PAM sequence: TTT
cttatgttgacttaatcttc

SEQ ID NO: 61005 - DNA, 20 bp, Artificial Sequence
  Description of Artificial Sequence: Synthetic oligonucleotide
  Target: SCNA; (-) strand; PAM type: YTN; PAM sequence: TTT
tcttatgttgacttaatctt

SEQ ID NO: 61006 - DNA, 20 bp, Artificial Sequence
  Description of Artificial Sequence: Synthetic oligonucleotide
  Target: SCNA; (-) strand; PAM type: YTN; PAM sequence: CTT
ttcttatgttgacttaatct

SEQ ID NO: 61007 - DNA, 20 bp, Artificial Sequence
  Description of Artificial Sequence: Synthetic oligonucleotide
  Target: SCNA; (-) strand; PAM type: YTN; PAM sequence: TTA
gacttttcttatgttgactt

SEQ ID NO: 61008 - DNA, 20 bp, Artificial Sequence
  Description of Artificial Sequence: Synthetic oligonucleotide
  Target: SCNA; (-) strand; PAM type: YTN; PAM sequence: TTT
agacttttcttatgttgact

SEQ ID NO: 61009 - DNA, 20 bp, Artificial Sequence
  Description of Artificial Sequence: Synthetic oligonucleotide
  Target: SCNA; (-) strand; PAM type: YTN; PAM sequence: TTA
tttagacttttcttatgttg

SEQ ID NO: 61010 - DNA, 20 bp, Artificial Sequence
  Description of Artificial Sequence: Synthetic oligonucleotide
  Target: SCNA; (-) strand; PAM type: YTN; PAM sequence: CTC
attatttagacttttcttat

SEQ ID NO: 61011 - DNA, 20 bp, Artificial Sequence
  Description of Artificial Sequence: Synthetic oligonucleotide
  Target: SCNA; (-) strand; PAM type: YTN; PAM sequence: CTG
cctcattatttagacttttc

SEQ ID NO: 61012 - DNA, 20 bp, Artificial Sequence
  Description of Artificial Sequence: Synthetic oligonucleotide
  Target: SCNA; (-) strand; PAM type: YTN; PAM sequence: TTA
taggcatgtgccactgcctc

SEQ ID NO: 61013 - DNA, 20 bp, Artificial Sequence
  Description of Artificial Sequence: Synthetic oligonucleotide
  Target: SCNA; (-) strand; PAM type: YTN; PAM sequence: CTG
agtagccaggattataggca

SEQ ID NO: 61014 - DNA, 20 bp, Artificial Sequence
  Description of Artificial Sequence: Synthetic oligonucleotide
  Target: SCNA; (-) strand; PAM type: YTN; PAM sequence: CTC
ctgagtagccaggattatag

SEQ ID NO: 61015 - DNA, 20 bp, Artificial Sequence
  Description of Artificial Sequence: Synthetic oligonucleotide
  Target: SCNA; (-) strand; PAM type: YTN; PAM sequence: CTC
agcctcctgagtagccagga

SEQ ID NO: 61016 - DNA, 20 bp, Artificial Sequence
  Description of Artificial Sequence: Synthetic oligonucleotide
  Target: SCNA; (-) strand; PAM type: YTN; PAM sequence: CTC
aagtcatgcccccacctcag

SEQ ID NO: 61017 - DNA, 20 bp, Artificial Sequence
  Description of Artificial Sequence: Synthetic oligonucleotide
  Target: SCNA; (-) strand; PAM type: YTN; PAM sequence: CTG
ggctcaagtcatgcccccac

SEQ ID NO: 61018 - DNA, 20 bp, Artificial Sequence
  Description of Artificial Sequence: Synthetic oligonucleotide
  Target: SCNA; (-) strand; PAM type: YTN; PAM sequence: TTC
ctgggctcaagtcatgcccc

SEQ ID NO: 61019 - DNA, 20 bp, Artificial Sequence
  Description of Artificial Sequence: Synthetic oligonucleotide
  Target: SCNA; (-) strand; PAM type: YTN; PAM sequence: TTG
aattcctgggctcaagtcat

SEQ ID NO: 61020 - DNA, 20 bp, Artificial Sequence
  Description of Artificial Sequence: Synthetic oligonucleotide
  Target: SCNA; (-) strand; PAM type: YTN; PAM sequence: CTT
gaattcctgggctcaagtca

SEQ ID NO: 61021 - DNA, 20 bp, Artificial Sequence
  Description of Artificial Sequence: Synthetic oligonucleotide
  Target: SCNA; (-) strand; PAM type: YTN; PAM sequence: CTG
catccttgaattcctgggct

SEQ ID NO: 61022 - DNA, 20 bp, Artificial Sequence
  Description of Artificial Sequence: Synthetic oligonucleotide
  Target: SCNA; (-) strand; PAM type: YTN; PAM sequence: CTC
actgcatccttgaattcctg

SEQ ID NO: 61023 - DNA, 20 bp, Artificial Sequence
  Description of Artificial Sequence: Synthetic oligonucleotide
  Target: SCNA; (-) strand; PAM type: YTN; PAM sequence: CTA
tcatagctcactgcatcctt

SEQ ID NO: 61024 - DNA, 20 bp, Artificial Sequence
  Description of Artificial Sequence: Synthetic oligonucleotide
  Target: SCNA; (-) strand; PAM type: YTN; PAM sequence: CTG
cagtgatgctatcatagctc

SEQ ID NO: 61025 - DNA, 20 bp, Artificial Sequence
  Description of Artificial Sequence: Synthetic oligonucleotide
  Target: SCNA; (-) strand; PAM type: YTN; PAM sequence: CTG
gactgcagtgatgctatcat

SEQ ID NO: 61026 - DNA, 20 bp, Artificial Sequence
  Description of Artificial Sequence: Synthetic oligonucleotide
  Target: SCNA; (-) strand; PAM type: YTN; PAM sequence: CTG
tcgcccaggctggactgcag

SEQ ID NO: 61027 - DNA, 20 bp, Artificial Sequence
  Description of Artificial Sequence: Synthetic oligonucleotide
  Target: SCNA; (-) strand; PAM type: YTN; PAM sequence: CTC
tgtcgcccaggctggactgc

SEQ ID NO: 61028 - DNA, 20 bp, Artificial Sequence
  Description of Artificial Sequence: Synthetic oligonucleotide
  Target: SCNA; (-) strand; PAM type: YTN; PAM sequence: TTG
ctctgtcgcccaggctggac

SEQ ID NO: 61029 - DNA, 20 bp, Artificial Sequence
  Description of Artificial Sequence: Synthetic oligonucleotide
  Target: SCNA; (-) strand; PAM type: YTN; PAM sequence: CTT
gctctgtcgcccaggctgga

SEQ ID NO: 61030 - DNA, 20 bp, Artificial Sequence
  Description of Artificial Sequence: Synthetic oligonucleotide
  Target: SCNA; (-) strand; PAM type: YTN; PAM sequence: TTA
gagtcagggccttgctctgt

SEQ ID NO: 61031 - DNA, 20 bp, Artificial Sequence
  Description of Artificial Sequence: Synthetic oligonucleotide
  Target: SCNA; (-) strand; PAM type: YTN; PAM sequence: TTT
agagtcagggccttgctctg

SEQ ID NO: 61032 - DNA, 20 bp, Artificial Sequence
  Description of Artificial Sequence: Synthetic oligonucleotide
  Target: SCNA; (-) strand; PAM type: YTN; PAM sequence: TTT
tagagtcagggccttgctct

SEQ ID NO: 61033 - DNA, 20 bp, Artificial Sequence
  Description of Artificial Sequence: Synthetic oligonucleotide
  Target: SCNA; (-) strand; PAM type: YTN; PAM sequence: TTT
ttagagtcagggccttgctc

SEQ ID NO: 61034 - DNA, 20 bp, Artificial Sequence
  Description of Artificial Sequence: Synthetic oligonucleotide
  Target: SCNA; (-) strand; PAM type: YTN; PAM sequence: TTC
agtttttagagtcagggcct

SEQ ID NO: 61035 - DNA, 20 bp, Artificial Sequence
  Description of Artificial Sequence: Synthetic oligonucleotide
  Target: SCNA; (-) strand; PAM type: YTN; PAM sequence: TTT
cagtttttagagtcagggcc

SEQ ID NO: 61036 - DNA, 20 bp, Artificial Sequence
  Description of Artificial Sequence: Synthetic oligonucleotide
  Target: SCNA; (-) strand; PAM type: YTN; PAM sequence: TTT
tcagtttttagagtcagggc

SEQ ID NO: 61037 - DNA, 20 bp, Artificial Sequence
  Description of Artificial Sequence: Synthetic oligonucleotide
  Target: SCNA; (-) strand; PAM type: YTN; PAM sequence: TTA
ttttcagtttttagagtcag

SEQ ID NO: 61038 - DNA, 20 bp, Artificial Sequence
  Description of Artificial Sequence: Synthetic oligonucleotide
  Target: SCNA; (-) strand; PAM type: YTN; PAM sequence: TTT
attttcagtttttagagtca

SEQ ID NO: 61039 - DNA, 20 bp, Artificial Sequence
  Description of Artificial Sequence: Synthetic oligonucleotide
  Target: SCNA; (-) strand; PAM type: YTN; PAM sequence: TTT
tattttcagtttttagagtc

SEQ ID NO: 61040 - DNA, 20 bp, Artificial Sequence
  Description of Artificial Sequence: Synthetic oligonucleotide
  Target: SCNA; (-) strand; PAM type: YTN; PAM sequence: TTT
ttattttcagtttttagagt

SEQ ID NO: 61041 - DNA, 20 bp, Artificial Sequence
  Description of Artificial Sequence: Synthetic oligonucleotide
  Target: SCNA; (-) strand; PAM type: YTN; PAM sequence: TTT
tttattttcagtttttagag

SEQ ID NO: 61042 - DNA, 20 bp, Artificial Sequence
  Description of Artificial Sequence: Synthetic oligonucleotide
  Target: SCNA; (-) strand; PAM type: YTN; PAM sequence: TTC
agttttttattttcagtttt

SEQ ID NO: 61043 - DNA, 20 bp, Artificial Sequence
  Description of Artificial Sequence: Synthetic oligonucleotide
  Target: SCNA; (-) strand; PAM type: YTN; PAM sequence: TTT
cagttttttattttcagttt

SEQ ID NO: 61044 - DNA, 20 bp, Artificial Sequence
  Description of Artificial Sequence: Synthetic oligonucleotide
  Target: SCNA; (-) strand; PAM type: YTN; PAM sequence: TTT
tcagttttttattttcagtt

SEQ ID NO: 61045 - DNA, 20 bp, Artificial Sequence
  Description of Artificial Sequence: Synthetic oligonucleotide
  Target: SCNA; (-) strand; PAM type: YTN; PAM sequence: TTT
ttcagttttttattttcagt

SEQ ID NO: 61046 - DNA, 20 bp, Artificial Sequence
  Description of Artificial Sequence: Synthetic oligonucleotide
  Target: SCNA; (-) strand; PAM type: YTN; PAM sequence: TTT
tttcagttttttattttcag

SEQ ID NO: 61047 - DNA, 20 bp, Artificial Sequence
  Description of Artificial Sequence: Synthetic oligonucleotide
  Target: SCNA; (-) strand; PAM type: YTN; PAM sequence: TTT
ttttcagttttttattttca

SEQ ID NO: 61048 - DNA, 20 bp, Artificial Sequence
  Description of Artificial Sequence: Synthetic oligonucleotide
  Target: SCNA; (-) strand; PAM type: YTN; PAM sequence: TTT
tttttcagttttttattttc

SEQ ID NO: 61049 - DNA, 20 bp, Artificial Sequence
  Description of Artificial Sequence: Synthetic oligonucleotide
  Target: SCNA; (-) strand; PAM type: YTN; PAM sequence: TTT
ttttttcagttttttatttt

SEQ ID NO: 61050 - DNA, 20 bp, Artificial Sequence
  Description of Artificial Sequence: Synthetic oligonucleotide
  Target: SCNA; (-) strand; PAM type: YTN; PAM sequence: TTC
acaacacatttttttttcag

SEQ ID NO: 61051 - DNA, 20 bp, Artificial Sequence
  Description of Artificial Sequence: Synthetic oligonucleotide
  Target: SCNA; (-) strand; PAM type: YTN; PAM sequence: CTC
atcaaagttcacaacacatt

SEQ ID NO: 61052 - DNA, 20 bp, Artificial Sequence
  Description of Artificial Sequence: Synthetic oligonucleotide
  Target: SCNA; (-) strand; PAM type: YTN; PAM sequence: TTA
tatgaatgcatctcatcaaa

SEQ ID NO: 61053 - DNA, 20 bp, Artificial Sequence
  Description of Artificial Sequence: Synthetic oligonucleotide
  Target: SCNA; (-) strand; PAM type: YTN; PAM sequence: TTT
atatgaatgcatctcatcaa

SEQ ID NO: 61054 - DNA, 20 bp, Artificial Sequence
  Description of Artificial Sequence: Synthetic oligonucleotide
  Target: SCNA; (-) strand; PAM type: YTN; PAM sequence: TTG
ggatgatttatatgaatgca

SEQ ID NO: 61055 - DNA, 20 bp, Artificial Sequence
  Description of Artificial Sequence: Synthetic oligonucleotide
  Target: SCNA; (-) strand; PAM type: YTN; PAM sequence: CTT
gggatgatttatatgaatgc

SEQ ID NO: 61056 - DNA, 20 bp, Artificial Sequence
  Description of Artificial Sequence: Synthetic oligonucleotide
  Target: SCNA; (-) strand; PAM type: YTN; PAM sequence: TTA
tacttgggatgatttatatg

SEQ ID NO: 61057 - DNA, 20 bp, Artificial Sequence
  Description of Artificial Sequence: Synthetic oligonucleotide
  Target: SCNA; (-) strand; PAM type: YTN; PAM sequence: TTT
atacttgggatgatttatat

SEQ ID NO: 61058 - DNA, 20 bp, Artificial Sequence
  Description of Artificial Sequence: Synthetic oligonucleotide
  Target: SCNA; (-) strand; PAM type: YTN; PAM sequence: TTT
tatacttgggatgatttata

SEQ ID NO: 61059 - DNA, 20 bp, Artificial Sequence
  Description of Artificial Sequence: Synthetic oligonucleotide
  Target: SCNA; (-) strand; PAM type: YTN; PAM sequence: TTC
aacatagatcagtgggggaa

SEQ ID NO: 61060 - DNA, 20 bp, Artificial Sequence
  Description of Artificial Sequence: Synthetic oligonucleotide
  Target: SCNA; (-) strand; PAM type: YTN; PAM sequence: CTT
caacatagatcagtggggga

SEQ ID NO: 61061 - DNA, 20 bp, Artificial Sequence
  Description of Artificial Sequence: Synthetic oligonucleotide
  Target: SCNA; (-) strand; PAM type: YTN; PAM sequence: CTC
ttcaacatagatcagtgggg

SEQ ID NO: 61062 - DNA, 20 bp, Artificial Sequence
  Description of Artificial Sequence: Synthetic oligonucleotide
  Target: SCNA; (-) strand; PAM type: YTN; PAM sequence: CTA
tctcttcaacatagatcagt

SEQ ID NO: 61063 - DNA, 20 bp, Artificial Sequence
  Description of Artificial Sequence: Synthetic oligonucleotide
  Target: SCNA; (-) strand; PAM type: YTN; PAM sequence: CTA
cactatctcttcaacataga

SEQ ID NO: 61064 - DNA, 20 bp, Artificial Sequence
  Description of Artificial Sequence: Synthetic oligonucleotide
  Target: SCNA; (-) strand; PAM type: YTN; PAM sequence: CTG
caaagtgaaagaaagctaca

SEQ ID NO: 61065 - DNA, 20 bp, Artificial Sequence
  Description of Artificial Sequence: Synthetic oligonucleotide
  Target: SCNA; (-) strand; PAM type: YTN; PAM sequence: CTA
tgtctgcaaagtgaaagaaa

SEQ ID NO: 61066 - DNA, 20 bp, Artificial Sequence
  Description of Artificial Sequence: Synthetic oligonucleotide
  Target: SCNA; (-) strand; PAM type: YTN; PAM sequence: CTC
cgtctatgtctgcaaagtga

SEQ ID NO: 61067 - DNA, 20 bp, Artificial Sequence
  Description of Artificial Sequence: Synthetic oligonucleotide
  Target: SCNA; (-) strand; PAM type: YTN; PAM sequence: CTG
aaacatgtgctccgtctatg

SEQ ID NO: 61068 - DNA, 20 bp, Artificial Sequence
  Description of Artificial Sequence: Synthetic oligonucleotide
  Target: SCNA; (-) strand; PAM type: YTN; PAM sequence: CTA
gctgaaacatgtgctccgtc

SEQ ID NO: 61069 - DNA, 20 bp, Artificial Sequence
  Description of Artificial Sequence: Synthetic oligonucleotide
  Target: SCNA; (-) strand; PAM type: YTN; PAM sequence: TTG
cctagctgaaacatgtgctc

SEQ ID NO: 61070 - DNA, 20 bp, Artificial Sequence
  Description of Artificial Sequence: Synthetic oligonucleotide
  Target: SCNA; (-) strand; PAM type: YTN; PAM sequence: TTG
agttgcctagctgaaacatg

SEQ ID NO: 61071 - DNA, 20 bp, Artificial Sequence
  Description of Artificial Sequence: Synthetic oligonucleotide
  Target: SCNA; (-) strand; PAM type: YTN; PAM sequence: CTA
tagcagtaagagtcacagga

SEQ ID NO: 61072 - DNA, 20 bp, Artificial Sequence
  Description of Artificial Sequence: Synthetic oligonucleotide
  Target: SCNA; (-) strand; PAM type: YTN; PAM sequence: CTG
gtggcaactatagcagtaag

SEQ ID NO: 61073 - DNA, 20 bp, Artificial Sequence
  Description of Artificial Sequence: Synthetic oligonucleotide
  Target: SCNA; (-) strand; PAM type: YTN; PAM sequence: CTC
tggtggcaactatagcagta

SEQ ID NO: 61074 - DNA, 20 bp, Artificial Sequence
  Description of Artificial Sequence: Synthetic oligonucleotide
  Target: SCNA; (-) strand; PAM type: YTN; PAM sequence: TTC
tctggtggcaactatagcag

SEQ ID NO: 61075 - DNA, 20 bp, Artificial Sequence
  Description of Artificial Sequence: Synthetic oligonucleotide
  Target: SCNA; (-) strand; PAM type: YTN; PAM sequence: TTC
acattctctggtggcaacta

SEQ ID NO: 61076 - DNA, 20 bp, Artificial Sequence
  Description of Artificial Sequence: Synthetic oligonucleotide
  Target: SCNA; (-) strand; PAM type: YTN; PAM sequence: TTT
cacattctctggtggcaact

SEQ ID NO: 61077 - DNA, 20 bp, Artificial Sequence
  Description of Artificial Sequence: Synthetic oligonucleotide
  Target: SCNA; (-) strand; PAM type: YTN; PAM sequence: TTT
tcacattctctggtggcaac

SEQ ID NO: 61078 - DNA, 20 bp, Artificial Sequence
  Description of Artificial Sequence: Synthetic oligonucleotide
  Target: SCNA; (-) strand; PAM type: YTN; PAM sequence: TTT
ttcacattctctggtggcaa

SEQ ID NO: 61079 - DNA, 20 bp, Artificial Sequence
  Description of Artificial Sequence: Synthetic oligonucleotide
  Target: SCNA; (-) strand; PAM type: YTN; PAM sequence: CTT
tttcacattctctggtggca

SEQ ID NO: 61080 - DNA, 20 bp, Artificial Sequence
  Description of Artificial Sequence: Synthetic oligonucleotide
  Target: SCNA; (-) strand; PAM type: YTN; PAM sequence: CTG
agctttttcacattctctgg

SEQ ID NO: 61081 - DNA, 20 bp, Artificial Sequence
  Description of Artificial Sequence: Synthetic oligonucleotide
  Target: SCNA; (-) strand; PAM type: YTN; PAM sequence: CTC
tgagctttttcacattctct

SEQ ID NO: 61082 - DNA, 20 bp, Artificial Sequence
  Description of Artificial Sequence: Synthetic oligonucleotide
  Target: SCNA; (-) strand; PAM type: YTN; PAM sequence: CTC
ctctgagctttttcacattc

SEQ ID NO: 61083 - DNA, 20 bp, Artificial Sequence
  Description of Artificial Sequence: Synthetic oligonucleotide
  Target: SCNA; (-) strand; PAM type: YTN; PAM sequence: TTC
tcctctgagctttttcacat

SEQ ID NO: 61084 - DNA, 20 bp, Artificial Sequence
  Description of Artificial Sequence: Synthetic oligonucleotide
  Target: SCNA; (-) strand; PAM type: YTN; PAM sequence: TTT
ctcctctgagctttttcaca

SEQ ID NO: 61085 - DNA, 20 bp, Artificial Sequence
  Description of Artificial Sequence: Synthetic oligonucleotide
  Target: SCNA; (-) strand; PAM type: YTN; PAM sequence: CTT
tctcctctgagctttttcac

SEQ ID NO: 61086 - DNA, 20 bp, Artificial Sequence
  Description of Artificial Sequence: Synthetic oligonucleotide
  Target: SCNA; (-) strand; PAM type: YTN; PAM sequence: TTC
tttctcctctgagctttttc

SEQ ID NO: 61087 - DNA, 20 bp, Artificial Sequence
  Description of Artificial Sequence: Synthetic oligonucleotide
  Target: SCNA; (-) strand; PAM type: YTN; PAM sequence: CTT
ctttctcctctgagcttttt

SEQ ID NO: 61088 - DNA, 20 bp, Artificial Sequence
  Description of Artificial Sequence: Synthetic oligonucleotide
  Target: SCNA; (-) strand; PAM type: YTN; PAM sequence: CTC
ttctttctcctctgagcttt

SEQ ID NO: 61089 - DNA, 20 bp, Artificial Sequence
  Description of Artificial Sequence: Synthetic oligonucleotide
  Target: SCNA; (-) strand; PAM type: YTN; PAM sequence: CTC
tcttctttctcctctgagct

SEQ ID NO: 61090 - DNA, 20 bp, Artificial Sequence
  Description of Artificial Sequence: Synthetic oligonucleotide
  Target: SCNA; (-) strand; PAM type: YTN; PAM sequence: TTC
ctctcttctttctcctctga

SEQ ID NO: 61091 - DNA, 20 bp, Artificial Sequence
  Description of Artificial Sequence: Synthetic oligonucleotide
  Target: SCNA; (-) strand; PAM type: YTN; PAM sequence: CTT
cctctcttctttctcctctg

SEQ ID NO: 61092 - DNA, 20 bp, Artificial Sequence
  Description of Artificial Sequence: Synthetic oligonucleotide
  Target: SCNA; (-) strand; PAM type: YTN; PAM sequence: TTC
ttcctctcttctttctcctc

SEQ ID NO: 61093 - DNA, 20 bp, Artificial Sequence
  Description of Artificial Sequence: Synthetic oligonucleotide
  Target: SCNA; (-) strand; PAM type: YTN; PAM sequence: TTG
cccattcttcctctcttctt

SEQ ID NO: 61094 - DNA, 20 bp, Artificial Sequence
  Description of Artificial Sequence: Synthetic oligonucleotide
  Target: SCNA; (-) strand; PAM type: YTN; PAM sequence: CTC
aacacagacacattgcccat

SEQ ID NO: 61095 - DNA, 20 bp, Artificial Sequence
  Description of Artificial Sequence: Synthetic oligonucleotide
  Target: SCNA; (-) strand; PAM type: YTN; PAM sequence: CTC
atccacaggcatagacacac

SEQ ID NO: 61096 - DNA, 20 bp, Artificial Sequence
  Description of Artificial Sequence: Synthetic oligonucleotide
  Target: SCNA; (-) strand; PAM type: YTN; PAM sequence: CTC
tcatccacaggcatagacac

SEQ ID NO: 61097 - DNA, 20 bp, Artificial Sequence
  Description of Artificial Sequence: Synthetic oligonucleotide
  Target: SCNA; (-) strand; PAM type: YTN; PAM sequence: TTG
gaaaagaatagacacacact

SEQ ID NO: 61098 - DNA, 20 bp, Artificial Sequence
  Description of Artificial Sequence: Synthetic oligonucleotide
  Target: SCNA; (-) strand; PAM type: YTN; PAM sequence: CTT
ggaaaagaatagacacacac

SEQ ID NO: 61099 - DNA, 20 bp, Artificial Sequence
  Description of Artificial Sequence: Synthetic oligonucleotide
  Target: SCNA; (-) strand; PAM type: YTN; PAM sequence: TTC
cttggaaaagaatagacaca

SEQ ID NO: 61100 - DNA, 20 bp, Artificial Sequence
  Description of Artificial Sequence: Synthetic oligonucleotide
  Target: SCNA; (-) strand; PAM type: YTN; PAM sequence: TTG
aattccttggaaaagaatag

SEQ ID NO: 61101 - DNA, 20 bp, Artificial Sequence
  Description of Artificial Sequence: Synthetic oligonucleotide
  Target: SCNA; (-) strand; PAM type: YTN; PAM sequence: TTT
gaattccttggaaaagaata

SEQ ID NO: 61102 - DNA, 20 bp, Artificial Sequence
  Description of Artificial Sequence: Synthetic oligonucleotide
  Target: SCNA; (-) strand; PAM type: YTN; PAM sequence: CTT
tgaattccttggaaaagaat

SEQ ID NO: 61103 - DNA, 20 bp, Artificial Sequence
  Description of Artificial Sequence: Synthetic oligonucleotide
  Target: SCNA; (-) strand; PAM type: YTN; PAM sequence: TTA
caaaccactttgaattcctt

SEQ ID NO: 61104 - DNA, 20 bp, Artificial Sequence
  Description of Artificial Sequence: Synthetic oligonucleotide
  Target: SCNA; (-) strand; PAM type: YTN; PAM sequence: TTT
acaaaccactttgaattcct

SEQ ID NO: 61105 - DNA, 20 bp, Artificial Sequence
  Description of Artificial Sequence: Synthetic oligonucleotide
  Target: SCNA; (-) strand; PAM type: YTN; PAM sequence: TTT
tacaaaccactttgaattcc

SEQ ID NO: 61106 - DNA, 20 bp, Artificial Sequence
  Description of Artificial Sequence: Synthetic oligonucleotide
  Target: SCNA; (-) strand; PAM type: YTN; PAM sequence: TTA
ttttacaaaccactttgaat

SEQ ID NO: 61107 - DNA, 20 bp, Artificial Sequence
  Description of Artificial Sequence: Synthetic oligonucleotide
  Target: SCNA; (-) strand; PAM type: YTN; PAM sequence: TTG
agtgttattttacaaaccac

SEQ ID NO: 61108 - DNA, 20 bp, Artificial Sequence
  Description of Artificial Sequence: Synthetic oligonucleotide
  Target: SCNA; (-) strand; PAM type: YTN; PAM sequence: TTC
aattgagtgttattttacaa

SEQ ID NO: 61109 - DNA, 20 bp, Artificial Sequence
  Description of Artificial Sequence: Synthetic oligonucleotide
  Target: SCNA; (-) strand; PAM type: YTN; PAM sequence: CTG
tattcaattgagtgttattt

SEQ ID NO: 61110 - DNA, 20 bp, Artificial Sequence
  Description of Artificial Sequence: Synthetic oligonucleotide
  Target: SCNA; (-) strand; PAM type: YTN; PAM sequence: TTG
aactgtattcaattgagtgt

SEQ ID NO: 61111 - DNA, 20 bp, Artificial Sequence
  Description of Artificial Sequence: Synthetic oligonucleotide
  Target: SCNA; (-) strand; PAM type: YTN; PAM sequence: CTT
gaactgtattcaattgagtg

SEQ ID NO: 61112 - DNA, 20 bp, Artificial Sequence
  Description of Artificial Sequence: Synthetic oligonucleotide
  Target: SCNA; (-) strand; PAM type: YTN; PAM sequence: CTG
taacttgaactgtattcaat

SEQ ID NO: 61113 - DNA, 20 bp, Artificial Sequence
  Description of Artificial Sequence: Synthetic oligonucleotide
  Target: SCNA; (-) strand; PAM type: YTN; PAM sequence: TTC
tgtaacttgaactgtattca

SEQ ID NO: 61114 - DNA, 20 bp, Artificial Sequence
  Description of Artificial Sequence: Synthetic oligonucleotide
  Target: SCNA; (-) strand; PAM type: YTN; PAM sequence: TTT
ctgtaacttgaactgtattc

SEQ ID NO: 61115 - DNA, 20 bp, Artificial Sequence
  Description of Artificial Sequence: Synthetic oligonucleotide
  Target: SCNA; (-) strand; PAM type: YTN; PAM sequence: TTT
tctgtaacttgaactgtatt

SEQ ID NO: 61116 - DNA, 20 bp, Artificial Sequence
  Description of Artificial Sequence: Synthetic oligonucleotide
  Target: SCNA; (-) strand; PAM type: YTN; PAM sequence: CTT
ttctgtaacttgaactgtat

SEQ ID NO: 61117 - DNA, 20 bp, Artificial Sequence
  Description of Artificial Sequence: Synthetic oligonucleotide
  Target: SCNA; (-) strand; PAM type: YTN; PAM sequence: CTC
ttttctgtaacttgaactgt

SEQ ID NO: 61118 - DNA, 20 bp, Artificial Sequence
  Description of Artificial Sequence: Synthetic oligonucleotide
  Target: SCNA; (-) strand; PAM type: YTN; PAM sequence: CTC
tcttttctgtaacttgaact

SEQ ID NO: 61119 - DNA, 20 bp, Artificial Sequence
  Description of Artificial Sequence: Synthetic oligonucleotide
  Target: SCNA; (-) strand; PAM type: YTN; PAM sequence: CTG
actctcttttctgtaacttg

SEQ ID NO: 61120 - DNA, 20 bp, Artificial Sequence
  Description of Artificial Sequence: Synthetic oligonucleotide
  Target: SCNA; (-) strand; PAM type: YTN; PAM sequence: CTC
tgactctcttttctgtaact

SEQ ID NO: 61121 - DNA, 20 bp, Artificial Sequence
  Description of Artificial Sequence: Synthetic oligonucleotide
  Target: SCNA; (-) strand; PAM type: YTN; PAM sequence: TTG
gggtatacacccaaactctg

SEQ ID NO: 61122 - DNA, 20 bp, Artificial Sequence
  Description of Artificial Sequence: Synthetic oligonucleotide
  Target: SCNA; (-) strand; PAM type: YTN; PAM sequence: CTT
ggggtatacacccaaactct

SEQ ID NO: 61123 - DNA, 20 bp, Artificial Sequence
  Description of Artificial Sequence: Synthetic oligonucleotide
  Target: SCNA; (-) strand; PAM type: YTN; PAM sequence: TTC
caccttggggtatacaccca

SEQ ID NO: 61124 - DNA, 20 bp, Artificial Sequence
  Description of Artificial Sequence: Synthetic oligonucleotide
  Target: SCNA; (-) strand; PAM type: YTN; PAM sequence: CTA
aagttccaccttggggtata

SEQ ID NO: 61125 - DNA, 20 bp, Artificial Sequence
  Description of Artificial Sequence: Synthetic oligonucleotide
  Target: SCNA; (-) strand; PAM type: YTN; PAM sequence: TTC
ctaaagttccaccttggggt

SEQ ID NO: 61126 - DNA, 20 bp, Artificial Sequence
  Description of Artificial Sequence: Synthetic oligonucleotide
  Target: SCNA; (-) strand; PAM type: YTN; PAM sequence: TTG
ttcctaaagttccaccttgg

SEQ ID NO: 61127 - DNA, 20 bp, Artificial Sequence
  Description of Artificial Sequence: Synthetic oligonucleotide
  Target: SCNA; (-) strand; PAM type: YTN; PAM sequence: CTT
gttcctaaagttccaccttg

SEQ ID NO: 61128 - DNA, 20 bp, Artificial Sequence
  Description of Artificial Sequence: Synthetic oligonucleotide
  Target: SCNA; (-) strand; PAM type: YTN; PAM sequence: CTA
cttgttcctaaagttccacc

SEQ ID NO: 61129 - DNA, 20 bp, Artificial Sequence
  Description of Artificial Sequence: Synthetic oligonucleotide
  Target: SCNA; (-) strand; PAM type: YTN; PAM sequence: TTA
cctacttgttcctaaagttc

SEQ ID NO: 61130 - DNA, 20 bp, Artificial Sequence
  Description of Artificial Sequence: Synthetic oligonucleotide
  Target: SCNA; (-) strand; PAM type: YTN; PAM sequence: TTA
ttacctacttgttcctaaag

SEQ ID NO: 61131 - DNA, 20 bp, Artificial Sequence
  Description of Artificial Sequence: Synthetic oligonucleotide
  Target: SCNA; (-) strand; PAM type: YTN; PAM sequence: CTT
attacctacttgttcctaaa

SEQ ID NO: 61132 - DNA, 20 bp, Artificial Sequence
  Description of Artificial Sequence: Synthetic oligonucleotide
  Target: SCNA; (-) strand; PAM type: YTN; PAM sequence: TTG
atgcttattacctacttgtt

SEQ ID NO: 61133 - DNA, 20 bp, Artificial Sequence
  Description of Artificial Sequence: Synthetic oligonucleotide
  Target: SCNA; (-) strand; PAM type: YTN; PAM sequence: CTA
aaagaataaagaaattgatg

SEQ ID NO: 61134 - DNA, 20 bp, Artificial Sequence
  Description of Artificial Sequence: Synthetic oligonucleotide
  Target: SCNA; (-) strand; PAM type: YTN; PAM sequence: TTC
atccatcaaatgacacacat

SEQ ID NO: 61135 - DNA, 20 bp, Artificial Sequence
  Description of Artificial Sequence: Synthetic oligonucleotide
  Target: SCNA; (-) strand; PAM type: YTN; PAM sequence: TTG
tatagttcatccatcaaatg

SEQ ID NO: 61136 - DNA, 20 bp, Artificial Sequence
  Description of Artificial Sequence: Synthetic oligonucleotide
  Target: SCNA; (-) strand; PAM type: YTN; PAM sequence: TTT
gtatagttcatccatcaaat

SEQ ID NO: 61137 - DNA, 20 bp, Artificial Sequence
  Description of Artificial Sequence: Synthetic oligonucleotide
  Target: SCNA; (-) strand; PAM type: YTN; PAM sequence: CTC
agaaacatttgtatagttca

SEQ ID NO: 61138 - DNA, 20 bp, Artificial Sequence
  Description of Artificial Sequence: Synthetic oligonucleotide
  Target: SCNA; (-) strand; PAM type: YTN; PAM sequence: CTC
tcagaaacatttgtatagtt

SEQ ID NO: 61139 - DNA, 20 bp, Artificial Sequence
  Description of Artificial Sequence: Synthetic oligonucleotide
  Target: SCNA; (-) strand; PAM type: YTN; PAM sequence: CTA
atctctcagaaacatttgta

SEQ ID NO: 61140 - DNA, 20 bp, Artificial Sequence
  Description of Artificial Sequence: Synthetic oligonucleotide
  Target: SCNA; (-) strand; PAM type: YTN; PAM sequence: CTA
ctaatctctcagaaacattt

SEQ ID NO: 61141 - DNA, 20 bp, Artificial Sequence
  Description of Artificial Sequence: Synthetic oligonucleotide
  Target: SCNA; (-) strand; PAM type: YTN; PAM sequence: CTG
ctactaatctctcagaaaca

SEQ ID NO: 61142 - DNA, 20 bp, Artificial Sequence
  Description of Artificial Sequence: Synthetic oligonucleotide
  Target: SCNA; (-) strand; PAM type: YTN; PAM sequence: TTG
agggctgctactaatctctc

SEQ ID NO: 61143 - DNA, 20 bp, Artificial Sequence
  Description of Artificial Sequence: Synthetic oligonucleotide
  Target: SCNA; (-) strand; PAM type: YTN; PAM sequence: CTT
gagggctgctactaatctct

SEQ ID NO: 61144 - DNA, 20 bp, Artificial Sequence
  Description of Artificial Sequence: Synthetic oligonucleotide
  Target: SCNA; (-) strand; PAM type: YTN; PAM sequence: CTG
aggacagagaaaagtgcttg

SEQ ID NO: 61145 - DNA, 20 bp, Artificial Sequence
  Description of Artificial Sequence: Synthetic oligonucleotide
  Target: SCNA; (-) strand; PAM type: YTN; PAM sequence: CTG
tgaacactgaggacagagaa

SEQ ID NO: 61146 - DNA, 20 bp, Artificial Sequence
  Description of Artificial Sequence: Synthetic oligonucleotide
  Target: SCNA; (-) strand; PAM type: YTN; PAM sequence: CTC
tgtgaacactgaggacagag

SEQ ID NO: 61147 - DNA, 20 bp, Artificial Sequence
  Description of Artificial Sequence: Synthetic oligonucleotide
  Target: SCNA; (-) strand; PAM type: YTN; PAM sequence: TTG
gtctctgtgaacactgagga

SEQ ID NO: 61148 - DNA, 20 bp, Artificial Sequence
  Description of Artificial Sequence: Synthetic oligonucleotide
  Target: SCNA; (-) strand; PAM type: YTN; PAM sequence: TTT
ggtctctgtgaacactgagg

SEQ ID NO: 61149 - DNA, 20 bp, Artificial Sequence
  Description of Artificial Sequence: Synthetic oligonucleotide
  Target: SCNA; (-) strand; PAM type: YTN; PAM sequence: TTC
atgtgatcatttggtctctg

SEQ ID NO: 61150 - DNA, 20 bp, Artificial Sequence
  Description of Artificial Sequence: Synthetic oligonucleotide
  Target: SCNA; (-) strand; PAM type: YTN; PAM sequence: CTT
catgtgatcatttggtctct

SEQ ID NO: 61151 - DNA, 20 bp, Artificial Sequence
  Description of Artificial Sequence: Synthetic oligonucleotide
  Target: SCNA; (-) strand; PAM type: YTN; PAM sequence: TTA
cttcatgtgatcatttggtc

SEQ ID NO: 61152 - DNA, 20 bp, Artificial Sequence
  Description of Artificial Sequence: Synthetic oligonucleotide
  Target: SCNA; (-) strand; PAM type: YTN; PAM sequence: TTG
atagagttacttcatgtgat

SEQ ID NO: 61153 - DNA, 20 bp, Artificial Sequence
  Description of Artificial Sequence: Synthetic oligonucleotide
  Target: SCNA; (-) strand; PAM type: YTN; PAM sequence: TTT
gatagagttacttcatgtga

SEQ ID NO: 61154 - DNA, 20 bp, Artificial Sequence
  Description of Artificial Sequence: Synthetic oligonucleotide
  Target: SCNA; (-) strand; PAM type: YTN; PAM sequence: CTT
tgatagagttacttcatgtg

SEQ ID NO: 61155 - DNA, 20 bp, Artificial Sequence
  Description of Artificial Sequence: Synthetic oligonucleotide
  Target: SCNA; (-) strand; PAM type: YTN; PAM sequence: TTA
gtctttgatagagttacttc

SEQ ID NO: 61156 - DNA, 20 bp, Artificial Sequence
  Description of Artificial Sequence: Synthetic oligonucleotide
  Target: SCNA; (-) strand; PAM type: YTN; PAM sequence: CTA
aaatggaaagaacagattag

SEQ ID NO: 61157 - DNA, 20 bp, Artificial Sequence
  Description of Artificial Sequence: Synthetic oligonucleotide
  Target: SCNA; (-) strand; PAM type: YTN; PAM sequence: TTG
tggccctaaaatggaaagaa

SEQ ID NO: 61158 - DNA, 20 bp, Artificial Sequence
  Description of Artificial Sequence: Synthetic oligonucleotide
  Target: SCNA; (-) strand; PAM type: YTN; PAM sequence: TTT
gtggccctaaaatggaaaga

SEQ ID NO: 61159 - DNA, 20 bp, Artificial Sequence
  Description of Artificial Sequence: Synthetic oligonucleotide
  Target: SCNA; (-) strand; PAM type: YTN; PAM sequence: CTA
tttgtggccctaaaatggaa

SEQ ID NO: 61160 - DNA, 20 bp, Artificial Sequence
  Description of Artificial Sequence: Synthetic oligonucleotide
  Target: SCNA; (-) strand; PAM type: YTN; PAM sequence: CTG
tgatgtgtataaagagacct

SEQ ID NO: 61161 - DNA, 20 bp, Artificial Sequence
  Description of Artificial Sequence: Synthetic oligonucleotide
  Target: SCNA; (-) strand; PAM type: YTN; PAM sequence: TTG
atatgcccctgtgatgtgta

SEQ ID NO: 61162 - DNA, 20 bp, Artificial Sequence
  Description of Artificial Sequence: Synthetic oligonucleotide
  Target: SCNA; (-) strand; PAM type: YTN; PAM sequence: TTT
gatatgcccctgtgatgtgt

SEQ ID NO: 61163 - DNA, 20 bp, Artificial Sequence
  Description of Artificial Sequence: Synthetic oligonucleotide
  Target: SCNA; (-) strand; PAM type: YTN; PAM sequence: CTT
tgatatgcccctgtgatgtg

SEQ ID NO: 61164 - DNA, 20 bp, Artificial Sequence
  Description of Artificial Sequence: Synthetic oligonucleotide
  Target: SCNA; (-) strand; PAM type: YTN; PAM sequence: TTA
aaatatgactttgatatgcc

SEQ ID NO: 61165 - DNA, 20 bp, Artificial Sequence
  Description of Artificial Sequence: Synthetic oligonucleotide
  Target: SCNA; (-) strand; PAM type: YTN; PAM sequence: TTT
aaaatatgactttgatatgc

SEQ ID NO: 61166 - DNA, 20 bp, Artificial Sequence
  Description of Artificial Sequence: Synthetic oligonucleotide
  Target: SCNA; (-) strand; PAM type: YTN; PAM sequence: TTT
taaaatatgactttgatatg

SEQ ID NO: 61167 - DNA, 20 bp, Artificial Sequence
  Description of Artificial Sequence: Synthetic oligonucleotide
  Target: SCNA; (-) strand; PAM type: YTN; PAM sequence: TTT
ttaaaatatgactttgatat

SEQ ID NO: 61168 - DNA, 20 bp, Artificial Sequence
  Description of Artificial Sequence: Synthetic oligonucleotide
  Target: SCNA; (-) strand; PAM type: YTN; PAM sequence: CTG
atttttaaaatatgactttg

SEQ ID NO: 61169 - DNA, 20 bp, Artificial Sequence
  Description of Artificial Sequence: Synthetic oligonucleotide
  Target: SCNA; (-) strand; PAM type: YTN; PAM sequence: TTC
tgatttttaaaatatgactt

SEQ ID NO: 61170 - DNA, 20 bp, Artificial Sequence
  Description of Artificial Sequence: Synthetic oligonucleotide
  Target: SCNA; (-) strand; PAM type: YTN; PAM sequence: TTA
atccattctgatttttaaaa

SEQ ID NO: 61171 - DNA, 20 bp, Artificial Sequence
  Description of Artificial Sequence: Synthetic oligonucleotide
  Target: SCNA; (-) strand; PAM type: YTN; PAM sequence: TTT
aatccattctgatttttaaa

SEQ ID NO: 61172 - DNA, 20 bp, Artificial Sequence
  Description of Artificial Sequence: Synthetic oligonucleotide
  Target: SCNA; (-) strand; PAM type: YTN; PAM sequence: TTT
taatccattctgatttttaa

SEQ ID NO: 61173 - DNA, 20 bp, Artificial Sequence
  Description of Artificial Sequence: Synthetic oligonucleotide
  Target: SCNA; (-) strand; PAM type: YTN; PAM sequence: TTG
tcaattttaatccattctga

SEQ ID NO: 61174 - DNA, 20 bp, Artificial Sequence
  Description of Artificial Sequence: Synthetic oligonucleotide
  Target: SCNA; (-) strand; PAM type: YTN; PAM sequence: TTT
gtcaattttaatccattctg

SEQ ID NO: 61175 - DNA, 20 bp, Artificial Sequence
  Description of Artificial Sequence: Synthetic oligonucleotide
  Target: SCNA; (-) strand; PAM type: YTN; PAM sequence: TTA
ccatcatgaaaaatgtttgt

SEQ ID NO: 61176 - DNA, 20 bp, Artificial Sequence
  Description of Artificial Sequence: Synthetic oligonucleotide
  Target: SCNA; (-) strand; PAM type: YTN; PAM sequence: TTT
accatcatgaaaaatgtttg

SEQ ID NO: 61177 - DNA, 20 bp, Artificial Sequence
  Description of Artificial Sequence: Synthetic oligonucleotide
  Target: SCNA; (-) strand; PAM type: YTN; PAM sequence: TTT
taccatcatgaaaaatgttt

SEQ ID NO: 61178 - DNA, 20 bp, Artificial Sequence
  Description of Artificial Sequence: Synthetic oligonucleotide
  Target: SCNA; (-) strand; PAM type: YTN; PAM sequence: CTT
ttaccatcatgaaaaatgtt

SEQ ID NO: 61179 - DNA, 20 bp, Artificial Sequence
  Description of Artificial Sequence: Synthetic oligonucleotide
  Target: SCNA; (-) strand; PAM type: YTN; PAM sequence: TTC
ttttaccatcatgaaaaatg

SEQ ID NO: 61180 - DNA, 20 bp, Artificial Sequence
  Description of Artificial Sequence: Synthetic oligonucleotide
  Target: SCNA; (-) strand; PAM type: YTN; PAM sequence: TTT
cttttaccatcatgaaaaat

SEQ ID NO: 61181 - DNA, 20 bp, Artificial Sequence
  Description of Artificial Sequence: Synthetic oligonucleotide
  Target: SCNA; (-) strand; PAM type: YTN; PAM sequence: CTG
tgatttcttttaccatcatg

SEQ ID NO: 61182 - DNA, 20 bp, Artificial Sequence
  Description of Artificial Sequence: Synthetic oligonucleotide
  Target: SCNA; (-) strand; PAM type: YTN; PAM sequence: TTG
atggatctgtgatttctttt

SEQ ID NO: 61183 - DNA, 20 bp, Artificial Sequence
  Description of Artificial Sequence: Synthetic oligonucleotide
  Target: SCNA; (-) strand; PAM type: YTN; PAM sequence: TTA
agaatcaaaatcattgatgg

SEQ ID NO: 61184 - DNA, 20 bp, Artificial Sequence
  Description of Artificial Sequence: Synthetic oligonucleotide
  Target: SCNA; (-) strand; PAM type: YTN; PAM sequence: CTT
aagaatcaaaatcattgatg

SEQ ID NO: 61185 - DNA, 20 bp, Artificial Sequence
  Description of Artificial Sequence: Synthetic oligonucleotide
  Target: SCNA; (-) strand; PAM type: YTN; PAM sequence: TTC
ttaagaatcaaaatcattga

SEQ ID NO: 61186 - DNA, 20 bp, Artificial Sequence
  Description of Artificial Sequence: Synthetic oligonucleotide
  Target: SCNA; (-) strand; PAM type: YTN; PAM sequence: TTA
aaaaataatcaagaatattc

SEQ ID NO: 61187 - DNA, 20 bp, Artificial Sequence
  Description of Artificial Sequence: Synthetic oligonucleotide
  Target: SCNA; (-) strand; PAM type: YTN; PAM sequence: TTT
aaaaaataatcaagaatatt

SEQ ID NO: 61188 - DNA, 20 bp, Artificial Sequence
  Description of Artificial Sequence: Synthetic oligonucleotide
  Target: SCNA; (-) strand; PAM type: YTN; PAM sequence: TTT
taaaaaataatcaagaatat

SEQ ID NO: 61189 - DNA, 20 bp, Artificial Sequence
  Description of Artificial Sequence: Synthetic oligonucleotide
  Target: SCNA; (-) strand; PAM type: YTN; PAM sequence: CTT
ttaaaaaataatcaagaata

SEQ ID NO: 61190 - DNA, 20 bp, Artificial Sequence
  Description of Artificial Sequence: Synthetic oligonucleotide
  Target: SCNA; (-) strand; PAM type: YTN; PAM sequence: CTC
atagtcttttaaaaaataat

SEQ ID NO: 61191 - DNA, 20 bp, Artificial Sequence
  Description of Artificial Sequence: Synthetic oligonucleotide
  Target: SCNA; (-) strand; PAM type: YTN; PAM sequence: TTA
aaaactcatagtcttttaaa

SEQ ID NO: 61192 - DNA, 20 bp, Artificial Sequence
  Description of Artificial Sequence: Synthetic oligonucleotide
  Target: SCNA; (-) strand; PAM type: YTN; PAM sequence: TTT
aaaaactcatagtcttttaa

SEQ ID NO: 61193 - DNA, 20 bp, Artificial Sequence
  Description of Artificial Sequence: Synthetic oligonucleotide
  Target: SCNA; (-) strand; PAM type: YTN; PAM sequence: TTT
taaaaactcatagtctttta

SEQ ID NO: 61194 - DNA, 20 bp, Artificial Sequence
  Description of Artificial Sequence: Synthetic oligonucleotide
  Target: SCNA; (-) strand; PAM type: YTN; PAM sequence: TTC
agagaacagttttaaaaact

SEQ ID NO: 61195 - DNA, 20 bp, Artificial Sequence
  Description of Artificial Sequence: Synthetic oligonucleotide
  Target: SCNA; (-) strand; PAM type: YTN; PAM sequence: TTT
cagagaacagttttaaaaac

SEQ ID NO: 61196 - DNA, 20 bp, Artificial Sequence
  Description of Artificial Sequence: Synthetic oligonucleotide
  Target: SCNA; (-) strand; PAM type: YTN; PAM sequence: CTA
tttcagagaacagttttaaa

SEQ ID NO: 61197 - DNA, 20 bp, Artificial Sequence
  Description of Artificial Sequence: Synthetic oligonucleotide
  Target: SCNA; (-) strand; PAM type: YTN; PAM sequence: TTC
tatttcagagaacagtttta

SEQ ID NO: 61198 - DNA, 20 bp, Artificial Sequence
  Description of Artificial Sequence: Synthetic oligonucleotide
  Target: SCNA; (-) strand; PAM type: YTN; PAM sequence: CTA
cataattctatttcagagaa

SEQ ID NO: 61199 - DNA, 20 bp, Artificial Sequence
  Description of Artificial Sequence: Synthetic oligonucleotide
  Target: SCNA; (-) strand; PAM type: YTN; PAM sequence: CTG
tacctacataattctatttc

SEQ ID NO: 61200 - DNA, 20 bp, Artificial Sequence
  Description of Artificial Sequence: Synthetic oligonucleotide
  Target: SCNA; (-) strand; PAM type: YTN; PAM sequence: TTC
tgtacctacataattctatt

SEQ ID NO: 61201 - DNA, 20 bp, Artificial Sequence
  Description of Artificial Sequence: Synthetic oligonucleotide
  Target: SCNA; (-) strand; PAM type: YTN; PAM sequence: TTT
ctgtacctacataattctat

SEQ ID NO: 61202 - DNA, 20 bp, Artificial Sequence
  Description of Artificial Sequence: Synthetic oligonucleotide
  Target: SCNA; (-) strand; PAM type: YTN; PAM sequence: TTA
aaaatgaatgtttctgtacc

SEQ ID NO: 61203 - DNA, 20 bp, Artificial Sequence
  Description of Artificial Sequence: Synthetic oligonucleotide
  Target: SCNA; (-) strand; PAM type: YTN; PAM sequence: TTT
aaaaatgaatgtttctgtac

SEQ ID NO: 61204 - DNA, 20 bp, Artificial Sequence
  Description of Artificial Sequence: Synthetic oligonucleotide
  Target: SCNA; (-) strand; PAM type: YTN; PAM sequence: TTT
taaaaatgaatgtttctgta

SEQ ID NO: 61205 - DNA, 20 bp, Artificial Sequence
  Description of Artificial Sequence: Synthetic oligonucleotide
  Target: SCNA; (-) strand; PAM type: YTN; PAM sequence: TTT
ttaaaaatgaatgtttctgt

SEQ ID NO: 61206 - DNA, 20 bp, Artificial Sequence
  Description of Artificial Sequence: Synthetic oligonucleotide
  Target: SCNA; (-) strand; PAM type: YTN; PAM sequence: CTT
tttaaaaatgaatgtttctg

SEQ ID NO: 61207 - DNA, 20 bp, Artificial Sequence
  Description of Artificial Sequence: Synthetic oligonucleotide
  Target: SCNA; (-) strand; PAM type: YTN; PAM sequence: TTA
tgactttttaaaaatgaatg

SEQ ID NO: 61208 - DNA, 20 bp, Artificial Sequence
  Description of Artificial Sequence: Synthetic oligonucleotide
  Target: SCNA; (-) strand; PAM type: YTN; PAM sequence: TTT
atgactttttaaaaatgaat

SEQ ID NO: 61209 - DNA, 20 bp, Artificial Sequence
  Description of Artificial Sequence: Synthetic oligonucleotide
  Target: SCNA; (-) strand; PAM type: YTN; PAM sequence: CTA
atatttatgactttttaaaa

SEQ ID NO: 61210 - DNA, 20 bp, Artificial Sequence
  Description of Artificial Sequence: Synthetic oligonucleotide
  Target: SCNA; (-) strand; PAM type: YTN; PAM sequence: TTG
ccctaatatttatgactttt

SEQ ID NO: 61211 - DNA, 20 bp, Artificial Sequence
  Description of Artificial Sequence: Synthetic oligonucleotide
  Target: SCNA; (-) strand; PAM type: YTN; PAM sequence: TTT
gccctaatatttatgacttt

SEQ ID NO: 61212 - DNA, 20 bp, Artificial Sequence
  Description of Artificial Sequence: Synthetic oligonucleotide
  Target: SCNA; (-) strand; PAM type: YTN; PAM sequence: TTT
tgccctaatatttatgactt

SEQ ID NO: 61213 - DNA, 20 bp, Artificial Sequence
  Description of Artificial Sequence: Synthetic oligonucleotide
  Target: SCNA; (-) strand; PAM type: YTN; PAM sequence: TTA
attttgccctaatatttatg

SEQ ID NO: 61214 - DNA, 20 bp, Artificial Sequence
  Description of Artificial Sequence: Synthetic oligonucleotide
  Target: SCNA; (-) strand; PAM type: YTN; PAM sequence: TTT
aattttgccctaatatttat

SEQ ID NO: 61215 - DNA, 20 bp, Artificial Sequence
  Description of Artificial Sequence: Synthetic oligonucleotide
  Target: SCNA; (-) strand; PAM type: YTN; PAM sequence: TTT
taattttgccctaatattta

SEQ ID NO: 61216 - DNA, 20 bp, Artificial Sequence
  Description of Artificial Sequence: Synthetic oligonucleotide
  Target: SCNA; (-) strand; PAM type: YTN; PAM sequence: TTT
ttaattttgccctaatattt

SEQ ID NO: 61217 - DNA, 20 bp, Artificial Sequence
  Description of Artificial Sequence: Synthetic oligonucleotide
  Target: SCNA; (-) strand; PAM type: YTN; PAM sequence: TTC
cagatttttaattttgccct

SEQ ID NO: 61218 - DNA, 20 bp, Artificial Sequence
  Description of Artificial Sequence: Synthetic oligonucleotide
  Target: SCNA; (-) strand; PAM type: YTN; PAM sequence: TTT
ccagatttttaattttgccc

SEQ ID NO: 61219 - DNA, 20 bp, Artificial Sequence
  Description of Artificial Sequence: Synthetic oligonucleotide
  Target: SCNA; (-) strand; PAM type: YTN; PAM sequence: TTT
tccagatttttaattttgcc

SEQ ID NO: 61220 - DNA, 20 bp, Artificial Sequence
  Description of Artificial Sequence: Synthetic oligonucleotide
  Target: SCNA; (-) strand; PAM type: YTN; PAM sequence: CTT
ttccagatttttaattttgc

SEQ ID NO: 61221 - DNA, 20 bp, Artificial Sequence
  Description of Artificial Sequence: Synthetic oligonucleotide
  Target: SCNA; (-) strand; PAM type: YTN; PAM sequence: TTG
cttttccagatttttaattt

SEQ ID NO: 61222 - DNA, 20 bp, Artificial Sequence
  Description of Artificial Sequence: Synthetic oligonucleotide
  Target: SCNA; (-) strand; PAM type: YTN; PAM sequence: TTT
gcttttccagatttttaatt

SEQ ID NO: 61223 - DNA, 20 bp, Artificial Sequence
  Description of Artificial Sequence: Synthetic oligonucleotide
  Target: SCNA; (-) strand; PAM type: YTN; PAM sequence: CTG
tttgcttttccagattttta

SEQ ID NO: 61224 - DNA, 20 bp, Artificial Sequence
  Description of Artificial Sequence: Synthetic oligonucleotide
  Target: SCNA; (-) strand; PAM type: YTN; PAM sequence: CTA
atagtaaaaaatgcgactgt

SEQ ID NO: 61225 - DNA, 20 bp, Artificial Sequence
  Description of Artificial Sequence: Synthetic oligonucleotide
  Target: SCNA; (-) strand; PAM type: YTN; PAM sequence: TTG
agctaatagtaaaaaatgcg

SEQ ID NO: 61226 - DNA, 20 bp, Artificial Sequence
  Description of Artificial Sequence: Synthetic oligonucleotide
  Target: SCNA; (-) strand; PAM type: YTN; PAM sequence: TTT
gagctaatagtaaaaaatgc

SEQ ID NO: 61227 - DNA, 20 bp, Artificial Sequence
  Description of Artificial Sequence: Synthetic oligonucleotide
  Target: SCNA; (-) strand; PAM type: YTN; PAM sequence: CTG
agtcagaggtatgtgtaggt

SEQ ID NO: 61228 - DNA, 20 bp, Artificial Sequence
  Description of Artificial Sequence: Synthetic oligonucleotide
  Target: SCNA; (-) strand; PAM type: YTN; PAM sequence: TTG
tcaaaaaggtggactgagtc

SEQ ID NO: 61229 - DNA, 20 bp, Artificial Sequence
  Description of Artificial Sequence: Synthetic oligonucleotide
  Target: SCNA; (-) strand; PAM type: YTN; PAM sequence: CTT
gtcaaaaaggtggactgagt

SEQ ID NO: 61230 - DNA, 20 bp, Artificial Sequence
  Description of Artificial Sequence: Synthetic oligonucleotide
  Target: SCNA; (-) strand; PAM type: YTN; PAM sequence: TTG
cttgtcaaaaaggtggactg

SEQ ID NO: 61231 - DNA, 20 bp, Artificial Sequence
  Description of Artificial Sequence: Synthetic oligonucleotide
  Target: SCNA; (-) strand; PAM type: YTN; PAM sequence: TTG
catcattgcttgtcaaaaag

SEQ ID NO: 61232 - DNA, 20 bp, Artificial Sequence
  Description of Artificial Sequence: Synthetic oligonucleotide
  Target: SCNA; (-) strand; PAM type: YTN; PAM sequence: TTT
gcatcattgcttgtcaaaaa

SEQ ID NO: 61233 - DNA, 20 bp, Artificial Sequence
  Description of Artificial Sequence: Synthetic oligonucleotide
  Target: SCNA; (-) strand; PAM type: YTN; PAM sequence: TTT
tgcatcattgcttgtcaaaa

SEQ ID NO: 61234 - DNA, 20 bp, Artificial Sequence
  Description of Artificial Sequence: Synthetic oligonucleotide
  Target: SCNA; (-) strand; PAM type: YTN; PAM sequence: TTT
ttgcatcattgcttgtcaaa

SEQ ID NO: 61235 - DNA, 20 bp, Artificial Sequence
  Description of Artificial Sequence: Synthetic oligonucleotide
  Target: SCNA; (-) strand; PAM type: YTN; PAM sequence: TTC
atttttgcatcattgcttgt

SEQ ID NO: 61236 - DNA, 20 bp, Artificial Sequence
  Description of Artificial Sequence: Synthetic oligonucleotide
  Target: SCNA; (-) strand; PAM type: YTN; PAM sequence: TTG
attcatttttgcatcattgc

SEQ ID NO: 61237 - DNA, 20 bp, Artificial Sequence
  Description of Artificial Sequence: Synthetic oligonucleotide
  Target: SCNA; (-) strand; PAM type: YTN; PAM sequence: CTT
gattcatttttgcatcattg

SEQ ID NO: 61238 - DNA, 20 bp, Artificial Sequence
  Description of Artificial Sequence: Synthetic oligonucleotide
  Target: SCNA; (-) strand; PAM type: YTN; PAM sequence: CTC
ttgattcatttttgcatcat

SEQ ID NO: 61239 - DNA, 20 bp, Artificial Sequence
  Description of Artificial Sequence: Synthetic oligonucleotide
  Target: SCNA; (-) strand; PAM type: YTN; PAM sequence: CTC
tcttgattcatttttgcatc

SEQ ID NO: 61240 - DNA, 20 bp, Artificial Sequence
  Description of Artificial Sequence: Synthetic oligonucleotide
  Target: SCNA; (-) strand; PAM type: YTN; PAM sequence: CTC
tctcttgattcatttttgca

SEQ ID NO: 61241 - DNA, 20 bp, Artificial Sequence
  Description of Artificial Sequence: Synthetic oligonucleotide
  Target: SCNA; (-) strand; PAM type: YTN; PAM sequence: TTC
tctctcttgattcatttttg

SEQ ID NO: 61242 - DNA, 20 bp, Artificial Sequence
  Description of Artificial Sequence: Synthetic oligonucleotide
  Target: SCNA; (-) strand; PAM type: YTN; PAM sequence: CTG
gtagttctctctcttgattc

SEQ ID NO: 61243 - DNA, 20 bp, Artificial Sequence
  Description of Artificial Sequence: Synthetic oligonucleotide
  Target: SCNA; (-) strand; PAM type: YTN; PAM sequence: CTA
aatgctggtagttctctctc

SEQ ID NO: 61244 - DNA, 20 bp, Artificial Sequence
  Description of Artificial Sequence: Synthetic oligonucleotide
  Target: SCNA; (-) strand; PAM type: YTN; PAM sequence: CTC
taaatgctggtagttctctc

SEQ ID NO: 61245 - DNA, 20 bp, Artificial Sequence
  Description of Artificial Sequence: Synthetic oligonucleotide
  Target: SCNA; (-) strand; PAM type: YTN; PAM sequence: TTA
ggataatcaatactctaaat

SEQ ID NO: 61246 - DNA, 20 bp, Artificial Sequence
  Description of Artificial Sequence: Synthetic oligonucleotide
  Target: SCNA; (-) strand; PAM type: YTN; PAM sequence: TTC
atgagtgatgggttaggata

SEQ ID NO: 61247 - DNA, 20 bp, Artificial Sequence
  Description of Artificial Sequence: Synthetic oligonucleotide
  Target: SCNA; (-) strand; PAM type: YTN; PAM sequence: TTG
ttcatgagtgatgggttagg

SEQ ID NO: 61248 - DNA, 20 bp, Artificial Sequence
  Description of Artificial Sequence: Synthetic oligonucleotide
  Target: SCNA; (-) strand; PAM type: YTN; PAM sequence: CTT
gttcatgagtgatgggttag

SEQ ID NO: 61249 - DNA, 20 bp, Artificial Sequence
  Description of Artificial Sequence: Synthetic oligonucleotide
  Target: SCNA; (-) strand; PAM type: YTN; PAM sequence: TTG
gtgcttgttcatgagtgatg

SEQ ID NO: 61250 - DNA, 20 bp, Artificial Sequence
  Description of Artificial Sequence: Synthetic oligonucleotide
  Target: SCNA; (-) strand; PAM type: YTN; PAM sequence: TTT
ggtgcttgttcatgagtgat

SEQ ID NO: 61251 - DNA, 20 bp, Artificial Sequence
  Description of Artificial Sequence: Synthetic oligonucleotide
  Target: SCNA; (-) strand; PAM type: YTN; PAM sequence: CTA
tgtaggtaggtaaaccccaa

SEQ ID NO: 61252 - DNA, 20 bp, Artificial Sequence
  Description of Artificial Sequence: Synthetic oligonucleotide
  Target: SCNA; (-) strand; PAM type: YTN; PAM sequence: CTC
tatgtaggtaggtaaacccc

SEQ ID NO: 61253 - DNA, 20 bp, Artificial Sequence
  Description of Artificial Sequence: Synthetic oligonucleotide
  Target: SCNA; (-) strand; PAM type: YTN; PAM sequence: TTC
tctatgtaggtaggtaaacc

SEQ ID NO: 61254 - DNA, 20 bp, Artificial Sequence
  Description of Artificial Sequence: Synthetic oligonucleotide
  Target: SCNA; (-) strand; PAM type: YTN; PAM sequence: CTG
agaaaaccaaacagggtgtg

SEQ ID NO: 61255 - DNA, 20 bp, Artificial Sequence
  Description of Artificial Sequence: Synthetic oligonucleotide
  Target: SCNA; (-) strand; PAM type: YTN; PAM sequence: CTG
ctgagaaaaccaaacagggt

SEQ ID NO: 61256 - DNA, 20 bp, Artificial Sequence
  Description of Artificial Sequence: Synthetic oligonucleotide
  Target: SCNA; (-) strand; PAM type: YTN; PAM sequence: CTG
ctgctgagaaaaccaaacag

SEQ ID NO: 61257 - DNA, 20 bp, Artificial Sequence
  Description of Artificial Sequence: Synthetic oligonucleotide
  Target: SCNA; (-) strand; PAM type: YTN; PAM sequence: TTG
tggctgctgctgagaaaacc

SEQ ID NO: 61258 - DNA, 20 bp, Artificial Sequence
  Description of Artificial Sequence: Synthetic oligonucleotide
  Target: SCNA; (-) strand; PAM type: YTN; PAM sequence: TTC
aaaggccaaggagggagttg

SEQ ID NO: 61259 - DNA, 20 bp, Artificial Sequence
  Description of Artificial Sequence: Synthetic oligonucleotide
  Target: SCNA; (-) strand; PAM type: YTN; PAM sequence: TTT
caaaggccaaggagggagtt

SEQ ID NO: 61260 - DNA, 20 bp, Artificial Sequence
  Description of Artificial Sequence: Synthetic oligonucleotide
  Target: SCNA; (-) strand; PAM type: YTN; PAM sequence: CTT
tcaaaggccaaggagggagt

SEQ ID NO: 61261 - DNA, 20 bp, Artificial Sequence
  Description of Artificial Sequence: Synthetic oligonucleotide
  Target: SCNA; (-) strand; PAM type: YTN; PAM sequence: TTC
atgaaaggactttcaaaggc

SEQ ID NO: 61262 - DNA, 20 bp, Artificial Sequence
  Description of Artificial Sequence: Synthetic oligonucleotide
  Target: SCNA; (-) strand; PAM type: YTN; PAM sequence: TTA
gccatggatgtattcatgaa

SEQ ID NO: 61263 - DNA, 20 bp, Artificial Sequence
  Description of Artificial Sequence: Synthetic oligonucleotide
  Target: SCNA; (-) strand; PAM type: YTN; PAM sequence: TTC
attagccatggatgtattca

SEQ ID NO: 61264 - DNA, 20 bp, Artificial Sequence
  Description of Artificial Sequence: Synthetic oligonucleotide
  Target: SCNA; (-) strand; PAM type: YTN; PAM sequence: TTC
cagtgtggtgtaaaggaatt

SEQ ID NO: 61265 - DNA, 20 bp, Artificial Sequence
  Description of Artificial Sequence: Synthetic oligonucleotide
  Target: SCNA; (-) strand; PAM type: YTN; PAM sequence: TTT
ccagtgtggtgtaaaggaat

SEQ ID NO: 61266 - DNA, 20 bp, Artificial Sequence
  Description of Artificial Sequence: Synthetic oligonucleotide
  Target: SCNA; (-) strand; PAM type: YTN; PAM sequence: TTT
tccagtgtggtgtaaaggaa

SEQ ID NO: 61267 - DNA, 20 bp, Artificial Sequence
  Description of Artificial Sequence: Synthetic oligonucleotide
  Target: SCNA; (-) strand; PAM type: YTN; PAM sequence: TTA
tgttttccagtgtggtgtaa

SEQ ID NO: 61268 - DNA, 20 bp, Artificial Sequence
  Description of Artificial Sequence: Synthetic oligonucleotide
  Target: SCNA; (-) strand; PAM type: YTN; PAM sequence: TTT
atgttttccagtgtggtgta

SEQ ID NO: 61269 - DNA, 20 bp, Artificial Sequence
  Description of Artificial Sequence: Synthetic oligonucleotide
  Target: SCNA; (-) strand; PAM type: YTN; PAM sequence: TTT
tatgttttccagtgtggtgt

SEQ ID NO: 61270 - DNA, 20 bp, Artificial Sequence
  Description of Artificial Sequence: Synthetic oligonucleotide
  Target: SCNA; (-) strand; PAM type: YTN; PAM sequence: TTC
aaagtgtattttatgttttc

SEQ ID NO: 61271 - DNA, 20 bp, Artificial Sequence
  Description of Artificial Sequence: Synthetic oligonucleotide
  Target: SCNA; (-) strand; PAM type: YTN; PAM sequence: CTC
attcaaagtgtattttatgt

SEQ ID NO: 61272 - DNA, 20 bp, Artificial Sequence
  Description of Artificial Sequence: Synthetic oligonucleotide
  Target: SCNA; (-) strand; PAM type: YTN; PAM sequence: TTC
tcattcaaagtgtattttat

SEQ ID NO: 61273 - DNA, 20 bp, Artificial Sequence
  Description of Artificial Sequence: Synthetic oligonucleotide
  Target: SCNA; (-) strand; PAM type: YTN; PAM sequence: TTC
cccgaaagttctcattcaaa

SEQ ID NO: 61274 - DNA, 20 bp, Artificial Sequence
  Description of Artificial Sequence: Synthetic oligonucleotide
  Target: SCNA; (-) strand; PAM type: YTN; PAM sequence: TTT
ccccgaaagttctcattcaa

SEQ ID NO: 61275 - DNA, 20 bp, Artificial Sequence
  Description of Artificial Sequence: Synthetic oligonucleotide
  Target: SCNA; (-) strand; PAM type: YTN; PAM sequence: TTT
tccccgaaagttctcattca

SEQ ID NO: 61276 - DNA, 20 bp, Artificial Sequence
  Description of Artificial Sequence: Synthetic oligonucleotide
  Target: SCNA; (-) strand; PAM type: YTN; PAM sequence: TTT
ttccccgaaagttctcattc

SEQ ID NO: 61277 - DNA, 20 bp, Artificial Sequence
  Description of Artificial Sequence: Synthetic oligonucleotide
  Target: SCNA; (-) strand; PAM type: YTN; PAM sequence: TTA
tttttccccgaaagttctca

SEQ ID NO: 61278 - DNA, 20 bp, Artificial Sequence
  Description of Artificial Sequence: Synthetic oligonucleotide
  Target: SCNA; (-) strand; PAM type: YTN; PAM sequence: TTT
atttttccccgaaagttctc

SEQ ID NO: 61279 - DNA, 20 bp, Artificial Sequence
  Description of Artificial Sequence: Synthetic oligonucleotide
  Target: SCNA; (-) strand; PAM type: YTN; PAM sequence: TTG
tttatttttccccgaaagtt

SEQ ID NO: 61280 - DNA, 20 bp, Artificial Sequence
  Description of Artificial Sequence: Synthetic oligonucleotide
  Target: SCNA; (-) strand; PAM type: YTN; PAM sequence: TTT
gtttatttttccccgaaagt

SEQ ID NO: 61281 - DNA, 20 bp, Artificial Sequence
  Description of Artificial Sequence: Synthetic oligonucleotide
  Target: SCNA; (-) strand; PAM type: YTN; PAM sequence: TTT
tgtttatttttccccgaaag

SEQ ID NO: 61282 - DNA, 20 bp, Artificial Sequence
  Description of Artificial Sequence: Synthetic oligonucleotide
  Target: SCNA; (-) strand; PAM type: YTN; PAM sequence: TTT
ttgtttatttttccccgaaa

SEQ ID NO: 61283 - DNA, 20 bp, Artificial Sequence
  Description of Artificial Sequence: Synthetic oligonucleotide
  Target: SCNA; (-) strand; PAM type: YTN; PAM sequence: TTT
tttgtttatttttccccgaa

SEQ ID NO: 61284 - DNA, 20 bp, Artificial Sequence
  Description of Artificial Sequence: Synthetic oligonucleotide
  Target: SCNA; (-) strand; PAM type: YTN; PAM sequence: TTC
agtgttttttgtttattttt

SEQ ID NO: 61285 - DNA, 20 bp, Artificial Sequence
  Description of Artificial Sequence: Synthetic oligonucleotide
  Target: SCNA; (-) strand; PAM type: YTN; PAM sequence: TTT
cagtgttttttgtttatttt

SEQ ID NO: 61286 - DNA, 20 bp, Artificial Sequence
  Description of Artificial Sequence: Synthetic oligonucleotide
  Target: SCNA; (-) strand; PAM type: YTN; PAM sequence: TTT
tcagtgttttttgtttattt

SEQ ID NO: 61287 - DNA, 20 bp, Artificial Sequence
  Description of Artificial Sequence: Synthetic oligonucleotide
  Target: SCNA; (-) strand; PAM type: YTN; PAM sequence: TTT
ttcagtgttttttgtttatt

SEQ ID NO: 61288 - DNA, 20 bp, Artificial Sequence
  Description of Artificial Sequence: Synthetic oligonucleotide
  Target: SCNA; (-) strand; PAM type: YTN; PAM sequence: CTC
atgatttttcagtgtttttt

SEQ ID NO: 61289 - DNA, 20 bp, Artificial Sequence
  Description of Artificial Sequence: Synthetic oligonucleotide
  Target: SCNA; (-) strand; PAM type: YTN; PAM sequence: TTC
tcatgatttttcagtgtttt

SEQ ID NO: 61290 - DNA, 20 bp, Artificial Sequence
  Description of Artificial Sequence: Synthetic oligonucleotide
  Target: SCNA; (-) strand; PAM type: YTN; PAM sequence: TTT
ctcatgatttttcagtgttt

SEQ ID NO: 61291 - DNA, 20 bp, Artificial Sequence
  Description of Artificial Sequence: Synthetic oligonucleotide
  Target: SCNA; (-) strand; PAM type: YTN; PAM sequence: TTG
gagggtttctcatgattttt

SEQ ID NO: 61292 - DNA, 20 bp, Artificial Sequence
  Description of Artificial Sequence: Synthetic oligonucleotide
  Target: SCNA; (-) strand; PAM type: YTN; PAM sequence: TTT
ggagggtttctcatgatttt

SEQ ID NO: 61293 - DNA, 20 bp, Artificial Sequence
  Description of Artificial Sequence: Synthetic oligonucleotide
  Target: SCNA; (-) strand; PAM type: YTN; PAM sequence: CTT
tggagggtttctcatgattt

SEQ ID NO: 61294 - DNA, 20 bp, Artificial Sequence
  Description of Artificial Sequence: Synthetic oligonucleotide
  Target: SCNA; (-) strand; PAM type: YTN; PAM sequence: CTC
acactttggagggtttctca

SEQ ID NO: 61295 - DNA, 20 bp, Artificial Sequence
  Description of Artificial Sequence: Synthetic oligonucleotide
  Target: SCNA; (-) strand; PAM type: YTN; PAM sequence: TTA
aaagagtctcacactttgga

SEQ ID NO: 61296 - DNA, 20 bp, Artificial Sequence
  Description of Artificial Sequence: Synthetic oligonucleotide
  Target: SCNA; (-) strand; PAM type: YTN; PAM sequence: CTT
aaaagagtctcacactttgg

SEQ ID NO: 61297 - DNA, 20 bp, Artificial Sequence
  Description of Artificial Sequence: Synthetic oligonucleotide
  Target: SCNA; (-) strand; PAM type: YTN; PAM sequence: TTA
aatgagtgtacacttaaaag

SEQ ID NO: 61298 - DNA, 20 bp, Artificial Sequence
  Description of Artificial Sequence: Synthetic oligonucleotide
  Target: SCNA; (-) strand; PAM type: YTN; PAM sequence: TTG
tccaatggttaaatgagtgt

SEQ ID NO: 61299 - DNA, 20 bp, Artificial Sequence
  Description of Artificial Sequence: Synthetic oligonucleotide
  Target: SCNA; (-) strand; PAM type: YTN; PAM sequence: TTT
gtccaatggttaaatgagtg

SEQ ID NO: 61300 - DNA, 20 bp, Artificial Sequence
  Description of Artificial Sequence: Synthetic oligonucleotide
  Target: SCNA; (-) strand; PAM type: YTN; PAM sequence: CTT
tgtccaatggttaaatgagt

SEQ ID NO: 61301 - DNA, 20 bp, Artificial Sequence
  Description of Artificial Sequence: Synthetic oligonucleotide
  Target: SCNA; (-) strand; PAM type: YTN; PAM sequence: CTG
ctttgtccaatggttaaatg

SEQ ID NO: 61302 - DNA, 20 bp, Artificial Sequence
  Description of Artificial Sequence: Synthetic oligonucleotide
  Target: SCNA; (-) strand; PAM type: YTN; PAM sequence: CTA
aaaatgtctgctttgtccaa

SEQ ID NO: 61303 - DNA, 20 bp, Artificial Sequence
  Description of Artificial Sequence: Synthetic oligonucleotide
  Target: SCNA; (-) strand; PAM type: YTN; PAM sequence: TTA
atgccagagctaaaaatgtc

SEQ ID NO: 61304 - DNA, 20 bp, Artificial Sequence
  Description of Artificial Sequence: Synthetic oligonucleotide
  Target: SCNA; (-) strand; PAM type: YTN; PAM sequence: TTT
aatgccagagctaaaaatgt

SEQ ID NO: 61305 - DNA, 20 bp, Artificial Sequence
  Description of Artificial Sequence: Synthetic oligonucleotide
  Target: SCNA; (-) strand; PAM type: YTN; PAM sequence: TTT
taatgccagagctaaaaatg

SEQ ID NO: 61306 - DNA, 20 bp, Artificial Sequence
  Description of Artificial Sequence: Synthetic oligonucleotide
  Target: SCNA; (-) strand; PAM type: YTN; PAM sequence: TTT
ttaatgccagagctaaaaat

SEQ ID NO: 61307 - DNA, 20 bp, Artificial Sequence
  Description of Artificial Sequence: Synthetic oligonucleotide
  Target: SCNA; (-) strand; PAM type: YTN; PAM sequence: CTA
aatttttaatgccagagcta

SEQ ID NO: 61308 - DNA, 20 bp, Artificial Sequence
  Description of Artificial Sequence: Synthetic oligonucleotide
  Target: SCNA; (-) strand; PAM type: YTN; PAM sequence: CTA
gccaagatggatgggagatg

SEQ ID NO: 61309 - DNA, 20 bp, Artificial Sequence
  Description of Artificial Sequence: Synthetic oligonucleotide
  Target: SCNA; (-) strand; PAM type: YTN; PAM sequence: TTA
ctagccaagatggatgggag

SEQ ID NO: 61310 - DNA, 20 bp, Artificial Sequence
  Description of Artificial Sequence: Synthetic oligonucleotide
  Target: SCNA; (-) strand; PAM type: YTN; PAM sequence: TTT
actagccaagatggatggga

SEQ ID NO: 61311 - DNA, 20 bp, Artificial Sequence
  Description of Artificial Sequence: Synthetic oligonucleotide
  Target: SCNA; (-) strand; PAM type: YTN; PAM sequence: TTT
tactagccaagatggatggg

SEQ ID NO: 61312 - DNA, 20 bp, Artificial Sequence
  Description of Artificial Sequence: Synthetic oligonucleotide
  Target: SCNA; (-) strand; PAM type: YTN; PAM sequence: CTT
ttactagccaagatggatgg

SEQ ID NO: 61313 - DNA, 20 bp, Artificial Sequence
  Description of Artificial Sequence: Synthetic oligonucleotide
  Target: SCNA; (-) strand; PAM type: YTN; PAM sequence: CTA
gacttttactagccaagatg

SEQ ID NO: 61314 - DNA, 20 bp, Artificial Sequence
  Description of Artificial Sequence: Synthetic oligonucleotide
  Target: SCNA; (-) strand; PAM type: YTN; PAM sequence: TTA
ggtggctagacttttactag

SEQ ID NO: 61315 - DNA, 20 bp, Artificial Sequence
  Description of Artificial Sequence: Synthetic oligonucleotide
  Target: SCNA; (-) strand; PAM type: YTN; PAM sequence: CTA
atccgtggttaggtggctag

SEQ ID NO: 61316 - DNA, 20 bp, Artificial Sequence
  Description of Artificial Sequence: Synthetic oligonucleotide
  Target: SCNA; (-) strand; PAM type: YTN; PAM sequence: TTC
atcctaatccgtggttaggt

SEQ ID NO: 61317 - DNA, 20 bp, Artificial Sequence
  Description of Artificial Sequence: Synthetic oligonucleotide
  Target: SCNA; (-) strand; PAM type: YTN; PAM sequence: CTC
agaggattcatcctaatccg

SEQ ID NO: 61318 - DNA, 20 bp, Artificial Sequence
  Description of Artificial Sequence: Synthetic oligonucleotide
  Target: SCNA; (-) strand; PAM type: YTN; PAM sequence: CTG
aaatgcagtaataacaactc

SEQ ID NO: 61319 - DNA, 20 bp, Artificial Sequence
  Description of Artificial Sequence: Synthetic oligonucleotide
  Target: SCNA; (-) strand; PAM type: YTN; PAM sequence: TTC
tgaaatgcagtaataacaac

SEQ ID NO: 61320 - DNA, 20 bp, Artificial Sequence
  Description of Artificial Sequence: Synthetic oligonucleotide
  Target: SCNA; (-) strand; PAM type: YTN; PAM sequence: CTT
ctgaaatgcagtaataacaa

SEQ ID NO: 61321 - DNA, 20 bp, Artificial Sequence
  Description of Artificial Sequence: Synthetic oligonucleotide
  Target: SCNA; (-) strand; PAM type: YTN; PAM sequence: CTC
cacttctgaaatgcagtaat

SEQ ID NO: 61322 - DNA, 20 bp, Artificial Sequence
  Description of Artificial Sequence: Synthetic oligonucleotide
  Target: SCNA; (-) strand; PAM type: YTN; PAM sequence: TTC
atgcaactccacttctgaaa

SEQ ID NO: 61323 - DNA, 20 bp, Artificial Sequence
  Description of Artificial Sequence: Synthetic oligonucleotide
  Target: SCNA; (-) strand; PAM type: YTN; PAM sequence: TTT
catgcaactccacttctgaa

SEQ ID NO: 61324 - DNA, 20 bp, Artificial Sequence
  Description of Artificial Sequence: Synthetic oligonucleotide
  Target: SCNA; (-) strand; PAM type: YTN; PAM sequence: TTT
tcatgcaactccacttctga

SEQ ID NO: 61325 - DNA, 20 bp, Artificial Sequence
  Description of Artificial Sequence: Synthetic oligonucleotide
  Target: SCNA; (-) strand; PAM type: YTN; PAM sequence: CTT
ttcatgcaactccacttctg

SEQ ID NO: 61326 - DNA, 20 bp, Artificial Sequence
  Description of Artificial Sequence: Synthetic oligonucleotide
  Target: SCNA; (-) strand; PAM type: YTN; PAM sequence: TTA
atcttttcatgcaactccac

SEQ ID NO: 61327 - DNA, 20 bp, Artificial Sequence
  Description of Artificial Sequence: Synthetic oligonucleotide
  Target: SCNA; (-) strand; PAM type: YTN; PAM sequence: TTA
aaaaaggggttaatcttttc

SEQ ID NO: 61328 - DNA, 20 bp, Artificial Sequence
  Description of Artificial Sequence: Synthetic oligonucleotide
  Target: SCNA; (-) strand; PAM type: YTN; PAM sequence: TTT
aaaaaaggggttaatctttt

SEQ ID NO: 61329 - DNA, 20 bp, Artificial Sequence
  Description of Artificial Sequence: Synthetic oligonucleotide
  Target: SCNA; (-) strand; PAM type: YTN; PAM sequence: TTA
gaccccgggaatttaaaaaa

SEQ ID NO: 61330 - DNA, 20 bp, Artificial Sequence
  Description of Artificial Sequence: Synthetic oligonucleotide
  Target: SCNA; (-) strand; PAM type: YTN; PAM sequence: TTT
agaccccgggaatttaaaaa

SEQ ID NO: 61331 - DNA, 20 bp, Artificial Sequence
  Description of Artificial Sequence: Synthetic oligonucleotide
  Target: SCNA; (-) strand; PAM type: YTN; PAM sequence: CTT
tagaccccgggaatttaaaa

SEQ ID NO: 61332 - DNA, 20 bp, Artificial Sequence
  Description of Artificial Sequence: Synthetic oligonucleotide
  Target: SCNA; (-) strand; PAM type: YTN; PAM sequence: TTA
ccctttagaccccgggaatt

SEQ ID NO: 61333 - DNA, 20 bp, Artificial Sequence
  Description of Artificial Sequence: Synthetic oligonucleotide
  Target: SCNA; (-) strand; PAM type: YTN; PAM sequence: CTG
ttaccctttagaccccggga

SEQ ID NO: 61334 - DNA, 20 bp, Artificial Sequence
  Description of Artificial Sequence: Synthetic oligonucleotide
  Target: SCNA; (-) strand; PAM type: YTN; PAM sequence: CTC
atactgttaccctttagacc

SEQ ID NO: 61335 - DNA, 20 bp, Artificial Sequence
  Description of Artificial Sequence: Synthetic oligonucleotide
  Target: SCNA; (-) strand; PAM type: YTN; PAM sequence: CTA
actcatactgttacccttta

SEQ ID NO: 61336 - DNA, 20 bp, Artificial Sequence
  Description of Artificial Sequence: Synthetic oligonucleotide
  Target: SCNA; (-) strand; PAM type: YTN; PAM sequence: TTC
taactcatactgttaccctt

SEQ ID NO: 61337 - DNA, 20 bp, Artificial Sequence
  Description of Artificial Sequence: Synthetic oligonucleotide
  Target: SCNA; (-) strand; PAM type: YTN; PAM sequence: CTT
ctaactcatactgttaccct

SEQ ID NO: 61338 - DNA, 20 bp, Artificial Sequence
  Description of Artificial Sequence: Synthetic oligonucleotide
  Target: SCNA; (-) strand; PAM type: YTN; PAM sequence: TTC
catgcttctaactcatactg

SEQ ID NO: 61339 - DNA, 20 bp, Artificial Sequence
  Description of Artificial Sequence: Synthetic oligonucleotide
  Target: SCNA; (-) strand; PAM type: YTN; PAM sequence: CTT
ccatgcttctaactcatact

SEQ ID NO: 61340 - DNA, 20 bp, Artificial Sequence
  Description of Artificial Sequence: Synthetic oligonucleotide
  Target: SCNA; (-) strand; PAM type: YTN; PAM sequence: CTC
cagcttccatgcttctaact

SEQ ID NO: 61341 - DNA, 20 bp, Artificial Sequence
  Description of Artificial Sequence: Synthetic oligonucleotide
  Target: SCNA; (-) strand; PAM type: YTN; PAM sequence: CTA
agcctccagcttccatgctt

SEQ ID NO: 61342 - DNA, 20 bp, Artificial Sequence
  Description of Artificial Sequence: Synthetic oligonucleotide
  Target: SCNA; (-) strand; PAM type: YTN; PAM sequence: CTG
accctaagcctccagcttcc

SEQ ID NO: 61343 - DNA, 20 bp, Artificial Sequence
  Description of Artificial Sequence: Synthetic oligonucleotide
  Target: SCNA; (-) strand; PAM type: YTN; PAM sequence: TTA
aggatacccctgaccctaag

SEQ ID NO: 61344 - DNA, 20 bp, Artificial Sequence
  Description of Artificial Sequence: Synthetic oligonucleotide
  Target: SCNA; (-) strand; PAM type: YTN; PAM sequence: TTC
atgttaaggatacccctgac

SEQ ID NO: 61345 - DNA, 20 bp, Artificial Sequence
  Description of Artificial Sequence: Synthetic oligonucleotide
  Target: SCNA; (-) strand; PAM type: YTN; PAM sequence: CTG
ggattcatgttaaggatacc

SEQ ID NO: 61346 - DNA, 20 bp, Artificial Sequence
  Description of Artificial Sequence: Synthetic oligonucleotide
  Target: SCNA; (-) strand; PAM type: YTN; PAM sequence: TTC
tgggattcatgttaaggata

SEQ ID NO: 61347 - DNA, 20 bp, Artificial Sequence
  Description of Artificial Sequence: Synthetic oligonucleotide
  Target: SCNA; (-) strand; PAM type: YTN; PAM sequence: CTT
ctgggattcatgttaaggat

SEQ ID NO: 61348 - DNA, 20 bp, Artificial Sequence
  Description of Artificial Sequence: Synthetic oligonucleotide
  Target: SCNA; (-) strand; PAM type: YTN; PAM sequence: TTC
ttctgggattcatgttaagg

SEQ ID NO: 61349 - DNA, 20 bp, Artificial Sequence
  Description of Artificial Sequence: Synthetic oligonucleotide
  Target: SCNA; (-) strand; PAM type: YTN; PAM sequence: CTT
cttctgggattcatgttaag

SEQ ID NO: 61350 - DNA, 20 bp, Artificial Sequence
  Description of Artificial Sequence: Synthetic oligonucleotide
  Target: SCNA; (-) strand; PAM type: YTN; PAM sequence: TTA
gccttcttctgggattcatg

SEQ ID NO: 61351 - DNA, 20 bp, Artificial Sequence
  Description of Artificial Sequence: Synthetic oligonucleotide
  Target: SCNA; (-) strand; PAM type: YTN; PAM sequence: CTG
ttagccttcttctgggattc

SEQ ID NO: 61352 - DNA, 20 bp, Artificial Sequence
  Description of Artificial Sequence: Synthetic oligonucleotide
  Target: SCNA; (-) strand; PAM type: YTN; PAM sequence: TTC
caccatcaacctgttagcct

SEQ ID NO: 61353 - DNA, 20 bp, Artificial Sequence
  Description of Artificial Sequence: Synthetic oligonucleotide
  Target: SCNA; (-) strand; PAM type: YTN; PAM sequence: TTT
ccaccatcaacctgttagcc

SEQ ID NO: 61354 - DNA, 20 bp, Artificial Sequence
  Description of Artificial Sequence: Synthetic oligonucleotide
  Target: SCNA; (-) strand; PAM type: YTN; PAM sequence: CTT
tccaccatcaacctgttagc

SEQ ID NO: 61355 - DNA, 20 bp, Artificial Sequence
  Description of Artificial Sequence: Synthetic oligonucleotide
  Target: SCNA; (-) strand; PAM type: YTN; PAM sequence: CTA
cgcctttccaccatcaacct

SEQ ID NO: 61356 - DNA, 20 bp, Artificial Sequence
  Description of Artificial Sequence: Synthetic oligonucleotide
  Target: SCNA; (-) strand; PAM type: YTN; PAM sequence: TTG
cctacgcctttccaccatca

SEQ ID NO: 61357 - DNA, 20 bp, Artificial Sequence
  Description of Artificial Sequence: Synthetic oligonucleotide
  Target: SCNA; (-) strand; PAM type: YTN; PAM sequence: CTG
ttgcctacgcctttccacca

SEQ ID NO: 61358 - DNA, 20 bp, Artificial Sequence
  Description of Artificial Sequence: Synthetic oligonucleotide
  Target: SCNA; (-) strand; PAM type: YTN; PAM sequence: TTC
tgttgcctacgcctttccac

SEQ ID NO: 61359 - DNA, 20 bp, Artificial Sequence
  Description of Artificial Sequence: Synthetic oligonucleotide
  Target: SCNA; (-) strand; PAM type: YTN; PAM sequence: TTA
gttctgttgcctacgccttt

SEQ ID NO: 61360 - DNA, 20 bp, Artificial Sequence
  Description of Artificial Sequence: Synthetic oligonucleotide
  Target: SCNA; (-) strand; PAM type: YTN; PAM sequence: TTG
aaccacaccccgagtgagca

SEQ ID NO: 61361 - DNA, 20 bp, Artificial Sequence
  Description of Artificial Sequence: Synthetic oligonucleotide
  Target: SCNA; (-) strand; PAM type: YTN; PAM sequence: TTT
gaaccacaccccgagtgagc

SEQ ID NO: 61362 - DNA, 20 bp, Artificial Sequence
  Description of Artificial Sequence: Synthetic oligonucleotide
  Target: SCNA; (-) strand; PAM type: YTN; PAM sequence: CTG
agtttgaaccacaccccgag

SEQ ID NO: 61363 - DNA, 20 bp, Artificial Sequence
  Description of Artificial Sequence: Synthetic oligonucleotide
  Target: SCNA; (-) strand; PAM type: YTN; PAM sequence: TTG
cctgagtttgaaccacaccc

SEQ ID NO: 61364 - DNA, 20 bp, Artificial Sequence
  Description of Artificial Sequence: Synthetic oligonucleotide
  Target: SCNA; (-) strand; PAM type: YTN; PAM sequence: TTT
gcctgagtttgaaccacacc

SEQ ID NO: 61365 - DNA, 20 bp, Artificial Sequence
  Description of Artificial Sequence: Synthetic oligonucleotide
  Target: SCNA; (-) strand; PAM type: YTN; PAM sequence: CTG
tttgcctgagtttgaaccac

SEQ ID NO: 61366 - DNA, 20 bp, Artificial Sequence
  Description of Artificial Sequence: Synthetic oligonucleotide
  Target: SCNA; (-) strand; PAM type: YTN; PAM sequence: CTG
ctgtttgcctgagtttgaac

SEQ ID NO: 61367 - DNA, 20 bp, Artificial Sequence
  Description of Artificial Sequence: Synthetic oligonucleotide
  Target: SCNA; (-) strand; PAM type: YTN; PAM sequence: TTG
ggcctgctgtttgcctgagt

SEQ ID NO: 61368 - DNA, 20 bp, Artificial Sequence
  Description of Artificial Sequence: Synthetic oligonucleotide
  Target: SCNA; (-) strand; PAM type: YTN; PAM sequence: CTT
gggcctgctgtttgcctgag

SEQ ID NO: 61369 - DNA, 20 bp, Artificial Sequence
  Description of Artificial Sequence: Synthetic oligonucleotide
  Target: SCNA; (-) strand; PAM type: YTN; PAM sequence: TTA
gaaccatcacacttgggcct

SEQ ID NO: 61370 - DNA, 20 bp, Artificial Sequence
  Description of Artificial Sequence: Synthetic oligonucleotide
  Target: SCNA; (-) strand; PAM type: YTN; PAM sequence: TTG
gatggattagaaccatcaca

SEQ ID NO: 61371 - DNA, 20 bp, Artificial Sequence
  Description of Artificial Sequence: Synthetic oligonucleotide
  Target: SCNA; (-) strand; PAM type: YTN; PAM sequence: CTG
agggcgggggtggatgttgg

SEQ ID NO: 61372 - DNA, 20 bp, Artificial Sequence
  Description of Artificial Sequence: Synthetic oligonucleotide
  Target: SCNA; (-) strand; PAM type: YTN; PAM sequence: CTC
agggtagatagctgagggcg

SEQ ID NO: 61373 - DNA, 20 bp, Artificial Sequence
  Description of Artificial Sequence: Synthetic oligonucleotide
  Target: SCNA; (-) strand; PAM type: YTN; PAM sequence: CTG
ctcagggtagatagctgagg

SEQ ID NO: 61374 - DNA, 20 bp, Artificial Sequence
  Description of Artificial Sequence: Synthetic oligonucleotide
  Target: SCNA; (-) strand; PAM type: YTN; PAM sequence: TTG
gagacggcccgcgagtgtga

SEQ ID NO: 61375 - DNA, 20 bp, Artificial Sequence
  Description of Artificial Sequence: Synthetic oligonucleotide
  Target: SCNA; (-) strand; PAM type: YTN; PAM sequence: CTG
gcgcggggttggagacggcc

SEQ ID NO: 61376 - DNA, 20 bp, Artificial Sequence
  Description of Artificial Sequence: Synthetic oligonucleotide
  Target: SCNA; (-) strand; PAM type: YTN; PAM sequence: CTC
gggtggctggcgcggggttg

SEQ ID NO: 61377 - DNA, 20 bp, Artificial Sequence
  Description of Artificial Sequence: Synthetic oligonucleotide
  Target: SCNA; (-) strand; PAM type: YTN; PAM sequence: CTG
agaacgccccctcgggtggc

SEQ ID NO: 61378 - DNA, 20 bp, Artificial Sequence
  Description of Artificial Sequence: Synthetic oligonucleotide
  Target: SCNA; (-) strand; PAM type: YTN; PAM sequence: CTA
gggtggaggctgagaacgcc

SEQ ID NO: 61379 - DNA, 20 bp, Artificial Sequence
  Description of Artificial Sequence: Synthetic oligonucleotide
  Target: SCNA; (-) strand; PAM type: YTN; PAM sequence: CTG
gcgcggggtccgctagggtg

SEQ ID NO: 61380 - DNA, 20 bp, Artificial Sequence
  Description of Artificial Sequence: Synthetic oligonucleotide
  Target: SCNA; (-) strand; PAM type: YTN; PAM sequence: TTA
acaagtgctggcgcggggtc

SEQ ID NO: 61381 - DNA, 20 bp, Artificial Sequence
  Description of Artificial Sequence: Synthetic oligonucleotide
  Target: SCNA; (-) strand; PAM type: YTN; PAM sequence: TTG
gcaaataatgaaatggaagt

SEQ ID NO: 61382 - DNA, 20 bp, Artificial Sequence
  Description of Artificial Sequence: Synthetic oligonucleotide
  Target: SCNA; (-) strand; PAM type: YTN; PAM sequence: TTT
ggcaaataatgaaatggaag

SEQ ID NO: 61383 - DNA, 20 bp, Artificial Sequence
  Description of Artificial Sequence: Synthetic oligonucleotide
  Target: SCNA; (-) strand; PAM type: YTN; PAM sequence: CTG
cgtttggcaaataatgaaat

SEQ ID NO: 61384 - DNA, 20 bp, Artificial Sequence
  Description of Artificial Sequence: Synthetic oligonucleotide
  Target: SCNA; (-) strand; PAM type: YTN; PAM sequence: CTG
taaagtaagcaagctgcgtt

SEQ ID NO: 61385 - DNA, 20 bp, Artificial Sequence
  Description of Artificial Sequence: Synthetic oligonucleotide
  Target: SCNA; (-) strand; PAM type: YTN; PAM sequence: CTC
tgtaaagtaagcaagctgcg

SEQ ID NO: 61386 - DNA, 20 bp, Artificial Sequence
  Description of Artificial Sequence: Synthetic oligonucleotide
  Target: SCNA; (-) strand; PAM type: YTN; PAM sequence: TTC
tctgtaaagtaagcaagctg

SEQ ID NO: 61387 - DNA, 20 bp, Artificial Sequence
  Description of Artificial Sequence: Synthetic oligonucleotide
  Target: SCNA; (-) strand; PAM type: YTN; PAM sequence: TTT
ctctgtaaagtaagcaagct

SEQ ID NO: 61388 - DNA, 20 bp, Artificial Sequence
  Description of Artificial Sequence: Synthetic oligonucleotide
  Target: SCNA; (-) strand; PAM type: YTN; PAM sequence: TTT
tctctgtaaagtaagcaagc

SEQ ID NO: 61389 - DNA, 20 bp, Artificial Sequence
  Description of Artificial Sequence: Synthetic oligonucleotide
  Target: SCNA; (-) strand; PAM type: YTN; PAM sequence: TTT
ttctctgtaaagtaagcaag

SEQ ID NO: 61390 - DNA, 20 bp, Artificial Sequence
  Description of Artificial Sequence: Synthetic oligonucleotide
  Target: SCNA; (-) strand; PAM type: YTN; PAM sequence: TTG
gtttttctctgtaaagtaag

SEQ ID NO: 61391 - DNA, 20 bp, Artificial Sequence
  Description of Artificial Sequence: Synthetic oligonucleotide
  Target: SCNA; (-) strand; PAM type: YTN; PAM sequence: CTT
ggtttttctctgtaaagtaa

SEQ ID NO: 61392 - DNA, 20 bp, Artificial Sequence
  Description of Artificial Sequence: Synthetic oligonucleotide
  Target: SCNA; (-) strand; PAM type: YTN; PAM sequence: CTC
ttggtttttctctgtaaagt

SEQ ID NO: 61393 - DNA, 20 bp, Artificial Sequence
  Description of Artificial Sequence: Synthetic oligonucleotide
  Target: SCNA; (-) strand; PAM type: YTN; PAM sequence: CTC
tcttggtttttctctgtaaa

SEQ ID NO: 61394 - DNA, 20 bp, Artificial Sequence
  Description of Artificial Sequence: Synthetic oligonucleotide
  Target: SCNA; (-) strand; PAM type: YTN; PAM sequence: CTG
cccgctctcttggtttttct

SEQ ID NO: 61395 - DNA, 20 bp, Artificial Sequence
  Description of Artificial Sequence: Synthetic oligonucleotide
  Target: SCNA; (-) strand; PAM type: YTN; PAM sequence: CTG
tctgcccgctctcttggttt

SEQ ID NO: 61396 - DNA, 20 bp, Artificial Sequence
  Description of Artificial Sequence: Synthetic oligonucleotide
  Target: SCNA; (-) strand; PAM type: YTN; PAM sequence: CTC
acataaaatctgtctgcccg

SEQ ID NO: 61397 - DNA, 20 bp, Artificial Sequence
  Description of Artificial Sequence: Synthetic oligonucleotide
  Target: SCNA; (-) strand; PAM type: YTN; PAM sequence: CTC
tcacataaaatctgtctgcc

SEQ ID NO: 61398 - DNA, 20 bp, Artificial Sequence
  Description of Artificial Sequence: Synthetic oligonucleotide
  Target: SCNA; (-) strand; PAM type: YTN; PAM sequence: TTC
tctcacataaaatctgtctg

SEQ ID NO: 61399 - DNA, 20 bp, Artificial Sequence
  Description of Artificial Sequence: Synthetic oligonucleotide
  Target: SCNA; (-) strand; PAM type: YTN; PAM sequence: TTT
ctctcacataaaatctgtct

SEQ ID NO: 61400 - DNA, 20 bp, Artificial Sequence
  Description of Artificial Sequence: Synthetic oligonucleotide
  Target: SCNA; (-) strand; PAM type: YTN; PAM sequence: TTT
tctctcacataaaatctgtc

SEQ ID NO: 61401 - DNA, 20 bp, Artificial Sequence
  Description of Artificial Sequence: Synthetic oligonucleotide
  Target: SCNA; (-) strand; PAM type: YTN; PAM sequence: CTT
ttctctcacataaaatctgt

SEQ ID NO: 61402 - DNA, 20 bp, Artificial Sequence
  Description of Artificial Sequence: Synthetic oligonucleotide
  Target: SCNA; (-) strand; PAM type: YTN; PAM sequence: CTC
catggagcgtgagcatccaa

SEQ ID NO: 61403 - DNA, 20 bp, Artificial Sequence
  Description of Artificial Sequence: Synthetic oligonucleotide
  Target: SCNA; (-) strand; PAM type: YTN; PAM sequence: TTC
cccgggaaacgcgaggatgc

SEQ ID NO: 61404 - DNA, 20 bp, Artificial Sequence
  Description of Artificial Sequence: Synthetic oligonucleotide
  Target: SCNA; (-) strand; PAM type: YTN; PAM sequence: TTT
ccccgggaaacgcgaggatg

SEQ ID NO: 61405 - DNA, 20 bp, Artificial Sequence
  Description of Artificial Sequence: Synthetic oligonucleotide
  Target: SCNA; (-) strand; PAM type: YTN; PAM sequence: TTT
tccccgggaaacgcgaggat

SEQ ID NO: 61406 - DNA, 20 bp, Artificial Sequence
  Description of Artificial Sequence: Synthetic oligonucleotide
  Target: SCNA; (-) strand; PAM type: YTN; PAM sequence: CTT
ttccccgggaaacgcgagga

SEQ ID NO: 61407 - DNA, 20 bp, Artificial Sequence
  Description of Artificial Sequence: Synthetic oligonucleotide
  Target: SCNA; (-) strand; PAM type: YTN; PAM sequence: CTC
cgggatccgcttttccccgg

SEQ ID NO: 61408 - DNA, 20 bp, Artificial Sequence
  Description of Artificial Sequence: Synthetic oligonucleotide
  Target: SCNA; (-) strand; PAM type: YTN; PAM sequence: TTC
tccgggatccgcttttcccc

SEQ ID NO: 61409 - DNA, 20 bp, Artificial Sequence
  Description of Artificial Sequence: Synthetic oligonucleotide
  Target: SCNA; (-) strand; PAM type: YTN; PAM sequence: CTT
ctccgggatccgcttttccc

SEQ ID NO: 61410 - DNA, 20 bp, Artificial Sequence
  Description of Artificial Sequence: Synthetic oligonucleotide
  Target: SCNA; (-) strand; PAM type: YTN; PAM sequence: CTG
cttctccgggatccgctttt

SEQ ID NO: 61411 - DNA, 20 bp, Artificial Sequence
  Description of Artificial Sequence: Synthetic oligonucleotide
  Target: SCNA; (-) strand; PAM type: YTN; PAM sequence: TTA
ggctgcttctccgggatccg

SEQ ID NO: 61412 - DNA, 20 bp, Artificial Sequence
  Description of Artificial Sequence: Synthetic oligonucleotide
  Target: SCNA; (-) strand; PAM type: YTN; PAM sequence: CTG
agagattaggctgcttctcc

SEQ ID NO: 61413 - DNA, 20 bp, Artificial Sequence
  Description of Artificial Sequence: Synthetic oligonucleotide
  Target: SCNA; (-) strand; PAM type: YTN; PAM sequence: CTC
cacaagggctgagagattag

SEQ ID NO: 61414 - DNA, 20 bp, Artificial Sequence
  Description of Artificial Sequence: Synthetic oligonucleotide
  Target: SCNA; (-) strand; PAM type: YTN; PAM sequence: TTC
tccacaagggctgagagatt

SEQ ID NO: 61415 - DNA, 20 bp, Artificial Sequence
  Description of Artificial Sequence: Synthetic oligonucleotide
  Target: SCNA; (-) strand; PAM type: YTN; PAM sequence: CTT
ctccacaagggctgagagat

SEQ ID NO: 61416 - DNA, 20 bp, Artificial Sequence
  Description of Artificial Sequence: Synthetic oligonucleotide
  Target: SCNA; (-) strand; PAM type: YTN; PAM sequence: TTC
ccttctccacaagggctgag

SEQ ID NO: 61417 - DNA, 20 bp, Artificial Sequence
  Description of Artificial Sequence: Synthetic oligonucleotide
  Target: SCNA; (-) strand; PAM type: YTN; PAM sequence: CTG
atattcccttctccacaagg

SEQ ID NO: 61418 - DNA, 20 bp, Artificial Sequence
  Description of Artificial Sequence: Synthetic oligonucleotide
  Target: SCNA; (-) strand; PAM type: YTN; PAM sequence: TTC
tgatattcccttctccacaa

SEQ ID NO: 61419 - DNA, 20 bp, Artificial Sequence
  Description of Artificial Sequence: Synthetic oligonucleotide
  Target: SCNA; (-) strand; PAM type: YTN; PAM sequence: CTT
ctgatattcccttctccaca

SEQ ID NO: 61420 - DNA, 20 bp, Artificial Sequence
  Description of Artificial Sequence: Synthetic oligonucleotide
  Target: SCNA; (-) strand; PAM type: YTN; PAM sequence: CTG
cttctgatattcccttctcc

SEQ ID NO: 61421 - DNA, 20 bp, Artificial Sequence
  Description of Artificial Sequence: Synthetic oligonucleotide
  Target: SCNA; (-) strand; PAM type: YTN; PAM sequence: TTC
gtcctgcttctgatattccc

SEQ ID NO: 61422 - DNA, 20 bp, Artificial Sequence
  Description of Artificial Sequence: Synthetic oligonucleotide
  Target: SCNA; (-) strand; PAM type: YTN; PAM sequence: TTT
cgtcctgcttctgatattcc

SEQ ID NO: 61423 - DNA, 20 bp, Artificial Sequence
  Description of Artificial Sequence: Synthetic oligonucleotide
  Target: SCNA; (-) strand; PAM type: YTN; PAM sequence: CTT
tcgtcctgcttctgatattc

SEQ ID NO: 61424 - DNA, 20 bp, Artificial Sequence
  Description of Artificial Sequence: Synthetic oligonucleotide
  Target: SCNA; (-) strand; PAM type: YTN; PAM sequence: CTG
gctttcgtcctgcttctgat

SEQ ID NO: 61425 - DNA, 20 bp, Artificial Sequence
  Description of Artificial Sequence: Synthetic oligonucleotide
  Target: SCNA; (-) strand; PAM type: YTN; PAM sequence: TTG
acctggctttcgtcctgctt

SEQ ID NO: 61426 - DNA, 20 bp, Artificial Sequence
  Description of Artificial Sequence: Synthetic oligonucleotide
  Target: SCNA; (-) strand; PAM type: YTN; PAM sequence: CTT
gacctggctttcgtcctgct

SEQ ID NO: 61427 - DNA, 20 bp, Artificial Sequence
  Description of Artificial Sequence: Synthetic oligonucleotide
  Target: SCNA; (-) strand; PAM type: YTN; PAM sequence: CTA
aggaaagagacttgacctgg

SEQ ID NO: 61428 - DNA, 20 bp, Artificial Sequence
  Description of Artificial Sequence: Synthetic oligonucleotide
  Target: SCNA; (-) strand; PAM type: YTN; PAM sequence: TTG
gggagcctaaggaaagagac

SEQ ID NO: 61429 - DNA, 20 bp, Artificial Sequence
  Description of Artificial Sequence: Synthetic oligonucleotide
  Target: SCNA; (-) strand; PAM type: YTN; PAM sequence: TTT
ggggagcctaaggaaagaga

SEQ ID NO: 61430 - DNA, 20 bp, Artificial Sequence
  Description of Artificial Sequence: Synthetic oligonucleotide
  Target: SCNA; (-) strand; PAM type: YTN; PAM sequence: CTT
tggggagcctaaggaaagag

SEQ ID NO: 61431 - DNA, 20 bp, Artificial Sequence
  Description of Artificial Sequence: Synthetic oligonucleotide
  Target: SCNA; (-) strand; PAM type: YTN; PAM sequence: TTG
tccctttggggagcctaagg

SEQ ID NO: 61432 - DNA, 20 bp, Artificial Sequence
  Description of Artificial Sequence: Synthetic oligonucleotide
  Target: SCNA; (-) strand; PAM type: YTN; PAM sequence: CTT
gtccctttggggagcctaag

SEQ ID NO: 61433 - DNA, 20 bp, Artificial Sequence
  Description of Artificial Sequence: Synthetic oligonucleotide
  Target: SCNA; (-) strand; PAM type: YTN; PAM sequence: CTG
ggaggtgagtacttgtccct

SEQ ID NO: 61434 - DNA, 20 bp, Artificial Sequence
  Description of Artificial Sequence: Synthetic oligonucleotide
  Target: SCNA; (-) strand; PAM type: YTN; PAM sequence: CTC
tgggaggtgagtacttgtcc

SEQ ID NO: 61435 - DNA, 20 bp, Artificial Sequence
  Description of Artificial Sequence: Synthetic oligonucleotide
  Target: SCNA; (-) strand; PAM type: YTN; PAM sequence: CTG
ggccaggtctctgggaggtg

SEQ ID NO: 61436 - DNA, 20 bp, Artificial Sequence
  Description of Artificial Sequence: Synthetic oligonucleotide
  Target: SCNA; (-) strand; PAM type: YTN; PAM sequence: CTG
ccatgaggacccgctgggcc

SEQ ID NO: 61437 - DNA, 20 bp, Artificial Sequence
  Description of Artificial Sequence: Synthetic oligonucleotide
  Target: SCNA; (-) strand; PAM type: YTN; PAM sequence: CTG
gagaacgccggatgggagac

SEQ ID NO: 61438 - DNA, 20 bp, Artificial Sequence
  Description of Artificial Sequence: Synthetic oligonucleotide
  Target: SCNA; (-) strand; PAM type: YTN; PAM sequence: TTG
gaaatcctggagaacgccgg

SEQ ID NO: 61439 - DNA, 20 bp, Artificial Sequence
  Description of Artificial Sequence: Synthetic oligonucleotide
  Target: SCNA; (-) strand; PAM type: YTN; PAM sequence: TTT
ggaaatcctggagaacgccg

SEQ ID NO: 61440 - DNA, 20 bp, Artificial Sequence
  Description of Artificial Sequence: Synthetic oligonucleotide
  Target: SCNA; (-) strand; PAM type: YTN; PAM sequence: CTT
tggaaatcctggagaacgcc

SEQ ID NO: 61441 - DNA, 20 bp, Artificial Sequence
  Description of Artificial Sequence: Synthetic oligonucleotide
  Target: SCNA; (-) strand; PAM type: YTN; PAM sequence: CTA
aacgggcgtctttggaaatc

SEQ ID NO: 61442 - DNA, 20 bp, Artificial Sequence
  Description of Artificial Sequence: Synthetic oligonucleotide
  Target: SCNA; (-) strand; PAM type: YTN; PAM sequence: CTG
tggatctaaacgggcgtctt

SEQ ID NO: 61443 - DNA, 20 bp, Artificial Sequence
  Description of Artificial Sequence: Synthetic oligonucleotide
  Target: SCNA; (-) strand; PAM type: YTN; PAM sequence: CTC
aggtaagtacctgtggatct

SEQ ID NO: 61444 - DNA, 20 bp, Artificial Sequence
  Description of Artificial Sequence: Synthetic oligonucleotide
  Target: SCNA; (-) strand; PAM type: YTN; PAM sequence: TTG
tggagaagcagagggactca

SEQ ID NO: 61445 - DNA, 20 bp, Artificial Sequence
  Description of Artificial Sequence: Synthetic oligonucleotide
  Target: SCNA; (-) strand; PAM type: YTN; PAM sequence: TTA
aaaaaagagagaggcgggga

SEQ ID NO: 61446 - DNA, 20 bp, Artificial Sequence
  Description of Artificial Sequence: Synthetic oligonucleotide
  Target: SCNA; (-) strand; PAM type: YTN; PAM sequence: TTT
aaaaaaagagagaggcgggg

SEQ ID NO: 61447 - DNA, 20 bp, Artificial Sequence
  Description of Artificial Sequence: Synthetic oligonucleotide
  Target: SCNA; (-) strand; PAM type: YTN; PAM sequence: TTT
taaaaaaagagagaggcggg

SEQ ID NO: 61448 - DNA, 20 bp, Artificial Sequence
  Description of Artificial Sequence: Synthetic oligonucleotide
  Target: SCNA; (-) strand; PAM type: YTN; PAM sequence: TTT
ttaaaaaaagagagaggcgg

SEQ ID NO: 61449 - DNA, 20 bp, Artificial Sequence
  Description of Artificial Sequence: Synthetic oligonucleotide
  Target: SCNA; (-) strand; PAM type: YTN; PAM sequence: TTT
tttaaaaaaagagagaggcg

SEQ ID NO: 61450 - DNA, 20 bp, Artificial Sequence
  Description of Artificial Sequence: Synthetic oligonucleotide
  Target: SCNA; (-) strand; PAM type: YTN; PAM sequence: TTT
ttttaaaaaaagagagaggc

SEQ ID NO: 61451 - DNA, 20 bp, Artificial Sequence
  Description of Artificial Sequence: Synthetic oligonucleotide
  Target: SCNA; (-) strand; PAM type: YTN; PAM sequence: TTT
tttttaaaaaaagagagagg

SEQ ID NO: 61452 - DNA, 20 bp, Artificial Sequence
  Description of Artificial Sequence: Synthetic oligonucleotide
  Target: SCNA; (-) strand; PAM type: YTN; PAM sequence: TTT
ttttttaaaaaaagagagag

SEQ ID NO: 61453 - DNA, 20 bp, Artificial Sequence
  Description of Artificial Sequence: Synthetic oligonucleotide
  Target: SCNA; (-) strand; PAM type: YTN; PAM sequence: TTT
tttttttaaaaaaagagaga

SEQ ID NO: 61454 - DNA, 20 bp, Artificial Sequence
  Description of Artificial Sequence: Synthetic oligonucleotide
  Target: SCNA; (-) strand; PAM type: YTN; PAM sequence: TTA
aattttttttttaaaaaaag

SEQ ID NO: 61455 - DNA, 20 bp, Artificial Sequence
  Description of Artificial Sequence: Synthetic oligonucleotide
  Target: SCNA; (-) strand; PAM type: YTN; PAM sequence: TTT
aaattttttttttaaaaaaa

SEQ ID NO: 61456 - DNA, 20 bp, Artificial Sequence
  Description of Artificial Sequence: Synthetic oligonucleotide
  Target: SCNA; (-) strand; PAM type: YTN; PAM sequence: TTG
tttaaattttttttttaaaa

SEQ ID NO: 61457 - DNA, 20 bp, Artificial Sequence
  Description of Artificial Sequence: Synthetic oligonucleotide
  Target: SCNA; (-) strand; PAM type: YTN; PAM sequence: TTG
ggaattgtttaaattttttt

SEQ ID NO: 61458 - DNA, 20 bp, Artificial Sequence
  Description of Artificial Sequence: Synthetic oligonucleotide
  Target: SCNA; (-) strand; PAM type: YTN; PAM sequence: TTT
gggaattgtttaaatttttt

SEQ ID NO: 61459 - DNA, 20 bp, Artificial Sequence
  Description of Artificial Sequence: Synthetic oligonucleotide
  Target: SCNA; (-) strand; PAM type: YTN; PAM sequence: TTA
tttgggaattgtttaaattt

SEQ ID NO: 61460 - DNA, 20 bp, Artificial Sequence
  Description of Artificial Sequence: Synthetic oligonucleotide
  Target: SCNA; (-) strand; PAM type: YTN; PAM sequence: TTA
aatattatttgggaattgtt

SEQ ID NO: 61461 - DNA, 20 bp, Artificial Sequence
  Description of Artificial Sequence: Synthetic oligonucleotide
  Target: SCNA; (-) strand; PAM type: YTN; PAM sequence: CTA
ttaaatattatttgggaatt

SEQ ID NO: 61462 - DNA, 20 bp, Artificial Sequence
  Description of Artificial Sequence: Synthetic oligonucleotide
  Target: SCNA; (-) strand; PAM type: YTN; PAM sequence: TTC
ctattaaatattatttggga

SEQ ID NO: 61463 - DNA, 20 bp, Artificial Sequence
  Description of Artificial Sequence: Synthetic oligonucleotide
  Target: SCNA; (-) strand; PAM type: YTN; PAM sequence: TTT
cctattaaatattatttggg

SEQ ID NO: 61464 - DNA, 20 bp, Artificial Sequence
  Description of Artificial Sequence: Synthetic oligonucleotide
  Target: SCNA; (-) strand; PAM type: YTN; PAM sequence: CTT
tcctattaaatattatttgg

SEQ ID NO: 61465 - DNA, 20 bp, Artificial Sequence
  Description of Artificial Sequence: Synthetic oligonucleotide
  Target: SCNA; (-) strand; PAM type: YTN; PAM sequence: TTC
tttcctattaaatattattt

SEQ ID NO: 61466 - DNA, 20 bp, Artificial Sequence
  Description of Artificial Sequence: Synthetic oligonucleotide
  Target: SCNA; (-) strand; PAM type: YTN; PAM sequence: CTT
ctttcctattaaatattatt

SEQ ID NO: 61467 - DNA, 20 bp, Artificial Sequence
  Description of Artificial Sequence: Synthetic oligonucleotide
  Target: SCNA; (-) strand; PAM type: YTN; PAM sequence: TTC
ttctttcctattaaatatta

SEQ ID NO: 61468 - DNA, 20 bp, Artificial Sequence
  Description of Artificial Sequence: Synthetic oligonucleotide
  Target: SCNA; (-) strand; PAM type: YTN; PAM sequence: CTT
cttctttcctattaaatatt

SEQ ID NO: 61469 - DNA, 20 bp, Artificial Sequence
  Description of Artificial Sequence: Synthetic oligonucleotide
  Target: SCNA; (-) strand; PAM type: YTN; PAM sequence: TTC
cttcttctttcctattaaat

SEQ ID NO: 61470 - DNA, 20 bp, Artificial Sequence
  Description of Artificial Sequence: Synthetic oligonucleotide
  Target: SCNA; (-) strand; PAM type: YTN; PAM sequence: TTT
ccttcttctttcctattaaa

SEQ ID NO: 61471 - DNA, 20 bp, Artificial Sequence
  Description of Artificial Sequence: Synthetic oligonucleotide
  Target: SCNA; (-) strand; PAM type: YTN; PAM sequence: TTT
tccttcttctttcctattaa

SEQ ID NO: 61472 - DNA, 20 bp, Artificial Sequence
  Description of Artificial Sequence: Synthetic oligonucleotide
  Target: SCNA; (-) strand; PAM type: YTN; PAM sequence: CTT
ttccttcttctttcctatta

SEQ ID NO: 61473 - DNA, 20 bp, Artificial Sequence
  Description of Artificial Sequence: Synthetic oligonucleotide
  Target: SCNA; (-) strand; PAM type: YTN; PAM sequence: CTC
cttttccttcttctttccta

SEQ ID NO: 61474 - DNA, 20 bp, Artificial Sequence
  Description of Artificial Sequence: Synthetic oligonucleotide
  Target: SCNA; (-) strand; PAM type: YTN; PAM sequence: CTG
tgcgctccttttccttcttc

SEQ ID NO: 61475 - DNA, 20 bp, Artificial Sequence
  Description of Artificial Sequence: Synthetic oligonucleotide
  Target: SCNA; (-) strand; PAM type: YTN; PAM sequence: TTC
ctgtgcgctccttttccttc

SEQ ID NO: 61476 - DNA, 20 bp, Artificial Sequence
  Description of Artificial Sequence: Synthetic oligonucleotide
  Target: SCNA; (-) strand; PAM type: YTN; PAM sequence: CTT
cctgtgcgctccttttcctt

SEQ ID NO: 61477 - DNA, 20 bp, Artificial Sequence
  Description of Artificial Sequence: Synthetic oligonucleotide
  Target: SCNA; (-) strand; PAM type: YTN; PAM sequence: CTC
cgcccttcctgtgcgctcct

SEQ ID NO: 61478 - DNA, 20 bp, Artificial Sequence
  Description of Artificial Sequence: Synthetic oligonucleotide
  Target: SCNA; (-) strand; PAM type: YTN; PAM sequence: CTG
gggacagtcccccccgggtg

SEQ ID NO: 61479 - DNA, 20 bp, Artificial Sequence
  Description of Artificial Sequence: Synthetic oligonucleotide
  Target: SCNA; (-) strand; PAM type: YTN; PAM sequence: CTC
tggggacagtcccccccggg

SEQ ID NO: 61480 - DNA, 20 bp, Artificial Sequence
  Description of Artificial Sequence: Synthetic oligonucleotide
  Target: SCNA; (-) strand; PAM type: YTN; PAM sequence: CTC
ctctggggacagtccccccc

SEQ ID NO: 61481 - DNA, 20 bp, Artificial Sequence
  Description of Artificial Sequence: Synthetic oligonucleotide
  Target: SCNA; (-) strand; PAM type: YTN; PAM sequence: CTC
acagcggcctcctctgggga

SEQ ID NO: 61482 - DNA, 20 bp, Artificial Sequence
  Description of Artificial Sequence: Synthetic oligonucleotide
  Target: SCNA; (-) strand; PAM type: YTN; PAM sequence: CTC
gcgtcgccggctcacagcgg

SEQ ID NO: 61483 - DNA, 20 bp, Artificial Sequence
  Description of Artificial Sequence: Synthetic oligonucleotide
  Target: SCNA; (-) strand; PAM type: YTN; PAM sequence: CTC
ccccagcctcgcgtcgccgg

SEQ ID NO: 61484 - DNA, 20 bp, Artificial Sequence
  Description of Artificial Sequence: Synthetic oligonucleotide
  Target: SCNA; (-) strand; PAM type: YTN; PAM sequence: CTC
ccactcccccagcctcgcgt

SEQ ID NO: 61485 - DNA, 20 bp, Artificial Sequence
  Description of Artificial Sequence: Synthetic oligonucleotide
  Target: SCNA; (-) strand; PAM type: YTN; PAM sequence: TTG
cctcccactcccccagcctc

SEQ ID NO: 61486 - DNA, 20 bp, Artificial Sequence
  Description of Artificial Sequence: Synthetic oligonucleotide
  Target: SCNA; (-) strand; PAM type: YTN; PAM sequence: TTT
gcctcccactcccccagcct

SEQ ID NO: 61487 - DNA, 20 bp, Artificial Sequence
  Description of Artificial Sequence: Synthetic oligonucleotide
  Target: SCNA; (-) strand; PAM type: YTN; PAM sequence: TTA
gcgggtttgcctcccactcc

SEQ ID NO: 61488 - DNA, 20 bp, Artificial Sequence
  Description of Artificial Sequence: Synthetic oligonucleotide
  Target: SCNA; (-) strand; PAM type: YTN; PAM sequence: TTC
gacgacaggttagcgggttt

SEQ ID NO: 61489 - DNA, 20 bp, Artificial Sequence
  Description of Artificial Sequence: Synthetic oligonucleotide
  Target: SCNA; (-) strand; PAM type: YTN; PAM sequence: CTG
ggagtggccattcgacgaca

SEQ ID NO: 61490 - DNA, 20 bp, Artificial Sequence
  Description of Artificial Sequence: Synthetic oligonucleotide
  Target: SCNA; (-) strand; PAM type: YTN; PAM sequence: CTC
gtgagcggagaactgggagt

SEQ ID NO: 61491 - DNA, 20 bp, Artificial Sequence
  Description of Artificial Sequence: Synthetic oligonucleotide
  Target: SCNA; (-) strand; PAM type: YTN; PAM sequence: TTC
caccctcgtgagcggagaac

SEQ ID NO: 61492 - DNA, 20 bp, Artificial Sequence
  Description of Artificial Sequence: Synthetic oligonucleotide
  Target: SCNA; (-) strand; PAM type: YTN; PAM sequence: TTT
ccaccctcgtgagcggagaa

SEQ ID NO: 61493 - DNA, 20 bp, Artificial Sequence
  Description of Artificial Sequence: Synthetic oligonucleotide
  Target: SCNA; (-) strand; PAM type: YTN; PAM sequence: CTT
tccaccctcgtgagcggaga

SEQ ID NO: 61494 - DNA, 20 bp, Artificial Sequence
  Description of Artificial Sequence: Synthetic oligonucleotide
  Target: SCNA; (-) strand; PAM type: YTN; PAM sequence: CTG
cctttccaccctcgtgagcg

SEQ ID NO: 61495 - DNA, 20 bp, Artificial Sequence
  Description of Artificial Sequence: Synthetic oligonucleotide
  Target: SCNA; (-) strand; PAM type: YTN; PAM sequence: TTC
tgcctttccaccctcgtgag

SEQ ID NO: 61496 - DNA, 20 bp, Artificial Sequence
  Description of Artificial Sequence: Synthetic oligonucleotide
  Target: SCNA; (-) strand; PAM type: YTN; PAM sequence: CTT
ctgcctttccaccctcgtga

SEQ ID NO: 61497 - DNA, 20 bp, Artificial Sequence
  Description of Artificial Sequence: Synthetic oligonucleotide
  Target: SCNA; (-) strand; PAM type: YTN; PAM sequence: TTC
aagccttctgcctttccacc

SEQ ID NO: 61498 - DNA, 20 bp, Artificial Sequence
  Description of Artificial Sequence: Synthetic oligonucleotide
  Target: SCNA; (-) strand; PAM type: YTN; PAM sequence: CTT
caagccttctgcctttccac

SEQ ID NO: 61499 - DNA, 20 bp, Artificial Sequence
  Description of Artificial Sequence: Synthetic oligonucleotide
  Target: SCNA; (-) strand; PAM type: YTN; PAM sequence: TTG
ccttcaagccttctgccttt

SEQ ID NO: 61500 - DNA, 20 bp, Artificial Sequence
  Description of Artificial Sequence: Synthetic oligonucleotide
  Target: SCNA; (-) strand; PAM type: YTN; PAM sequence: CTT
gccttcaagccttctgcctt

SEQ ID NO: 61501 - DNA, 20 bp, Artificial Sequence
  Description of Artificial Sequence: Synthetic oligonucleotide
  Target: SCNA; (-) strand; PAM type: YTN; PAM sequence: CTC
acgccttgccttcaagcctt

SEQ ID NO: 61502 - DNA, 20 bp, Artificial Sequence
  Description of Artificial Sequence: Synthetic oligonucleotide
  Target: SCNA; (-) strand; PAM type: YTN; PAM sequence: CTC
cctcacgccttgccttcaag

SEQ ID NO: 61503 - DNA, 20 bp, Artificial Sequence
  Description of Artificial Sequence: Synthetic oligonucleotide
  Target: SCNA; (-) strand; PAM type: YTN; PAM sequence: CTG
ggcgctccctcacgccttgc

SEQ ID NO: 61504 - DNA, 20 bp, Artificial Sequence
  Description of Artificial Sequence: Synthetic oligonucleotide
  Target: SCNA; (-) strand; PAM type: YTN; PAM sequence: CTC
cgagagcgtcctgggcgctc

SEQ ID NO: 61505 - DNA, 20 bp, Artificial Sequence
  Description of Artificial Sequence: Synthetic oligonucleotide
  Target: SCNA; (-) strand; PAM type: YTN; PAM sequence: CTG
cagcgcagaccccggcccgg

SEQ ID NO: 61506 - DNA, 20 bp, Artificial Sequence
  Description of Artificial Sequence: Synthetic oligonucleotide
  Target: SCNA; (-) strand; PAM type: YTN; PAM sequence: CTA
ggaggaggaggacggcgacg

SEQ ID NO: 61507 - DNA, 20 bp, Artificial Sequence
  Description of Artificial Sequence: Synthetic oligonucleotide
  Target: SCNA; (-) strand; PAM type: YTN; PAM sequence: CTG
acaaatcagcggtgggggcg

SEQ ID NO: 61508 - DNA, 20 bp, Artificial Sequence
  Description of Artificial Sequence: Synthetic oligonucleotide
  Target: SCNA; (-) strand; PAM type: YTN; PAM sequence: CTG
cagggaaagcagcgagcgcc

SEQ ID NO: 61509 - DNA, 20 bp, Artificial Sequence
  Description of Artificial Sequence: Synthetic oligonucleotide
  Target: SCNA; (-) strand; PAM type: YTN; PAM sequence: CTG
ccccatccccatccgagata

SEQ ID NO: 61510 - DNA, 20 bp, Artificial Sequence
  Description of Artificial Sequence: Synthetic oligonucleotide
  Target: SCNA; (-) strand; PAM type: YTN; PAM sequence: CTC
accccgcgccccctgcccca

SEQ ID NO: 61511 - DNA, 20 bp, Artificial Sequence
  Description of Artificial Sequence: Synthetic oligonucleotide
  Target: SCNA; (-) strand; PAM type: YTN; PAM sequence: TTG
atggctcaccccgcgccccc

SEQ ID NO: 61512 - DNA, 20 bp, Artificial Sequence
  Description of Artificial Sequence: Synthetic oligonucleotide
  Target: SCNA; (-) strand; PAM type: YTN; PAM sequence: CTG
gagttgatggctcaccccgc

SEQ ID NO: 61513 - DNA, 20 bp, Artificial Sequence
  Description of Artificial Sequence: Synthetic oligonucleotide
  Target: SCNA; (-) strand; PAM type: YTN; PAM sequence: TTG
cgcggccaggcaggcggctg

SEQ ID NO: 61514 - DNA, 20 bp, Artificial Sequence
  Description of Artificial Sequence: Synthetic oligonucleotide
  Target: SCNA; (-) strand; PAM type: YTN; PAM sequence: CTT
gcgcggccaggcaggcggct

SEQ ID NO: 61515 - DNA, 20 bp, Artificial Sequence
  Description of Artificial Sequence: Synthetic oligonucleotide
  Target: SCNA; (-) strand; PAM type: YTN; PAM sequence: TTC
ccgccttgcgcggccaggca

SEQ ID NO: 61516 - DNA, 20 bp, Artificial Sequence
  Description of Artificial Sequence: Synthetic oligonucleotide
  Target: SCNA; (-) strand; PAM type: YTN; PAM sequence: TTT
cccgccttgcgcggccaggc

SEQ ID NO: 61517 - DNA, 20 bp, Artificial Sequence
  Description of Artificial Sequence: Synthetic oligonucleotide
  Target: SCNA; (-) strand; PAM type: YTN; PAM sequence: CTT
tcccgccttgcgcggccagg

SEQ ID NO: 61518 - DNA, 20 bp, Artificial Sequence
  Description of Artificial Sequence: Synthetic oligonucleotide
  Target: SCNA; (-) strand; PAM type: YTN; PAM sequence: TTA
acgtgaggcgcaaaagcgcc

SEQ ID NO: 61519 - DNA, 20 bp, Artificial Sequence
  Description of Artificial Sequence: Synthetic oligonucleotide
  Target: SCNA; (-) strand; PAM type: YTN; PAM sequence: CTT
aacgtgaggcgcaaaagcgc

SEQ ID NO: 61520 - DNA, 20 bp, Artificial Sequence
  Description of Artificial Sequence: Synthetic oligonucleotide
  Target: SCNA; (-) strand; PAM type: YTN; PAM sequence: CTA
aacttaacgtgaggcgcaaa

SEQ ID NO: 61521 - DNA, 20 bp, Artificial Sequence
  Description of Artificial Sequence: Synthetic oligonucleotide
  Target: SCNA; (-) strand; PAM type: YTN; PAM sequence: CTC
gtgaccctaaacttaacgtg

SEQ ID NO: 61522 - DNA, 20 bp, Artificial Sequence
  Description of Artificial Sequence: Synthetic oligonucleotide
  Target: SCNA; (-) strand; PAM type: YTN; PAM sequence: CTC
cacaagagtgctcgtgaccc

SEQ ID NO: 61523 - DNA, 20 bp, Artificial Sequence
  Description of Artificial Sequence: Synthetic oligonucleotide
  Target: SCNA; (-) strand; PAM type: YTN; PAM sequence: CTC
ccgatctccacaagagtgct

SEQ ID NO: 61524 - DNA, 20 bp, Artificial Sequence
  Description of Artificial Sequence: Synthetic oligonucleotide
  Target: SCNA; (-) strand; PAM type: YTN; PAM sequence: CTA
gcccaaccgctcccgatctc

SEQ ID NO: 61525 - DNA, 20 bp, Artificial Sequence
  Description of Artificial Sequence: Synthetic oligonucleotide
  Target: SCNA; (-) strand; PAM type: YTN; PAM sequence: CTG
acgaggggtagggggtggtc

SEQ ID NO: 61526 - DNA, 20 bp, Artificial Sequence
  Description of Artificial Sequence: Synthetic oligonucleotide
  Target: SCNA; (-) strand; PAM type: YTN; PAM sequence: CTC
tgacgaggggtagggggtgg

SEQ ID NO: 61527 - DNA, 20 bp, Artificial Sequence
  Description of Artificial Sequence: Synthetic oligonucleotide
  Target: SCNA; (-) strand; PAM type: YTN; PAM sequence: CTC
ccagggcgactctgacgagg

SEQ ID NO: 61528 - DNA, 20 bp, Artificial Sequence
  Description of Artificial Sequence: Synthetic oligonucleotide
  Target: SCNA; (-) strand; PAM type: YTN; PAM sequence: CTC
tcccagggcgactctgacga

SEQ ID NO: 61529 - DNA, 20 bp, Artificial Sequence
  Description of Artificial Sequence: Synthetic oligonucleotide
  Target: SCNA; (-) strand; PAM type: YTN; PAM sequence: CTC
ggctctcccagggcgactct

SEQ ID NO: 61530 - DNA, 20 bp, Artificial Sequence
  Description of Artificial Sequence: Synthetic oligonucleotide
  Target: SCNA; (-) strand; PAM type: YTN; PAM sequence: CTC
aggccctcggctctcccagg

SEQ ID NO: 61531 - DNA, 20 bp, Artificial Sequence
  Description of Artificial Sequence: Synthetic oligonucleotide
  Target: SCNA; (-) strand; PAM type: YTN; PAM sequence: TTG
gtggtcgaccctcaggccct

SEQ ID NO: 61532 - DNA, 20 bp, Artificial Sequence
  Description of Artificial Sequence: Synthetic oligonucleotide
  Target: SCNA; (-) strand; PAM type: YTN; PAM sequence: CTT
ggtggtcgaccctcaggccc

SEQ ID NO: 61533 - DNA, 20 bp, Artificial Sequence
  Description of Artificial Sequence: Synthetic oligonucleotide
  Target: SCNA; (-) strand; PAM type: YTN; PAM sequence: CTG
cccttggtggtcgaccctca

SEQ ID NO: 61534 - DNA, 20 bp, Artificial Sequence
  Description of Artificial Sequence: Synthetic oligonucleotide
  Target: SCNA; (-) strand; PAM type: YTN; PAM sequence: CTC
tgcccttggtggtcgaccct

SEQ ID NO: 61535 - DNA, 20 bp, Artificial Sequence
  Description of Artificial Sequence: Synthetic oligonucleotide
  Target: SCNA; (-) strand; PAM type: YTN; PAM sequence: CTC
cccaagggataggctctgcc

SEQ ID NO: 61536 - DNA, 20 bp, Artificial Sequence
  Description of Artificial Sequence: Synthetic oligonucleotide
  Target: SCNA; (-) strand; PAM type: YTN; PAM sequence: CTC
cagcagctccccaagggata

SEQ ID NO: 61537 - DNA, 20 bp, Artificial Sequence
  Description of Artificial Sequence: Synthetic oligonucleotide
  Target: SCNA; (-) strand; PAM type: YTN; PAM sequence: CTC
ctccagcagctccccaaggg

SEQ ID NO: 61538 - DNA, 20 bp, Artificial Sequence
  Description of Artificial Sequence: Synthetic oligonucleotide
  Target: SCNA; (-) strand; PAM type: YTN; PAM sequence: CTG
tctcctccagcagctcccca

SEQ ID NO: 61539 - DNA, 20 bp, Artificial Sequence
  Description of Artificial Sequence: Synthetic oligonucleotide
  Target: SCNA; (-) strand; PAM type: YTN; PAM sequence: CTG
cctgtctcctccagcagctc

SEQ ID NO: 61540 - DNA, 20 bp, Artificial Sequence
  Description of Artificial Sequence: Synthetic oligonucleotide
  Target: SCNA; (-) strand; PAM type: YTN; PAM sequence: CTC
ccggcgctgcctgtctcctc

SEQ ID NO: 61541 - DNA, 20 bp, Artificial Sequence
  Description of Artificial Sequence: Synthetic oligonucleotide
  Target: SCNA; (-) strand; PAM type: YTN; PAM sequence: CTC
ggcggtgcggtgtgagccac

SEQ ID NO: 61542 - DNA, 20 bp, Artificial Sequence
  Description of Artificial Sequence: Synthetic oligonucleotide
  Target: SCNA; (-) strand; PAM type: YTN; PAM sequence: CTC
tcggcggtgcggtgtgagcc

SEQ ID NO: 61543 - DNA, 20 bp, Artificial Sequence
  Description of Artificial Sequence: Synthetic oligonucleotide
  Target: SCNA; (-) strand; PAM type: YTN; PAM sequence: TTC
agcgatgcgagggcaaagcg

SEQ ID NO: 61544 - DNA, 20 bp, Artificial Sequence
  Description of Artificial Sequence: Synthetic oligonucleotide
  Target: SCNA; (-) strand; PAM type: YTN; PAM sequence: TTT
cagcgatgcgagggcaaagc

SEQ ID NO: 61545 - DNA, 20 bp, Artificial Sequence
  Description of Artificial Sequence: Synthetic oligonucleotide
  Target: SCNA; (-) strand; PAM type: YTN; PAM sequence: TTA
aatttcagcgatgcgagggc

SEQ ID NO: 61546 - DNA, 20 bp, Artificial Sequence
  Description of Artificial Sequence: Synthetic oligonucleotide
  Target: SCNA; (-) strand; PAM type: YTN; PAM sequence: CTG
tgaccgtgattaaatttcag

SEQ ID NO: 61547 - DNA, 20 bp, Artificial Sequence
  Description of Artificial Sequence: Synthetic oligonucleotide
  Target: SCNA; (-) strand; PAM type: YTN; PAM sequence: TTG
taacctgtgaccgtgattaa

SEQ ID NO: 61548 - DNA, 20 bp, Artificial Sequence
  Description of Artificial Sequence: Synthetic oligonucleotide
  Target: SCNA; (-) strand; PAM type: YTN; PAM sequence: CTA
acgttgtaacctgtgaccgt

SEQ ID NO: 61549 - DNA, 20 bp, Artificial Sequence
  Description of Artificial Sequence: Synthetic oligonucleotide
  Target: SCNA; (-) strand; PAM type: YTN; PAM sequence: CTA
aagcgacccctaacgttgta

SEQ ID NO: 61550 - DNA, 20 bp, Artificial Sequence
  Description of Artificial Sequence: Synthetic oligonucleotide
  Target: SCNA; (-) strand; PAM type: YTN; PAM sequence: TTG
aactaaagcgacccctaacg

SEQ ID NO: 61551 - DNA, 20 bp, Artificial Sequence
  Description of Artificial Sequence: Synthetic oligonucleotide
  Target: SCNA; (-) strand; PAM type: YTN; PAM sequence: TTT
gaactaaagcgacccctaac

SEQ ID NO: 61552 - DNA, 20 bp, Artificial Sequence
  Description of Artificial Sequence: Synthetic oligonucleotide
  Target: SCNA; (-) strand; PAM type: YTN; PAM sequence: TTG
aagatatttgaactaaagcg

SEQ ID NO: 61553 - DNA, 20 bp, Artificial Sequence
  Description of Artificial Sequence: Synthetic oligonucleotide
  Target: SCNA; (-) strand; PAM type: YTN; PAM sequence: CTT
gaagatatttgaactaaagc

SEQ ID NO: 61554 - DNA, 20 bp, Artificial Sequence
  Description of Artificial Sequence: Synthetic oligonucleotide
  Target: SCNA; (-) strand; PAM type: YTN; PAM sequence: TTA
agagcaaacgaaaaccttga

SEQ ID NO: 61555 - DNA, 20 bp, Artificial Sequence
  Description of Artificial Sequence: Synthetic oligonucleotide
  Target: SCNA; (-) strand; PAM type: YTN; PAM sequence: CTA
gattaagagcaaacgaaaac

SEQ ID NO: 61556 - DNA, 20 bp, Artificial Sequence
  Description of Artificial Sequence: Synthetic oligonucleotide
  Target: SCNA; (-) strand; PAM type: YTN; PAM sequence: TTC
ctagattaagagcaaacgaa

SEQ ID NO: 61557 - DNA, 20 bp, Artificial Sequence
  Description of Artificial Sequence: Synthetic oligonucleotide
  Target: SCNA; (-) strand; PAM type: YTN; PAM sequence: CTT
cctagattaagagcaaacga

SEQ ID NO: 61558 - DNA, 20 bp, Artificial Sequence
  Description of Artificial Sequence: Synthetic oligonucleotide
  Target: SCNA; (-) strand; PAM type: YTN; PAM sequence: CTC
ttcctagattaagagcaaac

SEQ ID NO: 61559 - DNA, 20 bp, Artificial Sequence
  Description of Artificial Sequence: Synthetic oligonucleotide
  Target: SCNA; (-) strand; PAM type: YTN; PAM sequence: TTC
cggctcttcctagattaaga

SEQ ID NO: 61560 - DNA, 20 bp, Artificial Sequence
  Description of Artificial Sequence: Synthetic oligonucleotide
  Target: SCNA; (-) strand; PAM type: YTN; PAM sequence: TTT
ccggctcttcctagattaag

SEQ ID NO: 61561 - DNA, 20 bp, Artificial Sequence
  Description of Artificial Sequence: Synthetic oligonucleotide
  Target: SCNA; (-) strand; PAM type: YTN; PAM sequence: CTT
tccggctcttcctagattaa

SEQ ID NO: 61562 - DNA, 20 bp, Artificial Sequence
  Description of Artificial Sequence: Synthetic oligonucleotide
  Target: SCNA; (-) strand; PAM type: YTN; PAM sequence: CTC
aggaccctttccggctcttc

SEQ ID NO: 61563 - DNA, 20 bp, Artificial Sequence
  Description of Artificial Sequence: Synthetic oligonucleotide
  Target: SCNA; (-) strand; PAM type: YTN; PAM sequence: TTC
accctcaggaccctttccgg

SEQ ID NO: 61564 - DNA, 20 bp, Artificial Sequence
  Description of Artificial Sequence: Synthetic oligonucleotide
  Target: SCNA; (-) strand; PAM type: YTN; PAM sequence: TTT
caccctcaggaccctttccg

SEQ ID NO: 61565 - DNA, 20 bp, Artificial Sequence
  Description of Artificial Sequence: Synthetic oligonucleotide
  Target: SCNA; (-) strand; PAM type: YTN; PAM sequence: CTT
tcaccctcaggaccctttcc

SEQ ID NO: 61566 - DNA, 20 bp, Artificial Sequence
  Description of Artificial Sequence: Synthetic oligonucleotide
  Target: SCNA; (-) strand; PAM type: YTN; PAM sequence: CTC
cctttcaccctcaggaccct

SEQ ID NO: 61567 - DNA, 20 bp, Artificial Sequence
  Description of Artificial Sequence: Synthetic oligonucleotide
  Target: SCNA; (-) strand; PAM type: YTN; PAM sequence: TTA
gtagtctccctttcaccctc

SEQ ID NO: 61568 - DNA, 20 bp, Artificial Sequence
  Description of Artificial Sequence: Synthetic oligonucleotide
  Target: SCNA; (-) strand; PAM type: YTN; PAM sequence: CTT
agtagtctccctttcaccct

SEQ ID NO: 61569 - DNA, 20 bp, Artificial Sequence
  Description of Artificial Sequence: Synthetic oligonucleotide
  Target: SCNA; (-) strand; PAM type: YTN; PAM sequence: TTC
cttagtagtctccctttcac

SEQ ID NO: 61570 - DNA, 20 bp, Artificial Sequence
  Description of Artificial Sequence: Synthetic oligonucleotide
  Target: SCNA; (-) strand; PAM type: YTN; PAM sequence: CTT
ccttagtagtctccctttca

SEQ ID NO: 61571 - DNA, 20 bp, Artificial Sequence
  Description of Artificial Sequence: Synthetic oligonucleotide
  Target: SCNA; (-) strand; PAM type: YTN; PAM sequence: CTC
ttccttagtagtctcccttt

SEQ ID NO: 61572 - DNA, 20 bp, Artificial Sequence
  Description of Artificial Sequence: Synthetic oligonucleotide
  Target: SCNA; (-) strand; PAM type: YTN; PAM sequence: CTG
tgactcttccttagtagtct

SEQ ID NO: 61573 - DNA, 20 bp, Artificial Sequence
  Description of Artificial Sequence: Synthetic oligonucleotide
  Target: SCNA; (-) strand; PAM type: YTN; PAM sequence: CTC
aacctgtgactcttccttag

SEQ ID NO: 61574 - DNA, 20 bp, Artificial Sequence
  Description of Artificial Sequence: Synthetic oligonucleotide
  Target: SCNA; (-) strand; PAM type: YTN; PAM sequence: CTC
ctcaacctgtgactcttcct

SEQ ID NO: 61575 - DNA, 20 bp, Artificial Sequence
  Description of Artificial Sequence: Synthetic oligonucleotide
  Target: SCNA; (-) strand; PAM type: YTN; PAM sequence: CTG
cctcctcaacctgtgactct

SEQ ID NO: 61576 - DNA, 20 bp, Artificial Sequence
  Description of Artificial Sequence: Synthetic oligonucleotide
  Target: SCNA; (-) strand; PAM type: YTN; PAM sequence: CTC
ctgcctcctcaacctgtgac

SEQ ID NO: 61577 - DNA, 20 bp, Artificial Sequence
  Description of Artificial Sequence: Synthetic oligonucleotide
  Target: SCNA; (-) strand; PAM type: YTN; PAM sequence: TTC
tcctgcctcctcaacctgtg

SEQ ID NO: 61578 - DNA, 20 bp, Artificial Sequence
  Description of Artificial Sequence: Synthetic oligonucleotide
  Target: SCNA; (-) strand; PAM type: YTN; PAM sequence: CTT
ctcctgcctcctcaacctgt

SEQ ID NO: 61579 - DNA, 20 bp, Artificial Sequence
  Description of Artificial Sequence: Synthetic oligonucleotide
  Target: SCNA; (-) strand; PAM type: YTN; PAM sequence: CTG
agccttctcctgcctcctca

SEQ ID NO: 61580 - DNA, 20 bp, Artificial Sequence
  Description of Artificial Sequence: Synthetic oligonucleotide
  Target: SCNA; (-) strand; PAM type: YTN; PAM sequence: TTG
ctgagccttctcctgcctcc

SEQ ID NO: 61581 - DNA, 20 bp, Artificial Sequence
  Description of Artificial Sequence: Synthetic oligonucleotide
  Target: SCNA; (-) strand; PAM type: YTN; PAM sequence: TTT
gctgagccttctcctgcctc

SEQ ID NO: 61582 - DNA, 20 bp, Artificial Sequence
  Description of Artificial Sequence: Synthetic oligonucleotide
  Target: SCNA; (-) strand; PAM type: YTN; PAM sequence: TTG
gtggaaaggaaaatggtgat

SEQ ID NO: 61583 - DNA, 20 bp, Artificial Sequence
  Description of Artificial Sequence: Synthetic oligonucleotide
  Target: SCNA; (-) strand; PAM type: YTN; PAM sequence: CTG
attggtggaaaggaaaatgg

SEQ ID NO: 61584 - DNA, 20 bp, Artificial Sequence
  Description of Artificial Sequence: Synthetic oligonucleotide
  Target: SCNA; (-) strand; PAM type: YTN; PAM sequence: CTG
gcaggcgctgattggtggaa

SEQ ID NO: 61585 - DNA, 20 bp, Artificial Sequence
  Description of Artificial Sequence: Synthetic oligonucleotide
  Target: SCNA; (-) strand; PAM type: YTN; PAM sequence: CTG
atgggaaaatcagcgtctgg

SEQ ID NO: 61586 - DNA, 20 bp, Artificial Sequence
  Description of Artificial Sequence: Synthetic oligonucleotide
  Target: SCNA; (-) strand; PAM type: YTN; PAM sequence: TTC
cactgatgggaaaatcagcg

SEQ ID NO: 61587 - DNA, 20 bp, Artificial Sequence
  Description of Artificial Sequence: Synthetic oligonucleotide
  Target: SCNA; (-) strand; PAM type: YTN; PAM sequence: TTG
ttccactgatgggaaaatca

SEQ ID NO: 61588 - DNA, 20 bp, Artificial Sequence
  Description of Artificial Sequence: Synthetic oligonucleotide
  Target: SCNA; (-) strand; PAM type: YTN; PAM sequence: CTT
gttccactgatgggaaaatc

SEQ ID NO: 61589 - DNA, 20 bp, Artificial Sequence
  Description of Artificial Sequence: Synthetic oligonucleotide
  Target: SCNA; (-) strand; PAM type: YTN; PAM sequence: TTC
cttgttccactgatgggaaa

SEQ ID NO: 61590 - DNA, 20 bp, Artificial Sequence
  Description of Artificial Sequence: Synthetic oligonucleotide
  Target: SCNA; (-) strand; PAM type: YTN; PAM sequence: TTA
ttccttgttccactgatggg

SEQ ID NO: 61591 - DNA, 20 bp, Artificial Sequence
  Description of Artificial Sequence: Synthetic oligonucleotide
  Target: SCNA; (-) strand; PAM type: YTN; PAM sequence: TTT
attccttgttccactgatgg

SEQ ID NO: 61592 - DNA, 20 bp, Artificial Sequence
  Description of Artificial Sequence: Synthetic oligonucleotide
  Target: SCNA; (-) strand; PAM type: YTN; PAM sequence: CTG
gggaatatttattccttgtt

SEQ ID NO: 61593 - DNA, 20 bp, Artificial Sequence
  Description of Artificial Sequence: Synthetic oligonucleotide
  Target: SCNA; (-) strand; PAM type: YTN; PAM sequence: TTA
gacggctggggaatatttat

SEQ ID NO: 61594 - DNA, 20 bp, Artificial Sequence
  Description of Artificial Sequence: Synthetic oligonucleotide
  Target: SCNA; (-) strand; PAM type: YTN; PAM sequence: TTT
agacggctggggaatattta

SEQ ID NO: 61595 - DNA, 20 bp, Artificial Sequence
  Description of Artificial Sequence: Synthetic oligonucleotide
  Target: SCNA; (-) strand; PAM type: YTN; PAM sequence: TTT
tagacggctggggaatattt

SEQ ID NO: 61596 - DNA, 20 bp, Artificial Sequence
  Description of Artificial Sequence: Synthetic oligonucleotide
  Target: SCNA; (-) strand; PAM type: YTN; PAM sequence: TTG
ttttagacggctggggaata

SEQ ID NO: 61597 - DNA, 20 bp, Artificial Sequence
  Description of Artificial Sequence: Synthetic oligonucleotide
  Target: SCNA; (-) strand; PAM type: YTN; PAM sequence: CTT
gttttagacggctggggaat

SEQ ID NO: 61598 - DNA, 20 bp, Artificial Sequence
  Description of Artificial Sequence: Synthetic oligonucleotide
  Target: SCNA; (-) strand; PAM type: YTN; PAM sequence: TTA
ggaccgcttgttttagacgg

SEQ ID NO: 61599 - DNA, 20 bp, Artificial Sequence
  Description of Artificial Sequence: Synthetic oligonucleotide
  Target: SCNA; (-) strand; PAM type: YTN; PAM sequence: CTT
aggaccgcttgttttagacg

SEQ ID NO: 61600 - DNA, 20 bp, Artificial Sequence
  Description of Artificial Sequence: Synthetic oligonucleotide
  Target: SCNA; (-) strand; PAM type: YTN; PAM sequence: CTA
gagcgaaaagccttaggacc

SEQ ID NO: 61601 - DNA, 20 bp, Artificial Sequence
  Description of Artificial Sequence: Synthetic oligonucleotide
  Target: SCNA; (-) strand; PAM type: YTN; PAM sequence: TTC
tagagcgaaaagccttagga

SEQ ID NO: 61602 - DNA, 20 bp, Artificial Sequence
  Description of Artificial Sequence: Synthetic oligonucleotide
  Target: SCNA; (-) strand; PAM type: YTN; PAM sequence: TTT
ctagagcgaaaagccttagg

SEQ ID NO: 61603 - DNA, 20 bp, Artificial Sequence
  Description of Artificial Sequence: Synthetic oligonucleotide
  Target: SCNA; (-) strand; PAM type: YTN; PAM sequence: CTG
caaagtaagtcccatttcta

SEQ ID NO: 61604 - DNA, 20 bp, Artificial Sequence
  Description of Artificial Sequence: Synthetic oligonucleotide
  Target: SCNA; (-) strand; PAM type: YTN; PAM sequence: CTC
ccagataaagggaggtctgc

SEQ ID NO: 61605 - DNA, 20 bp, Artificial Sequence
  Description of Artificial Sequence: Synthetic oligonucleotide
  Target: SCNA; (-) strand; PAM type: YTN; PAM sequence: TTG
tctcccagataaagggaggt

SEQ ID NO: 61606 - DNA, 20 bp, Artificial Sequence
  Description of Artificial Sequence: Synthetic oligonucleotide
  Target: SCNA; (-) strand; PAM type: YTN; PAM sequence: TTT
gtctcccagataaagggagg

SEQ ID NO: 61607 - DNA, 20 bp, Artificial Sequence
  Description of Artificial Sequence: Synthetic oligonucleotide
  Target: SCNA; (-) strand; PAM type: YTN; PAM sequence: CTG
gatttgtctcccagataaag

SEQ ID NO: 61608 - DNA, 20 bp, Artificial Sequence
  Description of Artificial Sequence: Synthetic oligonucleotide
  Target: SCNA; (-) strand; PAM type: YTN; PAM sequence: CTA
aatcacgctggatttgtctc

SEQ ID NO: 61609 - DNA, 20 bp, Artificial Sequence
  Description of Artificial Sequence: Synthetic oligonucleotide
  Target: SCNA; (-) strand; PAM type: YTN; PAM sequence: TTG
gatatgatggtccggtaggc

SEQ ID NO: 61610 - DNA, 20 bp, Artificial Sequence
  Description of Artificial Sequence: Synthetic oligonucleotide
  Target: SCNA; (-) strand; PAM type: YTN; PAM sequence: CTG
aagaagaaattggatatgat

SEQ ID NO: 61611 - DNA, 20 bp, Artificial Sequence
  Description of Artificial Sequence: Synthetic oligonucleotide
  Target: SCNA; (-) strand; PAM type: YTN; PAM sequence: TTC
agaaggggctgaagaagaaa

SEQ ID NO: 61612 - DNA, 20 bp, Artificial Sequence
  Description of Artificial Sequence: Synthetic oligonucleotide
  Target: SCNA; (-) strand; PAM type: YTN; PAM sequence: TTT
cagaaggggctgaagaagaa

SEQ ID NO: 61613 - DNA, 20 bp, Artificial Sequence
  Description of Artificial Sequence: Synthetic oligonucleotide
  Target: SCNA; (-) strand; PAM type: YTN; PAM sequence: CTT
tcagaaggggctgaagaaga

SEQ ID NO: 61614 - DNA, 20 bp, Artificial Sequence
  Description of Artificial Sequence: Synthetic oligonucleotide
  Target: SCNA; (-) strand; PAM type: YTN; PAM sequence: CTC
cctttcagaaggggctgaag

SEQ ID NO: 61615 - DNA, 20 bp, Artificial Sequence
  Description of Artificial Sequence: Synthetic oligonucleotide
  Target: SCNA; (-) strand; PAM type: YTN; PAM sequence: CTG
agggcaacgagaatcagaag

SEQ ID NO: 61616 - DNA, 20 bp, Artificial Sequence
  Description of Artificial Sequence: Synthetic oligonucleotide
  Target: SCNA; (-) strand; PAM type: YTN; PAM sequence: TTC
tgagggcaacgagaatcaga

SEQ ID NO: 61617 - DNA, 20 bp, Artificial Sequence
  Description of Artificial Sequence: Synthetic oligonucleotide
  Target: SCNA; (-) strand; PAM type: YTN; PAM sequence: CTG
tgtgcatgtgcgtgtggtgg

SEQ ID NO: 61618 - DNA, 20 bp, Artificial Sequence
  Description of Artificial Sequence: Synthetic oligonucleotide
  Target: SCNA; (-) strand; PAM type: YTN; PAM sequence: TTC
gcgtgtgtatgtctgtgtgc

SEQ ID NO: 61619 - DNA, 20 bp, Artificial Sequence
  Description of Artificial Sequence: Synthetic oligonucleotide
  Target: SCNA; (-) strand; PAM type: YTN; PAM sequence: TTG
aagttcgcgtgtgtatgtct

SEQ ID NO: 61620 - DNA, 20 bp, Artificial Sequence
  Description of Artificial Sequence: Synthetic oligonucleotide
  Target: SCNA; (-) strand; PAM type: YTN; PAM sequence: CTT
gaagttcgcgtgtgtatgtc

SEQ ID NO: 61621 - DNA, 20 bp, Artificial Sequence
  Description of Artificial Sequence: Synthetic oligonucleotide
  Target: SCNA; (-) strand; PAM type: YTN; PAM sequence: TTG
tcttgaagttcgcgtgtgta

SEQ ID NO: 61622 - DNA, 20 bp, Artificial Sequence
  Description of Artificial Sequence: Synthetic oligonucleotide
  Target: SCNA; (-) strand; PAM type: YTN; PAM sequence: TTA
agcgatgcaaaaattgtctt

SEQ ID NO: 61623 - DNA, 20 bp, Artificial Sequence
  Description of Artificial Sequence: Synthetic oligonucleotide
  Target: SCNA; (-) strand; PAM type: YTN; PAM sequence: CTG
aaagaggtgaaaatgtgtta

SEQ ID NO: 61624 - DNA, 20 bp, Artificial Sequence
  Description of Artificial Sequence: Synthetic oligonucleotide
  Target: SCNA; (-) strand; PAM type: YTN; PAM sequence: CTC
tgaaagaggtgaaaatgtgt

SEQ ID NO: 61625 - DNA, 20 bp, Artificial Sequence
  Description of Artificial Sequence: Synthetic oligonucleotide
  Target: SCNA; (-) strand; PAM type: YTN; PAM sequence: TTC
cagctctgaaagaggtgaaa

SEQ ID NO: 61626 - DNA, 20 bp, Artificial Sequence
  Description of Artificial Sequence: Synthetic oligonucleotide
  Target: SCNA; (-) strand; PAM type: YTN; PAM sequence: CTT
ccagctctgaaagaggtgaa

SEQ ID NO: 61627 - DNA, 20 bp, Artificial Sequence
  Description of Artificial Sequence: Synthetic oligonucleotide
  Target: SCNA; (-) strand; PAM type: YTN; PAM sequence: CTG
tcttccagctctgaaagagg

SEQ ID NO: 61628 - DNA, 20 bp, Artificial Sequence
  Description of Artificial Sequence: Synthetic oligonucleotide
  Target: SCNA; (-) strand; PAM type: YTN; PAM sequence: CTG
gtgtgatccaggaacagctg

SEQ ID NO: 61629 - DNA, 20 bp, Artificial Sequence
  Description of Artificial Sequence: Synthetic oligonucleotide
  Target: SCNA; (-) strand; PAM type: YTN; PAM sequence: TTC
tggtgtgatccaggaacagc

SEQ ID NO: 61630 - DNA, 20 bp, Artificial Sequence
  Description of Artificial Sequence: Synthetic oligonucleotide
  Target: SCNA; (-) strand; PAM type: YTN; PAM sequence: CTC
cattctggtgtgatccagga

SEQ ID NO: 61631 - DNA, 20 bp, Artificial Sequence
  Description of Artificial Sequence: Synthetic oligonucleotide
  Target: SCNA; (-) strand; PAM type: YTN; PAM sequence: TTC
tccattctggtgtgatccag

SEQ ID NO: 61632 - DNA, 20 bp, Artificial Sequence
  Description of Artificial Sequence: Synthetic oligonucleotide
  Target: SCNA; (-) strand; PAM type: YTN; PAM sequence: CTT
ctccattctggtgtgatcca

SEQ ID NO: 61633 - DNA, 20 bp, Artificial Sequence
  Description of Artificial Sequence: Synthetic oligonucleotide
  Target: SCNA; (-) strand; PAM type: YTN; PAM sequence: TTG
cttctccattctggtgtgat

SEQ ID NO: 61634 - DNA, 20 bp, Artificial Sequence
  Description of Artificial Sequence: Synthetic oligonucleotide
  Target: SCNA; (-) strand; PAM type: YTN; PAM sequence: CTT
gcttctccattctggtgtga

SEQ ID NO: 61635 - DNA, 20 bp, Artificial Sequence
  Description of Artificial Sequence: Synthetic oligonucleotide
  Target: SCNA; (-) strand; PAM type: YTN; PAM sequence: CTA
gtgggaggagcttgcttctc

SEQ ID NO: 61636 - DNA, 20 bp, Artificial Sequence
  Description of Artificial Sequence: Synthetic oligonucleotide
  Target: SCNA; (-) strand; PAM type: YTN; PAM sequence: CTG
ctagtgggaggagcttgctt

SEQ ID NO: 61637 - DNA, 20 bp, Artificial Sequence
  Description of Artificial Sequence: Synthetic oligonucleotide
  Target: SCNA; (-) strand; PAM type: YTN; PAM sequence: TTC
tgctagtgggaggagcttgc

SEQ ID NO: 61638 - DNA, 20 bp, Artificial Sequence
  Description of Artificial Sequence: Synthetic oligonucleotide
  Target: SCNA; (-) strand; PAM type: YTN; PAM sequence: TTT
ctgctagtgggaggagcttg

SEQ ID NO: 61639 - DNA, 20 bp, Artificial Sequence
  Description of Artificial Sequence: Synthetic oligonucleotide
  Target: SCNA; (-) strand; PAM type: YTN; PAM sequence: CTT
tctgctagtgggaggagctt

SEQ ID NO: 61640 - DNA, 20 bp, Artificial Sequence
  Description of Artificial Sequence: Synthetic oligonucleotide
  Target: SCNA; (-) strand; PAM type: YTN; PAM sequence: TTC
cgaatccaggcacagaaagc

SEQ ID NO: 61641 - DNA, 20 bp, Artificial Sequence
  Description of Artificial Sequence: Synthetic oligonucleotide
  Target: SCNA; (-) strand; PAM type: YTN; PAM sequence: CTT
ccgaatccaggcacagaaag

SEQ ID NO: 61642 - DNA, 20 bp, Artificial Sequence
  Description of Artificial Sequence: Synthetic oligonucleotide
  Target: SCNA; (-) strand; PAM type: YTN; PAM sequence: CTA
atcttccgaatccaggcaca

SEQ ID NO: 61643 - DNA, 20 bp, Artificial Sequence
  Description of Artificial Sequence: Synthetic oligonucleotide
  Target: SCNA; (-) strand; PAM type: YTN; PAM sequence: TTA
actaatcttccgaatccagg

SEQ ID NO: 61644 - DNA, 20 bp, Artificial Sequence
  Description of Artificial Sequence: Synthetic oligonucleotide
  Target: SCNA; (-) strand; PAM type: YTN; PAM sequence: CTT
aactaatcttccgaatccag

SEQ ID NO: 61645 - DNA, 20 bp, Artificial Sequence
  Description of Artificial Sequence: Synthetic oligonucleotide
  Target: SCNA; (-) strand; PAM type: YTN; PAM sequence: TTC
cagtgcttaactaatcttcc

SEQ ID NO: 61646 - DNA, 20 bp, Artificial Sequence
  Description of Artificial Sequence: Synthetic oligonucleotide
  Target: SCNA; (-) strand; PAM type: YTN; PAM sequence: CTT
ccagtgcttaactaatcttc

SEQ ID NO: 61647 - DNA, 20 bp, Artificial Sequence
  Description of Artificial Sequence: Synthetic oligonucleotide
  Target: SCNA; (-) strand; PAM type: YTN; PAM sequence: CTC
ttccagtgcttaactaatct

SEQ ID NO: 61648 - DNA, 20 bp, Artificial Sequence
  Description of Artificial Sequence: Synthetic oligonucleotide
  Target: SCNA; (-) strand; PAM type: YTN; PAM sequence: CTC
ctcttccagtgcttaactaa

SEQ ID NO: 61649 - DNA, 20 bp, Artificial Sequence
  Description of Artificial Sequence: Synthetic oligonucleotide
  Target: SCNA; (-) strand; PAM type: YTN; PAM sequence: TTC
ccccctcctcttccagtgct

SEQ ID NO: 61650 - DNA, 20 bp, Artificial Sequence
  Description of Artificial Sequence: Synthetic oligonucleotide
  Target: SCNA; (-) strand; PAM type: YTN; PAM sequence: TTT
cccccctcctcttccagtgc

SEQ ID NO: 61651 - DNA, 20 bp, Artificial Sequence
  Description of Artificial Sequence: Synthetic oligonucleotide
  Target: SCNA; (-) strand; PAM type: YTN; PAM sequence: TTG
tttcccccctcctcttccag

SEQ ID NO: 61652 - DNA, 20 bp, Artificial Sequence
  Description of Artificial Sequence: Synthetic oligonucleotide
  Target: SCNA; (-) strand; PAM type: YTN; PAM sequence: TTG
ttgtttcccccctcctcttc

SEQ ID NO: 61653 - DNA, 20 bp, Artificial Sequence
  Description of Artificial Sequence: Synthetic oligonucleotide
  Target: SCNA; (-) strand; PAM type: YTN; PAM sequence: TTA
aaaaaaaaacatacagcaaa

SEQ ID NO: 61654 - DNA, 20 bp, Artificial Sequence
  Description of Artificial Sequence: Synthetic oligonucleotide
  Target: SCNA; (-) strand; PAM type: YTN; PAM sequence: CTA
taaatataaaaacaattaaa

SEQ ID NO: 61655 - DNA, 20 bp, Artificial Sequence
  Description of Artificial Sequence: Synthetic oligonucleotide
  Target: SCNA; (-) strand; PAM type: YTN; PAM sequence: TTC
tataaatataaaaacaatta

SEQ ID NO: 61656 - DNA, 20 bp, Artificial Sequence
  Description of Artificial Sequence: Synthetic oligonucleotide
  Target: SCNA; (-) strand; PAM type: YTN; PAM sequence: TTT
ctataaatataaaaacaatt

SEQ ID NO: 61657 - DNA, 20 bp, Artificial Sequence
  Description of Artificial Sequence: Synthetic oligonucleotide
  Target: SCNA; (-) strand; PAM type: YTN; PAM sequence: CTT
tctataaatataaaaacaat

SEQ ID NO: 61658 - DNA, 20 bp, Artificial Sequence
  Description of Artificial Sequence: Synthetic oligonucleotide
  Target: SCNA; (-) strand; PAM type: YTN; PAM sequence: TTA
gcgcaagaatcagacaaagc

SEQ ID NO: 61659 - DNA, 20 bp, Artificial Sequence
  Description of Artificial Sequence: Synthetic oligonucleotide
  Target: SCNA; (-) strand; PAM type: YTN; PAM sequence: TTC
agaacccaaattagcgcaag

SEQ ID NO: 61660 - DNA, 20 bp, Artificial Sequence
  Description of Artificial Sequence: Synthetic oligonucleotide
  Target: SCNA; (-) strand; PAM type: YTN; PAM sequence: TTT
cagaacccaaattagcgcaa

SEQ ID NO: 61661 - DNA, 20 bp, Artificial Sequence
  Description of Artificial Sequence: Synthetic oligonucleotide
  Target: SCNA; (-) strand; PAM type: YTN; PAM sequence: CTC
aaatttcagaacccaaatta

SEQ ID NO: 61662 - DNA, 20 bp, Artificial Sequence
  Description of Artificial Sequence: Synthetic oligonucleotide
  Target: SCNA; (-) strand; PAM type: YTN; PAM sequence: TTA
ctcaaatttcagaacccaaa

SEQ ID NO: 61663 - DNA, 20 bp, Artificial Sequence
  Description of Artificial Sequence: Synthetic oligonucleotide
  Target: SCNA; (-) strand; PAM type: YTN; PAM sequence: TTT
actcaaatttcagaacccaa

SEQ ID NO: 61664 - DNA, 20 bp, Artificial Sequence
  Description of Artificial Sequence: Synthetic oligonucleotide
  Target: SCNA; (-) strand; PAM type: YTN; PAM sequence: TTT
tactcaaatttcagaaccca

SEQ ID NO: 61665 - DNA, 20 bp, Artificial Sequence
  Description of Artificial Sequence: Synthetic oligonucleotide
  Target: SCNA; (-) strand; PAM type: YTN; PAM sequence: TTG
attttactcaaatttcagaa

SEQ ID NO: 61666 - DNA, 20 bp, Artificial Sequence
  Description of Artificial Sequence: Synthetic oligonucleotide
  Target: SCNA; (-) strand; PAM type: YTN; PAM sequence: TTT
gattttactcaaatttcaga

SEQ ID NO: 61667 - DNA, 20 bp, Artificial Sequence
  Description of Artificial Sequence: Synthetic oligonucleotide
  Target: SCNA; (-) strand; PAM type: YTN; PAM sequence: TTA
aatttgattttactcaaatt

SEQ ID NO: 61668 - DNA, 20 bp, Artificial Sequence
  Description of Artificial Sequence: Synthetic oligonucleotide
  Target: SCNA; (-) strand; PAM type: YTN; PAM sequence: TTT
aaatttgattttactcaaat

SEQ ID NO: 61669 - DNA, 20 bp, Artificial Sequence
  Description of Artificial Sequence: Synthetic oligonucleotide
  Target: SCNA; (-) strand; PAM type: YTN; PAM sequence: TTG
tatgtttaaatttgatttta

SEQ ID NO: 61670 - DNA, 20 bp, Artificial Sequence
  Description of Artificial Sequence: Synthetic oligonucleotide
  Target: SCNA; (-) strand; PAM type: YTN; PAM sequence: TTT
gtatgtttaaatttgatttt

SEQ ID NO: 61671 - DNA, 20 bp, Artificial Sequence
  Description of Artificial Sequence: Synthetic oligonucleotide
  Target: SCNA; (-) strand; PAM type: YTN; PAM sequence: TTT
tgtatgtttaaatttgattt

SEQ ID NO: 61672 - DNA, 20 bp, Artificial Sequence
  Description of Artificial Sequence: Synthetic oligonucleotide
  Target: SCNA; (-) strand; PAM type: YTN; PAM sequence: TTG
ttttgtatgtttaaatttga

SEQ ID NO: 61673 - DNA, 20 bp, Artificial Sequence
  Description of Artificial Sequence: Synthetic oligonucleotide
  Target: SCNA; (-) strand; PAM type: YTN; PAM sequence: TTA
aagttgttttgtatgtttaa

SEQ ID NO: 61674 - DNA, 20 bp, Artificial Sequence
  Description of Artificial Sequence: Synthetic oligonucleotide
  Target: SCNA; (-) strand; PAM type: YTN; PAM sequence: TTT
aaagttgttttgtatgttta

SEQ ID NO: 61675 - DNA, 20 bp, Artificial Sequence
  Description of Artificial Sequence: Synthetic oligonucleotide
  Target: SCNA; (-) strand; PAM type: YTN; PAM sequence: TTT
taaagttgttttgtatgttt

SEQ ID NO: 61676 - DNA, 20 bp, Artificial Sequence
  Description of Artificial Sequence: Synthetic oligonucleotide
  Target: SCNA; (-) strand; PAM type: YTN; PAM sequence: TTG
tggttttaaagttgttttgt

SEQ ID NO: 61677 - DNA, 20 bp, Artificial Sequence
  Description of Artificial Sequence: Synthetic oligonucleotide
  Target: SCNA; (-) strand; PAM type: YTN; PAM sequence: CTT
gtggttttaaagttgttttg

SEQ ID NO: 61678 - DNA, 20 bp, Artificial Sequence
  Description of Artificial Sequence: Synthetic oligonucleotide
  Target: SCNA; (-) strand; PAM type: YTN; PAM sequence: TTC
cttgtggttttaaagttgtt

SEQ ID NO: 61679 - DNA, 20 bp, Artificial Sequence
  Description of Artificial Sequence: Synthetic oligonucleotide
  Target: SCNA; (-) strand; PAM type: YTN; PAM sequence: CTG
ttccttgtggttttaaagtt

SEQ ID NO: 61680 - DNA, 20 bp, Artificial Sequence
  Description of Artificial Sequence: Synthetic oligonucleotide
  Target: SCNA; (-) strand; PAM type: YTN; PAM sequence: TTC
ctgttccttgtggttttaaa

SEQ ID NO: 61681 - DNA, 20 bp, Artificial Sequence
  Description of Artificial Sequence: Synthetic oligonucleotide
  Target: SCNA; (-) strand; PAM type: YTN; PAM sequence: CTT
cctgttccttgtggttttaa

SEQ ID NO: 61682 - DNA, 20 bp, Artificial Sequence
  Description of Artificial Sequence: Synthetic oligonucleotide
  Target: SCNA; (-) strand; PAM type: YTN; PAM sequence: TTG
cttcctgttccttgtggttt

SEQ ID NO: 61683 - DNA, 20 bp, Artificial Sequence
  Description of Artificial Sequence: Synthetic oligonucleotide
  Target: SCNA; (-) strand; PAM type: YTN; PAM sequence: TTT
gcttcctgttccttgtggtt

SEQ ID NO: 61684 - DNA, 20 bp, Artificial Sequence
  Description of Artificial Sequence: Synthetic oligonucleotide
  Target: SCNA; (-) strand; PAM type: YTN; PAM sequence: TTA
tgtataatcatttgcttcct

SEQ ID NO: 61685 - DNA, 20 bp, Artificial Sequence
  Description of Artificial Sequence: Synthetic oligonucleotide
  Target: SCNA; (-) strand; PAM type: YTN; PAM sequence: TTT
atgtataatcatttgcttcc

SEQ ID NO: 61686 - DNA, 20 bp, Artificial Sequence
  Description of Artificial Sequence: Synthetic oligonucleotide
  Target: SCNA; (-) strand; PAM type: YTN; PAM sequence: TTT
tatgtataatcatttgcttc

SEQ ID NO: 61687 - DNA, 20 bp, Artificial Sequence
  Description of Artificial Sequence: Synthetic oligonucleotide
  Target: SCNA; (-) strand; PAM type: YTN; PAM sequence: CTT
ttatgtataatcatttgctt

SEQ ID NO: 61688 - DNA, 20 bp, Artificial Sequence
  Description of Artificial Sequence: Synthetic oligonucleotide
  Target: SCNA; (-) strand; PAM type: YTN; PAM sequence: CTA
tatgtcttttatgtataatc

SEQ ID NO: 61689 - DNA, 20 bp, Artificial Sequence
  Description of Artificial Sequence: Synthetic oligonucleotide
  Target: SCNA; (-) strand; PAM type: YTN; PAM sequence: TTC
tatatgtcttttatgtataa

SEQ ID NO: 61690 - DNA, 20 bp, Artificial Sequence
  Description of Artificial Sequence: Synthetic oligonucleotide
  Target: SCNA; (-) strand; PAM type: YTN; PAM sequence: CTT
ctatatgtcttttatgtata

SEQ ID NO: 61691 - DNA, 20 bp, Artificial Sequence
  Description of Artificial Sequence: Synthetic oligonucleotide
  Target: SCNA; (-) strand; PAM type: YTN; PAM sequence: TTA
tcttctatatgtcttttatg

SEQ ID NO: 61692 - DNA, 20 bp, Artificial Sequence
  Description of Artificial Sequence: Synthetic oligonucleotide
  Target: SCNA; (-) strand; PAM type: YTN; PAM sequence: CTG
aacacatatgcattatcttc

SEQ ID NO: 61693 - DNA, 20 bp, Artificial Sequence
  Description of Artificial Sequence: Synthetic oligonucleotide
  Target: SCNA; (-) strand; PAM type: YTN; PAM sequence: TTC
cactgaacacatatgcatta

SEQ ID NO: 61694 - DNA, 20 bp, Artificial Sequence
  Description of Artificial Sequence: Synthetic oligonucleotide
  Target: SCNA; (-) strand; PAM type: YTN; PAM sequence: TTT
ccactgaacacatatgcatt

SEQ ID NO: 61695 - DNA, 20 bp, Artificial Sequence
  Description of Artificial Sequence: Synthetic oligonucleotide
  Target: SCNA; (-) strand; PAM type: YTN; PAM sequence: TTT
tccactgaacacatatgcat

SEQ ID NO: 61696 - DNA, 20 bp, Artificial Sequence
  Description of Artificial Sequence: Synthetic oligonucleotide
  Target: SCNA; (-) strand; PAM type: YTN; PAM sequence: CTA
ttttccactgaacacatatg

SEQ ID NO: 61697 - DNA, 20 bp, Artificial Sequence
  Description of Artificial Sequence: Synthetic oligonucleotide
  Target: SCNA; (-) strand; PAM type: YTN; PAM sequence: TTC
tattttccactgaacacata

SEQ ID NO: 61698 - DNA, 20 bp, Artificial Sequence
  Description of Artificial Sequence: Synthetic oligonucleotide
  Target: SCNA; (-) strand; PAM type: YTN; PAM sequence: TTT
ctattttccactgaacacat

SEQ ID NO: 61699 - DNA, 20 bp, Artificial Sequence
  Description of Artificial Sequence: Synthetic oligonucleotide
  Target: SCNA; (-) strand; PAM type: YTN; PAM sequence: TTT
tctattttccactgaacaca

SEQ ID NO: 61700 - DNA, 20 bp, Artificial Sequence
  Description of Artificial Sequence: Synthetic oligonucleotide
  Target: SCNA; (-) strand; PAM type: YTN; PAM sequence: CTT
ttctattttccactgaacac

SEQ ID NO: 61701 - DNA, 20 bp, Artificial Sequence
  Description of Artificial Sequence: Synthetic oligonucleotide
  Target: SCNA; (-) strand; PAM type: YTN; PAM sequence: TTC
atgcttttctattttccact

SEQ ID NO: 61702 - DNA, 20 bp, Artificial Sequence
  Description of Artificial Sequence: Synthetic oligonucleotide
  Target: SCNA; (-) strand; PAM type: YTN; PAM sequence: TTT
catgcttttctattttccac

SEQ ID NO: 61703 - DNA, 20 bp, Artificial Sequence
  Description of Artificial Sequence: Synthetic oligonucleotide
  Target: SCNA; (-) strand; PAM type: YTN; PAM sequence: CTT
tcatgcttttctattttcca

SEQ ID NO: 61704 - DNA, 20 bp, Artificial Sequence
  Description of Artificial Sequence: Synthetic oligonucleotide
  Target: SCNA; (-) strand; PAM type: YTN; PAM sequence: TTA
ctttcatgcttttctatttt

SEQ ID NO: 61705 - DNA, 20 bp, Artificial Sequence
  Description of Artificial Sequence: Synthetic oligonucleotide
  Target: SCNA; (-) strand; PAM type: YTN; PAM sequence: CTT
actttcatgcttttctattt

SEQ ID NO: 61706 - DNA, 20 bp, Artificial Sequence
  Description of Artificial Sequence: Synthetic oligonucleotide
  Target: SCNA; (-) strand; PAM type: YTN; PAM sequence: TTG
tgatcttactttcatgcttt

SEQ ID NO: 61707 - DNA, 20 bp, Artificial Sequence
  Description of Artificial Sequence: Synthetic oligonucleotide
  Target: SCNA; (-) strand; PAM type: YTN; PAM sequence: TTT
gtgatcttactttcatgctt

SEQ ID NO: 61708 - DNA, 20 bp, Artificial Sequence
  Description of Artificial Sequence: Synthetic oligonucleotide
  Target: SCNA; (-) strand; PAM type: YTN; PAM sequence: TTA
aataataaatatttgtgatc

SEQ ID NO: 61709 - DNA, 20 bp, Artificial Sequence
  Description of Artificial Sequence: Synthetic oligonucleotide
  Target: SCNA; (-) strand; PAM type: YTN; PAM sequence: TTT
aaataataaatatttgtgat

SEQ ID NO: 61710 - DNA, 20 bp, Artificial Sequence
  Description of Artificial Sequence: Synthetic oligonucleotide
  Target: SCNA; (-) strand; PAM type: YTN; PAM sequence: TTC
aaggaagagtttaaataata

SEQ ID NO: 61711 - DNA, 20 bp, Artificial Sequence
  Description of Artificial Sequence: Synthetic oligonucleotide
  Target: SCNA; (-) strand; PAM type: YTN; PAM sequence: TTC
caaagggcagaccaatagtt

SEQ ID NO: 61712 - DNA, 20 bp, Artificial Sequence
  Description of Artificial Sequence: Synthetic oligonucleotide
  Target: SCNA; (-) strand; PAM type: YTN; PAM sequence: TTT
ccaaagggcagaccaatagt

SEQ ID NO: 61713 - DNA, 20 bp, Artificial Sequence
  Description of Artificial Sequence: Synthetic oligonucleotide
  Target: SCNA; (-) strand; PAM type: YTN; PAM sequence: TTT
tccaaagggcagaccaatag

SEQ ID NO: 61714 - DNA, 20 bp, Artificial Sequence
  Description of Artificial Sequence: Synthetic oligonucleotide
  Target: SCNA; (-) strand; PAM type: YTN; PAM sequence: CTT
ttccaaagggcagaccaata

SEQ ID NO: 61715 - DNA, 20 bp, Artificial Sequence
  Description of Artificial Sequence: Synthetic oligonucleotide
  Target: SCNA; (-) strand; PAM type: YTN; PAM sequence: CTG
cttttccaaagggcagacca

SEQ ID NO: 61716 - DNA, 20 bp, Artificial Sequence
  Description of Artificial Sequence: Synthetic oligonucleotide
  Target: SCNA; (-) strand; PAM type: YTN; PAM sequence: TTA
aggaaagtctgcttttccaa

SEQ ID NO: 61717 - DNA, 20 bp, Artificial Sequence
  Description of Artificial Sequence: Synthetic oligonucleotide
  Target: SCNA; (-) strand; PAM type: YTN; PAM sequence: CTG
cattaaggaaagtctgcttt

SEQ ID NO: 61718 - DNA, 20 bp, Artificial Sequence
  Description of Artificial Sequence: Synthetic oligonucleotide
  Target: SCNA; (-) strand; PAM type: YTN; PAM sequence: CTA
ctgcattaaggaaagtctgc

SEQ ID NO: 61719 - DNA, 20 bp, Artificial Sequence
  Description of Artificial Sequence: Synthetic oligonucleotide
  Target: SCNA; (-) strand; PAM type: YTN; PAM sequence: TTA
atatgagctactgcattaag

SEQ ID NO: 61720 - DNA, 20 bp, Artificial Sequence
  Description of Artificial Sequence: Synthetic oligonucleotide
  Target: SCNA; (-) strand; PAM type: YTN; PAM sequence: CTA
agcaaacaaaaaatattaat

SEQ ID NO: 61721 - DNA, 20 bp, Artificial Sequence
  Description of Artificial Sequence: Synthetic oligonucleotide
  Target: SCNA; (-) strand; PAM type: YTN; PAM sequence: CTG
gtcctaagcaaacaaaaaat

SEQ ID NO: 61722 - DNA, 20 bp, Artificial Sequence
  Description of Artificial Sequence: Synthetic oligonucleotide
  Target: SCNA; (-) strand; PAM type: YTN; PAM sequence: CTC
tggtcctaagcaaacaaaaa

SEQ ID NO: 61723 - DNA, 20 bp, Artificial Sequence
  Description of Artificial Sequence: Synthetic oligonucleotide
  Target: SCNA; (-) strand; PAM type: YTN; PAM sequence: TTG
ctctggtcctaagcaaacaa

SEQ ID NO: 61724 - DNA, 20 bp, Artificial Sequence
  Description of Artificial Sequence: Synthetic oligonucleotide
  Target: SCNA; (-) strand; PAM type: YTN; PAM sequence: CTT
gctctggtcctaagcaaaca

SEQ ID NO: 61725 - DNA, 20 bp, Artificial Sequence
  Description of Artificial Sequence: Synthetic oligonucleotide
  Target: SCNA; (-) strand; PAM type: YTN; PAM sequence: TTC
ttgctctggtcctaagcaaa

SEQ ID NO: 61726 - DNA, 20 bp, Artificial Sequence
  Description of Artificial Sequence: Synthetic oligonucleotide
  Target: SCNA; (-) strand; PAM type: YTN; PAM sequence: CTT
cttgctctggtcctaagcaa

SEQ ID NO: 61727 - DNA, 20 bp, Artificial Sequence
  Description of Artificial Sequence: Synthetic oligonucleotide
  Target: SCNA; (-) strand; PAM type: YTN; PAM sequence: CTC
ccaagtccaaccttcttgct

SEQ ID NO: 61728 - DNA, 20 bp, Artificial Sequence
  Description of Artificial Sequence: Synthetic oligonucleotide
  Target: SCNA; (-) strand; PAM type: YTN; PAM sequence: CTA
gctcccaagtccaaccttct

SEQ ID NO: 61729 - DNA, 20 bp, Artificial Sequence
  Description of Artificial Sequence: Synthetic oligonucleotide
  Target: SCNA; (-) strand; PAM type: YTN; PAM sequence: CTC
aaagccagacagcaaactag

SEQ ID NO: 61730 - DNA, 20 bp, Artificial Sequence
  Description of Artificial Sequence: Synthetic oligonucleotide
  Target: SCNA; (-) strand; PAM type: YTN; PAM sequence: TTC
aaggtctcaaagccagacag

SEQ ID NO: 61731 - DNA, 20 bp, Artificial Sequence
  Description of Artificial Sequence: Synthetic oligonucleotide
  Target: SCNA; (-) strand; PAM type: YTN; PAM sequence: TTG
ttcaaggtctcaaagccaga

SEQ ID NO: 61732 - DNA, 20 bp, Artificial Sequence
  Description of Artificial Sequence: Synthetic oligonucleotide
  Target: SCNA; (-) strand; PAM type: YTN; PAM sequence: CTT
gttcaaggtctcaaagccag

SEQ ID NO: 61733 - DNA, 20 bp, Artificial Sequence
  Description of Artificial Sequence: Synthetic oligonucleotide
  Target: SCNA; (-) strand; PAM type: YTN; PAM sequence: CTG
gaaacagaaggagaacaaaa

SEQ ID NO: 61734 - DNA, 20 bp, Artificial Sequence
  Description of Artificial Sequence: Synthetic oligonucleotide
  Target: SCNA; (-) strand; PAM type: YTN; PAM sequence: TTA
caaaaaagaaaactggaaac

SEQ ID NO: 61735 - DNA, 20 bp, Artificial Sequence
  Description of Artificial Sequence: Synthetic oligonucleotide
  Target: SCNA; (-) strand; PAM type: YTN; PAM sequence: TTT
acaaaaaagaaaactggaaa

SEQ ID NO: 61736 - DNA, 20 bp, Artificial Sequence
  Description of Artificial Sequence: Synthetic oligonucleotide
  Target: SCNA; (-) strand; PAM type: YTN; PAM sequence: CTA
atttacaaaaaagaaaactg

SEQ ID NO: 61737 - DNA, 20 bp, Artificial Sequence
  Description of Artificial Sequence: Synthetic oligonucleotide
  Target: SCNA; (-) strand; PAM type: YTN; PAM sequence: CTC
ctaatttacaaaaaagaaaa

SEQ ID NO: 61738 - DNA, 20 bp, Artificial Sequence
  Description of Artificial Sequence: Synthetic oligonucleotide
  Target: SCNA; (-) strand; PAM type: YTN; PAM sequence: TTA
atctcctaatttacaaaaaa

SEQ ID NO: 61739 - DNA, 20 bp, Artificial Sequence
  Description of Artificial Sequence: Synthetic oligonucleotide
  Target: SCNA; (-) strand; PAM type: YTN; PAM sequence: TTG
aaaatagagtgatcacatga

SEQ ID NO: 61740 - DNA, 20 bp, Artificial Sequence
  Description of Artificial Sequence: Synthetic oligonucleotide
  Target: SCNA; (-) strand; PAM type: YTN; PAM sequence: TTC
ccataacaaaaagttgaaaa

SEQ ID NO: 61741 - DNA, 20 bp, Artificial Sequence
  Description of Artificial Sequence: Synthetic oligonucleotide
  Target: SCNA; (-) strand; PAM type: YTN; PAM sequence: TTT
cccataacaaaaagttgaaa

SEQ ID NO: 61742 - DNA, 20 bp, Artificial Sequence
  Description of Artificial Sequence: Synthetic oligonucleotide
  Target: SCNA; (-) strand; PAM type: YTN; PAM sequence: TTG
aatatttcccataacaaaaa

SEQ ID NO: 61743 - DNA, 20 bp, Artificial Sequence
  Description of Artificial Sequence: Synthetic oligonucleotide
  Target: SCNA; (-) strand; PAM type: YTN; PAM sequence: TTT
gaatatttcccataacaaaa

SEQ ID NO: 61744 - DNA, 20 bp, Artificial Sequence
  Description of Artificial Sequence: Synthetic oligonucleotide
  Target: SCNA; (-) strand; PAM type: YTN; PAM sequence: TTG
catatgtttgaatatttccc

SEQ ID NO: 61745 - DNA, 20 bp, Artificial Sequence
  Description of Artificial Sequence: Synthetic oligonucleotide
  Target: SCNA; (-) strand; PAM type: YTN; PAM sequence: TTT
gcatatgtttgaatatttcc

SEQ ID NO: 61746 - DNA, 20 bp, Artificial Sequence
  Description of Artificial Sequence: Synthetic oligonucleotide
  Target: SCNA; (-) strand; PAM type: YTN; PAM sequence: TTT
tgcatatgtttgaatatttc

SEQ ID NO: 61747 - DNA, 20 bp, Artificial Sequence
  Description of Artificial Sequence: Synthetic oligonucleotide
  Target: SCNA; (-) strand; PAM type: YTN; PAM sequence: CTT
ttgcatatgtttgaatattt

SEQ ID NO: 61748 - DNA, 20 bp, Artificial Sequence
  Description of Artificial Sequence: Synthetic oligonucleotide
  Target: SCNA; (-) strand; PAM type: YTN; PAM sequence: CTA
cttttgcatatgtttgaata

SEQ ID NO: 61749 - DNA, 20 bp, Artificial Sequence
  Description of Artificial Sequence: Synthetic oligonucleotide
  Target: SCNA; (-) strand; PAM type: YTN; PAM sequence: CTG
tctacttttgcatatgtttg

SEQ ID NO: 61750 - DNA, 20 bp, Artificial Sequence
  Description of Artificial Sequence: Synthetic oligonucleotide
  Target: SCNA; (-) strand; PAM type: YTN; PAM sequence: TTC
tgtctacttttgcatatgtt

SEQ ID NO: 61751 - DNA, 20 bp, Artificial Sequence
  Description of Artificial Sequence: Synthetic oligonucleotide
  Target: SCNA; (-) strand; PAM type: YTN; PAM sequence: TTA
ttctgtctacttttgcatat

SEQ ID NO: 61752 - DNA, 20 bp, Artificial Sequence
  Description of Artificial Sequence: Synthetic oligonucleotide
  Target: SCNA; (-) strand; PAM type: YTN; PAM sequence: TTT
attctgtctacttttgcata

SEQ ID NO: 61753 - DNA, 20 bp, Artificial Sequence
  Description of Artificial Sequence: Synthetic oligonucleotide
  Target: SCNA; (-) strand; PAM type: YTN; PAM sequence: CTT
tattctgtctacttttgcat

SEQ ID NO: 61754 - DNA, 20 bp, Artificial Sequence
  Description of Artificial Sequence: Synthetic oligonucleotide
  Target: SCNA; (-) strand; PAM type: YTN; PAM sequence: TTC
acatgagagtcctttattct

SEQ ID NO: 61755 - DNA, 20 bp, Artificial Sequence
  Description of Artificial Sequence: Synthetic oligonucleotide
  Target: SCNA; (-) strand; PAM type: YTN; PAM sequence: CTT
cacatgagagtcctttattc

SEQ ID NO: 61756 - DNA, 20 bp, Artificial Sequence
  Description of Artificial Sequence: Synthetic oligonucleotide
  Target: SCNA; (-) strand; PAM type: YTN; PAM sequence: TTG
gatgatcttcacatgagagt

SEQ ID NO: 61757 - DNA, 20 bp, Artificial Sequence
  Description of Artificial Sequence: Synthetic oligonucleotide
  Target: SCNA; (-) strand; PAM type: YTN; PAM sequence: TTG
aaaaaatgtaaaagttggat

SEQ ID NO: 61758 - DNA, 20 bp, Artificial Sequence
  Description of Artificial Sequence: Synthetic oligonucleotide
  Target: SCNA; (-) strand; PAM type: YTN; PAM sequence: TTA
tggatgagacatgatcagcc

SEQ ID NO: 61759 - DNA, 20 bp, Artificial Sequence
  Description of Artificial Sequence: Synthetic oligonucleotide
  Target: SCNA; (-) strand; PAM type: YTN; PAM sequence: CTT
atggatgagacatgatcagc

SEQ ID NO: 61760 - DNA, 20 bp, Artificial Sequence
  Description of Artificial Sequence: Synthetic oligonucleotide
  Target: SCNA; (-) strand; PAM type: YTN; PAM sequence: TTG
gtagtgataaagtgagtgga

SEQ ID NO: 61761 - DNA, 20 bp, Artificial Sequence
  Description of Artificial Sequence: Synthetic oligonucleotide
  Target: SCNA; (-) strand; PAM type: YTN; PAM sequence: TTG
gtaaaaaaaaaaaaaaaaga

SEQ ID NO: 61762 - DNA, 20 bp, Artificial Sequence
  Description of Artificial Sequence: Synthetic oligonucleotide
  Target: SCNA; (-) strand; PAM type: YTN; PAM sequence: TTT
ggtaaaaaaaaaaaaaaaag

SEQ ID NO: 61763 - DNA, 20 bp, Artificial Sequence
  Description of Artificial Sequence: Synthetic oligonucleotide
  Target: SCNA; (-) strand; PAM type: YTN; PAM sequence: TTG
aatttggtaaaaaaaaaaaa

SEQ ID NO: 61764 - DNA, 20 bp, Artificial Sequence
  Description of Artificial Sequence: Synthetic oligonucleotide
  Target: SCNA; (-) strand; PAM type: YTN; PAM sequence: CTT
gaatttggtaaaaaaaaaaa

SEQ ID NO: 61765 - DNA, 20 bp, Artificial Sequence
  Description of Artificial Sequence: Synthetic oligonucleotide
  Target: SCNA; (-) strand; PAM type: YTN; PAM sequence: CTG
aaaagatatatataaagctt

SEQ ID NO: 61766 - DNA, 20 bp, Artificial Sequence
  Description of Artificial Sequence: Synthetic oligonucleotide
  Target: SCNA; (-) strand; PAM type: YTN; PAM sequence: TTA
cagctgaaaagatatatata

SEQ ID NO: 61767 - DNA, 20 bp, Artificial Sequence
  Description of Artificial Sequence: Synthetic oligonucleotide
  Target: SCNA; (-) strand; PAM type: YTN; PAM sequence: TTT
acagctgaaaagatatatat

SEQ ID NO: 61768 - DNA, 20 bp, Artificial Sequence
  Description of Artificial Sequence: Synthetic oligonucleotide
  Target: SCNA; (-) strand; PAM type: YTN; PAM sequence: CTG
aatgtttacagctgaaaaga

SEQ ID NO: 61769 - DNA, 20 bp, Artificial Sequence
  Description of Artificial Sequence: Synthetic oligonucleotide
  Target: SCNA; (-) strand; PAM type: YTN; PAM sequence: TTG
tggatgcatactgaatgttt

SEQ ID NO: 61770 - DNA, 20 bp, Artificial Sequence
  Description of Artificial Sequence: Synthetic oligonucleotide
  Target: SCNA; (-) strand; PAM type: YTN; PAM sequence: TTT
gtggatgcatactgaatgtt

SEQ ID NO: 61771 - DNA, 20 bp, Artificial Sequence
  Description of Artificial Sequence: Synthetic oligonucleotide
  Target: SCNA; (-) strand; PAM type: YTN; PAM sequence: TTT
tgtggatgcatactgaatgt

SEQ ID NO: 61772 - DNA, 20 bp, Artificial Sequence
  Description of Artificial Sequence: Synthetic oligonucleotide
  Target: SCNA; (-) strand; PAM type: YTN; PAM sequence: TTA
aattttgtggatgcatactg

SEQ ID NO: 61773 - DNA, 20 bp, Artificial Sequence
  Description of Artificial Sequence: Synthetic oligonucleotide
  Target: SCNA; (-) strand; PAM type: YTN; PAM sequence: CTT
aaattttgtggatgcatact

SEQ ID NO: 61774 - DNA, 20 bp, Artificial Sequence
  Description of Artificial Sequence: Synthetic oligonucleotide
  Target: SCNA; (-) strand; PAM type: YTN; PAM sequence: TTA
aacagtccttaaattttgtg

SEQ ID NO: 61775 - DNA, 20 bp, Artificial Sequence
  Description of Artificial Sequence: Synthetic oligonucleotide
  Target: SCNA; (-) strand; PAM type: YTN; PAM sequence: TTT
aaacagtccttaaattttgt

SEQ ID NO: 61776 - DNA, 20 bp, Artificial Sequence
  Description of Artificial Sequence: Synthetic oligonucleotide
  Target: SCNA; (-) strand; PAM type: YTN; PAM sequence: TTT
taaacagtccttaaattttg

SEQ ID NO: 61777 - DNA, 20 bp, Artificial Sequence
  Description of Artificial Sequence: Synthetic oligonucleotide
  Target: SCNA; (-) strand; PAM type: YTN; PAM sequence: TTT
ttaaacagtccttaaatttt

SEQ ID NO: 61778 - DNA, 20 bp, Artificial Sequence
  Description of Artificial Sequence: Synthetic oligonucleotide
  Target: SCNA; (-) strand; PAM type: YTN; PAM sequence: TTA
tttttaaacagtccttaaat

SEQ ID NO: 61779 - DNA, 20 bp, Artificial Sequence
  Description of Artificial Sequence: Synthetic oligonucleotide
  Target: SCNA; (-) strand; PAM type: YTN; PAM sequence: TTG
tggttatttttaaacagtcc

SEQ ID NO: 61780 - DNA, 20 bp, Artificial Sequence
  Description of Artificial Sequence: Synthetic oligonucleotide
  Target: SCNA; (-) strand; PAM type: YTN; PAM sequence: CTA
atgatattgtggttattttt

SEQ ID NO: 61781 - DNA, 20 bp, Artificial Sequence
  Description of Artificial Sequence: Synthetic oligonucleotide
  Target: SCNA; (-) strand; PAM type: YTN; PAM sequence: TTA
aagaatcatctaatgatatt

SEQ ID NO: 61782 - DNA, 20 bp, Artificial Sequence
  Description of Artificial Sequence: Synthetic oligonucleotide
  Target: SCNA; (-) strand; PAM type: YTN; PAM sequence: TTT
aaagaatcatctaatgatat

SEQ ID NO: 61783 - DNA, 20 bp, Artificial Sequence
  Description of Artificial Sequence: Synthetic oligonucleotide
  Target: SCNA; (-) strand; PAM type: YTN; PAM sequence: TTT
taaagaatcatctaatgata

SEQ ID NO: 61784 - DNA, 20 bp, Artificial Sequence
  Description of Artificial Sequence: Synthetic oligonucleotide
  Target: SCNA; (-) strand; PAM type: YTN; PAM sequence: CTG
caattttaaagaatcatcta

SEQ ID NO: 61785 - DNA, 20 bp, Artificial Sequence
  Description of Artificial Sequence: Synthetic oligonucleotide
  Target: SCNA; (-) strand; PAM type: YTN; PAM sequence: TTA
cactgcaattttaaagaatc

SEQ ID NO: 61786 - DNA, 20 bp, Artificial Sequence
  Description of Artificial Sequence: Synthetic oligonucleotide
  Target: SCNA; (-) strand; PAM type: YTN; PAM sequence: CTA
ggtgtaaattacactgcaat

SEQ ID NO: 61787 - DNA, 20 bp, Artificial Sequence
  Description of Artificial Sequence: Synthetic oligonucleotide
  Target: SCNA; (-) strand; PAM type: YTN; PAM sequence: TTC
cctaggtgtaaattacactg

SEQ ID NO: 61788 - DNA, 20 bp, Artificial Sequence
  Description of Artificial Sequence: Synthetic oligonucleotide
  Target: SCNA; (-) strand; PAM type: YTN; PAM sequence: TTT
ccctaggtgtaaattacact

SEQ ID NO: 61789 - DNA, 20 bp, Artificial Sequence
  Description of Artificial Sequence: Synthetic oligonucleotide
  Target: SCNA; (-) strand; PAM type: YTN; PAM sequence: CTG
agcatttccctaggtgtaaa

SEQ ID NO: 61790 - DNA, 20 bp, Artificial Sequence
  Description of Artificial Sequence: Synthetic oligonucleotide
  Target: SCNA; (-) strand; PAM type: YTN; PAM sequence: TTA
aagggacacaacatctgagc

SEQ ID NO: 61791 - DNA, 20 bp, Artificial Sequence
  Description of Artificial Sequence: Synthetic oligonucleotide
  Target: SCNA; (-) strand; PAM type: YTN; PAM sequence: TTT
aaagggacacaacatctgag

SEQ ID NO: 61792 - DNA, 20 bp, Artificial Sequence
  Description of Artificial Sequence: Synthetic oligonucleotide
  Target: SCNA; (-) strand; PAM type: YTN; PAM sequence: CTG
atttaaagggacacaacatc

SEQ ID NO: 61793 - DNA, 20 bp, Artificial Sequence
  Description of Artificial Sequence: Synthetic oligonucleotide
  Target: SCNA; (-) strand; PAM type: YTN; PAM sequence: TTC
aaaactgatttaaagggaca

SEQ ID NO: 61794 - DNA, 20 bp, Artificial Sequence
  Description of Artificial Sequence: Synthetic oligonucleotide
  Target: SCNA; (-) strand; PAM type: YTN; PAM sequence: TTT
caaaactgatttaaagggac

SEQ ID NO: 61795 - DNA, 20 bp, Artificial Sequence
  Description of Artificial Sequence: Synthetic oligonucleotide
  Target: SCNA; (-) strand; PAM type: YTN; PAM sequence: TTT
tcaaaactgatttaaaggga

SEQ ID NO: 61796 - DNA, 20 bp, Artificial Sequence
  Description of Artificial Sequence: Synthetic oligonucleotide
  Target: SCNA; (-) strand; PAM type: YTN; PAM sequence: TTT
ttcaaaactgatttaaaggg

SEQ ID NO: 61797 - DNA, 20 bp, Artificial Sequence
  Description of Artificial Sequence: Synthetic oligonucleotide
  Target: SCNA; (-) strand; PAM type: YTN; PAM sequence: CTT
tttcaaaactgatttaaagg

SEQ ID NO: 61798 - DNA, 20 bp, Artificial Sequence
  Description of Artificial Sequence: Synthetic oligonucleotide
  Target: SCNA; (-) strand; PAM type: YTN; PAM sequence: CTA
atgcatggctttttcaaaac

SEQ ID NO: 61799 - DNA, 20 bp, Artificial Sequence
  Description of Artificial Sequence: Synthetic oligonucleotide
  Target: SCNA; (-) strand; PAM type: YTN; PAM sequence: TTA
cactaatgcatggctttttc

SEQ ID NO: 61800 - DNA, 20 bp, Artificial Sequence
  Description of Artificial Sequence: Synthetic oligonucleotide
  Target: SCNA; (-) strand; PAM type: YTN; PAM sequence: TTC
aaaatagtgtgggttacact

SEQ ID NO: 61801 - DNA, 20 bp, Artificial Sequence
  Description of Artificial Sequence: Synthetic oligonucleotide
  Target: SCNA; (-) strand; PAM type: YTN; PAM sequence: CTT
caaaatagtgtgggttacac

SEQ ID NO: 61802 - DNA, 20 bp, Artificial Sequence
  Description of Artificial Sequence: Synthetic oligonucleotide
  Target: SCNA; (-) strand; PAM type: YTN; PAM sequence: CTG
tgtcttcaaaatagtgtggg

SEQ ID NO: 61803 - DNA, 20 bp, Artificial Sequence
  Description of Artificial Sequence: Synthetic oligonucleotide
  Target: SCNA; (-) strand; PAM type: YTN; PAM sequence: CTG
gaatgatgaaaatgtcctgt

SEQ ID NO: 61804 - DNA, 20 bp, Artificial Sequence
  Description of Artificial Sequence: Synthetic oligonucleotide
  Target: SCNA; (-) strand; PAM type: YTN; PAM sequence: CTG
tctggaatgatgaaaatgtc

SEQ ID NO: 61805 - DNA, 20 bp, Artificial Sequence
  Description of Artificial Sequence: Synthetic oligonucleotide
  Target: SCNA; (-) strand; PAM type: YTN; PAM sequence: CTA
gaatatgcacatgaaggtac

SEQ ID NO: 61806 - DNA, 20 bp, Artificial Sequence
  Description of Artificial Sequence: Synthetic oligonucleotide
  Target: SCNA; (-) strand; PAM type: YTN; PAM sequence: TTC
tagaatatgcacatgaaggt

SEQ ID NO: 61807 - DNA, 20 bp, Artificial Sequence
  Description of Artificial Sequence: Synthetic oligonucleotide
  Target: SCNA; (-) strand; PAM type: YTN; PAM sequence: TTA
tgacattctagaatatgcac

SEQ ID NO: 61808 - DNA, 20 bp, Artificial Sequence
  Description of Artificial Sequence: Synthetic oligonucleotide
  Target: SCNA; (-) strand; PAM type: YTN; PAM sequence: TTT
atgacattctagaatatgca

SEQ ID NO: 61809 - DNA, 20 bp, Artificial Sequence
  Description of Artificial Sequence: Synthetic oligonucleotide
  Target: SCNA; (-) strand; PAM type: YTN; PAM sequence: CTT
tatgacattctagaatatgc

SEQ ID NO: 61810 - DNA, 20 bp, Artificial Sequence
  Description of Artificial Sequence: Synthetic oligonucleotide
  Target: SCNA; (-) strand; PAM type: YTN; PAM sequence: TTA
gatctttatgacattctaga

SEQ ID NO: 61811 - DNA, 20 bp, Artificial Sequence
  Description of Artificial Sequence: Synthetic oligonucleotide
  Target: SCNA; (-) strand; PAM type: YTN; PAM sequence: CTA
cgtgattagatctttatgac

SEQ ID NO: 61812 - DNA, 20 bp, Artificial Sequence
  Description of Artificial Sequence: Synthetic oligonucleotide
  Target: SCNA; (-) strand; PAM type: YTN; PAM sequence: TTA
tactacgtgattagatcttt

SEQ ID NO: 61813 - DNA, 20 bp, Artificial Sequence
  Description of Artificial Sequence: Synthetic oligonucleotide
  Target: SCNA; (-) strand; PAM type: YTN; PAM sequence: TTT
atactacgtgattagatctt

SEQ ID NO: 61814 - DNA, 20 bp, Artificial Sequence
  Description of Artificial Sequence: Synthetic oligonucleotide
  Target: SCNA; (-) strand; PAM type: YTN; PAM sequence: CTG
agtaaaagaagtcagacaaa

SEQ ID NO: 61815 - DNA, 20 bp, Artificial Sequence
  Description of Artificial Sequence: Synthetic oligonucleotide
  Target: SCNA; (-) strand; PAM type: YTN; PAM sequence: TTA
tactgagtaaaagaagtcag

SEQ ID NO: 61816 - DNA, 20 bp, Artificial Sequence
  Description of Artificial Sequence: Synthetic oligonucleotide
  Target: SCNA; (-) strand; PAM type: YTN; PAM sequence: CTC
acaaatattatactgagtaa

SEQ ID NO: 61817 - DNA, 20 bp, Artificial Sequence
  Description of Artificial Sequence: Synthetic oligonucleotide
  Target: SCNA; (-) strand; PAM type: YTN; PAM sequence: TTC
atgcaacgacatgaacgaac

SEQ ID NO: 61818 - DNA, 20 bp, Artificial Sequence
  Description of Artificial Sequence: Synthetic oligonucleotide
  Target: SCNA; (-) strand; PAM type: YTN; PAM sequence: TTA
acagtagtaaaaagaaacaa

SEQ ID NO: 61819 - DNA, 20 bp, Artificial Sequence
  Description of Artificial Sequence: Synthetic oligonucleotide
  Target: SCNA; (-) strand; PAM type: YTN; PAM sequence: CTA
ttaacagtagtaaaaagaaa

SEQ ID NO: 61820 - DNA, 20 bp, Artificial Sequence
  Description of Artificial Sequence: Synthetic oligonucleotide
  Target: SCNA; (-) strand; PAM type: YTN; PAM sequence: TTA
tactattaacagtagtaaaa

SEQ ID NO: 61821 - DNA, 20 bp, Artificial Sequence
  Description of Artificial Sequence: Synthetic oligonucleotide
  Target: SCNA; (-) strand; PAM type: YTN; PAM sequence: CTT
atactattaacagtagtaaa

SEQ ID NO: 61822 - DNA, 20 bp, Artificial Sequence
  Description of Artificial Sequence: Synthetic oligonucleotide
  Target: SCNA; (-) strand; PAM type: YTN; PAM sequence: TTG
taaagaggcacaatggaaaa

SEQ ID NO: 61823 - DNA, 20 bp, Artificial Sequence
  Description of Artificial Sequence: Synthetic oligonucleotide
  Target: SCNA; (-) strand; PAM type: YTN; PAM sequence: CTA
gttgtaaagaggcacaatgg

SEQ ID NO: 61824 - DNA, 20 bp, Artificial Sequence
  Description of Artificial Sequence: Synthetic oligonucleotide
  Target: SCNA; (-) strand; PAM type: YTN; PAM sequence: TTG
agatactagttgtaaagagg

SEQ ID NO: 61825 - DNA, 20 bp, Artificial Sequence
  Description of Artificial Sequence: Synthetic oligonucleotide
  Target: SCNA; (-) strand; PAM type: YTN; PAM sequence: CTA
ttgagatactagttgtaaag

SEQ ID NO: 61826 - DNA, 20 bp, Artificial Sequence
  Description of Artificial Sequence: Synthetic oligonucleotide
  Target: SCNA; (-) strand; PAM type: YTN; PAM sequence: CTC
tattgagatactagttgtaa

SEQ ID NO: 61827 - DNA, 20 bp, Artificial Sequence
  Description of Artificial Sequence: Synthetic oligonucleotide
  Target: SCNA; (-) strand; PAM type: YTN; PAM sequence: TTG
taatactctattgagatact

SEQ ID NO: 61828 - DNA, 20 bp, Artificial Sequence
  Description of Artificial Sequence: Synthetic oligonucleotide
  Target: SCNA; (-) strand; PAM type: YTN; PAM sequence: TTG
ttgtaatactctattgagat

SEQ ID NO: 61829 - DNA, 20 bp, Artificial Sequence
  Description of Artificial Sequence: Synthetic oligonucleotide
  Target: SCNA; (-) strand; PAM type: YTN; PAM sequence: TTA
aataattgttgtaatactct

SEQ ID NO: 61830 - DNA, 20 bp, Artificial Sequence
  Description of Artificial Sequence: Synthetic oligonucleotide
  Target: SCNA; (-) strand; PAM type: YTN; PAM sequence: CTA
taaatatgtcatgtgaaata

SEQ ID NO: 61831 - DNA, 20 bp, Artificial Sequence
  Description of Artificial Sequence: Synthetic oligonucleotide
  Target: SCNA; (-) strand; PAM type: YTN; PAM sequence: TTA
tactataaatatgtcatgtg

SEQ ID NO: 61832 - DNA, 20 bp, Artificial Sequence
  Description of Artificial Sequence: Synthetic oligonucleotide
  Target: SCNA; (-) strand; PAM type: YTN; PAM sequence: CTC
aaggaggtcatggttatact

SEQ ID NO: 61833 - DNA, 20 bp, Artificial Sequence
  Description of Artificial Sequence: Synthetic oligonucleotide
  Target: SCNA; (-) strand; PAM type: YTN; PAM sequence: CTA
ggtctcaaggaggtcatggt

SEQ ID NO: 61834 - DNA, 20 bp, Artificial Sequence
  Description of Artificial Sequence: Synthetic oligonucleotide
  Target: SCNA; (-) strand; PAM type: YTN; PAM sequence: TTA
aagcactaggtctcaaggag

SEQ ID NO: 61835 - DNA, 20 bp, Artificial Sequence
  Description of Artificial Sequence: Synthetic oligonucleotide
  Target: SCNA; (-) strand; PAM type: YTN; PAM sequence: CTT
aaagcactaggtctcaagga

SEQ ID NO: 61836 - DNA, 20 bp, Artificial Sequence
  Description of Artificial Sequence: Synthetic oligonucleotide
  Target: SCNA; (-) strand; PAM type: YTN; PAM sequence: TTG
acttaaagcactaggtctca

SEQ ID NO: 61837 - DNA, 20 bp, Artificial Sequence
  Description of Artificial Sequence: Synthetic oligonucleotide
  Target: SCNA; (-) strand; PAM type: YTN; PAM sequence: TTT
gacttaaagcactaggtctc

SEQ ID NO: 61838 - DNA, 20 bp, Artificial Sequence
  Description of Artificial Sequence: Synthetic oligonucleotide
  Target: SCNA; (-) strand; PAM type: YTN; PAM sequence: CTT
tgacttaaagcactaggtct

SEQ ID NO: 61839 - DNA, 20 bp, Artificial Sequence
  Description of Artificial Sequence: Synthetic oligonucleotide
  Target: SCNA; (-) strand; PAM type: YTN; PAM sequence: CTC
tttgacttaaagcactaggt

SEQ ID NO: 61840 - DNA, 20 bp, Artificial Sequence
  Description of Artificial Sequence: Synthetic oligonucleotide
  Target: SCNA; (-) strand; PAM type: YTN; PAM sequence: TTA
cctctttgacttaaagcact

SEQ ID NO: 61841 - DNA, 20 bp, Artificial Sequence
  Description of Artificial Sequence: Synthetic oligonucleotide
  Target: SCNA; (-) strand; PAM type: YTN; PAM sequence: TTT
acctctttgacttaaagcac

SEQ ID NO: 61842 - DNA, 20 bp, Artificial Sequence
  Description of Artificial Sequence: Synthetic oligonucleotide
  Target: SCNA; (-) strand; PAM type: YTN; PAM sequence: TTA
tttacctctttgacttaaag

SEQ ID NO: 61843 - DNA, 20 bp, Artificial Sequence
  Description of Artificial Sequence: Synthetic oligonucleotide
  Target: SCNA; (-) strand; PAM type: YTN; PAM sequence: TTT
atttacctctttgacttaaa

SEQ ID NO: 61844 - DNA, 20 bp, Artificial Sequence
  Description of Artificial Sequence: Synthetic oligonucleotide
  Target: SCNA; (-) strand; PAM type: YTN; PAM sequence: TTT
tatttacctctttgacttaa

SEQ ID NO: 61845 - DNA, 20 bp, Artificial Sequence
  Description of Artificial Sequence: Synthetic oligonucleotide
  Target: SCNA; (-) strand; PAM type: YTN; PAM sequence: CTC
attttatttacctctttgac

SEQ ID NO: 61846 - DNA, 20 bp, Artificial Sequence
  Description of Artificial Sequence: Synthetic oligonucleotide
  Target: SCNA; (-) strand; PAM type: YTN; PAM sequence: CTA
aaatatctcattttatttac

SEQ ID NO: 61847 - DNA, 20 bp, Artificial Sequence
  Description of Artificial Sequence: Synthetic oligonucleotide
  Target: SCNA; (-) strand; PAM type: YTN; PAM sequence: TTG
taatgagacctaaaatatct

SEQ ID NO: 61848 - DNA, 20 bp, Artificial Sequence
  Description of Artificial Sequence: Synthetic oligonucleotide
  Target: SCNA; (-) strand; PAM type: YTN; PAM sequence: CTG
ttgtaatgagacctaaaata

SEQ ID NO: 61849 - DNA, 20 bp, Artificial Sequence
  Description of Artificial Sequence: Synthetic oligonucleotide
  Target: SCNA; (-) strand; PAM type: YTN; PAM sequence: TTG
gtctgttgtaatgagaccta

SEQ ID NO: 61850 - DNA, 20 bp, Artificial Sequence
  Description of Artificial Sequence: Synthetic oligonucleotide
  Target: SCNA; (-) strand; PAM type: YTN; PAM sequence: CTC
acattggtctgttgtaatga

SEQ ID NO: 61851 - DNA, 20 bp, Artificial Sequence
  Description of Artificial Sequence: Synthetic oligonucleotide
  Target: SCNA; (-) strand; PAM type: YTN; PAM sequence: CTC
tcacattggtctgttgtaat

SEQ ID NO: 61852 - DNA, 20 bp, Artificial Sequence
  Description of Artificial Sequence: Synthetic oligonucleotide
  Target: SCNA; (-) strand; PAM type: YTN; PAM sequence: TTC
tctcacattggtctgttgta

SEQ ID NO: 61853 - DNA, 20 bp, Artificial Sequence
  Description of Artificial Sequence: Synthetic oligonucleotide
  Target: SCNA; (-) strand; PAM type: YTN; PAM sequence: CTG
tccagaaataattctctcac

SEQ ID NO: 61854 - DNA, 20 bp, Artificial Sequence
  Description of Artificial Sequence: Synthetic oligonucleotide
  Target: SCNA; (-) strand; PAM type: YTN; PAM sequence: TTA
taagaagtgcaactgtccag

SEQ ID NO: 61855 - DNA, 20 bp, Artificial Sequence
  Description of Artificial Sequence: Synthetic oligonucleotide
  Target: SCNA; (-) strand; PAM type: YTN; PAM sequence: TTT
ataagaagtgcaactgtcca

SEQ ID NO: 61856 - DNA, 20 bp, Artificial Sequence
  Description of Artificial Sequence: Synthetic oligonucleotide
  Target: SCNA; (-) strand; PAM type: YTN; PAM sequence: TTA
aacgtttataagaagtgcaa

SEQ ID NO: 61857 - DNA, 20 bp, Artificial Sequence
  Description of Artificial Sequence: Synthetic oligonucleotide
  Target: SCNA; (-) strand; PAM type: YTN; PAM sequence: TTG
gaatcatgttaaacgtttat

SEQ ID NO: 61858 - DNA, 20 bp, Artificial Sequence
  Description of Artificial Sequence: Synthetic oligonucleotide
  Target: SCNA; (-) strand; PAM type: YTN; PAM sequence: TTT
ggaatcatgttaaacgttta

SEQ ID NO: 61859 - DNA, 20 bp, Artificial Sequence
  Description of Artificial Sequence: Synthetic oligonucleotide
  Target: SCNA; (-) strand; PAM type: YTN; PAM sequence: TTA
ccaaataaaagtttggaatc

SEQ ID NO: 61860 - DNA, 20 bp, Artificial Sequence
  Description of Artificial Sequence: Synthetic oligonucleotide
  Target: SCNA; (-) strand; PAM type: YTN; PAM sequence: CTA
acaaattaccaaataaaagt

SEQ ID NO: 61861 - DNA, 20 bp, Artificial Sequence
  Description of Artificial Sequence: Synthetic oligonucleotide
  Target: SCNA; (-) strand; PAM type: YTN; PAM sequence: TTG
ccaaaggactaacaaattac

SEQ ID NO: 61862 - DNA, 20 bp, Artificial Sequence
  Description of Artificial Sequence: Synthetic oligonucleotide
  Target: SCNA; (-) strand; PAM type: YTN; PAM sequence: TTT
gccaaaggactaacaaatta

SEQ ID NO: 61863 - DNA, 20 bp, Artificial Sequence
  Description of Artificial Sequence: Synthetic oligonucleotide
  Target: SCNA; (-) strand; PAM type: YTN; PAM sequence: CTT
tgccaaaggactaacaaatt

SEQ ID NO: 61864 - DNA, 20 bp, Artificial Sequence
  Description of Artificial Sequence: Synthetic oligonucleotide
  Target: SCNA; (-) strand; PAM type: YTN; PAM sequence: TTA
gtcctttgccaaaggactaa

SEQ ID NO: 61865 - DNA, 20 bp, Artificial Sequence
  Description of Artificial Sequence: Synthetic oligonucleotide
  Target: SCNA; (-) strand; PAM type: YTN; PAM sequence: CTA
aataacatagtacattagtc

SEQ ID NO: 61866 - DNA, 20 bp, Artificial Sequence
  Description of Artificial Sequence: Synthetic oligonucleotide
  Target: SCNA; (-) strand; PAM type: YTN; PAM sequence: TTA
tgactaaataacatagtaca

SEQ ID NO: 61867 - DNA, 20 bp, Artificial Sequence
  Description of Artificial Sequence: Synthetic oligonucleotide
  Target: SCNA; (-) strand; PAM type: YTN; PAM sequence: TTG
ttatgactaaataacatagt

SEQ ID NO: 61868 - DNA, 20 bp, Artificial Sequence
  Description of Artificial Sequence: Synthetic oligonucleotide
  Target: SCNA; (-) strand; PAM type: YTN; PAM sequence: CTT
gttatgactaaataacatag

SEQ ID NO: 61869 - DNA, 20 bp, Artificial Sequence
  Description of Artificial Sequence: Synthetic oligonucleotide
  Target: SCNA; (-) strand; PAM type: YTN; PAM sequence: CTG
cttgttatgactaaataaca

SEQ ID NO: 61870 - DNA, 20 bp, Artificial Sequence
  Description of Artificial Sequence: Synthetic oligonucleotide
  Target: SCNA; (-) strand; PAM type: YTN; PAM sequence: TTG
atctgcttgttatgactaaa

SEQ ID NO: 61871 - DNA, 20 bp, Artificial Sequence
  Description of Artificial Sequence: Synthetic oligonucleotide
  Target: SCNA; (-) strand; PAM type: YTN; PAM sequence: TTA
cataaaatgtaattgatctg

SEQ ID NO: 61872 - DNA, 20 bp, Artificial Sequence
  Description of Artificial Sequence: Synthetic oligonucleotide
  Target: SCNA; (-) strand; PAM type: YTN; PAM sequence: CTA
taaaagttacataaaatgta

SEQ ID NO: 61873 - DNA, 20 bp, Artificial Sequence
  Description of Artificial Sequence: Synthetic oligonucleotide
  Target: SCNA; (-) strand; PAM type: YTN; PAM sequence: CTG
tctataaaagttacataaaa

SEQ ID NO: 61874 - DNA, 20 bp, Artificial Sequence
  Description of Artificial Sequence: Synthetic oligonucleotide
  Target: SCNA; (-) strand; PAM type: YTN; PAM sequence: CTC
tgtctataaaagttacataa

SEQ ID NO: 61875 - DNA, 20 bp, Artificial Sequence
  Description of Artificial Sequence: Synthetic oligonucleotide
  Target: SCNA; (-) strand; PAM type: YTN; PAM sequence: TTC
tctgtctataaaagttacat

SEQ ID NO: 61876 - DNA, 20 bp, Artificial Sequence
  Description of Artificial Sequence: Synthetic oligonucleotide
  Target: SCNA; (-) strand; PAM type: YTN; PAM sequence: TTT
ctctgtctataaaagttaca

SEQ ID NO: 61877 - DNA, 20 bp, Artificial Sequence
  Description of Artificial Sequence: Synthetic oligonucleotide
  Target: SCNA; (-) strand; PAM type: YTN; PAM sequence: CTC
agtttctctgtctataaaag

SEQ ID NO: 61878 - DNA, 20 bp, Artificial Sequence
  Description of Artificial Sequence: Synthetic oligonucleotide
  Target: SCNA; (-) strand; PAM type: YTN; PAM sequence: TTG
gagctcagtttctctgtcta

SEQ ID NO: 61879 - DNA, 20 bp, Artificial Sequence
  Description of Artificial Sequence: Synthetic oligonucleotide
  Target: SCNA; (-) strand; PAM type: YTN; PAM sequence: CTT
ggagctcagtttctctgtct

SEQ ID NO: 61880 - DNA, 20 bp, Artificial Sequence
  Description of Artificial Sequence: Synthetic oligonucleotide
  Target: SCNA; (-) strand; PAM type: YTN; PAM sequence: CTC
ttggagctcagtttctctgt

SEQ ID NO: 61881 - DNA, 20 bp, Artificial Sequence
  Description of Artificial Sequence: Synthetic oligonucleotide
  Target: SCNA; (-) strand; PAM type: YTN; PAM sequence: CTC
agcatatcaccaaaactctt

SEQ ID NO: 61882 - DNA, 20 bp, Artificial Sequence
  Description of Artificial Sequence: Synthetic oligonucleotide
  Target: SCNA; (-) strand; PAM type: YTN; PAM sequence: CTA
ggtgatctcagcatatcacc

SEQ ID NO: 61883 - DNA, 20 bp, Artificial Sequence
  Description of Artificial Sequence: Synthetic oligonucleotide
  Target: SCNA; (-) strand; PAM type: YTN; PAM sequence: TTA
aaatagctaggtgatctcag

SEQ ID NO: 61884 - DNA, 20 bp, Artificial Sequence
  Description of Artificial Sequence: Synthetic oligonucleotide
  Target: SCNA; (-) strand; PAM type: YTN; PAM sequence: CTT
aaaatagctaggtgatctca

SEQ ID NO: 61885 - DNA, 20 bp, Artificial Sequence
  Description of Artificial Sequence: Synthetic oligonucleotide
  Target: SCNA; (-) strand; PAM type: YTN; PAM sequence: CTG
ccacttaaaatagctaggtg

SEQ ID NO: 61886 - DNA, 20 bp, Artificial Sequence
  Description of Artificial Sequence: Synthetic oligonucleotide
  Target: SCNA; (-) strand; PAM type: YTN; PAM sequence: CTC
tgccacttaaaatagctagg

SEQ ID NO: 61887 - DNA, 20 bp, Artificial Sequence
  Description of Artificial Sequence: Synthetic oligonucleotide
  Target: SCNA; (-) strand; PAM type: YTN; PAM sequence: CTC
agctctgccacttaaaatag

SEQ ID NO: 61888 - DNA, 20 bp, Artificial Sequence
  Description of Artificial Sequence: Synthetic oligonucleotide
  Target: SCNA; (-) strand; PAM type: YTN; PAM sequence: TTG
tctcagctctgccacttaaa

SEQ ID NO: 61889 - DNA, 20 bp, Artificial Sequence
  Description of Artificial Sequence: Synthetic oligonucleotide
  Target: SCNA; (-) strand; PAM type: YTN; PAM sequence: CTA
aattgtctcagctctgccac

SEQ ID NO: 61890 - DNA, 20 bp, Artificial Sequence
  Description of Artificial Sequence: Synthetic oligonucleotide
  Target: SCNA; (-) strand; PAM type: YTN; PAM sequence: CTG
ctaaattgtctcagctctgc

SEQ ID NO: 61891 - DNA, 20 bp, Artificial Sequence
  Description of Artificial Sequence: Synthetic oligonucleotide
  Target: SCNA; (-) strand; PAM type: YTN; PAM sequence: TTC
tgctaaattgtctcagctct

SEQ ID NO: 61892 - DNA, 20 bp, Artificial Sequence
  Description of Artificial Sequence: Synthetic oligonucleotide
  Target: SCNA; (-) strand; PAM type: YTN; PAM sequence: TTT
ctgctaaattgtctcagctc

SEQ ID NO: 61893 - DNA, 20 bp, Artificial Sequence
  Description of Artificial Sequence: Synthetic oligonucleotide
  Target: SCNA; (-) strand; PAM type: YTN; PAM sequence: CTG
taacagtttctgctaaattg

SEQ ID NO: 61894 - DNA, 20 bp, Artificial Sequence
  Description of Artificial Sequence: Synthetic oligonucleotide
  Target: SCNA; (-) strand; PAM type: YTN; PAM sequence: TTC
tgtaacagtttctgctaaat

SEQ ID NO: 61895 - DNA, 20 bp, Artificial Sequence
  Description of Artificial Sequence: Synthetic oligonucleotide
  Target: SCNA; (-) strand; PAM type: YTN; PAM sequence: CTT
ctgtaacagtttctgctaaa

SEQ ID NO: 61896 - DNA, 20 bp, Artificial Sequence
  Description of Artificial Sequence: Synthetic oligonucleotide
  Target: SCNA; (-) strand; PAM type: YTN; PAM sequence: TTG
tgccttctgtaacagtttct

SEQ ID NO: 61897 - DNA, 20 bp, Artificial Sequence
  Description of Artificial Sequence: Synthetic oligonucleotide
  Target: SCNA; (-) strand; PAM type: YTN; PAM sequence: TTC
aggagacaattgtgccttct

SEQ ID NO: 61898 - DNA, 20 bp, Artificial Sequence
  Description of Artificial Sequence: Synthetic oligonucleotide
  Target: SCNA; (-) strand; PAM type: YTN; PAM sequence: CTA
attcaggagacaattgtgcc

SEQ ID NO: 61899 - DNA, 20 bp, Artificial Sequence
  Description of Artificial Sequence: Synthetic oligonucleotide
  Target: SCNA; (-) strand; PAM type: YTN; PAM sequence: CTG
ctaattcaggagacaattgt

SEQ ID NO: 61900 - DNA, 20 bp, Artificial Sequence
  Description of Artificial Sequence: Synthetic oligonucleotide
  Target: SCNA; (-) strand; PAM type: YTN; PAM sequence: TTC
agacacaaactgctaattca

SEQ ID NO: 61901 - DNA, 20 bp, Artificial Sequence
  Description of Artificial Sequence: Synthetic oligonucleotide
  Target: SCNA; (-) strand; PAM type: YTN; PAM sequence: CTT
cagacacaaactgctaattc

SEQ ID NO: 61902 - DNA, 20 bp, Artificial Sequence
  Description of Artificial Sequence: Synthetic oligonucleotide
  Target: SCNA; (-) strand; PAM type: YTN; PAM sequence: CTG
tgaggcttcagacacaaact

SEQ ID NO: 61903 - DNA, 20 bp, Artificial Sequence
  Description of Artificial Sequence: Synthetic oligonucleotide
  Target: SCNA; (-) strand; PAM type: YTN; PAM sequence: TTA
ccacacccaatctgtgaggc

SEQ ID NO: 61904 - DNA, 20 bp, Artificial Sequence
  Description of Artificial Sequence: Synthetic oligonucleotide
  Target: SCNA; (-) strand; PAM type: YTN; PAM sequence: TTT
accacacccaatctgtgagg

SEQ ID NO: 61905 - DNA, 20 bp, Artificial Sequence
  Description of Artificial Sequence: Synthetic oligonucleotide
  Target: SCNA; (-) strand; PAM type: YTN; PAM sequence: CTT
taccacacccaatctgtgag

SEQ ID NO: 61906 - DNA, 20 bp, Artificial Sequence
  Description of Artificial Sequence: Synthetic oligonucleotide
  Target: SCNA; (-) strand; PAM type: YTN; PAM sequence: CTC
tttaccacacccaatctgtg

SEQ ID NO: 61907 - DNA, 20 bp, Artificial Sequence
  Description of Artificial Sequence: Synthetic oligonucleotide
  Target: SCNA; (-) strand; PAM type: YTN; PAM sequence: CTC
actctttaccacacccaatc

SEQ ID NO: 61908 - DNA, 20 bp, Artificial Sequence
  Description of Artificial Sequence: Synthetic oligonucleotide
  Target: SCNA; (-) strand; PAM type: YTN; PAM sequence: TTC
tcactctttaccacacccaa

SEQ ID NO: 61909 - DNA, 20 bp, Artificial Sequence
  Description of Artificial Sequence: Synthetic oligonucleotide
  Target: SCNA; (-) strand; PAM type: YTN; PAM sequence: CTT
ctcactctttaccacaccca

SEQ ID NO: 61910 - DNA, 20 bp, Artificial Sequence
  Description of Artificial Sequence: Synthetic oligonucleotide
  Target: SCNA; (-) strand; PAM type: YTN; PAM sequence: TTC
cttctcactctttaccacac

SEQ ID NO: 61911 - DNA, 20 bp, Artificial Sequence
  Description of Artificial Sequence: Synthetic oligonucleotide
  Target: SCNA; (-) strand; PAM type: YTN; PAM sequence: TTT
ccttctcactctttaccaca

SEQ ID NO: 61912 - DNA, 20 bp, Artificial Sequence
  Description of Artificial Sequence: Synthetic oligonucleotide
  Target: SCNA; (-) strand; PAM type: YTN; PAM sequence: TTT
tccttctcactctttaccac

SEQ ID NO: 61913 - DNA, 20 bp, Artificial Sequence
  Description of Artificial Sequence: Synthetic oligonucleotide
  Target: SCNA; (-) strand; PAM type: YTN; PAM sequence: TTT
ttccttctcactctttacca

SEQ ID NO: 61914 - DNA, 20 bp, Artificial Sequence
  Description of Artificial Sequence: Synthetic oligonucleotide
  Target: SCNA; (-) strand; PAM type: YTN; PAM sequence: CTT
tttccttctcactctttacc

SEQ ID NO: 61915 - DNA, 20 bp, Artificial Sequence
  Description of Artificial Sequence: Synthetic oligonucleotide
  Target: SCNA; (-) strand; PAM type: YTN; PAM sequence: CTA
cctttttccttctcactctt

SEQ ID NO: 61916 - DNA, 20 bp, Artificial Sequence
  Description of Artificial Sequence: Synthetic oligonucleotide
  Target: SCNA; (-) strand; PAM type: YTN; PAM sequence: TTC
tacctttttccttctcactc

SEQ ID NO: 61917 - DNA, 20 bp, Artificial Sequence
  Description of Artificial Sequence: Synthetic oligonucleotide
  Target: SCNA; (-) strand; PAM type: YTN; PAM sequence: CTG
ggttctacctttttccttct

SEQ ID NO: 61918 - DNA, 20 bp, Artificial Sequence
  Description of Artificial Sequence: Synthetic oligonucleotide
  Target: SCNA; (-) strand; PAM type: YTN; PAM sequence: CTA
acacagctgggttctacctt

SEQ ID NO: 61919 - DNA, 20 bp, Artificial Sequence
  Description of Artificial Sequence: Synthetic oligonucleotide
  Target: SCNA; (-) strand; PAM type: YTN; PAM sequence: TTC
taacacagctgggttctacc

SEQ ID NO: 61920 - DNA, 20 bp, Artificial Sequence
  Description of Artificial Sequence: Synthetic oligonucleotide
  Target: SCNA; (-) strand; PAM type: YTN; PAM sequence: TTT
ctaacacagctgggttctac

SEQ ID NO: 61921 - DNA, 20 bp, Artificial Sequence
  Description of Artificial Sequence: Synthetic oligonucleotide
  Target: SCNA; (-) strand; PAM type: YTN; PAM sequence: CTA
tttctaacacagctgggttc

SEQ ID NO: 61922 - DNA, 20 bp, Artificial Sequence
  Description of Artificial Sequence: Synthetic oligonucleotide
  Target: SCNA; (-) strand; PAM type: YTN; PAM sequence: TTG
aaggctatttctaacacagc

SEQ ID NO: 61923 - DNA, 20 bp, Artificial Sequence
  Description of Artificial Sequence: Synthetic oligonucleotide
  Target: SCNA; (-) strand; PAM type: YTN; PAM sequence: TTT
gaaggctatttctaacacag

SEQ ID NO: 61924 - DNA, 20 bp, Artificial Sequence
  Description of Artificial Sequence: Synthetic oligonucleotide
  Target: SCNA; (-) strand; PAM type: YTN; PAM sequence: TTG
tcacatccaaatttgaaggc

SEQ ID NO: 61925 - DNA, 20 bp, Artificial Sequence
  Description of Artificial Sequence: Synthetic oligonucleotide
  Target: SCNA; (-) strand; PAM type: YTN; PAM sequence: TTC
cattgtcacatccaaatttg

SEQ ID NO: 61926 - DNA, 20 bp, Artificial Sequence
  Description of Artificial Sequence: Synthetic oligonucleotide
  Target: SCNA; (-) strand; PAM type: YTN; PAM sequence: TTT
ccattgtcacatccaaattt

SEQ ID NO: 61927 - DNA, 20 bp, Artificial Sequence
  Description of Artificial Sequence: Synthetic oligonucleotide
  Target: SCNA; (-) strand; PAM type: YTN; PAM sequence: TTG
atttccattgtcacatccaa

SEQ ID NO: 61928 - DNA, 20 bp, Artificial Sequence
  Description of Artificial Sequence: Synthetic oligonucleotide
  Target: SCNA; (-) strand; PAM type: YTN; PAM sequence: CTT
gatttccattgtcacatcca

SEQ ID NO: 61929 - DNA, 20 bp, Artificial Sequence
  Description of Artificial Sequence: Synthetic oligonucleotide
  Target: SCNA; (-) strand; PAM type: YTN; PAM sequence: TTC
ttgatttccattgtcacatc

SEQ ID NO: 61930 - DNA, 20 bp, Artificial Sequence
  Description of Artificial Sequence: Synthetic oligonucleotide
  Target: SCNA; (-) strand; PAM type: YTN; PAM sequence: CTT
cttgatttccattgtcacat

SEQ ID NO: 61931 - DNA, 20 bp, Artificial Sequence
  Description of Artificial Sequence: Synthetic oligonucleotide
  Target: SCNA; (-) strand; PAM type: YTN; PAM sequence: TTC
ttcttgatttccattgtcac

SEQ ID NO: 61932 - DNA, 20 bp, Artificial Sequence
  Description of Artificial Sequence: Synthetic oligonucleotide
  Target: SCNA; (-) strand; PAM type: YTN; PAM sequence: TTC
ataataacataagttcttct

SEQ ID NO: 61933 - DNA, 20 bp, Artificial Sequence
  Description of Artificial Sequence: Synthetic oligonucleotide
  Target: SCNA; (-) strand; PAM type: YTN; PAM sequence: TTT
cataataacataagttcttc

SEQ ID NO: 61934 - DNA, 20 bp, Artificial Sequence
  Description of Artificial Sequence: Synthetic oligonucleotide
  Target: SCNA; (-) strand; PAM type: YTN; PAM sequence: CTG
tttcataataacataagttc

SEQ ID NO: 61935 - DNA, 20 bp, Artificial Sequence
  Description of Artificial Sequence: Synthetic oligonucleotide
  Target: SCNA; (-) strand; PAM type: YTN; PAM sequence: TTA
aatatgaatgaactgtttca

SEQ ID NO: 61936 - DNA, 20 bp, Artificial Sequence
  Description of Artificial Sequence: Synthetic oligonucleotide
  Target: SCNA; (-) strand; PAM type: YTN; PAM sequence: TTT
aaatatgaatgaactgtttc

SEQ ID NO: 61937 - DNA, 20 bp, Artificial Sequence
  Description of Artificial Sequence: Synthetic oligonucleotide
  Target: SCNA; (-) strand; PAM type: YTN; PAM sequence: CTT
taaatatgaatgaactgttt

SEQ ID NO: 61938 - DNA, 20 bp, Artificial Sequence
  Description of Artificial Sequence: Synthetic oligonucleotide
  Target: SCNA; (-) strand; PAM type: YTN; PAM sequence: TTG
aggaataccaatatagaaaa

SEQ ID NO: 61939 - DNA, 20 bp, Artificial Sequence
  Description of Artificial Sequence: Synthetic oligonucleotide
  Target: SCNA; (-) strand; PAM type: YTN; PAM sequence: CTA
ttgaggaataccaatataga

SEQ ID NO: 61940 - DNA, 20 bp, Artificial Sequence
  Description of Artificial Sequence: Synthetic oligonucleotide
  Target: SCNA; (-) strand; PAM type: YTN; PAM sequence: CTC
cccctattgaggaataccaa

SEQ ID NO: 61941 - DNA, 20 bp, Artificial Sequence
  Description of Artificial Sequence: Synthetic oligonucleotide
  Target: SCNA; (-) strand; PAM type: YTN; PAM sequence: TTG
taggtagtaagaaatcatct

SEQ ID NO: 61942 - DNA, 20 bp, Artificial Sequence
  Description of Artificial Sequence: Synthetic oligonucleotide
  Target: SCNA; (-) strand; PAM type: YTN; PAM sequence: TTT
gtaggtagtaagaaatcatc

SEQ ID NO: 61943 - DNA, 20 bp, Artificial Sequence
  Description of Artificial Sequence: Synthetic oligonucleotide
  Target: SCNA; (-) strand; PAM type: YTN; PAM sequence: TTT
tgtaggtagtaagaaatcat

SEQ ID NO: 61944 - DNA, 20 bp, Artificial Sequence
  Description of Artificial Sequence: Synthetic oligonucleotide
  Target: SCNA; (-) strand; PAM type: YTN; PAM sequence: TTT
ttgtaggtagtaagaaatca

SEQ ID NO: 61945 - DNA, 20 bp, Artificial Sequence
  Description of Artificial Sequence: Synthetic oligonucleotide
  Target: SCNA; (-) strand; PAM type: YTN; PAM sequence: TTT
tttgtaggtagtaagaaatc

SEQ ID NO: 61946 - DNA, 20 bp, Artificial Sequence
  Description of Artificial Sequence: Synthetic oligonucleotide
  Target: SCNA; (-) strand; PAM type: YTN; PAM sequence: TTT
ttttgtaggtagtaagaaat

SEQ ID NO: 61947 - DNA, 20 bp, Artificial Sequence
  Description of Artificial Sequence: Synthetic oligonucleotide
  Target: SCNA; (-) strand; PAM type: YTN; PAM sequence: CTT
tttttgtaggtagtaagaaa

SEQ ID NO: 61948 - DNA, 20 bp, Artificial Sequence
  Description of Artificial Sequence: Synthetic oligonucleotide
  Target: SCNA; (-) strand; PAM type: YTN; PAM sequence: TTC
tttttttgtaggtagtaaga

SEQ ID NO: 61949 - DNA, 20 bp, Artificial Sequence
  Description of Artificial Sequence: Synthetic oligonucleotide
  Target: SCNA; (-) strand; PAM type: YTN; PAM sequence: TTT
ctttttttgtaggtagtaag

SEQ ID NO: 61950 - DNA, 20 bp, Artificial Sequence
  Description of Artificial Sequence: Synthetic oligonucleotide
  Target: SCNA; (-) strand; PAM type: YTN; PAM sequence: TTT
tctttttttgtaggtagtaa

SEQ ID NO: 61951 - DNA, 20 bp, Artificial Sequence
  Description of Artificial Sequence: Synthetic oligonucleotide
  Target: SCNA; (-) strand; PAM type: YTN; PAM sequence: TTA
cagttttctttttttgtagg

SEQ ID NO: 61952 - DNA, 20 bp, Artificial Sequence
  Description of Artificial Sequence: Synthetic oligonucleotide
  Target: SCNA; (-) strand; PAM type: YTN; PAM sequence: TTT
acagttttctttttttgtag

SEQ ID NO: 61953 - DNA, 20 bp, Artificial Sequence
  Description of Artificial Sequence: Synthetic oligonucleotide
  Target: SCNA; (-) strand; PAM type: YTN; PAM sequence: TTA
gtttacagttttcttttttt

SEQ ID NO: 61954 - DNA, 20 bp, Artificial Sequence
  Description of Artificial Sequence: Synthetic oligonucleotide
  Target: SCNA; (-) strand; PAM type: YTN; PAM sequence: TTC
aaaatgacaacgaaattagt

SEQ ID NO: 61955 - DNA, 20 bp, Artificial Sequence
  Description of Artificial Sequence: Synthetic oligonucleotide
  Target: SCNA; (-) strand; PAM type: YTN; PAM sequence: TTG
taattcaaaatgacaacgaa

SEQ ID NO: 61956 - DNA, 20 bp, Artificial Sequence
  Description of Artificial Sequence: Synthetic oligonucleotide
  Target: SCNA; (-) strand; PAM type: YTN; PAM sequence: TTA
aacatatagttgtaattcaa

SEQ ID NO: 61957 - DNA, 20 bp, Artificial Sequence
  Description of Artificial Sequence: Synthetic oligonucleotide
  Target: SCNA; (-) strand; PAM type: YTN; PAM sequence: TTA
aggagtgacaagagttaaac

SEQ ID NO: 61958 - DNA, 20 bp, Artificial Sequence
  Description of Artificial Sequence: Synthetic oligonucleotide
  Target: SCNA; (-) strand; PAM type: YTN; PAM sequence: TTT
aaggagtgacaagagttaaa

SEQ ID NO: 61959 - DNA, 20 bp, Artificial Sequence
  Description of Artificial Sequence: Synthetic oligonucleotide
  Target: SCNA; (-) strand; PAM type: YTN; PAM sequence: TTT
taaggagtgacaagagttaa

SEQ ID NO: 61960 - DNA, 20 bp, Artificial Sequence
  Description of Artificial Sequence: Synthetic oligonucleotide
  Target: SCNA; (-) strand; PAM type: YTN; PAM sequence: TTC
aaggcattttaaggagtgac

SEQ ID NO: 61961 - DNA, 20 bp, Artificial Sequence
  Description of Artificial Sequence: Synthetic oligonucleotide
  Target: SCNA; (-) strand; PAM type: YTN; PAM sequence: CTG
tgttcaaggcattttaagga

SEQ ID NO: 61962 - DNA, 20 bp, Artificial Sequence
  Description of Artificial Sequence: Synthetic oligonucleotide
  Target: SCNA; (-) strand; PAM type: YTN; PAM sequence: TTA
ctgtgttcaaggcattttaa

SEQ ID NO: 61963 - DNA, 20 bp, Artificial Sequence
  Description of Artificial Sequence: Synthetic oligonucleotide
  Target: SCNA; (-) strand; PAM type: YTN; PAM sequence: TTT
actgtgttcaaggcatttta

SEQ ID NO: 61964 - DNA, 20 bp, Artificial Sequence
  Description of Artificial Sequence: Synthetic oligonucleotide
  Target: SCNA; (-) strand; PAM type: YTN; PAM sequence: TTG
gatgtttactgtgttcaagg

SEQ ID NO: 61965 - DNA, 20 bp, Artificial Sequence
  Description of Artificial Sequence: Synthetic oligonucleotide
  Target: SCNA; (-) strand; PAM type: YTN; PAM sequence: TTC
attggatgtttactgtgttc

SEQ ID NO: 61966 - DNA, 20 bp, Artificial Sequence
  Description of Artificial Sequence: Synthetic oligonucleotide
  Target: SCNA; (-) strand; PAM type: YTN; PAM sequence: TTA
aaagttcattggatgtttac

SEQ ID NO: 61967 - DNA, 20 bp, Artificial Sequence
  Description of Artificial Sequence: Synthetic oligonucleotide
  Target: SCNA; (-) strand; PAM type: YTN; PAM sequence: TTA
tgtgtaattaaaagttcatt

SEQ ID NO: 61968 - DNA, 20 bp, Artificial Sequence
  Description of Artificial Sequence: Synthetic oligonucleotide
  Target: SCNA; (-) strand; PAM type: YTN; PAM sequence: CTA
tcaatattatgtgtaattaa

SEQ ID NO: 61969 - DNA, 20 bp, Artificial Sequence
  Description of Artificial Sequence: Synthetic oligonucleotide
  Target: SCNA; (-) strand; PAM type: YTN; PAM sequence: CTA
gaacatatgcaatatcacta

SEQ ID NO: 61970 - DNA, 20 bp, Artificial Sequence
  Description of Artificial Sequence: Synthetic oligonucleotide
  Target: SCNA; (-) strand; PAM type: YTN; PAM sequence: TTA
agaatacagacctagaacat

SEQ ID NO: 61971 - DNA, 20 bp, Artificial Sequence
  Description of Artificial Sequence: Synthetic oligonucleotide
  Target: SCNA; (-) strand; PAM type: YTN; PAM sequence: CTT
aagaatacagacctagaaca

SEQ ID NO: 61972 - DNA, 20 bp, Artificial Sequence
  Description of Artificial Sequence: Synthetic oligonucleotide
  Target: SCNA; (-) strand; PAM type: YTN; PAM sequence: CTC
cttaagaatacagacctaga

SEQ ID NO: 61973 - DNA, 20 bp, Artificial Sequence
  Description of Artificial Sequence: Synthetic oligonucleotide
  Target: SCNA; (-) strand; PAM type: YTN; PAM sequence: TTC
cctccttaagaatacagacc

SEQ ID NO: 61974 - DNA, 20 bp, Artificial Sequence
  Description of Artificial Sequence: Synthetic oligonucleotide
  Target: SCNA; (-) strand; PAM type: YTN; PAM sequence: TTT
ccctccttaagaatacagac

SEQ ID NO: 61975 - DNA, 20 bp, Artificial Sequence
  Description of Artificial Sequence: Synthetic oligonucleotide
  Target: SCNA; (-) strand; PAM type: YTN; PAM sequence: CTT
tccctccttaagaatacaga

SEQ ID NO: 61976 - DNA, 20 bp, Artificial Sequence
  Description of Artificial Sequence: Synthetic oligonucleotide
  Target: SCNA; (-) strand; PAM type: YTN; PAM sequence: TTG
agcagctttccctccttaag

SEQ ID NO: 61977 - DNA, 20 bp, Artificial Sequence
  Description of Artificial Sequence: Synthetic oligonucleotide
  Target: SCNA; (-) strand; PAM type: YTN; PAM sequence: CTT
gagcagctttccctccttaa

SEQ ID NO: 61978 - DNA, 20 bp, Artificial Sequence
  Description of Artificial Sequence: Synthetic oligonucleotide
  Target: SCNA; (-) strand; PAM type: YTN; PAM sequence: TTG
tacttgagcagctttccctc

SEQ ID NO: 61979 - DNA, 20 bp, Artificial Sequence
  Description of Artificial Sequence: Synthetic oligonucleotide
  Target: SCNA; (-) strand; PAM type: YTN; PAM sequence: TTT
gtacttgagcagctttccct

SEQ ID NO: 61980 - DNA, 20 bp, Artificial Sequence
  Description of Artificial Sequence: Synthetic oligonucleotide
  Target: SCNA; (-) strand; PAM type: YTN; PAM sequence: CTT
tgtacttgagcagctttccc

SEQ ID NO: 61981 - DNA, 20 bp, Artificial Sequence
  Description of Artificial Sequence: Synthetic oligonucleotide
  Target: SCNA; (-) strand; PAM type: YTN; PAM sequence: TTC
tttgtacttgagcagctttc

SEQ ID NO: 61982 - DNA, 20 bp, Artificial Sequence
  Description of Artificial Sequence: Synthetic oligonucleotide
  Target: SCNA; (-) strand; PAM type: YTN; PAM sequence: CTT
ctttgtacttgagcagcttt

SEQ ID NO: 61983 - DNA, 20 bp, Artificial Sequence
  Description of Artificial Sequence: Synthetic oligonucleotide
  Target: SCNA; (-) strand; PAM type: YTN; PAM sequence: TTC
ccttctttgtacttgagcag

SEQ ID NO: 61984 - DNA, 20 bp, Artificial Sequence
  Description of Artificial Sequence: Synthetic oligonucleotide
  Target: SCNA; (-) strand; PAM type: YTN; PAM sequence: CTA
gttcccttctttgtacttga

SEQ ID NO: 61985 - DNA, 20 bp, Artificial Sequence
  Description of Artificial Sequence: Synthetic oligonucleotide
  Target: SCNA; (-) strand; PAM type: YTN; PAM sequence: TTC
tagttcccttctttgtactt

SEQ ID NO: 61986 - DNA, 20 bp, Artificial Sequence
  Description of Artificial Sequence: Synthetic oligonucleotide
  Target: SCNA; (-) strand; PAM type: YTN; PAM sequence: CTT
ctagttcccttctttgtact

SEQ ID NO: 61987 - DNA, 20 bp, Artificial Sequence
  Description of Artificial Sequence: Synthetic oligonucleotide
  Target: SCNA; (-) strand; PAM type: YTN; PAM sequence: TTA
acttctagttcccttctttg

SEQ ID NO: 61988 - DNA, 20 bp, Artificial Sequence
  Description of Artificial Sequence: Synthetic oligonucleotide
  Target: SCNA; (-) strand; PAM type: YTN; PAM sequence: TTT
aacttctagttcccttcttt

SEQ ID NO: 61989 - DNA, 20 bp, Artificial Sequence
  Description of Artificial Sequence: Synthetic oligonucleotide
  Target: SCNA; (-) strand; PAM type: YTN; PAM sequence: TTT
taacttctagttcccttctt

SEQ ID NO: 61990 - DNA, 20 bp, Artificial Sequence
  Description of Artificial Sequence: Synthetic oligonucleotide
  Target: SCNA; (-) strand; PAM type: YTN; PAM sequence: TTA
ttttaacttctagttccctt

SEQ ID NO: 61991 - DNA, 20 bp, Artificial Sequence
  Description of Artificial Sequence: Synthetic oligonucleotide
  Target: SCNA; (-) strand; PAM type: YTN; PAM sequence: TTT
attttaacttctagttccct

SEQ ID NO: 61992 - DNA, 20 bp, Artificial Sequence
  Description of Artificial Sequence: Synthetic oligonucleotide
  Target: SCNA; (-) strand; PAM type: YTN; PAM sequence: CTT
tattttaacttctagttccc

SEQ ID NO: 61993 - DNA, 20 bp, Artificial Sequence
  Description of Artificial Sequence: Synthetic oligonucleotide
  Target: SCNA; (-) strand; PAM type: YTN; PAM sequence: TTA
aaaaaactttattttaactt

SEQ ID NO: 61994 - DNA, 20 bp, Artificial Sequence
  Description of Artificial Sequence: Synthetic oligonucleotide
  Target: SCNA; (-) strand; PAM type: YTN; PAM sequence: CTG
tccatcaataatgaaaagaa

SEQ ID NO: 61995 - DNA, 20 bp, Artificial Sequence
  Description of Artificial Sequence: Synthetic oligonucleotide
  Target: SCNA; (-) strand; PAM type: YTN; PAM sequence: CTG
aagaccatgctgtccatcaa

SEQ ID NO: 61996 - DNA, 20 bp, Artificial Sequence
  Description of Artificial Sequence: Synthetic oligonucleotide
  Target: SCNA; (-) strand; PAM type: YTN; PAM sequence: TTA
ctgaagaccatgctgtccat

SEQ ID NO: 61997 - DNA, 20 bp, Artificial Sequence
  Description of Artificial Sequence: Synthetic oligonucleotide
  Target: SCNA; (-) strand; PAM type: YTN; PAM sequence: TTT
actgaagaccatgctgtcca

SEQ ID NO: 61998 - DNA, 20 bp, Artificial Sequence
  Description of Artificial Sequence: Synthetic oligonucleotide
  Target: SCNA; (-) strand; PAM type: YTN; PAM sequence: CTA
aagatttactgaagaccatg

SEQ ID NO: 61999 - DNA, 20 bp, Artificial Sequence
  Description of Artificial Sequence: Synthetic oligonucleotide
  Target: SCNA; (-) strand; PAM type: YTN; PAM sequence: TTC
agagaggctaaagatttact

SEQ ID NO: 62000 - DNA, 20 bp, Artificial Sequence
  Description of Artificial Sequence: Synthetic oligonucleotide
  Target: SCNA; (-) strand; PAM type: YTN; PAM sequence: TTA
tattcagagaggctaaagat

SEQ ID NO: 62001 - DNA, 20 bp, Artificial Sequence
  Description of Artificial Sequence: Synthetic oligonucleotide
  Target: SCNA; (-) strand; PAM type: YTN; PAM sequence: TTA
acgttatattcagagaggct

SEQ ID NO: 62002 - DNA, 20 bp, Artificial Sequence
  Description of Artificial Sequence: Synthetic oligonucleotide
  Target: SCNA; (-) strand; PAM type: YTN; PAM sequence: TTT
aacgttatattcagagaggc

SEQ ID NO: 62003 - DNA, 20 bp, Artificial Sequence
  Description of Artificial Sequence: Synthetic oligonucleotide
  Target: SCNA; (-) strand; PAM type: YTN; PAM sequence: TTA
gtttaacgttatattcagag

SEQ ID NO: 62004 - DNA, 20 bp, Artificial Sequence
  Description of Artificial Sequence: Synthetic oligonucleotide
  Target: SCNA; (-) strand; PAM type: YTN; PAM sequence: TTC
aattagtttaacgttatatt

SEQ ID NO: 62005 - DNA, 20 bp, Artificial Sequence
  Description of Artificial Sequence: Synthetic oligonucleotide
  Target: SCNA; (-) strand; PAM type: YTN; PAM sequence: TTA
tgaggtacaagccattcaat

SEQ ID NO: 62006 - DNA, 20 bp, Artificial Sequence
  Description of Artificial Sequence: Synthetic oligonucleotide
  Target: SCNA; (-) strand; PAM type: YTN; PAM sequence: CTT
atgaggtacaagccattcaa

SEQ ID NO: 62007 - DNA, 20 bp, Artificial Sequence
  Description of Artificial Sequence: Synthetic oligonucleotide
  Target: SCNA; (-) strand; PAM type: YTN; PAM sequence: TTC
ttatgaggtacaagccattc

SEQ ID NO: 62008 - DNA, 20 bp, Artificial Sequence
  Description of Artificial Sequence: Synthetic oligonucleotide
  Target: SCNA; (-) strand; PAM type: YTN; PAM sequence: TTT
cttatgaggtacaagccatt

SEQ ID NO: 62009 - DNA, 20 bp, Artificial Sequence
  Description of Artificial Sequence: Synthetic oligonucleotide
  Target: SCNA; (-) strand; PAM type: YTN; PAM sequence: TTC
atatttcttatgaggtacaa

SEQ ID NO: 62010 - DNA, 20 bp, Artificial Sequence
  Description of Artificial Sequence: Synthetic oligonucleotide
  Target: SCNA; (-) strand; PAM type: YTN; PAM sequence: CTT
catatttcttatgaggtaca

SEQ ID NO: 62011 - DNA, 20 bp, Artificial Sequence
  Description of Artificial Sequence: Synthetic oligonucleotide
  Target: SCNA; (-) strand; PAM type: YTN; PAM sequence: TTC
ataacttcatatttcttatg

SEQ ID NO: 62012 - DNA, 20 bp, Artificial Sequence
  Description of Artificial Sequence: Synthetic oligonucleotide
  Target: SCNA; (-) strand; PAM type: YTN; PAM sequence: CTT
cataacttcatatttcttat

SEQ ID NO: 62013 - DNA, 20 bp, Artificial Sequence
  Description of Artificial Sequence: Synthetic oligonucleotide
  Target: SCNA; (-) strand; PAM type: YTN; PAM sequence: TTA
cttcataacttcatatttct

SEQ ID NO: 62014 - DNA, 20 bp, Artificial Sequence
  Description of Artificial Sequence: Synthetic oligonucleotide
  Target: SCNA; (-) strand; PAM type: YTN; PAM sequence: TTA
ttacttcataacttcatatt

SEQ ID NO: 62015 - DNA, 20 bp, Artificial Sequence
  Description of Artificial Sequence: Synthetic oligonucleotide
  Target: SCNA; (-) strand; PAM type: YTN; PAM sequence: TTC
caaatatgttattacttcat

SEQ ID NO: 62016 - DNA, 20 bp, Artificial Sequence
  Description of Artificial Sequence: Synthetic oligonucleotide
  Target: SCNA; (-) strand; PAM type: YTN; PAM sequence: CTT
ccaaatatgttattacttca

SEQ ID NO: 62017 - DNA, 20 bp, Artificial Sequence
  Description of Artificial Sequence: Synthetic oligonucleotide
  Target: SCNA; (-) strand; PAM type: YTN; PAM sequence: TTA
gtaatgcttccaaatatgtt

SEQ ID NO: 62018 - DNA, 20 bp, Artificial Sequence
  Description of Artificial Sequence: Synthetic oligonucleotide
  Target: SCNA; (-) strand; PAM type: YTN; PAM sequence: TTA
tgaacagaatatgcatgtta

SEQ ID NO: 62019 - DNA, 20 bp, Artificial Sequence
  Description of Artificial Sequence: Synthetic oligonucleotide
  Target: SCNA; (-) strand; PAM type: YTN; PAM sequence: TTG
tagttatgaacagaatatgc

SEQ ID NO: 62020 - DNA, 20 bp, Artificial Sequence
  Description of Artificial Sequence: Synthetic oligonucleotide
  Target: SCNA; (-) strand; PAM type: YTN; PAM sequence: TTA
gcaaagagaaaacaaaacat

SEQ ID NO: 62021 - DNA, 20 bp, Artificial Sequence
  Description of Artificial Sequence: Synthetic oligonucleotide
  Target: SCNA; (-) strand; PAM type: YTN; PAM sequence: CTT
agcaaagagaaaacaaaaca

SEQ ID NO: 62022 - DNA, 20 bp, Artificial Sequence
  Description of Artificial Sequence: Synthetic oligonucleotide
  Target: SCNA; (-) strand; PAM type: YTN; PAM sequence: TTC
acttagcaaagagaaaacaa

SEQ ID NO: 62023 - DNA, 20 bp, Artificial Sequence
  Description of Artificial Sequence: Synthetic oligonucleotide
  Target: SCNA; (-) strand; PAM type: YTN; PAM sequence: TTT
cacttagcaaagagaaaaca

SEQ ID NO: 62024 - DNA, 20 bp, Artificial Sequence
  Description of Artificial Sequence: Synthetic oligonucleotide
  Target: SCNA; (-) strand; PAM type: YTN; PAM sequence: TTA
tatttcacttagcaaagaga

SEQ ID NO: 62025 - DNA, 20 bp, Artificial Sequence
  Description of Artificial Sequence: Synthetic oligonucleotide
  Target: SCNA; (-) strand; PAM type: YTN; PAM sequence: TTT
atatttcacttagcaaagag

SEQ ID NO: 62026 - DNA, 20 bp, Artificial Sequence
  Description of Artificial Sequence: Synthetic oligonucleotide
  Target: SCNA; (-) strand; PAM type: YTN; PAM sequence: CTG
gtaaaatatttatatttcac

SEQ ID NO: 62027 - DNA, 20 bp, Artificial Sequence
  Description of Artificial Sequence: Synthetic oligonucleotide
  Target: SCNA; (-) strand; PAM type: YTN; PAM sequence: TTA
tggtctggtaaaatatttat

SEQ ID NO: 62028 - DNA, 20 bp, Artificial Sequence
  Description of Artificial Sequence: Synthetic oligonucleotide
  Target: SCNA; (-) strand; PAM type: YTN; PAM sequence: CTA
ttatggtctggtaaaatatt

SEQ ID NO: 62029 - DNA, 20 bp, Artificial Sequence
  Description of Artificial Sequence: Synthetic oligonucleotide
  Target: SCNA; (-) strand; PAM type: YTN; PAM sequence: TTA
aatccagataaaagaatcct

SEQ ID NO: 62030 - DNA, 20 bp, Artificial Sequence
  Description of Artificial Sequence: Synthetic oligonucleotide
  Target: SCNA; (-) strand; PAM type: YTN; PAM sequence: TTA
atgaattaaatccagataaa

SEQ ID NO: 62031 - DNA, 20 bp, Artificial Sequence
  Description of Artificial Sequence: Synthetic oligonucleotide
  Target: SCNA; (-) strand; PAM type: YTN; PAM sequence: CTA
tagcaaaattaatgaattaa

SEQ ID NO: 62032 - DNA, 20 bp, Artificial Sequence
  Description of Artificial Sequence: Synthetic oligonucleotide
  Target: SCNA; (-) strand; PAM type: YTN; PAM sequence: TTA
atctatagcaaaattaatga

SEQ ID NO: 62033 - DNA, 20 bp, Artificial Sequence
  Description of Artificial Sequence: Synthetic oligonucleotide
  Target: SCNA; (-) strand; PAM type: YTN; PAM sequence: TTC
atagaatgttaatctatagc

SEQ ID NO: 62034 - DNA, 20 bp, Artificial Sequence
  Description of Artificial Sequence: Synthetic oligonucleotide
  Target: SCNA; (-) strand; PAM type: YTN; PAM sequence: TTT
catagaatgttaatctatag

SEQ ID NO: 62035 - DNA, 20 bp, Artificial Sequence
  Description of Artificial Sequence: Synthetic oligonucleotide
  Target: SCNA; (-) strand; PAM type: YTN; PAM sequence: TTA
agcatatatttcatagaatg

SEQ ID NO: 62036 - DNA, 20 bp, Artificial Sequence
  Description of Artificial Sequence: Synthetic oligonucleotide
  Target: SCNA; (-) strand; PAM type: YTN; PAM sequence: CTA
ggttaagcatatatttcata

SEQ ID NO: 62037 - DNA, 20 bp, Artificial Sequence
  Description of Artificial Sequence: Synthetic oligonucleotide
  Target: SCNA; (-) strand; PAM type: YTN; PAM sequence: CTA
tgggggtaaacaaagtctag

SEQ ID NO: 62038 - DNA, 20 bp, Artificial Sequence
  Description of Artificial Sequence: Synthetic oligonucleotide
  Target: SCNA; (-) strand; PAM type: YTN; PAM sequence: TTC
tatgggggtaaacaaagtct

SEQ ID NO: 62039 - DNA, 20 bp, Artificial Sequence
  Description of Artificial Sequence: Synthetic oligonucleotide
  Target: SCNA; (-) strand; PAM type: YTN; PAM sequence: TTG
ttctatgggggtaaacaaag

SEQ ID NO: 62040 - DNA, 20 bp, Artificial Sequence
  Description of Artificial Sequence: Synthetic oligonucleotide
  Target: SCNA; (-) strand; PAM type: YTN; PAM sequence: TTC
agttgttctatgggggtaaa

SEQ ID NO: 62041 - DNA, 20 bp, Artificial Sequence
  Description of Artificial Sequence: Synthetic oligonucleotide
  Target: SCNA; (-) strand; PAM type: YTN; PAM sequence: CTA
aaaattcagttgttctatgg

SEQ ID NO: 62042 - DNA, 20 bp, Artificial Sequence
  Description of Artificial Sequence: Synthetic oligonucleotide
  Target: SCNA; (-) strand; PAM type: YTN; PAM sequence: TTA
ccacataccatacctaaaaa

SEQ ID NO: 62043 - DNA, 20 bp, Artificial Sequence
  Description of Artificial Sequence: Synthetic oligonucleotide
  Target: SCNA; (-) strand; PAM type: YTN; PAM sequence: TTT
accacataccatacctaaaa

SEQ ID NO: 62044 - DNA, 20 bp, Artificial Sequence
  Description of Artificial Sequence: Synthetic oligonucleotide
  Target: SCNA; (-) strand; PAM type: YTN; PAM sequence: CTA
tagcacaagtttaccacata

SEQ ID NO: 62045 - DNA, 20 bp, Artificial Sequence
  Description of Artificial Sequence: Synthetic oligonucleotide
  Target: SCNA; (-) strand; PAM type: YTN; PAM sequence: TTG
ctatagcacaagtttaccac

SEQ ID NO: 62046 - DNA, 20 bp, Artificial Sequence
  Description of Artificial Sequence: Synthetic oligonucleotide
  Target: SCNA; (-) strand; PAM type: YTN; PAM sequence: TTT
gctatagcacaagtttacca

SEQ ID NO: 62047 - DNA, 20 bp, Artificial Sequence
  Description of Artificial Sequence: Synthetic oligonucleotide
  Target: SCNA; (-) strand; PAM type: YTN; PAM sequence: CTT
tgctatagcacaagtttacc

SEQ ID NO: 62048 - DNA, 20 bp, Artificial Sequence
  Description of Artificial Sequence: Synthetic oligonucleotide
  Target: SCNA; (-) strand; PAM type: YTN; PAM sequence: CTG
tctttgctatagcacaagtt

SEQ ID NO: 62049 - DNA, 20 bp, Artificial Sequence
  Description of Artificial Sequence: Synthetic oligonucleotide
  Target: SCNA; (-) strand; PAM type: YTN; PAM sequence: CTG
ctgtctttgctatagcacaa

SEQ ID NO: 62050 - DNA, 20 bp, Artificial Sequence
  Description of Artificial Sequence: Synthetic oligonucleotide
  Target: SCNA; (-) strand; PAM type: YTN; PAM sequence: CTC
tgctgtctttgctatagcac

SEQ ID NO: 62051 - DNA, 20 bp, Artificial Sequence
  Description of Artificial Sequence: Synthetic oligonucleotide
  Target: SCNA; (-) strand; PAM type: YTN; PAM sequence: CTA
ctctgctgtctttgctatag

SEQ ID NO: 62052 - DNA, 20 bp, Artificial Sequence
  Description of Artificial Sequence: Synthetic oligonucleotide
  Target: SCNA; (-) strand; PAM type: YTN; PAM sequence: TTC
tactctgctgtctttgctat

SEQ ID NO: 62053 - DNA, 20 bp, Artificial Sequence
  Description of Artificial Sequence: Synthetic oligonucleotide
  Target: SCNA; (-) strand; PAM type: YTN; PAM sequence: TTC
atgccattctactctgctgt

SEQ ID NO: 62054 - DNA, 20 bp, Artificial Sequence
  Description of Artificial Sequence: Synthetic oligonucleotide
  Target: SCNA; (-) strand; PAM type: YTN; PAM sequence: TTT
catgccattctactctgctg

SEQ ID NO: 62055 - DNA, 20 bp, Artificial Sequence
  Description of Artificial Sequence: Synthetic oligonucleotide
  Target: SCNA; (-) strand; PAM type: YTN; PAM sequence: TTT
tcatgccattctactctgct

SEQ ID NO: 62056 - DNA, 20 bp, Artificial Sequence
  Description of Artificial Sequence: Synthetic oligonucleotide
  Target: SCNA; (-) strand; PAM type: YTN; PAM sequence: TTA
ttttcatgccattctactct

SEQ ID NO: 62057 - DNA, 20 bp, Artificial Sequence
  Description of Artificial Sequence: Synthetic oligonucleotide
  Target: SCNA; (-) strand; PAM type: YTN; PAM sequence: TTT
attttcatgccattctactc

SEQ ID NO: 62058 - DNA, 20 bp, Artificial Sequence
  Description of Artificial Sequence: Synthetic oligonucleotide
  Target: SCNA; (-) strand; PAM type: YTN; PAM sequence: CTT
tattttcatgccattctact

SEQ ID NO: 62059 - DNA, 20 bp, Artificial Sequence
  Description of Artificial Sequence: Synthetic oligonucleotide
  Target: SCNA; (-) strand; PAM type: YTN; PAM sequence: TTA
atgggcagcatctttatttt

SEQ ID NO: 62060 - DNA, 20 bp, Artificial Sequence
  Description of Artificial Sequence: Synthetic oligonucleotide
  Target: SCNA; (-) strand; PAM type: YTN; PAM sequence: TTG
ttaatgggcagcatctttat

SEQ ID NO: 62061 - DNA, 20 bp, Artificial Sequence
  Description of Artificial Sequence: Synthetic oligonucleotide
  Target: SCNA; (-) strand; PAM type: YTN; PAM sequence: TTA
atcaattgttaatgggcagc

SEQ ID NO: 62062 - DNA, 20 bp, Artificial Sequence
  Description of Artificial Sequence: Synthetic oligonucleotide
  Target: SCNA; (-) strand; PAM type: YTN; PAM sequence: TTT
aatcaattgttaatgggcag

SEQ ID NO: 62063 - DNA, 20 bp, Artificial Sequence
  Description of Artificial Sequence: Synthetic oligonucleotide
  Target: SCNA; (-) strand; PAM type: YTN; PAM sequence: CTT
taatcaattgttaatgggca

SEQ ID NO: 62064 - DNA, 20 bp, Artificial Sequence
  Description of Artificial Sequence: Synthetic oligonucleotide
  Target: SCNA; (-) strand; PAM type: YTN; PAM sequence: CTC
tttaatcaattgttaatggg

SEQ ID NO: 62065 - DNA, 20 bp, Artificial Sequence
  Description of Artificial Sequence: Synthetic oligonucleotide
  Target: SCNA; (-) strand; PAM type: YTN; PAM sequence: CTC
tctttaatcaattgttaatg

SEQ ID NO: 62066 - DNA, 20 bp, Artificial Sequence
  Description of Artificial Sequence: Synthetic oligonucleotide
  Target: SCNA; (-) strand; PAM type: YTN; PAM sequence: TTA
aatcagtcctctctttaatc

SEQ ID NO: 62067 - DNA, 20 bp, Artificial Sequence
  Description of Artificial Sequence: Synthetic oligonucleotide
  Target: SCNA; (-) strand; PAM type: YTN; PAM sequence: TTA
aacacattaaatcagtcctc

SEQ ID NO: 62068 - DNA, 20 bp, Artificial Sequence
  Description of Artificial Sequence: Synthetic oligonucleotide
  Target: SCNA; (-) strand; PAM type: YTN; PAM sequence: CTT
aaacacattaaatcagtcct

SEQ ID NO: 62069 - DNA, 20 bp, Artificial Sequence
  Description of Artificial Sequence: Synthetic oligonucleotide
  Target: SCNA; (-) strand; PAM type: YTN; PAM sequence: TTA
acttaaacacattaaatcag

SEQ ID NO: 62070 - DNA, 20 bp, Artificial Sequence
  Description of Artificial Sequence: Synthetic oligonucleotide
  Target: SCNA; (-) strand; PAM type: YTN; PAM sequence: CTT
aacttaaacacattaaatca

SEQ ID NO: 62071 - DNA, 20 bp, Artificial Sequence
  Description of Artificial Sequence: Synthetic oligonucleotide
  Target: SCNA; (-) strand; PAM type: YTN; PAM sequence: TTC
ttaacttaaacacattaaat

SEQ ID NO: 62072 - DNA, 20 bp, Artificial Sequence
  Description of Artificial Sequence: Synthetic oligonucleotide
  Target: SCNA; (-) strand; PAM type: YTN; PAM sequence: TTT
cttaacttaaacacattaaa

SEQ ID NO: 62073 - DNA, 20 bp, Artificial Sequence
  Description of Artificial Sequence: Synthetic oligonucleotide
  Target: SCNA; (-) strand; PAM type: YTN; PAM sequence: TTT
tcttaacttaaacacattaa

SEQ ID NO: 62074 - DNA, 20 bp, Artificial Sequence
  Description of Artificial Sequence: Synthetic oligonucleotide
  Target: SCNA; (-) strand; PAM type: YTN; PAM sequence: TTG
tattttcttaacttaaacac

SEQ ID NO: 62075 - DNA, 20 bp, Artificial Sequence
  Description of Artificial Sequence: Synthetic oligonucleotide
  Target: SCNA; (-) strand; PAM type: YTN; PAM sequence: TTA
tccaaagataataaacgttg

SEQ ID NO: 62076 - DNA, 20 bp, Artificial Sequence
  Description of Artificial Sequence: Synthetic oligonucleotide
  Target: SCNA; (-) strand; PAM type: YTN; PAM sequence: TTC
acaacaaatacggaatatta

SEQ ID NO: 62077 - DNA, 20 bp, Artificial Sequence
  Description of Artificial Sequence: Synthetic oligonucleotide
  Target: SCNA; (-) strand; PAM type: YTN; PAM sequence: TTG
tgttcacaacaaatacggaa

SEQ ID NO: 62078 - DNA, 20 bp, Artificial Sequence
  Description of Artificial Sequence: Synthetic oligonucleotide
  Target: SCNA; (-) strand; PAM type: YTN; PAM sequence: CTT
gtgttcacaacaaatacgga

SEQ ID NO: 62079 - DNA, 20 bp, Artificial Sequence
  Description of Artificial Sequence: Synthetic oligonucleotide
  Target: SCNA; (-) strand; PAM type: YTN; PAM sequence: TTA
catcaccccttgtgttcaca

SEQ ID NO: 62080 - DNA, 20 bp, Artificial Sequence
  Description of Artificial Sequence: Synthetic oligonucleotide
  Target: SCNA; (-) strand; PAM type: YTN; PAM sequence: CTC
cagcatcaacattacatcac

SEQ ID NO: 62081 - DNA, 20 bp, Artificial Sequence
  Description of Artificial Sequence: Synthetic oligonucleotide
  Target: SCNA; (-) strand; PAM type: YTN; PAM sequence: TTA
cagaaggtgagaggaaggtg

SEQ ID NO: 62082 - DNA, 20 bp, Artificial Sequence
  Description of Artificial Sequence: Synthetic oligonucleotide
  Target: SCNA; (-) strand; PAM type: YTN; PAM sequence: TTT
acagaaggtgagaggaaggt

SEQ ID NO: 62083 - DNA, 20 bp, Artificial Sequence
  Description of Artificial Sequence: Synthetic oligonucleotide
  Target: SCNA; (-) strand; PAM type: YTN; PAM sequence: CTC
acaggtttacagaaggtgag

SEQ ID NO: 62084 - DNA, 20 bp, Artificial Sequence
  Description of Artificial Sequence: Synthetic oligonucleotide
  Target: SCNA; (-) strand; PAM type: YTN; PAM sequence: CTC
tcacaggtttacagaaggtg

SEQ ID NO: 62085 - DNA, 20 bp, Artificial Sequence
  Description of Artificial Sequence: Synthetic oligonucleotide
  Target: SCNA; (-) strand; PAM type: YTN; PAM sequence: CTC
tctcacaggtttacagaagg

SEQ ID NO: 62086 - DNA, 20 bp, Artificial Sequence
  Description of Artificial Sequence: Synthetic oligonucleotide
  Target: SCNA; (-) strand; PAM type: YTN; PAM sequence: CTC
gtctctctcacaggtttaca

SEQ ID NO: 62087 - DNA, 20 bp, Artificial Sequence
  Description of Artificial Sequence: Synthetic oligonucleotide
  Target: SCNA; (-) strand; PAM type: YTN; PAM sequence: CTA
cctcgtctctctcacaggtt

SEQ ID NO: 62088 - DNA, 20 bp, Artificial Sequence
  Description of Artificial Sequence: Synthetic oligonucleotide
  Target: SCNA; (-) strand; PAM type: YTN; PAM sequence: CTC
actacctcgtctctctcaca

SEQ ID NO: 62089 - DNA, 20 bp, Artificial Sequence
  Description of Artificial Sequence: Synthetic oligonucleotide
  Target: SCNA; (-) strand; PAM type: YTN; PAM sequence: CTA
tcgcaatctcactacctcgt

SEQ ID NO: 62090 - DNA, 20 bp, Artificial Sequence
  Description of Artificial Sequence: Synthetic oligonucleotide
  Target: SCNA; (-) strand; PAM type: YTN; PAM sequence: TTA
cacaagaagcctatcgcaat

SEQ ID NO: 62091 - DNA, 20 bp, Artificial Sequence
  Description of Artificial Sequence: Synthetic oligonucleotide
  Target: SCNA; (-) strand; PAM type: YTN; PAM sequence: CTA
tgaaattacacaagaagcct

SEQ ID NO: 62092 - DNA, 20 bp, Artificial Sequence
  Description of Artificial Sequence: Synthetic oligonucleotide
  Target: SCNA; (-) strand; PAM type: YTN; PAM sequence: CTA
cccactatgaaattacacaa

SEQ ID NO: 62093 - DNA, 20 bp, Artificial Sequence
  Description of Artificial Sequence: Synthetic oligonucleotide
  Target: SCNA; (-) strand; PAM type: YTN; PAM sequence: CTC
tacccactatgaaattacac

SEQ ID NO: 62094 - DNA, 20 bp, Artificial Sequence
  Description of Artificial Sequence: Synthetic oligonucleotide
  Target: SCNA; (-) strand; PAM type: YTN; PAM sequence: CTA
ctctacccactatgaaatta

SEQ ID NO: 62095 - DNA, 20 bp, Artificial Sequence
  Description of Artificial Sequence: Synthetic oligonucleotide
  Target: SCNA; (-) strand; PAM type: YTN; PAM sequence: CTC
tactctacccactatgaaat

SEQ ID NO: 62096 - DNA, 20 bp, Artificial Sequence
  Description of Artificial Sequence: Synthetic oligonucleotide
  Target: SCNA; (-) strand; PAM type: YTN; PAM sequence: TTC
tctactctacccactatgaa

SEQ ID NO: 62097 - DNA, 20 bp, Artificial Sequence
  Description of Artificial Sequence: Synthetic oligonucleotide
  Target: SCNA; (-) strand; PAM type: YTN; PAM sequence: TTT
ctctactctacccactatga

SEQ ID NO: 62098 - DNA, 20 bp, Artificial Sequence
  Description of Artificial Sequence: Synthetic oligonucleotide
  Target: SCNA; (-) strand; PAM type: YTN; PAM sequence: CTT
tctctactctacccactatg

SEQ ID NO: 62099 - DNA, 20 bp, Artificial Sequence
  Description of Artificial Sequence: Synthetic oligonucleotide
  Target: SCNA; (-) strand; PAM type: YTN; PAM sequence: TTA
ggctttctctactctaccca

SEQ ID NO: 62100 - DNA, 20 bp, Artificial Sequence
  Description of Artificial Sequence: Synthetic oligonucleotide
  Target: SCNA; (-) strand; PAM type: YTN; PAM sequence: CTC
ccaacagtatgcattaggct

SEQ ID NO: 62101 - DNA, 20 bp, Artificial Sequence
  Description of Artificial Sequence: Synthetic oligonucleotide
  Target: SCNA; (-) strand; PAM type: YTN; PAM sequence: TTC
caaaatcatacataatgatc

SEQ ID NO: 62102 - DNA, 20 bp, Artificial Sequence
  Description of Artificial Sequence: Synthetic oligonucleotide
  Target: SCNA; (-) strand; PAM type: YTN; PAM sequence: TTT
ccaaaatcatacataatgat

SEQ ID NO: 62103 - DNA, 20 bp, Artificial Sequence
  Description of Artificial Sequence: Synthetic oligonucleotide
  Target: SCNA; (-) strand; PAM type: YTN; PAM sequence: CTT
tccaaaatcatacataatga

SEQ ID NO: 62104 - DNA, 20 bp, Artificial Sequence
  Description of Artificial Sequence: Synthetic oligonucleotide
  Target: SCNA; (-) strand; PAM type: YTN; PAM sequence: CTC
accccctttccaaaatcata

SEQ ID NO: 62105 - DNA, 20 bp, Artificial Sequence
  Description of Artificial Sequence: Synthetic oligonucleotide
  Target: SCNA; (-) strand; PAM type: YTN; PAM sequence: CTC
atgctcaccccctttccaaa

SEQ ID NO: 62106 - DNA, 20 bp, Artificial Sequence
  Description of Artificial Sequence: Synthetic oligonucleotide
  Target: SCNA; (-) strand; PAM type: YTN; PAM sequence: TTC
ccccatctcatgctcacccc

SEQ ID NO: 62107 - DNA, 20 bp, Artificial Sequence
  Description of Artificial Sequence: Synthetic oligonucleotide
  Target: SCNA; (-) strand; PAM type: YTN; PAM sequence: CTA
ttcccccatctcatgctcac

SEQ ID NO: 62108 - DNA, 20 bp, Artificial Sequence
  Description of Artificial Sequence: Synthetic oligonucleotide
  Target: SCNA; (-) strand; PAM type: YTN; PAM sequence: TTC
agagtaaccctattccccca

SEQ ID NO: 62109 - DNA, 20 bp, Artificial Sequence
  Description of Artificial Sequence: Synthetic oligonucleotide
  Target: SCNA; (-) strand; PAM type: YTN; PAM sequence: CTT
cagagtaaccctattccccc

SEQ ID NO: 62110 - DNA, 20 bp, Artificial Sequence
  Description of Artificial Sequence: Synthetic oligonucleotide
  Target: SCNA; (-) strand; PAM type: YTN; PAM sequence: TTC
ttcagagtaaccctattccc

SEQ ID NO: 62111 - DNA, 20 bp, Artificial Sequence
  Description of Artificial Sequence: Synthetic oligonucleotide
  Target: SCNA; (-) strand; PAM type: YTN; PAM sequence: TTT
cttcagagtaaccctattcc

SEQ ID NO: 62112 - DNA, 20 bp, Artificial Sequence
  Description of Artificial Sequence: Synthetic oligonucleotide
  Target: SCNA; (-) strand; PAM type: YTN; PAM sequence: TTC
ccatttcttcagagtaaccc

SEQ ID NO: 62113 - DNA, 20 bp, Artificial Sequence
  Description of Artificial Sequence: Synthetic oligonucleotide
  Target: SCNA; (-) strand; PAM type: YTN; PAM sequence: CTT
cccatttcttcagagtaacc

SEQ ID NO: 62114 - DNA, 20 bp, Artificial Sequence
  Description of Artificial Sequence: Synthetic oligonucleotide
  Target: SCNA; (-) strand; PAM type: YTN; PAM sequence: CTC
ttcccatttcttcagagtaa

SEQ ID NO: 62115 - DNA, 20 bp, Artificial Sequence
  Description of Artificial Sequence: Synthetic oligonucleotide
  Target: SCNA; (-) strand; PAM type: YTN; PAM sequence: TTG
ctcttcccatttcttcagag

SEQ ID NO: 62116 - DNA, 20 bp, Artificial Sequence
  Description of Artificial Sequence: Synthetic oligonucleotide
  Target: SCNA; (-) strand; PAM type: YTN; PAM sequence: TTG
attgctcttcccatttcttc

SEQ ID NO: 62117 - DNA, 20 bp, Artificial Sequence
  Description of Artificial Sequence: Synthetic oligonucleotide
  Target: SCNA; (-) strand; PAM type: YTN; PAM sequence: CTT
gattgctcttcccatttctt

SEQ ID NO: 62118 - DNA, 20 bp, Artificial Sequence
  Description of Artificial Sequence: Synthetic oligonucleotide
  Target: SCNA; (-) strand; PAM type: YTN; PAM sequence: CTC
cttgattgctcttcccattt

SEQ ID NO: 62119 - DNA, 20 bp, Artificial Sequence
  Description of Artificial Sequence: Synthetic oligonucleotide
  Target: SCNA; (-) strand; PAM type: YTN; PAM sequence: TTC
tccttgattgctcttcccat

SEQ ID NO: 62120 - DNA, 20 bp, Artificial Sequence
  Description of Artificial Sequence: Synthetic oligonucleotide
  Target: SCNA; (-) strand; PAM type: YTN; PAM sequence: CTT
ctccttgattgctcttccca

SEQ ID NO: 62121 - DNA, 20 bp, Artificial Sequence
  Description of Artificial Sequence: Synthetic oligonucleotide
  Target: SCNA; (-) strand; PAM type: YTN; PAM sequence: CTA
tgcttctccttgattgctct

SEQ ID NO: 62122 - DNA, 20 bp, Artificial Sequence
  Description of Artificial Sequence: Synthetic oligonucleotide
  Target: SCNA; (-) strand; PAM type: YTN; PAM sequence: CTG
aatactatgcttctccttga

SEQ ID NO: 62123 - DNA, 20 bp, Artificial Sequence
  Description of Artificial Sequence: Synthetic oligonucleotide
  Target: SCNA; (-) strand; PAM type: YTN; PAM sequence: TTA
gagaatctgaatactatgct

SEQ ID NO: 62124 - DNA, 20 bp, Artificial Sequence
  Description of Artificial Sequence: Synthetic oligonucleotide
  Target: SCNA; (-) strand; PAM type: YTN; PAM sequence: TTG
gccatggggtcaaattagag

SEQ ID NO: 62125 - DNA, 20 bp, Artificial Sequence
  Description of Artificial Sequence: Synthetic oligonucleotide
  Target: SCNA; (-) strand; PAM type: YTN; PAM sequence: CTA
gtggaaacaatatgaagttg

SEQ ID NO: 62126 - DNA, 20 bp, Artificial Sequence
  Description of Artificial Sequence: Synthetic oligonucleotide
  Target: SCNA; (-) strand; PAM type: YTN; PAM sequence: TTA
aaatgatatctagtggaaac

SEQ ID NO: 62127 - DNA, 20 bp, Artificial Sequence
  Description of Artificial Sequence: Synthetic oligonucleotide
  Target: SCNA; (-) strand; PAM type: YTN; PAM sequence: TTT
aaaatgatatctagtggaaa

SEQ ID NO: 62128 - DNA, 20 bp, Artificial Sequence
  Description of Artificial Sequence: Synthetic oligonucleotide
  Target: SCNA; (-) strand; PAM type: YTN; PAM sequence: TTA
ggaccacgaaaccacaggaa

SEQ ID NO: 62129 - DNA, 20 bp, Artificial Sequence
  Description of Artificial Sequence: Synthetic oligonucleotide
  Target: SCNA; (-) strand; PAM type: YTN; PAM sequence: CTT
aggaccacgaaaccacagga

SEQ ID NO: 62130 - DNA, 20 bp, Artificial Sequence
  Description of Artificial Sequence: Synthetic oligonucleotide
  Target: SCNA; (-) strand; PAM type: YTN; PAM sequence: TTC
ttaggaccacgaaaccacag

SEQ ID NO: 62131 - DNA, 20 bp, Artificial Sequence
  Description of Artificial Sequence: Synthetic oligonucleotide
  Target: SCNA; (-) strand; PAM type: YTN; PAM sequence: TTC
atattcttaggaccacgaaa

SEQ ID NO: 62132 - DNA, 20 bp, Artificial Sequence
  Description of Artificial Sequence: Synthetic oligonucleotide
  Target: SCNA; (-) strand; PAM type: YTN; PAM sequence: CTT
catattcttaggaccacgaa

SEQ ID NO: 62133 - DNA, 20 bp, Artificial Sequence
  Description of Artificial Sequence: Synthetic oligonucleotide
  Target: SCNA; (-) strand; PAM type: YTN; PAM sequence: TTG
catgccttcatattcttagg

SEQ ID NO: 62134 - DNA, 20 bp, Artificial Sequence
  Description of Artificial Sequence: Synthetic oligonucleotide
  Target: SCNA; (-) strand; PAM type: YTN; PAM sequence: CTT
gcatgccttcatattcttag

SEQ ID NO: 62135 - DNA, 20 bp, Artificial Sequence
  Description of Artificial Sequence: Synthetic oligonucleotide
  Target: SCNA; (-) strand; PAM type: YTN; PAM sequence: TTG
gaatcttgcatgccttcata

SEQ ID NO: 62136 - DNA, 20 bp, Artificial Sequence
  Description of Artificial Sequence: Synthetic oligonucleotide
  Target: SCNA; (-) strand; PAM type: YTN; PAM sequence: CTT
ggaatcttgcatgccttcat

SEQ ID NO: 62137 - DNA, 20 bp, Artificial Sequence
  Description of Artificial Sequence: Synthetic oligonucleotide
  Target: SCNA; (-) strand; PAM type: YTN; PAM sequence: TTA
atcttggaatcttgcatgcc

SEQ ID NO: 62138 - DNA, 20 bp, Artificial Sequence
  Description of Artificial Sequence: Synthetic oligonucleotide
  Target: SCNA; (-) strand; PAM type: YTN; PAM sequence: TTT
aatcttggaatcttgcatgc

SEQ ID NO: 62139 - DNA, 20 bp, Artificial Sequence
  Description of Artificial Sequence: Synthetic oligonucleotide
  Target: SCNA; (-) strand; PAM type: YTN; PAM sequence: CTT
taatcttggaatcttgcatg

SEQ ID NO: 62140 - DNA, 20 bp, Artificial Sequence
  Description of Artificial Sequence: Synthetic oligonucleotide
  Target: SCNA; (-) strand; PAM type: YTN; PAM sequence: TTA
acatctttaatcttggaatc

SEQ ID NO: 62141 - DNA, 20 bp, Artificial Sequence
  Description of Artificial Sequence: Synthetic oligonucleotide
  Target: SCNA; (-) strand; PAM type: YTN; PAM sequence: TTT
aacatctttaatcttggaat

SEQ ID NO: 62142 - DNA, 20 bp, Artificial Sequence
  Description of Artificial Sequence: Synthetic oligonucleotide
  Target: SCNA; (-) strand; PAM type: YTN; PAM sequence: CTT
taacatctttaatcttggaa

SEQ ID NO: 62143 - DNA, 20 bp, Artificial Sequence
  Description of Artificial Sequence: Synthetic oligonucleotide
  Target: SCNA; (-) strand; PAM type: YTN; PAM sequence: CTG
gctttaacatctttaatctt

SEQ ID NO: 62144 - DNA, 20 bp, Artificial Sequence
  Description of Artificial Sequence: Synthetic oligonucleotide
  Target: SCNA; (-) strand; PAM type: YTN; PAM sequence: CTA
tctggctttaacatctttaa

SEQ ID NO: 62145 - DNA, 20 bp, Artificial Sequence
  Description of Artificial Sequence: Synthetic oligonucleotide
  Target: SCNA; (-) strand; PAM type: YTN; PAM sequence: TTC
tatctggctttaacatcttt

SEQ ID NO: 62146 - DNA, 20 bp, Artificial Sequence
  Description of Artificial Sequence: Synthetic oligonucleotide
  Target: SCNA; (-) strand; PAM type: YTN; PAM sequence: TTT
ctatctggctttaacatctt

SEQ ID NO: 62147 - DNA, 20 bp, Artificial Sequence
  Description of Artificial Sequence: Synthetic oligonucleotide
  Target: SCNA; (-) strand; PAM type: YTN; PAM sequence: TTT
tctatctggctttaacatct

SEQ ID NO: 62148 - DNA, 20 bp, Artificial Sequence
  Description of Artificial Sequence: Synthetic oligonucleotide
  Target: SCNA; (-) strand; PAM type: YTN; PAM sequence: CTT
ttctatctggctttaacatc

SEQ ID NO: 62149 - DNA, 20 bp, Artificial Sequence
  Description of Artificial Sequence: Synthetic oligonucleotide
  Target: SCNA; (-) strand; PAM type: YTN; PAM sequence: TTA
aatatcttttctatctggct

SEQ ID NO: 62150 - DNA, 20 bp, Artificial Sequence
  Description of Artificial Sequence: Synthetic oligonucleotide
  Target: SCNA; (-) strand; PAM type: YTN; PAM sequence: TTT
aaatatcttttctatctggc

SEQ ID NO: 62151 - DNA, 20 bp, Artificial Sequence
  Description of Artificial Sequence: Synthetic oligonucleotide
  Target: SCNA; (-) strand; PAM type: YTN; PAM sequence: TTG
aaatatttaaatatcttttc

SEQ ID NO: 62152 - DNA, 20 bp, Artificial Sequence
  Description of Artificial Sequence: Synthetic oligonucleotide
  Target: SCNA; (-) strand; PAM type: YTN; PAM sequence: TTT
gaaatatttaaatatctttt

SEQ ID NO: 62153 - DNA, 20 bp, Artificial Sequence
  Description of Artificial Sequence: Synthetic oligonucleotide
  Target: SCNA; (-) strand; PAM type: YTN; PAM sequence: TTT
tgaaatatttaaatatcttt

SEQ ID NO: 62154 - DNA, 20 bp, Artificial Sequence
  Description of Artificial Sequence: Synthetic oligonucleotide
  Target: SCNA; (-) strand; PAM type: YTN; PAM sequence: TTA
gattttgaaatatttaaata

SEQ ID NO: 62155 - DNA, 20 bp, Artificial Sequence
  Description of Artificial Sequence: Synthetic oligonucleotide
  Target: SCNA; (-) strand; PAM type: YTN; PAM sequence: TTG
ttagattttgaaatatttaa

SEQ ID NO: 62156 - DNA, 20 bp, Artificial Sequence
  Description of Artificial Sequence: Synthetic oligonucleotide
  Target: SCNA; (-) strand; PAM type: YTN; PAM sequence: CTT
gttagattttgaaatattta

SEQ ID NO: 62157 - DNA, 20 bp, Artificial Sequence
  Description of Artificial Sequence: Synthetic oligonucleotide
  Target: SCNA; (-) strand; PAM type: YTN; PAM sequence: TTG
aacttgttagattttgaaat

SEQ ID NO: 62158 - DNA, 20 bp, Artificial Sequence
  Description of Artificial Sequence: Synthetic oligonucleotide
  Target: SCNA; (-) strand; PAM type: YTN; PAM sequence: TTT
gaacttgttagattttgaaa

SEQ ID NO: 62159 - DNA, 20 bp, Artificial Sequence
  Description of Artificial Sequence: Synthetic oligonucleotide
  Target: SCNA; (-) strand; PAM type: YTN; PAM sequence: CTA
aagtcatttgaacttgttag

SEQ ID NO: 62160 - DNA, 20 bp, Artificial Sequence
  Description of Artificial Sequence: Synthetic oligonucleotide
  Target: SCNA; (-) strand; PAM type: YTN; PAM sequence: CTA
aaactaaagtcatttgaact

SEQ ID NO: 62161 - DNA, 20 bp, Artificial Sequence
  Description of Artificial Sequence: Synthetic oligonucleotide
  Target: SCNA; (-) strand; PAM type: YTN; PAM sequence: TTC
taaaactaaagtcatttgaa

SEQ ID NO: 62162 - DNA, 20 bp, Artificial Sequence
  Description of Artificial Sequence: Synthetic oligonucleotide
  Target: SCNA; (-) strand; PAM type: YTN; PAM sequence: TTT
ctaaaactaaagtcatttga

SEQ ID NO: 62163 - DNA, 20 bp, Artificial Sequence
  Description of Artificial Sequence: Synthetic oligonucleotide
  Target: SCNA; (-) strand; PAM type: YTN; PAM sequence: CTT
tctaaaactaaagtcatttg

SEQ ID NO: 62164 - DNA, 20 bp, Artificial Sequence
  Description of Artificial Sequence: Synthetic oligonucleotide
  Target: SCNA; (-) strand; PAM type: YTN; PAM sequence: TTC
tttctaaaactaaagtcatt

SEQ ID NO: 62165 - DNA, 20 bp, Artificial Sequence
  Description of Artificial Sequence: Synthetic oligonucleotide
  Target: SCNA; (-) strand; PAM type: YTN; PAM sequence: TTT
ctttctaaaactaaagtcat

SEQ ID NO: 62166 - DNA, 20 bp, Artificial Sequence
  Description of Artificial Sequence: Synthetic oligonucleotide
  Target: SCNA; (-) strand; PAM type: YTN; PAM sequence: TTT
tctttctaaaactaaagtca

SEQ ID NO: 62167 - DNA, 20 bp, Artificial Sequence
  Description of Artificial Sequence: Synthetic oligonucleotide
  Target: SCNA; (-) strand; PAM type: YTN; PAM sequence: TTT
ttctttctaaaactaaagtc

SEQ ID NO: 62168 - DNA, 20 bp, Artificial Sequence
  Description of Artificial Sequence: Synthetic oligonucleotide
  Target: SCNA; (-) strand; PAM type: YTN; PAM sequence: TTT
tttctttctaaaactaaagt

SEQ ID NO: 62169 - DNA, 20 bp, Artificial Sequence
  Description of Artificial Sequence: Synthetic oligonucleotide
  Target: SCNA; (-) strand; PAM type: YTN; PAM sequence: TTT
ttttctttctaaaactaaag

SEQ ID NO: 62170 - DNA, 20 bp, Artificial Sequence
  Description of Artificial Sequence: Synthetic oligonucleotide
  Target: SCNA; (-) strand; PAM type: YTN; PAM sequence: TTA
atgtgtttttttctttctaa

SEQ ID NO: 62171 - DNA, 20 bp, Artificial Sequence
  Description of Artificial Sequence: Synthetic oligonucleotide
  Target: SCNA; (-) strand; PAM type: YTN; PAM sequence: CTC
attaatgtgtttttttcttt

SEQ ID NO: 62172 - DNA, 20 bp, Artificial Sequence
  Description of Artificial Sequence: Synthetic oligonucleotide
  Target: SCNA; (-) strand; PAM type: YTN; PAM sequence: TTG
ggctcattaatgtgtttttt

SEQ ID NO: 62173 - DNA, 20 bp, Artificial Sequence
  Description of Artificial Sequence: Synthetic oligonucleotide
  Target: SCNA; (-) strand; PAM type: YTN; PAM sequence: CTT
gggctcattaatgtgttttt

SEQ ID NO: 62174 - DNA, 20 bp, Artificial Sequence
  Description of Artificial Sequence: Synthetic oligonucleotide
  Target: SCNA; (-) strand; PAM type: YTN; PAM sequence: TTC
ttgggctcattaatgtgttt

SEQ ID NO: 62175 - DNA, 20 bp, Artificial Sequence
  Description of Artificial Sequence: Synthetic oligonucleotide
  Target: SCNA; (-) strand; PAM type: YTN; PAM sequence: TTT
cttgggctcattaatgtgtt

SEQ ID NO: 62176 - DNA, 20 bp, Artificial Sequence
  Description of Artificial Sequence: Synthetic oligonucleotide
  Target: SCNA; (-) strand; PAM type: YTN; PAM sequence: TTG
cgtgtatttcttgggctcat

SEQ ID NO: 62177 - DNA, 20 bp, Artificial Sequence
  Description of Artificial Sequence: Synthetic oligonucleotide
  Target: SCNA; (-) strand; PAM type: YTN; PAM sequence: TTG
cagagttgcgtgtatttctt

SEQ ID NO: 62178 - DNA, 20 bp, Artificial Sequence
  Description of Artificial Sequence: Synthetic oligonucleotide
  Target: SCNA; (-) strand; PAM type: YTN; PAM sequence: CTC
accagagttgcagagttgcg

SEQ ID NO: 62179 - DNA, 20 bp, Artificial Sequence
  Description of Artificial Sequence: Synthetic oligonucleotide
  Target: SCNA; (-) strand; PAM type: YTN; PAM sequence: CTA
tcatgctcaccagagttgca

SEQ ID NO: 62180 - DNA, 20 bp, Artificial Sequence
  Description of Artificial Sequence: Synthetic oligonucleotide
  Target: SCNA; (-) strand; PAM type: YTN; PAM sequence: TTA
gaagtctatcatgctcacca

SEQ ID NO: 62181 - DNA, 20 bp, Artificial Sequence
  Description of Artificial Sequence: Synthetic oligonucleotide
  Target: SCNA; (-) strand; PAM type: YTN; PAM sequence: CTT
agaagtctatcatgctcacc

SEQ ID NO: 62182 - DNA, 20 bp, Artificial Sequence
  Description of Artificial Sequence: Synthetic oligonucleotide
  Target: SCNA; (-) strand; PAM type: YTN; PAM sequence: CTC
ttagaagtctatcatgctca

SEQ ID NO: 62183 - DNA, 20 bp, Artificial Sequence
  Description of Artificial Sequence: Synthetic oligonucleotide
  Target: SCNA; (-) strand; PAM type: YTN; PAM sequence: TTA
ctcttagaagtctatcatgc

SEQ ID NO: 62184 - DNA, 20 bp, Artificial Sequence
  Description of Artificial Sequence: Synthetic oligonucleotide
  Target: SCNA; (-) strand; PAM type: YTN; PAM sequence: TTT
actcttagaagtctatcatg

SEQ ID NO: 62185 - DNA, 20 bp, Artificial Sequence
  Description of Artificial Sequence: Synthetic oligonucleotide
  Target: SCNA; (-) strand; PAM type: YTN; PAM sequence: CTA
gtacatttactcttagaagt

SEQ ID NO: 62186 - DNA, 20 bp, Artificial Sequence
  Description of Artificial Sequence: Synthetic oligonucleotide
  Target: SCNA; (-) strand; PAM type: YTN; PAM sequence: TTG
tatctagtacatttactctt

SEQ ID NO: 62187 - DNA, 20 bp, Artificial Sequence
  Description of Artificial Sequence: Synthetic oligonucleotide
  Target: SCNA; (-) strand; PAM type: YTN; PAM sequence: TTA
ggttgtatctagtacattta

SEQ ID NO: 62188 - DNA, 20 bp, Artificial Sequence
  Description of Artificial Sequence: Synthetic oligonucleotide
  Target: SCNA; (-) strand; PAM type: YTN; PAM sequence: TTT
aggttgtatctagtacattt

SEQ ID NO: 62189 - DNA, 20 bp, Artificial Sequence
  Description of Artificial Sequence: Synthetic oligonucleotide
  Target: SCNA; (-) strand; PAM type: YTN; PAM sequence: CTG
aatttaggttgtatctagta

SEQ ID NO: 62190 - DNA, 20 bp, Artificial Sequence
  Description of Artificial Sequence: Synthetic oligonucleotide
  Target: SCNA; (-) strand; PAM type: YTN; PAM sequence: TTA
ataagtccctgaatttaggt

SEQ ID NO: 62191 - DNA, 20 bp, Artificial Sequence
  Description of Artificial Sequence: Synthetic oligonucleotide
  Target: SCNA; (-) strand; PAM type: YTN; PAM sequence: TTT
aataagtccctgaatttagg

SEQ ID NO: 62192 - DNA, 20 bp, Artificial Sequence
  Description of Artificial Sequence: Synthetic oligonucleotide
  Target: SCNA; (-) strand; PAM type: YTN; PAM sequence: CTT
taataagtccctgaatttag

SEQ ID NO: 62193 - DNA, 20 bp, Artificial Sequence
  Description of Artificial Sequence: Synthetic oligonucleotide
  Target: SCNA; (-) strand; PAM type: YTN; PAM sequence: CTA
gtaatgagtagtagagcttt

SEQ ID NO: 62194 - DNA, 20 bp, Artificial Sequence
  Description of Artificial Sequence: Synthetic oligonucleotide
  Target: SCNA; (-) strand; PAM type: YTN; PAM sequence: CTG
agtcactagtaatgagtagt

SEQ ID NO: 62195 - DNA, 20 bp, Artificial Sequence
  Description of Artificial Sequence: Synthetic oligonucleotide
  Target: SCNA; (-) strand; PAM type: YTN; PAM sequence: CTC
tgagtcactagtaatgagta

SEQ ID NO: 62196 - DNA, 20 bp, Artificial Sequence
  Description of Artificial Sequence: Synthetic oligonucleotide
  Target: SCNA; (-) strand; PAM type: YTN; PAM sequence: TTG
ctctgagtcactagtaatga

SEQ ID NO: 62197 - DNA, 20 bp, Artificial Sequence
  Description of Artificial Sequence: Synthetic oligonucleotide
  Target: SCNA; (-) strand; PAM type: YTN; PAM sequence: CTT
gctctgagtcactagtaatg

SEQ ID NO: 62198 - DNA, 20 bp, Artificial Sequence
  Description of Artificial Sequence: Synthetic oligonucleotide
  Target: SCNA; (-) strand; PAM type: YTN; PAM sequence: TTA
tagatacttgctctgagtca

SEQ ID NO: 62199 - DNA, 20 bp, Artificial Sequence
  Description of Artificial Sequence: Synthetic oligonucleotide
  Target: SCNA; (-) strand; PAM type: YTN; PAM sequence: TTA
gagaggttatagatacttgc

SEQ ID NO: 62200 - DNA, 20 bp, Artificial Sequence
  Description of Artificial Sequence: Synthetic oligonucleotide
  Target: SCNA; (-) strand; PAM type: YTN; PAM sequence: CTA
gagattagagaggttataga

SEQ ID NO: 62201 - DNA, 20 bp, Artificial Sequence
  Description of Artificial Sequence: Synthetic oligonucleotide
  Target: SCNA; (-) strand; PAM type: YTN; PAM sequence: TTA
atgagaaaactagagattag

SEQ ID NO: 62202 - DNA, 20 bp, Artificial Sequence
  Description of Artificial Sequence: Synthetic oligonucleotide
  Target: SCNA; (-) strand; PAM type: YTN; PAM sequence: TTT
aatgagaaaactagagatta

SEQ ID NO: 62203 - DNA, 20 bp, Artificial Sequence
  Description of Artificial Sequence: Synthetic oligonucleotide
  Target: SCNA; (-) strand; PAM type: YTN; PAM sequence: TTT
taatgagaaaactagagatt

SEQ ID NO: 62204 - DNA, 20 bp, Artificial Sequence
  Description of Artificial Sequence: Synthetic oligonucleotide
  Target: SCNA; (-) strand; PAM type: YTN; PAM sequence: TTT
ttaatgagaaaactagagat

SEQ ID NO: 62205 - DNA, 20 bp, Artificial Sequence
  Description of Artificial Sequence: Synthetic oligonucleotide
  Target: SCNA; (-) strand; PAM type: YTN; PAM sequence: TTT
tttaatgagaaaactagaga

SEQ ID NO: 62206 - DNA, 20 bp, Artificial Sequence
  Description of Artificial Sequence: Synthetic oligonucleotide
  Target: SCNA; (-) strand; PAM type: YTN; PAM sequence: TTA
caacaatcaaacaagacaag

SEQ ID NO: 62207 - DNA, 20 bp, Artificial Sequence
  Description of Artificial Sequence: Synthetic oligonucleotide
  Target: SCNA; (-) strand; PAM type: YTN; PAM sequence: CTT
acaacaatcaaacaagacaa

SEQ ID NO: 62208 - DNA, 20 bp, Artificial Sequence
  Description of Artificial Sequence: Synthetic oligonucleotide
  Target: SCNA; (-) strand; PAM type: YTN; PAM sequence: TTC
cttacaacaatcaaacaaga

SEQ ID NO: 62209 - DNA, 20 bp, Artificial Sequence
  Description of Artificial Sequence: Synthetic oligonucleotide
  Target: SCNA; (-) strand; PAM type: YTN; PAM sequence: TTC
attccttacaacaatcaaac

SEQ ID NO: 62210 - DNA, 20 bp, Artificial Sequence
  Description of Artificial Sequence: Synthetic oligonucleotide
  Target: SCNA; (-) strand; PAM type: YTN; PAM sequence: TTA
ttcattccttacaacaatca

SEQ ID NO: 62211 - DNA, 20 bp, Artificial Sequence
  Description of Artificial Sequence: Synthetic oligonucleotide
  Target: SCNA; (-) strand; PAM type: YTN; PAM sequence: CTA
tgagccacattattcattcc

SEQ ID NO: 62212 - DNA, 20 bp, Artificial Sequence
  Description of Artificial Sequence: Synthetic oligonucleotide
  Target: SCNA; (-) strand; PAM type: YTN; PAM sequence: TTG
ctatgagccacattattcat

SEQ ID NO: 62213 - DNA, 20 bp, Artificial Sequence
  Description of Artificial Sequence: Synthetic oligonucleotide
  Target: SCNA; (-) strand; PAM type: YTN; PAM sequence: TTT
gctatgagccacattattca

SEQ ID NO: 62214 - DNA, 20 bp, Artificial Sequence
  Description of Artificial Sequence: Synthetic oligonucleotide
  Target: SCNA; (-) strand; PAM type: YTN; PAM sequence: CTT
tgctatgagccacattattc

SEQ ID NO: 62215 - DNA, 20 bp, Artificial Sequence
  Description of Artificial Sequence: Synthetic oligonucleotide
  Target: SCNA; (-) strand; PAM type: YTN; PAM sequence: CTC
tttgctatgagccacattat

SEQ ID NO: 62216 - DNA, 20 bp, Artificial Sequence
  Description of Artificial Sequence: Synthetic oligonucleotide
  Target: SCNA; (-) strand; PAM type: YTN; PAM sequence: CTG
gctctttgctatgagccaca

SEQ ID NO: 62217 - DNA, 20 bp, Artificial Sequence
  Description of Artificial Sequence: Synthetic oligonucleotide
  Target: SCNA; (-) strand; PAM type: YTN; PAM sequence: CTG
cctggctctttgctatgagc

SEQ ID NO: 62218 - DNA, 20 bp, Artificial Sequence
  Description of Artificial Sequence: Synthetic oligonucleotide
  Target: SCNA; (-) strand; PAM type: YTN; PAM sequence: CTC
tgcctggctctttgctatga

SEQ ID NO: 62219 - DNA, 20 bp, Artificial Sequence
  Description of Artificial Sequence: Synthetic oligonucleotide
  Target: SCNA; (-) strand; PAM type: YTN; PAM sequence: TTC
cactctgcctggctctttgc

SEQ ID NO: 62220 - DNA, 20 bp, Artificial Sequence
  Description of Artificial Sequence: Synthetic oligonucleotide
  Target: SCNA; (-) strand; PAM type: YTN; PAM sequence: CTT
ccactctgcctggctctttg

SEQ ID NO: 62221 - DNA, 20 bp, Artificial Sequence
  Description of Artificial Sequence: Synthetic oligonucleotide
  Target: SCNA; (-) strand; PAM type: YTN; PAM sequence: CTG
agagcttccactctgcctgg

SEQ ID NO: 62222 - DNA, 20 bp, Artificial Sequence
  Description of Artificial Sequence: Synthetic oligonucleotide
  Target: SCNA; (-) strand; PAM type: YTN; PAM sequence: TTG
tactgagagcttccactctg

SEQ ID NO: 62223 - DNA, 20 bp, Artificial Sequence
  Description of Artificial Sequence: Synthetic oligonucleotide
  Target: SCNA; (-) strand; PAM type: YTN; PAM sequence: CTT
gtactgagagcttccactct

SEQ ID NO: 62224 - DNA, 20 bp, Artificial Sequence
  Description of Artificial Sequence: Synthetic oligonucleotide
  Target: SCNA; (-) strand; PAM type: YTN; PAM sequence: CTA
cttgtactgagagcttccac

SEQ ID NO: 62225 - DNA, 20 bp, Artificial Sequence
  Description of Artificial Sequence: Synthetic oligonucleotide
  Target: SCNA; (-) strand; PAM type: YTN; PAM sequence: CTA
gataataacaatagctactt

SEQ ID NO: 62226 - DNA, 20 bp, Artificial Sequence
  Description of Artificial Sequence: Synthetic oligonucleotide
  Target: SCNA; (-) strand; PAM type: YTN; PAM sequence: CTA
ggacacccaaaacatggagg

SEQ ID NO: 62227 - DNA, 20 bp, Artificial Sequence
  Description of Artificial Sequence: Synthetic oligonucleotide
  Target: SCNA; (-) strand; PAM type: YTN; PAM sequence: CTG
caatggaaaaaaaaaaaaag

SEQ ID NO: 62228 - DNA, 20 bp, Artificial Sequence
  Description of Artificial Sequence: Synthetic oligonucleotide
  Target: SCNA; (-) strand; PAM type: YTN; PAM sequence: CTA
ctgcaatggaaaaaaaaaaa

SEQ ID NO: 62229 - DNA, 20 bp, Artificial Sequence
  Description of Artificial Sequence: Synthetic oligonucleotide
  Target: SCNA; (-) strand; PAM type: YTN; PAM sequence: CTG
tggaggatgggaacaggtgg

SEQ ID NO: 62230 - DNA, 20 bp, Artificial Sequence
  Description of Artificial Sequence: Synthetic oligonucleotide
  Target: SCNA; (-) strand; PAM type: YTN; PAM sequence: CTG
gtgggatgggagactgtgga

SEQ ID NO: 62231 - DNA, 20 bp, Artificial Sequence
  Description of Artificial Sequence: Synthetic oligonucleotide
  Target: SCNA; (-) strand; PAM type: YTN; PAM sequence: TTG
ctggtgggatgggagactgt

SEQ ID NO: 62232 - DNA, 20 bp, Artificial Sequence
  Description of Artificial Sequence: Synthetic oligonucleotide
  Target: SCNA; (-) strand; PAM type: YTN; PAM sequence: CTC
acgtgtgttgctggtgggat

SEQ ID NO: 62233 - DNA, 20 bp, Artificial Sequence
  Description of Artificial Sequence: Synthetic oligonucleotide
  Target: SCNA; (-) strand; PAM type: YTN; PAM sequence: TTG
atgggaaggcatcagatatc

SEQ ID NO: 62234 - DNA, 20 bp, Artificial Sequence
  Description of Artificial Sequence: Synthetic oligonucleotide
  Target: SCNA; (-) strand; PAM type: YTN; PAM sequence: TTA
ttgatgggaaggcatcagat

SEQ ID NO: 62235 - DNA, 20 bp, Artificial Sequence
  Description of Artificial Sequence: Synthetic oligonucleotide
  Target: SCNA; (-) strand; PAM type: YTN; PAM sequence: CTA
agtgagagttattgatggga

SEQ ID NO: 62236 - DNA, 20 bp, Artificial Sequence
  Description of Artificial Sequence: Synthetic oligonucleotide
  Target: SCNA; (-) strand; PAM type: YTN; PAM sequence: TTA
cccatactaagtgagagtta

SEQ ID NO: 62237 - DNA, 20 bp, Artificial Sequence
  Description of Artificial Sequence: Synthetic oligonucleotide
  Target: SCNA; (-) strand; PAM type: YTN; PAM sequence: CTT
acccatactaagtgagagtt

SEQ ID NO: 62238 - DNA, 20 bp, Artificial Sequence
  Description of Artificial Sequence: Synthetic oligonucleotide
  Target: SCNA; (-) strand; PAM type: YTN; PAM sequence: TTG
cttacccatactaagtgaga

SEQ ID NO: 62239 - DNA, 20 bp, Artificial Sequence
  Description of Artificial Sequence: Synthetic oligonucleotide
  Target: SCNA; (-) strand; PAM type: YTN; PAM sequence: TTT
gcttacccatactaagtgag

SEQ ID NO: 62240 - DNA, 20 bp, Artificial Sequence
  Description of Artificial Sequence: Synthetic oligonucleotide
  Target: SCNA; (-) strand; PAM type: YTN; PAM sequence: TTT
tgcttacccatactaagtga

SEQ ID NO: 62241 - DNA, 20 bp, Artificial Sequence
  Description of Artificial Sequence: Synthetic oligonucleotide
  Target: SCNA; (-) strand; PAM type: YTN; PAM sequence: TTT
ttgcttacccatactaagtg

SEQ ID NO: 62242 - DNA, 20 bp, Artificial Sequence
  Description of Artificial Sequence: Synthetic oligonucleotide
  Target: SCNA; (-) strand; PAM type: YTN; PAM sequence: TTT
tttgcttacccatactaagt

SEQ ID NO: 62243 - DNA, 20 bp, Artificial Sequence
  Description of Artificial Sequence: Synthetic oligonucleotide
  Target: SCNA; (-) strand; PAM type: YTN; PAM sequence: TTG
gaaattttttgcttacccat

SEQ ID NO: 62244 - DNA, 20 bp, Artificial Sequence
  Description of Artificial Sequence: Synthetic oligonucleotide
  Target: SCNA; (-) strand; PAM type: YTN; PAM sequence: CTG
gttggaaattttttgcttac

SEQ ID NO: 62245 - DNA, 20 bp, Artificial Sequence
  Description of Artificial Sequence: Synthetic oligonucleotide
  Target: SCNA; (-) strand; PAM type: YTN; PAM sequence: TTC
catccctggttggaaatttt

SEQ ID NO: 62246 - DNA, 20 bp, Artificial Sequence
  Description of Artificial Sequence: Synthetic oligonucleotide
  Target: SCNA; (-) strand; PAM type: YTN; PAM sequence: CTT
ccatccctggttggaaattt

SEQ ID NO: 62247 - DNA, 20 bp, Artificial Sequence
  Description of Artificial Sequence: Synthetic oligonucleotide
  Target: SCNA; (-) strand; PAM type: YTN; PAM sequence: CTC
cacaacttccatccctggtt

SEQ ID NO: 62248 - DNA, 20 bp, Artificial Sequence
  Description of Artificial Sequence: Synthetic oligonucleotide
  Target: SCNA; (-) strand; PAM type: YTN; PAM sequence: CTC
tccacaacttccatccctgg

SEQ ID NO: 62249 - DNA, 20 bp, Artificial Sequence
  Description of Artificial Sequence: Synthetic oligonucleotide
  Target: SCNA; (-) strand; PAM type: YTN; PAM sequence: CTA
tctctccacaacttccatcc

SEQ ID NO: 62250 - DNA, 20 bp, Artificial Sequence
  Description of Artificial Sequence: Synthetic oligonucleotide
  Target: SCNA; (-) strand; PAM type: YTN; PAM sequence: CTC
tatctctccacaacttccat

SEQ ID NO: 62251 - DNA, 20 bp, Artificial Sequence
  Description of Artificial Sequence: Synthetic oligonucleotide
  Target: SCNA; (-) strand; PAM type: YTN; PAM sequence: TTC
ccactctatctctccacaac

SEQ ID NO: 62252 - DNA, 20 bp, Artificial Sequence
  Description of Artificial Sequence: Synthetic oligonucleotide
  Target: SCNA; (-) strand; PAM type: YTN; PAM sequence: TTT
cccactctatctctccacaa

SEQ ID NO: 62253 - DNA, 20 bp, Artificial Sequence
  Description of Artificial Sequence: Synthetic oligonucleotide
  Target: SCNA; (-) strand; PAM type: YTN; PAM sequence: CTT
tcccactctatctctccaca

SEQ ID NO: 62254 - DNA, 20 bp, Artificial Sequence
  Description of Artificial Sequence: Synthetic oligonucleotide
  Target: SCNA; (-) strand; PAM type: YTN; PAM sequence: TTG
agctttcccactctatctct

SEQ ID NO: 62255 - DNA, 20 bp, Artificial Sequence
  Description of Artificial Sequence: Synthetic oligonucleotide
  Target: SCNA; (-) strand; PAM type: YTN; PAM sequence: CTT
gagctttcccactctatctc

SEQ ID NO: 62256 - DNA, 20 bp, Artificial Sequence
  Description of Artificial Sequence: Synthetic oligonucleotide
  Target: SCNA; (-) strand; PAM type: YTN; PAM sequence: CTC
cttgagctttcccactctat

SEQ ID NO: 62257 - DNA, 20 bp, Artificial Sequence
  Description of Artificial Sequence: Synthetic oligonucleotide
  Target: SCNA; (-) strand; PAM type: YTN; PAM sequence: CTA
tcaatgctccttgagctttc

SEQ ID NO: 62258 - DNA, 20 bp, Artificial Sequence
  Description of Artificial Sequence: Synthetic oligonucleotide
  Target: SCNA; (-) strand; PAM type: YTN; PAM sequence: TTA
atgatccctatcaatgctcc

SEQ ID NO: 62259 - DNA, 20 bp, Artificial Sequence
  Description of Artificial Sequence: Synthetic oligonucleotide
  Target: SCNA; (-) strand; PAM type: YTN; PAM sequence: TTA
attaatgatccctatcaatg

SEQ ID NO: 62260 - DNA, 20 bp, Artificial Sequence
  Description of Artificial Sequence: Synthetic oligonucleotide
  Target: SCNA; (-) strand; PAM type: YTN; PAM sequence: TTT
aattaatgatccctatcaat

SEQ ID NO: 62261 - DNA, 20 bp, Artificial Sequence
  Description of Artificial Sequence: Synthetic oligonucleotide
  Target: SCNA; (-) strand; PAM type: YTN; PAM sequence: TTT
taattaatgatccctatcaa

SEQ ID NO: 62262 - DNA, 20 bp, Artificial Sequence
  Description of Artificial Sequence: Synthetic oligonucleotide
  Target: SCNA; (-) strand; PAM type: YTN; PAM sequence: TTT
ttaattaatgatccctatca

SEQ ID NO: 62263 - DNA, 20 bp, Artificial Sequence
  Description of Artificial Sequence: Synthetic oligonucleotide
  Target: SCNA; (-) strand; PAM type: YTN; PAM sequence: TTG
gtagatttttaattaatgat

SEQ ID NO: 62264 - DNA, 20 bp, Artificial Sequence
  Description of Artificial Sequence: Synthetic oligonucleotide
  Target: SCNA; (-) strand; PAM type: YTN; PAM sequence: TTT
ggtagatttttaattaatga

SEQ ID NO: 62265 - DNA, 20 bp, Artificial Sequence
  Description of Artificial Sequence: Synthetic oligonucleotide
  Target: SCNA; (-) strand; PAM type: YTN; PAM sequence: TTA
gggagagaaagagatgtttg

SEQ ID NO: 62266 - DNA, 20 bp, Artificial Sequence
  Description of Artificial Sequence: Synthetic oligonucleotide
  Target: SCNA; (-) strand; PAM type: YTN; PAM sequence: CTC
gcacattagggagagaaaga

SEQ ID NO: 62267 - DNA, 20 bp, Artificial Sequence
  Description of Artificial Sequence: Synthetic oligonucleotide
  Target: SCNA; (-) strand; PAM type: YTN; PAM sequence: TTG
taactcgcacattagggaga

SEQ ID NO: 62268 - DNA, 20 bp, Artificial Sequence
  Description of Artificial Sequence: Synthetic oligonucleotide
  Target: SCNA; (-) strand; PAM type: YTN; PAM sequence: TTA
ttgtaactcgcacattaggg

SEQ ID NO: 62269 - DNA, 20 bp, Artificial Sequence
  Description of Artificial Sequence: Synthetic oligonucleotide
  Target: SCNA; (-) strand; PAM type: YTN; PAM sequence: TTG
agtgatgttattgtaactcg

SEQ ID NO: 62270 - DNA, 20 bp, Artificial Sequence
  Description of Artificial Sequence: Synthetic oligonucleotide
  Target: SCNA; (-) strand; PAM type: YTN; PAM sequence: TTT
gagtgatgttattgtaactc

SEQ ID NO: 62271 - DNA, 20 bp, Artificial Sequence
  Description of Artificial Sequence: Synthetic oligonucleotide
  Target: SCNA; (-) strand; PAM type: YTN; PAM sequence: CTT
tgagtgatgttattgtaact

SEQ ID NO: 62272 - DNA, 20 bp, Artificial Sequence
  Description of Artificial Sequence: Synthetic oligonucleotide
  Target: SCNA; (-) strand; PAM type: YTN; PAM sequence: CTG
ctttgagtgatgttattgta

SEQ ID NO: 62273 - DNA, 20 bp, Artificial Sequence
  Description of Artificial Sequence: Synthetic oligonucleotide
  Target: SCNA; (-) strand; PAM type: YTN; PAM sequence: CTG
caaactgctttgagtgatgt

SEQ ID NO: 62274 - DNA, 20 bp, Artificial Sequence
  Description of Artificial Sequence: Synthetic oligonucleotide
  Target: SCNA; (-) strand; PAM type: YTN; PAM sequence: CTG
tggctgcaaactgctttgag

SEQ ID NO: 62275 - DNA, 20 bp, Artificial Sequence
  Description of Artificial Sequence: Synthetic oligonucleotide
  Target: SCNA; (-) strand; PAM type: YTN; PAM sequence: TTC
aagctgtggctgcaaactgc

SEQ ID NO: 62276 - DNA, 20 bp, Artificial Sequence
  Description of Artificial Sequence: Synthetic oligonucleotide
  Target: SCNA; (-) strand; PAM type: YTN; PAM sequence: CTT
caagctgtggctgcaaactg

SEQ ID NO: 62277 - DNA, 20 bp, Artificial Sequence
  Description of Artificial Sequence: Synthetic oligonucleotide
  Target: SCNA; (-) strand; PAM type: YTN; PAM sequence: TTC
ttcaagctgtggctgcaaac

SEQ ID NO: 62278 - DNA, 20 bp, Artificial Sequence
  Description of Artificial Sequence: Synthetic oligonucleotide
  Target: SCNA; (-) strand; PAM type: YTN; PAM sequence: TTT
cttcaagctgtggctgcaaa

SEQ ID NO: 62279 - DNA, 20 bp, Artificial Sequence
  Description of Artificial Sequence: Synthetic oligonucleotide
  Target: SCNA; (-) strand; PAM type: YTN; PAM sequence: CTG
tatttcttcaagctgtggct

SEQ ID NO: 62280 - DNA, 20 bp, Artificial Sequence
  Description of Artificial Sequence: Synthetic oligonucleotide
  Target: SCNA; (-) strand; PAM type: YTN; PAM sequence: TTA
ctgtatttcttcaagctgtg

SEQ ID NO: 62281 - DNA, 20 bp, Artificial Sequence
  Description of Artificial Sequence: Synthetic oligonucleotide
  Target: SCNA; (-) strand; PAM type: YTN; PAM sequence: TTG
ttactgtatttcttcaagct

SEQ ID NO: 62282 - DNA, 20 bp, Artificial Sequence
  Description of Artificial Sequence: Synthetic oligonucleotide
  Target: SCNA; (-) strand; PAM type: YTN; PAM sequence: CTG
tcattgttactgtatttctt

SEQ ID NO: 62283 - DNA, 20 bp, Artificial Sequence
  Description of Artificial Sequence: Synthetic oligonucleotide
  Target: SCNA; (-) strand; PAM type: YTN; PAM sequence: TTC
tgtcattgttactgtatttc

SEQ ID NO: 62284 - DNA, 20 bp, Artificial Sequence
  Description of Artificial Sequence: Synthetic oligonucleotide
  Target: SCNA; (-) strand; PAM type: YTN; PAM sequence: TTA
attctgtcattgttactgta

SEQ ID NO: 62285 - DNA, 20 bp, Artificial Sequence
  Description of Artificial Sequence: Synthetic oligonucleotide
  Target: SCNA; (-) strand; PAM type: YTN; PAM sequence: TTA
ataaagatagtgaatgttaa

SEQ ID NO: 62286 - DNA, 20 bp, Artificial Sequence
  Description of Artificial Sequence: Synthetic oligonucleotide
  Target: SCNA; (-) strand; PAM type: YTN; PAM sequence: TTA
agaaagtaaaaatgttaata

SEQ ID NO: 62287 - DNA, 20 bp, Artificial Sequence
  Description of Artificial Sequence: Synthetic oligonucleotide
  Target: SCNA; (-) strand; PAM type: YTN; PAM sequence: TTT
aagaaagtaaaaatgttaat

SEQ ID NO: 62288 - DNA, 20 bp, Artificial Sequence
  Description of Artificial Sequence: Synthetic oligonucleotide
  Target: SCNA; (-) strand; PAM type: YTN; PAM sequence: TTG
aaagaaacaaggtttaagaa

SEQ ID NO: 62289 - DNA, 20 bp, Artificial Sequence
  Description of Artificial Sequence: Synthetic oligonucleotide
  Target: SCNA; (-) strand; PAM type: YTN; PAM sequence: TTT
gaaagaaacaaggtttaaga

SEQ ID NO: 62290 - DNA, 20 bp, Artificial Sequence
  Description of Artificial Sequence: Synthetic oligonucleotide
  Target: SCNA; (-) strand; PAM type: YTN; PAM sequence: TTT
tgaaagaaacaaggtttaag

SEQ ID NO: 62291 - DNA, 20 bp, Artificial Sequence
  Description of Artificial Sequence: Synthetic oligonucleotide
  Target: SCNA; (-) strand; PAM type: YTN; PAM sequence: CTT
ttgaaagaaacaaggtttaa

SEQ ID NO: 62292 - DNA, 20 bp, Artificial Sequence
  Description of Artificial Sequence: Synthetic oligonucleotide
  Target: SCNA; (-) strand; PAM type: YTN; PAM sequence: CTA
tgccagtgtcttttgaaaga

SEQ ID NO: 62293 - DNA, 20 bp, Artificial Sequence
  Description of Artificial Sequence: Synthetic oligonucleotide
  Target: SCNA; (-) strand; PAM type: YTN; PAM sequence: TTC
atacaggactatgccagtgt

SEQ ID NO: 62294 - DNA, 20 bp, Artificial Sequence
  Description of Artificial Sequence: Synthetic oligonucleotide
  Target: SCNA; (-) strand; PAM type: YTN; PAM sequence: TTG
gcaaatccacataattcata

SEQ ID NO: 62295 - DNA, 20 bp, Artificial Sequence
  Description of Artificial Sequence: Synthetic oligonucleotide
  Target: SCNA; (-) strand; PAM type: YTN; PAM sequence: CTT
ggcaaatccacataattcat

SEQ ID NO: 62296 - DNA, 20 bp, Artificial Sequence
  Description of Artificial Sequence: Synthetic oligonucleotide
  Target: SCNA; (-) strand; PAM type: YTN; PAM sequence: CTC
ttggcaaatccacataattc

SEQ ID NO: 62297 - DNA, 20 bp, Artificial Sequence
  Description of Artificial Sequence: Synthetic oligonucleotide
  Target: SCNA; (-) strand; PAM type: YTN; PAM sequence: TTC
tcttggcaaatccacataat

SEQ ID NO: 62298 - DNA, 20 bp, Artificial Sequence
  Description of Artificial Sequence: Synthetic oligonucleotide
  Target: SCNA; (-) strand; PAM type: YTN; PAM sequence: TTT
ctcttggcaaatccacataa

SEQ ID NO: 62299 - DNA, 20 bp, Artificial Sequence
  Description of Artificial Sequence: Synthetic oligonucleotide
  Target: SCNA; (-) strand; PAM type: YTN; PAM sequence: TTT
tctcttggcaaatccacata

SEQ ID NO: 62300 - DNA, 20 bp, Artificial Sequence
  Description of Artificial Sequence: Synthetic oligonucleotide
  Target: SCNA; (-) strand; PAM type: YTN; PAM sequence: TTT
ttctcttggcaaatccacat

SEQ ID NO: 62301 - DNA, 20 bp, Artificial Sequence
  Description of Artificial Sequence: Synthetic oligonucleotide
  Target: SCNA; (-) strand; PAM type: YTN; PAM sequence: TTT
tttctcttggcaaatccaca

SEQ ID NO: 62302 - DNA, 20 bp, Artificial Sequence
  Description of Artificial Sequence: Synthetic oligonucleotide
  Target: SCNA; (-) strand; PAM type: YTN; PAM sequence: TTT
ttttctcttggcaaatccac

SEQ ID NO: 62303 - DNA, 20 bp, Artificial Sequence
  Description of Artificial Sequence: Synthetic oligonucleotide
  Target: SCNA; (-) strand; PAM type: YTN; PAM sequence: TTA
tttttttctcttggcaaatc

SEQ ID NO: 62304 - DNA, 20 bp, Artificial Sequence
  Description of Artificial Sequence: Synthetic oligonucleotide
  Target: SCNA; (-) strand; PAM type: YTN; PAM sequence: TTT
atttttttctcttggcaaat

SEQ ID NO: 62305 - DNA, 20 bp, Artificial Sequence
  Description of Artificial Sequence: Synthetic oligonucleotide
  Target: SCNA; (-) strand; PAM type: YTN; PAM sequence: TTT
tatttttttctcttggcaaa

SEQ ID NO: 62306 - DNA, 20 bp, Artificial Sequence
  Description of Artificial Sequence: Synthetic oligonucleotide
  Target: SCNA; (-) strand; PAM type: YTN; PAM sequence: TTG
tatcattttatttttttctc

SEQ ID NO: 62307 - DNA, 20 bp, Artificial Sequence
  Description of Artificial Sequence: Synthetic oligonucleotide
  Target: SCNA; (-) strand; PAM type: YTN; PAM sequence: TTG
ttgtatcattttattttttt

SEQ ID NO: 62308 - DNA, 20 bp, Artificial Sequence
  Description of Artificial Sequence: Synthetic oligonucleotide
  Target: SCNA; (-) strand; PAM type: YTN; PAM sequence: TTT
gttgtatcattttatttttt

SEQ ID NO: 62309 - DNA, 20 bp, Artificial Sequence
  Description of Artificial Sequence: Synthetic oligonucleotide
  Target: SCNA; (-) strand; PAM type: YTN; PAM sequence: TTG
gaacaccatttgttgtatca

SEQ ID NO: 62310 - DNA, 20 bp, Artificial Sequence
  Description of Artificial Sequence: Synthetic oligonucleotide
  Target: SCNA; (-) strand; PAM type: YTN; PAM sequence: CTT
ggaacaccatttgttgtatc

SEQ ID NO: 62311 - DNA, 20 bp, Artificial Sequence
  Description of Artificial Sequence: Synthetic oligonucleotide
  Target: SCNA; (-) strand; PAM type: YTN; PAM sequence: CTG
tcaaacttggaacaccattt

SEQ ID NO: 62312 - DNA, 20 bp, Artificial Sequence
  Description of Artificial Sequence: Synthetic oligonucleotide
  Target: SCNA; (-) strand; PAM type: YTN; PAM sequence: CTG
gcacaaagggtctgtcaaac

SEQ ID NO: 62313 - DNA, 20 bp, Artificial Sequence
  Description of Artificial Sequence: Synthetic oligonucleotide
  Target: SCNA; (-) strand; PAM type: YTN; PAM sequence: TTC
agagccactggcacaaaggg

SEQ ID NO: 62314 - DNA, 20 bp, Artificial Sequence
  Description of Artificial Sequence: Synthetic oligonucleotide
  Target: SCNA; (-) strand; PAM type: YTN; PAM sequence: TTT
cagagccactggcacaaagg

SEQ ID NO: 62315 - DNA, 20 bp, Artificial Sequence
  Description of Artificial Sequence: Synthetic oligonucleotide
  Target: SCNA; (-) strand; PAM type: YTN; PAM sequence: CTT
tcagagccactggcacaaag

SEQ ID NO: 62316 - DNA, 20 bp, Artificial Sequence
  Description of Artificial Sequence: Synthetic oligonucleotide
  Target: SCNA; (-) strand; PAM type: YTN; PAM sequence: CTG
aagcctttcagagccactgg

SEQ ID NO: 62317 - DNA, 20 bp, Artificial Sequence
  Description of Artificial Sequence: Synthetic oligonucleotide
  Target: SCNA; (-) strand; PAM type: YTN; PAM sequence: TTC
tgaagcctttcagagccact

SEQ ID NO: 62318 - DNA, 20 bp, Artificial Sequence
  Description of Artificial Sequence: Synthetic oligonucleotide
  Target: SCNA; (-) strand; PAM type: YTN; PAM sequence: TTC
attctgaagcctttcagagc

SEQ ID NO: 62319 - DNA, 20 bp, Artificial Sequence
  Description of Artificial Sequence: Synthetic oligonucleotide
  Target: SCNA; (-) strand; PAM type: YTN; PAM sequence: TTG
gatattcattctgaagcctt

SEQ ID NO: 62320 - DNA, 20 bp, Artificial Sequence
  Description of Artificial Sequence: Synthetic oligonucleotide
  Target: SCNA; (-) strand; PAM type: YTN; PAM sequence: CTG
aattggatattcattctgaa

SEQ ID NO: 62321 - DNA, 20 bp, Artificial Sequence
  Description of Artificial Sequence: Synthetic oligonucleotide
  Target: SCNA; (-) strand; PAM type: YTN; PAM sequence: TTC
tgaattggatattcattctg

SEQ ID NO: 62322 - DNA, 20 bp, Artificial Sequence
  Description of Artificial Sequence: Synthetic oligonucleotide
  Target: SCNA; (-) strand; PAM type: YTN; PAM sequence: TTT
ctgaattggatattcattct

SEQ ID NO: 62323 - DNA, 20 bp, Artificial Sequence
  Description of Artificial Sequence: Synthetic oligonucleotide
  Target: SCNA; (-) strand; PAM type: YTN; PAM sequence: CTG
atttctgaattggatattca

SEQ ID NO: 62324 - DNA, 20 bp, Artificial Sequence
  Description of Artificial Sequence: Synthetic oligonucleotide
  Target: SCNA; (-) strand; PAM type: YTN; PAM sequence: TTA
gggactgatttctgaattgg

SEQ ID NO: 62325 - DNA, 20 bp, Artificial Sequence
  Description of Artificial Sequence: Synthetic oligonucleotide
  Target: SCNA; (-) strand; PAM type: YTN; PAM sequence: CTG
aaatattagggactgatttc

SEQ ID NO: 62326 - DNA, 20 bp, Artificial Sequence
  Description of Artificial Sequence: Synthetic oligonucleotide
  Target: SCNA; (-) strand; PAM type: YTN; PAM sequence: CTA
atctgaaatattagggactg

SEQ ID NO: 62327 - DNA, 20 bp, Artificial Sequence
  Description of Artificial Sequence: Synthetic oligonucleotide
  Target: SCNA; (-) strand; PAM type: YTN; PAM sequence: TTC
actaatctgaaatattaggg

SEQ ID NO: 62328 - DNA, 20 bp, Artificial Sequence
  Description of Artificial Sequence: Synthetic oligonucleotide
  Target: SCNA; (-) strand; PAM type: YTN; PAM sequence: CTT
cactaatctgaaatattagg

SEQ ID NO: 62329 - DNA, 20 bp, Artificial Sequence
  Description of Artificial Sequence: Synthetic oligonucleotide
  Target: SCNA; (-) strand; PAM type: YTN; PAM sequence: TTC
ttcactaatctgaaatatta

SEQ ID NO: 62330 - DNA, 20 bp, Artificial Sequence
  Description of Artificial Sequence: Synthetic oligonucleotide
  Target: SCNA; (-) strand; PAM type: YTN; PAM sequence: TTG
attcttcactaatctgaaat

SEQ ID NO: 62331 - DNA, 20 bp, Artificial Sequence
  Description of Artificial Sequence: Synthetic oligonucleotide
  Target: SCNA; (-) strand; PAM type: YTN; PAM sequence: CTG
ttgattcttcactaatctga

SEQ ID NO: 62332 - DNA, 20 bp, Artificial Sequence
  Description of Artificial Sequence: Synthetic oligonucleotide
  Target: SCNA; (-) strand; PAM type: YTN; PAM sequence: TTC
agtctgttgattcttcacta

SEQ ID NO: 62333 - DNA, 20 bp, Artificial Sequence
  Description of Artificial Sequence: Synthetic oligonucleotide
  Target: SCNA; (-) strand; PAM type: YTN; PAM sequence: CTG
ttcagtctgttgattcttca

SEQ ID NO: 62334 - DNA, 20 bp, Artificial Sequence
  Description of Artificial Sequence: Synthetic oligonucleotide
  Target: SCNA; (-) strand; PAM type: YTN; PAM sequence: CTG
aatacaaatgctgttcagtc

SEQ ID NO: 62335 - DNA, 20 bp, Artificial Sequence
  Description of Artificial Sequence: Synthetic oligonucleotide
  Target: SCNA; (-) strand; PAM type: YTN; PAM sequence: TTC
tgaatacaaatgctgttcag

SEQ ID NO: 62336 - DNA, 20 bp, Artificial Sequence
  Description of Artificial Sequence: Synthetic oligonucleotide
  Target: SCNA; (-) strand; PAM type: YTN; PAM sequence: TTT
ctgaatacaaatgctgttca

SEQ ID NO: 62337 - DNA, 20 bp, Artificial Sequence
  Description of Artificial Sequence: Synthetic oligonucleotide
  Target: SCNA; (-) strand; PAM type: YTN; PAM sequence: CTT
tctgaatacaaatgctgttc

SEQ ID NO: 62338 - DNA, 20 bp, Artificial Sequence
  Description of Artificial Sequence: Synthetic oligonucleotide
  Target: SCNA; (-) strand; PAM type: YTN; PAM sequence: TTC
ctttctgaatacaaatgctg

SEQ ID NO: 62339 - DNA, 20 bp, Artificial Sequence
  Description of Artificial Sequence: Synthetic oligonucleotide
  Target: SCNA; (-) strand; PAM type: YTN; PAM sequence: CTT
cctttctgaatacaaatgct

SEQ ID NO: 62340 - DNA, 20 bp, Artificial Sequence
  Description of Artificial Sequence: Synthetic oligonucleotide
  Target: SCNA; (-) strand; PAM type: YTN; PAM sequence: TTC
ttcctttctgaatacaaatg

SEQ ID NO: 62341 - DNA, 20 bp, Artificial Sequence
  Description of Artificial Sequence: Synthetic oligonucleotide
  Target: SCNA; (-) strand; PAM type: YTN; PAM sequence: TTT
cttcctttctgaatacaaat

SEQ ID NO: 62342 - DNA, 20 bp, Artificial Sequence
  Description of Artificial Sequence: Synthetic oligonucleotide
  Target: SCNA; (-) strand; PAM type: YTN; PAM sequence: TTT
tcttcctttctgaatacaaa

SEQ ID NO: 62343 - DNA, 20 bp, Artificial Sequence
  Description of Artificial Sequence: Synthetic oligonucleotide
  Target: SCNA; (-) strand; PAM type: YTN; PAM sequence: TTA
ttttcttcctttctgaatac

SEQ ID NO: 62344 - DNA, 20 bp, Artificial Sequence
  Description of Artificial Sequence: Synthetic oligonucleotide
  Target: SCNA; (-) strand; PAM type: YTN; PAM sequence: TTT
attttcttcctttctgaata

SEQ ID NO: 62345 - DNA, 20 bp, Artificial Sequence
  Description of Artificial Sequence: Synthetic oligonucleotide
  Target: SCNA; (-) strand; PAM type: YTN; PAM sequence: TTC
atttattttcttcctttctg

SEQ ID NO: 62346 - DNA, 20 bp, Artificial Sequence
  Description of Artificial Sequence: Synthetic oligonucleotide
  Target: SCNA; (-) strand; PAM type: YTN; PAM sequence: TTA
aaaattcatttattttcttc

SEQ ID NO: 62347 - DNA, 20 bp, Artificial Sequence
  Description of Artificial Sequence: Synthetic oligonucleotide
  Target: SCNA; (-) strand; PAM type: YTN; PAM sequence: TTT
aaaaattcatttattttctt

SEQ ID NO: 62348 - DNA, 20 bp, Artificial Sequence
  Description of Artificial Sequence: Synthetic oligonucleotide
  Target: SCNA; (-) strand; PAM type: YTN; PAM sequence: TTT
taaaaattcatttattttct

SEQ ID NO: 62349 - DNA, 20 bp, Artificial Sequence
  Description of Artificial Sequence: Synthetic oligonucleotide
  Target: SCNA; (-) strand; PAM type: YTN; PAM sequence: TTC
ccgtgatattttaaaaattc

SEQ ID NO: 62350 - DNA, 20 bp, Artificial Sequence
  Description of Artificial Sequence: Synthetic oligonucleotide
  Target: SCNA; (-) strand; PAM type: YTN; PAM sequence: TTA
caagttcccgtgatatttta

SEQ ID NO: 62351 - DNA, 20 bp, Artificial Sequence
  Description of Artificial Sequence: Synthetic oligonucleotide
  Target: SCNA; (-) strand; PAM type: YTN; PAM sequence: TTC
aaaacaatacacaaaacatt

SEQ ID NO: 62352 - DNA, 20 bp, Artificial Sequence
  Description of Artificial Sequence: Synthetic oligonucleotide
  Target: SCNA; (-) strand; PAM type: YTN; PAM sequence: TTC
agttcaaaacaatacacaaa

SEQ ID NO: 62353 - DNA, 20 bp, Artificial Sequence
  Description of Artificial Sequence: Synthetic oligonucleotide
  Target: SCNA; (-) strand; PAM type: YTN; PAM sequence: CTT
cagttcaaaacaatacacaa

SEQ ID NO: 62354 - DNA, 20 bp, Artificial Sequence
  Description of Artificial Sequence: Synthetic oligonucleotide
  Target: SCNA; (-) strand; PAM type: YTN; PAM sequence: TTG
taacttcagttcaaaacaat

SEQ ID NO: 62355 - DNA, 20 bp, Artificial Sequence
  Description of Artificial Sequence: Synthetic oligonucleotide
  Target: SCNA; (-) strand; PAM type: YTN; PAM sequence: TTG
taacagtattgtaacttcag

SEQ ID NO: 62356 - DNA, 20 bp, Artificial Sequence
  Description of Artificial Sequence: Synthetic oligonucleotide
  Target: SCNA; (-) strand; PAM type: YTN; PAM sequence: TTT
gtaacagtattgtaacttca

SEQ ID NO: 62357 - DNA, 20 bp, Artificial Sequence
  Description of Artificial Sequence: Synthetic oligonucleotide
  Target: SCNA; (-) strand; PAM type: YTN; PAM sequence: CTG
tttgtaacagtattgtaact

SEQ ID NO: 62358 - DNA, 20 bp, Artificial Sequence
  Description of Artificial Sequence: Synthetic oligonucleotide
  Target: SCNA; (-) strand; PAM type: YTN; PAM sequence: CTC
tgtttgtaacagtattgtaa

SEQ ID NO: 62359 - DNA, 20 bp, Artificial Sequence
  Description of Artificial Sequence: Synthetic oligonucleotide
  Target: SCNA; (-) strand; PAM type: YTN; PAM sequence: CTG
tatatactctgtttgtaaca

SEQ ID NO: 62360 - DNA, 20 bp, Artificial Sequence
  Description of Artificial Sequence: Synthetic oligonucleotide
  Target: SCNA; (-) strand; PAM type: YTN; PAM sequence: TTG
ctgtatatactctgtttgta

SEQ ID NO: 62361 - DNA, 20 bp, Artificial Sequence
  Description of Artificial Sequence: Synthetic oligonucleotide
  Target: SCNA; (-) strand; PAM type: YTN; PAM sequence: TTT
gctgtatatactctgtttgt

SEQ ID NO: 62362 - DNA, 20 bp, Artificial Sequence
  Description of Artificial Sequence: Synthetic oligonucleotide
  Target: SCNA; (-) strand; PAM type: YTN; PAM sequence: TTA
tttgctgtatatactctgtt

SEQ ID NO: 62363 - DNA, 20 bp, Artificial Sequence
  Description of Artificial Sequence: Synthetic oligonucleotide
  Target: SCNA; (-) strand; PAM type: YTN; PAM sequence: CTT
atttgctgtatatactctgt

SEQ ID NO: 62364 - DNA, 20 bp, Artificial Sequence
  Description of Artificial Sequence: Synthetic oligonucleotide
  Target: SCNA; (-) strand; PAM type: YTN; PAM sequence: TTG
taaggaacatacttatttgc

SEQ ID NO: 62365 - DNA, 20 bp, Artificial Sequence
  Description of Artificial Sequence: Synthetic oligonucleotide
  Target: SCNA; (-) strand; PAM type: YTN; PAM sequence: TTG
gatattgtaaggaacatact

SEQ ID NO: 62366 - DNA, 20 bp, Artificial Sequence
  Description of Artificial Sequence: Synthetic oligonucleotide
  Target: SCNA; (-) strand; PAM type: YTN; PAM sequence: TTT
ggatattgtaaggaacatac

SEQ ID NO: 62367 - DNA, 20 bp, Artificial Sequence
  Description of Artificial Sequence: Synthetic oligonucleotide
  Target: SCNA; (-) strand; PAM type: YTN; PAM sequence: TTT
tggatattgtaaggaacata

SEQ ID NO: 62368 - DNA, 20 bp, Artificial Sequence
  Description of Artificial Sequence: Synthetic oligonucleotide
  Target: SCNA; (-) strand; PAM type: YTN; PAM sequence: CTG
gatattttggatattgtaag

SEQ ID NO: 62369 - DNA, 20 bp, Artificial Sequence
  Description of Artificial Sequence: Synthetic oligonucleotide
  Target: SCNA; (-) strand; PAM type: YTN; PAM sequence: TTC
ctggatattttggatattgt

SEQ ID NO: 62370 - DNA, 20 bp, Artificial Sequence
  Description of Artificial Sequence: Synthetic oligonucleotide
  Target: SCNA; (-) strand; PAM type: YTN; PAM sequence: TTA
gattcctggatattttggat

SEQ ID NO: 62371 - DNA, 20 bp, Artificial Sequence
  Description of Artificial Sequence: Synthetic oligonucleotide
  Target: SCNA; (-) strand; PAM type: YTN; PAM sequence: CTA
gaaaggaaaacgtattagat

SEQ ID NO: 62372 - DNA, 20 bp, Artificial Sequence
  Description of Artificial Sequence: Synthetic oligonucleotide
  Target: SCNA; (-) strand; PAM type: YTN; PAM sequence: TTA
tctagaaaggaaaacgtatt

SEQ ID NO: 62373 - DNA, 20 bp, Artificial Sequence
  Description of Artificial Sequence: Synthetic oligonucleotide
  Target: SCNA; (-) strand; PAM type: YTN; PAM sequence: CTC
aaattatctagaaaggaaaa

SEQ ID NO: 62374 - DNA, 20 bp, Artificial Sequence
  Description of Artificial Sequence: Synthetic oligonucleotide
  Target: SCNA; (-) strand; PAM type: YTN; PAM sequence: CTC
tcaaattatctagaaaggaa

SEQ ID NO: 62375 - DNA, 20 bp, Artificial Sequence
  Description of Artificial Sequence: Synthetic oligonucleotide
  Target: SCNA; (-) strand; PAM type: YTN; PAM sequence: TTA
tactctcaaattatctagaa

SEQ ID NO: 62376 - DNA, 20 bp, Artificial Sequence
  Description of Artificial Sequence: Synthetic oligonucleotide
  Target: SCNA; (-) strand; PAM type: YTN; PAM sequence: TTT
atactctcaaattatctaga

SEQ ID NO: 62377 - DNA, 20 bp, Artificial Sequence
  Description of Artificial Sequence: Synthetic oligonucleotide
  Target: SCNA; (-) strand; PAM type: YTN; PAM sequence: CTT
tatactctcaaattatctag

SEQ ID NO: 62378 - DNA, 20 bp, Artificial Sequence
  Description of Artificial Sequence: Synthetic oligonucleotide
  Target: SCNA; (-) strand; PAM type: YTN; PAM sequence: TTA
aacgtcactttatactctca

SEQ ID NO: 62379 - DNA, 20 bp, Artificial Sequence
  Description of Artificial Sequence: Synthetic oligonucleotide
  Target: SCNA; (-) strand; PAM type: YTN; PAM sequence: CTT
aaacgtcactttatactctc

SEQ ID NO: 62380 - DNA, 20 bp, Artificial Sequence
  Description of Artificial Sequence: Synthetic oligonucleotide
  Target: SCNA; (-) strand; PAM type: YTN; PAM sequence: TTC
ttaaacgtcactttatactc

SEQ ID NO: 62381 - DNA, 20 bp, Artificial Sequence
  Description of Artificial Sequence: Synthetic oligonucleotide
  Target: SCNA; (-) strand; PAM type: YTN; PAM sequence: TTT
cttaaacgtcactttatact

SEQ ID NO: 62382 - DNA, 20 bp, Artificial Sequence
  Description of Artificial Sequence: Synthetic oligonucleotide
  Target: SCNA; (-) strand; PAM type: YTN; PAM sequence: CTA
aaaagtttcttaaacgtcac

SEQ ID NO: 62383 - DNA, 20 bp, Artificial Sequence
  Description of Artificial Sequence: Synthetic oligonucleotide
  Target: SCNA; (-) strand; PAM type: YTN; PAM sequence: TTA
caggcgtgagccaccatgcc

SEQ ID NO: 62384 - DNA, 20 bp, Artificial Sequence
  Description of Artificial Sequence: Synthetic oligonucleotide
  Target: SCNA; (-) strand; PAM type: YTN; PAM sequence: CTG
agattacaggcgtgagccac

SEQ ID NO: 62385 - DNA, 20 bp, Artificial Sequence
  Description of Artificial Sequence: Synthetic oligonucleotide
  Target: SCNA; (-) strand; PAM type: YTN; PAM sequence: CTC
ccaaagtgctgagattacag

SEQ ID NO: 62386 - DNA, 20 bp, Artificial Sequence
  Description of Artificial Sequence: Synthetic oligonucleotide
  Target: SCNA; (-) strand; PAM type: YTN; PAM sequence: CTC
agcctcccaaagtgctgaga

SEQ ID NO: 62387 - DNA, 20 bp, Artificial Sequence
  Description of Artificial Sequence: Synthetic oligonucleotide
  Target: SCNA; (-) strand; PAM type: YTN; PAM sequence: CTG
cccacctcagcctcccaaag

SEQ ID NO: 62388 - DNA, 20 bp, Artificial Sequence
  Description of Artificial Sequence: Synthetic oligonucleotide
  Target: SCNA; (-) strand; PAM type: YTN; PAM sequence: CTC
aggtaatctgcccacctcag

SEQ ID NO: 62389 - DNA, 20 bp, Artificial Sequence
  Description of Artificial Sequence: Synthetic oligonucleotide
  Target: SCNA; (-) strand; PAM type: YTN; PAM sequence: CTG
acctcaggtaatctgcccac

SEQ ID NO: 62390 - DNA, 20 bp, Artificial Sequence
  Description of Artificial Sequence: Synthetic oligonucleotide
  Target: SCNA; (-) strand; PAM type: YTN; PAM sequence: CTC
ctgacctcaggtaatctgcc

SEQ ID NO: 62391 - DNA, 20 bp, Artificial Sequence
  Description of Artificial Sequence: Synthetic oligonucleotide
  Target: SCNA; (-) strand; PAM type: YTN; PAM sequence: CTA
actcctgacctcaggtaatc

SEQ ID NO: 62392 - DNA, 20 bp, Artificial Sequence
  Description of Artificial Sequence: Synthetic oligonucleotide
  Target: SCNA; (-) strand; PAM type: YTN; PAM sequence: CTC
taactcctgacctcaggtaa

SEQ ID NO: 62393 - DNA, 20 bp, Artificial Sequence
  Description of Artificial Sequence: Synthetic oligonucleotide
  Target: SCNA; (-) strand; PAM type: YTN; PAM sequence: CTG
gtctctaactcctgacctca

SEQ ID NO: 62394 - DNA, 20 bp, Artificial Sequence
  Description of Artificial Sequence: Synthetic oligonucleotide
  Target: SCNA; (-) strand; PAM type: YTN; PAM sequence: TTG
gccaggctggtctctaactc

SEQ ID NO: 62395 - DNA, 20 bp, Artificial Sequence
  Description of Artificial Sequence: Synthetic oligonucleotide
  Target: SCNA; (-) strand; PAM type: YTN; PAM sequence: CTT
ggccaggctggtctctaact

SEQ ID NO: 62396 - DNA, 20 bp, Artificial Sequence
  Description of Artificial Sequence: Synthetic oligonucleotide
  Target: SCNA; (-) strand; PAM type: YTN; PAM sequence: TTA
ccatcttggccaggctggtc

SEQ ID NO: 62397 - DNA, 20 bp, Artificial Sequence
  Description of Artificial Sequence: Synthetic oligonucleotide
  Target: SCNA; (-) strand; PAM type: YTN; PAM sequence: TTT
accatcttggccaggctggt

SEQ ID NO: 62398 - DNA, 20 bp, Artificial Sequence
  Description of Artificial Sequence: Synthetic oligonucleotide
  Target: SCNA; (-) strand; PAM type: YTN; PAM sequence: TTT
taccatcttggccaggctgg

SEQ ID NO: 62399 - DNA, 20 bp, Artificial Sequence
  Description of Artificial Sequence: Synthetic oligonucleotide
  Target: SCNA; (-) strand; PAM type: YTN; PAM sequence: TTA
gtagagacggggttttacca

SEQ ID NO: 62400 - DNA, 20 bp, Artificial Sequence
  Description of Artificial Sequence: Synthetic oligonucleotide
  Target: SCNA; (-) strand; PAM type: YTN; PAM sequence: TTT
agtagagacggggttttacc

SEQ ID NO: 62401 - DNA, 20 bp, Artificial Sequence
  Description of Artificial Sequence: Synthetic oligonucleotide
  Target: SCNA; (-) strand; PAM type: YTN; PAM sequence: TTT
tagtagagacggggttttac

SEQ ID NO: 62402 - DNA, 20 bp, Artificial Sequence
  Description of Artificial Sequence: Synthetic oligonucleotide
  Target: SCNA; (-) strand; PAM type: YTN; PAM sequence: TTT
ttagtagagacggggtttta

SEQ ID NO: 62403 - DNA, 20 bp, Artificial Sequence
  Description of Artificial Sequence: Synthetic oligonucleotide
  Target: SCNA; (-) strand; PAM type: YTN; PAM sequence: TTG
tatttttagtagagacgggg

SEQ ID NO: 62404 - DNA, 20 bp, Artificial Sequence
  Description of Artificial Sequence: Synthetic oligonucleotide
  Target: SCNA; (-) strand; PAM type: YTN; PAM sequence: TTT
gtatttttagtagagacggg

SEQ ID NO: 62405 - DNA, 20 bp, Artificial Sequence
  Description of Artificial Sequence: Synthetic oligonucleotide
  Target: SCNA; (-) strand; PAM type: YTN; PAM sequence: TTT
tgtatttttagtagagacgg

SEQ ID NO: 62406 - DNA, 20 bp, Artificial Sequence
  Description of Artificial Sequence: Synthetic oligonucleotide
  Target: SCNA; (-) strand; PAM type: YTN; PAM sequence: TTT
ttgtatttttagtagagacg

SEQ ID NO: 62407 - DNA, 20 bp, Artificial Sequence
  Description of Artificial Sequence: Synthetic oligonucleotide
  Target: SCNA; (-) strand; PAM type: YTN; PAM sequence: CTG
atttttgtatttttagtaga

SEQ ID NO: 62408 - DNA, 20 bp, Artificial Sequence
  Description of Artificial Sequence: Synthetic oligonucleotide
  Target: SCNA; (-) strand; PAM type: YTN; PAM sequence: CTG
ccaccacgtccagctgattt

SEQ ID NO: 62409 - DNA, 20 bp, Artificial Sequence
  Description of Artificial Sequence: Synthetic oligonucleotide
  Target: SCNA; (-) strand; PAM type: YTN; PAM sequence: TTA
caggcacctgccaccacgtc

SEQ ID NO: 62410 - DNA, 20 bp, Artificial Sequence
  Description of Artificial Sequence: Synthetic oligonucleotide
  Target: SCNA; (-) strand; PAM type: YTN; PAM sequence: CTG
ggattacaggcacctgccac

SEQ ID NO: 62411 - DNA, 20 bp, Artificial Sequence
  Description of Artificial Sequence: Synthetic oligonucleotide
  Target: SCNA; (-) strand; PAM type: YTN; PAM sequence: CTC
agccccccaagtagctggga

SEQ ID NO: 62412 - DNA, 20 bp, Artificial Sequence
  Description of Artificial Sequence: Synthetic oligonucleotide
  Target: SCNA; (-) strand; PAM type: YTN; PAM sequence: CTG
cctcagccccccaagtagct

SEQ ID NO: 62413 - DNA, 20 bp, Artificial Sequence
  Description of Artificial Sequence: Synthetic oligonucleotide
  Target: SCNA; (-) strand; PAM type: YTN; PAM sequence: CTC
ctgcctcagccccccaagta

SEQ ID NO: 62414 - DNA, 20 bp, Artificial Sequence
  Description of Artificial Sequence: Synthetic oligonucleotide
  Target: SCNA; (-) strand; PAM type: YTN; PAM sequence: TTC
tcctgcctcagccccccaag

SEQ ID NO: 62415 - DNA, 20 bp, Artificial Sequence
  Description of Artificial Sequence: Synthetic oligonucleotide
  Target: SCNA; (-) strand; PAM type: YTN; PAM sequence: CTG
ggtacaagcaattctcctgc

SEQ ID NO: 62416 - DNA, 20 bp, Artificial Sequence
  Description of Artificial Sequence: Synthetic oligonucleotide
  Target: SCNA; (-) strand; PAM type: YTN; PAM sequence: CTC
ctgggtacaagcaattctcc

SEQ ID NO: 62417 - DNA, 20 bp, Artificial Sequence
  Description of Artificial Sequence: Synthetic oligonucleotide
  Target: SCNA; (-) strand; PAM type: YTN; PAM sequence: CTC
agtgcaacaaccacctcctg

SEQ ID NO: 62418 - DNA, 20 bp, Artificial Sequence
  Description of Artificial Sequence: Synthetic oligonucleotide
  Target: SCNA; (-) strand; PAM type: YTN; PAM sequence: CTC
ggctcagtgcaacaaccacc

SEQ ID NO: 62419 - DNA, 20 bp, Artificial Sequence
  Description of Artificial Sequence: Synthetic oligonucleotide
  Target: SCNA; (-) strand; PAM type: YTN; PAM sequence: CTG
gagcgcagtagtgcgatctc

SEQ ID NO: 62420 - DNA, 20 bp, Artificial Sequence
  Description of Artificial Sequence: Synthetic oligonucleotide
  Target: SCNA; (-) strand; PAM type: YTN; PAM sequence: CTG
tcgcccaggctggagcgcag

SEQ ID NO: 62421 - DNA, 20 bp, Artificial Sequence
  Description of Artificial Sequence: Synthetic oligonucleotide
  Target: SCNA; (-) strand; PAM type: YTN; PAM sequence: CTC
tgtcgcccaggctggagcgc

SEQ ID NO: 62422 - DNA, 20 bp, Artificial Sequence
  Description of Artificial Sequence: Synthetic oligonucleotide
  Target: SCNA; (-) strand; PAM type: YTN; PAM sequence: TTG
ctctgtcgcccaggctggag

SEQ ID NO: 62423 - DNA, 20 bp, Artificial Sequence
  Description of Artificial Sequence: Synthetic oligonucleotide
  Target: SCNA; (-) strand; PAM type: YTN; PAM sequence: CTT
gctctgtcgcccaggctgga

SEQ ID NO: 62424 - DNA, 20 bp, Artificial Sequence
  Description of Artificial Sequence: Synthetic oligonucleotide
  Target: SCNA; (-) strand; PAM type: YTN; PAM sequence: TTC
ccccaagatggagtcttgct

SEQ ID NO: 62425 - DNA, 20 bp, Artificial Sequence
  Description of Artificial Sequence: Synthetic oligonucleotide
  Target: SCNA; (-) strand; PAM type: YTN; PAM sequence: TTT
cccccaagatggagtcttgc

SEQ ID NO: 62426 - DNA, 20 bp, Artificial Sequence
  Description of Artificial Sequence: Synthetic oligonucleotide
  Target: SCNA; (-) strand; PAM type: YTN; PAM sequence: TTT
tcccccaagatggagtcttg

SEQ ID NO: 62427 - DNA, 20 bp, Artificial Sequence
  Description of Artificial Sequence: Synthetic oligonucleotide
  Target: SCNA; (-) strand; PAM type: YTN; PAM sequence: TTT
ttcccccaagatggagtctt

SEQ ID NO: 62428 - DNA, 20 bp, Artificial Sequence
  Description of Artificial Sequence: Synthetic oligonucleotide
  Target: SCNA; (-) strand; PAM type: YTN; PAM sequence: CTT
tttcccccaagatggagtct

SEQ ID NO: 62429 - DNA, 20 bp, Artificial Sequence
  Description of Artificial Sequence: Synthetic oligonucleotide
  Target: SCNA; (-) strand; PAM type: YTN; PAM sequence: TTC
tttttcccccaagatggagt

SEQ ID NO: 62430 - DNA, 20 bp, Artificial Sequence
  Description of Artificial Sequence: Synthetic oligonucleotide
  Target: SCNA; (-) strand; PAM type: YTN; PAM sequence: TTT
ctttttcccccaagatggag

SEQ ID NO: 62431 - DNA, 20 bp, Artificial Sequence
  Description of Artificial Sequence: Synthetic oligonucleotide
  Target: SCNA; (-) strand; PAM type: YTN; PAM sequence: TTT
tctttttcccccaagatgga

SEQ ID NO: 62432 - DNA, 20 bp, Artificial Sequence
  Description of Artificial Sequence: Synthetic oligonucleotide
  Target: SCNA; (-) strand; PAM type: YTN; PAM sequence: TTT
ttctttttcccccaagatgg

SEQ ID NO: 62433 - DNA, 20 bp, Artificial Sequence
  Description of Artificial Sequence: Synthetic oligonucleotide
  Target: SCNA; (-) strand; PAM type: YTN; PAM sequence: TTT
tttctttttcccccaagatg

SEQ ID NO: 62434 - DNA, 20 bp, Artificial Sequence
  Description of Artificial Sequence: Synthetic oligonucleotide
  Target: SCNA; (-) strand; PAM type: YTN; PAM sequence: CTT
ttttctttttcccccaagat

SEQ ID NO: 62435 - DNA, 20 bp, Artificial Sequence
  Description of Artificial Sequence: Synthetic oligonucleotide
  Target: SCNA; (-) strand; PAM type: YTN; PAM sequence: TTC
ttttttctttttcccccaag

SEQ ID NO: 62436 - DNA, 20 bp, Artificial Sequence
  Description of Artificial Sequence: Synthetic oligonucleotide
  Target: SCNA; (-) strand; PAM type: YTN; PAM sequence: TTT
cttttttctttttcccccaa

SEQ ID NO: 62437 - DNA, 20 bp, Artificial Sequence
  Description of Artificial Sequence: Synthetic oligonucleotide
  Target: SCNA; (-) strand; PAM type: YTN; PAM sequence: CTT
tcttttttctttttccccca

SEQ ID NO: 62438 - DNA, 20 bp, Artificial Sequence
  Description of Artificial Sequence: Synthetic oligonucleotide
  Target: SCNA; (-) strand; PAM type: YTN; PAM sequence: TTC
tttcttttttctttttcccc

SEQ ID NO: 62439 - DNA, 20 bp, Artificial Sequence
  Description of Artificial Sequence: Synthetic oligonucleotide
  Target: SCNA; (-) strand; PAM type: YTN; PAM sequence: TTT
ctttcttttttctttttccc

SEQ ID NO: 62440 - DNA, 20 bp, Artificial Sequence
  Description of Artificial Sequence: Synthetic oligonucleotide
  Target: SCNA; (-) strand; PAM type: YTN; PAM sequence: CTT
tctttcttttttctttttcc

SEQ ID NO: 62441 - DNA, 20 bp, Artificial Sequence
  Description of Artificial Sequence: Synthetic oligonucleotide
  Target: SCNA; (-) strand; PAM type: YTN; PAM sequence: TTC
tttctttcttttttcttttt

SEQ ID NO: 62442 - DNA, 20 bp, Artificial Sequence
  Description of Artificial Sequence: Synthetic oligonucleotide
  Target: SCNA; (-) strand; PAM type: YTN; PAM sequence: TTT
ctttctttcttttttctttt

SEQ ID NO: 62443 - DNA, 20 bp, Artificial Sequence
  Description of Artificial Sequence: Synthetic oligonucleotide
  Target: SCNA; (-) strand; PAM type: YTN; PAM sequence: TTA
aaaagtttctttctttcttt

SEQ ID NO: 62444 - DNA, 20 bp, Artificial Sequence
  Description of Artificial Sequence: Synthetic oligonucleotide
  Target: SCNA; (-) strand; PAM type: YTN; PAM sequence: TTA
tatggtgttaaaaagtttct

SEQ ID NO: 62445 - DNA, 20 bp, Artificial Sequence
  Description of Artificial Sequence: Synthetic oligonucleotide
  Target: SCNA; (-) strand; PAM type: YTN; PAM sequence: TTT
atatggtgttaaaaagtttc

SEQ ID NO: 62446 - DNA, 20 bp, Artificial Sequence
  Description of Artificial Sequence: Synthetic oligonucleotide
  Target: SCNA; (-) strand; PAM type: YTN; PAM sequence: TTT
tatatggtgttaaaaagttt

SEQ ID NO: 62447 - DNA, 20 bp, Artificial Sequence
  Description of Artificial Sequence: Synthetic oligonucleotide
  Target: SCNA; (-) strand; PAM type: YTN; PAM sequence: TTT
ttatatggtgttaaaaagtt

SEQ ID NO: 62448 - DNA, 20 bp, Artificial Sequence
  Description of Artificial Sequence: Synthetic oligonucleotide
  Target: SCNA; (-) strand; PAM type: YTN; PAM sequence: CTT
tttatatggtgttaaaaagt

SEQ ID NO: 62449 - DNA, 20 bp, Artificial Sequence
  Description of Artificial Sequence: Synthetic oligonucleotide
  Target: SCNA; (-) strand; PAM type: YTN; PAM sequence: TTA
gtgatgtgctttttatatgg

SEQ ID NO: 62450 - DNA, 20 bp, Artificial Sequence
  Description of Artificial Sequence: Synthetic oligonucleotide
  Target: SCNA; (-) strand; PAM type: YTN; PAM sequence: TTC
aaaccattagtgatgtgctt

SEQ ID NO: 62451 - DNA, 20 bp, Artificial Sequence
  Description of Artificial Sequence: Synthetic oligonucleotide
  Target: SCNA; (-) strand; PAM type: YTN; PAM sequence: TTT
caaaccattagtgatgtgct

SEQ ID NO: 62452 - DNA, 20 bp, Artificial Sequence
  Description of Artificial Sequence: Synthetic oligonucleotide
  Target: SCNA; (-) strand; PAM type: YTN; PAM sequence: TTT
tcaaaccattagtgatgtgc

SEQ ID NO: 62453 - DNA, 20 bp, Artificial Sequence
  Description of Artificial Sequence: Synthetic oligonucleotide
  Target: SCNA; (-) strand; PAM type: YTN; PAM sequence: TTA
tatggaacaccaagttttca

SEQ ID NO: 62454 - DNA, 20 bp, Artificial Sequence
  Description of Artificial Sequence: Synthetic oligonucleotide
  Target: SCNA; (-) strand; PAM type: YTN; PAM sequence: TTT
atatggaacaccaagttttc

SEQ ID NO: 62455 - DNA, 20 bp, Artificial Sequence
  Description of Artificial Sequence: Synthetic oligonucleotide
  Target: SCNA; (-) strand; PAM type: YTN; PAM sequence: CTT
tatatggaacaccaagtttt

SEQ ID NO: 62456 - DNA, 20 bp, Artificial Sequence
  Description of Artificial Sequence: Synthetic oligonucleotide
  Target: SCNA; (-) strand; PAM type: YTN; PAM sequence: TTC
cagctttatatggaacacca

SEQ ID NO: 62457 - DNA, 20 bp, Artificial Sequence
  Description of Artificial Sequence: Synthetic oligonucleotide
  Target: SCNA; (-) strand; PAM type: YTN; PAM sequence: TTT
ccagctttatatggaacacc

SEQ ID NO: 62458 - DNA, 20 bp, Artificial Sequence
  Description of Artificial Sequence: Synthetic oligonucleotide
  Target: SCNA; (-) strand; PAM type: YTN; PAM sequence: CTA
cataaatttccagctttata

SEQ ID NO: 62459 - DNA, 20 bp, Artificial Sequence
  Description of Artificial Sequence: Synthetic oligonucleotide
  Target: SCNA; (-) strand; PAM type: YTN; PAM sequence: TTA
actacataaatttccagctt

SEQ ID NO: 62460 - DNA, 20 bp, Artificial Sequence
  Description of Artificial Sequence: Synthetic oligonucleotide
  Target: SCNA; (-) strand; PAM type: YTN; PAM sequence: CTT
aactacataaatttccagct

SEQ ID NO: 62461 - DNA, 20 bp, Artificial Sequence
  Description of Artificial Sequence: Synthetic oligonucleotide
  Target: SCNA; (-) strand; PAM type: YTN; PAM sequence: TTC
ttaactacataaatttccag

SEQ ID NO: 62462 - DNA, 20 bp, Artificial Sequence
  Description of Artificial Sequence: Synthetic oligonucleotide
  Target: SCNA; (-) strand; PAM type: YTN; PAM sequence: TTT
cttaactacataaatttcca

SEQ ID NO: 62463 - DNA, 20 bp, Artificial Sequence
  Description of Artificial Sequence: Synthetic oligonucleotide
  Target: SCNA; (-) strand; PAM type: YTN; PAM sequence: CTA
aatttcttaactacataaat

SEQ ID NO: 62464 - DNA, 20 bp, Artificial Sequence
  Description of Artificial Sequence: Synthetic oligonucleotide
  Target: SCNA; (-) strand; PAM type: YTN; PAM sequence: TTC
taaatttcttaactacataa

SEQ ID NO: 62465 - DNA, 20 bp, Artificial Sequence
  Description of Artificial Sequence: Synthetic oligonucleotide
  Target: SCNA; (-) strand; PAM type: YTN; PAM sequence: TTT
ctaaatttcttaactacata

SEQ ID NO: 62466 - DNA, 20 bp, Artificial Sequence
  Description of Artificial Sequence: Synthetic oligonucleotide
  Target: SCNA; (-) strand; PAM type: YTN; PAM sequence: CTT
tctaaatttcttaactacat

SEQ ID NO: 62467 - DNA, 20 bp, Artificial Sequence
  Description of Artificial Sequence: Synthetic oligonucleotide
  Target: SCNA; (-) strand; PAM type: YTN; PAM sequence: TTG
ctttctaaatttcttaacta

SEQ ID NO: 62468 - DNA, 20 bp, Artificial Sequence
  Description of Artificial Sequence: Synthetic oligonucleotide
  Target: SCNA; (-) strand; PAM type: YTN; PAM sequence: TTT
gctttctaaatttcttaact

SEQ ID NO: 62469 - DNA, 20 bp, Artificial Sequence
  Description of Artificial Sequence: Synthetic oligonucleotide
  Target: SCNA; (-) strand; PAM type: YTN; PAM sequence: TTG
aataatttgctttctaaatt

SEQ ID NO: 62470 - DNA, 20 bp, Artificial Sequence
  Description of Artificial Sequence: Synthetic oligonucleotide
  Target: SCNA; (-) strand; PAM type: YTN; PAM sequence: TTT
gaataatttgctttctaaat

SEQ ID NO: 62471 - DNA, 20 bp, Artificial Sequence
  Description of Artificial Sequence: Synthetic oligonucleotide
  Target: SCNA; (-) strand; PAM type: YTN; PAM sequence: CTT
tgaataatttgctttctaaa

SEQ ID NO: 62472 - DNA, 20 bp, Artificial Sequence
  Description of Artificial Sequence: Synthetic oligonucleotide
  Target: SCNA; (-) strand; PAM type: YTN; PAM sequence: TTC
tttgaataatttgctttcta

SEQ ID NO: 62473 - DNA, 20 bp, Artificial Sequence
  Description of Artificial Sequence: Synthetic oligonucleotide
  Target: SCNA; (-) strand; PAM type: YTN; PAM sequence: CTT
ctttgaataatttgctttct

SEQ ID NO: 62474 - DNA, 20 bp, Artificial Sequence
  Description of Artificial Sequence: Synthetic oligonucleotide
  Target: SCNA; (-) strand; PAM type: YTN; PAM sequence: TTA
agagataacttctttgaata

SEQ ID NO: 62475 - DNA, 20 bp, Artificial Sequence
  Description of Artificial Sequence: Synthetic oligonucleotide
  Target: SCNA; (-) strand; PAM type: YTN; PAM sequence: TTA
tcaaatagccattaagagat

SEQ ID NO: 62476 - DNA, 20 bp, Artificial Sequence
  Description of Artificial Sequence: Synthetic oligonucleotide
  Target: SCNA; (-) strand; PAM type: YTN; PAM sequence: TTT
atcaaatagccattaagaga

SEQ ID NO: 62477 - DNA, 20 bp, Artificial Sequence
  Description of Artificial Sequence: Synthetic oligonucleotide
  Target: SCNA; (-) strand; PAM type: YTN; PAM sequence: CTA
aagtgtttatcaaatagcca

SEQ ID NO: 62478 - DNA, 20 bp, Artificial Sequence
  Description of Artificial Sequence: Synthetic oligonucleotide
  Target: SCNA; (-) strand; PAM type: YTN; PAM sequence: TTA
tactaaagtgtttatcaaat

SEQ ID NO: 62479 - DNA, 20 bp, Artificial Sequence
  Description of Artificial Sequence: Synthetic oligonucleotide
  Target: SCNA; (-) strand; PAM type: YTN; PAM sequence: TTT
atactaaagtgtttatcaaa

SEQ ID NO: 62480 - DNA, 20 bp, Artificial Sequence
  Description of Artificial Sequence: Synthetic oligonucleotide
  Target: SCNA; (-) strand; PAM type: YTN; PAM sequence: TTT
tatactaaagtgtttatcaa

SEQ ID NO: 62481 - DNA, 20 bp, Artificial Sequence
  Description of Artificial Sequence: Synthetic oligonucleotide
  Target: SCNA; (-) strand; PAM type: YTN; PAM sequence: TTT
ttatactaaagtgtttatca

SEQ ID NO: 62482 - DNA, 20 bp, Artificial Sequence
  Description of Artificial Sequence: Synthetic oligonucleotide
  Target: SCNA; (-) strand; PAM type: YTN; PAM sequence: TTG
acatggatatgtttttatac

SEQ ID NO: 62483 - DNA, 20 bp, Artificial Sequence
  Description of Artificial Sequence: Synthetic oligonucleotide
  Target: SCNA; (-) strand; PAM type: YTN; PAM sequence: TTA
ttgacatggatatgttttta

SEQ ID NO: 62484 - DNA, 20 bp, Artificial Sequence
  Description of Artificial Sequence: Synthetic oligonucleotide
  Target: SCNA; (-) strand; PAM type: YTN; PAM sequence: TTT
attgacatggatatgttttt

SEQ ID NO: 62485 - DNA, 20 bp, Artificial Sequence
  Description of Artificial Sequence: Synthetic oligonucleotide
  Target: SCNA; (-) strand; PAM type: YTN; PAM sequence: TTA
caaatccatatttattgaca

SEQ ID NO: 62486 - DNA, 20 bp, Artificial Sequence
  Description of Artificial Sequence: Synthetic oligonucleotide
  Target: SCNA; (-) strand; PAM type: YTN; PAM sequence: TTA
tagccaagatgatgttacaa

SEQ ID NO: 62487 - DNA, 20 bp, Artificial Sequence
  Description of Artificial Sequence: Synthetic oligonucleotide
  Target: SCNA; (-) strand; PAM type: YTN; PAM sequence: TTT
atagccaagatgatgttaca

SEQ ID NO: 62488 - DNA, 20 bp, Artificial Sequence
  Description of Artificial Sequence: Synthetic oligonucleotide
  Target: SCNA; (-) strand; PAM type: YTN; PAM sequence: TTT
tatagccaagatgatgttac

SEQ ID NO: 62489 - DNA, 20 bp, Artificial Sequence
  Description of Artificial Sequence: Synthetic oligonucleotide
  Target: SCNA; (-) strand; PAM type: YTN; PAM sequence: TTA
aataaatatatgatacagta

SEQ ID NO: 62490 - DNA, 20 bp, Artificial Sequence
  Description of Artificial Sequence: Synthetic oligonucleotide
  Target: SCNA; (-) strand; PAM type: YTN; PAM sequence: TTA
aaaatagataattaaataaa

SEQ ID NO: 62491 - DNA, 20 bp, Artificial Sequence
  Description of Artificial Sequence: Synthetic oligonucleotide
  Target: SCNA; (-) strand; PAM type: YTN; PAM sequence: TTC
aaccgatgtatacgaaaata

SEQ ID NO: 62492 - DNA, 20 bp, Artificial Sequence
  Description of Artificial Sequence: Synthetic oligonucleotide
  Target: SCNA; (-) strand; PAM type: YTN; PAM sequence: TTG
aattcaaccgatgtatacga

SEQ ID NO: 62493 - DNA, 20 bp, Artificial Sequence
  Description of Artificial Sequence: Synthetic oligonucleotide
  Target: SCNA; (-) strand; PAM type: YTN; PAM sequence: TTG
gaagacaaaaagaagaaaaa

SEQ ID NO: 62494 - DNA, 20 bp, Artificial Sequence
  Description of Artificial Sequence: Synthetic oligonucleotide
  Target: SCNA; (-) strand; PAM type: YTN; PAM sequence: CTT
ggaagacaaaaagaagaaaa

SEQ ID NO: 62495 - DNA, 20 bp, Artificial Sequence
  Description of Artificial Sequence: Synthetic oligonucleotide
  Target: SCNA; (-) strand; PAM type: YTN; PAM sequence: TTC
ttggaagacaaaaagaagaa

SEQ ID NO: 62496 - DNA, 20 bp, Artificial Sequence
  Description of Artificial Sequence: Synthetic oligonucleotide
  Target: SCNA; (-) strand; PAM type: YTN; PAM sequence: TTA
ttcttggaagacaaaaagaa

SEQ ID NO: 62497 - DNA, 20 bp, Artificial Sequence
  Description of Artificial Sequence: Synthetic oligonucleotide
  Target: SCNA; (-) strand; PAM type: YTN; PAM sequence: TTT
attcttggaagacaaaaaga

SEQ ID NO: 62498 - DNA, 20 bp, Artificial Sequence
  Description of Artificial Sequence: Synthetic oligonucleotide
  Target: SCNA; (-) strand; PAM type: YTN; PAM sequence: TTT
tattcttggaagacaaaaag

SEQ ID NO: 62499 - DNA, 20 bp, Artificial Sequence
  Description of Artificial Sequence: Synthetic oligonucleotide
  Target: SCNA; (-) strand; PAM type: YTN; PAM sequence: CTG
ggtatatagacaagcgtttt

SEQ ID NO: 62500 - DNA, 20 bp, Artificial Sequence
  Description of Artificial Sequence: Synthetic oligonucleotide
  Target: SCNA; (-) strand; PAM type: YTN; PAM sequence: TTA
gactgggtatatagacaagc

SEQ ID NO: 62501 - DNA, 20 bp, Artificial Sequence
  Description of Artificial Sequence: Synthetic oligonucleotide
  Target: SCNA; (-) strand; PAM type: YTN; PAM sequence: TTA
ttagactgggtatatagaca

SEQ ID NO: 62502 - DNA, 20 bp, Artificial Sequence
  Description of Artificial Sequence: Synthetic oligonucleotide
  Target: SCNA; (-) strand; PAM type: YTN; PAM sequence: TTA
acatatataaagaattatta

SEQ ID NO: 62503 - DNA, 20 bp, Artificial Sequence
  Description of Artificial Sequence: Synthetic oligonucleotide
  Target: SCNA; (-) strand; PAM type: YTN; PAM sequence: TTT
aacatatataaagaattatt

SEQ ID NO: 62504 - DNA, 20 bp, Artificial Sequence
  Description of Artificial Sequence: Synthetic oligonucleotide
  Target: SCNA; (-) strand; PAM type: YTN; PAM sequence: TTA
gtaatatttaacatatataa

SEQ ID NO: 62505 - DNA, 20 bp, Artificial Sequence
  Description of Artificial Sequence: Synthetic oligonucleotide
  Target: SCNA; (-) strand; PAM type: YTN; PAM sequence: TTA
ttagtaatatttaacatata

SEQ ID NO: 62506 - DNA, 20 bp, Artificial Sequence
  Description of Artificial Sequence: Synthetic oligonucleotide
  Target: SCNA; (-) strand; PAM type: YTN; PAM sequence: CTT
attagtaatatttaacatat

SEQ ID NO: 62507 - DNA, 20 bp, Artificial Sequence
  Description of Artificial Sequence: Synthetic oligonucleotide
  Target: SCNA; (-) strand; PAM type: YTN; PAM sequence: TTA
acttattagtaatatttaac

SEQ ID NO: 62508 - DNA, 20 bp, Artificial Sequence
  Description of Artificial Sequence: Synthetic oligonucleotide
  Target: SCNA; (-) strand; PAM type: YTN; PAM sequence: TTA
agattaacttattagtaata

SEQ ID NO: 62509 - DNA, 20 bp, Artificial Sequence
  Description of Artificial Sequence: Synthetic oligonucleotide
  Target: SCNA; (-) strand; PAM type: YTN; PAM sequence: TTT
aagattaacttattagtaat

SEQ ID NO: 62510 - DNA, 20 bp, Artificial Sequence
  Description of Artificial Sequence: Synthetic oligonucleotide
  Target: SCNA; (-) strand; PAM type: YTN; PAM sequence: TTG
atttaagattaacttattag

SEQ ID NO: 62511 - DNA, 20 bp, Artificial Sequence
  Description of Artificial Sequence: Synthetic oligonucleotide
  Target: SCNA; (-) strand; PAM type: YTN; PAM sequence: TTA
tagagaagttgatttaagat

SEQ ID NO: 62512 - DNA, 20 bp, Artificial Sequence
  Description of Artificial Sequence: Synthetic oligonucleotide
  Target: SCNA; (-) strand; PAM type: YTN; PAM sequence: CTA
ttatagagaagttgatttaa

SEQ ID NO: 62513 - DNA, 20 bp, Artificial Sequence
  Description of Artificial Sequence: Synthetic oligonucleotide
  Target: SCNA; (-) strand; PAM type: YTN; PAM sequence: TTG
tctattatagagaagttgat

SEQ ID NO: 62514 - DNA, 20 bp, Artificial Sequence
  Description of Artificial Sequence: Synthetic oligonucleotide
  Target: SCNA; (-) strand; PAM type: YTN; PAM sequence: TTA
gtgaaggatcattgtctatt

SEQ ID NO: 62515 - DNA, 20 bp, Artificial Sequence
  Description of Artificial Sequence: Synthetic oligonucleotide
  Target: SCNA; (-) strand; PAM type: YTN; PAM sequence: CTT
agtgaaggatcattgtctat

SEQ ID NO: 62516 - DNA, 20 bp, Artificial Sequence
  Description of Artificial Sequence: Synthetic oligonucleotide
  Target: SCNA; (-) strand; PAM type: YTN; PAM sequence: CTC
agaaaagaatcagtaagact

SEQ ID NO: 62517 - DNA, 20 bp, Artificial Sequence
  Description of Artificial Sequence: Synthetic oligonucleotide
  Target: SCNA; (-) strand; PAM type: YTN; PAM sequence: TTA
aatagaaatggactcagaaa

SEQ ID NO: 62518 - DNA, 20 bp, Artificial Sequence
  Description of Artificial Sequence: Synthetic oligonucleotide
  Target: SCNA; (-) strand; PAM type: YTN; PAM sequence: TTT
aaatagaaatggactcagaa

SEQ ID NO: 62519 - DNA, 20 bp, Artificial Sequence
  Description of Artificial Sequence: Synthetic oligonucleotide
  Target: SCNA; (-) strand; PAM type: YTN; PAM sequence: TTA
aggataatttaaatagaaat

SEQ ID NO: 62520 - DNA, 20 bp, Artificial Sequence
  Description of Artificial Sequence: Synthetic oligonucleotide
  Target: SCNA; (-) strand; PAM type: YTN; PAM sequence: TTT
aaggataatttaaatagaaa

SEQ ID NO: 62521 - DNA, 20 bp, Artificial Sequence
  Description of Artificial Sequence: Synthetic oligonucleotide
  Target: SCNA; (-) strand; PAM type: YTN; PAM sequence: TTA
atgacgaaatttaaggataa

SEQ ID NO: 62522 - DNA, 20 bp, Artificial Sequence
  Description of Artificial Sequence: Synthetic oligonucleotide
  Target: SCNA; (-) strand; PAM type: YTN; PAM sequence: TTT
aatgacgaaatttaaggata

SEQ ID NO: 62523 - DNA, 20 bp, Artificial Sequence
  Description of Artificial Sequence: Synthetic oligonucleotide
  Target: SCNA; (-) strand; PAM type: YTN; PAM sequence: TTT
taatgacgaaatttaaggat

SEQ ID NO: 62524 - DNA, 20 bp, Artificial Sequence
  Description of Artificial Sequence: Synthetic oligonucleotide
  Target: SCNA; (-) strand; PAM type: YTN; PAM sequence: TTC
aatattttaatgacgaaatt

SEQ ID NO: 62525 - DNA, 20 bp, Artificial Sequence
  Description of Artificial Sequence: Synthetic oligonucleotide
  Target: SCNA; (-) strand; PAM type: YTN; PAM sequence: CTT
caatattttaatgacgaaat

SEQ ID NO: 62526 - DNA, 20 bp, Artificial Sequence
  Description of Artificial Sequence: Synthetic oligonucleotide
  Target: SCNA; (-) strand; PAM type: YTN; PAM sequence: TTA
acttcaatattttaatgacg

SEQ ID NO: 62527 - DNA, 20 bp, Artificial Sequence
  Description of Artificial Sequence: Synthetic oligonucleotide
  Target: SCNA; (-) strand; PAM type: YTN; PAM sequence: TTT
aacttcaatattttaatgac

SEQ ID NO: 62528 - DNA, 20 bp, Artificial Sequence
  Description of Artificial Sequence: Synthetic oligonucleotide
  Target: SCNA; (-) strand; PAM type: YTN; PAM sequence: CTT
taacttcaatattttaatga

SEQ ID NO: 62529 - DNA, 20 bp, Artificial Sequence
  Description of Artificial Sequence: Synthetic oligonucleotide
  Target: SCNA; (-) strand; PAM type: YTN; PAM sequence: CTG
cacatacaactttaacttca

SEQ ID NO: 62530 - DNA, 20 bp, Artificial Sequence
  Description of Artificial Sequence: Synthetic oligonucleotide
  Target: SCNA; (+) strand; PAM type: YTN; PAM sequence: CTA
aaacctatacctaacagcct

SEQ ID NO: 62531 - DNA, 20 bp, Artificial Sequence
  Description of Artificial Sequence: Synthetic oligonucleotide
  Target: SCNA; (+) strand; PAM type: YTN; PAM sequence: CTA
tacctaacagcctggaagta

SEQ ID NO: 62532 - DNA, 20 bp, Artificial Sequence
  Description of Artificial Sequence: Synthetic oligonucleotide
  Target: SCNA; (+) strand; PAM type: YTN; PAM sequence: CTA
acagcctggaagtaggtctg

SEQ ID NO: 62533 - DNA, 20 bp, Artificial Sequence
  Description of Artificial Sequence: Synthetic oligonucleotide
  Target: SCNA; (+) strand; PAM type: YTN; PAM sequence: CTG
gaagtaggtctgatcatcaa

SEQ ID NO: 62534 - DNA, 20 bp, Artificial Sequence
  Description of Artificial Sequence: Synthetic oligonucleotide
  Target: SCNA; (+) strand; PAM type: YTN; PAM sequence: CTG
atcatcaaaaaccaacacag

SEQ ID NO: 62535 - DNA, 20 bp, Artificial Sequence
  Description of Artificial Sequence: Synthetic oligonucleotide
  Target: SCNA; (+) strand; PAM type: YTN; PAM sequence: TTT
gaatgtctattctcaccatg

SEQ ID NO: 62536 - DNA, 20 bp, Artificial Sequence
  Description of Artificial Sequence: Synthetic oligonucleotide
  Target: SCNA; (+) strand; PAM type: YTN; PAM sequence: TTG
aatgtctattctcaccatgg

SEQ ID NO: 62537 - DNA, 20 bp, Artificial Sequence
  Description of Artificial Sequence: Synthetic oligonucleotide
  Target: SCNA; (+) strand; PAM type: YTN; PAM sequence: CTA
ttctcaccatgggcagtgaa

SEQ ID NO: 62538 - DNA, 20 bp, Artificial Sequence
  Description of Artificial Sequence: Synthetic oligonucleotide
  Target: SCNA; (+) strand; PAM type: YTN; PAM sequence: TTC
tcaccatgggcagtgaaaac

SEQ ID NO: 62539 - DNA, 20 bp, Artificial Sequence
  Description of Artificial Sequence: Synthetic oligonucleotide
  Target: SCNA; (+) strand; PAM type: YTN; PAM sequence: CTC
accatgggcagtgaaaacac

SEQ ID NO: 62540 - DNA, 20 bp, Artificial Sequence
  Description of Artificial Sequence: Synthetic oligonucleotide
  Target: SCNA; (+) strand; PAM type: YTN; PAM sequence: CTC
cataatattgatgtacagag

SEQ ID NO: 62541 - DNA, 20 bp, Artificial Sequence
  Description of Artificial Sequence: Synthetic oligonucleotide
  Target: SCNA; (+) strand; PAM type: YTN; PAM sequence: TTG
atgtacagagctgttcttaa

SEQ ID NO: 62542 - DNA, 20 bp, Artificial Sequence
  Description of Artificial Sequence: Synthetic oligonucleotide
  Target: SCNA; (+) strand; PAM type: YTN; PAM sequence: CTG
ttcttaaacataactttgga

SEQ ID NO: 62543 - DNA, 20 bp, Artificial Sequence
  Description of Artificial Sequence: Synthetic oligonucleotide
  Target: SCNA; (+) strand; PAM type: YTN; PAM sequence: TTC
ttaaacataactttggattg

SEQ ID NO: 62544 - DNA, 20 bp, Artificial Sequence
  Description of Artificial Sequence: Synthetic oligonucleotide
  Target: SCNA; (+) strand; PAM type: YTN; PAM sequence: CTT
aaacataactttggattgtg

SEQ ID NO: 62545 - DNA, 20 bp, Artificial Sequence
  Description of Artificial Sequence: Synthetic oligonucleotide
  Target: SCNA; (+) strand; PAM type: YTN; PAM sequence: TTA
aacataactttggattgtgt

SEQ ID NO: 62546 - DNA, 20 bp, Artificial Sequence
  Description of Artificial Sequence: Synthetic oligonucleotide
  Target: SCNA; (+) strand; PAM type: YTN; PAM sequence: CTT
tggattgtgttggactcctt

SEQ ID NO: 62547 - DNA, 20 bp, Artificial Sequence
  Description of Artificial Sequence: Synthetic oligonucleotide
  Target: SCNA; (+) strand; PAM type: YTN; PAM sequence: TTT
ggattgtgttggactccttc

SEQ ID NO: 62548 - DNA, 20 bp, Artificial Sequence
  Description of Artificial Sequence: Synthetic oligonucleotide
  Target: SCNA; (+) strand; PAM type: YTN; PAM sequence: TTG
gattgtgttggactccttct

SEQ ID NO: 62549 - DNA, 20 bp, Artificial Sequence
  Description of Artificial Sequence: Synthetic oligonucleotide
  Target: SCNA; (+) strand; PAM type: YTN; PAM sequence: TTG
tgttggactccttcttagaa

SEQ ID NO: 62550 - DNA, 20 bp, Artificial Sequence
  Description of Artificial Sequence: Synthetic oligonucleotide
  Target: SCNA; (+) strand; PAM type: YTN; PAM sequence: TTG
gactccttcttagaatggca

SEQ ID NO: 62551 - DNA, 20 bp, Artificial Sequence
  Description of Artificial Sequence: Synthetic oligonucleotide
  Target: SCNA; (+) strand; PAM type: YTN; PAM sequence: CTC
cttcttagaatggcaccaag

SEQ ID NO: 62552 - DNA, 20 bp, Artificial Sequence
  Description of Artificial Sequence: Synthetic oligonucleotide
  Target: SCNA; (+) strand; PAM type: YTN; PAM sequence: CTT
cttagaatggcaccaagtaa

SEQ ID NO: 62553 - DNA, 20 bp, Artificial Sequence
  Description of Artificial Sequence: Synthetic oligonucleotide
  Target: SCNA; (+) strand; PAM type: YTN; PAM sequence: TTC
ttagaatggcaccaagtaac

SEQ ID NO: 62554 - DNA, 20 bp, Artificial Sequence
  Description of Artificial Sequence: Synthetic oligonucleotide
  Target: SCNA; (+) strand; PAM type: YTN; PAM sequence: CTT
agaatggcaccaagtaacca

SEQ ID NO: 62555 - DNA, 20 bp, Artificial Sequence
  Description of Artificial Sequence: Synthetic oligonucleotide
  Target: SCNA; (+) strand; PAM type: YTN; PAM sequence: TTA
gaatggcaccaagtaaccac

SEQ ID NO: 62556 - DNA, 20 bp, Artificial Sequence
  Description of Artificial Sequence: Synthetic oligonucleotide
  Target: SCNA; (+) strand; PAM type: YTN; PAM sequence: TTC
acctccaaacattgctgtga

SEQ ID NO: 62557 - DNA, 20 bp, Artificial Sequence
  Description of Artificial Sequence: Synthetic oligonucleotide
  Target: SCNA; (+) strand; PAM type: YTN; PAM sequence: CTC
caaacattgctgtgataatc

SEQ ID NO: 62558 - DNA, 20 bp, Artificial Sequence
  Description of Artificial Sequence: Synthetic oligonucleotide
  Target: SCNA; (+) strand; PAM type: YTN; PAM sequence: TTG
ctgtgataatcagagctcag

SEQ ID NO: 62559 - DNA, 20 bp, Artificial Sequence
  Description of Artificial Sequence: Synthetic oligonucleotide
  Target: SCNA; (+) strand; PAM type: YTN; PAM sequence: CTG
tgataatcagagctcagaat

SEQ ID NO: 62560 - DNA, 20 bp, Artificial Sequence
  Description of Artificial Sequence: Synthetic oligonucleotide
  Target: SCNA; (+) strand; PAM type: YTN; PAM sequence: CTC
agaatcagttgttaacaata

SEQ ID NO: 62561 - DNA, 20 bp, Artificial Sequence
  Description of Artificial Sequence: Synthetic oligonucleotide
  Target: SCNA; (+) strand; PAM type: YTN; PAM sequence: TTG
ttaacaatacataatttaca

SEQ ID NO: 62562 - DNA, 20 bp, Artificial Sequence
  Description of Artificial Sequence: Synthetic oligonucleotide
  Target: SCNA; (+) strand; PAM type: YTN; PAM sequence: TTA
acaatacataatttacagtt

SEQ ID NO: 62563 - DNA, 20 bp, Artificial Sequence
  Description of Artificial Sequence: Synthetic oligonucleotide
  Target: SCNA; (+) strand; PAM type: YTN; PAM sequence: TTT
acagttccttcagagatatg

SEQ ID NO: 62564 - DNA, 20 bp, Artificial Sequence
  Description of Artificial Sequence: Synthetic oligonucleotide
  Target: SCNA; (+) strand; PAM type: YTN; PAM sequence: TTA
cagttccttcagagatatgt

SEQ ID NO: 62565 - DNA, 20 bp, Artificial Sequence
  Description of Artificial Sequence: Synthetic oligonucleotide
  Target: SCNA; (+) strand; PAM type: YTN; PAM sequence: TTC
cttcagagatatgtcttctt

SEQ ID NO: 62566 - DNA, 20 bp, Artificial Sequence
  Description of Artificial Sequence: Synthetic oligonucleotide
  Target: SCNA; (+) strand; PAM type: YTN; PAM sequence: CTT
cagagatatgtcttcttttg

SEQ ID NO: 62567 - DNA, 20 bp, Artificial Sequence
  Description of Artificial Sequence: Synthetic oligonucleotide
  Target: SCNA; (+) strand; PAM type: YTN; PAM sequence: TTC
agagatatgtcttcttttgc

SEQ ID NO: 62568 - DNA, 20 bp, Artificial Sequence
  Description of Artificial Sequence: Synthetic oligonucleotide
  Target: SCNA; (+) strand; PAM type: YTN; PAM sequence: CTT
cttttgctttagatgagatc

SEQ ID NO: 62569 - DNA, 20 bp, Artificial Sequence
  Description of Artificial Sequence: Synthetic oligonucleotide
  Target: SCNA; (+) strand; PAM type: YTN; PAM sequence: TTC
ttttgctttagatgagatca

SEQ ID NO: 62570 - DNA, 20 bp, Artificial Sequence
  Description of Artificial Sequence: Synthetic oligonucleotide
  Target: SCNA; (+) strand; PAM type: YTN; PAM sequence: CTT
ttgctttagatgagatcaag

SEQ ID NO: 62571 - DNA, 20 bp, Artificial Sequence
  Description of Artificial Sequence: Synthetic oligonucleotide
  Target: SCNA; (+) strand; PAM type: YTN; PAM sequence: TTT
tgctttagatgagatcaaga

SEQ ID NO: 62572 - DNA, 20 bp, Artificial Sequence
  Description of Artificial Sequence: Synthetic oligonucleotide
  Target: SCNA; (+) strand; PAM type: YTN; PAM sequence: TTT
gctttagatgagatcaagaa

SEQ ID NO: 62573 - DNA, 20 bp, Artificial Sequence
  Description of Artificial Sequence: Synthetic oligonucleotide
  Target: SCNA; (+) strand; PAM type: YTN; PAM sequence: TTG
ctttagatgagatcaagaaa

SEQ ID NO: 62574 - DNA, 20 bp, Artificial Sequence
  Description of Artificial Sequence: Synthetic oligonucleotide
  Target: SCNA; (+) strand; PAM type: YTN; PAM sequence: CTT
tagatgagatcaagaaaatt

SEQ ID NO: 62575 - DNA, 20 bp, Artificial Sequence
  Description of Artificial Sequence: Synthetic oligonucleotide
  Target: SCNA; (+) strand; PAM type: YTN; PAM sequence: TTT
agatgagatcaagaaaattg

SEQ ID NO: 62576 - DNA, 20 bp, Artificial Sequence
  Description of Artificial Sequence: Synthetic oligonucleotide
  Target: SCNA; (+) strand; PAM type: YTN; PAM sequence: TTA
gatgagatcaagaaaattgt

SEQ ID NO: 62577 - DNA, 20 bp, Artificial Sequence
  Description of Artificial Sequence: Synthetic oligonucleotide
  Target: SCNA; (+) strand; PAM type: YTN; PAM sequence: TTG
taggaaaggtctttttctca

SEQ ID NO: 62578 - DNA, 20 bp, Artificial Sequence
  Description of Artificial Sequence: Synthetic oligonucleotide
  Target: SCNA; (+) strand; PAM type: YTN; PAM sequence: CTT
tttctcagctgttacccttt

SEQ ID NO: 62579 - DNA, 20 bp, Artificial Sequence
  Description of Artificial Sequence: Synthetic oligonucleotide
  Target: SCNA; (+) strand; PAM type: YTN; PAM sequence: TTT
ttctcagctgttaccctttt

SEQ ID NO: 62580 - DNA, 20 bp, Artificial Sequence
  Description of Artificial Sequence: Synthetic oligonucleotide
  Target: SCNA; (+) strand; PAM type: YTN; PAM sequence: TTT
tctcagctgttacccttttg

SEQ ID NO: 62581 - DNA, 20 bp, Artificial Sequence
  Description of Artificial Sequence: Synthetic oligonucleotide
  Target: SCNA; (+) strand; PAM type: YTN; PAM sequence: TTT
ctcagctgttacccttttgc

SEQ ID NO: 62582 - DNA, 20 bp, Artificial Sequence
  Description of Artificial Sequence: Synthetic oligonucleotide
  Target: SCNA; (+) strand; PAM type: YTN; PAM sequence: TTC
tcagctgttacccttttgcc

SEQ ID NO: 62583 - DNA, 20 bp, Artificial Sequence
  Description of Artificial Sequence: Synthetic oligonucleotide
  Target: SCNA; (+) strand; PAM type: YTN; PAM sequence: CTC
agctgttacccttttgccca

SEQ ID NO: 62584 - DNA, 20 bp, Artificial Sequence
  Description of Artificial Sequence: Synthetic oligonucleotide
  Target: SCNA; (+) strand; PAM type: YTN; PAM sequence: CTG
ttacccttttgcccatcgat

SEQ ID NO: 62585 - DNA, 20 bp, Artificial Sequence
  Description of Artificial Sequence: Synthetic oligonucleotide
  Target: SCNA; (+) strand; PAM type: YTN; PAM sequence: TTA
cccttttgcccatcgatcta

SEQ ID NO: 62586 - DNA, 20 bp, Artificial Sequence
  Description of Artificial Sequence: Synthetic oligonucleotide
  Target: SCNA; (+) strand; PAM type: YTN; PAM sequence: CTT
ttgcccatcgatctaagaca

SEQ ID NO: 62587 - DNA, 20 bp, Artificial Sequence
  Description of Artificial Sequence: Synthetic oligonucleotide
  Target: SCNA; (+) strand; PAM type: YTN; PAM sequence: TTT
tgcccatcgatctaagacaa

SEQ ID NO: 62588 - DNA, 20 bp, Artificial Sequence
  Description of Artificial Sequence: Synthetic oligonucleotide
  Target: SCNA; (+) strand; PAM type: YTN; PAM sequence: TTT
gcccatcgatctaagacaag

SEQ ID NO: 62589 - DNA, 20 bp, Artificial Sequence
  Description of Artificial Sequence: Synthetic oligonucleotide
  Target: SCNA; (+) strand; PAM type: YTN; PAM sequence: TTG
cccatcgatctaagacaagt

SEQ ID NO: 62590 - DNA, 20 bp, Artificial Sequence
  Description of Artificial Sequence: Synthetic oligonucleotide
  Target: SCNA; (+) strand; PAM type: YTN; PAM sequence: CTA
agacaagtggcctaacctag

SEQ ID NO: 62591 - DNA, 20 bp, Artificial Sequence
  Description of Artificial Sequence: Synthetic oligonucleotide
  Target: SCNA; (+) strand; PAM type: YTN; PAM sequence: CTA
acctagctaaaggatggcac

SEQ ID NO: 62592 - DNA, 20 bp, Artificial Sequence
  Description of Artificial Sequence: Synthetic oligonucleotide
  Target: SCNA; (+) strand; PAM type: YTN; PAM sequence: CTA
gctaaaggatggcacaaaca

SEQ ID NO: 62593 - DNA, 20 bp, Artificial Sequence
  Description of Artificial Sequence: Synthetic oligonucleotide
  Target: SCNA; (+) strand; PAM type: YTN; PAM sequence: CTA
aaggatggcacaaacagcta

SEQ ID NO: 62594 - DNA, 20 bp, Artificial Sequence
  Description of Artificial Sequence: Synthetic oligonucleotide
  Target: SCNA; (+) strand; PAM type: YTN; PAM sequence: CTA
aggatgcccaagatggattt

SEQ ID NO: 62595 - DNA, 20 bp, Artificial Sequence
  Description of Artificial Sequence: Synthetic oligonucleotide
  Target: SCNA; (+) strand; PAM type: YTN; PAM sequence: TTT
ccaaggaagtttgccaaaaa

SEQ ID NO: 62596 - DNA, 20 bp, Artificial Sequence
  Description of Artificial Sequence: Synthetic oligonucleotide
  Target: SCNA; (+) strand; PAM type: YTN; PAM sequence: TTC
caaggaagtttgccaaaaag

SEQ ID NO: 62597 - DNA, 20 bp, Artificial Sequence
  Description of Artificial Sequence: Synthetic oligonucleotide
  Target: SCNA; (+) strand; PAM type: YTN; PAM sequence: TTT
gccaaaaagacttgccagat

SEQ ID NO: 62598 - DNA, 20 bp, Artificial Sequence
  Description of Artificial Sequence: Synthetic oligonucleotide
  Target: SCNA; (+) strand; PAM type: YTN; PAM sequence: TTG
ccaaaaagacttgccagatt

SEQ ID NO: 62599 - DNA, 20 bp, Artificial Sequence
  Description of Artificial Sequence: Synthetic oligonucleotide
  Target: SCNA; (+) strand; PAM type: YTN; PAM sequence: CTT
gccagatttctaatcattca

SEQ ID NO: 62600 - DNA, 20 bp, Artificial Sequence
  Description of Artificial Sequence: Synthetic oligonucleotide
  Target: SCNA; (+) strand; PAM type: YTN; PAM sequence: TTG
ccagatttctaatcattcaa

SEQ ID NO: 62601 - DNA, 20 bp, Artificial Sequence
  Description of Artificial Sequence: Synthetic oligonucleotide
  Target: SCNA; (+) strand; PAM type: YTN; PAM sequence: TTT
ctaatcattcaacatggaca

SEQ ID NO: 62602 - DNA, 20 bp, Artificial Sequence
  Description of Artificial Sequence: Synthetic oligonucleotide
  Target: SCNA; (+) strand; PAM type: YTN; PAM sequence: TTC
taatcattcaacatggacac

SEQ ID NO: 62603 - DNA, 20 bp, Artificial Sequence
  Description of Artificial Sequence: Synthetic oligonucleotide
  Target: SCNA; (+) strand; PAM type: YTN; PAM sequence: CTA
atcattcaacatggacactc

SEQ ID NO: 62604 - DNA, 20 bp, Artificial Sequence
  Description of Artificial Sequence: Synthetic oligonucleotide
  Target: SCNA; (+) strand; PAM type: YTN; PAM sequence: TTC
aacatggacactccatcttc

SEQ ID NO: 62605 - DNA, 20 bp, Artificial Sequence
  Description of Artificial Sequence: Synthetic oligonucleotide
  Target: SCNA; (+) strand; PAM type: YTN; PAM sequence: CTC
catcttcaacagcaggagtc

SEQ ID NO: 62606 - DNA, 20 bp, Artificial Sequence
  Description of Artificial Sequence: Synthetic oligonucleotide
  Target: SCNA; (+) strand; PAM type: YTN; PAM sequence: CTT
caacagcaggagtcagtgct

SEQ ID NO: 62607 - DNA, 20 bp, Artificial Sequence
  Description of Artificial Sequence: Synthetic oligonucleotide
  Target: SCNA; (+) strand; PAM type: YTN; PAM sequence: TTC
aacagcaggagtcagtgctg

SEQ ID NO: 62608 - DNA, 20 bp, Artificial Sequence
  Description of Artificial Sequence: Synthetic oligonucleotide
  Target: SCNA; (+) strand; PAM type: YTN; PAM sequence: CTG
ccacattactaatgtttggc

SEQ ID NO: 62609 - DNA, 20 bp, Artificial Sequence
  Description of Artificial Sequence: Synthetic oligonucleotide
  Target: SCNA; (+) strand; PAM type: YTN; PAM sequence: TTA
ctaatgtttggcagcctctc

SEQ ID NO: 62610 - DNA, 20 bp, Artificial Sequence
  Description of Artificial Sequence: Synthetic oligonucleotide
  Target: SCNA; (+) strand; PAM type: YTN; PAM sequence: CTA
atgtttggcagcctctcaaa

SEQ ID NO: 62611 - DNA, 20 bp, Artificial Sequence
  Description of Artificial Sequence: Synthetic oligonucleotide
  Target: SCNA; (+) strand; PAM type: YTN; PAM sequence: TTT
ggcagcctctcaaaacttgc

SEQ ID NO: 62612 - DNA, 20 bp, Artificial Sequence
  Description of Artificial Sequence: Synthetic oligonucleotide
  Target: SCNA; (+) strand; PAM type: YTN; PAM sequence: TTG
gcagcctctcaaaacttgct

SEQ ID NO: 62613 - DNA, 20 bp, Artificial Sequence
  Description of Artificial Sequence: Synthetic oligonucleotide
  Target: SCNA; (+) strand; PAM type: YTN; PAM sequence: CTC
tcaaaacttgctttgaccat

SEQ ID NO: 62614 - DNA, 20 bp, Artificial Sequence
  Description of Artificial Sequence: Synthetic oligonucleotide
  Target: SCNA; (+) strand; PAM type: YTN; PAM sequence: CTC
aaaacttgctttgaccattt

SEQ ID NO: 62615 - DNA, 20 bp, Artificial Sequence
  Description of Artificial Sequence: Synthetic oligonucleotide
  Target: SCNA; (+) strand; PAM type: YTN; PAM sequence: CTT
gctttgaccatttccataga

SEQ ID NO: 62616 - DNA, 20 bp, Artificial Sequence
  Description of Artificial Sequence: Synthetic oligonucleotide
  Target: SCNA; (+) strand; PAM type: YTN; PAM sequence: TTG
ctttgaccatttccatagag

SEQ ID NO: 62617 - DNA, 20 bp, Artificial Sequence
  Description of Artificial Sequence: Synthetic oligonucleotide
  Target: SCNA; (+) strand; PAM type: YTN; PAM sequence: CTT
tgaccatttccatagagatt

SEQ ID NO: 62618 - DNA, 20 bp, Artificial Sequence
  Description of Artificial Sequence: Synthetic oligonucleotide
  Target: SCNA; (+) strand; PAM type: YTN; PAM sequence: TTT
gaccatttccatagagattt

SEQ ID NO: 62619 - DNA, 20 bp, Artificial Sequence
  Description of Artificial Sequence: Synthetic oligonucleotide
  Target: SCNA; (+) strand; PAM type: YTN; PAM sequence: TTG
accatttccatagagatttg

SEQ ID NO: 62620 - DNA, 20 bp, Artificial Sequence
  Description of Artificial Sequence: Synthetic oligonucleotide
  Target: SCNA; (+) strand; PAM type: YTN; PAM sequence: TTT
ccatagagatttggatgacg

SEQ ID NO: 62621 - DNA, 20 bp, Artificial Sequence
  Description of Artificial Sequence: Synthetic oligonucleotide
  Target: SCNA; (+) strand; PAM type: YTN; PAM sequence: TTC
catagagatttggatgacgc

SEQ ID NO: 62622 - DNA, 20 bp, Artificial Sequence
  Description of Artificial Sequence: Synthetic oligonucleotide
  Target: SCNA; (+) strand; PAM type: YTN; PAM sequence: TTT
ggatgacgccttacacaaca

SEQ ID NO: 62623 - DNA, 20 bp, Artificial Sequence
  Description of Artificial Sequence: Synthetic oligonucleotide
  Target: SCNA; (+) strand; PAM type: YTN; PAM sequence: TTG
gatgacgccttacacaacac

SEQ ID NO: 62624 - DNA, 20 bp, Artificial Sequence
  Description of Artificial Sequence: Synthetic oligonucleotide
  Target: SCNA; (+) strand; PAM type: YTN; PAM sequence: CTT
acacaacacgtagtacgttc

SEQ ID NO: 62625 - DNA, 20 bp, Artificial Sequence
  Description of Artificial Sequence: Synthetic oligonucleotide
  Target: SCNA; (+) strand; PAM type: YTN; PAM sequence: TTA
cacaacacgtagtacgttct

SEQ ID NO: 62626 - DNA, 20 bp, Artificial Sequence
  Description of Artificial Sequence: Synthetic oligonucleotide
  Target: SCNA; (+) strand; PAM type: YTN; PAM sequence: TTC
tagaggctcatctgtccata

SEQ ID NO: 62627 - DNA, 20 bp, Artificial Sequence
  Description of Artificial Sequence: Synthetic oligonucleotide
  Target: SCNA; (+) strand; PAM type: YTN; PAM sequence: CTA
gaggctcatctgtccatatt

SEQ ID NO: 62628 - DNA, 20 bp, Artificial Sequence
  Description of Artificial Sequence: Synthetic oligonucleotide
  Target: SCNA; (+) strand; PAM type: YTN; PAM sequence: CTC
atctgtccatatttagtctt

SEQ ID NO: 62629 - DNA, 20 bp, Artificial Sequence
  Description of Artificial Sequence: Synthetic oligonucleotide
  Target: SCNA; (+) strand; PAM type: YTN; PAM sequence: CTG
tccatatttagtcttcattt

SEQ ID NO: 62630 - DNA, 20 bp, Artificial Sequence
  Description of Artificial Sequence: Synthetic oligonucleotide
  Target: SCNA; (+) strand; PAM type: YTN; PAM sequence: TTT
agtcttcatttgttttttta

SEQ ID NO: 62631 - DNA, 20 bp, Artificial Sequence
  Description of Artificial Sequence: Synthetic oligonucleotide
  Target: SCNA; (+) strand; PAM type: YTN; PAM sequence: TTA
gtcttcatttgtttttttac

SEQ ID NO: 62632 - DNA, 20 bp, Artificial Sequence
  Description of Artificial Sequence: Synthetic oligonucleotide
  Target: SCNA; (+) strand; PAM type: YTN; PAM sequence: CTT
catttgtttttttacaagag

SEQ ID NO: 62633 - DNA, 20 bp, Artificial Sequence
  Description of Artificial Sequence: Synthetic oligonucleotide
  Target: SCNA; (+) strand; PAM type: YTN; PAM sequence: TTC
atttgtttttttacaagagt

SEQ ID NO: 62634 - DNA, 20 bp, Artificial Sequence
  Description of Artificial Sequence: Synthetic oligonucleotide
  Target: SCNA; (+) strand; PAM type: YTN; PAM sequence: TTT
gtttttttacaagagttgat

SEQ ID NO: 62635 - DNA, 20 bp, Artificial Sequence
  Description of Artificial Sequence: Synthetic oligonucleotide
  Target: SCNA; (+) strand; PAM type: YTN; PAM sequence: TTG
tttttttacaagagttgatt

SEQ ID NO: 62636 - DNA, 20 bp, Artificial Sequence
  Description of Artificial Sequence: Synthetic oligonucleotide
  Target: SCNA; (+) strand; PAM type: YTN; PAM sequence: TTT
ttttacaagagttgattttg

SEQ ID NO: 62637 - DNA, 20 bp, Artificial Sequence
  Description of Artificial Sequence: Synthetic oligonucleotide
  Target: SCNA; (+) strand; PAM type: YTN; PAM sequence: TTT
tttacaagagttgattttgt

SEQ ID NO: 62638 - DNA, 20 bp, Artificial Sequence
  Description of Artificial Sequence: Synthetic oligonucleotide
  Target: SCNA; (+) strand; PAM type: YTN; PAM sequence: TTT
ttacaagagttgattttgtt

SEQ ID NO: 62639 - DNA, 20 bp, Artificial Sequence
  Description of Artificial Sequence: Synthetic oligonucleotide
  Target: SCNA; (+) strand; PAM type: YTN; PAM sequence: TTT
tacaagagttgattttgtta

SEQ ID NO: 62640 - DNA, 20 bp, Artificial Sequence
  Description of Artificial Sequence: Synthetic oligonucleotide
  Target: SCNA; (+) strand; PAM type: YTN; PAM sequence: TTT
acaagagttgattttgttag

SEQ ID NO: 62641 - DNA, 20 bp, Artificial Sequence
  Description of Artificial Sequence: Synthetic oligonucleotide
  Target: SCNA; (+) strand; PAM type: YTN; PAM sequence: TTA
caagagttgattttgttagg

SEQ ID NO: 62642 - DNA, 20 bp, Artificial Sequence
  Description of Artificial Sequence: Synthetic oligonucleotide
  Target: SCNA; (+) strand; PAM type: YTN; PAM sequence: TTG
attttgttaggaaacgtagt

SEQ ID NO: 62643 - DNA, 20 bp, Artificial Sequence
  Description of Artificial Sequence: Synthetic oligonucleotide
  Target: SCNA; (+) strand; PAM type: YTN; PAM sequence: TTT
tgttaggaaacgtagtattc

SEQ ID NO: 62644 - DNA, 20 bp, Artificial Sequence
  Description of Artificial Sequence: Synthetic oligonucleotide
  Target: SCNA; (+) strand; PAM type: YTN; PAM sequence: TTT
gttaggaaacgtagtattca

SEQ ID NO: 62645 - DNA, 20 bp, Artificial Sequence
  Description of Artificial Sequence: Synthetic oligonucleotide
  Target: SCNA; (+) strand; PAM type: YTN; PAM sequence: TTG
ttaggaaacgtagtattcaa

SEQ ID NO: 62646 - DNA, 20 bp, Artificial Sequence
  Description of Artificial Sequence: Synthetic oligonucleotide
  Target: SCNA; (+) strand; PAM type: YTN; PAM sequence: TTA
ggaaacgtagtattcaacaa

SEQ ID NO: 62647 - DNA, 20 bp, Artificial Sequence
  Description of Artificial Sequence: Synthetic oligonucleotide
  Target: SCNA; (+) strand; PAM type: YTN; PAM sequence: TTC
aacaataattttctgctact

SEQ ID NO: 62648 - DNA, 20 bp, Artificial Sequence
  Description of Artificial Sequence: Synthetic oligonucleotide
  Target: SCNA; (+) strand; PAM type: YTN; PAM sequence: TTT
tctgctactctcaattccta

SEQ ID NO: 62649 - DNA, 20 bp, Artificial Sequence
  Description of Artificial Sequence: Synthetic oligonucleotide
  Target: SCNA; (+) strand; PAM type: YTN; PAM sequence: TTT
ctgctactctcaattcctag

SEQ ID NO: 62650 - DNA, 20 bp, Artificial Sequence
  Description of Artificial Sequence: Synthetic oligonucleotide
  Target: SCNA; (+) strand; PAM type: YTN; PAM sequence: TTC
tgctactctcaattcctagg

SEQ ID NO: 62651 - DNA, 20 bp, Artificial Sequence
  Description of Artificial Sequence: Synthetic oligonucleotide
  Target: SCNA; (+) strand; PAM type: YTN; PAM sequence: CTG
ctactctcaattcctaggta

SEQ ID NO: 62652 - DNA, 20 bp, Artificial Sequence
  Description of Artificial Sequence: Synthetic oligonucleotide
  Target: SCNA; (+) strand; PAM type: YTN; PAM sequence: CTA
ctctcaattcctaggtagtc

SEQ ID NO: 62653 - DNA, 20 bp, Artificial Sequence
  Description of Artificial Sequence: Synthetic oligonucleotide
  Target: SCNA; (+) strand; PAM type: YTN; PAM sequence: CTC
tcaattcctaggtagtcgta

SEQ ID NO: 62654 - DNA, 20 bp, Artificial Sequence
  Description of Artificial Sequence: Synthetic oligonucleotide
  Target: SCNA; (+) strand; PAM type: YTN; PAM sequence: CTC
aattcctaggtagtcgtaca

SEQ ID NO: 62655 - DNA, 20 bp, Artificial Sequence
  Description of Artificial Sequence: Synthetic oligonucleotide
  Target: SCNA; (+) strand; PAM type: YTN; PAM sequence: TTC
ctaggtagtcgtacagtgtc

SEQ ID NO: 62656 - DNA, 20 bp, Artificial Sequence
  Description of Artificial Sequence: Synthetic oligonucleotide
  Target: SCNA; (+) strand; PAM type: YTN; PAM sequence: CTA
ggtagtcgtacagtgtccag

SEQ ID NO: 62657 - DNA, 20 bp, Artificial Sequence
  Description of Artificial Sequence: Synthetic oligonucleotide
  Target: SCNA; (+) strand; PAM type: YTN; PAM sequence: CTG
ccctacttacctactttcca

SEQ ID NO: 62658 - DNA, 20 bp, Artificial Sequence
  Description of Artificial Sequence: Synthetic oligonucleotide
  Target: SCNA; (+) strand; PAM type: YTN; PAM sequence: CTA
cttacctactttccacactg

SEQ ID NO: 62659 - DNA, 20 bp, Artificial Sequence
  Description of Artificial Sequence: Synthetic oligonucleotide
  Target: SCNA; (+) strand; PAM type: YTN; PAM sequence: CTT
acctactttccacactgctg

SEQ ID NO: 62660 - DNA, 20 bp, Artificial Sequence
  Description of Artificial Sequence: Synthetic oligonucleotide
  Target: SCNA; (+) strand; PAM type: YTN; PAM sequence: TTA
cctactttccacactgctgc

SEQ ID NO: 62661 - DNA, 20 bp, Artificial Sequence
  Description of Artificial Sequence: Synthetic oligonucleotide
  Target: SCNA; (+) strand; PAM type: YTN; PAM sequence: CTA
ctttccacactgctgcacag

SEQ ID NO: 62662 - DNA, 20 bp, Artificial Sequence
  Description of Artificial Sequence: Synthetic oligonucleotide
  Target: SCNA; (+) strand; PAM type: YTN; PAM sequence: CTT
tccacactgctgcacaggaa

SEQ ID NO: 62663 - DNA, 20 bp, Artificial Sequence
  Description of Artificial Sequence: Synthetic oligonucleotide
  Target: SCNA; (+) strand; PAM type: YTN; PAM sequence: TTT
ccacactgctgcacaggaaa

SEQ ID NO: 62664 - DNA, 20 bp, Artificial Sequence
  Description of Artificial Sequence: Synthetic oligonucleotide
  Target: SCNA; (+) strand; PAM type: YTN; PAM sequence: TTC
cacactgctgcacaggaaaa

SEQ ID NO: 62665 - DNA, 20 bp, Artificial Sequence
  Description of Artificial Sequence: Synthetic oligonucleotide
  Target: SCNA; (+) strand; PAM type: YTN; PAM sequence: CTG
ctgcacaggaaaatctgaca

SEQ ID NO: 62666 - DNA, 20 bp, Artificial Sequence
  Description of Artificial Sequence: Synthetic oligonucleotide
  Target: SCNA; (+) strand; PAM type: YTN; PAM sequence: CTG
cacaggaaaatctgacagag

SEQ ID NO: 62667 - DNA, 20 bp, Artificial Sequence
  Description of Artificial Sequence: Synthetic oligonucleotide
  Target: SCNA; (+) strand; PAM type: YTN; PAM sequence: CTG
acagaggacaataacaaaca

SEQ ID NO: 62668 - DNA, 20 bp, Artificial Sequence
  Description of Artificial Sequence: Synthetic oligonucleotide
  Target: SCNA; (+) strand; PAM type: YTN; PAM sequence: CTC
accagctcatgcgttctttt

SEQ ID NO: 62669 - DNA, 20 bp, Artificial Sequence
  Description of Artificial Sequence: Synthetic oligonucleotide
  Target: SCNA; (+) strand; PAM type: YTN; PAM sequence: CTC
atgcgttcttttttgatcct

SEQ ID NO: 62670 - DNA, 20 bp, Artificial Sequence
  Description of Artificial Sequence: Synthetic oligonucleotide
  Target: SCNA; (+) strand; PAM type: YTN; PAM sequence: TTC
ttttttgatcctaattccga

SEQ ID NO: 62671 - DNA, 20 bp, Artificial Sequence
  Description of Artificial Sequence: Synthetic oligonucleotide
  Target: SCNA; (+) strand; PAM type: YTN; PAM sequence: CTT
ttttgatcctaattccgaga

SEQ ID NO: 62672 - DNA, 20 bp, Artificial Sequence
  Description of Artificial Sequence: Synthetic oligonucleotide
  Target: SCNA; (+) strand; PAM type: YTN; PAM sequence: TTT
tttgatcctaattccgagag

SEQ ID NO: 62673 - DNA, 20 bp, Artificial Sequence
  Description of Artificial Sequence: Synthetic oligonucleotide
  Target: SCNA; (+) strand; PAM type: YTN; PAM sequence: TTT
ttgatcctaattccgagaga

SEQ ID NO: 62674 - DNA, 20 bp, Artificial Sequence
  Description of Artificial Sequence: Synthetic oligonucleotide
  Target: SCNA; (+) strand; PAM type: YTN; PAM sequence: TTT
tgatcctaattccgagagac

SEQ ID NO: 62675 - DNA, 20 bp, Artificial Sequence
  Description of Artificial Sequence: Synthetic oligonucleotide
  Target: SCNA; (+) strand; PAM type: YTN; PAM sequence: TTT
gatcctaattccgagagact

SEQ ID NO: 62676 - DNA, 20 bp, Artificial Sequence
  Description of Artificial Sequence: Synthetic oligonucleotide
  Target: SCNA; (+) strand; PAM type: YTN; PAM sequence: TTG
atcctaattccgagagactc

SEQ ID NO: 62677 - DNA, 20 bp, Artificial Sequence
  Description of Artificial Sequence: Synthetic oligonucleotide
  Target: SCNA; (+) strand; PAM type: YTN; PAM sequence: CTA
attccgagagactcaccaaa

SEQ ID NO: 62678 - DNA, 20 bp, Artificial Sequence
  Description of Artificial Sequence: Synthetic oligonucleotide
  Target: SCNA; (+) strand; PAM type: YTN; PAM sequence: TTC
cgagagactcaccaaagaca

SEQ ID NO: 62679 - DNA, 20 bp, Artificial Sequence
  Description of Artificial Sequence: Synthetic oligonucleotide
  Target: SCNA; (+) strand; PAM type: YTN; PAM sequence: CTC
accaaagacatgaagagaaa

SEQ ID NO: 62680 - DNA, 20 bp, Artificial Sequence
  Description of Artificial Sequence: Synthetic oligonucleotide
  Target: SCNA; (+) strand; PAM type: YTN; PAM sequence: CTT
ttcttggaaatattgtaatt

SEQ ID NO: 62681 - DNA, 20 bp, Artificial Sequence
  Description of Artificial Sequence: Synthetic oligonucleotide
  Target: SCNA; (+) strand; PAM type: YTN; PAM sequence: TTT
tcttggaaatattgtaattg

SEQ ID NO: 62682 - DNA, 20 bp, Artificial Sequence
  Description of Artificial Sequence: Synthetic oligonucleotide
  Target: SCNA; (+) strand; PAM type: YTN; PAM sequence: TTT
cttggaaatattgtaattgc

SEQ ID NO: 62683 - DNA, 20 bp, Artificial Sequence
  Description of Artificial Sequence: Synthetic oligonucleotide
  Target: SCNA; (+) strand; PAM type: YTN; PAM sequence: TTC
ttggaaatattgtaattgct

SEQ ID NO: 62684 - DNA, 20 bp, Artificial Sequence
  Description of Artificial Sequence: Synthetic oligonucleotide
  Target: SCNA; (+) strand; PAM type: YTN; PAM sequence: CTT
ggaaatattgtaattgctgg

SEQ ID NO: 62685 - DNA, 20 bp, Artificial Sequence
  Description of Artificial Sequence: Synthetic oligonucleotide
  Target: SCNA; (+) strand; PAM type: YTN; PAM sequence: TTG
gaaatattgtaattgctggt

SEQ ID NO: 62686 - DNA, 20 bp, Artificial Sequence
  Description of Artificial Sequence: Synthetic oligonucleotide
  Target: SCNA; (+) strand; PAM type: YTN; PAM sequence: TTG
taattgctggtacatttgtt

SEQ ID NO: 62687 - DNA, 20 bp, Artificial Sequence
  Description of Artificial Sequence: Synthetic oligonucleotide
  Target: SCNA; (+) strand; PAM type: YTN; PAM sequence: TTG
ctggtacatttgttgttctg

SEQ ID NO: 62688 - DNA, 20 bp, Artificial Sequence
  Description of Artificial Sequence: Synthetic oligonucleotide
  Target: SCNA; (+) strand; PAM type: YTN; PAM sequence: CTG
gtacatttgttgttctggca

SEQ ID NO: 62689 - DNA, 20 bp, Artificial Sequence
  Description of Artificial Sequence: Synthetic oligonucleotide
  Target: SCNA; (+) strand; PAM type: YTN; PAM sequence: TTT
gttgttctggcataaagtag

SEQ ID NO: 62690 - DNA, 20 bp, Artificial Sequence
  Description of Artificial Sequence: Synthetic oligonucleotide
  Target: SCNA; (+) strand; PAM type: YTN; PAM sequence: TTG
ttgttctggcataaagtaga

SEQ ID NO: 62691 - DNA, 20 bp, Artificial Sequence
  Description of Artificial Sequence: Synthetic oligonucleotide
  Target: SCNA; (+) strand; PAM type: YTN; PAM sequence: TTG
ttctggcataaagtagaaat

SEQ ID NO: 62692 - DNA, 20 bp, Artificial Sequence
  Description of Artificial Sequence: Synthetic oligonucleotide
  Target: SCNA; (+) strand; PAM type: YTN; PAM sequence: TTC
tggcataaagtagaaattgt

SEQ ID NO: 62693 - DNA, 20 bp, Artificial Sequence
  Description of Artificial Sequence: Synthetic oligonucleotide
  Target: SCNA; (+) strand; PAM type: YTN; PAM sequence: CTG
gcataaagtagaaattgtca

SEQ ID NO: 62694 - DNA, 20 bp, Artificial Sequence
  Description of Artificial Sequence: Synthetic oligonucleotide
  Target: SCNA; (+) strand; PAM type: YTN; PAM sequence: TTG
tcaggtaaacattgcttcct

SEQ ID NO: 62695 - DNA, 20 bp, Artificial Sequence
  Description of Artificial Sequence: Synthetic oligonucleotide
  Target: SCNA; (+) strand; PAM type: YTN; PAM sequence: TTG
cttccttttggatcaaaaag

SEQ ID NO: 62696 - DNA, 20 bp, Artificial Sequence
  Description of Artificial Sequence: Synthetic oligonucleotide
  Target: SCNA; (+) strand; PAM type: YTN; PAM sequence: CTT
ccttttggatcaaaaagaaa

SEQ ID NO: 62697 - DNA, 20 bp, Artificial Sequence
  Description of Artificial Sequence: Synthetic oligonucleotide
  Target: SCNA; (+) strand; PAM type: YTN; PAM sequence: TTC
cttttggatcaaaaagaaat

SEQ ID NO: 62698 - DNA, 20 bp, Artificial Sequence
  Description of Artificial Sequence: Synthetic oligonucleotide
  Target: SCNA; (+) strand; PAM type: YTN; PAM sequence: CTT
ttggatcaaaaagaaattta

SEQ ID NO: 62699 - DNA, 20 bp, Artificial Sequence
  Description of Artificial Sequence: Synthetic oligonucleotide
  Target: SCNA; (+) strand; PAM type: YTN; PAM sequence: TTT
tggatcaaaaagaaatttaa

SEQ ID NO: 62700 - DNA, 20 bp, Artificial Sequence
  Description of Artificial Sequence: Synthetic oligonucleotide
  Target: SCNA; (+) strand; PAM type: YTN; PAM sequence: TTT
ggatcaaaaagaaatttaac

SEQ ID NO: 62701 - DNA, 20 bp, Artificial Sequence
  Description of Artificial Sequence: Synthetic oligonucleotide
  Target: SCNA; (+) strand; PAM type: YTN; PAM sequence: TTG
gatcaaaaagaaatttaacc

SEQ ID NO: 62702 - DNA, 20 bp, Artificial Sequence
  Description of Artificial Sequence: Synthetic oligonucleotide
  Target: SCNA; (+) strand; PAM type: YTN; PAM sequence: TTT
aaccaaataaatgcaagagg

SEQ ID NO: 62703 - DNA, 20 bp, Artificial Sequence
  Description of Artificial Sequence: Synthetic oligonucleotide
  Target: SCNA; (+) strand; PAM type: YTN; PAM sequence: TTA
accaaataaatgcaagaggt

SEQ ID NO: 62704 - DNA, 20 bp, Artificial Sequence
  Description of Artificial Sequence: Synthetic oligonucleotide
  Target: SCNA; (+) strand; PAM type: YTN; PAM sequence: TTT
gagaaatcagtggaggttca

SEQ ID NO: 62705 - DNA, 20 bp, Artificial Sequence
  Description of Artificial Sequence: Synthetic oligonucleotide
  Target: SCNA; (+) strand; PAM type: YTN; PAM sequence: TTG
agaaatcagtggaggttcaa

SEQ ID NO: 62706 - DNA, 20 bp, Artificial Sequence
  Description of Artificial Sequence: Synthetic oligonucleotide
  Target: SCNA; (+) strand; PAM type: YTN; PAM sequence: TTC
aagtggttttttttttcttt

SEQ ID NO: 62707 - DNA, 20 bp, Artificial Sequence
  Description of Artificial Sequence: Synthetic oligonucleotide
  Target: SCNA; (+) strand; PAM type: YTN; PAM sequence: TTT
tttttttcttttgtagttga

SEQ ID NO: 62708 - DNA, 20 bp, Artificial Sequence
  Description of Artificial Sequence: Synthetic oligonucleotide
  Target: SCNA; (+) strand; PAM type: YTN; PAM sequence: TTT
ttttttcttttgtagttgat

SEQ ID NO: 62709 - DNA, 20 bp, Artificial Sequence
  Description of Artificial Sequence: Synthetic oligonucleotide
  Target: SCNA; (+) strand; PAM type: YTN; PAM sequence: TTT
tttttcttttgtagttgata

SEQ ID NO: 62710 - DNA, 20 bp, Artificial Sequence
  Description of Artificial Sequence: Synthetic oligonucleotide
  Target: SCNA; (+) strand; PAM type: YTN; PAM sequence: TTT
ttttcttttgtagttgataa

SEQ ID NO: 62711 - DNA, 20 bp, Artificial Sequence
  Description of Artificial Sequence: Synthetic oligonucleotide
  Target: SCNA; (+) strand; PAM type: YTN; PAM sequence: TTT
tttcttttgtagttgataat

SEQ ID NO: 62712 - DNA, 20 bp, Artificial Sequence
  Description of Artificial Sequence: Synthetic oligonucleotide
  Target: SCNA; (+) strand; PAM type: YTN; PAM sequence: TTT
ttcttttgtagttgataata

SEQ ID NO: 62713 - DNA, 20 bp, Artificial Sequence
  Description of Artificial Sequence: Synthetic oligonucleotide
  Target: SCNA; (+) strand; PAM type: YTN; PAM sequence: TTT
tcttttgtagttgataatac

SEQ ID NO: 62714 - DNA, 20 bp, Artificial Sequence
  Description of Artificial Sequence: Synthetic oligonucleotide
  Target: SCNA; (+) strand; PAM type: YTN; PAM sequence: TTT
cttttgtagttgataatact

SEQ ID NO: 62715 - DNA, 20 bp, Artificial Sequence
  Description of Artificial Sequence: Synthetic oligonucleotide
  Target: SCNA; (+) strand; PAM type: YTN; PAM sequence: TTC
ttttgtagttgataatactc

SEQ ID NO: 62716 - DNA, 20 bp, Artificial Sequence
  Description of Artificial Sequence: Synthetic oligonucleotide
  Target: SCNA; (+) strand; PAM type: YTN; PAM sequence: CTT
ttgtagttgataatactctg

SEQ ID NO: 62717 - DNA, 20 bp, Artificial Sequence
  Description of Artificial Sequence: Synthetic oligonucleotide
  Target: SCNA; (+) strand; PAM type: YTN; PAM sequence: TTT
tgtagttgataatactctgt

SEQ ID NO: 62718 - DNA, 20 bp, Artificial Sequence
  Description of Artificial Sequence: Synthetic oligonucleotide
  Target: SCNA; (+) strand; PAM type: YTN; PAM sequence: TTT
gtagttgataatactctgtt

SEQ ID NO: 62719 - DNA, 20 bp, Artificial Sequence
  Description of Artificial Sequence: Synthetic oligonucleotide
  Target: SCNA; (+) strand; PAM type: YTN; PAM sequence: TTG
tagttgataatactctgttt

SEQ ID NO: 62720 - DNA, 20 bp, Artificial Sequence
  Description of Artificial Sequence: Synthetic oligonucleotide
  Target: SCNA; (+) strand; PAM type: YTN; PAM sequence: TTG
ataatactctgttttaaatc

SEQ ID NO: 62721 - DNA, 20 bp, Artificial Sequence
  Description of Artificial Sequence: Synthetic oligonucleotide
  Target: SCNA; (+) strand; PAM type: YTN; PAM sequence: CTC
tgttttaaatcagtgagttt

SEQ ID NO: 62722 - DNA, 20 bp, Artificial Sequence
  Description of Artificial Sequence: Synthetic oligonucleotide
  Target: SCNA; (+) strand; PAM type: YTN; PAM sequence: CTG
ttttaaatcagtgagtttta

SEQ ID NO: 62723 - DNA, 20 bp, Artificial Sequence
  Description of Artificial Sequence: Synthetic oligonucleotide
  Target: SCNA; (+) strand; PAM type: YTN; PAM sequence: TTT
taaatcagtgagttttactt

SEQ ID NO: 62724 - DNA, 20 bp, Artificial Sequence
  Description of Artificial Sequence: Synthetic oligonucleotide
  Target: SCNA; (+) strand; PAM type: YTN; PAM sequence: TTT
aaatcagtgagttttactta

SEQ ID NO: 62725 - DNA, 20 bp, Artificial Sequence
  Description of Artificial Sequence: Synthetic oligonucleotide
  Target: SCNA; (+) strand; PAM type: YTN; PAM sequence: TTA
aatcagtgagttttacttat

SEQ ID NO: 62726 - DNA, 20 bp, Artificial Sequence
  Description of Artificial Sequence: Synthetic oligonucleotide
  Target: SCNA; (+) strand; PAM type: YTN; PAM sequence: TTT
tacttatatatgcttgtcct

SEQ ID NO: 62727 - DNA, 20 bp, Artificial Sequence
  Description of Artificial Sequence: Synthetic oligonucleotide
  Target: SCNA; (+) strand; PAM type: YTN; PAM sequence: TTT
acttatatatgcttgtcctt

SEQ ID NO: 62728 - DNA, 20 bp, Artificial Sequence
  Description of Artificial Sequence: Synthetic oligonucleotide
  Target: SCNA; (+) strand; PAM type: YTN; PAM sequence: TTA
cttatatatgcttgtccttt

SEQ ID NO: 62729 - DNA, 20 bp, Artificial Sequence
  Description of Artificial Sequence: Synthetic oligonucleotide
  Target: SCNA; (+) strand; PAM type: YTN; PAM sequence: CTT
atatatgcttgtcctttttt

SEQ ID NO: 62730 - DNA, 20 bp, Artificial Sequence
  Description of Artificial Sequence: Synthetic oligonucleotide
  Target: SCNA; (+) strand; PAM type: YTN; PAM sequence: TTA
tatatgcttgtccttttttt

SEQ ID NO: 62731 - DNA, 20 bp, Artificial Sequence
  Description of Artificial Sequence: Synthetic oligonucleotide
  Target: SCNA; (+) strand; PAM type: YTN; PAM sequence: CTT
gtccttttttttttctagtt

SEQ ID NO: 62732 - DNA, 20 bp, Artificial Sequence
  Description of Artificial Sequence: Synthetic oligonucleotide
  Target: SCNA; (+) strand; PAM type: YTN; PAM sequence: TTG
tccttttttttttctagtta

SEQ ID NO: 62733 - DNA, 20 bp, Artificial Sequence
  Description of Artificial Sequence: Synthetic oligonucleotide
  Target: SCNA; (+) strand; PAM type: YTN; PAM sequence: CTT
ttttttttctagttaccaga

SEQ ID NO: 62734 - DNA, 20 bp, Artificial Sequence
  Description of Artificial Sequence: Synthetic oligonucleotide
  Target: SCNA; (+) strand; PAM type: YTN; PAM sequence: TTT
tttttttctagttaccagaa

SEQ ID NO: 62735 - DNA, 20 bp, Artificial Sequence
  Description of Artificial Sequence: Synthetic oligonucleotide
  Target: SCNA; (+) strand; PAM type: YTN; PAM sequence: TTT
ttttttctagttaccagaac

SEQ ID NO: 62736 - DNA, 20 bp, Artificial Sequence
  Description of Artificial Sequence: Synthetic oligonucleotide
  Target: SCNA; (+) strand; PAM type: YTN; PAM sequence: TTT
tttttctagttaccagaaca

SEQ ID NO: 62737 - DNA, 20 bp, Artificial Sequence
  Description of Artificial Sequence: Synthetic oligonucleotide
  Target: SCNA; (+) strand; PAM type: YTN; PAM sequence: TTT
ttttctagttaccagaacaa

SEQ ID NO: 62738 - DNA, 20 bp, Artificial Sequence
  Description of Artificial Sequence: Synthetic oligonucleotide
  Target: SCNA; (+) strand; PAM type: YTN; PAM sequence: TTT
tttctagttaccagaacaat

SEQ ID NO: 62739 - DNA, 20 bp, Artificial Sequence
  Description of Artificial Sequence: Synthetic oligonucleotide
  Target: SCNA; (+) strand; PAM type: YTN; PAM sequence: TTT
ttctagttaccagaacaata

SEQ ID NO: 62740 - DNA, 20 bp, Artificial Sequence
  Description of Artificial Sequence: Synthetic oligonucleotide
  Target: SCNA; (+) strand; PAM type: YTN; PAM sequence: TTT
tctagttaccagaacaatac

SEQ ID NO: 62741 - DNA, 20 bp, Artificial Sequence
  Description of Artificial Sequence: Synthetic oligonucleotide
  Target: SCNA; (+) strand; PAM type: YTN; PAM sequence: TTT
ctagttaccagaacaatact

SEQ ID NO: 62742 - DNA, 20 bp, Artificial Sequence
  Description of Artificial Sequence: Synthetic oligonucleotide
  Target: SCNA; (+) strand; PAM type: YTN; PAM sequence: TTC
tagttaccagaacaatactc

SEQ ID NO: 62743 - DNA, 20 bp, Artificial Sequence
  Description of Artificial Sequence: Synthetic oligonucleotide
  Target: SCNA; (+) strand; PAM type: YTN; PAM sequence: CTA
gttaccagaacaatactcag

SEQ ID NO: 62744 - DNA, 20 bp, Artificial Sequence
  Description of Artificial Sequence: Synthetic oligonucleotide
  Target: SCNA; (+) strand; PAM type: YTN; PAM sequence: TTA
ccagaacaatactcagtgaa

SEQ ID NO: 62745 - DNA, 20 bp, Artificial Sequence
  Description of Artificial Sequence: Synthetic oligonucleotide
  Target: SCNA; (+) strand; PAM type: YTN; PAM sequence: CTC
agtgaacttatgaatatatg

SEQ ID NO: 62746 - DNA, 20 bp, Artificial Sequence
  Description of Artificial Sequence: Synthetic oligonucleotide
  Target: SCNA; (+) strand; PAM type: YTN; PAM sequence: CTT
atgaatatatggtaaatatt

SEQ ID NO: 62747 - DNA, 20 bp, Artificial Sequence
  Description of Artificial Sequence: Synthetic oligonucleotide
  Target: SCNA; (+) strand; PAM type: YTN; PAM sequence: TTA
tgaatatatggtaaatatta

SEQ ID NO: 62748 - DNA, 20 bp, Artificial Sequence
  Description of Artificial Sequence: Synthetic oligonucleotide
  Target: SCNA; (+) strand; PAM type: YTN; PAM sequence: TTA
aacacatcccacttggatga

SEQ ID NO: 62749 - DNA, 20 bp, Artificial Sequence
  Description of Artificial Sequence: Synthetic oligonucleotide
  Target: SCNA; (+) strand; PAM type: YTN; PAM sequence: CTT
ggatgagaagatatgtgagt

SEQ ID NO: 62750 - DNA, 20 bp, Artificial Sequence
  Description of Artificial Sequence: Synthetic oligonucleotide
  Target: SCNA; (+) strand; PAM type: YTN; PAM sequence: TTG
gatgagaagatatgtgagtc

SEQ ID NO: 62751 - DNA, 20 bp, Artificial Sequence
  Description of Artificial Sequence: Synthetic oligonucleotide
  Target: SCNA; (+) strand; PAM type: YTN; PAM sequence: CTA
agtctaaagttagatgtgtt

SEQ ID NO: 62752 - DNA, 20 bp, Artificial Sequence
  Description of Artificial Sequence: Synthetic oligonucleotide
  Target: SCNA; (+) strand; PAM type: YTN; PAM sequence: CTA
aagttagatgtgttccataa

SEQ ID NO: 62753 - DNA, 20 bp, Artificial Sequence
  Description of Artificial Sequence: Synthetic oligonucleotide
  Target: SCNA; (+) strand; PAM type: YTN; PAM sequence: TTA
gatgtgttccataaacatag

SEQ ID NO: 62754 - DNA, 20 bp, Artificial Sequence
  Description of Artificial Sequence: Synthetic oligonucleotide
  Target: SCNA; (+) strand; PAM type: YTN; PAM sequence: TTC
cataaacatagtgtttatgg

SEQ ID NO: 62755 - DNA, 20 bp, Artificial Sequence
  Description of Artificial Sequence: Synthetic oligonucleotide
  Target: SCNA; (+) strand; PAM type: YTN; PAM sequence: TTT
atggagttggtgcatattca

SEQ ID NO: 62756 - DNA, 20 bp, Artificial Sequence
  Description of Artificial Sequence: Synthetic oligonucleotide
  Target: SCNA; (+) strand; PAM type: YTN; PAM sequence: TTA
tggagttggtgcatattcac

SEQ ID NO: 62757 - DNA, 20 bp, Artificial Sequence
  Description of Artificial Sequence: Synthetic oligonucleotide
  Target: SCNA; (+) strand; PAM type: YTN; PAM sequence: TTG
gtgcatattcacttctcagt

SEQ ID NO: 62758 - DNA, 20 bp, Artificial Sequence
  Description of Artificial Sequence: Synthetic oligonucleotide
  Target: SCNA; (+) strand; PAM type: YTN; PAM sequence: TTC
acttctcagtaagttacact

SEQ ID NO: 62759 - DNA, 20 bp, Artificial Sequence
  Description of Artificial Sequence: Synthetic oligonucleotide
  Target: SCNA; (+) strand; PAM type: YTN; PAM sequence: CTT
ctcagtaagttacactttct

SEQ ID NO: 62760 - DNA, 20 bp, Artificial Sequence
  Description of Artificial Sequence: Synthetic oligonucleotide
  Target: SCNA; (+) strand; PAM type: YTN; PAM sequence: TTC
tcagtaagttacactttctt

SEQ ID NO: 62761 - DNA, 20 bp, Artificial Sequence
  Description of Artificial Sequence: Synthetic oligonucleotide
  Target: SCNA; (+) strand; PAM type: YTN; PAM sequence: CTC
agtaagttacactttcttaa

SEQ ID NO: 62762 - DNA, 20 bp, Artificial Sequence
  Description of Artificial Sequence: Synthetic oligonucleotide
  Target: SCNA; (+) strand; PAM type: YTN; PAM sequence: TTA
cactttcttaatttcttttt

SEQ ID NO: 62763 - DNA, 20 bp, Artificial Sequence
  Description of Artificial Sequence: Synthetic oligonucleotide
  Target: SCNA; (+) strand; PAM type: YTN; PAM sequence: CTT
tcttaatttctttttggtgc

SEQ ID NO: 62764 - DNA, 20 bp, Artificial Sequence
  Description of Artificial Sequence: Synthetic oligonucleotide
  Target: SCNA; (+) strand; PAM type: YTN; PAM sequence: TTT
cttaatttctttttggtgct

SEQ ID NO: 62765 - DNA, 20 bp, Artificial Sequence
  Description of Artificial Sequence: Synthetic oligonucleotide
  Target: SCNA; (+) strand; PAM type: YTN; PAM sequence: TTC
ttaatttctttttggtgcta

SEQ ID NO: 62766 - DNA, 20 bp, Artificial Sequence
  Description of Artificial Sequence: Synthetic oligonucleotide
  Target: SCNA; (+) strand; PAM type: YTN; PAM sequence: CTT
aatttctttttggtgctagg

SEQ ID NO: 62767 - DNA, 20 bp, Artificial Sequence
  Description of Artificial Sequence: Synthetic oligonucleotide
  Target: SCNA; (+) strand; PAM type: YTN; PAM sequence: TTA
atttctttttggtgctaggt

SEQ ID NO: 62768 - DNA, 20 bp, Artificial Sequence
  Description of Artificial Sequence: Synthetic oligonucleotide
  Target: SCNA; (+) strand; PAM type: YTN; PAM sequence: TTT
ctttttggtgctaggtgata

SEQ ID NO: 62769 - DNA, 20 bp, Artificial Sequence
  Description of Artificial Sequence: Synthetic oligonucleotide
  Target: SCNA; (+) strand; PAM type: YTN; PAM sequence: TTC
tttttggtgctaggtgatat

SEQ ID NO: 62770 - DNA, 20 bp, Artificial Sequence
  Description of Artificial Sequence: Synthetic oligonucleotide
  Target: SCNA; (+) strand; PAM type: YTN; PAM sequence: CTT
tttggtgctaggtgatattc

SEQ ID NO: 62771 - DNA, 20 bp, Artificial Sequence
  Description of Artificial Sequence: Synthetic oligonucleotide
  Target: SCNA; (+) strand; PAM type: YTN; PAM sequence: TTT
ttggtgctaggtgatattct

SEQ ID NO: 62772 - DNA, 20 bp, Artificial Sequence
  Description of Artificial Sequence: Synthetic oligonucleotide
  Target: SCNA; (+) strand; PAM type: YTN; PAM sequence: TTT
tggtgctaggtgatattctg

SEQ ID NO: 62773 - DNA, 20 bp, Artificial Sequence
  Description of Artificial Sequence: Synthetic oligonucleotide
  Target: SCNA; (+) strand; PAM type: YTN; PAM sequence: TTT
ggtgctaggtgatattctgc

SEQ ID NO: 62774 - DNA, 20 bp, Artificial Sequence
  Description of Artificial Sequence: Synthetic oligonucleotide
  Target: SCNA; (+) strand; PAM type: YTN; PAM sequence: TTG
gtgctaggtgatattctgct

SEQ ID NO: 62775 - DNA, 20 bp, Artificial Sequence
  Description of Artificial Sequence: Synthetic oligonucleotide
  Target: SCNA; (+) strand; PAM type: YTN; PAM sequence: CTA
ggtgatattctgctaagtac

SEQ ID NO: 62776 - DNA, 20 bp, Artificial Sequence
  Description of Artificial Sequence: Synthetic oligonucleotide
  Target: SCNA; (+) strand; PAM type: YTN; PAM sequence: TTC
tgctaagtacacataagtat

SEQ ID NO: 62777 - DNA, 20 bp, Artificial Sequence
  Description of Artificial Sequence: Synthetic oligonucleotide
  Target: SCNA; (+) strand; PAM type: YTN; PAM sequence: CTG
ctaagtacacataagtatag

SEQ ID NO: 62778 - DNA, 20 bp, Artificial Sequence
  Description of Artificial Sequence: Synthetic oligonucleotide
  Target: SCNA; (+) strand; PAM type: YTN; PAM sequence: CTA
agtacacataagtatagtaa

SEQ ID NO: 62779 - DNA, 20 bp, Artificial Sequence
  Description of Artificial Sequence: Synthetic oligonucleotide
  Target: SCNA; (+) strand; PAM type: YTN; PAM sequence: TTG
gttagtaaactagtaaaatg

SEQ ID NO: 62780 - DNA, 20 bp, Artificial Sequence
  Description of Artificial Sequence: Synthetic oligonucleotide
  Target: SCNA; (+) strand; PAM type: YTN; PAM sequence: TTA
gtaaactagtaaaatgctcc

SEQ ID NO: 62781 - DNA, 20 bp, Artificial Sequence
  Description of Artificial Sequence: Synthetic oligonucleotide
  Target: SCNA; (+) strand; PAM type: YTN; PAM sequence: CTA
gtaaaatgctcccctagcta

SEQ ID NO: 62782 - DNA, 20 bp, Artificial Sequence
  Description of Artificial Sequence: Synthetic oligonucleotide
  Target: SCNA; (+) strand; PAM type: YTN; PAM sequence: CTC
ccctagctattagtaaatag

SEQ ID NO: 62783 - DNA, 20 bp, Artificial Sequence
  Description of Artificial Sequence: Synthetic oligonucleotide
  Target: SCNA; (+) strand; PAM type: YTN; PAM sequence: CTA
gctattagtaaatagcttct

SEQ ID NO: 62784 - DNA, 20 bp, Artificial Sequence
  Description of Artificial Sequence: Synthetic oligonucleotide
  Target: SCNA; (+) strand; PAM type: YTN; PAM sequence: CTA
ttagtaaatagcttctgcct

SEQ ID NO: 62785 - DNA, 20 bp, Artificial Sequence
  Description of Artificial Sequence: Synthetic oligonucleotide
  Target: SCNA; (+) strand; PAM type: YTN; PAM sequence: TTA
gtaaatagcttctgccttgt

SEQ ID NO: 62786 - DNA, 20 bp, Artificial Sequence
  Description of Artificial Sequence: Synthetic oligonucleotide
  Target: SCNA; (+) strand; PAM type: YTN; PAM sequence: CTT
ctgccttgtgtctccaaaat

SEQ ID NO: 62787 - DNA, 20 bp, Artificial Sequence
  Description of Artificial Sequence: Synthetic oligonucleotide
  Target: SCNA; (+) strand; PAM type: YTN; PAM sequence: TTC
tgccttgtgtctccaaaata

SEQ ID NO: 62788 - DNA, 20 bp, Artificial Sequence
  Description of Artificial Sequence: Synthetic oligonucleotide
  Target: SCNA; (+) strand; PAM type: YTN; PAM sequence: CTG
ccttgtgtctccaaaatatc

SEQ ID NO: 62789 - DNA, 20 bp, Artificial Sequence
  Description of Artificial Sequence: Synthetic oligonucleotide
  Target: SCNA; (+) strand; PAM type: YTN; PAM sequence: CTT
gtgtctccaaaatatctcta

SEQ ID NO: 62790 - DNA, 20 bp, Artificial Sequence
  Description of Artificial Sequence: Synthetic oligonucleotide
  Target: SCNA; (+) strand; PAM type: YTN; PAM sequence: TTG
tgtctccaaaatatctctac

SEQ ID NO: 62791 - DNA, 20 bp, Artificial Sequence
  Description of Artificial Sequence: Synthetic oligonucleotide
  Target: SCNA; (+) strand; PAM type: YTN; PAM sequence: CTC
caaaatatctctaccattat

SEQ ID NO: 62792 - DNA, 20 bp, Artificial Sequence
  Description of Artificial Sequence: Synthetic oligonucleotide
  Target: SCNA; (+) strand; PAM type: YTN; PAM sequence: CTC
taccattatcctgatcttga

SEQ ID NO: 62793 - DNA, 20 bp, Artificial Sequence
  Description of Artificial Sequence: Synthetic oligonucleotide
  Target: SCNA; (+) strand; PAM type: YTN; PAM sequence: CTA
ccattatcctgatcttgatt

SEQ ID NO: 62794 - DNA, 20 bp, Artificial Sequence
  Description of Artificial Sequence: Synthetic oligonucleotide
  Target: SCNA; (+) strand; PAM type: YTN; PAM sequence: TTA
tcctgatcttgattgctatt

SEQ ID NO: 62795 - DNA, 20 bp, Artificial Sequence
  Description of Artificial Sequence: Synthetic oligonucleotide
  Target: SCNA; (+) strand; PAM type: YTN; PAM sequence: CTG
atcttgattgctattttata

SEQ ID NO: 62796 - DNA, 20 bp, Artificial Sequence
  Description of Artificial Sequence: Synthetic oligonucleotide
  Target: SCNA; (+) strand; PAM type: YTN; PAM sequence: CTT
gattgctattttatattaaa

SEQ ID NO: 62797 - DNA, 20 bp, Artificial Sequence
  Description of Artificial Sequence: Synthetic oligonucleotide
  Target: SCNA; (+) strand; PAM type: YTN; PAM sequence: TTG
attgctattttatattaaaa

SEQ ID NO: 62798 - DNA, 20 bp, Artificial Sequence
  Description of Artificial Sequence: Synthetic oligonucleotide
  Target: SCNA; (+) strand; PAM type: YTN; PAM sequence: TTG
ctattttatattaaaagaag

SEQ ID NO: 62799 - DNA, 20 bp, Artificial Sequence
  Description of Artificial Sequence: Synthetic oligonucleotide
  Target: SCNA; (+) strand; PAM type: YTN; PAM sequence: CTA
ttttatattaaaagaagaca

SEQ ID NO: 62800 - DNA, 20 bp, Artificial Sequence
  Description of Artificial Sequence: Synthetic oligonucleotide
  Target: SCNA; (+) strand; PAM type: YTN; PAM sequence: TTT
tatattaaaagaagacatgt

SEQ ID NO: 62801 - DNA, 20 bp, Artificial Sequence
  Description of Artificial Sequence: Synthetic oligonucleotide
  Target: SCNA; (+) strand; PAM type: YTN; PAM sequence: TTT
atattaaaagaagacatgtg

SEQ ID NO: 62802 - DNA, 20 bp, Artificial Sequence
  Description of Artificial Sequence: Synthetic oligonucleotide
  Target: SCNA; (+) strand; PAM type: YTN; PAM sequence: TTA
tattaaaagaagacatgtga

SEQ ID NO: 62803 - DNA, 20 bp, Artificial Sequence
  Description of Artificial Sequence: Synthetic oligonucleotide
  Target: SCNA; (+) strand; PAM type: YTN; PAM sequence: TTA
aaagaagacatgtgaatgta

SEQ ID NO: 62804 - DNA, 20 bp, Artificial Sequence
  Description of Artificial Sequence: Synthetic oligonucleotide
  Target: SCNA; (+) strand; PAM type: YTN; PAM sequence: TTT
aaaaaaattgttatttctta

SEQ ID NO: 62805 - DNA, 20 bp, Artificial Sequence
  Description of Artificial Sequence: Synthetic oligonucleotide
  Target: SCNA; (+) strand; PAM type: YTN; PAM sequence: TTA
aaaaaattgttatttcttat

SEQ ID NO: 62806 - DNA, 20 bp, Artificial Sequence
  Description of Artificial Sequence: Synthetic oligonucleotide
  Target: SCNA; (+) strand; PAM type: YTN; PAM sequence: TTG
ttatttcttatttaccttta

SEQ ID NO: 62807 - DNA, 20 bp, Artificial Sequence
  Description of Artificial Sequence: Synthetic oligonucleotide
  Target: SCNA; (+) strand; PAM type: YTN; PAM sequence: TTA
tttcttatttacctttaaaa

SEQ ID NO: 62808 - DNA, 20 bp, Artificial Sequence
  Description of Artificial Sequence: Synthetic oligonucleotide
  Target: SCNA; (+) strand; PAM type: YTN; PAM sequence: TTT
cttatttacctttaaaaata

SEQ ID NO: 62809 - DNA, 20 bp, Artificial Sequence
  Description of Artificial Sequence: Synthetic oligonucleotide
  Target: SCNA; (+) strand; PAM type: YTN; PAM sequence: TTC
ttatttacctttaaaaatac

SEQ ID NO: 62810 - DNA, 20 bp, Artificial Sequence
  Description of Artificial Sequence: Synthetic oligonucleotide
  Target: SCNA; (+) strand; PAM type: YTN; PAM sequence: CTT
atttacctttaaaaatacag

SEQ ID NO: 62811 - DNA, 20 bp, Artificial Sequence
  Description of Artificial Sequence: Synthetic oligonucleotide
  Target: SCNA; (+) strand; PAM type: YTN; PAM sequence: TTA
tttacctttaaaaatacagt

SEQ ID NO: 62812 - DNA, 20 bp, Artificial Sequence
  Description of Artificial Sequence: Synthetic oligonucleotide
  Target: SCNA; (+) strand; PAM type: YTN; PAM sequence: TTT
acctttaaaaatacagtgtg

SEQ ID NO: 62813 - DNA, 20 bp, Artificial Sequence
  Description of Artificial Sequence: Synthetic oligonucleotide
  Target: SCNA; (+) strand; PAM type: YTN; PAM sequence: TTA
cctttaaaaatacagtgtgc

SEQ ID NO: 62814 - DNA, 20 bp, Artificial Sequence
  Description of Artificial Sequence: Synthetic oligonucleotide
  Target: SCNA; (+) strand; PAM type: YTN; PAM sequence: CTT
taaaaatacagtgtgctgta

SEQ ID NO: 62815 - DNA, 20 bp, Artificial Sequence
  Description of Artificial Sequence: Synthetic oligonucleotide
  Target: SCNA; (+) strand; PAM type: YTN; PAM sequence: TTT
aaaaatacagtgtgctgtac

SEQ ID NO: 62816 - DNA, 20 bp, Artificial Sequence
  Description of Artificial Sequence: Synthetic oligonucleotide
  Target: SCNA; (+) strand; PAM type: YTN; PAM sequence: TTA
aaaatacagtgtgctgtact

SEQ ID NO: 62817 - DNA, 20 bp, Artificial Sequence
  Description of Artificial Sequence: Synthetic oligonucleotide
  Target: SCNA; (+) strand; PAM type: YTN; PAM sequence: CTG
tactagtactactactaata

SEQ ID NO: 62818 - DNA, 20 bp, Artificial Sequence
  Description of Artificial Sequence: Synthetic oligonucleotide
  Target: SCNA; (+) strand; PAM type: YTN; PAM sequence: CTA
gtactactactaataaatag

SEQ ID NO: 62819 - DNA, 20 bp, Artificial Sequence
  Description of Artificial Sequence: Synthetic oligonucleotide
  Target: SCNA; (+) strand; PAM type: YTN; PAM sequence: CTA
ctactaataaatagcatcat

SEQ ID NO: 62820 - DNA, 20 bp, Artificial Sequence
  Description of Artificial Sequence: Synthetic oligonucleotide
  Target: SCNA; (+) strand; PAM type: YTN; PAM sequence: CTA
ctaataaatagcatcattga

SEQ ID NO: 62821 - DNA, 20 bp, Artificial Sequence
  Description of Artificial Sequence: Synthetic oligonucleotide
  Target: SCNA; (+) strand; PAM type: YTN; PAM sequence: CTA
ataaatagcatcattgactc

SEQ ID NO: 62822 - DNA, 20 bp, Artificial Sequence
  Description of Artificial Sequence: Synthetic oligonucleotide
  Target: SCNA; (+) strand; PAM type: YTN; PAM sequence: TTG
actcatagatcacttactat

SEQ ID NO: 62823 - DNA, 20 bp, Artificial Sequence
  Description of Artificial Sequence: Synthetic oligonucleotide
  Target: SCNA; (+) strand; PAM type: YTN; PAM sequence: CTC
atagatcacttactatcagc

SEQ ID NO: 62824 - DNA, 20 bp, Artificial Sequence
  Description of Artificial Sequence: Synthetic oligonucleotide
  Target: SCNA; (+) strand; PAM type: YTN; PAM sequence: CTT
actatcagccaggcagtcct

SEQ ID NO: 62825 - DNA, 20 bp, Artificial Sequence
  Description of Artificial Sequence: Synthetic oligonucleotide
  Target: SCNA; (+) strand; PAM type: YTN; PAM sequence: TTA
ctatcagccaggcagtccta

SEQ ID NO: 62826 - DNA, 20 bp, Artificial Sequence
  Description of Artificial Sequence: Synthetic oligonucleotide
  Target: SCNA; (+) strand; PAM type: YTN; PAM sequence: CTA
tcagccaggcagtcctaagt

SEQ ID NO: 62827 - DNA, 20 bp, Artificial Sequence
  Description of Artificial Sequence: Synthetic oligonucleotide
  Target: SCNA; (+) strand; PAM type: YTN; PAM sequence: CTA
agtattccacttacattaac

SEQ ID NO: 62828 - DNA, 20 bp, Artificial Sequence
  Description of Artificial Sequence: Synthetic oligonucleotide
  Target: SCNA; (+) strand; PAM type: YTN; PAM sequence: TTC
cacttacattaactcactta

SEQ ID NO: 62829 - DNA, 20 bp, Artificial Sequence
  Description of Artificial Sequence: Synthetic oligonucleotide
  Target: SCNA; (+) strand; PAM type: YTN; PAM sequence: CTT
acattaactcacttaatgca

SEQ ID NO: 62830 - DNA, 20 bp, Artificial Sequence
  Description of Artificial Sequence: Synthetic oligonucleotide
  Target: SCNA; (+) strand; PAM type: YTN; PAM sequence: TTA
cattaactcacttaatgcat

SEQ ID NO: 62831 - DNA, 20 bp, Artificial Sequence
  Description of Artificial Sequence: Synthetic oligonucleotide
  Target: SCNA; (+) strand; PAM type: YTN; PAM sequence: TTA
actcacttaatgcatgcaac

SEQ ID NO: 62832 - DNA, 20 bp, Artificial Sequence
  Description of Artificial Sequence: Synthetic oligonucleotide
  Target: SCNA; (+) strand; PAM type: YTN; PAM sequence: CTC
acttaatgcatgcaacaatg

SEQ ID NO: 62833 - DNA, 20 bp, Artificial Sequence
  Description of Artificial Sequence: Synthetic oligonucleotide
  Target: SCNA; (+) strand; PAM type: YTN; PAM sequence: CTT
aatgcatgcaacaatgctat

SEQ ID NO: 62834 - DNA, 20 bp, Artificial Sequence
  Description of Artificial Sequence: Synthetic oligonucleotide
  Target: SCNA; (+) strand; PAM type: YTN; PAM sequence: TTA
atgcatgcaacaatgctatg

SEQ ID NO: 62835 - DNA, 20 bp, Artificial Sequence
  Description of Artificial Sequence: Synthetic oligonucleotide
  Target: SCNA; (+) strand; PAM type: YTN; PAM sequence: CTA
tgaggcactatttttatcat

SEQ ID NO: 62836 - DNA, 20 bp, Artificial Sequence
  Description of Artificial Sequence: Synthetic oligonucleotide
  Target: SCNA; (+) strand; PAM type: YTN; PAM sequence: CTA
tttttatcatttgcatattt

SEQ ID NO: 62837 - DNA, 20 bp, Artificial Sequence
  Description of Artificial Sequence: Synthetic oligonucleotide
  Target: SCNA; (+) strand; PAM type: YTN; PAM sequence: TTT
ttatcatttgcatatttaca

SEQ ID NO: 62838 - DNA, 20 bp, Artificial Sequence
  Description of Artificial Sequence: Synthetic oligonucleotide
  Target: SCNA; (+) strand; PAM type: YTN; PAM sequence: TTT
tatcatttgcatatttacat

SEQ ID NO: 62839 - DNA, 20 bp, Artificial Sequence
  Description of Artificial Sequence: Synthetic oligonucleotide
  Target: SCNA; (+) strand; PAM type: YTN; PAM sequence: TTT
atcatttgcatatttacata

SEQ ID NO: 62840 - DNA, 20 bp, Artificial Sequence
  Description of Artificial Sequence: Synthetic oligonucleotide
  Target: SCNA; (+) strand; PAM type: YTN; PAM sequence: TTA
tcatttgcatatttacatat

SEQ ID NO: 62841 - DNA, 20 bp, Artificial Sequence
  Description of Artificial Sequence: Synthetic oligonucleotide
  Target: SCNA; (+) strand; PAM type: YTN; PAM sequence: TTT
gcatatttacatataaggaa

SEQ ID NO: 62842 - DNA, 20 bp, Artificial Sequence
  Description of Artificial Sequence: Synthetic oligonucleotide
  Target: SCNA; (+) strand; PAM type: YTN; PAM sequence: TTG
catatttacatataaggaaa

SEQ ID NO: 62843 - DNA, 20 bp, Artificial Sequence
  Description of Artificial Sequence: Synthetic oligonucleotide
  Target: SCNA; (+) strand; PAM type: YTN; PAM sequence: TTT
acatataaggaaacagagac

SEQ ID NO: 62844 - DNA, 20 bp, Artificial Sequence
  Description of Artificial Sequence: Synthetic oligonucleotide
  Target: SCNA; (+) strand; PAM type: YTN; PAM sequence: TTA
catataaggaaacagagaca

SEQ ID NO: 62845 - DNA, 20 bp, Artificial Sequence
  Description of Artificial Sequence: Synthetic oligonucleotide
  Target: SCNA; (+) strand; PAM type: YTN; PAM sequence: CTA
atattaagtagtaagagaca

SEQ ID NO: 62846 - DNA, 20 bp, Artificial Sequence
  Description of Artificial Sequence: Synthetic oligonucleotide
  Target: SCNA; (+) strand; PAM type: YTN; PAM sequence: TTA
agtagtaagagacataaatg

SEQ ID NO: 62847 - DNA, 20 bp, Artificial Sequence
  Description of Artificial Sequence: Synthetic oligonucleotide
  Target: SCNA; (+) strand; PAM type: YTN; PAM sequence: TTC
catagtctattaatagtttt

SEQ ID NO: 62848 - DNA, 20 bp, Artificial Sequence
  Description of Artificial Sequence: Synthetic oligonucleotide
  Target: SCNA; (+) strand; PAM type: YTN; PAM sequence: CTA
ttaatagttttggagttcag

SEQ ID NO: 62849 - DNA, 20 bp, Artificial Sequence
  Description of Artificial Sequence: Synthetic oligonucleotide
  Target: SCNA; (+) strand; PAM type: YTN; PAM sequence: TTA
atagttttggagttcaggat

SEQ ID NO: 62850 - DNA, 20 bp, Artificial Sequence
  Description of Artificial Sequence: Synthetic oligonucleotide
  Target: SCNA; (+) strand; PAM type: YTN; PAM sequence: TTT
tggagttcaggatagtctct

SEQ ID NO: 62851 - DNA, 20 bp, Artificial Sequence
  Description of Artificial Sequence: Synthetic oligonucleotide
  Target: SCNA; (+) strand; PAM type: YTN; PAM sequence: TTT
ggagttcaggatagtctcta

SEQ ID NO: 62852 - DNA, 20 bp, Artificial Sequence
  Description of Artificial Sequence: Synthetic oligonucleotide
  Target: SCNA; (+) strand; PAM type: YTN; PAM sequence: TTG
gagttcaggatagtctctat

SEQ ID NO: 62853 - DNA, 20 bp, Artificial Sequence
  Description of Artificial Sequence: Synthetic oligonucleotide
  Target: SCNA; (+) strand; PAM type: YTN; PAM sequence: TTC
aggatagtctctattactct

SEQ ID NO: 62854 - DNA, 20 bp, Artificial Sequence
  Description of Artificial Sequence: Synthetic oligonucleotide
  Target: SCNA; (+) strand; PAM type: YTN; PAM sequence: CTC
tattactctaacctacctca

SEQ ID NO: 62855 - DNA, 20 bp, Artificial Sequence
  Description of Artificial Sequence: Synthetic oligonucleotide
  Target: SCNA; (+) strand; PAM type: YTN; PAM sequence: CTA
ttactctaacctacctcatt

SEQ ID NO: 62856 - DNA, 20 bp, Artificial Sequence
  Description of Artificial Sequence: Synthetic oligonucleotide
  Target: SCNA; (+) strand; PAM type: YTN; PAM sequence: TTA
ctctaacctacctcattaag

SEQ ID NO: 62857 - DNA, 20 bp, Artificial Sequence
  Description of Artificial Sequence: Synthetic oligonucleotide
  Target: SCNA; (+) strand; PAM type: YTN; PAM sequence: CTC
taacctacctcattaagcag

SEQ ID NO: 62858 - DNA, 20 bp, Artificial Sequence
  Description of Artificial Sequence: Synthetic oligonucleotide
  Target: SCNA; (+) strand; PAM type: YTN; PAM sequence: CTA
acctacctcattaagcagca

SEQ ID NO: 62859 - DNA, 20 bp, Artificial Sequence
  Description of Artificial Sequence: Synthetic oligonucleotide
  Target: SCNA; (+) strand; PAM type: YTN; PAM sequence: CTA
cctcattaagcagcatcctt

SEQ ID NO: 62860 - DNA, 20 bp, Artificial Sequence
  Description of Artificial Sequence: Synthetic oligonucleotide
  Target: SCNA; (+) strand; PAM type: YTN; PAM sequence: CTC
attaagcagcatccttgact

SEQ ID NO: 62861 - DNA, 20 bp, Artificial Sequence
  Description of Artificial Sequence: Synthetic oligonucleotide
  Target: SCNA; (+) strand; PAM type: YTN; PAM sequence: TTA
agcagcatccttgactattc

SEQ ID NO: 62862 - DNA, 20 bp, Artificial Sequence
  Description of Artificial Sequence: Synthetic oligonucleotide
  Target: SCNA; (+) strand; PAM type: YTN; PAM sequence: CTT
gactattctaggtaaagagt

SEQ ID NO: 62863 - DNA, 20 bp, Artificial Sequence
  Description of Artificial Sequence: Synthetic oligonucleotide
  Target: SCNA; (+) strand; PAM type: YTN; PAM sequence: TTG
actattctaggtaaagagta

SEQ ID NO: 62864 - DNA, 20 bp, Artificial Sequence
  Description of Artificial Sequence: Synthetic oligonucleotide
  Target: SCNA; (+) strand; PAM type: YTN; PAM sequence: CTA
ttctaggtaaagagtattgt

SEQ ID NO: 62865 - DNA, 20 bp, Artificial Sequence
  Description of Artificial Sequence: Synthetic oligonucleotide
  Target: SCNA; (+) strand; PAM type: YTN; PAM sequence: TTC
taggtaaagagtattgtatt

SEQ ID NO: 62866 - DNA, 20 bp, Artificial Sequence
  Description of Artificial Sequence: Synthetic oligonucleotide
  Target: SCNA; (+) strand; PAM type: YTN; PAM sequence: CTA
ggtaaagagtattgtattct

SEQ ID NO: 62867 - DNA, 20 bp, Artificial Sequence
  Description of Artificial Sequence: Synthetic oligonucleotide
  Target: SCNA; (+) strand; PAM type: YTN; PAM sequence: TTG
tattcttttctaagataaaa

SEQ ID NO: 62868 - DNA, 20 bp, Artificial Sequence
  Description of Artificial Sequence: Synthetic oligonucleotide
  Target: SCNA; (+) strand; PAM type: YTN; PAM sequence: TTC
ttttctaagataaaaacatg

SEQ ID NO: 62869 - DNA, 20 bp, Artificial Sequence
  Description of Artificial Sequence: Synthetic oligonucleotide
  Target: SCNA; (+) strand; PAM type: YTN; PAM sequence: CTT
ttctaagataaaaacatgac

SEQ ID NO: 62870 - DNA, 20 bp, Artificial Sequence
  Description of Artificial Sequence: Synthetic oligonucleotide
  Target: SCNA; (+) strand; PAM type: YTN; PAM sequence: TTT
tctaagataaaaacatgact

SEQ ID NO: 62871 - DNA, 20 bp, Artificial Sequence
  Description of Artificial Sequence: Synthetic oligonucleotide
  Target: SCNA; (+) strand; PAM type: YTN; PAM sequence: TTT
ctaagataaaaacatgactt

SEQ ID NO: 62872 - DNA, 20 bp, Artificial Sequence
  Description of Artificial Sequence: Synthetic oligonucleotide
  Target: SCNA; (+) strand; PAM type: YTN; PAM sequence: TTC
taagataaaaacatgacttg

SEQ ID NO: 62873 - DNA, 20 bp, Artificial Sequence
  Description of Artificial Sequence: Synthetic oligonucleotide
  Target: SCNA; (+) strand; PAM type: YTN; PAM sequence: CTA
agataaaaacatgacttgct

SEQ ID NO: 62874 - DNA, 20 bp, Artificial Sequence
  Description of Artificial Sequence: Synthetic oligonucleotide
  Target: SCNA; (+) strand; PAM type: YTN; PAM sequence: CTT
gctactatatttgtttggat

SEQ ID NO: 62875 - DNA, 20 bp, Artificial Sequence
  Description of Artificial Sequence: Synthetic oligonucleotide
  Target: SCNA; (+) strand; PAM type: YTN; PAM sequence: TTG
ctactatatttgtttggatt

SEQ ID NO: 62876 - DNA, 20 bp, Artificial Sequence
  Description of Artificial Sequence: Synthetic oligonucleotide
  Target: SCNA; (+) strand; PAM type: YTN; PAM sequence: CTA
ctatatttgtttggattcag

SEQ ID NO: 62877 - DNA, 20 bp, Artificial Sequence
  Description of Artificial Sequence: Synthetic oligonucleotide
  Target: SCNA; (+) strand; PAM type: YTN; PAM sequence: CTA
tatttgtttggattcagctt

SEQ ID NO: 62878 - DNA, 20 bp, Artificial Sequence
  Description of Artificial Sequence: Synthetic oligonucleotide
  Target: SCNA; (+) strand; PAM type: YTN; PAM sequence: TTT
gtttggattcagctttactg

SEQ ID NO: 62879 - DNA, 20 bp, Artificial Sequence
  Description of Artificial Sequence: Synthetic oligonucleotide
  Target: SCNA; (+) strand; PAM type: YTN; PAM sequence: TTG
tttggattcagctttactgg

SEQ ID NO: 62880 - DNA, 20 bp, Artificial Sequence
  Description of Artificial Sequence: Synthetic oligonucleotide
  Target: SCNA; (+) strand; PAM type: YTN; PAM sequence: TTT
ggattcagctttactggaac

SEQ ID NO: 62881 - DNA, 20 bp, Artificial Sequence
  Description of Artificial Sequence: Synthetic oligonucleotide
  Target: SCNA; (+) strand; PAM type: YTN; PAM sequence: TTG
gattcagctttactggaaca

SEQ ID NO: 62882 - DNA, 20 bp, Artificial Sequence
  Description of Artificial Sequence: Synthetic oligonucleotide
  Target: SCNA; (+) strand; PAM type: YTN; PAM sequence: TTC
agctttactggaacacagct

SEQ ID NO: 62883 - DNA, 20 bp, Artificial Sequence
  Description of Artificial Sequence: Synthetic oligonucleotide
  Target: SCNA; (+) strand; PAM type: YTN; PAM sequence: CTT
tactggaacacagcttagct

SEQ ID NO: 62884 - DNA, 20 bp, Artificial Sequence
  Description of Artificial Sequence: Synthetic oligonucleotide
  Target: SCNA; (+) strand; PAM type: YTN; PAM sequence: TTT
actggaacacagcttagctt

SEQ ID NO: 62885 - DNA, 20 bp, Artificial Sequence
  Description of Artificial Sequence: Synthetic oligonucleotide
  Target: SCNA; (+) strand; PAM type: YTN; PAM sequence: TTA
ctggaacacagcttagcttt

SEQ ID NO: 62886 - DNA, 20 bp, Artificial Sequence
  Description of Artificial Sequence: Synthetic oligonucleotide
  Target: SCNA; (+) strand; PAM type: YTN; PAM sequence: CTG
gaacacagcttagctttgac

SEQ ID NO: 62887 - DNA, 20 bp, Artificial Sequence
  Description of Artificial Sequence: Synthetic oligonucleotide
  Target: SCNA; (+) strand; PAM type: YTN; PAM sequence: CTT
agctttgacatttacagaca

SEQ ID NO: 62888 - DNA, 20 bp, Artificial Sequence
  Description of Artificial Sequence: Synthetic oligonucleotide
  Target: SCNA; (+) strand; PAM type: YTN; PAM sequence: TTA
gctttgacatttacagacat

SEQ ID NO: 62889 - DNA, 20 bp, Artificial Sequence
  Description of Artificial Sequence: Synthetic oligonucleotide
  Target: SCNA; (+) strand; PAM type: YTN; PAM sequence: CTT
tgacatttacagacatgggt

SEQ ID NO: 62890 - DNA, 20 bp, Artificial Sequence
  Description of Artificial Sequence: Synthetic oligonucleotide
  Target: SCNA; (+) strand; PAM type: YTN; PAM sequence: TTT
gacatttacagacatgggtt

SEQ ID NO: 62891 - DNA, 20 bp, Artificial Sequence
  Description of Artificial Sequence: Synthetic oligonucleotide
  Target: SCNA; (+) strand; PAM type: YTN; PAM sequence: TTG
acatttacagacatgggtta

SEQ ID NO: 62892 - DNA, 20 bp, Artificial Sequence
  Description of Artificial Sequence: Synthetic oligonucleotide
  Target: SCNA; (+) strand; PAM type: YTN; PAM sequence: TTT
acagacatgggttaggtttc

SEQ ID NO: 62893 - DNA, 20 bp, Artificial Sequence
  Description of Artificial Sequence: Synthetic oligonucleotide
  Target: SCNA; (+) strand; PAM type: YTN; PAM sequence: TTA
cagacatgggttaggtttca

SEQ ID NO: 62894 - DNA, 20 bp, Artificial Sequence
  Description of Artificial Sequence: Synthetic oligonucleotide
  Target: SCNA; (+) strand; PAM type: YTN; PAM sequence: TTA
ggtttcattttgttgcaaga

SEQ ID NO: 62895 - DNA, 20 bp, Artificial Sequence
  Description of Artificial Sequence: Synthetic oligonucleotide
  Target: SCNA; (+) strand; PAM type: YTN; PAM sequence: TTT
cattttgttgcaagataaaa

SEQ ID NO: 62896 - DNA, 20 bp, Artificial Sequence
  Description of Artificial Sequence: Synthetic oligonucleotide
  Target: SCNA; (+) strand; PAM type: YTN; PAM sequence: TTC
attttgttgcaagataaaag

SEQ ID NO: 62897 - DNA, 20 bp, Artificial Sequence
  Description of Artificial Sequence: Synthetic oligonucleotide
  Target: SCNA; (+) strand; PAM type: YTN; PAM sequence: TTT
tgttgcaagataaaaggcaa

SEQ ID NO: 62898 - DNA, 20 bp, Artificial Sequence
  Description of Artificial Sequence: Synthetic oligonucleotide
  Target: SCNA; (+) strand; PAM type: YTN; PAM sequence: TTT
gttgcaagataaaaggcaat

SEQ ID NO: 62899 - DNA, 20 bp, Artificial Sequence
  Description of Artificial Sequence: Synthetic oligonucleotide
  Target: SCNA; (+) strand; PAM type: YTN; PAM sequence: TTG
ttgcaagataaaaggcaatc

SEQ ID NO: 62900 - DNA, 20 bp, Artificial Sequence
  Description of Artificial Sequence: Synthetic oligonucleotide
  Target: SCNA; (+) strand; PAM type: YTN; PAM sequence: TTG
caagataaaaggcaatctga

SEQ ID NO: 62901 - DNA, 20 bp, Artificial Sequence
  Description of Artificial Sequence: Synthetic oligonucleotide
  Target: SCNA; (+) strand; PAM type: YTN; PAM sequence: CTG
atatttagtttacctgcaaa

SEQ ID NO: 62902 - DNA, 20 bp, Artificial Sequence
  Description of Artificial Sequence: Synthetic oligonucleotide
  Target: SCNA; (+) strand; PAM type: YTN; PAM sequence: TTT
agtttacctgcaaaaggcag

SEQ ID NO: 62903 - DNA, 20 bp, Artificial Sequence
  Description of Artificial Sequence: Synthetic oligonucleotide
  Target: SCNA; (+) strand; PAM type: YTN; PAM sequence: TTA
gtttacctgcaaaaggcagt

SEQ ID NO: 62904 - DNA, 20 bp, Artificial Sequence
  Description of Artificial Sequence: Synthetic oligonucleotide
  Target: SCNA; (+) strand; PAM type: YTN; PAM sequence: TTT
acctgcaaaaggcagttagg

SEQ ID NO: 62905 - DNA, 20 bp, Artificial Sequence
  Description of Artificial Sequence: Synthetic oligonucleotide
  Target: SCNA; (+) strand; PAM type: YTN; PAM sequence: TTA
cctgcaaaaggcagttagga

SEQ ID NO: 62906 - DNA, 20 bp, Artificial Sequence
  Description of Artificial Sequence: Synthetic oligonucleotide
  Target: SCNA; (+) strand; PAM type: YTN; PAM sequence: CTG
caaaaggcagttaggaagcc

SEQ ID NO: 62907 - DNA, 20 bp, Artificial Sequence
  Description of Artificial Sequence: Synthetic oligonucleotide
  Target: SCNA; (+) strand; PAM type: YTN; PAM sequence: TTA
ggaagccctagaggaaccta

SEQ ID NO: 62908 - DNA, 20 bp, Artificial Sequence
  Description of Artificial Sequence: Synthetic oligonucleotide
  Target: SCNA; (+) strand; PAM type: YTN; PAM sequence: CTA
gaggaacctaattaaaatgc

SEQ ID NO: 62909 - DNA, 20 bp, Artificial Sequence
  Description of Artificial Sequence: Synthetic oligonucleotide
  Target: SCNA; (+) strand; PAM type: YTN; PAM sequence: CTA
attaaaatgcagcacatttc

SEQ ID NO: 62910 - DNA, 20 bp, Artificial Sequence
  Description of Artificial Sequence: Synthetic oligonucleotide
  Target: SCNA; (+) strand; PAM type: YTN; PAM sequence: TTA
aaatgcagcacatttccaag

SEQ ID NO: 62911 - DNA, 20 bp, Artificial Sequence
  Description of Artificial Sequence: Synthetic oligonucleotide
  Target: SCNA; (+) strand; PAM type: YTN; PAM sequence: TTT
ccaaggcaccatatcttgct

SEQ ID NO: 62912 - DNA, 20 bp, Artificial Sequence
  Description of Artificial Sequence: Synthetic oligonucleotide
  Target: SCNA; (+) strand; PAM type: YTN; PAM sequence: TTC
caaggcaccatatcttgctg

SEQ ID NO: 62913 - DNA, 20 bp, Artificial Sequence
  Description of Artificial Sequence: Synthetic oligonucleotide
  Target: SCNA; (+) strand; PAM type: YTN; PAM sequence: CTT
gctgtgttgccatagaaaca

SEQ ID NO: 62914 - DNA, 20 bp, Artificial Sequence
  Description of Artificial Sequence: Synthetic oligonucleotide
  Target: SCNA; (+) strand; PAM type: YTN; PAM sequence: TTG
ctgtgttgccatagaaacaa

SEQ ID NO: 62915 - DNA, 20 bp, Artificial Sequence
  Description of Artificial Sequence: Synthetic oligonucleotide
  Target: SCNA; (+) strand; PAM type: YTN; PAM sequence: CTG
tgttgccatagaaacaacga

SEQ ID NO: 62916 - DNA, 20 bp, Artificial Sequence
  Description of Artificial Sequence: Synthetic oligonucleotide
  Target: SCNA; (+) strand; PAM type: YTN; PAM sequence: TTG
ccatagaaacaacgaggatt

SEQ ID NO: 62917 - DNA, 20 bp, Artificial Sequence
  Description of Artificial Sequence: Synthetic oligonucleotide
  Target: SCNA; (+) strand; PAM type: YTN; PAM sequence: TTT
ctggtcactgaccttccagg

SEQ ID NO: 62918 - DNA, 20 bp, Artificial Sequence
  Description of Artificial Sequence: Synthetic oligonucleotide
  Target: SCNA; (+) strand; PAM type: YTN; PAM sequence: TTC
tggtcactgaccttccaggg

SEQ ID NO: 62919 - DNA, 20 bp, Artificial Sequence
  Description of Artificial Sequence: Synthetic oligonucleotide
  Target: SCNA; (+) strand; PAM type: YTN; PAM sequence: CTG
gtcactgaccttccagggaa

SEQ ID NO: 62920 - DNA, 20 bp, Artificial Sequence
  Description of Artificial Sequence: Synthetic oligonucleotide
  Target: SCNA; (+) strand; PAM type: YTN; PAM sequence: CTG
accttccagggaatctgagg

SEQ ID NO: 62921 - DNA, 20 bp, Artificial Sequence
  Description of Artificial Sequence: Synthetic oligonucleotide
  Target: SCNA; (+) strand; PAM type: YTN; PAM sequence: CTT
ccagggaatctgaggatgta

SEQ ID NO: 62922 - DNA, 20 bp, Artificial Sequence
  Description of Artificial Sequence: Synthetic oligonucleotide
  Target: SCNA; (+) strand; PAM type: YTN; PAM sequence: TTC
cagggaatctgaggatgtat

SEQ ID NO: 62923 - DNA, 20 bp, Artificial Sequence
  Description of Artificial Sequence: Synthetic oligonucleotide
  Target: SCNA; (+) strand; PAM type: YTN; PAM sequence: CTG
aggatgtattttcataaggt

SEQ ID NO: 62924 - DNA, 20 bp, Artificial Sequence
  Description of Artificial Sequence: Synthetic oligonucleotide
  Target: SCNA; (+) strand; PAM type: YTN; PAM sequence: TTT
tcataaggttcataagagaa

SEQ ID NO: 62925 - DNA, 20 bp, Artificial Sequence
  Description of Artificial Sequence: Synthetic oligonucleotide
  Target: SCNA; (+) strand; PAM type: YTN; PAM sequence: TTT
cataaggttcataagagaag

SEQ ID NO: 62926 - DNA, 20 bp, Artificial Sequence
  Description of Artificial Sequence: Synthetic oligonucleotide
  Target: SCNA; (+) strand; PAM type: YTN; PAM sequence: TTC
ataaggttcataagagaagc

SEQ ID NO: 62927 - DNA, 20 bp, Artificial Sequence
  Description of Artificial Sequence: Synthetic oligonucleotide
  Target: SCNA; (+) strand; PAM type: YTN; PAM sequence: TTC
ataagagaagccatcctagt

SEQ ID NO: 62928 - DNA, 20 bp, Artificial Sequence
  Description of Artificial Sequence: Synthetic oligonucleotide
  Target: SCNA; (+) strand; PAM type: YTN; PAM sequence: CTA
gtatgttaacctatagttgc

SEQ ID NO: 62929 - DNA, 20 bp, Artificial Sequence
  Description of Artificial Sequence: Synthetic oligonucleotide
  Target: SCNA; (+) strand; PAM type: YTN; PAM sequence: TTA
acctatagttgcagatcaac

SEQ ID NO: 62930 - DNA, 20 bp, Artificial Sequence
  Description of Artificial Sequence: Synthetic oligonucleotide
  Target: SCNA; (+) strand; PAM type: YTN; PAM sequence: CTA
tagttgcagatcaactatac

SEQ ID NO: 62931 - DNA, 20 bp, Artificial Sequence
  Description of Artificial Sequence: Synthetic oligonucleotide
  Target: SCNA; (+) strand; PAM type: YTN; PAM sequence: TTG
cagatcaactatacgttatg

SEQ ID NO: 62932 - DNA, 20 bp, Artificial Sequence
  Description of Artificial Sequence: Synthetic oligonucleotide
  Target: SCNA; (+) strand; PAM type: YTN; PAM sequence: CTA
tacgttatggaaattcccta

SEQ ID NO: 62933 - DNA, 20 bp, Artificial Sequence
  Description of Artificial Sequence: Synthetic oligonucleotide
  Target: SCNA; (+) strand; PAM type: YTN; PAM sequence: TTA
tggaaattccctatgcaatt

SEQ ID NO: 62934 - DNA, 20 bp, Artificial Sequence
  Description of Artificial Sequence: Synthetic oligonucleotide
  Target: SCNA; (+) strand; PAM type: YTN; PAM sequence: TTC
cctatgcaattctagccaat

SEQ ID NO: 62935 - DNA, 20 bp, Artificial Sequence
  Description of Artificial Sequence: Synthetic oligonucleotide
  Target: SCNA; (+) strand; PAM type: YTN; PAM sequence: CTA
tgcaattctagccaatttta

SEQ ID NO: 62936 - DNA, 20 bp, Artificial Sequence
  Description of Artificial Sequence: Synthetic oligonucleotide
  Target: SCNA; (+) strand; PAM type: YTN; PAM sequence: TTC
tagccaattttaaaaccaaa

SEQ ID NO: 62937 - DNA, 20 bp, Artificial Sequence
  Description of Artificial Sequence: Synthetic oligonucleotide
  Target: SCNA; (+) strand; PAM type: YTN; PAM sequence: CTA
gccaattttaaaaccaaatt

SEQ ID NO: 62938 - DNA, 20 bp, Artificial Sequence
  Description of Artificial Sequence: Synthetic oligonucleotide
  Target: SCNA; (+) strand; PAM type: YTN; PAM sequence: TTT
taaaaccaaattatactagc

SEQ ID NO: 62939 - DNA, 20 bp, Artificial Sequence
  Description of Artificial Sequence: Synthetic oligonucleotide
  Target: SCNA; (+) strand; PAM type: YTN; PAM sequence: TTT
aaaaccaaattatactagca

SEQ ID NO: 62940 - DNA, 20 bp, Artificial Sequence
  Description of Artificial Sequence: Synthetic oligonucleotide
  Target: SCNA; (+) strand; PAM type: YTN; PAM sequence: TTA
aaaccaaattatactagcaa

SEQ ID NO: 62941 - DNA, 20 bp, Artificial Sequence
  Description of Artificial Sequence: Synthetic oligonucleotide
  Target: SCNA; (+) strand; PAM type: YTN; PAM sequence: TTA
tactagcaaaacttactaga

SEQ ID NO: 62942 - DNA, 20 bp, Artificial Sequence
  Description of Artificial Sequence: Synthetic oligonucleotide
  Target: SCNA; (+) strand; PAM type: YTN; PAM sequence: CTA
gcaaaacttactagaggctc

SEQ ID NO: 62943 - DNA, 20 bp, Artificial Sequence
  Description of Artificial Sequence: Synthetic oligonucleotide
  Target: SCNA; (+) strand; PAM type: YTN; PAM sequence: CTT
actagaggctcaaactaagg

SEQ ID NO: 62944 - DNA, 20 bp, Artificial Sequence
  Description of Artificial Sequence: Synthetic oligonucleotide
  Target: SCNA; (+) strand; PAM type: YTN; PAM sequence: TTA
ctagaggctcaaactaaggg

SEQ ID NO: 62945 - DNA, 20 bp, Artificial Sequence
  Description of Artificial Sequence: Synthetic oligonucleotide
  Target: SCNA; (+) strand; PAM type: YTN; PAM sequence: CTA
gaggctcaaactaagggctc

SEQ ID NO: 62946 - DNA, 20 bp, Artificial Sequence
  Description of Artificial Sequence: Synthetic oligonucleotide
  Target: SCNA; (+) strand; PAM type: YTN; PAM sequence: CTC
aaactaagggctctttgaag

SEQ ID NO: 62947 - DNA, 20 bp, Artificial Sequence
  Description of Artificial Sequence: Synthetic oligonucleotide
  Target: SCNA; (+) strand; PAM type: YTN; PAM sequence: CTA
agggctctttgaaggaatgt

SEQ ID NO: 62948 - DNA, 20 bp, Artificial Sequence
  Description of Artificial Sequence: Synthetic oligonucleotide
  Target: SCNA; (+) strand; PAM type: YTN; PAM sequence: CTC
tttgaaggaatgtggtttaa

SEQ ID NO: 62949 - DNA, 20 bp, Artificial Sequence
  Description of Artificial Sequence: Synthetic oligonucleotide
  Target: SCNA; (+) strand; PAM type: YTN; PAM sequence: CTT
tgaaggaatgtggtttaact

SEQ ID NO: 62950 - DNA, 20 bp, Artificial Sequence
  Description of Artificial Sequence: Synthetic oligonucleotide
  Target: SCNA; (+) strand; PAM type: YTN; PAM sequence: TTT
gaaggaatgtggtttaactg

SEQ ID NO: 62951 - DNA, 20 bp, Artificial Sequence
  Description of Artificial Sequence: Synthetic oligonucleotide
  Target: SCNA; (+) strand; PAM type: YTN; PAM sequence: TTG
aaggaatgtggtttaactgc

SEQ ID NO: 62952 - DNA, 20 bp, Artificial Sequence
  Description of Artificial Sequence: Synthetic oligonucleotide
  Target: SCNA; (+) strand; PAM type: YTN; PAM sequence: TTT
aactgcttccaatataagat

SEQ ID NO: 62953 - DNA, 20 bp, Artificial Sequence
  Description of Artificial Sequence: Synthetic oligonucleotide
  Target: SCNA; (+) strand; PAM type: YTN; PAM sequence: TTA
actgcttccaatataagatt

SEQ ID NO: 62954 - DNA, 20 bp, Artificial Sequence
  Description of Artificial Sequence: Synthetic oligonucleotide
  Target: SCNA; (+) strand; PAM type: YTN; PAM sequence: CTG
cttccaatataagatttcaa

SEQ ID NO: 62955 - DNA, 20 bp, Artificial Sequence
  Description of Artificial Sequence: Synthetic oligonucleotide
  Target: SCNA; (+) strand; PAM type: YTN; PAM sequence: CTT
ccaatataagatttcaaata

SEQ ID NO: 62956 - DNA, 20 bp, Artificial Sequence
  Description of Artificial Sequence: Synthetic oligonucleotide
  Target: SCNA; (+) strand; PAM type: YTN; PAM sequence: TTC
caatataagatttcaaataa

SEQ ID NO: 62957 - DNA, 20 bp, Artificial Sequence
  Description of Artificial Sequence: Synthetic oligonucleotide
  Target: SCNA; (+) strand; PAM type: YTN; PAM sequence: TTT
caaataattaaggatactgt

SEQ ID NO: 62958 - DNA, 20 bp, Artificial Sequence
  Description of Artificial Sequence: Synthetic oligonucleotide
  Target: SCNA; (+) strand; PAM type: YTN; PAM sequence: TTC
aaataattaaggatactgta

SEQ ID NO: 62959 - DNA, 20 bp, Artificial Sequence
  Description of Artificial Sequence: Synthetic oligonucleotide
  Target: SCNA; (+) strand; PAM type: YTN; PAM sequence: TTA
aggatactgtagtagcagca

SEQ ID NO: 62960 - DNA, 20 bp, Artificial Sequence
  Description of Artificial Sequence: Synthetic oligonucleotide
  Target: SCNA; (+) strand; PAM type: YTN; PAM sequence: CTG
tagtagcagcaaaaacatta

SEQ ID NO: 62961 - DNA, 20 bp, Artificial Sequence
  Description of Artificial Sequence: Synthetic oligonucleotide
  Target: SCNA; (+) strand; PAM type: YTN; PAM sequence: TTA
aagaaaagcttaggtaatta

SEQ ID NO: 62962 - DNA, 20 bp, Artificial Sequence
  Description of Artificial Sequence: Synthetic oligonucleotide
  Target: SCNA; (+) strand; PAM type: YTN; PAM sequence: CTT
aggtaattacacaaagaaca

SEQ ID NO: 62963 - DNA, 20 bp, Artificial Sequence
  Description of Artificial Sequence: Synthetic oligonucleotide
  Target: SCNA; (+) strand; PAM type: YTN; PAM sequence: TTA
ggtaattacacaaagaacat

SEQ ID NO: 62964 - DNA, 20 bp, Artificial Sequence
  Description of Artificial Sequence: Synthetic oligonucleotide
  Target: SCNA; (+) strand; PAM type: YTN; PAM sequence: TTA
cacaaagaacattggaacta

SEQ ID NO: 62965 - DNA, 20 bp, Artificial Sequence
  Description of Artificial Sequence: Synthetic oligonucleotide
  Target: SCNA; (+) strand; PAM type: YTN; PAM sequence: TTG
gaactaaaatcatatttagg

SEQ ID NO: 62966 - DNA, 20 bp, Artificial Sequence
  Description of Artificial Sequence: Synthetic oligonucleotide
  Target: SCNA; (+) strand; PAM type: YTN; PAM sequence: CTA
aaatcatatttaggaatagt

SEQ ID NO: 62967 - DNA, 20 bp, Artificial Sequence
  Description of Artificial Sequence: Synthetic oligonucleotide
  Target: SCNA; (+) strand; PAM type: YTN; PAM sequence: TTT
aggaatagtttcaatgttat

SEQ ID NO: 62968 - DNA, 20 bp, Artificial Sequence
  Description of Artificial Sequence: Synthetic oligonucleotide
  Target: SCNA; (+) strand; PAM type: YTN; PAM sequence: TTA
ggaatagtttcaatgttata

SEQ ID NO: 62969 - DNA, 20 bp, Artificial Sequence
  Description of Artificial Sequence: Synthetic oligonucleotide
  Target: SCNA; (+) strand; PAM type: YTN; PAM sequence: TTT
caatgttatatctattctat

SEQ ID NO: 62970 - DNA, 20 bp, Artificial Sequence
  Description of Artificial Sequence: Synthetic oligonucleotide
  Target: SCNA; (+) strand; PAM type: YTN; PAM sequence: TTC
aatgttatatctattctatt

SEQ ID NO: 62971 - DNA, 20 bp, Artificial Sequence
  Description of Artificial Sequence: Synthetic oligonucleotide
  Target: SCNA; (+) strand; PAM type: YTN; PAM sequence: TTA
tatctattctattgcatttt

SEQ ID NO: 62972 - DNA, 20 bp, Artificial Sequence
  Description of Artificial Sequence: Synthetic oligonucleotide
  Target: SCNA; (+) strand; PAM type: YTN; PAM sequence: CTA
ttctattgcattttgggttc

SEQ ID NO: 62973 - DNA, 20 bp, Artificial Sequence
  Description of Artificial Sequence: Synthetic oligonucleotide
  Target: SCNA; (+) strand; PAM type: YTN; PAM sequence: TTC
tattgcattttgggttcttc

SEQ ID NO: 62974 - DNA, 20 bp, Artificial Sequence
  Description of Artificial Sequence: Synthetic oligonucleotide
  Target: SCNA; (+) strand; PAM type: YTN; PAM sequence: CTA
ttgcattttgggttcttcaa

SEQ ID NO: 62975 - DNA, 20 bp, Artificial Sequence
  Description of Artificial Sequence: Synthetic oligonucleotide
  Target: SCNA; (+) strand; PAM type: YTN; PAM sequence: TTG
cattttgggttcttcaattc

SEQ ID NO: 62976 - DNA, 20 bp, Artificial Sequence
  Description of Artificial Sequence: Synthetic oligonucleotide
  Target: SCNA; (+) strand; PAM type: YTN; PAM sequence: TTT
tgggttcttcaattctaggc

SEQ ID NO: 62977 - DNA, 20 bp, Artificial Sequence
  Description of Artificial Sequence: Synthetic oligonucleotide
  Target: SCNA; (+) strand; PAM type: YTN; PAM sequence: TTT
gggttcttcaattctaggct

SEQ ID NO: 62978 - DNA, 20 bp, Artificial Sequence
  Description of Artificial Sequence: Synthetic oligonucleotide
  Target: SCNA; (+) strand; PAM type: YTN; PAM sequence: TTG
ggttcttcaattctaggctt

SEQ ID NO: 62979 - DNA, 20 bp, Artificial Sequence
  Description of Artificial Sequence: Synthetic oligonucleotide
  Target: SCNA; (+) strand; PAM type: YTN; PAM sequence: TTC
ttcaattctaggcttactca

SEQ ID NO: 62980 - DNA, 20 bp, Artificial Sequence
  Description of Artificial Sequence: Synthetic oligonucleotide
  Target: SCNA; (+) strand; PAM type: YTN; PAM sequence: CTT
caattctaggcttactcaaa

SEQ ID NO: 62981 - DNA, 20 bp, Artificial Sequence
  Description of Artificial Sequence: Synthetic oligonucleotide
  Target: SCNA; (+) strand; PAM type: YTN; PAM sequence: TTC
aattctaggcttactcaaag

SEQ ID NO: 62982 - DNA, 20 bp, Artificial Sequence
  Description of Artificial Sequence: Synthetic oligonucleotide
  Target: SCNA; (+) strand; PAM type: YTN; PAM sequence: TTC
taggcttactcaaaggataa

SEQ ID NO: 62983 - DNA, 20 bp, Artificial Sequence
  Description of Artificial Sequence: Synthetic oligonucleotide
  Target: SCNA; (+) strand; PAM type: YTN; PAM sequence: CTA
ggcttactcaaaggataaaa

SEQ ID NO: 62984 - DNA, 20 bp, Artificial Sequence
  Description of Artificial Sequence: Synthetic oligonucleotide
  Target: SCNA; (+) strand; PAM type: YTN; PAM sequence: CTT
actcaaaggataaaacgaac

SEQ ID NO: 62985 - DNA, 20 bp, Artificial Sequence
  Description of Artificial Sequence: Synthetic oligonucleotide
  Target: SCNA; (+) strand; PAM type: YTN; PAM sequence: TTA
ctcaaaggataaaacgaaca

SEQ ID NO: 62986 - DNA, 20 bp, Artificial Sequence
  Description of Artificial Sequence: Synthetic oligonucleotide
  Target: SCNA; (+) strand; PAM type: YTN; PAM sequence: CTC
aaaggataaaacgaacatta

SEQ ID NO: 62987 - DNA, 20 bp, Artificial Sequence
  Description of Artificial Sequence: Synthetic oligonucleotide
  Target: SCNA; (+) strand; PAM type: YTN; PAM sequence: TTA
ctgcatcaatcaactacacc

SEQ ID NO: 62988 - DNA, 20 bp, Artificial Sequence
  Description of Artificial Sequence: Synthetic oligonucleotide
  Target: SCNA; (+) strand; PAM type: YTN; PAM sequence: CTG
catcaatcaactacacctag

SEQ ID NO: 62989 - DNA, 20 bp, Artificial Sequence
  Description of Artificial Sequence: Synthetic oligonucleotide
  Target: SCNA; (+) strand; PAM type: YTN; PAM sequence: CTA
cacctagaaaatcaaacttt

SEQ ID NO: 62990 - DNA, 20 bp, Artificial Sequence
  Description of Artificial Sequence: Synthetic oligonucleotide
  Target: SCNA; (+) strand; PAM type: YTN; PAM sequence: CTA
gaaaatcaaactttattata

SEQ ID NO: 62991 - DNA, 20 bp, Artificial Sequence
  Description of Artificial Sequence: Synthetic oligonucleotide
  Target: SCNA; (+) strand; PAM type: YTN; PAM sequence: CTT
tattatacaatattaagttg

SEQ ID NO: 62992 - DNA, 20 bp, Artificial Sequence
  Description of Artificial Sequence: Synthetic oligonucleotide
  Target: SCNA; (+) strand; PAM type: YTN; PAM sequence: TTT
attatacaatattaagttgc

SEQ ID NO: 62993 - DNA, 20 bp, Artificial Sequence
  Description of Artificial Sequence: Synthetic oligonucleotide
  Target: SCNA; (+) strand; PAM type: YTN; PAM sequence: TTA
ttatacaatattaagttgct

SEQ ID NO: 62994 - DNA, 20 bp, Artificial Sequence
  Description of Artificial Sequence: Synthetic oligonucleotide
  Target: SCNA; (+) strand; PAM type: YTN; PAM sequence: TTA
tacaatattaagttgctaat

SEQ ID NO: 62995 - DNA, 20 bp, Artificial Sequence
  Description of Artificial Sequence: Synthetic oligonucleotide
  Target: SCNA; (+) strand; PAM type: YTN; PAM sequence: TTA
agttgctaatattatttata

SEQ ID NO: 62996 - DNA, 20 bp, Artificial Sequence
  Description of Artificial Sequence: Synthetic oligonucleotide
  Target: SCNA; (+) strand; PAM type: YTN; PAM sequence: TTG
ctaatattatttatacctat

SEQ ID NO: 62997 - DNA, 20 bp, Artificial Sequence
  Description of Artificial Sequence: Synthetic oligonucleotide
  Target: SCNA; (+) strand; PAM type: YTN; PAM sequence: CTA
atattatttatacctataga

SEQ ID NO: 62998 - DNA, 20 bp, Artificial Sequence
  Description of Artificial Sequence: Synthetic oligonucleotide
  Target: SCNA; (+) strand; PAM type: YTN; PAM sequence: TTA
tttatacctatagattctta

SEQ ID NO: 62999 - DNA, 20 bp, Artificial Sequence
  Description of Artificial Sequence: Synthetic oligonucleotide
  Target: SCNA; (+) strand; PAM type: YTN; PAM sequence: TTT
atacctatagattcttaatt

SEQ ID NO: 63000 - DNA, 20 bp, Artificial Sequence
  Description of Artificial Sequence: Synthetic oligonucleotide
  Target: SCNA; (+) strand; PAM type: YTN; PAM sequence: TTA
tacctatagattcttaattc

SEQ ID NO: 63001 - DNA, 20 bp, Artificial Sequence
  Description of Artificial Sequence: Synthetic oligonucleotide
  Target: SCNA; (+) strand; PAM type: YTN; PAM sequence: CTA
tagattcttaattcatgccc

SEQ ID NO: 63002 - DNA, 20 bp, Artificial Sequence
  Description of Artificial Sequence: Synthetic oligonucleotide
  Target: SCNA; (+) strand; PAM type: YTN; PAM sequence: TTC
ttaattcatgccctttacta

SEQ ID NO: 63003 - DNA, 20 bp, Artificial Sequence
  Description of Artificial Sequence: Synthetic oligonucleotide
  Target: SCNA; (+) strand; PAM type: YTN; PAM sequence: CTT
aattcatgccctttactatc

SEQ ID NO: 63004 - DNA, 20 bp, Artificial Sequence
  Description of Artificial Sequence: Synthetic oligonucleotide
  Target: SCNA; (+) strand; PAM type: YTN; PAM sequence: TTA
attcatgccctttactatct

SEQ ID NO: 63005 - DNA, 20 bp, Artificial Sequence
  Description of Artificial Sequence: Synthetic oligonucleotide
  Target: SCNA; (+) strand; PAM type: YTN; PAM sequence: TTC
atgccctttactatctattt

SEQ ID NO: 63006 - DNA, 20 bp, Artificial Sequence
  Description of Artificial Sequence: Synthetic oligonucleotide
  Target: SCNA; (+) strand; PAM type: YTN; PAM sequence: CTT
tactatctatttataaattc

SEQ ID NO: 63007 - DNA, 20 bp, Artificial Sequence
  Description of Artificial Sequence: Synthetic oligonucleotide
  Target: SCNA; (+) strand; PAM type: YTN; PAM sequence: TTT
actatctatttataaattca

SEQ ID NO: 63008 - DNA, 20 bp, Artificial Sequence
  Description of Artificial Sequence: Synthetic oligonucleotide
  Target: SCNA; (+) strand; PAM type: YTN; PAM sequence: TTA
ctatctatttataaattcat

SEQ ID NO: 63009 - DNA, 20 bp, Artificial Sequence
  Description of Artificial Sequence: Synthetic oligonucleotide
  Target: SCNA; (+) strand; PAM type: YTN; PAM sequence: CTA
tctatttataaattcattca

SEQ ID NO: 63010 - DNA, 20 bp, Artificial Sequence
  Description of Artificial Sequence: Synthetic oligonucleotide
  Target: SCNA; (+) strand; PAM type: YTN; PAM sequence: CTA
tttataaattcattcattcc

SEQ ID NO: 63011 - DNA, 20 bp, Artificial Sequence
  Description of Artificial Sequence: Synthetic oligonucleotide
  Target: SCNA; (+) strand; PAM type: YTN; PAM sequence: TTT
ataaattcattcattccatt

SEQ ID NO: 63012 - DNA, 20 bp, Artificial Sequence
  Description of Artificial Sequence: Synthetic oligonucleotide
  Target: SCNA; (+) strand; PAM type: YTN; PAM sequence: TTA
taaattcattcattccatta

SEQ ID NO: 63013 - DNA, 20 bp, Artificial Sequence
  Description of Artificial Sequence: Synthetic oligonucleotide
  Target: SCNA; (+) strand; PAM type: YTN; PAM sequence: TTC
attcattccattactaaata

SEQ ID NO: 63014 - DNA, 20 bp, Artificial Sequence
  Description of Artificial Sequence: Synthetic oligonucleotide
  Target: SCNA; (+) strand; PAM type: YTN; PAM sequence: TTC
attccattactaaatatgta

SEQ ID NO: 63015 - DNA, 20 bp, Artificial Sequence
  Description of Artificial Sequence: Synthetic oligonucleotide
  Target: SCNA; (+) strand; PAM type: YTN; PAM sequence: TTC
cattactaaatatgtataat

SEQ ID NO: 63016 - DNA, 20 bp, Artificial Sequence
  Description of Artificial Sequence: Synthetic oligonucleotide
  Target: SCNA; (+) strand; PAM type: YTN; PAM sequence: TTA
ctaaatatgtataattgaca

SEQ ID NO: 63017 - DNA, 20 bp, Artificial Sequence
  Description of Artificial Sequence: Synthetic oligonucleotide
  Target: SCNA; (+) strand; PAM type: YTN; PAM sequence: CTA
aatatgtataattgacaatc

SEQ ID NO: 63018 - DNA, 20 bp, Artificial Sequence
  Description of Artificial Sequence: Synthetic oligonucleotide
  Target: SCNA; (+) strand; PAM type: YTN; PAM sequence: TTG
acaatcccagttatacctta

SEQ ID NO: 63019 - DNA, 20 bp, Artificial Sequence
  Description of Artificial Sequence: Synthetic oligonucleotide
  Target: SCNA; (+) strand; PAM type: YTN; PAM sequence: TTA
taccttaatttatatttttt

SEQ ID NO: 63020 - DNA, 20 bp, Artificial Sequence
  Description of Artificial Sequence: Synthetic oligonucleotide
  Target: SCNA; (+) strand; PAM type: YTN; PAM sequence: CTT
aatttatatttttttgtcta

SEQ ID NO: 63021 - DNA, 20 bp, Artificial Sequence
  Description of Artificial Sequence: Synthetic oligonucleotide
  Target: SCNA; (+) strand; PAM type: YTN; PAM sequence: TTA
atttatatttttttgtctat

SEQ ID NO: 63022 - DNA, 20 bp, Artificial Sequence
  Description of Artificial Sequence: Synthetic oligonucleotide
  Target: SCNA; (+) strand; PAM type: YTN; PAM sequence: TTT
atatttttttgtctatttga

SEQ ID NO: 63023 - DNA, 20 bp, Artificial Sequence
  Description of Artificial Sequence: Synthetic oligonucleotide
  Target: SCNA; (+) strand; PAM type: YTN; PAM sequence: TTA
tatttttttgtctatttgac

SEQ ID NO: 63024 - DNA, 20 bp, Artificial Sequence
  Description of Artificial Sequence: Synthetic oligonucleotide
  Target: SCNA; (+) strand; PAM type: YTN; PAM sequence: TTT
ttttgtctatttgacataag

SEQ ID NO: 63025 - DNA, 20 bp, Artificial Sequence
  Description of Artificial Sequence: Synthetic oligonucleotide
  Target: SCNA; (+) strand; PAM type: YTN; PAM sequence: TTT
tttgtctatttgacataagc

SEQ ID NO: 63026 - DNA, 20 bp, Artificial Sequence
  Description of Artificial Sequence: Synthetic oligonucleotide
  Target: SCNA; (+) strand; PAM type: YTN; PAM sequence: TTT
ttgtctatttgacataagcc

SEQ ID NO: 63027 - DNA, 20 bp, Artificial Sequence
  Description of Artificial Sequence: Synthetic oligonucleotide
  Target: SCNA; (+) strand; PAM type: YTN; PAM sequence: TTT
tgtctatttgacataagcca

SEQ ID NO: 63028 - DNA, 20 bp, Artificial Sequence
  Description of Artificial Sequence: Synthetic oligonucleotide
  Target: SCNA; (+) strand; PAM type: YTN; PAM sequence: TTT
gtctatttgacataagccaa

SEQ ID NO: 63029 - DNA, 20 bp, Artificial Sequence
  Description of Artificial Sequence: Synthetic oligonucleotide
  Target: SCNA; (+) strand; PAM type: YTN; PAM sequence: TTG
tctatttgacataagccaag

SEQ ID NO: 63030 - DNA, 20 bp, Artificial Sequence
  Description of Artificial Sequence: Synthetic oligonucleotide
  Target: SCNA; (+) strand; PAM type: YTN; PAM sequence: CTA
tttgacataagccaagtacc

SEQ ID NO: 63031 - DNA, 20 bp, Artificial Sequence
  Description of Artificial Sequence: Synthetic oligonucleotide
  Target: SCNA; (+) strand; PAM type: YTN; PAM sequence: TTT
gacataagccaagtacccat

SEQ ID NO: 63032 - DNA, 20 bp, Artificial Sequence
  Description of Artificial Sequence: Synthetic oligonucleotide
  Target: SCNA; (+) strand; PAM type: YTN; PAM sequence: TTG
acataagccaagtacccatg

SEQ ID NO: 63033 - DNA, 20 bp, Artificial Sequence
  Description of Artificial Sequence: Synthetic oligonucleotide
  Target: SCNA; (+) strand; PAM type: YTN; PAM sequence: TTC
aacacagaaaattacaaagc

SEQ ID NO: 63034 - DNA, 20 bp, Artificial Sequence
  Description of Artificial Sequence: Synthetic oligonucleotide
  Target: SCNA; (+) strand; PAM type: YTN; PAM sequence: TTA
caaagcccaccttactgtag

SEQ ID NO: 63035 - DNA, 20 bp, Artificial Sequence
  Description of Artificial Sequence: Synthetic oligonucleotide
  Target: SCNA; (+) strand; PAM type: YTN; PAM sequence: CTT
actgtagactgctgctctta

SEQ ID NO: 63036 - DNA, 20 bp, Artificial Sequence
  Description of Artificial Sequence: Synthetic oligonucleotide
  Target: SCNA; (+) strand; PAM type: YTN; PAM sequence: TTA
ctgtagactgctgctcttat

SEQ ID NO: 63037 - DNA, 20 bp, Artificial Sequence
  Description of Artificial Sequence: Synthetic oligonucleotide
  Target: SCNA; (+) strand; PAM type: YTN; PAM sequence: CTG
tagactgctgctcttattgc

SEQ ID NO: 63038 - DNA, 20 bp, Artificial Sequence
  Description of Artificial Sequence: Synthetic oligonucleotide
  Target: SCNA; (+) strand; PAM type: YTN; PAM sequence: CTG
ctgctcttattgcatcaaca

SEQ ID NO: 63039 - DNA, 20 bp, Artificial Sequence
  Description of Artificial Sequence: Synthetic oligonucleotide
  Target: SCNA; (+) strand; PAM type: YTN; PAM sequence: CTG
ctcttattgcatcaacattc

SEQ ID NO: 63040 - DNA, 20 bp, Artificial Sequence
  Description of Artificial Sequence: Synthetic oligonucleotide
  Target: SCNA; (+) strand; PAM type: YTN; PAM sequence: CTC
ttattgcatcaacattcgta

SEQ ID NO: 63041 - DNA, 20 bp, Artificial Sequence
  Description of Artificial Sequence: Synthetic oligonucleotide
  Target: SCNA; (+) strand; PAM type: YTN; PAM sequence: CTT
attgcatcaacattcgtatc

SEQ ID NO: 63042 - DNA, 20 bp, Artificial Sequence
  Description of Artificial Sequence: Synthetic oligonucleotide
  Target: SCNA; (+) strand; PAM type: YTN; PAM sequence: TTA
ttgcatcaacattcgtatct

SEQ ID NO: 63043 - DNA, 20 bp, Artificial Sequence
  Description of Artificial Sequence: Synthetic oligonucleotide
  Target: SCNA; (+) strand; PAM type: YTN; PAM sequence: TTG
catcaacattcgtatcttcc

SEQ ID NO: 63044 - DNA, 20 bp, Artificial Sequence
  Description of Artificial Sequence: Synthetic oligonucleotide
  Target: SCNA; (+) strand; PAM type: YTN; PAM sequence: TTC
gtatcttccacggaaaataa

SEQ ID NO: 63045 - DNA, 20 bp, Artificial Sequence
  Description of Artificial Sequence: Synthetic oligonucleotide
  Target: SCNA; (+) strand; PAM type: YTN; PAM sequence: CTT
ccacggaaaataattaactt

SEQ ID NO: 63046 - DNA, 20 bp, Artificial Sequence
  Description of Artificial Sequence: Synthetic oligonucleotide
  Target: SCNA; (+) strand; PAM type: YTN; PAM sequence: TTC
cacggaaaataattaactta

SEQ ID NO: 63047 - DNA, 20 bp, Artificial Sequence
  Description of Artificial Sequence: Synthetic oligonucleotide
  Target: SCNA; (+) strand; PAM type: YTN; PAM sequence: TTA
acttagttctataatcagga

SEQ ID NO: 63048 - DNA, 20 bp, Artificial Sequence
  Description of Artificial Sequence: Synthetic oligonucleotide
  Target: SCNA; (+) strand; PAM type: YTN; PAM sequence: CTT
agttctataatcaggatatg

SEQ ID NO: 63049 - DNA, 20 bp, Artificial Sequence
  Description of Artificial Sequence: Synthetic oligonucleotide
  Target: SCNA; (+) strand; PAM type: YTN; PAM sequence: TTA
gttctataatcaggatatgc

SEQ ID NO: 63050 - DNA, 20 bp, Artificial Sequence
  Description of Artificial Sequence: Synthetic oligonucleotide
  Target: SCNA; (+) strand; PAM type: YTN; PAM sequence: TTC
tataatcaggatatgcccgg

SEQ ID NO: 63051 - DNA, 20 bp, Artificial Sequence
  Description of Artificial Sequence: Synthetic oligonucleotide
  Target: SCNA; (+) strand; PAM type: YTN; PAM sequence: CTA
taatcaggatatgcccggtt

SEQ ID NO: 63052 - DNA, 20 bp, Artificial Sequence
  Description of Artificial Sequence: Synthetic oligonucleotide
  Target: SCNA; (+) strand; PAM type: YTN; PAM sequence: TTT
atttacaaggaaatacctat

SEQ ID NO: 63053 - DNA, 20 bp, Artificial Sequence
  Description of Artificial Sequence: Synthetic oligonucleotide
  Target: SCNA; (+) strand; PAM type: YTN; PAM sequence: TTA
tttacaaggaaatacctatc

SEQ ID NO: 63054 - DNA, 20 bp, Artificial Sequence
  Description of Artificial Sequence: Synthetic oligonucleotide
  Target: SCNA; (+) strand; PAM type: YTN; PAM sequence: TTT
acaaggaaatacctatcagg

SEQ ID NO: 63055 - DNA, 20 bp, Artificial Sequence
  Description of Artificial Sequence: Synthetic oligonucleotide
  Target: SCNA; (+) strand; PAM type: YTN; PAM sequence: TTA
caaggaaatacctatcaggt

SEQ ID NO: 63056 - DNA, 20 bp, Artificial Sequence
  Description of Artificial Sequence: Synthetic oligonucleotide
  Target: SCNA; (+) strand; PAM type: YTN; PAM sequence: CTA
tcaggtgctaatttctctta

SEQ ID NO: 63057 - DNA, 20 bp, Artificial Sequence
  Description of Artificial Sequence: Synthetic oligonucleotide
  Target: SCNA; (+) strand; PAM type: YTN; PAM sequence: CTA
atttctcttagaattagaaa

SEQ ID NO: 63058 - DNA, 20 bp, Artificial Sequence
  Description of Artificial Sequence: Synthetic oligonucleotide
  Target: SCNA; (+) strand; PAM type: YTN; PAM sequence: TTT
ctcttagaattagaaatctt

SEQ ID NO: 63059 - DNA, 20 bp, Artificial Sequence
  Description of Artificial Sequence: Synthetic oligonucleotide
  Target: SCNA; (+) strand; PAM type: YTN; PAM sequence: TTC
tcttagaattagaaatcttg

SEQ ID NO: 63060 - DNA, 20 bp, Artificial Sequence
  Description of Artificial Sequence: Synthetic oligonucleotide
  Target: SCNA; (+) strand; PAM type: YTN; PAM sequence: CTC
ttagaattagaaatcttggc

SEQ ID NO: 63061 - DNA, 20 bp, Artificial Sequence
  Description of Artificial Sequence: Synthetic oligonucleotide
  Target: SCNA; (+) strand; PAM type: YTN; PAM sequence: CTT
agaattagaaatcttggcca

SEQ ID NO: 63062 - DNA, 20 bp, Artificial Sequence
  Description of Artificial Sequence: Synthetic oligonucleotide
  Target: SCNA; (+) strand; PAM type: YTN; PAM sequence: TTA
gaattagaaatcttggccag

SEQ ID NO: 63063 - DNA, 20 bp, Artificial Sequence
  Description of Artificial Sequence: Synthetic oligonucleotide
  Target: SCNA; (+) strand; PAM type: YTN; PAM sequence: TTA
gaaatcttggccaggcatgg

SEQ ID NO: 63064 - DNA, 20 bp, Artificial Sequence
  Description of Artificial Sequence: Synthetic oligonucleotide
  Target: SCNA; (+) strand; PAM type: YTN; PAM sequence: CTT
ggccaggcatggtggctcac

SEQ ID NO: 63065 - DNA, 20 bp, Artificial Sequence
  Description of Artificial Sequence: Synthetic oligonucleotide
  Target: SCNA; (+) strand; PAM type: YTN; PAM sequence: TTG
gccaggcatggtggctcaca

SEQ ID NO: 63066 - DNA, 20 bp, Artificial Sequence
  Description of Artificial Sequence: Synthetic oligonucleotide
  Target: SCNA; (+) strand; PAM type: YTN; PAM sequence: CTC
acacctgtaatcccagcact

SEQ ID NO: 63067 - DNA, 20 bp, Artificial Sequence
  Description of Artificial Sequence: Synthetic oligonucleotide
  Target: SCNA; (+) strand; PAM type: YTN; PAM sequence: CTG
taatcccagcactttgggag

SEQ ID NO: 63068 - DNA, 20 bp, Artificial Sequence
  Description of Artificial Sequence: Synthetic oligonucleotide
  Target: SCNA; (+) strand; PAM type: YTN; PAM sequence: CTT
tgggaggccgaggtaggtgg

SEQ ID NO: 63069 - DNA, 20 bp, Artificial Sequence
  Description of Artificial Sequence: Synthetic oligonucleotide
  Target: SCNA; (+) strand; PAM type: YTN; PAM sequence: TTT
gggaggccgaggtaggtgga

SEQ ID NO: 63070 - DNA, 20 bp, Artificial Sequence
  Description of Artificial Sequence: Synthetic oligonucleotide
  Target: SCNA; (+) strand; PAM type: YTN; PAM sequence: TTG
ggaggccgaggtaggtggat

SEQ ID NO: 63071 - DNA, 20 bp, Artificial Sequence
  Description of Artificial Sequence: Synthetic oligonucleotide
  Target: SCNA; (+) strand; PAM type: YTN; PAM sequence: TTA
cctgaggtcaggagtttgag

SEQ ID NO: 63072 - DNA, 20 bp, Artificial Sequence
  Description of Artificial Sequence: Synthetic oligonucleotide
  Target: SCNA; (+) strand; PAM type: YTN; PAM sequence: CTG
aggtcaggagtttgagacca

SEQ ID NO: 63073 - DNA, 20 bp, Artificial Sequence
  Description of Artificial Sequence: Synthetic oligonucleotide
  Target: SCNA; (+) strand; PAM type: YTN; PAM sequence: TTT
gagaccagcctggccaacgt

SEQ ID NO: 63074 - DNA, 20 bp, Artificial Sequence
  Description of Artificial Sequence: Synthetic oligonucleotide
  Target: SCNA; (+) strand; PAM type: YTN; PAM sequence: TTG
agaccagcctggccaacgtg

SEQ ID NO: 63075 - DNA, 20 bp, Artificial Sequence
  Description of Artificial Sequence: Synthetic oligonucleotide
  Target: SCNA; (+) strand; PAM type: YTN; PAM sequence: CTG
gccaacgtggtgaaccctgt

SEQ ID NO: 63076 - DNA, 20 bp, Artificial Sequence
  Description of Artificial Sequence: Synthetic oligonucleotide
  Target: SCNA; (+) strand; PAM type: YTN; PAM sequence: CTG
tctctactaaaaatacaaaa

SEQ ID NO: 63077 - DNA, 20 bp, Artificial Sequence
  Description of Artificial Sequence: Synthetic oligonucleotide
  Target: SCNA; (+) strand; PAM type: YTN; PAM sequence: CTC
tactaaaaatacaaaaatta

SEQ ID NO: 63078 - DNA, 20 bp, Artificial Sequence
  Description of Artificial Sequence: Synthetic oligonucleotide
  Target: SCNA; (+) strand; PAM type: YTN; PAM sequence: CTA
ctaaaaatacaaaaattagt

SEQ ID NO: 63079 - DNA, 20 bp, Artificial Sequence
  Description of Artificial Sequence: Synthetic oligonucleotide
  Target: SCNA; (+) strand; PAM type: YTN; PAM sequence: CTA
aaaatacaaaaattagtcgg

SEQ ID NO: 63080 - DNA, 20 bp, Artificial Sequence
  Description of Artificial Sequence: Synthetic oligonucleotide
  Target: SCNA; (+) strand; PAM type: YTN; PAM sequence: TTA
gtcgggctaaggtggtgtgt

SEQ ID NO: 63081 - DNA, 20 bp, Artificial Sequence
  Description of Artificial Sequence: Synthetic oligonucleotide
  Target: SCNA; (+) strand; PAM type: YTN; PAM sequence: CTA
aggtggtgtgttcctgtaat

SEQ ID NO: 63082 - DNA, 20 bp, Artificial Sequence
  Description of Artificial Sequence: Synthetic oligonucleotide
  Target: SCNA; (+) strand; PAM type: YTN; PAM sequence: TTC
ctgtaatcccacctactcga

SEQ ID NO: 63083 - DNA, 20 bp, Artificial Sequence
  Description of Artificial Sequence: Synthetic oligonucleotide
  Target: SCNA; (+) strand; PAM type: YTN; PAM sequence: CTG
taatcccacctactcgagag

SEQ ID NO: 63084 - DNA, 20 bp, Artificial Sequence
  Description of Artificial Sequence: Synthetic oligonucleotide
  Target: SCNA; (+) strand; PAM type: YTN; PAM sequence: CTA
ctcgagaggctgaggcagga

SEQ ID NO: 63085 - DNA, 20 bp, Artificial Sequence
  Description of Artificial Sequence: Synthetic oligonucleotide
  Target: SCNA; (+) strand; PAM type: YTN; PAM sequence: CTC
gagaggctgaggcaggagaa

SEQ ID NO: 63086 - DNA, 20 bp, Artificial Sequence
  Description of Artificial Sequence: Synthetic oligonucleotide
  Target: SCNA; (+) strand; PAM type: YTN; PAM sequence: CTG
aggcaggagaatcgcttgaa

SEQ ID NO: 63087 - DNA, 20 bp, Artificial Sequence
  Description of Artificial Sequence: Synthetic oligonucleotide
  Target: SCNA; (+) strand; PAM type: YTN; PAM sequence: CTT
gaacctgggaggcggaggtt

SEQ ID NO: 63088 - DNA, 20 bp, Artificial Sequence
  Description of Artificial Sequence: Synthetic oligonucleotide
  Target: SCNA; (+) strand; PAM type: YTN; PAM sequence: TTG
aacctgggaggcggaggttg

SEQ ID NO: 63089 - DNA, 20 bp, Artificial Sequence
  Description of Artificial Sequence: Synthetic oligonucleotide
  Target: SCNA; (+) strand; PAM type: YTN; PAM sequence: CTG
ggaggcggaggttgcagtga

SEQ ID NO: 63090 - DNA, 20 bp, Artificial Sequence
  Description of Artificial Sequence: Synthetic oligonucleotide
  Target: SCNA; (+) strand; PAM type: YTN; PAM sequence: TTG
cagtgaactgagattgtgcc

SEQ ID NO: 63091 - DNA, 20 bp, Artificial Sequence
  Description of Artificial Sequence: Synthetic oligonucleotide
  Target: SCNA; (+) strand; PAM type: YTN; PAM sequence: CTG
agattgtgccattgcactcc

SEQ ID NO: 63092 - DNA, 20 bp, Artificial Sequence
  Description of Artificial Sequence: Synthetic oligonucleotide
  Target: SCNA; (+) strand; PAM type: YTN; PAM sequence: TTG
tgccattgcactccagccta

SEQ ID NO: 63093 - DNA, 20 bp, Artificial Sequence
  Description of Artificial Sequence: Synthetic oligonucleotide
  Target: SCNA; (+) strand; PAM type: YTN; PAM sequence: TTG
cactccagcctaggtggcaa

SEQ ID NO: 63094 - DNA, 20 bp, Artificial Sequence
  Description of Artificial Sequence: Synthetic oligonucleotide
  Target: SCNA; (+) strand; PAM type: YTN; PAM sequence: CTC
cagcctaggtggcaagagca

SEQ ID NO: 63095 - DNA, 20 bp, Artificial Sequence
  Description of Artificial Sequence: Synthetic oligonucleotide
  Target: SCNA; (+) strand; PAM type: YTN; PAM sequence: CTA
ggtggcaagagcaagactcc

SEQ ID NO: 63096 - DNA, 20 bp, Artificial Sequence
  Description of Artificial Sequence: Synthetic oligonucleotide
  Target: SCNA; (+) strand; PAM type: YTN; PAM sequence: CTC
catctcaaaaaaaaaaaaaa

SEQ ID NO: 63097 - DNA, 20 bp, Artificial Sequence
  Description of Artificial Sequence: Synthetic oligonucleotide
  Target: SCNA; (+) strand; PAM type: YTN; PAM sequence: CTC
aaaaaaaaaaaaaaagaaat

SEQ ID NO: 63098 - DNA, 20 bp, Artificial Sequence
  Description of Artificial Sequence: Synthetic oligonucleotide
  Target: SCNA; (+) strand; PAM type: YTN; PAM sequence: CTC
tctatatgtatctatagata

SEQ ID NO: 63099 - DNA, 20 bp, Artificial Sequence
  Description of Artificial Sequence: Synthetic oligonucleotide
  Target: SCNA; (+) strand; PAM type: YTN; PAM sequence: CTC
tatatgtatctatagatata

SEQ ID NO: 63100 - DNA, 20 bp, Artificial Sequence
  Description of Artificial Sequence: Synthetic oligonucleotide
  Target: SCNA; (+) strand; PAM type: YTN; PAM sequence: CTA
tatgtatctatagatataga

SEQ ID NO: 63101 - DNA, 20 bp, Artificial Sequence
  Description of Artificial Sequence: Synthetic oligonucleotide
  Target: SCNA; (+) strand; PAM type: YTN; PAM sequence: CTA
tagatatagatatgtttata

SEQ ID NO: 63102 - DNA, 20 bp, Artificial Sequence
  Description of Artificial Sequence: Synthetic oligonucleotide
  Target: SCNA; (+) strand; PAM type: YTN; PAM sequence: TTT
atagatatatagatatacag

SEQ ID NO: 63103 - DNA, 20 bp, Artificial Sequence
  Description of Artificial Sequence: Synthetic oligonucleotide
  Target: SCNA; (+) strand; PAM type: YTN; PAM sequence: TTA
tagatatatagatatacaga

SEQ ID NO: 63104 - DNA, 20 bp, Artificial Sequence
  Description of Artificial Sequence: Synthetic oligonucleotide
  Target: SCNA; (+) strand; PAM type: YTN; PAM sequence: TTT
tgtgtgtgtttgtgtgtgtg

SEQ ID NO: 63105 - DNA, 20 bp, Artificial Sequence
  Description of Artificial Sequence: Synthetic oligonucleotide
  Target: SCNA; (+) strand; PAM type: YTN; PAM sequence: TTT
gtgtgtgtttgtgtgtgtgt

SEQ ID NO: 63106 - DNA, 20 bp, Artificial Sequence
  Description of Artificial Sequence: Synthetic oligonucleotide
  Target: SCNA; (+) strand; PAM type: YTN; PAM sequence: TTG
tgtgtgtttgtgtgtgtgtg

SEQ ID NO: 63107 - DNA, 20 bp, Artificial Sequence
  Description of Artificial Sequence: Synthetic oligonucleotide
  Target: SCNA; (+) strand; PAM type: YTN; PAM sequence: TTT
gtgtgtgtgtgtgtgtgtat

SEQ ID NO: 63108 - DNA, 20 bp, Artificial Sequence
  Description of Artificial Sequence: Synthetic oligonucleotide
  Target: SCNA; (+) strand; PAM type: YTN; PAM sequence: TTG
tgtgtgtgtgtgtgtgtata

SEQ ID NO: 63109 - DNA, 20 bp, Artificial Sequence
  Description of Artificial Sequence: Synthetic oligonucleotide
  Target: SCNA; (+) strand; PAM type: YTN; PAM sequence: TTT
gtcttcaggcacctgaagaa

SEQ ID NO: 63110 - DNA, 20 bp, Artificial Sequence
  Description of Artificial Sequence: Synthetic oligonucleotide
  Target: SCNA; (+) strand; PAM type: YTN; PAM sequence: TTG
tcttcaggcacctgaagaaa

SEQ ID NO: 63111 - DNA, 20 bp, Artificial Sequence
  Description of Artificial Sequence: Synthetic oligonucleotide
  Target: SCNA; (+) strand; PAM type: YTN; PAM sequence: CTT
caggcacctgaagaaaaaca

SEQ ID NO: 63112 - DNA, 20 bp, Artificial Sequence
  Description of Artificial Sequence: Synthetic oligonucleotide
  Target: SCNA; (+) strand; PAM type: YTN; PAM sequence: TTC
aggcacctgaagaaaaacag

SEQ ID NO: 63113 - DNA, 20 bp, Artificial Sequence
  Description of Artificial Sequence: Synthetic oligonucleotide
  Target: SCNA; (+) strand; PAM type: YTN; PAM sequence: CTG
aagaaaaacagatgtactag

SEQ ID NO: 63114 - DNA, 20 bp, Artificial Sequence
  Description of Artificial Sequence: Synthetic oligonucleotide
  Target: SCNA; (+) strand; PAM type: YTN; PAM sequence: CTA
gcaaaacttactaaaggctc

SEQ ID NO: 63115 - DNA, 20 bp, Artificial Sequence
  Description of Artificial Sequence: Synthetic oligonucleotide
  Target: SCNA; (+) strand; PAM type: YTN; PAM sequence: CTT
actaaaggctcaaactctag

SEQ ID NO: 63116 - DNA, 20 bp, Artificial Sequence
  Description of Artificial Sequence: Synthetic oligonucleotide
  Target: SCNA; (+) strand; PAM type: YTN; PAM sequence: TTA
ctaaaggctcaaactctagt

SEQ ID NO: 63117 - DNA, 20 bp, Artificial Sequence
  Description of Artificial Sequence: Synthetic oligonucleotide
  Target: SCNA; (+) strand; PAM type: YTN; PAM sequence: CTA
aaggctcaaactctagtaaa

SEQ ID NO: 63118 - DNA, 20 bp, Artificial Sequence
  Description of Artificial Sequence: Synthetic oligonucleotide
  Target: SCNA; (+) strand; PAM type: YTN; PAM sequence: CTC
aaactctagtaaattttctt

SEQ ID NO: 63119 - DNA, 20 bp, Artificial Sequence
  Description of Artificial Sequence: Synthetic oligonucleotide
  Target: SCNA; (+) strand; PAM type: YTN; PAM sequence: CTC
tagtaaattttctttaggta

SEQ ID NO: 63120 - DNA, 20 bp, Artificial Sequence
  Description of Artificial Sequence: Synthetic oligonucleotide
  Target: SCNA; (+) strand; PAM type: YTN; PAM sequence: CTA
gtaaattttctttaggtacc

SEQ ID NO: 63121 - DNA, 20 bp, Artificial Sequence
  Description of Artificial Sequence: Synthetic oligonucleotide
  Target: SCNA; (+) strand; PAM type: YTN; PAM sequence: TTT
tctttaggtacctgaagaaa

SEQ ID NO: 63122 - DNA, 20 bp, Artificial Sequence
  Description of Artificial Sequence: Synthetic oligonucleotide
  Target: SCNA; (+) strand; PAM type: YTN; PAM sequence: TTT
ctttaggtacctgaagaaaa

SEQ ID NO: 63123 - DNA, 20 bp, Artificial Sequence
  Description of Artificial Sequence: Synthetic oligonucleotide
  Target: SCNA; (+) strand; PAM type: YTN; PAM sequence: TTC
tttaggtacctgaagaaaaa

SEQ ID NO: 63124 - DNA, 20 bp, Artificial Sequence
  Description of Artificial Sequence: Synthetic oligonucleotide
  Target: SCNA; (+) strand; PAM type: YTN; PAM sequence: CTT
taggtacctgaagaaaaaca

SEQ ID NO: 63125 - DNA, 20 bp, Artificial Sequence
  Description of Artificial Sequence: Synthetic oligonucleotide
  Target: SCNA; (+) strand; PAM type: YTN; PAM sequence: TTT
aggtacctgaagaaaaacaa

SEQ ID NO: 63126 - DNA, 20 bp, Artificial Sequence
  Description of Artificial Sequence: Synthetic oligonucleotide
  Target: SCNA; (+) strand; PAM type: YTN; PAM sequence: TTA
ggtacctgaagaaaaacaaa

SEQ ID NO: 63127 - DNA, 20 bp, Artificial Sequence
  Description of Artificial Sequence: Synthetic oligonucleotide
  Target: SCNA; (+) strand; PAM type: YTN; PAM sequence: CTG
aagaaaaacaaatatctaat

SEQ ID NO: 63128 - DNA, 20 bp, Artificial Sequence
  Description of Artificial Sequence: Synthetic oligonucleotide
  Target: SCNA; (+) strand; PAM type: YTN; PAM sequence: CTA
attattatacctagaaaagt

SEQ ID NO: 63129 - DNA, 20 bp, Artificial Sequence
  Description of Artificial Sequence: Synthetic oligonucleotide
  Target: SCNA; (+) strand; PAM type: YTN; PAM sequence: TTA
ttatacctagaaaagtgggg

SEQ ID NO: 63130 - DNA, 20 bp, Artificial Sequence
  Description of Artificial Sequence: Synthetic oligonucleotide
  Target: SCNA; (+) strand; PAM type: YTN; PAM sequence: TTA
tacctagaaaagtggggcta

SEQ ID NO: 63131 - DNA, 20 bp, Artificial Sequence
  Description of Artificial Sequence: Synthetic oligonucleotide
  Target: SCNA; (+) strand; PAM type: YTN; PAM sequence: CTA
gaaaagtggggctatcaccc

SEQ ID NO: 63132 - DNA, 20 bp, Artificial Sequence
  Description of Artificial Sequence: Synthetic oligonucleotide
  Target: SCNA; (+) strand; PAM type: YTN; PAM sequence: CTA
tcaccccatttcctagactt

SEQ ID NO: 63133 - DNA, 20 bp, Artificial Sequence
  Description of Artificial Sequence: Synthetic oligonucleotide
  Target: SCNA; (+) strand; PAM type: YTN; PAM sequence: TTT
cctagacttctggaagtttt

SEQ ID NO: 63134 - DNA, 20 bp, Artificial Sequence
  Description of Artificial Sequence: Synthetic oligonucleotide
  Target: SCNA; (+) strand; PAM type: YTN; PAM sequence: TTC
ctagacttctggaagttttc

SEQ ID NO: 63135 - DNA, 20 bp, Artificial Sequence
  Description of Artificial Sequence: Synthetic oligonucleotide
  Target: SCNA; (+) strand; PAM type: YTN; PAM sequence: CTA
gacttctggaagttttctta

SEQ ID NO: 63136 - DNA, 20 bp, Artificial Sequence
  Description of Artificial Sequence: Synthetic oligonucleotide
  Target: SCNA; (+) strand; PAM type: YTN; PAM sequence: CTT
ctggaagttttcttaaatag

SEQ ID NO: 63137 - DNA, 20 bp, Artificial Sequence
  Description of Artificial Sequence: Synthetic oligonucleotide
  Target: SCNA; (+) strand; PAM type: YTN; PAM sequence: TTC
tggaagttttcttaaatagc

SEQ ID NO: 63138 - DNA, 20 bp, Artificial Sequence
  Description of Artificial Sequence: Synthetic oligonucleotide
  Target: SCNA; (+) strand; PAM type: YTN; PAM sequence: CTG
gaagttttcttaaatagctg

SEQ ID NO: 63139 - DNA, 20 bp, Artificial Sequence
  Description of Artificial Sequence: Synthetic oligonucleotide
  Target: SCNA; (+) strand; PAM type: YTN; PAM sequence: TTT
tcttaaatagctgtgtgtcc

SEQ ID NO: 63140 - DNA, 20 bp, Artificial Sequence
  Description of Artificial Sequence: Synthetic oligonucleotide
  Target: SCNA; (+) strand; PAM type: YTN; PAM sequence: TTT
cttaaatagctgtgtgtcct

SEQ ID NO: 63141 - DNA, 20 bp, Artificial Sequence
  Description of Artificial Sequence: Synthetic oligonucleotide
  Target: SCNA; (+) strand; PAM type: YTN; PAM sequence: TTC
ttaaatagctgtgtgtcctc

SEQ ID NO: 63142 - DNA, 20 bp, Artificial Sequence
  Description of Artificial Sequence: Synthetic oligonucleotide
  Target: SCNA; (+) strand; PAM type: YTN; PAM sequence: CTT
aaatagctgtgtgtcctcac

SEQ ID NO: 63143 - DNA, 20 bp, Artificial Sequence
  Description of Artificial Sequence: Synthetic oligonucleotide
  Target: SCNA; (+) strand; PAM type: YTN; PAM sequence: TTA
aatagctgtgtgtcctcact

SEQ ID NO: 63144 - DNA, 20 bp, Artificial Sequence
  Description of Artificial Sequence: Synthetic oligonucleotide
  Target: SCNA; (+) strand; PAM type: YTN; PAM sequence: CTG
tgtgtcctcactctgacact

SEQ ID NO: 63145 - DNA, 20 bp, Artificial Sequence
  Description of Artificial Sequence: Synthetic oligonucleotide
  Target: SCNA; (+) strand; PAM type: YTN; PAM sequence: CTC
actctgacactatgtggcca

SEQ ID NO: 63146 - DNA, 20 bp, Artificial Sequence
  Description of Artificial Sequence: Synthetic oligonucleotide
  Target: SCNA; (+) strand; PAM type: YTN; PAM sequence: CTC
tgacactatgtggccaaggg

SEQ ID NO: 63147 - DNA, 20 bp, Artificial Sequence
  Description of Artificial Sequence: Synthetic oligonucleotide
  Target: SCNA; (+) strand; PAM type: YTN; PAM sequence: CTG
acactatgtggccaaggggc

SEQ ID NO: 63148 - DNA, 20 bp, Artificial Sequence
  Description of Artificial Sequence: Synthetic oligonucleotide
  Target: SCNA; (+) strand; PAM type: YTN; PAM sequence: CTA
tgtggccaaggggctgagag

SEQ ID NO: 63149 - DNA, 20 bp, Artificial Sequence
  Description of Artificial Sequence: Synthetic oligonucleotide
  Target: SCNA; (+) strand; PAM type: YTN; PAM sequence: CTG
agagcacagactgtggtgct

SEQ ID NO: 63150 - DNA, 20 bp, Artificial Sequence
  Description of Artificial Sequence: Synthetic oligonucleotide
  Target: SCNA; (+) strand; PAM type: YTN; PAM sequence: CTG
tggtgctgtaatgttgggcc

SEQ ID NO: 63151 - DNA, 20 bp, Artificial Sequence
  Description of Artificial Sequence: Synthetic oligonucleotide
  Target: SCNA; (+) strand; PAM type: YTN; PAM sequence: CTG
taatgttgggcctcttggct

SEQ ID NO: 63152 - DNA, 20 bp, Artificial Sequence
  Description of Artificial Sequence: Synthetic oligonucleotide
  Target: SCNA; (+) strand; PAM type: YTN; PAM sequence: TTG
ggcctcttggctctgccgct

SEQ ID NO: 63153 - DNA, 20 bp, Artificial Sequence
  Description of Artificial Sequence: Synthetic oligonucleotide
  Target: SCNA; (+) strand; PAM type: YTN; PAM sequence: CTC
ttggctctgccgcttactag

SEQ ID NO: 63154 - DNA, 20 bp, Artificial Sequence
  Description of Artificial Sequence: Synthetic oligonucleotide
  Target: SCNA; (+) strand; PAM type: YTN; PAM sequence: CTT
ggctctgccgcttactagct

SEQ ID NO: 63155 - DNA, 20 bp, Artificial Sequence
  Description of Artificial Sequence: Synthetic oligonucleotide
  Target: SCNA; (+) strand; PAM type: YTN; PAM sequence: TTG
gctctgccgcttactagctg

SEQ ID NO: 63156 - DNA, 20 bp, Artificial Sequence
  Description of Artificial Sequence: Synthetic oligonucleotide
  Target: SCNA; (+) strand; PAM type: YTN; PAM sequence: CTC
tgccgcttactagctgtgtg

SEQ ID NO: 63157 - DNA, 20 bp, Artificial Sequence
  Description of Artificial Sequence: Synthetic oligonucleotide
  Target: SCNA; (+) strand; PAM type: YTN; PAM sequence: CTG
ccgcttactagctgtgtggc

SEQ ID NO: 63158 - DNA, 20 bp, Artificial Sequence
  Description of Artificial Sequence: Synthetic oligonucleotide
  Target: SCNA; (+) strand; PAM type: YTN; PAM sequence: CTT
actagctgtgtggccgtggg

SEQ ID NO: 63159 - DNA, 20 bp, Artificial Sequence
  Description of Artificial Sequence: Synthetic oligonucleotide
  Target: SCNA; (+) strand; PAM type: YTN; PAM sequence: TTA
ctagctgtgtggccgtggga

SEQ ID NO: 63160 - DNA, 20 bp, Artificial Sequence
  Description of Artificial Sequence: Synthetic oligonucleotide
  Target: SCNA; (+) strand; PAM type: YTN; PAM sequence: CTA
gctgtgtggccgtgggaaag

SEQ ID NO: 63161 - DNA, 20 bp, Artificial Sequence
  Description of Artificial Sequence: Synthetic oligonucleotide
  Target: SCNA; (+) strand; PAM type: YTN; PAM sequence: CTG
tgtggccgtgggaaagttat

SEQ ID NO: 63162 - DNA, 20 bp, Artificial Sequence
  Description of Artificial Sequence: Synthetic oligonucleotide
  Target: SCNA; (+) strand; PAM type: YTN; PAM sequence: TTA
tctagcctgtgggtgcctcc

SEQ ID NO: 63163 - DNA, 20 bp, Artificial Sequence
  Description of Artificial Sequence: Synthetic oligonucleotide
  Target: SCNA; (+) strand; PAM type: YTN; PAM sequence: CTA
gcctgtgggtgcctcctttg

SEQ ID NO: 63164 - DNA, 20 bp, Artificial Sequence
  Description of Artificial Sequence: Synthetic oligonucleotide
  Target: SCNA; (+) strand; PAM type: YTN; PAM sequence: CTG
tgggtgcctcctttggctta

SEQ ID NO: 63165 - DNA, 20 bp, Artificial Sequence
  Description of Artificial Sequence: Synthetic oligonucleotide
  Target: SCNA; (+) strand; PAM type: YTN; PAM sequence: CTC
ctttggcttatgtgtaaaat

SEQ ID NO: 63166 - DNA, 20 bp, Artificial Sequence
  Description of Artificial Sequence: Synthetic oligonucleotide
  Target: SCNA; (+) strand; PAM type: YTN; PAM sequence: CTT
tggcttatgtgtaaaattag

SEQ ID NO: 63167 - DNA, 20 bp, Artificial Sequence
  Description of Artificial Sequence: Synthetic oligonucleotide
  Target: SCNA; (+) strand; PAM type: YTN; PAM sequence: TTT
ggcttatgtgtaaaattaga

SEQ ID NO: 63168 - DNA, 20 bp, Artificial Sequence
  Description of Artificial Sequence: Synthetic oligonucleotide
  Target: SCNA; (+) strand; PAM type: YTN; PAM sequence: TTG
gcttatgtgtaaaattagaa

SEQ ID NO: 63169 - DNA, 20 bp, Artificial Sequence
  Description of Artificial Sequence: Synthetic oligonucleotide
  Target: SCNA; (+) strand; PAM type: YTN; PAM sequence: CTT
atgtgtaaaattagaatcat

SEQ ID NO: 63170 - DNA, 20 bp, Artificial Sequence
  Description of Artificial Sequence: Synthetic oligonucleotide
  Target: SCNA; (+) strand; PAM type: YTN; PAM sequence: TTA
tgtgtaaaattagaatcata

SEQ ID NO: 63171 - DNA, 20 bp, Artificial Sequence
  Description of Artificial Sequence: Synthetic oligonucleotide
  Target: SCNA; (+) strand; PAM type: YTN; PAM sequence: TTA
gaatcataatggaacctatt

SEQ ID NO: 63172 - DNA, 20 bp, Artificial Sequence
  Description of Artificial Sequence: Synthetic oligonucleotide
  Target: SCNA; (+) strand; PAM type: YTN; PAM sequence: CTA
ttaaggttgttttgagaatt

SEQ ID NO: 63173 - DNA, 20 bp, Artificial Sequence
  Description of Artificial Sequence: Synthetic oligonucleotide
  Target: SCNA; (+) strand; PAM type: YTN; PAM sequence: TTA
aggttgttttgagaattaaa

SEQ ID NO: 63174 - DNA, 20 bp, Artificial Sequence
  Description of Artificial Sequence: Synthetic oligonucleotide
  Target: SCNA; (+) strand; PAM type: YTN; PAM sequence: TTG
ttttgagaattaaatgactt

SEQ ID NO: 63175 - DNA, 20 bp, Artificial Sequence
  Description of Artificial Sequence: Synthetic oligonucleotide
  Target: SCNA; (+) strand; PAM type: YTN; PAM sequence: TTT
tgagaattaaatgacttaat

SEQ ID NO: 63176 - DNA, 20 bp, Artificial Sequence
  Description of Artificial Sequence: Synthetic oligonucleotide
  Target: SCNA; (+) strand; PAM type: YTN; PAM sequence: TTT
gagaattaaatgacttaata

SEQ ID NO: 63177 - DNA, 20 bp, Artificial Sequence
  Description of Artificial Sequence: Synthetic oligonucleotide
  Target: SCNA; (+) strand; PAM type: YTN; PAM sequence: TTG
agaattaaatgacttaatat

SEQ ID NO: 63178 - DNA, 20 bp, Artificial Sequence
  Description of Artificial Sequence: Synthetic oligonucleotide
  Target: SCNA; (+) strand; PAM type: YTN; PAM sequence: TTA
aatgacttaatattgataaa

SEQ ID NO: 63179 - DNA, 20 bp, Artificial Sequence
  Description of Artificial Sequence: Synthetic oligonucleotide
  Target: SCNA; (+) strand; PAM type: YTN; PAM sequence: CTT
aatattgataaatcacttac

SEQ ID NO: 63180 - DNA, 20 bp, Artificial Sequence
  Description of Artificial Sequence: Synthetic oligonucleotide
  Target: SCNA; (+) strand; PAM type: YTN; PAM sequence: TTA
atattgataaatcacttaca

SEQ ID NO: 63181 - DNA, 20 bp, Artificial Sequence
  Description of Artificial Sequence: Synthetic oligonucleotide
  Target: SCNA; (+) strand; PAM type: YTN; PAM sequence: TTG
ataaatcacttacatctata

SEQ ID NO: 63182 - DNA, 20 bp, Artificial Sequence
  Description of Artificial Sequence: Synthetic oligonucleotide
  Target: SCNA; (+) strand; PAM type: YTN; PAM sequence: CTT
acatctatatttgacacata

SEQ ID NO: 63183 - DNA, 20 bp, Artificial Sequence
  Description of Artificial Sequence: Synthetic oligonucleotide
  Target: SCNA; (+) strand; PAM type: YTN; PAM sequence: TTA
catctatatttgacacataa

SEQ ID NO: 63184 - DNA, 20 bp, Artificial Sequence
  Description of Artificial Sequence: Synthetic oligonucleotide
  Target: SCNA; (+) strand; PAM type: YTN; PAM sequence: CTA
tatttgacacataataattt

SEQ ID NO: 63185 - DNA, 20 bp, Artificial Sequence
  Description of Artificial Sequence: Synthetic oligonucleotide
  Target: SCNA; (+) strand; PAM type: YTN; PAM sequence: TTT
gacacataataatttgtcta

SEQ ID NO: 63186 - DNA, 20 bp, Artificial Sequence
  Description of Artificial Sequence: Synthetic oligonucleotide
  Target: SCNA; (+) strand; PAM type: YTN; PAM sequence: TTG
acacataataatttgtctaa

SEQ ID NO: 63187 - DNA, 20 bp, Artificial Sequence
  Description of Artificial Sequence: Synthetic oligonucleotide
  Target: SCNA; (+) strand; PAM type: YTN; PAM sequence: TTT
gtctaaagtatagccaataa

SEQ ID NO: 63188 - DNA, 20 bp, Artificial Sequence
  Description of Artificial Sequence: Synthetic oligonucleotide
  Target: SCNA; (+) strand; PAM type: YTN; PAM sequence: TTG
tctaaagtatagccaataac

SEQ ID NO: 63189 - DNA, 20 bp, Artificial Sequence
  Description of Artificial Sequence: Synthetic oligonucleotide
  Target: SCNA; (+) strand; PAM type: YTN; PAM sequence: CTA
aagtatagccaataacaggg

SEQ ID NO: 63190 - DNA, 20 bp, Artificial Sequence
  Description of Artificial Sequence: Synthetic oligonucleotide
  Target: SCNA; (+) strand; PAM type: YTN; PAM sequence: CTC
atatgaaaatgtcagccctg

SEQ ID NO: 63191 - DNA, 20 bp, Artificial Sequence
  Description of Artificial Sequence: Synthetic oligonucleotide
  Target: SCNA; (+) strand; PAM type: YTN; PAM sequence: CTG
ttgcactcttgccctgccca

SEQ ID NO: 63192 - DNA, 20 bp, Artificial Sequence
  Description of Artificial Sequence: Synthetic oligonucleotide
  Target: SCNA; (+) strand; PAM type: YTN; PAM sequence: TTG
cactcttgccctgcccaaga

SEQ ID NO: 63193 - DNA, 20 bp, Artificial Sequence
  Description of Artificial Sequence: Synthetic oligonucleotide
  Target: SCNA; (+) strand; PAM type: YTN; PAM sequence: CTC
ttgccctgcccaagacagaa

SEQ ID NO: 63194 - DNA, 20 bp, Artificial Sequence
  Description of Artificial Sequence: Synthetic oligonucleotide
  Target: SCNA; (+) strand; PAM type: YTN; PAM sequence: CTT
gccctgcccaagacagaaag

SEQ ID NO: 63195 - DNA, 20 bp, Artificial Sequence
  Description of Artificial Sequence: Synthetic oligonucleotide
  Target: SCNA; (+) strand; PAM type: YTN; PAM sequence: TTG
ccctgcccaagacagaaaga

SEQ ID NO: 63196 - DNA, 20 bp, Artificial Sequence
  Description of Artificial Sequence: Synthetic oligonucleotide
  Target: SCNA; (+) strand; PAM type: YTN; PAM sequence: CTG
cccaagacagaaagaacaaa

SEQ ID NO: 63197 - DNA, 20 bp, Artificial Sequence
  Description of Artificial Sequence: Synthetic oligonucleotide
  Target: SCNA; (+) strand; PAM type: YTN; PAM sequence: TTT
cagatgaaacacagagttcc

SEQ ID NO: 63198 - DNA, 20 bp, Artificial Sequence
  Description of Artificial Sequence: Synthetic oligonucleotide
  Target: SCNA; (+) strand; PAM type: YTN; PAM sequence: TTC
agatgaaacacagagttcca

SEQ ID NO: 63199 - DNA, 20 bp, Artificial Sequence
  Description of Artificial Sequence: Synthetic oligonucleotide
  Target: SCNA; (+) strand; PAM type: YTN; PAM sequence: TTC
cattagtgtgtggacagagg

SEQ ID NO: 63200 - DNA, 20 bp, Artificial Sequence
  Description of Artificial Sequence: Synthetic oligonucleotide
  Target: SCNA; (+) strand; PAM type: YTN; PAM sequence: TTA
gtgtgtggacagaggcagtc

SEQ ID NO: 63201 - DNA, 20 bp, Artificial Sequence
  Description of Artificial Sequence: Synthetic oligonucleotide
  Target: SCNA; (+) strand; PAM type: YTN; PAM sequence: CTG
tcaggtttacagatttgaaa

SEQ ID NO: 63202 - DNA, 20 bp, Artificial Sequence
  Description of Artificial Sequence: Synthetic oligonucleotide
  Target: SCNA; (+) strand; PAM type: YTN; PAM sequence: TTT
acagatttgaaaagaaaatg

SEQ ID NO: 63203 - DNA, 20 bp, Artificial Sequence
  Description of Artificial Sequence: Synthetic oligonucleotide
  Target: SCNA; (+) strand; PAM type: YTN; PAM sequence: TTA
cagatttgaaaagaaaatgt

SEQ ID NO: 63204 - DNA, 20 bp, Artificial Sequence
  Description of Artificial Sequence: Synthetic oligonucleotide
  Target: SCNA; (+) strand; PAM type: YTN; PAM sequence: TTT
gaaaagaaaatgtgttttct

SEQ ID NO: 63205 - DNA, 20 bp, Artificial Sequence
  Description of Artificial Sequence: Synthetic oligonucleotide
  Target: SCNA; (+) strand; PAM type: YTN; PAM sequence: TTG
aaaagaaaatgtgttttctt

SEQ ID NO: 63206 - DNA, 20 bp, Artificial Sequence
  Description of Artificial Sequence: Synthetic oligonucleotide
  Target: SCNA; (+) strand; PAM type: YTN; PAM sequence: TTT
tcttcctcagtatggattta

SEQ ID NO: 63207 - DNA, 20 bp, Artificial Sequence
  Description of Artificial Sequence: Synthetic oligonucleotide
  Target: SCNA; (+) strand; PAM type: YTN; PAM sequence: TTT
cttcctcagtatggatttag

SEQ ID NO: 63208 - DNA, 20 bp, Artificial Sequence
  Description of Artificial Sequence: Synthetic oligonucleotide
  Target: SCNA; (+) strand; PAM type: YTN; PAM sequence: TTC
ttcctcagtatggatttaga

SEQ ID NO: 63209 - DNA, 20 bp, Artificial Sequence
  Description of Artificial Sequence: Synthetic oligonucleotide
  Target: SCNA; (+) strand; PAM type: YTN; PAM sequence: CTT
cctcagtatggatttagaca

SEQ ID NO: 63210 - DNA, 20 bp, Artificial Sequence
  Description of Artificial Sequence: Synthetic oligonucleotide
  Target: SCNA; (+) strand; PAM type: YTN; PAM sequence: TTC
ctcagtatggatttagacag

SEQ ID NO: 63211 - DNA, 20 bp, Artificial Sequence
  Description of Artificial Sequence: Synthetic oligonucleotide
  Target: SCNA; (+) strand; PAM type: YTN; PAM sequence: CTC
agtatggatttagacagcac

SEQ ID NO: 63212 - DNA, 20 bp, Artificial Sequence
  Description of Artificial Sequence: Synthetic oligonucleotide
  Target: SCNA; (+) strand; PAM type: YTN; PAM sequence: TTT
agacagcactgtctttgaga

SEQ ID NO: 63213 - DNA, 20 bp, Artificial Sequence
  Description of Artificial Sequence: Synthetic oligonucleotide
  Target: SCNA; (+) strand; PAM type: YTN; PAM sequence: TTA
gacagcactgtctttgagaa

SEQ ID NO: 63214 - DNA, 20 bp, Artificial Sequence
  Description of Artificial Sequence: Synthetic oligonucleotide
  Target: SCNA; (+) strand; PAM type: YTN; PAM sequence: CTG
tctttgagaattaatagttg

SEQ ID NO: 63215 - DNA, 20 bp, Artificial Sequence
  Description of Artificial Sequence: Synthetic oligonucleotide
  Target: SCNA; (+) strand; PAM type: YTN; PAM sequence: CTT
tgagaattaatagttgtctt

SEQ ID NO: 63216 - DNA, 20 bp, Artificial Sequence
  Description of Artificial Sequence: Synthetic oligonucleotide
  Target: SCNA; (+) strand; PAM type: YTN; PAM sequence: TTT
gagaattaatagttgtcttt

SEQ ID NO: 63217 - DNA, 20 bp, Artificial Sequence
  Description of Artificial Sequence: Synthetic oligonucleotide
  Target: SCNA; (+) strand; PAM type: YTN; PAM sequence: TTG
agaattaatagttgtctttg

SEQ ID NO: 63218 - DNA, 20 bp, Artificial Sequence
  Description of Artificial Sequence: Synthetic oligonucleotide
  Target: SCNA; (+) strand; PAM type: YTN; PAM sequence: TTA
atagttgtctttgagatgtg

SEQ ID NO: 63219 - DNA, 20 bp, Artificial Sequence
  Description of Artificial Sequence: Synthetic oligonucleotide
  Target: SCNA; (+) strand; PAM type: YTN; PAM sequence: TTG
tctttgagatgtgtgaatgc

SEQ ID NO: 63220 - DNA, 20 bp, Artificial Sequence
  Description of Artificial Sequence: Synthetic oligonucleotide
  Target: SCNA; (+) strand; PAM type: YTN; PAM sequence: CTT
tgagatgtgtgaatgcatga

SEQ ID NO: 63221 - DNA, 20 bp, Artificial Sequence
  Description of Artificial Sequence: Synthetic oligonucleotide
  Target: SCNA; (+) strand; PAM type: YTN; PAM sequence: TTT
gagatgtgtgaatgcatgag

SEQ ID NO: 63222 - DNA, 20 bp, Artificial Sequence
  Description of Artificial Sequence: Synthetic oligonucleotide
  Target: SCNA; (+) strand; PAM type: YTN; PAM sequence: TTG
agatgtgtgaatgcatgagt

SEQ ID NO: 63223 - DNA, 20 bp, Artificial Sequence
  Description of Artificial Sequence: Synthetic oligonucleotide
  Target: SCNA; (+) strand; PAM type: YTN; PAM sequence: TTT
gttttaatctagtagtgaaa

SEQ ID NO: 63224 - DNA, 20 bp, Artificial Sequence
  Description of Artificial Sequence: Synthetic oligonucleotide
  Target: SCNA; (+) strand; PAM type: YTN; PAM sequence: TTG
ttttaatctagtagtgaaaa

SEQ ID NO: 63225 - DNA, 20 bp, Artificial Sequence
  Description of Artificial Sequence: Synthetic oligonucleotide
  Target: SCNA; (+) strand; PAM type: YTN; PAM sequence: TTT
taatctagtagtgaaaagga

SEQ ID NO: 63226 - DNA, 20 bp, Artificial Sequence
  Description of Artificial Sequence: Synthetic oligonucleotide
  Target: SCNA; (+) strand; PAM type: YTN; PAM sequence: TTT
aatctagtagtgaaaaggaa

SEQ ID NO: 63227 - DNA, 20 bp, Artificial Sequence
  Description of Artificial Sequence: Synthetic oligonucleotide
  Target: SCNA; (+) strand; PAM type: YTN; PAM sequence: TTA
atctagtagtgaaaaggaaa

SEQ ID NO: 63228 - DNA, 20 bp, Artificial Sequence
  Description of Artificial Sequence: Synthetic oligonucleotide
  Target: SCNA; (+) strand; PAM type: YTN; PAM sequence: CTA
gtagtgaaaaggaaacgctg

SEQ ID NO: 63229 - DNA, 20 bp, Artificial Sequence
  Description of Artificial Sequence: Synthetic oligonucleotide
  Target: SCNA; (+) strand; PAM type: YTN; PAM sequence: CTG
tttttctttctatacactca

SEQ ID NO: 63230 - DNA, 20 bp, Artificial Sequence
  Description of Artificial Sequence: Synthetic oligonucleotide
  Target: SCNA; (+) strand; PAM type: YTN; PAM sequence: TTT
ttctttctatacactcactc

SEQ ID NO: 63231 - DNA, 20 bp, Artificial Sequence
  Description of Artificial Sequence: Synthetic oligonucleotide
  Target: SCNA; (+) strand; PAM type: YTN; PAM sequence: TTT
tctttctatacactcactca

SEQ ID NO: 63232 - DNA, 20 bp, Artificial Sequence
  Description of Artificial Sequence: Synthetic oligonucleotide
  Target: SCNA; (+) strand; PAM type: YTN; PAM sequence: TTT
ctttctatacactcactcac

SEQ ID NO: 63233 - DNA, 20 bp, Artificial Sequence
  Description of Artificial Sequence: Synthetic oligonucleotide
  Target: SCNA; (+) strand; PAM type: YTN; PAM sequence: TTC
tttctatacactcactcaca

SEQ ID NO: 63234 - DNA, 20 bp, Artificial Sequence
  Description of Artificial Sequence: Synthetic oligonucleotide
  Target: SCNA; (+) strand; PAM type: YTN; PAM sequence: CTT
tctatacactcactcacaac

SEQ ID NO: 63235 - DNA, 20 bp, Artificial Sequence
  Description of Artificial Sequence: Synthetic oligonucleotide
  Target: SCNA; (+) strand; PAM type: YTN; PAM sequence: TTT
ctatacactcactcacaaca

SEQ ID NO: 63236 - DNA, 20 bp, Artificial Sequence
  Description of Artificial Sequence: Synthetic oligonucleotide
  Target: SCNA; (+) strand; PAM type: YTN; PAM sequence: TTC
tatacactcactcacaacac

SEQ ID NO: 63237 - DNA, 20 bp, Artificial Sequence
  Description of Artificial Sequence: Synthetic oligonucleotide
  Target: SCNA; (+) strand; PAM type: YTN; PAM sequence: CTA
tacactcactcacaacactc

SEQ ID NO: 63238 - DNA, 20 bp, Artificial Sequence
  Description of Artificial Sequence: Synthetic oligonucleotide
  Target: SCNA; (+) strand; PAM type: YTN; PAM sequence: CTC
actcacaacactcaatattt

SEQ ID NO: 63239 - DNA, 20 bp, Artificial Sequence
  Description of Artificial Sequence: Synthetic oligonucleotide
  Target: SCNA; (+) strand; PAM type: YTN; PAM sequence: CTC
acaacactcaatatttccgg

SEQ ID NO: 63240 - DNA, 20 bp, Artificial Sequence
  Description of Artificial Sequence: Synthetic oligonucleotide
  Target: SCNA; (+) strand; PAM type: YTN; PAM sequence: CTC
aatatttccggaacacaata

SEQ ID NO: 63241 - DNA, 20 bp, Artificial Sequence
  Description of Artificial Sequence: Synthetic oligonucleotide
  Target: SCNA; (+) strand; PAM type: YTN; PAM sequence: TTT
ccggaacacaatatttccgg

SEQ ID NO: 63242 - DNA, 20 bp, Artificial Sequence
  Description of Artificial Sequence: Synthetic oligonucleotide
  Target: SCNA; (+) strand; PAM type: YTN; PAM sequence: TTC
cggaacacaatatttccggt

SEQ ID NO: 63243 - DNA, 20 bp, Artificial Sequence
  Description of Artificial Sequence: Synthetic oligonucleotide
  Target: SCNA; (+) strand; PAM type: YTN; PAM sequence: TTT
ccggttcatttctgacacca

SEQ ID NO: 63244 - DNA, 20 bp, Artificial Sequence
  Description of Artificial Sequence: Synthetic oligonucleotide
  Target: SCNA; (+) strand; PAM type: YTN; PAM sequence: TTC
cggttcatttctgacaccac

SEQ ID NO: 63245 - DNA, 20 bp, Artificial Sequence
  Description of Artificial Sequence: Synthetic oligonucleotide
  Target: SCNA; (+) strand; PAM type: YTN; PAM sequence: TTC
atttctgacaccacatgtgt

SEQ ID NO: 63246 - DNA, 20 bp, Artificial Sequence
  Description of Artificial Sequence: Synthetic oligonucleotide
  Target: SCNA; (+) strand; PAM type: YTN; PAM sequence: TTT
ctgacaccacatgtgtgtgt

SEQ ID NO: 63247 - DNA, 20 bp, Artificial Sequence
  Description of Artificial Sequence: Synthetic oligonucleotide
  Target: SCNA; (+) strand; PAM type: YTN; PAM sequence: TTC
tgacaccacatgtgtgtgtg

SEQ ID NO: 63248 - DNA, 20 bp, Artificial Sequence
  Description of Artificial Sequence: Synthetic oligonucleotide
  Target: SCNA; (+) strand; PAM type: YTN; PAM sequence: CTG
acaccacatgtgtgtgtggg

SEQ ID NO: 63249 - DNA, 20 bp, Artificial Sequence
  Description of Artificial Sequence: Synthetic oligonucleotide
  Target: SCNA; (+) strand; PAM type: YTN; PAM sequence: TTT
tctacaccaagcaattctcc

SEQ ID NO: 63250 - DNA, 20 bp, Artificial Sequence
  Description of Artificial Sequence: Synthetic oligonucleotide
  Target: SCNA; (+) strand; PAM type: YTN; PAM sequence: TTT
ctacaccaagcaattctccc

SEQ ID NO: 63251 - DNA, 20 bp, Artificial Sequence
  Description of Artificial Sequence: Synthetic oligonucleotide
  Target: SCNA; (+) strand; PAM type: YTN; PAM sequence: TTC
tacaccaagcaattctccca

SEQ ID NO: 63252 - DNA, 20 bp, Artificial Sequence
  Description of Artificial Sequence: Synthetic oligonucleotide
  Target: SCNA; (+) strand; PAM type: YTN; PAM sequence: CTA
caccaagcaattctcccatt

SEQ ID NO: 63253 - DNA, 20 bp, Artificial Sequence
  Description of Artificial Sequence: Synthetic oligonucleotide
  Target: SCNA; (+) strand; PAM type: YTN; PAM sequence: TTC
tcccattctttgtggctacc

SEQ ID NO: 63254 - DNA, 20 bp, Artificial Sequence
  Description of Artificial Sequence: Synthetic oligonucleotide
  Target: SCNA; (+) strand; PAM type: YTN; PAM sequence: CTC
ccattctttgtggctaccaa

SEQ ID NO: 63255 - DNA, 20 bp, Artificial Sequence
  Description of Artificial Sequence: Synthetic oligonucleotide
  Target: SCNA; (+) strand; PAM type: YTN; PAM sequence: TTC
tttgtggctaccaactgggt

SEQ ID NO: 63256 - DNA, 20 bp, Artificial Sequence
  Description of Artificial Sequence: Synthetic oligonucleotide
  Target: SCNA; (+) strand; PAM type: YTN; PAM sequence: CTT
tgtggctaccaactgggtgt

SEQ ID NO: 63257 - DNA, 20 bp, Artificial Sequence
  Description of Artificial Sequence: Synthetic oligonucleotide
  Target: SCNA; (+) strand; PAM type: YTN; PAM sequence: TTT
gtggctaccaactgggtgtc

SEQ ID NO: 63258 - DNA, 20 bp, Artificial Sequence
  Description of Artificial Sequence: Synthetic oligonucleotide
  Target: SCNA; (+) strand; PAM type: YTN; PAM sequence: TTG
tggctaccaactgggtgtcc

SEQ ID NO: 63259 - DNA, 20 bp, Artificial Sequence
  Description of Artificial Sequence: Synthetic oligonucleotide
  Target: SCNA; (+) strand; PAM type: YTN; PAM sequence: CTA
ccaactgggtgtcccgtaat

SEQ ID NO: 63260 - DNA, 20 bp, Artificial Sequence
  Description of Artificial Sequence: Synthetic oligonucleotide
  Target: SCNA; (+) strand; PAM type: YTN; PAM sequence: CTG
ggtgtcccgtaattcaaatc

SEQ ID NO: 63261 - DNA, 20 bp, Artificial Sequence
  Description of Artificial Sequence: Synthetic oligonucleotide
  Target: SCNA; (+) strand; PAM type: YTN; PAM sequence: TTC
aaatcggacactatctacct

SEQ ID NO: 63262 - DNA, 20 bp, Artificial Sequence
  Description of Artificial Sequence: Synthetic oligonucleotide
  Target: SCNA; (+) strand; PAM type: YTN; PAM sequence: CTA
tctacctggagttagcattg

SEQ ID NO: 63263 - DNA, 20 bp, Artificial Sequence
  Description of Artificial Sequence: Synthetic oligonucleotide
  Target: SCNA; (+) strand; PAM type: YTN; PAM sequence: CTA
cctggagttagcattgaccc

SEQ ID NO: 63264 - DNA, 20 bp, Artificial Sequence
  Description of Artificial Sequence: Synthetic oligonucleotide
  Target: SCNA; (+) strand; PAM type: YTN; PAM sequence: CTG
gagttagcattgacccacag

SEQ ID NO: 63265 - DNA, 20 bp, Artificial Sequence
  Description of Artificial Sequence: Synthetic oligonucleotide
  Target: SCNA; (+) strand; PAM type: YTN; PAM sequence: TTA
gcattgacccacaggttaag

SEQ ID NO: 63266 - DNA, 20 bp, Artificial Sequence
  Description of Artificial Sequence: Synthetic oligonucleotide
  Target: SCNA; (+) strand; PAM type: YTN; PAM sequence: TTG
acccacaggttaaggactca

SEQ ID NO: 63267 - DNA, 20 bp, Artificial Sequence
  Description of Artificial Sequence: Synthetic oligonucleotide
  Target: SCNA; (+) strand; PAM type: YTN; PAM sequence: TTA
aggactcagttttacaagat

SEQ ID NO: 63268 - DNA, 20 bp, Artificial Sequence
  Description of Artificial Sequence: Synthetic oligonucleotide
  Target: SCNA; (+) strand; PAM type: YTN; PAM sequence: CTC
agttttacaagatttttccc

SEQ ID NO: 63269 - DNA, 20 bp, Artificial Sequence
  Description of Artificial Sequence: Synthetic oligonucleotide
  Target: SCNA; (+) strand; PAM type: YTN; PAM sequence: TTT
tacaagatttttccccttcc

SEQ ID NO: 63270 - DNA, 20 bp, Artificial Sequence
  Description of Artificial Sequence: Synthetic oligonucleotide
  Target: SCNA; (+) strand; PAM type: YTN; PAM sequence: TTT
acaagatttttccccttccc

SEQ ID NO: 63271 - DNA, 20 bp, Artificial Sequence
  Description of Artificial Sequence: Synthetic oligonucleotide
  Target: SCNA; (+) strand; PAM type: YTN; PAM sequence: TTA
caagatttttccccttccca

SEQ ID NO: 63272 - DNA, 20 bp, Artificial Sequence
  Description of Artificial Sequence: Synthetic oligonucleotide
  Target: SCNA; (+) strand; PAM type: YTN; PAM sequence: TTT
ttccccttcccactgaagat

SEQ ID NO: 63273 - DNA, 20 bp, Artificial Sequence
  Description of Artificial Sequence: Synthetic oligonucleotide
  Target: SCNA; (+) strand; PAM type: YTN; PAM sequence: TTT
tccccttcccactgaagatg

SEQ ID NO: 63274 - DNA, 20 bp, Artificial Sequence
  Description of Artificial Sequence: Synthetic oligonucleotide
  Target: SCNA; (+) strand; PAM type: YTN; PAM sequence: TTT
ccccttcccactgaagatga

SEQ ID NO: 63275 - DNA, 20 bp, Artificial Sequence
  Description of Artificial Sequence: Synthetic oligonucleotide
  Target: SCNA; (+) strand; PAM type: YTN; PAM sequence: TTC
cccttcccactgaagatgac

SEQ ID NO: 63276 - DNA, 20 bp, Artificial Sequence
  Description of Artificial Sequence: Synthetic oligonucleotide
  Target: SCNA; (+) strand; PAM type: YTN; PAM sequence: CTT
cccactgaagatgacaatca

SEQ ID NO: 63277 - DNA, 20 bp, Artificial Sequence
  Description of Artificial Sequence: Synthetic oligonucleotide
  Target: SCNA; (+) strand; PAM type: YTN; PAM sequence: TTC
ccactgaagatgacaatcac

SEQ ID NO: 63278 - DNA, 20 bp, Artificial Sequence
  Description of Artificial Sequence: Synthetic oligonucleotide
  Target: SCNA; (+) strand; PAM type: YTN; PAM sequence: CTG
aagatgacaatcacaagcaa

SEQ ID NO: 63279 - DNA, 20 bp, Artificial Sequence
  Description of Artificial Sequence: Synthetic oligonucleotide
  Target: SCNA; (+) strand; PAM type: YTN; PAM sequence: CTC
atgttactcatagcttctgt

SEQ ID NO: 63280 - DNA, 20 bp, Artificial Sequence
  Description of Artificial Sequence: Synthetic oligonucleotide
  Target: SCNA; (+) strand; PAM type: YTN; PAM sequence: TTA
ctcatagcttctgtttgact

SEQ ID NO: 63281 - DNA, 20 bp, Artificial Sequence
  Description of Artificial Sequence: Synthetic oligonucleotide
  Target: SCNA; (+) strand; PAM type: YTN; PAM sequence: CTC
atagcttctgtttgacttgt

SEQ ID NO: 63282 - DNA, 20 bp, Artificial Sequence
  Description of Artificial Sequence: Synthetic oligonucleotide
  Target: SCNA; (+) strand; PAM type: YTN; PAM sequence: CTT
ctgtttgacttgtctacaaa

SEQ ID NO: 63283 - DNA, 20 bp, Artificial Sequence
  Description of Artificial Sequence: Synthetic oligonucleotide
  Target: SCNA; (+) strand; PAM type: YTN; PAM sequence: TTC
tgtttgacttgtctacaaat

SEQ ID NO: 63284 - DNA, 20 bp, Artificial Sequence
  Description of Artificial Sequence: Synthetic oligonucleotide
  Target: SCNA; (+) strand; PAM type: YTN; PAM sequence: CTG
tttgacttgtctacaaatcc

SEQ ID NO: 63285 - DNA, 20 bp, Artificial Sequence
  Description of Artificial Sequence: Synthetic oligonucleotide
  Target: SCNA; (+) strand; PAM type: YTN; PAM sequence: TTT
gacttgtctacaaatccaag

SEQ ID NO: 63286 - DNA, 20 bp, Artificial Sequence
  Description of Artificial Sequence: Synthetic oligonucleotide
  Target: SCNA; (+) strand; PAM type: YTN; PAM sequence: TTG
acttgtctacaaatccaagg

SEQ ID NO: 63287 - DNA, 20 bp, Artificial Sequence
  Description of Artificial Sequence: Synthetic oligonucleotide
  Target: SCNA; (+) strand; PAM type: YTN; PAM sequence: CTT
gtctacaaatccaaggtctc

SEQ ID NO: 63288 - DNA, 20 bp, Artificial Sequence
  Description of Artificial Sequence: Synthetic oligonucleotide
  Target: SCNA; (+) strand; PAM type: YTN; PAM sequence: TTG
tctacaaatccaaggtctcc

SEQ ID NO: 63289 - DNA, 20 bp, Artificial Sequence
  Description of Artificial Sequence: Synthetic oligonucleotide
  Target: SCNA; (+) strand; PAM type: YTN; PAM sequence: CTA
caaatccaaggtctccacgg

SEQ ID NO: 63290 - DNA, 20 bp, Artificial Sequence
  Description of Artificial Sequence: Synthetic oligonucleotide
  Target: SCNA; (+) strand; PAM type: YTN; PAM sequence: CTC
cacggccctctcctcaggtt

SEQ ID NO: 63291 - DNA, 20 bp, Artificial Sequence
  Description of Artificial Sequence: Synthetic oligonucleotide
  Target: SCNA; (+) strand; PAM type: YTN; PAM sequence: CTC
tcctcaggtttgataatttg

SEQ ID NO: 63292 - DNA, 20 bp, Artificial Sequence
  Description of Artificial Sequence: Synthetic oligonucleotide
  Target: SCNA; (+) strand; PAM type: YTN; PAM sequence: CTC
ctcaggtttgataatttgct

SEQ ID NO: 63293 - DNA, 20 bp, Artificial Sequence
  Description of Artificial Sequence: Synthetic oligonucleotide
  Target: SCNA; (+) strand; PAM type: YTN; PAM sequence: CTC
aggtttgataatttgctagt

SEQ ID NO: 63294 - DNA, 20 bp, Artificial Sequence
  Description of Artificial Sequence: Synthetic oligonucleotide
  Target: SCNA; (+) strand; PAM type: YTN; PAM sequence: TTT
gataatttgctagtgtgatt

SEQ ID NO: 63295 - DNA, 20 bp, Artificial Sequence
  Description of Artificial Sequence: Synthetic oligonucleotide
  Target: SCNA; (+) strand; PAM type: YTN; PAM sequence: TTG
ataatttgctagtgtgattc

SEQ ID NO: 63296 - DNA, 20 bp, Artificial Sequence
  Description of Artificial Sequence: Synthetic oligonucleotide
  Target: SCNA; (+) strand; PAM type: YTN; PAM sequence: TTT
gctagtgtgattcacagact

SEQ ID NO: 63297 - DNA, 20 bp, Artificial Sequence
  Description of Artificial Sequence: Synthetic oligonucleotide
  Target: SCNA; (+) strand; PAM type: YTN; PAM sequence: TTG
ctagtgtgattcacagactt

SEQ ID NO: 63298 - DNA, 20 bp, Artificial Sequence
  Description of Artificial Sequence: Synthetic oligonucleotide
  Target: SCNA; (+) strand; PAM type: YTN; PAM sequence: CTA
gtgtgattcacagacttcag

SEQ ID NO: 63299 - DNA, 20 bp, Artificial Sequence
  Description of Artificial Sequence: Synthetic oligonucleotide
  Target: SCNA; (+) strand; PAM type: YTN; PAM sequence: TTC
acagacttcaggaaaacagt

SEQ ID NO: 63300 - DNA, 20 bp, Artificial Sequence
  Description of Artificial Sequence: Synthetic oligonucleotide
  Target: SCNA; (+) strand; PAM type: YTN; PAM sequence: CTT
caggaaaacagtttgcttac

SEQ ID NO: 63301 - DNA, 20 bp, Artificial Sequence
  Description of Artificial Sequence: Synthetic oligonucleotide
  Target: SCNA; (+) strand; PAM type: YTN; PAM sequence: TTC
aggaaaacagtttgcttact

SEQ ID NO: 63302 - DNA, 20 bp, Artificial Sequence
  Description of Artificial Sequence: Synthetic oligonucleotide
  Target: SCNA; (+) strand; PAM type: YTN; PAM sequence: TTT
gcttactagattaccagttt

SEQ ID NO: 63303 - DNA, 20 bp, Artificial Sequence
  Description of Artificial Sequence: Synthetic oligonucleotide
  Target: SCNA; (+) strand; PAM type: YTN; PAM sequence: TTG
cttactagattaccagtttg

SEQ ID NO: 63304 - DNA, 20 bp, Artificial Sequence
  Description of Artificial Sequence: Synthetic oligonucleotide
  Target: SCNA; (+) strand; PAM type: YTN; PAM sequence: CTT
actagattaccagtttgtta

SEQ ID NO: 63305 - DNA, 20 bp, Artificial Sequence
  Description of Artificial Sequence: Synthetic oligonucleotide
  Target: SCNA; (+) strand; PAM type: YTN; PAM sequence: TTA
ctagattaccagtttgttat

SEQ ID NO: 63306 - DNA, 20 bp, Artificial Sequence
  Description of Artificial Sequence: Synthetic oligonucleotide
  Target: SCNA; (+) strand; PAM type: YTN; PAM sequence: CTA
gattaccagtttgttataaa

SEQ ID NO: 63307 - DNA, 20 bp, Artificial Sequence
  Description of Artificial Sequence: Synthetic oligonucleotide
  Target: SCNA; (+) strand; PAM type: YTN; PAM sequence: TTA
ccagtttgttataaaaggat

SEQ ID NO: 63308 - DNA, 20 bp, Artificial Sequence
  Description of Artificial Sequence: Synthetic oligonucleotide
  Target: SCNA; (+) strand; PAM type: YTN; PAM sequence: TTT
gttataaaaggatacaactc

SEQ ID NO: 63309 - DNA, 20 bp, Artificial Sequence
  Description of Artificial Sequence: Synthetic oligonucleotide
  Target: SCNA; (+) strand; PAM type: YTN; PAM sequence: TTG
ttataaaaggatacaactca

SEQ ID NO: 63310 - DNA, 20 bp, Artificial Sequence
  Description of Artificial Sequence: Synthetic oligonucleotide
  Target: SCNA; (+) strand; PAM type: YTN; PAM sequence: TTA
taaaaggatacaactcagga

SEQ ID NO: 63311 - DNA, 20 bp, Artificial Sequence
  Description of Artificial Sequence: Synthetic oligonucleotide
  Target: SCNA; (+) strand; PAM type: YTN; PAM sequence: CTC
aggaacagccagatggaaga

SEQ ID NO: 63312 - DNA, 20 bp, Artificial Sequence
  Description of Artificial Sequence: Synthetic oligonucleotide
  Target: SCNA; (+) strand; PAM type: YTN; PAM sequence: CTT
gcatgccttctctggacaca

SEQ ID NO: 63313 - DNA, 20 bp, Artificial Sequence
  Description of Artificial Sequence: Synthetic oligonucleotide
  Target: SCNA; (+) strand; PAM type: YTN; PAM sequence: TTG
catgccttctctggacacac

SEQ ID NO: 63314 - DNA, 20 bp, Artificial Sequence
  Description of Artificial Sequence: Synthetic oligonucleotide
  Target: SCNA; (+) strand; PAM type: YTN; PAM sequence: CTT
ctctggacacaccacaattc

SEQ ID NO: 63315 - DNA, 20 bp, Artificial Sequence
  Description of Artificial Sequence: Synthetic oligonucleotide
  Target: SCNA; (+) strand; PAM type: YTN; PAM sequence: TTC
tctggacacaccacaattcc

SEQ ID NO: 63316 - DNA, 20 bp, Artificial Sequence
  Description of Artificial Sequence: Synthetic oligonucleotide
  Target: SCNA; (+) strand; PAM type: YTN; PAM sequence: CTC
tggacacaccacaattccca

SEQ ID NO: 63317 - DNA, 20 bp, Artificial Sequence
  Description of Artificial Sequence: Synthetic oligonucleotide
  Target: SCNA; (+) strand; PAM type: YTN; PAM sequence: CTG
gacacaccacaattcccagc

SEQ ID NO: 63318 - DNA, 20 bp, Artificial Sequence
  Description of Artificial Sequence: Synthetic oligonucleotide
  Target: SCNA; (+) strand; PAM type: YTN; PAM sequence: TTC
ccagcacctctgcatgttca

SEQ ID NO: 63319 - DNA, 20 bp, Artificial Sequence
  Description of Artificial Sequence: Synthetic oligonucleotide
  Target: SCNA; (+) strand; PAM type: YTN; PAM sequence: CTC
tgcatgttcacctatttcaa

SEQ ID NO: 63320 - DNA, 20 bp, Artificial Sequence
  Description of Artificial Sequence: Synthetic oligonucleotide
  Target: SCNA; (+) strand; PAM type: YTN; PAM sequence: CTG
catgttcacctatttcaaag

SEQ ID NO: 63321 - DNA, 20 bp, Artificial Sequence
  Description of Artificial Sequence: Synthetic oligonucleotide
  Target: SCNA; (+) strand; PAM type: YTN; PAM sequence: TTC
acctatttcaaagcactctg

SEQ ID NO: 63322 - DNA, 20 bp, Artificial Sequence
  Description of Artificial Sequence: Synthetic oligonucleotide
  Target: SCNA; (+) strand; PAM type: YTN; PAM sequence: CTA
tttcaaagcactctgaatcc

SEQ ID NO: 63323 - DNA, 20 bp, Artificial Sequence
  Description of Artificial Sequence: Synthetic oligonucleotide
  Target: SCNA; (+) strand; PAM type: YTN; PAM sequence: TTT
caaagcactctgaatcctgt

SEQ ID NO: 63324 - DNA, 20 bp, Artificial Sequence
  Description of Artificial Sequence: Synthetic oligonucleotide
  Target: SCNA; (+) strand; PAM type: YTN; PAM sequence: TTC
aaagcactctgaatcctgtc

SEQ ID NO: 63325 - DNA, 20 bp, Artificial Sequence
  Description of Artificial Sequence: Synthetic oligonucleotide
  Target: SCNA; (+) strand; PAM type: YTN; PAM sequence: CTC
tgaatcctgtcttttaggga

SEQ ID NO: 63326 - DNA, 20 bp, Artificial Sequence
  Description of Artificial Sequence: Synthetic oligonucleotide
  Target: SCNA; (+) strand; PAM type: YTN; PAM sequence: CTG
aatcctgtcttttagggatt

SEQ ID NO: 63327 - DNA, 20 bp, Artificial Sequence
  Description of Artificial Sequence: Synthetic oligonucleotide
  Target: SCNA; (+) strand; PAM type: YTN; PAM sequence: CTG
tcttttagggatttttatgg

SEQ ID NO: 63328 - DNA, 20 bp, Artificial Sequence
  Description of Artificial Sequence: Synthetic oligonucleotide
  Target: SCNA; (+) strand; PAM type: YTN; PAM sequence: CTT
ttagggatttttatggagtc

SEQ ID NO: 63329 - DNA, 20 bp, Artificial Sequence
  Description of Artificial Sequence: Synthetic oligonucleotide
  Target: SCNA; (+) strand; PAM type: YTN; PAM sequence: TTT
tagggatttttatggagtct

SEQ ID NO: 63330 - DNA, 20 bp, Artificial Sequence
  Description of Artificial Sequence: Synthetic oligonucleotide
  Target: SCNA; (+) strand; PAM type: YTN; PAM sequence: TTT
agggatttttatggagtctt

SEQ ID NO: 63331 - DNA, 20 bp, Artificial Sequence
  Description of Artificial Sequence: Synthetic oligonucleotide
  Target: SCNA; (+) strand; PAM type: YTN; PAM sequence: TTA
gggatttttatggagtcttc

SEQ ID NO: 63332 - DNA, 20 bp, Artificial Sequence
  Description of Artificial Sequence: Synthetic oligonucleotide
  Target: SCNA; (+) strand; PAM type: YTN; PAM sequence: TTT
ttatggagtcttcatcatgg

SEQ ID NO: 63333 - DNA, 20 bp, Artificial Sequence
  Description of Artificial Sequence: Synthetic oligonucleotide
  Target: SCNA; (+) strand; PAM type: YTN; PAM sequence: TTT
tatggagtcttcatcatgga

SEQ ID NO: 63334 - DNA, 20 bp, Artificial Sequence
  Description of Artificial Sequence: Synthetic oligonucleotide
  Target: SCNA; (+) strand; PAM type: YTN; PAM sequence: TTT
atggagtcttcatcatggaa

SEQ ID NO: 63335 - DNA, 20 bp, Artificial Sequence
  Description of Artificial Sequence: Synthetic oligonucleotide
  Target: SCNA; (+) strand; PAM type: YTN; PAM sequence: TTA
tggagtcttcatcatggaag

SEQ ID NO: 63336 - DNA, 20 bp, Artificial Sequence
  Description of Artificial Sequence: Synthetic oligonucleotide
  Target: SCNA; (+) strand; PAM type: YTN; PAM sequence: CTT
catcatggaagcattgttgc

SEQ ID NO: 63337 - DNA, 20 bp, Artificial Sequence
  Description of Artificial Sequence: Synthetic oligonucleotide
  Target: SCNA; (+) strand; PAM type: YTN; PAM sequence: TTC
atcatggaagcattgttgct

SEQ ID NO: 63338 - DNA, 20 bp, Artificial Sequence
  Description of Artificial Sequence: Synthetic oligonucleotide
  Target: SCNA; (+) strand; PAM type: YTN; PAM sequence: TTG
ttgcttattaactcaatctc

SEQ ID NO: 63339 - DNA, 20 bp, Artificial Sequence
  Description of Artificial Sequence: Synthetic oligonucleotide
  Target: SCNA; (+) strand; PAM type: YTN; PAM sequence: TTG
cttattaactcaatctccag

SEQ ID NO: 63340 - DNA, 20 bp, Artificial Sequence
  Description of Artificial Sequence: Synthetic oligonucleotide
  Target: SCNA; (+) strand; PAM type: YTN; PAM sequence: CTT
attaactcaatctccagctc

SEQ ID NO: 63341 - DNA, 20 bp, Artificial Sequence
  Description of Artificial Sequence: Synthetic oligonucleotide
  Target: SCNA; (+) strand; PAM type: YTN; PAM sequence: TTA
ttaactcaatctccagctcc

SEQ ID NO: 63342 - DNA, 20 bp, Artificial Sequence
  Description of Artificial Sequence: Synthetic oligonucleotide
  Target: SCNA; (+) strand; PAM type: YTN; PAM sequence: TTA
actcaatctccagctcctct

SEQ ID NO: 63343 - DNA, 20 bp, Artificial Sequence
  Description of Artificial Sequence: Synthetic oligonucleotide
  Target: SCNA; (+) strand; PAM type: YTN; PAM sequence: CTC
aatctccagctcctcttctc

SEQ ID NO: 63344 - DNA, 20 bp, Artificial Sequence
  Description of Artificial Sequence: Synthetic oligonucleotide
  Target: SCNA; (+) strand; PAM type: YTN; PAM sequence: CTC
cagctcctcttctctcccgt

SEQ ID NO: 63345 - DNA, 20 bp, Artificial Sequence
  Description of Artificial Sequence: Synthetic oligonucleotide
  Target: SCNA; (+) strand; PAM type: YTN; PAM sequence: CTC
ctcttctctcccgtccccag

SEQ ID NO: 63346 - DNA, 20 bp, Artificial Sequence
  Description of Artificial Sequence: Synthetic oligonucleotide
  Target: SCNA; (+) strand; PAM type: YTN; PAM sequence: CTC
ttctctcccgtccccagaag

SEQ ID NO: 63347 - DNA, 20 bp, Artificial Sequence
  Description of Artificial Sequence: Synthetic oligonucleotide
  Target: SCNA; (+) strand; PAM type: YTN; PAM sequence: CTT
ctctcccgtccccagaagat

SEQ ID NO: 63348 - DNA, 20 bp, Artificial Sequence
  Description of Artificial Sequence: Synthetic oligonucleotide
  Target: SCNA; (+) strand; PAM type: YTN; PAM sequence: TTC
tctcccgtccccagaagatg

SEQ ID NO: 63349 - DNA, 20 bp, Artificial Sequence
  Description of Artificial Sequence: Synthetic oligonucleotide
  Target: SCNA; (+) strand; PAM type: YTN; PAM sequence: CTC
tcccgtccccagaagatgtg

SEQ ID NO: 63350 - DNA, 20 bp, Artificial Sequence
  Description of Artificial Sequence: Synthetic oligonucleotide
  Target: SCNA; (+) strand; PAM type: YTN; PAM sequence: CTC
ccgtccccagaagatgtgaa

SEQ ID NO: 63351 - DNA, 20 bp, Artificial Sequence
  Description of Artificial Sequence: Synthetic oligonucleotide
  Target: SCNA; (+) strand; PAM type: YTN; PAM sequence: CTT
caagcttcttatcatggctt

SEQ ID NO: 63352 - DNA, 20 bp, Artificial Sequence
  Description of Artificial Sequence: Synthetic oligonucleotide
  Target: SCNA; (+) strand; PAM type: YTN; PAM sequence: TTC
aagcttcttatcatggcttg

SEQ ID NO: 63353 - DNA, 20 bp, Artificial Sequence
  Description of Artificial Sequence: Synthetic oligonucleotide
  Target: SCNA; (+) strand; PAM type: YTN; PAM sequence: CTT
cttatcatggcttgaccttt

SEQ ID NO: 63354 - DNA, 20 bp, Artificial Sequence
  Description of Artificial Sequence: Synthetic oligonucleotide
  Target: SCNA; (+) strand; PAM type: YTN; PAM sequence: TTC
ttatcatggcttgacctttc

SEQ ID NO: 63355 - DNA, 20 bp, Artificial Sequence
  Description of Artificial Sequence: Synthetic oligonucleotide
  Target: SCNA; (+) strand; PAM type: YTN; PAM sequence: CTT
atcatggcttgacctttctg

SEQ ID NO: 63356 - DNA, 20 bp, Artificial Sequence
  Description of Artificial Sequence: Synthetic oligonucleotide
  Target: SCNA; (+) strand; PAM type: YTN; PAM sequence: TTA
tcatggcttgacctttctgg

SEQ ID NO: 63357 - DNA, 20 bp, Artificial Sequence
  Description of Artificial Sequence: Synthetic oligonucleotide
  Target: SCNA; (+) strand; PAM type: YTN; PAM sequence: CTT
gacctttctggtgaccagcc

SEQ ID NO: 63358 - DNA, 20 bp, Artificial Sequence
  Description of Artificial Sequence: Synthetic oligonucleotide
  Target: SCNA; (+) strand; PAM type: YTN; PAM sequence: TTG
acctttctggtgaccagccc

SEQ ID NO: 63359 - DNA, 20 bp, Artificial Sequence
  Description of Artificial Sequence: Synthetic oligonucleotide
  Target: SCNA; (+) strand; PAM type: YTN; PAM sequence: CTT
tctggtgaccagcccccatc

SEQ ID NO: 63360 - DNA, 20 bp, Artificial Sequence
  Description of Artificial Sequence: Synthetic oligonucleotide
  Target: SCNA; (+) strand; PAM type: YTN; PAM sequence: TTT
ctggtgaccagcccccatcc

SEQ ID NO: 63361 - DNA, 20 bp, Artificial Sequence
  Description of Artificial Sequence: Synthetic oligonucleotide
  Target: SCNA; (+) strand; PAM type: YTN; PAM sequence: TTC
tggtgaccagcccccatcca

SEQ ID NO: 63362 - DNA, 20 bp, Artificial Sequence
  Description of Artificial Sequence: Synthetic oligonucleotide
  Target: SCNA; (+) strand; PAM type: YTN; PAM sequence: CTG
gtgaccagcccccatccagg

SEQ ID NO: 63363 - DNA, 20 bp, Artificial Sequence
  Description of Artificial Sequence: Synthetic oligonucleotide
  Target: SCNA; (+) strand; PAM type: YTN; PAM sequence: CTT
cattagaagagaagatgcta

SEQ ID NO: 63364 - DNA, 20 bp, Artificial Sequence
  Description of Artificial Sequence: Synthetic oligonucleotide
  Target: SCNA; (+) strand; PAM type: YTN; PAM sequence: TTC
attagaagagaagatgctac

SEQ ID NO: 63365 - DNA, 20 bp, Artificial Sequence
  Description of Artificial Sequence: Synthetic oligonucleotide
  Target: SCNA; (+) strand; PAM type: YTN; PAM sequence: TTA
gaagagaagatgctactctc

SEQ ID NO: 63366 - DNA, 20 bp, Artificial Sequence
  Description of Artificial Sequence: Synthetic oligonucleotide
  Target: SCNA; (+) strand; PAM type: YTN; PAM sequence: CTA
ctctcacccagggactaagg

SEQ ID NO: 63367 - DNA, 20 bp, Artificial Sequence
  Description of Artificial Sequence: Synthetic oligonucleotide
  Target: SCNA; (+) strand; PAM type: YTN; PAM sequence: CTC
tcacccagggactaaggagc

SEQ ID NO: 63368 - DNA, 20 bp, Artificial Sequence
  Description of Artificial Sequence: Synthetic oligonucleotide
  Target: SCNA; (+) strand; PAM type: YTN; PAM sequence: CTC
acccagggactaaggagctc

SEQ ID NO: 63369 - DNA, 20 bp, Artificial Sequence
  Description of Artificial Sequence: Synthetic oligonucleotide
  Target: SCNA; (+) strand; PAM type: YTN; PAM sequence: CTA
aggagctctgtcagaaagca

SEQ ID NO: 63370 - DNA, 20 bp, Artificial Sequence
  Description of Artificial Sequence: Synthetic oligonucleotide
  Target: SCNA; (+) strand; PAM type: YTN; PAM sequence: CTC
tgtcagaaagcagagtcaaa

SEQ ID NO: 63371 - DNA, 20 bp, Artificial Sequence
  Description of Artificial Sequence: Synthetic oligonucleotide
  Target: SCNA; (+) strand; PAM type: YTN; PAM sequence: CTG
tcagaaagcagagtcaaaga

SEQ ID NO: 63372 - DNA, 20 bp, Artificial Sequence
  Description of Artificial Sequence: Synthetic oligonucleotide
  Target: SCNA; (+) strand; PAM type: YTN; PAM sequence: TTA
gaacaaaagatgaccctagc

SEQ ID NO: 63373 - DNA, 20 bp, Artificial Sequence
  Description of Artificial Sequence: Synthetic oligonucleotide
  Target: SCNA; (+) strand; PAM type: YTN; PAM sequence: CTA
gcacccctactactcaggaa

SEQ ID NO: 63374 - DNA, 20 bp, Artificial Sequence
  Description of Artificial Sequence: Synthetic oligonucleotide
  Target: SCNA; (+) strand; PAM type: YTN; PAM sequence: CTA
ctactcaggaaattacaagg

SEQ ID NO: 63375 - DNA, 20 bp, Artificial Sequence
  Description of Artificial Sequence: Synthetic oligonucleotide
  Target: SCNA; (+) strand; PAM type: YTN; PAM sequence: CTA
ctcaggaaattacaagggtt

SEQ ID NO: 63376 - DNA, 20 bp, Artificial Sequence
  Description of Artificial Sequence: Synthetic oligonucleotide
  Target: SCNA; (+) strand; PAM type: YTN; PAM sequence: CTC
aggaaattacaagggtttta

SEQ ID NO: 63377 - DNA, 20 bp, Artificial Sequence
  Description of Artificial Sequence: Synthetic oligonucleotide
  Target: SCNA; (+) strand; PAM type: YTN; PAM sequence: TTA
caagggttttaggagctctt

SEQ ID NO: 63378 - DNA, 20 bp, Artificial Sequence
  Description of Artificial Sequence: Synthetic oligonucleotide
  Target: SCNA; (+) strand; PAM type: YTN; PAM sequence: TTT
taggagctctttgtaagaac

SEQ ID NO: 63379 - DNA, 20 bp, Artificial Sequence
  Description of Artificial Sequence: Synthetic oligonucleotide
  Target: SCNA; (+) strand; PAM type: YTN; PAM sequence: TTT
aggagctctttgtaagaact

SEQ ID NO: 63380 - DNA, 20 bp, Artificial Sequence
  Description of Artificial Sequence: Synthetic oligonucleotide
  Target: SCNA; (+) strand; PAM type: YTN; PAM sequence: TTA
ggagctctttgtaagaactg

SEQ ID NO: 63381 - DNA, 20 bp, Artificial Sequence
  Description of Artificial Sequence: Synthetic oligonucleotide
  Target: SCNA; (+) strand; PAM type: YTN; PAM sequence: CTC
tttgtaagaactggaggcag

SEQ ID NO: 63382 - DNA, 20 bp, Artificial Sequence
  Description of Artificial Sequence: Synthetic oligonucleotide
  Target: SCNA; (+) strand; PAM type: YTN; PAM sequence: CTT
tgtaagaactggaggcagaa

SEQ ID NO: 63383 - DNA, 20 bp, Artificial Sequence
  Description of Artificial Sequence: Synthetic oligonucleotide
  Target: SCNA; (+) strand; PAM type: YTN; PAM sequence: TTT
gtaagaactggaggcagaaa

SEQ ID NO: 63384 - DNA, 20 bp, Artificial Sequence
  Description of Artificial Sequence: Synthetic oligonucleotide
  Target: SCNA; (+) strand; PAM type: YTN; PAM sequence: TTG
taagaactggaggcagaaac

SEQ ID NO: 63385 - DNA, 20 bp, Artificial Sequence
  Description of Artificial Sequence: Synthetic oligonucleotide
  Target: SCNA; (+) strand; PAM type: YTN; PAM sequence: CTG
gaggcagaaaccaaatacat

SEQ ID NO: 63386 - DNA, 20 bp, Artificial Sequence
  Description of Artificial Sequence: Synthetic oligonucleotide
  Target: SCNA; (+) strand; PAM type: YTN; PAM sequence: TTT
tcatatatgtatatatttat

SEQ ID NO: 63387 - DNA, 20 bp, Artificial Sequence
  Description of Artificial Sequence: Synthetic oligonucleotide
  Target: SCNA; (+) strand; PAM type: YTN; PAM sequence: TTT
catatatgtatatatttatt

SEQ ID NO: 63388 - DNA, 20 bp, Artificial Sequence
  Description of Artificial Sequence: Synthetic oligonucleotide
  Target: SCNA; (+) strand; PAM type: YTN; PAM sequence: TTC
atatatgtatatatttatta

SEQ ID NO: 63389 - DNA, 20 bp, Artificial Sequence
  Description of Artificial Sequence: Synthetic oligonucleotide
  Target: SCNA; (+) strand; PAM type: YTN; PAM sequence: TTT
attatgtcacaaatagctac

SEQ ID NO: 63390 - DNA, 20 bp, Artificial Sequence
  Description of Artificial Sequence: Synthetic oligonucleotide
  Target: SCNA; (+) strand; PAM type: YTN; PAM sequence: TTA
ttatgtcacaaatagctaca

SEQ ID NO: 63391 - DNA, 20 bp, Artificial Sequence
  Description of Artificial Sequence: Synthetic oligonucleotide
  Target: SCNA; (+) strand; PAM type: YTN; PAM sequence: TTA
tgtcacaaatagctacatac

SEQ ID NO: 63392 - DNA, 20 bp, Artificial Sequence
  Description of Artificial Sequence: Synthetic oligonucleotide
  Target: SCNA; (+) strand; PAM type: YTN; PAM sequence: CTA
catactggataagccagaaa

SEQ ID NO: 63393 - DNA, 20 bp, Artificial Sequence
  Description of Artificial Sequence: Synthetic oligonucleotide
  Target: SCNA; (+) strand; PAM type: YTN; PAM sequence: CTG
gataagccagaaagatgagg

SEQ ID NO: 63394 - DNA, 20 bp, Artificial Sequence
  Description of Artificial Sequence: Synthetic oligonucleotide
  Target: SCNA; (+) strand; PAM type: YTN; PAM sequence: TTT
gcatctcacactagtgcaga

SEQ ID NO: 63395 - DNA, 20 bp, Artificial Sequence
  Description of Artificial Sequence: Synthetic oligonucleotide
  Target: SCNA; (+) strand; PAM type: YTN; PAM sequence: TTG
catctcacactagtgcagag

SEQ ID NO: 63396 - DNA, 20 bp, Artificial Sequence
  Description of Artificial Sequence: Synthetic oligonucleotide
  Target: SCNA; (+) strand; PAM type: YTN; PAM sequence: CTC
acactagtgcagagattctg

SEQ ID NO: 63397 - DNA, 20 bp, Artificial Sequence
  Description of Artificial Sequence: Synthetic oligonucleotide
  Target: SCNA; (+) strand; PAM type: YTN; PAM sequence: CTA
gtgcagagattctgaaaaag

SEQ ID NO: 63398 - DNA, 20 bp, Artificial Sequence
  Description of Artificial Sequence: Synthetic oligonucleotide
  Target: SCNA; (+) strand; PAM type: YTN; PAM sequence: TTC
tgaaaaagaccccacttgga

SEQ ID NO: 63399 - DNA, 20 bp, Artificial Sequence
  Description of Artificial Sequence: Synthetic oligonucleotide
  Target: SCNA; (+) strand; PAM type: YTN; PAM sequence: CTG
aaaaagaccccacttggaat

SEQ ID NO: 63400 - DNA, 20 bp, Artificial Sequence
  Description of Artificial Sequence: Synthetic oligonucleotide
  Target: SCNA; (+) strand; PAM type: YTN; PAM sequence: CTT
ggaataccaaaccacacatt

SEQ ID NO: 63401 - DNA, 20 bp, Artificial Sequence
  Description of Artificial Sequence: Synthetic oligonucleotide
  Target: SCNA; (+) strand; PAM type: YTN; PAM sequence: TTG
gaataccaaaccacacatta

SEQ ID NO: 63402 - DNA, 20 bp, Artificial Sequence
  Description of Artificial Sequence: Synthetic oligonucleotide
  Target: SCNA; (+) strand; PAM type: YTN; PAM sequence: TTA
gattgttctgttcccaattg

SEQ ID NO: 63403 - DNA, 20 bp, Artificial Sequence
  Description of Artificial Sequence: Synthetic oligonucleotide
  Target: SCNA; (+) strand; PAM type: YTN; PAM sequence: TTG
ttctgttcccaattgtgtgc

SEQ ID NO: 63404 - DNA, 20 bp, Artificial Sequence
  Description of Artificial Sequence: Synthetic oligonucleotide
  Target: SCNA; (+) strand; PAM type: YTN; PAM sequence: TTC
tgttcccaattgtgtgccaa

SEQ ID NO: 63405 - DNA, 20 bp, Artificial Sequence
  Description of Artificial Sequence: Synthetic oligonucleotide
  Target: SCNA; (+) strand; PAM type: YTN; PAM sequence: CTG
ttcccaattgtgtgccaaag

SEQ ID NO: 63406 - DNA, 20 bp, Artificial Sequence
  Description of Artificial Sequence: Synthetic oligonucleotide
  Target: SCNA; (+) strand; PAM type: YTN; PAM sequence: TTC
ccaattgtgtgccaaagtgc

SEQ ID NO: 63407 - DNA, 20 bp, Artificial Sequence
  Description of Artificial Sequence: Synthetic oligonucleotide
  Target: SCNA; (+) strand; PAM type: YTN; PAM sequence: TTG
tgtgccaaagtgcactctga

SEQ ID NO: 63408 - DNA, 20 bp, Artificial Sequence
  Description of Artificial Sequence: Synthetic oligonucleotide
  Target: SCNA; (+) strand; PAM type: YTN; PAM sequence: CTC
tgaactgttttggtaaagcc

SEQ ID NO: 63409 - DNA, 20 bp, Artificial Sequence
  Description of Artificial Sequence: Synthetic oligonucleotide
  Target: SCNA; (+) strand; PAM type: YTN; PAM sequence: CTG
aactgttttggtaaagccga

SEQ ID NO: 63410 - DNA, 20 bp, Artificial Sequence
  Description of Artificial Sequence: Synthetic oligonucleotide
  Target: SCNA; (+) strand; PAM type: YTN; PAM sequence: CTG
ttttggtaaagccgaccgtg

SEQ ID NO: 63411 - DNA, 20 bp, Artificial Sequence
  Description of Artificial Sequence: Synthetic oligonucleotide
  Target: SCNA; (+) strand; PAM type: YTN; PAM sequence: TTT
tggtaaagccgaccgtggag

SEQ ID NO: 63412 - DNA, 20 bp, Artificial Sequence
  Description of Artificial Sequence: Synthetic oligonucleotide
  Target: SCNA; (+) strand; PAM type: YTN; PAM sequence: TTT
ggtaaagccgaccgtggagt

SEQ ID NO: 63413 - DNA, 20 bp, Artificial Sequence
  Description of Artificial Sequence: Synthetic oligonucleotide
  Target: SCNA; (+) strand; PAM type: YTN; PAM sequence: TTG
gtaaagccgaccgtggagtc

SEQ ID NO: 63414 - DNA, 20 bp, Artificial Sequence
  Description of Artificial Sequence: Synthetic oligonucleotide
  Target: SCNA; (+) strand; PAM type: YTN; PAM sequence: CTG
aataacttgggagaatgtaa

SEQ ID NO: 63415 - DNA, 20 bp, Artificial Sequence
  Description of Artificial Sequence: Synthetic oligonucleotide
  Target: SCNA; (+) strand; PAM type: YTN; PAM sequence: CTT
gggagaatgtaagtctgcaa

SEQ ID NO: 63416 - DNA, 20 bp, Artificial Sequence
  Description of Artificial Sequence: Synthetic oligonucleotide
  Target: SCNA; (+) strand; PAM type: YTN; PAM sequence: TTG
ggagaatgtaagtctgcaaa

SEQ ID NO: 63417 - DNA, 20 bp, Artificial Sequence
  Description of Artificial Sequence: Synthetic oligonucleotide
  Target: SCNA; (+) strand; PAM type: YTN; PAM sequence: CTG
caaaataaacctaggactgg

SEQ ID NO: 63418 - DNA, 20 bp, Artificial Sequence
  Description of Artificial Sequence: Synthetic oligonucleotide
  Target: SCNA; (+) strand; PAM type: YTN; PAM sequence: CTA
ggactggattgatcctcagg

SEQ ID NO: 63419 - DNA, 20 bp, Artificial Sequence
  Description of Artificial Sequence: Synthetic oligonucleotide
  Target: SCNA; (+) strand; PAM type: YTN; PAM sequence: CTG
gattgatcctcaggccactt

SEQ ID NO: 63420 - DNA, 20 bp, Artificial Sequence
  Description of Artificial Sequence: Synthetic oligonucleotide
  Target: SCNA; (+) strand; PAM type: YTN; PAM sequence: TTG
atcctcaggccacttggcag

SEQ ID NO: 63421 - DNA, 20 bp, Artificial Sequence
  Description of Artificial Sequence: Synthetic oligonucleotide
  Target: SCNA; (+) strand; PAM type: YTN; PAM sequence: CTC
aggccacttggcaggtgaat

SEQ ID NO: 63422 - DNA, 20 bp, Artificial Sequence
  Description of Artificial Sequence: Synthetic oligonucleotide
  Target: SCNA; (+) strand; PAM type: YTN; PAM sequence: CTT
ggcaggtgaatgtctcggga

SEQ ID NO: 63423 - DNA, 20 bp, Artificial Sequence
  Description of Artificial Sequence: Synthetic oligonucleotide
  Target: SCNA; (+) strand; PAM type: YTN; PAM sequence: TTG
gcaggtgaatgtctcgggag

SEQ ID NO: 63424 - DNA, 20 bp, Artificial Sequence
  Description of Artificial Sequence: Synthetic oligonucleotide
  Target: SCNA; (+) strand; PAM type: YTN; PAM sequence: CTC
gggagtgaatatgagacaag

SEQ ID NO: 63425 - DNA, 20 bp, Artificial Sequence
  Description of Artificial Sequence: Synthetic oligonucleotide
  Target: SCNA; (+) strand; PAM type: YTN; PAM sequence: CTT
cctgaaaaggcttatatgac

SEQ ID NO: 63426 - DNA, 20 bp, Artificial Sequence
  Description of Artificial Sequence: Synthetic oligonucleotide
  Target: SCNA; (+) strand; PAM type: YTN; PAM sequence: TTC
ctgaaaaggcttatatgact

SEQ ID NO: 63427 - DNA, 20 bp, Artificial Sequence
  Description of Artificial Sequence: Synthetic oligonucleotide
  Target: SCNA; (+) strand; PAM type: YTN; PAM sequence: CTG
aaaaggcttatatgacttaa

SEQ ID NO: 63428 - DNA, 20 bp, Artificial Sequence
  Description of Artificial Sequence: Synthetic oligonucleotide
  Target: SCNA; (+) strand; PAM type: YTN; PAM sequence: CTT
atatgacttaaagaactttt

SEQ ID NO: 63429 - DNA, 20 bp, Artificial Sequence
  Description of Artificial Sequence: Synthetic oligonucleotide
  Target: SCNA; (+) strand; PAM type: YTN; PAM sequence: TTA
tatgacttaaagaacttttt

SEQ ID NO: 63430 - DNA, 20 bp, Artificial Sequence
  Description of Artificial Sequence: Synthetic oligonucleotide
  Target: SCNA; (+) strand; PAM type: YTN; PAM sequence: CTT
aaagaactttttgtttaagt

SEQ ID NO: 63431 - DNA, 20 bp, Artificial Sequence
  Description of Artificial Sequence: Synthetic oligonucleotide
  Target: SCNA; (+) strand; PAM type: YTN; PAM sequence: TTA
aagaactttttgtttaagtg

SEQ ID NO: 63432 - DNA, 20 bp, Artificial Sequence
  Description of Artificial Sequence: Synthetic oligonucleotide
  Target: SCNA; (+) strand; PAM type: YTN; PAM sequence: CTT
tttgtttaagtgtttggtcc

SEQ ID NO: 63433 - DNA, 20 bp, Artificial Sequence
  Description of Artificial Sequence: Synthetic oligonucleotide
  Target: SCNA; (+) strand; PAM type: YTN; PAM sequence: TTT
ttgtttaagtgtttggtccc

SEQ ID NO: 63434 - DNA, 20 bp, Artificial Sequence
  Description of Artificial Sequence: Synthetic oligonucleotide
  Target: SCNA; (+) strand; PAM type: YTN; PAM sequence: TTT
tgtttaagtgtttggtccca

SEQ ID NO: 63435 - DNA, 20 bp, Artificial Sequence
  Description of Artificial Sequence: Synthetic oligonucleotide
  Target: SCNA; (+) strand; PAM type: YTN; PAM sequence: TTT
gtttaagtgtttggtcccaa

SEQ ID NO: 63436 - DNA, 20 bp, Artificial Sequence
  Description of Artificial Sequence: Synthetic oligonucleotide
  Target: SCNA; (+) strand; PAM type: YTN; PAM sequence: TTG
tttaagtgtttggtcccaaa

SEQ ID NO: 63437 - DNA, 20 bp, Artificial Sequence
  Description of Artificial Sequence: Synthetic oligonucleotide
  Target: SCNA; (+) strand; PAM type: YTN; PAM sequence: TTT
aagtgtttggtcccaaataa

SEQ ID NO: 63438 - DNA, 20 bp, Artificial Sequence
  Description of Artificial Sequence: Synthetic oligonucleotide
  Target: SCNA; (+) strand; PAM type: YTN; PAM sequence: TTA
agtgtttggtcccaaataaa

SEQ ID NO: 63439 - DNA, 20 bp, Artificial Sequence
  Description of Artificial Sequence: Synthetic oligonucleotide
  Target: SCNA; (+) strand; PAM type: YTN; PAM sequence: TTT
ggtcccaaataaactattaa

SEQ ID NO: 63440 - DNA, 20 bp, Artificial Sequence
  Description of Artificial Sequence: Synthetic oligonucleotide
  Target: SCNA; (+) strand; PAM type: YTN; PAM sequence: TTG
gtcccaaataaactattaag

SEQ ID NO: 63441 - DNA, 20 bp, Artificial Sequence
  Description of Artificial Sequence: Synthetic oligonucleotide
  Target: SCNA; (+) strand; PAM type: YTN; PAM sequence: CTA
ttaagatatataaagtaatt

SEQ ID NO: 63442 - DNA, 20 bp, Artificial Sequence
  Description of Artificial Sequence: Synthetic oligonucleotide
  Target: SCNA; (+) strand; PAM type: YTN; PAM sequence: TTA
agatatataaagtaattcac

SEQ ID NO: 63443 - DNA, 20 bp, Artificial Sequence
  Description of Artificial Sequence: Synthetic oligonucleotide
  Target: SCNA; (+) strand; PAM type: YTN; PAM sequence: TTC
actgctcaaaaattaccgtc

SEQ ID NO: 63444 - DNA, 20 bp, Artificial Sequence
  Description of Artificial Sequence: Synthetic oligonucleotide
  Target: SCNA; (+) strand; PAM type: YTN; PAM sequence: CTG
ctcaaaaattaccgtcagat

SEQ ID NO: 63445 - DNA, 20 bp, Artificial Sequence
  Description of Artificial Sequence: Synthetic oligonucleotide
  Target: SCNA; (+) strand; PAM type: YTN; PAM sequence: CTC
aaaaattaccgtcagataaa

SEQ ID NO: 63446 - DNA, 20 bp, Artificial Sequence
  Description of Artificial Sequence: Synthetic oligonucleotide
  Target: SCNA; (+) strand; PAM type: YTN; PAM sequence: TTA
ccgtcagataaatattaagg

SEQ ID NO: 63447 - DNA, 20 bp, Artificial Sequence
  Description of Artificial Sequence: Synthetic oligonucleotide
  Target: SCNA; (+) strand; PAM type: YTN; PAM sequence: TTA
agggaagaaacactttaaag

SEQ ID NO: 63448 - DNA, 20 bp, Artificial Sequence
  Description of Artificial Sequence: Synthetic oligonucleotide
  Target: SCNA; (+) strand; PAM type: YTN; PAM sequence: CTT
taaaggagaatttgtatcca

SEQ ID NO: 63449 - DNA, 20 bp, Artificial Sequence
  Description of Artificial Sequence: Synthetic oligonucleotide
  Target: SCNA; (+) strand; PAM type: YTN; PAM sequence: TTT
aaaggagaatttgtatccac

SEQ ID NO: 63450 - DNA, 20 bp, Artificial Sequence
  Description of Artificial Sequence: Synthetic oligonucleotide
  Target: SCNA; (+) strand; PAM type: YTN; PAM sequence: TTA
aaggagaatttgtatccaca

SEQ ID NO: 63451 - DNA, 20 bp, Artificial Sequence
  Description of Artificial Sequence: Synthetic oligonucleotide
  Target: SCNA; (+) strand; PAM type: YTN; PAM sequence: TTT
gtatccacataaatccttaa

SEQ ID NO: 63452 - DNA, 20 bp, Artificial Sequence
  Description of Artificial Sequence: Synthetic oligonucleotide
  Target: SCNA; (+) strand; PAM type: YTN; PAM sequence: TTG
tatccacataaatccttaaa

SEQ ID NO: 63453 - DNA, 20 bp, Artificial Sequence
  Description of Artificial Sequence: Synthetic oligonucleotide
  Target: SCNA; (+) strand; PAM type: YTN; PAM sequence: CTT
aaattcatggtcacaacttt

SEQ ID NO: 63454 - DNA, 20 bp, Artificial Sequence
  Description of Artificial Sequence: Synthetic oligonucleotide
  Target: SCNA; (+) strand; PAM type: YTN; PAM sequence: TTA
aattcatggtcacaactttc

SEQ ID NO: 63455 - DNA, 20 bp, Artificial Sequence
  Description of Artificial Sequence: Synthetic oligonucleotide
  Target: SCNA; (+) strand; PAM type: YTN; PAM sequence: TTC
atggtcacaactttcctaat

SEQ ID NO: 63456 - DNA, 20 bp, Artificial Sequence
  Description of Artificial Sequence: Synthetic oligonucleotide
  Target: SCNA; (+) strand; PAM type: YTN; PAM sequence: CTT
tcctaatctcaaattgttct

SEQ ID NO: 63457 - DNA, 20 bp, Artificial Sequence
  Description of Artificial Sequence: Synthetic oligonucleotide
  Target: SCNA; (+) strand; PAM type: YTN; PAM sequence: TTT
cctaatctcaaattgttcta

SEQ ID NO: 63458 - DNA, 20 bp, Artificial Sequence
  Description of Artificial Sequence: Synthetic oligonucleotide
  Target: SCNA; (+) strand; PAM type: YTN; PAM sequence: TTC
ctaatctcaaattgttctag

SEQ ID NO: 63459 - DNA, 20 bp, Artificial Sequence
  Description of Artificial Sequence: Synthetic oligonucleotide
  Target: SCNA; (+) strand; PAM type: YTN; PAM sequence: CTA
atctcaaattgttctaggtc

SEQ ID NO: 63460 - DNA, 20 bp, Artificial Sequence
  Description of Artificial Sequence: Synthetic oligonucleotide
  Target: SCNA; (+) strand; PAM type: YTN; PAM sequence: CTC
aaattgttctaggtcactgc

SEQ ID NO: 63461 - DNA, 20 bp, Artificial Sequence
  Description of Artificial Sequence: Synthetic oligonucleotide
  Target: SCNA; (+) strand; PAM type: YTN; PAM sequence: TTG
ttctaggtcactgctatcag

SEQ ID NO: 63462 - DNA, 20 bp, Artificial Sequence
  Description of Artificial Sequence: Synthetic oligonucleotide
  Target: SCNA; (+) strand; PAM type: YTN; PAM sequence: TTC
taggtcactgctatcagtct

SEQ ID NO: 63463 - DNA, 20 bp, Artificial Sequence
  Description of Artificial Sequence: Synthetic oligonucleotide
  Target: SCNA; (+) strand; PAM type: YTN; PAM sequence: CTA
ggtcactgctatcagtctag

SEQ ID NO: 63464 - DNA, 20 bp, Artificial Sequence
  Description of Artificial Sequence: Synthetic oligonucleotide
  Target: SCNA; (+) strand; PAM type: YTN; PAM sequence: CTG
ctatcagtctagttctgtcc

SEQ ID NO: 63465 - DNA, 20 bp, Artificial Sequence
  Description of Artificial Sequence: Synthetic oligonucleotide
  Target: SCNA; (+) strand; PAM type: YTN; PAM sequence: CTA
tcagtctagttctgtcctct

SEQ ID NO: 63466 - DNA, 20 bp, Artificial Sequence
  Description of Artificial Sequence: Synthetic oligonucleotide
  Target: SCNA; (+) strand; PAM type: YTN; PAM sequence: CTA
gttctgtcctctatttctta

SEQ ID NO: 63467 - DNA, 20 bp, Artificial Sequence
  Description of Artificial Sequence: Synthetic oligonucleotide
  Target: SCNA; (+) strand; PAM type: YTN; PAM sequence: TTC
tgtcctctatttcttaattt

SEQ ID NO: 63468 - DNA, 20 bp, Artificial Sequence
  Description of Artificial Sequence: Synthetic oligonucleotide
  Target: SCNA; (+) strand; PAM type: YTN; PAM sequence: CTG
tcctctatttcttaatttaa

SEQ ID NO: 63469 - DNA, 20 bp, Artificial Sequence
  Description of Artificial Sequence: Synthetic oligonucleotide
  Target: SCNA; (+) strand; PAM type: YTN; PAM sequence: CTC
tatttcttaatttaatacca

SEQ ID NO: 63470 - DNA, 20 bp, Artificial Sequence
  Description of Artificial Sequence: Synthetic oligonucleotide
  Target: SCNA; (+) strand; PAM type: YTN; PAM sequence: CTA
tttcttaatttaataccaat

SEQ ID NO: 63471 - DNA, 20 bp, Artificial Sequence
  Description of Artificial Sequence: Synthetic oligonucleotide
  Target: SCNA; (+) strand; PAM type: YTN; PAM sequence: TTT
cttaatttaataccaatact

SEQ ID NO: 63472 - DNA, 20 bp, Artificial Sequence
  Description of Artificial Sequence: Synthetic oligonucleotide
  Target: SCNA; (+) strand; PAM type: YTN; PAM sequence: TTC
ttaatttaataccaatactt

SEQ ID NO: 63473 - DNA, 20 bp, Artificial Sequence
  Description of Artificial Sequence: Synthetic oligonucleotide
  Target: SCNA; (+) strand; PAM type: YTN; PAM sequence: CTT
aatttaataccaatactttt

SEQ ID NO: 63474 - DNA, 20 bp, Artificial Sequence
  Description of Artificial Sequence: Synthetic oligonucleotide
  Target: SCNA; (+) strand; PAM type: YTN; PAM sequence: TTA
atttaataccaatactttta

SEQ ID NO: 63475 - DNA, 20 bp, Artificial Sequence
  Description of Artificial Sequence: Synthetic oligonucleotide
  Target: SCNA; (+) strand; PAM type: YTN; PAM sequence: TTT
aataccaatacttttaaatt

SEQ ID NO: 63476 - DNA, 20 bp, Artificial Sequence
  Description of Artificial Sequence: Synthetic oligonucleotide
  Target: SCNA; (+) strand; PAM type: YTN; PAM sequence: TTA
ataccaatacttttaaattt

SEQ ID NO: 63477 - DNA, 20 bp, Artificial Sequence
  Description of Artificial Sequence: Synthetic oligonucleotide
  Target: SCNA; (+) strand; PAM type: YTN; PAM sequence: CTT
ttaaatttttaaaatatgct

SEQ ID NO: 63478 - DNA, 20 bp, Artificial Sequence
  Description of Artificial Sequence: Synthetic oligonucleotide
  Target: SCNA; (+) strand; PAM type: YTN; PAM sequence: TTT
taaatttttaaaatatgctg

SEQ ID NO: 63479 - DNA, 20 bp, Artificial Sequence
  Description of Artificial Sequence: Synthetic oligonucleotide
  Target: SCNA; (+) strand; PAM type: YTN; PAM sequence: TTT
aaatttttaaaatatgctgc

SEQ ID NO: 63480 - DNA, 20 bp, Artificial Sequence
  Description of Artificial Sequence: Synthetic oligonucleotide
  Target: SCNA; (+) strand; PAM type: YTN; PAM sequence: TTA
aatttttaaaatatgctgct

SEQ ID NO: 63481 - DNA, 20 bp, Artificial Sequence
  Description of Artificial Sequence: Synthetic oligonucleotide
  Target: SCNA; (+) strand; PAM type: YTN; PAM sequence: TTT
ttaaaatatgctgctttagg

SEQ ID NO: 63482 - DNA, 20 bp, Artificial Sequence
  Description of Artificial Sequence: Synthetic oligonucleotide
  Target: SCNA; (+) strand; PAM type: YTN; PAM sequence: TTT
taaaatatgctgctttaggt

SEQ ID NO: 63483 - DNA, 20 bp, Artificial Sequence
  Description of Artificial Sequence: Synthetic oligonucleotide
  Target: SCNA; (+) strand; PAM type: YTN; PAM sequence: TTT
aaaatatgctgctttaggta

SEQ ID NO: 63484 - DNA, 20 bp, Artificial Sequence
  Description of Artificial Sequence: Synthetic oligonucleotide
  Target: SCNA; (+) strand; PAM type: YTN; PAM sequence: TTA
aaatatgctgctttaggtag

SEQ ID NO: 63485 - DNA, 20 bp, Artificial Sequence
  Description of Artificial Sequence: Synthetic oligonucleotide
  Target: SCNA; (+) strand; PAM type: YTN; PAM sequence: CTG
ctttaggtagatttaaaata

SEQ ID NO: 63486 - DNA, 20 bp, Artificial Sequence
  Description of Artificial Sequence: Synthetic oligonucleotide
  Target: SCNA; (+) strand; PAM type: YTN; PAM sequence: CTT
taggtagatttaaaatatat

SEQ ID NO: 63487 - DNA, 20 bp, Artificial Sequence
  Description of Artificial Sequence: Synthetic oligonucleotide
  Target: SCNA; (+) strand; PAM type: YTN; PAM sequence: TTT
aggtagatttaaaatatatc

SEQ ID NO: 63488 - DNA, 20 bp, Artificial Sequence
  Description of Artificial Sequence: Synthetic oligonucleotide
  Target: SCNA; (+) strand; PAM type: YTN; PAM sequence: TTA
ggtagatttaaaatatatcc

SEQ ID NO: 63489 - DNA, 20 bp, Artificial Sequence
  Description of Artificial Sequence: Synthetic oligonucleotide
  Target: SCNA; (+) strand; PAM type: YTN; PAM sequence: TTT
aaaatatatcctaaccgcca

SEQ ID NO: 63490 - DNA, 20 bp, Artificial Sequence
  Description of Artificial Sequence: Synthetic oligonucleotide
  Target: SCNA; (+) strand; PAM type: YTN; PAM sequence: TTA
aaatatatcctaaccgccac

SEQ ID NO: 63491 - DNA, 20 bp, Artificial Sequence
  Description of Artificial Sequence: Synthetic oligonucleotide
  Target: SCNA; (+) strand; PAM type: YTN; PAM sequence: CTA
accgccactttctaaccttc

SEQ ID NO: 63492 - DNA, 20 bp, Artificial Sequence
  Description of Artificial Sequence: Synthetic oligonucleotide
  Target: SCNA; (+) strand; PAM type: YTN; PAM sequence: CTT
tctaaccttcctgaaatata

SEQ ID NO: 63493 - DNA, 20 bp, Artificial Sequence
  Description of Artificial Sequence: Synthetic oligonucleotide
  Target: SCNA; (+) strand; PAM type: YTN; PAM sequence: TTT
ctaaccttcctgaaatatac

SEQ ID NO: 63494 - DNA, 20 bp, Artificial Sequence
  Description of Artificial Sequence: Synthetic oligonucleotide
  Target: SCNA; (+) strand; PAM type: YTN; PAM sequence: TTC
taaccttcctgaaatatact

SEQ ID NO: 63495 - DNA, 20 bp, Artificial Sequence
  Description of Artificial Sequence: Synthetic oligonucleotide
  Target: SCNA; (+) strand; PAM type: YTN; PAM sequence: CTA
accttcctgaaatatactgt

SEQ ID NO: 63496 - DNA, 20 bp, Artificial Sequence
  Description of Artificial Sequence: Synthetic oligonucleotide
  Target: SCNA; (+) strand; PAM type: YTN; PAM sequence: CTT
cctgaaatatactgttcaat

SEQ ID NO: 63497 - DNA, 20 bp, Artificial Sequence
  Description of Artificial Sequence: Synthetic oligonucleotide
  Target: SCNA; (+) strand; PAM type: YTN; PAM sequence: TTC
ctgaaatatactgttcaata

SEQ ID NO: 63498 - DNA, 20 bp, Artificial Sequence
  Description of Artificial Sequence: Synthetic oligonucleotide
  Target: SCNA; (+) strand; PAM type: YTN; PAM sequence: CTG
aaatatactgttcaataaca

SEQ ID NO: 63499 - DNA, 20 bp, Artificial Sequence
  Description of Artificial Sequence: Synthetic oligonucleotide
  Target: SCNA; (+) strand; PAM type: YTN; PAM sequence: CTG
ttcaataacaaatcctttcc

SEQ ID NO: 63500 - DNA, 20 bp, Artificial Sequence
  Description of Artificial Sequence: Synthetic oligonucleotide
  Target: SCNA; (+) strand; PAM type: YTN; PAM sequence: TTC
aataacaaatcctttccttg

SEQ ID NO: 63501 - DNA, 20 bp, Artificial Sequence
  Description of Artificial Sequence: Synthetic oligonucleotide
  Target: SCNA; (+) strand; PAM type: YTN; PAM sequence: CTT
tccttgcttaaacataactt

SEQ ID NO: 63502 - DNA, 20 bp, Artificial Sequence
  Description of Artificial Sequence: Synthetic oligonucleotide
  Target: SCNA; (+) strand; PAM type: YTN; PAM sequence: TTT
ccttgcttaaacataactta

SEQ ID NO: 63503 - DNA, 20 bp, Artificial Sequence
  Description of Artificial Sequence: Synthetic oligonucleotide
  Target: SCNA; (+) strand; PAM type: YTN; PAM sequence: TTC
cttgcttaaacataacttaa

SEQ ID NO: 63504 - DNA, 20 bp, Artificial Sequence
  Description of Artificial Sequence: Synthetic oligonucleotide
  Target: SCNA; (+) strand; PAM type: YTN; PAM sequence: CTT
gcttaaacataacttaaata

SEQ ID NO: 63505 - DNA, 20 bp, Artificial Sequence
  Description of Artificial Sequence: Synthetic oligonucleotide
  Target: SCNA; (+) strand; PAM type: YTN; PAM sequence: TTG
cttaaacataacttaaataa

SEQ ID NO: 63506 - DNA, 20 bp, Artificial Sequence
  Description of Artificial Sequence: Synthetic oligonucleotide
  Target: SCNA; (+) strand; PAM type: YTN; PAM sequence: CTT
aaacataacttaaataaaac

SEQ ID NO: 63507 - DNA, 20 bp, Artificial Sequence
  Description of Artificial Sequence: Synthetic oligonucleotide
  Target: SCNA; (+) strand; PAM type: YTN; PAM sequence: TTA
aacataacttaaataaaaca

SEQ ID NO: 63508 - DNA, 20 bp, Artificial Sequence
  Description of Artificial Sequence: Synthetic oligonucleotide
  Target: SCNA; (+) strand; PAM type: YTN; PAM sequence: CTT
aaataaaacaagaaacttac

SEQ ID NO: 63509 - DNA, 20 bp, Artificial Sequence
  Description of Artificial Sequence: Synthetic oligonucleotide
  Target: SCNA; (+) strand; PAM type: YTN; PAM sequence: TTA
aataaaacaagaaacttacc

SEQ ID NO: 63510 - DNA, 20 bp, Artificial Sequence
  Description of Artificial Sequence: Synthetic oligonucleotide
  Target: SCNA; (+) strand; PAM type: YTN; PAM sequence: CTT
accatttctctctagtgtaa

SEQ ID NO: 63511 - DNA, 20 bp, Artificial Sequence
  Description of Artificial Sequence: Synthetic oligonucleotide
  Target: SCNA; (+) strand; PAM type: YTN; PAM sequence: TTA
ccatttctctctagtgtaag

SEQ ID NO: 63512 - DNA, 20 bp, Artificial Sequence
  Description of Artificial Sequence: Synthetic oligonucleotide
  Target: SCNA; (+) strand; PAM type: YTN; PAM sequence: TTT
ctctctagtgtaagatgaca

SEQ ID NO: 63513 - DNA, 20 bp, Artificial Sequence
  Description of Artificial Sequence: Synthetic oligonucleotide
  Target: SCNA; (+) strand; PAM type: YTN; PAM sequence: TTC
tctctagtgtaagatgacac

SEQ ID NO: 63514 - DNA, 20 bp, Artificial Sequence
  Description of Artificial Sequence: Synthetic oligonucleotide
  Target: SCNA; (+) strand; PAM type: YTN; PAM sequence: CTC
tctagtgtaagatgacacat

SEQ ID NO: 63515 - DNA, 20 bp, Artificial Sequence
  Description of Artificial Sequence: Synthetic oligonucleotide
  Target: SCNA; (+) strand; PAM type: YTN; PAM sequence: CTC
tagtgtaagatgacacatgc

SEQ ID NO: 63516 - DNA, 20 bp, Artificial Sequence
  Description of Artificial Sequence: Synthetic oligonucleotide
  Target: SCNA; (+) strand; PAM type: YTN; PAM sequence: CTA
gtgtaagatgacacatgcag

SEQ ID NO: 63517 - DNA, 20 bp, Artificial Sequence
  Description of Artificial Sequence: Synthetic oligonucleotide
  Target: SCNA; (+) strand; PAM type: YTN; PAM sequence: CTT
agcactctgtagtagtctct

SEQ ID NO: 63518 - DNA, 20 bp, Artificial Sequence
  Description of Artificial Sequence: Synthetic oligonucleotide
  Target: SCNA; (+) strand; PAM type: YTN; PAM sequence: TTA
gcactctgtagtagtctctc

SEQ ID NO: 63519 - DNA, 20 bp, Artificial Sequence
  Description of Artificial Sequence: Synthetic oligonucleotide
  Target: SCNA; (+) strand; PAM type: YTN; PAM sequence: CTC
tgtagtagtctctcttcaat

SEQ ID NO: 63520 - DNA, 20 bp, Artificial Sequence
  Description of Artificial Sequence: Synthetic oligonucleotide
  Target: SCNA; (+) strand; PAM type: YTN; PAM sequence: CTG
tagtagtctctcttcaatta

SEQ ID NO: 63521 - DNA, 20 bp, Artificial Sequence
  Description of Artificial Sequence: Synthetic oligonucleotide
  Target: SCNA; (+) strand; PAM type: YTN; PAM sequence: CTC
tcttcaattaggtaaaaaag

SEQ ID NO: 63522 - DNA, 20 bp, Artificial Sequence
  Description of Artificial Sequence: Synthetic oligonucleotide
  Target: SCNA; (+) strand; PAM type: YTN; PAM sequence: CTC
ttcaattaggtaaaaaagga

SEQ ID NO: 63523 - DNA, 20 bp, Artificial Sequence
  Description of Artificial Sequence: Synthetic oligonucleotide
  Target: SCNA; (+) strand; PAM type: YTN; PAM sequence: CTT
caattaggtaaaaaaggaag

SEQ ID NO: 63524 - DNA, 20 bp, Artificial Sequence
  Description of Artificial Sequence: Synthetic oligonucleotide
  Target: SCNA; (+) strand; PAM type: YTN; PAM sequence: TTC
aattaggtaaaaaaggaagt

SEQ ID NO: 63525 - DNA, 20 bp, Artificial Sequence
  Description of Artificial Sequence: Synthetic oligonucleotide
  Target: SCNA; (+) strand; PAM type: YTN; PAM sequence: TTA
ggtaaaaaaggaagtttcta

SEQ ID NO: 63526 - DNA, 20 bp, Artificial Sequence
  Description of Artificial Sequence: Synthetic oligonucleotide
  Target: SCNA; (+) strand; PAM type: YTN; PAM sequence: TTT
ctatggtaaccatccttata

SEQ ID NO: 63527 - DNA, 20 bp, Artificial Sequence
  Description of Artificial Sequence: Synthetic oligonucleotide
  Target: SCNA; (+) strand; PAM type: YTN; PAM sequence: TTC
tatggtaaccatccttatag

SEQ ID NO: 63528 - DNA, 20 bp, Artificial Sequence
  Description of Artificial Sequence: Synthetic oligonucleotide
  Target: SCNA; (+) strand; PAM type: YTN; PAM sequence: CTA
tggtaaccatccttatagtc

SEQ ID NO: 63529 - DNA, 20 bp, Artificial Sequence
  Description of Artificial Sequence: Synthetic oligonucleotide
  Target: SCNA; (+) strand; PAM type: YTN; PAM sequence: CTT
atagtcactcattcctcctt

SEQ ID NO: 63530 - DNA, 20 bp, Artificial Sequence
  Description of Artificial Sequence: Synthetic oligonucleotide
  Target: SCNA; (+) strand; PAM type: YTN; PAM sequence: TTA
tagtcactcattcctccttc

SEQ ID NO: 63531 - DNA, 20 bp, Artificial Sequence
  Description of Artificial Sequence: Synthetic oligonucleotide
  Target: SCNA; (+) strand; PAM type: YTN; PAM sequence: CTC
attcctccttccttcctcac

SEQ ID NO: 63532 - DNA, 20 bp, Artificial Sequence
  Description of Artificial Sequence: Synthetic oligonucleotide
  Target: SCNA; (+) strand; PAM type: YTN; PAM sequence: TTC
ctccttccttcctcaccagc

SEQ ID NO: 63533 - DNA, 20 bp, Artificial Sequence
  Description of Artificial Sequence: Synthetic oligonucleotide
  Target: SCNA; (+) strand; PAM type: YTN; PAM sequence: CTC
cttccttcctcaccagcgcc

SEQ ID NO: 63534 - DNA, 20 bp, Artificial Sequence
  Description of Artificial Sequence: Synthetic oligonucleotide
  Target: SCNA; (+) strand; PAM type: YTN; PAM sequence: CTT
ccttcctcaccagcgcccaa

SEQ ID NO: 63535 - DNA, 20 bp, Artificial Sequence
  Description of Artificial Sequence: Synthetic oligonucleotide
  Target: SCNA; (+) strand; PAM type: YTN; PAM sequence: TTC
cttcctcaccagcgcccaat

SEQ ID NO: 63536 - DNA, 20 bp, Artificial Sequence
  Description of Artificial Sequence: Synthetic oligonucleotide
  Target: SCNA; (+) strand; PAM type: YTN; PAM sequence: CTT
cctcaccagcgcccaatata

SEQ ID NO: 63537 - DNA, 20 bp, Artificial Sequence
  Description of Artificial Sequence: Synthetic oligonucleotide
  Target: SCNA; (+) strand; PAM type: YTN; PAM sequence: TTC
ctcaccagcgcccaatatat

SEQ ID NO: 63538 - DNA, 20 bp, Artificial Sequence
  Description of Artificial Sequence: Synthetic oligonucleotide
  Target: SCNA; (+) strand; PAM type: YTN; PAM sequence: CTC
accagcgcccaatatatatc

SEQ ID NO: 63539 - DNA, 20 bp, Artificial Sequence
  Description of Artificial Sequence: Synthetic oligonucleotide
  Target: SCNA; (+) strand; PAM type: YTN; PAM sequence: TTA
ctcatgaatacatataaact

SEQ ID NO: 63540 - DNA, 20 bp, Artificial Sequence
  Description of Artificial Sequence: Synthetic oligonucleotide
  Target: SCNA; (+) strand; PAM type: YTN; PAM sequence: CTC
atgaatacatataaactgct

SEQ ID NO: 63541 - DNA, 20 bp, Artificial Sequence
  Description of Artificial Sequence: Synthetic oligonucleotide
  Target: SCNA; (+) strand; PAM type: YTN; PAM sequence: CTG
ctagcatgtctagaatattc

SEQ ID NO: 63542 - DNA, 20 bp, Artificial Sequence
  Description of Artificial Sequence: Synthetic oligonucleotide
  Target: SCNA; (+) strand; PAM type: YTN; PAM sequence: CTA
gcatgtctagaatattctgt

SEQ ID NO: 63543 - DNA, 20 bp, Artificial Sequence
  Description of Artificial Sequence: Synthetic oligonucleotide
  Target: SCNA; (+) strand; PAM type: YTN; PAM sequence: CTA
gaatattctgtcttgaaatt

SEQ ID NO: 63544 - DNA, 20 bp, Artificial Sequence
  Description of Artificial Sequence: Synthetic oligonucleotide
  Target: SCNA; (+) strand; PAM type: YTN; PAM sequence: TTC
tgtcttgaaattatactttc

SEQ ID NO: 63545 - DNA, 20 bp, Artificial Sequence
  Description of Artificial Sequence: Synthetic oligonucleotide
  Target: SCNA; (+) strand; PAM type: YTN; PAM sequence: CTG
tcttgaaattatactttcta

SEQ ID NO: 63546 - DNA, 20 bp, Artificial Sequence
  Description of Artificial Sequence: Synthetic oligonucleotide
  Target: SCNA; (+) strand; PAM type: YTN; PAM sequence: CTT
gaaattatactttctactag

SEQ ID NO: 63547 - DNA, 20 bp, Artificial Sequence
  Description of Artificial Sequence: Synthetic oligonucleotide
  Target: SCNA; (+) strand; PAM type: YTN; PAM sequence: TTG
aaattatactttctactagt

SEQ ID NO: 63548 - DNA, 20 bp, Artificial Sequence
  Description of Artificial Sequence: Synthetic oligonucleotide
  Target: SCNA; (+) strand; PAM type: YTN; PAM sequence: TTA
tactttctactagtgacttt

SEQ ID NO: 63549 - DNA, 20 bp, Artificial Sequence
  Description of Artificial Sequence: Synthetic oligonucleotide
  Target: SCNA; (+) strand; PAM type: YTN; PAM sequence: CTT
tctactagtgacttttagaa

SEQ ID NO: 63550 - DNA, 20 bp, Artificial Sequence
  Description of Artificial Sequence: Synthetic oligonucleotide
  Target: SCNA; (+) strand; PAM type: YTN; PAM sequence: TTT
ctactagtgacttttagaaa

SEQ ID NO: 63551 - DNA, 20 bp, Artificial Sequence
  Description of Artificial Sequence: Synthetic oligonucleotide
  Target: SCNA; (+) strand; PAM type: YTN; PAM sequence: TTC
tactagtgacttttagaaat

SEQ ID NO: 63552 - DNA, 20 bp, Artificial Sequence
  Description of Artificial Sequence: Synthetic oligonucleotide
  Target: SCNA; (+) strand; PAM type: YTN; PAM sequence: CTA
ctagtgacttttagaaatga

SEQ ID NO: 63553 - DNA, 20 bp, Artificial Sequence
  Description of Artificial Sequence: Synthetic oligonucleotide
  Target: SCNA; (+) strand; PAM type: YTN; PAM sequence: CTA
gtgacttttagaaatgacta

SEQ ID NO: 63554 - DNA, 20 bp, Artificial Sequence
  Description of Artificial Sequence: Synthetic oligonucleotide
  Target: SCNA; (+) strand; PAM type: YTN; PAM sequence: CTT
ttagaaatgactatgcccca

SEQ ID NO: 63555 - DNA, 20 bp, Artificial Sequence
  Description of Artificial Sequence: Synthetic oligonucleotide
  Target: SCNA; (+) strand; PAM type: YTN; PAM sequence: TTT
tagaaatgactatgccccag

SEQ ID NO: 63556 - DNA, 20 bp, Artificial Sequence
  Description of Artificial Sequence: Synthetic oligonucleotide
  Target: SCNA; (+) strand; PAM type: YTN; PAM sequence: TTT
agaaatgactatgccccaga

SEQ ID NO: 63557 - DNA, 20 bp, Artificial Sequence
  Description of Artificial Sequence: Synthetic oligonucleotide
  Target: SCNA; (+) strand; PAM type: YTN; PAM sequence: TTA
gaaatgactatgccccagaa

SEQ ID NO: 63558 - DNA, 20 bp, Artificial Sequence
  Description of Artificial Sequence: Synthetic oligonucleotide
  Target: SCNA; (+) strand; PAM type: YTN; PAM sequence: CTA
tgccccagaataattaaaaa

SEQ ID NO: 63559 - DNA, 20 bp, Artificial Sequence
  Description of Artificial Sequence: Synthetic oligonucleotide
  Target: SCNA; (+) strand; PAM type: YTN; PAM sequence: TTA
aaaagagaaaccaaataatt

SEQ ID NO: 63560 - DNA, 20 bp, Artificial Sequence
  Description of Artificial Sequence: Synthetic oligonucleotide
  Target: SCNA; (+) strand; PAM type: YTN; PAM sequence: TTT
ttaaattaatttatacagag

SEQ ID NO: 63561 - DNA, 20 bp, Artificial Sequence
  Description of Artificial Sequence: Synthetic oligonucleotide
  Target: SCNA; (+) strand; PAM type: YTN; PAM sequence: TTT
taaattaatttatacagagt

SEQ ID NO: 63562 - DNA, 20 bp, Artificial Sequence
  Description of Artificial Sequence: Synthetic oligonucleotide
  Target: SCNA; (+) strand; PAM type: YTN; PAM sequence: TTT
aaattaatttatacagagtt

SEQ ID NO: 63563 - DNA, 20 bp, Artificial Sequence
  Description of Artificial Sequence: Synthetic oligonucleotide
  Target: SCNA; (+) strand; PAM type: YTN; PAM sequence: TTA
aattaatttatacagagttt

SEQ ID NO: 63564 - DNA, 20 bp, Artificial Sequence
  Description of Artificial Sequence: Synthetic oligonucleotide
  Target: SCNA; (+) strand; PAM type: YTN; PAM sequence: TTA
atttatacagagtttttcac

SEQ ID NO: 63565 - DNA, 20 bp, Artificial Sequence
  Description of Artificial Sequence: Synthetic oligonucleotide
  Target: SCNA; (+) strand; PAM type: YTN; PAM sequence: TTT
atacagagtttttcaccatc

SEQ ID NO: 63566 - DNA, 20 bp, Artificial Sequence
  Description of Artificial Sequence: Synthetic oligonucleotide
  Target: SCNA; (+) strand; PAM type: YTN; PAM sequence: TTA
tacagagtttttcaccatca

SEQ ID NO: 63567 - DNA, 20 bp, Artificial Sequence
  Description of Artificial Sequence: Synthetic oligonucleotide
  Target: SCNA; (+) strand; PAM type: YTN; PAM sequence: TTT
ttcaccatcaagtttatttt

SEQ ID NO: 63568 - DNA, 20 bp, Artificial Sequence
  Description of Artificial Sequence: Synthetic oligonucleotide
  Target: SCNA; (+) strand; PAM type: YTN; PAM sequence: TTT
tcaccatcaagtttattttc

SEQ ID NO: 63569 - DNA, 20 bp, Artificial Sequence
  Description of Artificial Sequence: Synthetic oligonucleotide
  Target: SCNA; (+) strand; PAM type: YTN; PAM sequence: TTT
caccatcaagtttattttca

SEQ ID NO: 63570 - DNA, 20 bp, Artificial Sequence
  Description of Artificial Sequence: Synthetic oligonucleotide
  Target: SCNA; (+) strand; PAM type: YTN; PAM sequence: TTC
accatcaagtttattttcag

SEQ ID NO: 63571 - DNA, 20 bp, Artificial Sequence
  Description of Artificial Sequence: Synthetic oligonucleotide
  Target: SCNA; (+) strand; PAM type: YTN; PAM sequence: TTT
attttcagcacccatgggga

SEQ ID NO: 63572 - DNA, 20 bp, Artificial Sequence
  Description of Artificial Sequence: Synthetic oligonucleotide
  Target: SCNA; (+) strand; PAM type: YTN; PAM sequence: TTA
ttttcagcacccatggggag

SEQ ID NO: 63573 - DNA, 20 bp, Artificial Sequence
  Description of Artificial Sequence: Synthetic oligonucleotide
  Target: SCNA; (+) strand; PAM type: YTN; PAM sequence: TTT
tcagcacccatggggagtta

SEQ ID NO: 63574 - DNA, 20 bp, Artificial Sequence
  Description of Artificial Sequence: Synthetic oligonucleotide
  Target: SCNA; (+) strand; PAM type: YTN; PAM sequence: TTT
cagcacccatggggagttaa

SEQ ID NO: 63575 - DNA, 20 bp, Artificial Sequence
  Description of Artificial Sequence: Synthetic oligonucleotide
  Target: SCNA; (+) strand; PAM type: YTN; PAM sequence: TTC
agcacccatggggagttaat

SEQ ID NO: 63576 - DNA, 20 bp, Artificial Sequence
  Description of Artificial Sequence: Synthetic oligonucleotide
  Target: SCNA; (+) strand; PAM type: YTN; PAM sequence: TTA
atagatcttccctgaaagag

SEQ ID NO: 63577 - DNA, 20 bp, Artificial Sequence
  Description of Artificial Sequence: Synthetic oligonucleotide
  Target: SCNA; (+) strand; PAM type: YTN; PAM sequence: CTT
ccctgaaagagaaaaacctt

SEQ ID NO: 63578 - DNA, 20 bp, Artificial Sequence
  Description of Artificial Sequence: Synthetic oligonucleotide
  Target: SCNA; (+) strand; PAM type: YTN; PAM sequence: TTC
cctgaaagagaaaaaccttt

SEQ ID NO: 63579 - DNA, 20 bp, Artificial Sequence
  Description of Artificial Sequence: Synthetic oligonucleotide
  Target: SCNA; (+) strand; PAM type: YTN; PAM sequence: CTG
aaagagaaaaacctttccta

SEQ ID NO: 63580 - DNA, 20 bp, Artificial Sequence
  Description of Artificial Sequence: Synthetic oligonucleotide
  Target: SCNA; (+) strand; PAM type: YTN; PAM sequence: CTT
tcctaaggaaaaatcctaga

SEQ ID NO: 63581 - DNA, 20 bp, Artificial Sequence
  Description of Artificial Sequence: Synthetic oligonucleotide
  Target: SCNA; (+) strand; PAM type: YTN; PAM sequence: TTT
cctaaggaaaaatcctagaa

SEQ ID NO: 63582 - DNA, 20 bp, Artificial Sequence
  Description of Artificial Sequence: Synthetic oligonucleotide
  Target: SCNA; (+) strand; PAM type: YTN; PAM sequence: TTC
ctaaggaaaaatcctagaat

SEQ ID NO: 63583 - DNA, 20 bp, Artificial Sequence
  Description of Artificial Sequence: Synthetic oligonucleotide
  Target: SCNA; (+) strand; PAM type: YTN; PAM sequence: CTA
aggaaaaatcctagaattca

SEQ ID NO: 63584 - DNA, 20 bp, Artificial Sequence
  Description of Artificial Sequence: Synthetic oligonucleotide
  Target: SCNA; (+) strand; PAM type: YTN; PAM sequence: CTA
gaattcatatatttggcaac

SEQ ID NO: 63585 - DNA, 20 bp, Artificial Sequence
  Description of Artificial Sequence: Synthetic oligonucleotide
  Target: SCNA; (+) strand; PAM type: YTN; PAM sequence: TTC
atatatttggcaacatttaa

SEQ ID NO: 63586 - DNA, 20 bp, Artificial Sequence
  Description of Artificial Sequence: Synthetic oligonucleotide
  Target: SCNA; (+) strand; PAM type: YTN; PAM sequence: TTT
ggcaacatttaaaggaggcc

SEQ ID NO: 63587 - DNA, 20 bp, Artificial Sequence
  Description of Artificial Sequence: Synthetic oligonucleotide
  Target: SCNA; (+) strand; PAM type: YTN; PAM sequence: TTG
gcaacatttaaaggaggcca

SEQ ID NO: 63588 - DNA, 20 bp, Artificial Sequence
  Description of Artificial Sequence: Synthetic oligonucleotide
  Target: SCNA; (+) strand; PAM type: YTN; PAM sequence: TTT
aaaggaggccatgaaatttt

SEQ ID NO: 63589 - DNA, 20 bp, Artificial Sequence
  Description of Artificial Sequence: Synthetic oligonucleotide
  Target: SCNA; (+) strand; PAM type: YTN; PAM sequence: TTA
aaggaggccatgaaattttt

SEQ ID NO: 63590 - DNA, 20 bp, Artificial Sequence
  Description of Artificial Sequence: Synthetic oligonucleotide
  Target: SCNA; (+) strand; PAM type: YTN; PAM sequence: TTT
ttatcagtctagagaattga

SEQ ID NO: 63591 - DNA, 20 bp, Artificial Sequence
  Description of Artificial Sequence: Synthetic oligonucleotide
  Target: SCNA; (+) strand; PAM type: YTN; PAM sequence: TTT
tatcagtctagagaattgat

SEQ ID NO: 63592 - DNA, 20 bp, Artificial Sequence
  Description of Artificial Sequence: Synthetic oligonucleotide
  Target: SCNA; (+) strand; PAM type: YTN; PAM sequence: TTT
atcagtctagagaattgatc

SEQ ID NO: 63593 - DNA, 20 bp, Artificial Sequence
  Description of Artificial Sequence: Synthetic oligonucleotide
  Target: SCNA; (+) strand; PAM type: YTN; PAM sequence: TTA
tcagtctagagaattgatct

SEQ ID NO: 63594 - DNA, 20 bp, Artificial Sequence
  Description of Artificial Sequence: Synthetic oligonucleotide
  Target: SCNA; (+) strand; PAM type: YTN; PAM sequence: CTA
gagaattgatctcctttaag

SEQ ID NO: 63595 - DNA, 20 bp, Artificial Sequence
  Description of Artificial Sequence: Synthetic oligonucleotide
  Target: SCNA; (+) strand; PAM type: YTN; PAM sequence: TTG
atctcctttaaggtgactct

SEQ ID NO: 63596 - DNA, 20 bp, Artificial Sequence
  Description of Artificial Sequence: Synthetic oligonucleotide
  Target: SCNA; (+) strand; PAM type: YTN; PAM sequence: CTC
ctttaaggtgactctggtag

SEQ ID NO: 63597 - DNA, 20 bp, Artificial Sequence
  Description of Artificial Sequence: Synthetic oligonucleotide
  Target: SCNA; (+) strand; PAM type: YTN; PAM sequence: CTT
taaggtgactctggtagttc

SEQ ID NO: 63598 - DNA, 20 bp, Artificial Sequence
  Description of Artificial Sequence: Synthetic oligonucleotide
  Target: SCNA; (+) strand; PAM type: YTN; PAM sequence: TTT
aaggtgactctggtagttcc

SEQ ID NO: 63599 - DNA, 20 bp, Artificial Sequence
  Description of Artificial Sequence: Synthetic oligonucleotide
  Target: SCNA; (+) strand; PAM type: YTN; PAM sequence: TTA
aggtgactctggtagttcca

SEQ ID NO: 63600 - DNA, 20 bp, Artificial Sequence
  Description of Artificial Sequence: Synthetic oligonucleotide
  Target: SCNA; (+) strand; PAM type: YTN; PAM sequence: CTC
tggtagttccaacgatgttt

SEQ ID NO: 63601 - DNA, 20 bp, Artificial Sequence
  Description of Artificial Sequence: Synthetic oligonucleotide
  Target: SCNA; (+) strand; PAM type: YTN; PAM sequence: CTG
gtagttccaacgatgtttaa

SEQ ID NO: 63602 - DNA, 20 bp, Artificial Sequence
  Description of Artificial Sequence: Synthetic oligonucleotide
  Target: SCNA; (+) strand; PAM type: YTN; PAM sequence: TTC
caacgatgtttaaaggcatt

SEQ ID NO: 63603 - DNA, 20 bp, Artificial Sequence
  Description of Artificial Sequence: Synthetic oligonucleotide
  Target: SCNA; (+) strand; PAM type: YTN; PAM sequence: TTT
aaaggcatttcctgtaaaaa

SEQ ID NO: 63604 - DNA, 20 bp, Artificial Sequence
  Description of Artificial Sequence: Synthetic oligonucleotide
  Target: SCNA; (+) strand; PAM type: YTN; PAM sequence: TTA
aaggcatttcctgtaaaaaa

SEQ ID NO: 63605 - DNA, 20 bp, Artificial Sequence
  Description of Artificial Sequence: Synthetic oligonucleotide
  Target: SCNA; (+) strand; PAM type: YTN; PAM sequence: TTT
cctgtaaaaaaaaaaaaaaa

SEQ ID NO: 63606 - DNA, 20 bp, Artificial Sequence
  Description of Artificial Sequence: Synthetic oligonucleotide
  Target: SCNA; (+) strand; PAM type: YTN; PAM sequence: TTC
ctgtaaaaaaaaaaaaaaaa

SEQ ID NO: 63607 - DNA, 20 bp, Artificial Sequence
  Description of Artificial Sequence: Synthetic oligonucleotide
  Target: SCNA; (+) strand; PAM type: YTN; PAM sequence: CTG
taaaaaaaaaaaaaaaaaga

SEQ ID NO: 63608 - DNA, 20 bp, Artificial Sequence
  Description of Artificial Sequence: Synthetic oligonucleotide
  Target: SCNA; (+) strand; PAM type: YTN; PAM sequence: TTT
ctgatgattaaaaaaaaaaa

SEQ ID NO: 63609 - DNA, 20 bp, Artificial Sequence
  Description of Artificial Sequence: Synthetic oligonucleotide
  Target: SCNA; (+) strand; PAM type: YTN; PAM sequence: TTC
tgatgattaaaaaaaaaaag

SEQ ID NO: 63610 - DNA, 20 bp, Artificial Sequence
  Description of Artificial Sequence: Synthetic oligonucleotide
  Target: SCNA; (+) strand; PAM type: YTN; PAM sequence: CTG
atgattaaaaaaaaaaagtg

SEQ ID NO: 63611 - DNA, 20 bp, Artificial Sequence
  Description of Artificial Sequence: Synthetic oligonucleotide
  Target: SCNA; (+) strand; PAM type: YTN; PAM sequence: TTA
aaaaaaaaaagtgaggaatg

SEQ ID NO: 63612 - DNA, 20 bp, Artificial Sequence
  Description of Artificial Sequence: Synthetic oligonucleotide
  Target: SCNA; (+) strand; PAM type: YTN; PAM sequence: CTG
agttaaacaaagttaaccac

SEQ ID NO: 63613 - DNA, 20 bp, Artificial Sequence
  Description of Artificial Sequence: Synthetic oligonucleotide
  Target: SCNA; (+) strand; PAM type: YTN; PAM sequence: TTA
aacaaagttaaccacattct

SEQ ID NO: 63614 - DNA, 20 bp, Artificial Sequence
  Description of Artificial Sequence: Synthetic oligonucleotide
  Target: SCNA; (+) strand; PAM type: YTN; PAM sequence: TTA
accacattctctcagagcct

SEQ ID NO: 63615 - DNA, 20 bp, Artificial Sequence
  Description of Artificial Sequence: Synthetic oligonucleotide
  Target: SCNA; (+) strand; PAM type: YTN; PAM sequence: TTC
tctcagagccttgaatgtgc

SEQ ID NO: 63616 - DNA, 20 bp, Artificial Sequence
  Description of Artificial Sequence: Synthetic oligonucleotide
  Target: SCNA; (+) strand; PAM type: YTN; PAM sequence: CTC
tcagagccttgaatgtgcta

SEQ ID NO: 63617 - DNA, 20 bp, Artificial Sequence
  Description of Artificial Sequence: Synthetic oligonucleotide
  Target: SCNA; (+) strand; PAM type: YTN; PAM sequence: CTC
agagccttgaatgtgctaat

SEQ ID NO: 63618 - DNA, 20 bp, Artificial Sequence
  Description of Artificial Sequence: Synthetic oligonucleotide
  Target: SCNA; (+) strand; PAM type: YTN; PAM sequence: CTT
gaatgtgctaatatgtgcta

SEQ ID NO: 63619 - DNA, 20 bp, Artificial Sequence
  Description of Artificial Sequence: Synthetic oligonucleotide
  Target: SCNA; (+) strand; PAM type: YTN; PAM sequence: TTG
aatgtgctaatatgtgctaa

SEQ ID NO: 63620 - DNA, 20 bp, Artificial Sequence
  Description of Artificial Sequence: Synthetic oligonucleotide
  Target: SCNA; (+) strand; PAM type: YTN; PAM sequence: CTA
atatgtgctaatgtgtctta

SEQ ID NO: 63621 - DNA, 20 bp, Artificial Sequence
  Description of Artificial Sequence: Synthetic oligonucleotide
  Target: SCNA; (+) strand; PAM type: YTN; PAM sequence: CTA
atgtgtcttatggctctcta

SEQ ID NO: 63622 - DNA, 20 bp, Artificial Sequence
  Description of Artificial Sequence: Synthetic oligonucleotide
  Target: SCNA; (+) strand; PAM type: YTN; PAM sequence: CTT
atggctctctaaggagggtg

SEQ ID NO: 63623 - DNA, 20 bp, Artificial Sequence
  Description of Artificial Sequence: Synthetic oligonucleotide
  Target: SCNA; (+) strand; PAM type: YTN; PAM sequence: TTA
tggctctctaaggagggtgt

SEQ ID NO: 63624 - DNA, 20 bp, Artificial Sequence
  Description of Artificial Sequence: Synthetic oligonucleotide
  Target: SCNA; (+) strand; PAM type: YTN; PAM sequence: CTC
tctaaggagggtgtagtcaa

SEQ ID NO: 63625 - DNA, 20 bp, Artificial Sequence
  Description of Artificial Sequence: Synthetic oligonucleotide
  Target: SCNA; (+) strand; PAM type: YTN; PAM sequence: CTC
taaggagggtgtagtcaaaa

SEQ ID NO: 63626 - DNA, 20 bp, Artificial Sequence
  Description of Artificial Sequence: Synthetic oligonucleotide
  Target: SCNA; (+) strand; PAM type: YTN; PAM sequence: CTA
aggagggtgtagtcaaaatc

SEQ ID NO: 63627 - DNA, 20 bp, Artificial Sequence
  Description of Artificial Sequence: Synthetic oligonucleotide
  Target: SCNA; (+) strand; PAM type: YTN; PAM sequence: CTT
ctacactgcttagttcccgg

SEQ ID NO: 63628 - DNA, 20 bp, Artificial Sequence
  Description of Artificial Sequence: Synthetic oligonucleotide
  Target: SCNA; (+) strand; PAM type: YTN; PAM sequence: TTC
tacactgcttagttcccggg

SEQ ID NO: 63629 - DNA, 20 bp, Artificial Sequence
  Description of Artificial Sequence: Synthetic oligonucleotide
  Target: SCNA; (+) strand; PAM type: YTN; PAM sequence: CTA
cactgcttagttcccgggaa

SEQ ID NO: 63630 - DNA, 20 bp, Artificial Sequence
  Description of Artificial Sequence: Synthetic oligonucleotide
  Target: SCNA; (+) strand; PAM type: YTN; PAM sequence: CTG
cttagttcccgggaacccac

SEQ ID NO: 63631 - DNA, 20 bp, Artificial Sequence
  Description of Artificial Sequence: Synthetic oligonucleotide
  Target: SCNA; (+) strand; PAM type: YTN; PAM sequence: CTT
agttcccgggaacccacttt

SEQ ID NO: 63632 - DNA, 20 bp, Artificial Sequence
  Description of Artificial Sequence: Synthetic oligonucleotide
  Target: SCNA; (+) strand; PAM type: YTN; PAM sequence: TTA
gttcccgggaacccactttt

SEQ ID NO: 63633 - DNA, 20 bp, Artificial Sequence
  Description of Artificial Sequence: Synthetic oligonucleotide
  Target: SCNA; (+) strand; PAM type: YTN; PAM sequence: TTC
ccgggaacccactttttttt

SEQ ID NO: 63634 - DNA, 20 bp, Artificial Sequence
  Description of Artificial Sequence: Synthetic oligonucleotide
  Target: SCNA; (+) strand; PAM type: YTN; PAM sequence: CTT
tttttttttttttattcatg

SEQ ID NO: 63635 - DNA, 20 bp, Artificial Sequence
  Description of Artificial Sequence: Synthetic oligonucleotide
  Target: SCNA; (+) strand; PAM type: YTN; PAM sequence: TTT
ttttttttttttattcatgg

SEQ ID NO: 63636 - DNA, 20 bp, Artificial Sequence
  Description of Artificial Sequence: Synthetic oligonucleotide
  Target: SCNA; (+) strand; PAM type: YTN; PAM sequence: TTT
tttttttttttattcatggt

SEQ ID NO: 63637 - DNA, 20 bp, Artificial Sequence
  Description of Artificial Sequence: Synthetic oligonucleotide
  Target: SCNA; (+) strand; PAM type: YTN; PAM sequence: TTT
ttttttttttattcatggtc

SEQ ID NO: 63638 - DNA, 20 bp, Artificial Sequence
  Description of Artificial Sequence: Synthetic oligonucleotide
  Target: SCNA; (+) strand; PAM type: YTN; PAM sequence: TTT
tttttttttattcatggtcg

SEQ ID NO: 63639 - DNA, 20 bp, Artificial Sequence
  Description of Artificial Sequence: Synthetic oligonucleotide
  Target: SCNA; (+) strand; PAM type: YTN; PAM sequence: TTT
ttttttttattcatggtcga

SEQ ID NO: 63640 - DNA, 20 bp, Artificial Sequence
  Description of Artificial Sequence: Synthetic oligonucleotide
  Target: SCNA; (+) strand; PAM type: YTN; PAM sequence: TTT
tttttttattcatggtcgaa

SEQ ID NO: 63641 - DNA, 20 bp, Artificial Sequence
  Description of Artificial Sequence: Synthetic oligonucleotide
  Target: SCNA; (+) strand; PAM type: YTN; PAM sequence: TTT
ttttttattcatggtcgaat

SEQ ID NO: 63642 - DNA, 20 bp, Artificial Sequence
  Description of Artificial Sequence: Synthetic oligonucleotide
  Target: SCNA; (+) strand; PAM type: YTN; PAM sequence: TTT
tttttattcatggtcgaata

SEQ ID NO: 63643 - DNA, 20 bp, Artificial Sequence
  Description of Artificial Sequence: Synthetic oligonucleotide
  Target: SCNA; (+) strand; PAM type: YTN; PAM sequence: TTT
ttttattcatggtcgaatat

SEQ ID NO: 63644 - DNA, 20 bp, Artificial Sequence
  Description of Artificial Sequence: Synthetic oligonucleotide
  Target: SCNA; (+) strand; PAM type: YTN; PAM sequence: TTT
tttattcatggtcgaatatt

SEQ ID NO: 63645 - DNA, 20 bp, Artificial Sequence
  Description of Artificial Sequence: Synthetic oligonucleotide
  Target: SCNA; (+) strand; PAM type: YTN; PAM sequence: TTT
ttattcatggtcgaatatta

SEQ ID NO: 63646 - DNA, 20 bp, Artificial Sequence
  Description of Artificial Sequence: Synthetic oligonucleotide
  Target: SCNA; (+) strand; PAM type: YTN; PAM sequence: TTT
tattcatggtcgaatattat

SEQ ID NO: 63647 - DNA, 20 bp, Artificial Sequence
  Description of Artificial Sequence: Synthetic oligonucleotide
  Target: SCNA; (+) strand; PAM type: YTN; PAM sequence: TTT
attcatggtcgaatattatt

SEQ ID NO: 63648 - DNA, 20 bp, Artificial Sequence
  Description of Artificial Sequence: Synthetic oligonucleotide
  Target: SCNA; (+) strand; PAM type: YTN; PAM sequence: TTA
ttcatggtcgaatattattt

SEQ ID NO: 63649 - DNA, 20 bp, Artificial Sequence
  Description of Artificial Sequence: Synthetic oligonucleotide
  Target: SCNA; (+) strand; PAM type: YTN; PAM sequence: TTC
atggtcgaatattatttatt

SEQ ID NO: 63650 - DNA, 20 bp, Artificial Sequence
  Description of Artificial Sequence: Synthetic oligonucleotide
  Target: SCNA; (+) strand; PAM type: YTN; PAM sequence: TTA
tttattgtcagaaaggtaca

SEQ ID NO: 63651 - DNA, 20 bp, Artificial Sequence
  Description of Artificial Sequence: Synthetic oligonucleotide
  Target: SCNA; (+) strand; PAM type: YTN; PAM sequence: TTT
attgtcagaaaggtacagca

SEQ ID NO: 63652 - DNA, 20 bp, Artificial Sequence
  Description of Artificial Sequence: Synthetic oligonucleotide
  Target: SCNA; (+) strand; PAM type: YTN; PAM sequence: TTA
ttgtcagaaaggtacagcat

SEQ ID NO: 63653 - DNA, 20 bp, Artificial Sequence
  Description of Artificial Sequence: Synthetic oligonucleotide
  Target: SCNA; (+) strand; PAM type: YTN; PAM sequence: TTG
tcagaaaggtacagcattca

SEQ ID NO: 63654 - DNA, 20 bp, Artificial Sequence
  Description of Artificial Sequence: Synthetic oligonucleotide
  Target: SCNA; (+) strand; PAM type: YTN; PAM sequence: TTC
acaccaatatcagacaaaat

SEQ ID NO: 63655 - DNA, 20 bp, Artificial Sequence
  Description of Artificial Sequence: Synthetic oligonucleotide
  Target: SCNA; (+) strand; PAM type: YTN; PAM sequence: TTT
taactaaaaaattatttcga

SEQ ID NO: 63656 - DNA, 20 bp, Artificial Sequence
  Description of Artificial Sequence: Synthetic oligonucleotide
  Target: SCNA; (+) strand; PAM type: YTN; PAM sequence: TTT
aactaaaaaattatttcgag

SEQ ID NO: 63657 - DNA, 20 bp, Artificial Sequence
  Description of Artificial Sequence: Synthetic oligonucleotide
  Target: SCNA; (+) strand; PAM type: YTN; PAM sequence: TTA
actaaaaaattatttcgaga

SEQ ID NO: 63658 - DNA, 20 bp, Artificial Sequence
  Description of Artificial Sequence: Synthetic oligonucleotide
  Target: SCNA; (+) strand; PAM type: YTN; PAM sequence: CTA
aaaaattatttcgagacaaa

SEQ ID NO: 63659 - DNA, 20 bp, Artificial Sequence
  Description of Artificial Sequence: Synthetic oligonucleotide
  Target: SCNA; (+) strand; PAM type: YTN; PAM sequence: TTA
tttcgagacaaaaataacaa

SEQ ID NO: 63660 - DNA, 20 bp, Artificial Sequence
  Description of Artificial Sequence: Synthetic oligonucleotide
  Target: SCNA; (+) strand; PAM type: YTN; PAM sequence: TTT
cgagacaaaaataacaatat

SEQ ID NO: 63661 - DNA, 20 bp, Artificial Sequence
  Description of Artificial Sequence: Synthetic oligonucleotide
  Target: SCNA; (+) strand; PAM type: YTN; PAM sequence: TTC
gagacaaaaataacaatata

SEQ ID NO: 63662 - DNA, 20 bp, Artificial Sequence
  Description of Artificial Sequence: Synthetic oligonucleotide
  Target: SCNA; (+) strand; PAM type: YTN; PAM sequence: TTA
ataaaaggctcaattaaaaa

SEQ ID NO: 63663 - DNA, 20 bp, Artificial Sequence
  Description of Artificial Sequence: Synthetic oligonucleotide
  Target: SCNA; (+) strand; PAM type: YTN; PAM sequence: CTC
aattaaaaatgtataacaat

SEQ ID NO: 63664 - DNA, 20 bp, Artificial Sequence
  Description of Artificial Sequence: Synthetic oligonucleotide
  Target: SCNA; (+) strand; PAM type: YTN; PAM sequence: TTA
aaaatgtataacaattataa

SEQ ID NO: 63665 - DNA, 20 bp, Artificial Sequence
  Description of Artificial Sequence: Synthetic oligonucleotide
  Target: SCNA; (+) strand; PAM type: YTN; PAM sequence: TTA
taaacacatacacatcaaac

SEQ ID NO: 63666 - DNA, 20 bp, Artificial Sequence
  Description of Artificial Sequence: Synthetic oligonucleotide
  Target: SCNA; (+) strand; PAM type: YTN; PAM sequence: TTC
cccaaaatacgtaaagcaaa

SEQ ID NO: 63667 - DNA, 20 bp, Artificial Sequence
  Description of Artificial Sequence: Synthetic oligonucleotide
  Target: SCNA; (+) strand; PAM type: YTN; PAM sequence: TTG
acaggattgaagggagaaat

SEQ ID NO: 63668 - DNA, 20 bp, Artificial Sequence
  Description of Artificial Sequence: Synthetic oligonucleotide
  Target: SCNA; (+) strand; PAM type: YTN; PAM sequence: TTG
aagggagaaatagaccactc

SEQ ID NO: 63669 - DNA, 20 bp, Artificial Sequence
  Description of Artificial Sequence: Synthetic oligonucleotide
  Target: SCNA; (+) strand; PAM type: YTN; PAM sequence: CTC
tacaatagtagttggggtct

SEQ ID NO: 63670 - DNA, 20 bp, Artificial Sequence
  Description of Artificial Sequence: Synthetic oligonucleotide
  Target: SCNA; (+) strand; PAM type: YTN; PAM sequence: CTA
caatagtagttggggtcttc

SEQ ID NO: 63671 - DNA, 20 bp, Artificial Sequence
  Description of Artificial Sequence: Synthetic oligonucleotide
  Target: SCNA; (+) strand; PAM type: YTN; PAM sequence: TTG
gggtcttcaacaccccactt

SEQ ID NO: 63672 - DNA, 20 bp, Artificial Sequence
  Description of Artificial Sequence: Synthetic oligonucleotide
  Target: SCNA; (+) strand; PAM type: YTN; PAM sequence: CTT
caacaccccactttcaataa

SEQ ID NO: 63673 - DNA, 20 bp, Artificial Sequence
  Description of Artificial Sequence: Synthetic oligonucleotide
  Target: SCNA; (+) strand; PAM type: YTN; PAM sequence: TTC
aacaccccactttcaataat

SEQ ID NO: 63674 - DNA, 20 bp, Artificial Sequence
  Description of Artificial Sequence: Synthetic oligonucleotide
  Target: SCNA; (+) strand; PAM type: YTN; PAM sequence: CTT
tcaataattaatcacagcca

SEQ ID NO: 63675 - DNA, 20 bp, Artificial Sequence
  Description of Artificial Sequence: Synthetic oligonucleotide
  Target: SCNA; (+) strand; PAM type: YTN; PAM sequence: TTT
caataattaatcacagccac

SEQ ID NO: 63676 - DNA, 20 bp, Artificial Sequence
  Description of Artificial Sequence: Synthetic oligonucleotide
  Target: SCNA; (+) strand; PAM type: YTN; PAM sequence: TTC
aataattaatcacagccact

SEQ ID NO: 63677 - DNA, 20 bp, Artificial Sequence
  Description of Artificial Sequence: Synthetic oligonucleotide
  Target: SCNA; (+) strand; PAM type: YTN; PAM sequence: TTA
atcacagccacttaaggaac

SEQ ID NO: 63678 - DNA, 20 bp, Artificial Sequence
  Description of Artificial Sequence: Synthetic oligonucleotide
  Target: SCNA; (+) strand; PAM type: YTN; PAM sequence: CTT
aaggaaccagtgcataccaa

SEQ ID NO: 63679 - DNA, 20 bp, Artificial Sequence
  Description of Artificial Sequence: Synthetic oligonucleotide
  Target: SCNA; (+) strand; PAM type: YTN; PAM sequence: TTA
aggaaccagtgcataccaaa

SEQ ID NO: 63680 - DNA, 20 bp, Artificial Sequence
  Description of Artificial Sequence: Synthetic oligonucleotide
  Target: SCNA; (+) strand; PAM type: YTN; PAM sequence: CTT
ctggcagtgttgcttcaggg

SEQ ID NO: 63681 - DNA, 20 bp, Artificial Sequence
  Description of Artificial Sequence: Synthetic oligonucleotide
  Target: SCNA; (+) strand; PAM type: YTN; PAM sequence: TTC
tggcagtgttgcttcaggga

SEQ ID NO: 63682 - DNA, 20 bp, Artificial Sequence
  Description of Artificial Sequence: Synthetic oligonucleotide
  Target: SCNA; (+) strand; PAM type: YTN; PAM sequence: CTG
gcagtgttgcttcagggaat

SEQ ID NO: 63683 - DNA, 20 bp, Artificial Sequence
  Description of Artificial Sequence: Synthetic oligonucleotide
  Target: SCNA; (+) strand; PAM type: YTN; PAM sequence: TTG
cttcagggaattccgagtgt

SEQ ID NO: 63684 - DNA, 20 bp, Artificial Sequence
  Description of Artificial Sequence: Synthetic oligonucleotide
  Target: SCNA; (+) strand; PAM type: YTN; PAM sequence: CTT
cagggaattccgagtgtagg

SEQ ID NO: 63685 - DNA, 20 bp, Artificial Sequence
  Description of Artificial Sequence: Synthetic oligonucleotide
  Target: SCNA; (+) strand; PAM type: YTN; PAM sequence: TTC
agggaattccgagtgtaggg

SEQ ID NO: 63686 - DNA, 20 bp, Artificial Sequence
  Description of Artificial Sequence: Synthetic oligonucleotide
  Target: SCNA; (+) strand; PAM type: YTN; PAM sequence: TTC
cgagtgtagggttaatgttc

SEQ ID NO: 63687 - DNA, 20 bp, Artificial Sequence
  Description of Artificial Sequence: Synthetic oligonucleotide
  Target: SCNA; (+) strand; PAM type: YTN; PAM sequence: TTA
atgttccattttctctacct

SEQ ID NO: 63688 - DNA, 20 bp, Artificial Sequence
  Description of Artificial Sequence: Synthetic oligonucleotide
  Target: SCNA; (+) strand; PAM type: YTN; PAM sequence: TTC
cattttctctacctcttcta

SEQ ID NO: 63689 - DNA, 20 bp, Artificial Sequence
  Description of Artificial Sequence: Synthetic oligonucleotide
  Target: SCNA; (+) strand; PAM type: YTN; PAM sequence: TTT
tctctacctcttctaaaatt

SEQ ID NO: 63690 - DNA, 20 bp, Artificial Sequence
  Description of Artificial Sequence: Synthetic oligonucleotide
  Target: SCNA; (+) strand; PAM type: YTN; PAM sequence: TTT
ctctacctcttctaaaattc

SEQ ID NO: 63691 - DNA, 20 bp, Artificial Sequence
  Description of Artificial Sequence: Synthetic oligonucleotide
  Target: SCNA; (+) strand; PAM type: YTN; PAM sequence: TTC
tctacctcttctaaaattcc

SEQ ID NO: 63692 - DNA, 20 bp, Artificial Sequence
  Description of Artificial Sequence: Synthetic oligonucleotide
  Target: SCNA; (+) strand; PAM type: YTN; PAM sequence: CTC
tacctcttctaaaattcctc

SEQ ID NO: 63693 - DNA, 20 bp, Artificial Sequence
  Description of Artificial Sequence: Synthetic oligonucleotide
  Target: SCNA; (+) strand; PAM type: YTN; PAM sequence: CTA
cctcttctaaaattcctcct

SEQ ID NO: 63694 - DNA, 20 bp, Artificial Sequence
  Description of Artificial Sequence: Synthetic oligonucleotide
  Target: SCNA; (+) strand; PAM type: YTN; PAM sequence: CTC
ttctaaaattcctccttctt

SEQ ID NO: 63695 - DNA, 20 bp, Artificial Sequence
  Description of Artificial Sequence: Synthetic oligonucleotide
  Target: SCNA; (+) strand; PAM type: YTN; PAM sequence: CTT
ctaaaattcctccttcttca

SEQ ID NO: 63696 - DNA, 20 bp, Artificial Sequence
  Description of Artificial Sequence: Synthetic oligonucleotide
  Target: SCNA; (+) strand; PAM type: YTN; PAM sequence: TTC
taaaattcctccttcttcaa

SEQ ID NO: 63697 - DNA, 20 bp, Artificial Sequence
  Description of Artificial Sequence: Synthetic oligonucleotide
  Target: SCNA; (+) strand; PAM type: YTN; PAM sequence: CTA
aaattcctccttcttcaaat

SEQ ID NO: 63698 - DNA, 20 bp, Artificial Sequence
  Description of Artificial Sequence: Synthetic oligonucleotide
  Target: SCNA; (+) strand; PAM type: YTN; PAM sequence: TTC
ctccttcttcaaatggctat

SEQ ID NO: 63699 - DNA, 20 bp, Artificial Sequence
  Description of Artificial Sequence: Synthetic oligonucleotide
  Target: SCNA; (+) strand; PAM type: YTN; PAM sequence: CTC
cttcttcaaatggctattaa

SEQ ID NO: 63700 - DNA, 20 bp, Artificial Sequence
  Description of Artificial Sequence: Synthetic oligonucleotide
  Target: SCNA; (+) strand; PAM type: YTN; PAM sequence: CTT
cttcaaatggctattaataa

SEQ ID NO: 63701 - DNA, 20 bp, Artificial Sequence
  Description of Artificial Sequence: Synthetic oligonucleotide
  Target: SCNA; (+) strand; PAM type: YTN; PAM sequence: TTC
ttcaaatggctattaataac

SEQ ID NO: 63702 - DNA, 20 bp, Artificial Sequence
  Description of Artificial Sequence: Synthetic oligonucleotide
  Target: SCNA; (+) strand; PAM type: YTN; PAM sequence: CTT
caaatggctattaataactt

SEQ ID NO: 63703 - DNA, 20 bp, Artificial Sequence
  Description of Artificial Sequence: Synthetic oligonucleotide
  Target: SCNA; (+) strand; PAM type: YTN; PAM sequence: TTC
aaatggctattaataacttt

SEQ ID NO: 63704 - DNA, 20 bp, Artificial Sequence
  Description of Artificial Sequence: Synthetic oligonucleotide
  Target: SCNA; (+) strand; PAM type: YTN; PAM sequence: CTA
ttaataactttatatttttg

SEQ ID NO: 63705 - DNA, 20 bp, Artificial Sequence
  Description of Artificial Sequence: Synthetic oligonucleotide
  Target: SCNA; (+) strand; PAM type: YTN; PAM sequence: TTA
ataactttatatttttgtcc

SEQ ID NO: 63706 - DNA, 20 bp, Artificial Sequence
  Description of Artificial Sequence: Synthetic oligonucleotide
  Target: SCNA; (+) strand; PAM type: YTN; PAM sequence: CTT
tatatttttgtcctttgtgt

SEQ ID NO: 63707 - DNA, 20 bp, Artificial Sequence
  Description of Artificial Sequence: Synthetic oligonucleotide
  Target: SCNA; (+) strand; PAM type: YTN; PAM sequence: TTT
atatttttgtcctttgtgtc

SEQ ID NO: 63708 - DNA, 20 bp, Artificial Sequence
  Description of Artificial Sequence: Synthetic oligonucleotide
  Target: SCNA; (+) strand; PAM type: YTN; PAM sequence: TTA
tatttttgtcctttgtgtca

SEQ ID NO: 63709 - DNA, 20 bp, Artificial Sequence
  Description of Artificial Sequence: Synthetic oligonucleotide
  Target: SCNA; (+) strand; PAM type: YTN; PAM sequence: TTT
ttgtcctttgtgtcagttct

SEQ ID NO: 63710 - DNA, 20 bp, Artificial Sequence
  Description of Artificial Sequence: Synthetic oligonucleotide
  Target: SCNA; (+) strand; PAM type: YTN; PAM sequence: TTT
tgtcctttgtgtcagttctt

SEQ ID NO: 63711 - DNA, 20 bp, Artificial Sequence
  Description of Artificial Sequence: Synthetic oligonucleotide
  Target: SCNA; (+) strand; PAM type: YTN; PAM sequence: TTT
gtcctttgtgtcagttctta

SEQ ID NO: 63712 - DNA, 20 bp, Artificial Sequence
  Description of Artificial Sequence: Synthetic oligonucleotide
  Target: SCNA; (+) strand; PAM type: YTN; PAM sequence: TTG
tcctttgtgtcagttcttaa

SEQ ID NO: 63713 - DNA, 20 bp, Artificial Sequence
  Description of Artificial Sequence: Synthetic oligonucleotide
  Target: SCNA; (+) strand; PAM type: YTN; PAM sequence: CTT
tgtgtcagttcttaattcat

SEQ ID NO: 63714 - DNA, 20 bp, Artificial Sequence
  Description of Artificial Sequence: Synthetic oligonucleotide
  Target: SCNA; (+) strand; PAM type: YTN; PAM sequence: TTT
gtgtcagttcttaattcatg

SEQ ID NO: 63715 - DNA, 20 bp, Artificial Sequence
  Description of Artificial Sequence: Synthetic oligonucleotide
  Target: SCNA; (+) strand; PAM type: YTN; PAM sequence: TTG
tgtcagttcttaattcatgt

SEQ ID NO: 63716 - DNA, 20 bp, Artificial Sequence
  Description of Artificial Sequence: Synthetic oligonucleotide
  Target: SCNA; (+) strand; PAM type: YTN; PAM sequence: TTC
ttaattcatgttgcttataa

SEQ ID NO: 63717 - DNA, 20 bp, Artificial Sequence
  Description of Artificial Sequence: Synthetic oligonucleotide
  Target: SCNA; (+) strand; PAM type: YTN; PAM sequence: CTT
aattcatgttgcttataagc

SEQ ID NO: 63718 - DNA, 20 bp, Artificial Sequence
  Description of Artificial Sequence: Synthetic oligonucleotide
  Target: SCNA; (+) strand; PAM type: YTN; PAM sequence: TTA
attcatgttgcttataagca

SEQ ID NO: 63719 - DNA, 20 bp, Artificial Sequence
  Description of Artificial Sequence: Synthetic oligonucleotide
  Target: SCNA; (+) strand; PAM type: YTN; PAM sequence: TTC
atgttgcttataagcatgat

SEQ ID NO: 63720 - DNA, 20 bp, Artificial Sequence
  Description of Artificial Sequence: Synthetic oligonucleotide
  Target: SCNA; (+) strand; PAM type: YTN; PAM sequence: TTG
cttataagcatgatttttat

SEQ ID NO: 63721 - DNA, 20 bp, Artificial Sequence
  Description of Artificial Sequence: Synthetic oligonucleotide
  Target: SCNA; (+) strand; PAM type: YTN; PAM sequence: CTT
ataagcatgatttttattat

SEQ ID NO: 63722 - DNA, 20 bp, Artificial Sequence
  Description of Artificial Sequence: Synthetic oligonucleotide
  Target: SCNA; (+) strand; PAM type: YTN; PAM sequence: TTA
taagcatgatttttattatt

SEQ ID NO: 63723 - DNA, 20 bp, Artificial Sequence
  Description of Artificial Sequence: Synthetic oligonucleotide
  Target: SCNA; (+) strand; PAM type: YTN; PAM sequence: TTT
ttattattaaagtgagatgg

SEQ ID NO: 63724 - DNA, 20 bp, Artificial Sequence
  Description of Artificial Sequence: Synthetic oligonucleotide
  Target: SCNA; (+) strand; PAM type: YTN; PAM sequence: TTT
tattattaaagtgagatggg

SEQ ID NO: 63725 - DNA, 20 bp, Artificial Sequence
  Description of Artificial Sequence: Synthetic oligonucleotide
  Target: SCNA; (+) strand; PAM type: YTN; PAM sequence: TTT
attattaaagtgagatggga

SEQ ID NO: 63726 - DNA, 20 bp, Artificial Sequence
  Description of Artificial Sequence: Synthetic oligonucleotide
  Target: SCNA; (+) strand; PAM type: YTN; PAM sequence: TTA
ttattaaagtgagatgggat

SEQ ID NO: 63727 - DNA, 20 bp, Artificial Sequence
  Description of Artificial Sequence: Synthetic oligonucleotide
  Target: SCNA; (+) strand; PAM type: YTN; PAM sequence: TTA
ttaaagtgagatgggataaa

SEQ ID NO: 63728 - DNA, 20 bp, Artificial Sequence
  Description of Artificial Sequence: Synthetic oligonucleotide
  Target: SCNA; (+) strand; PAM type: YTN; PAM sequence: TTA
aagtgagatgggataaaaat

SEQ ID NO: 63729 - DNA, 20 bp, Artificial Sequence
  Description of Artificial Sequence: Synthetic oligonucleotide
  Target: SCNA; (+) strand; PAM type: YTN; PAM sequence: TTT
ttgcaatgagataacgtttt

SEQ ID NO: 63730 - DNA, 20 bp, Artificial Sequence
  Description of Artificial Sequence: Synthetic oligonucleotide
  Target: SCNA; (+) strand; PAM type: YTN; PAM sequence: TTT
tgcaatgagataacgtttta

SEQ ID NO: 63731 - DNA, 20 bp, Artificial Sequence
  Description of Artificial Sequence: Synthetic oligonucleotide
  Target: SCNA; (+) strand; PAM type: YTN; PAM sequence: TTT
gcaatgagataacgttttat

SEQ ID NO: 63732 - DNA, 20 bp, Artificial Sequence
  Description of Artificial Sequence: Synthetic oligonucleotide
  Target: SCNA; (+) strand; PAM type: YTN; PAM sequence: TTG
caatgagataacgttttatt

SEQ ID NO: 63733 - DNA, 20 bp, Artificial Sequence
  Description of Artificial Sequence: Synthetic oligonucleotide
  Target: SCNA; (+) strand; PAM type: YTN; PAM sequence: TTT
tattttaattctcaccattt

SEQ ID NO: 63734 - DNA, 20 bp, Artificial Sequence
  Description of Artificial Sequence: Synthetic oligonucleotide
  Target: SCNA; (+) strand; PAM type: YTN; PAM sequence: TTT
attttaattctcaccattta

SEQ ID NO: 63735 - DNA, 20 bp, Artificial Sequence
  Description of Artificial Sequence: Synthetic oligonucleotide
  Target: SCNA; (+) strand; PAM type: YTN; PAM sequence: TTA
ttttaattctcaccatttat

SEQ ID NO: 63736 - DNA, 20 bp, Artificial Sequence
  Description of Artificial Sequence: Synthetic oligonucleotide
  Target: SCNA; (+) strand; PAM type: YTN; PAM sequence: TTT
taattctcaccatttatata

SEQ ID NO: 63737 - DNA, 20 bp, Artificial Sequence
  Description of Artificial Sequence: Synthetic oligonucleotide
  Target: SCNA; (+) strand; PAM type: YTN; PAM sequence: TTT
aattctcaccatttatatac

SEQ ID NO: 63738 - DNA, 20 bp, Artificial Sequence
  Description of Artificial Sequence: Synthetic oligonucleotide
  Target: SCNA; (+) strand; PAM type: YTN; PAM sequence: TTA
attctcaccatttatataca

SEQ ID NO: 63739 - DNA, 20 bp, Artificial Sequence
  Description of Artificial Sequence: Synthetic oligonucleotide
  Target: SCNA; (+) strand; PAM type: YTN; PAM sequence: TTC
tcaccatttatatacaaaca

SEQ ID NO: 63740 - DNA, 20 bp, Artificial Sequence
  Description of Artificial Sequence: Synthetic oligonucleotide
  Target: SCNA; (+) strand; PAM type: YTN; PAM sequence: CTC
accatttatatacaaacaca

SEQ ID NO: 63741 - DNA, 20 bp, Artificial Sequence
  Description of Artificial Sequence: Synthetic oligonucleotide
  Target: SCNA; (+) strand; PAM type: YTN; PAM sequence: TTT
atatacaaacacaagtgaat

SEQ ID NO: 63742 - DNA, 20 bp, Artificial Sequence
  Description of Artificial Sequence: Synthetic oligonucleotide
  Target: SCNA; (+) strand; PAM type: YTN; PAM sequence: TTA
tatacaaacacaagtgaata

SEQ ID NO: 63743 - DNA, 20 bp, Artificial Sequence
  Description of Artificial Sequence: Synthetic oligonucleotide
  Target: SCNA; (+) strand; PAM type: YTN; PAM sequence: TTT
catatttagtatttataggt

SEQ ID NO: 63744 - DNA, 20 bp, Artificial Sequence
  Description of Artificial Sequence: Synthetic oligonucleotide
  Target: SCNA; (+) strand; PAM type: YTN; PAM sequence: TTC
atatttagtatttataggtg

SEQ ID NO: 63745 - DNA, 20 bp, Artificial Sequence
  Description of Artificial Sequence: Synthetic oligonucleotide
  Target: SCNA; (+) strand; PAM type: YTN; PAM sequence: TTT
agtatttataggtgcatagt

SEQ ID NO: 63746 - DNA, 20 bp, Artificial Sequence
  Description of Artificial Sequence: Synthetic oligonucleotide
  Target: SCNA; (+) strand; PAM type: YTN; PAM sequence: TTA
gtatttataggtgcatagtt

SEQ ID NO: 63747 - DNA, 20 bp, Artificial Sequence
  Description of Artificial Sequence: Synthetic oligonucleotide
  Target: SCNA; (+) strand; PAM type: YTN; PAM sequence: TTT
ataggtgcatagtttcatgc

SEQ ID NO: 63748 - DNA, 20 bp, Artificial Sequence
  Description of Artificial Sequence: Synthetic oligonucleotide
  Target: SCNA; (+) strand; PAM type: YTN; PAM sequence: TTA
taggtgcatagtttcatgct

SEQ ID NO: 63749 - DNA, 20 bp, Artificial Sequence
  Description of Artificial Sequence: Synthetic oligonucleotide
  Target: SCNA; (+) strand; PAM type: YTN; PAM sequence: TTT
catgctcacatatttttaag

SEQ ID NO: 63750 - DNA, 20 bp, Artificial Sequence
  Description of Artificial Sequence: Synthetic oligonucleotide
  Target: SCNA; (+) strand; PAM type: YTN; PAM sequence: TTC
atgctcacatatttttaagt

SEQ ID NO: 63751 - DNA, 20 bp, Artificial Sequence
  Description of Artificial Sequence: Synthetic oligonucleotide
  Target: SCNA; (+) strand; PAM type: YTN; PAM sequence: CTC
acatatttttaagtattata

SEQ ID NO: 63752 - DNA, 20 bp, Artificial Sequence
  Description of Artificial Sequence: Synthetic oligonucleotide
  Target: SCNA; (+) strand; PAM type: YTN; PAM sequence: TTT
ttaagtattatatatattaa

SEQ ID NO: 63753 - DNA, 20 bp, Artificial Sequence
  Description of Artificial Sequence: Synthetic oligonucleotide
  Target: SCNA; (+) strand; PAM type: YTN; PAM sequence: TTT
taagtattatatatattaac

SEQ ID NO: 63754 - DNA, 20 bp, Artificial Sequence
  Description of Artificial Sequence: Synthetic oligonucleotide
  Target: SCNA; (+) strand; PAM type: YTN; PAM sequence: TTT
aagtattatatatattaaca

SEQ ID NO: 63755 - DNA, 20 bp, Artificial Sequence
  Description of Artificial Sequence: Synthetic oligonucleotide
  Target: SCNA; (+) strand; PAM type: YTN; PAM sequence: TTA
agtattatatatattaacaa

SEQ ID NO: 63756 - DNA, 20 bp, Artificial Sequence
  Description of Artificial Sequence: Synthetic oligonucleotide
  Target: SCNA; (+) strand; PAM type: YTN; PAM sequence: TTA
tatatattaacaaatttcac

SEQ ID NO: 63757 - DNA, 20 bp, Artificial Sequence
  Description of Artificial Sequence: Synthetic oligonucleotide
  Target: SCNA; (+) strand; PAM type: YTN; PAM sequence: TTA
acaaatttcacaatacgtca

SEQ ID NO: 63758 - DNA, 20 bp, Artificial Sequence
  Description of Artificial Sequence: Synthetic oligonucleotide
  Target: SCNA; (+) strand; PAM type: YTN; PAM sequence: TTT
cacaatacgtcattattctt

SEQ ID NO: 63759 - DNA, 20 bp, Artificial Sequence
  Description of Artificial Sequence: Synthetic oligonucleotide
  Target: SCNA; (+) strand; PAM type: YTN; PAM sequence: TTC
acaatacgtcattattctta

SEQ ID NO: 63760 - DNA, 20 bp, Artificial Sequence
  Description of Artificial Sequence: Synthetic oligonucleotide
  Target: SCNA; (+) strand; PAM type: YTN; PAM sequence: TTA
ttcttagacagtatcattaa

SEQ ID NO: 63761 - DNA, 20 bp, Artificial Sequence
  Description of Artificial Sequence: Synthetic oligonucleotide
  Target: SCNA; (+) strand; PAM type: YTN; PAM sequence: TTC
ttagacagtatcattaaaag

SEQ ID NO: 63762 - DNA, 20 bp, Artificial Sequence
  Description of Artificial Sequence: Synthetic oligonucleotide
  Target: SCNA; (+) strand; PAM type: YTN; PAM sequence: CTT
agacagtatcattaaaagac

SEQ ID NO: 63763 - DNA, 20 bp, Artificial Sequence
  Description of Artificial Sequence: Synthetic oligonucleotide
  Target: SCNA; (+) strand; PAM type: YTN; PAM sequence: TTA
gacagtatcattaaaagaca

SEQ ID NO: 63764 - DNA, 20 bp, Artificial Sequence
  Description of Artificial Sequence: Synthetic oligonucleotide
  Target: SCNA; (+) strand; PAM type: YTN; PAM sequence: TTA
aaagacacctaaaaatctta

SEQ ID NO: 63765 - DNA, 20 bp, Artificial Sequence
  Description of Artificial Sequence: Synthetic oligonucleotide
  Target: SCNA; (+) strand; PAM type: YTN; PAM sequence: CTA
aaaatcttataatatatgat

SEQ ID NO: 63766 - DNA, 20 bp, Artificial Sequence
  Description of Artificial Sequence: Synthetic oligonucleotide
  Target: SCNA; (+) strand; PAM type: YTN; PAM sequence: CTT
ataatatatgatagcaaatc

SEQ ID NO: 63767 - DNA, 20 bp, Artificial Sequence
  Description of Artificial Sequence: Synthetic oligonucleotide
  Target: SCNA; (+) strand; PAM type: YTN; PAM sequence: TTA
taatatatgatagcaaatca

SEQ ID NO: 63768 - DNA, 20 bp, Artificial Sequence
  Description of Artificial Sequence: Synthetic oligonucleotide
  Target: SCNA; (+) strand; PAM type: YTN; PAM sequence: CTA
acaacttctgaacaacagca

SEQ ID NO: 63769 - DNA, 20 bp, Artificial Sequence
  Description of Artificial Sequence: Synthetic oligonucleotide
  Target: SCNA; (+) strand; PAM type: YTN; PAM sequence: CTT
ctgaacaacagcaacaaaaa

SEQ ID NO: 63770 - DNA, 20 bp, Artificial Sequence
  Description of Artificial Sequence: Synthetic oligonucleotide
  Target: SCNA; (+) strand; PAM type: YTN; PAM sequence: TTC
tgaacaacagcaacaaaaaa

SEQ ID NO: 63771 - DNA, 20 bp, Artificial Sequence
  Description of Artificial Sequence: Synthetic oligonucleotide
  Target: SCNA; (+) strand; PAM type: YTN; PAM sequence: CTG
aacaacagcaacaaaaaaat

SEQ ID NO: 63772 - DNA, 20 bp, Artificial Sequence
  Description of Artificial Sequence: Synthetic oligonucleotide
  Target: SCNA; (+) strand; PAM type: YTN; PAM sequence: TTT
agaaataagtggtagtcact

SEQ ID NO: 63773 - DNA, 20 bp, Artificial Sequence
  Description of Artificial Sequence: Synthetic oligonucleotide
  Target: SCNA; (+) strand; PAM type: YTN; PAM sequence: TTA
gaaataagtggtagtcactt

SEQ ID NO: 63774 - DNA, 20 bp, Artificial Sequence
  Description of Artificial Sequence: Synthetic oligonucleotide
  Target: SCNA; (+) strand; PAM type: YTN; PAM sequence: CTT
aggtgtttttaatttgtttt

SEQ ID NO: 63775 - DNA, 20 bp, Artificial Sequence
  Description of Artificial Sequence: Synthetic oligonucleotide
  Target: SCNA; (+) strand; PAM type: YTN; PAM sequence: TTA
ggtgtttttaatttgtttta

SEQ ID NO: 63776 - DNA, 20 bp, Artificial Sequence
  Description of Artificial Sequence: Synthetic oligonucleotide
  Target: SCNA; (+) strand; PAM type: YTN; PAM sequence: TTT
ttaatttgttttaacatcgt

SEQ ID NO: 63777 - DNA, 20 bp, Artificial Sequence
  Description of Artificial Sequence: Synthetic oligonucleotide
  Target: SCNA; (+) strand; PAM type: YTN; PAM sequence: TTT
taatttgttttaacatcgta

SEQ ID NO: 63778 - DNA, 20 bp, Artificial Sequence
  Description of Artificial Sequence: Synthetic oligonucleotide
  Target: SCNA; (+) strand; PAM type: YTN; PAM sequence: TTT
aatttgttttaacatcgtag

SEQ ID NO: 63779 - DNA, 20 bp, Artificial Sequence
  Description of Artificial Sequence: Synthetic oligonucleotide
  Target: SCNA; (+) strand; PAM type: YTN; PAM sequence: TTA
atttgttttaacatcgtaga

SEQ ID NO: 63780 - DNA, 20 bp, Artificial Sequence
  Description of Artificial Sequence: Synthetic oligonucleotide
  Target: SCNA; (+) strand; PAM type: YTN; PAM sequence: TTT
gttttaacatcgtagattga

SEQ ID NO: 63781 - DNA, 20 bp, Artificial Sequence
  Description of Artificial Sequence: Synthetic oligonucleotide
  Target: SCNA; (+) strand; PAM type: YTN; PAM sequence: TTG
ttttaacatcgtagattgaa

SEQ ID NO: 63782 - DNA, 20 bp, Artificial Sequence
  Description of Artificial Sequence: Synthetic oligonucleotide
  Target: SCNA; (+) strand; PAM type: YTN; PAM sequence: TTT
taacatcgtagattgaagcc

SEQ ID NO: 63783 - DNA, 20 bp, Artificial Sequence
  Description of Artificial Sequence: Synthetic oligonucleotide
  Target: SCNA; (+) strand; PAM type: YTN; PAM sequence: TTT
aacatcgtagattgaagcca

SEQ ID NO: 63784 - DNA, 20 bp, Artificial Sequence
  Description of Artificial Sequence: Synthetic oligonucleotide
  Target: SCNA; (+) strand; PAM type: YTN; PAM sequence: TTA
acatcgtagattgaagccac

SEQ ID NO: 63785 - DNA, 20 bp, Artificial Sequence
  Description of Artificial Sequence: Synthetic oligonucleotide
  Target: SCNA; (+) strand; PAM type: YTN; PAM sequence: TTG
aagccacaaaatccacagca

SEQ ID NO: 63786 - DNA, 20 bp, Artificial Sequence
  Description of Artificial Sequence: Synthetic oligonucleotide
  Target: SCNA; (+) strand; PAM type: YTN; PAM sequence: CTG
ctaccatgtattcacttcag

SEQ ID NO: 63787 - DNA, 20 bp, Artificial Sequence
  Description of Artificial Sequence: Synthetic oligonucleotide
  Target: SCNA; (+) strand; PAM type: YTN; PAM sequence: CTA
ccatgtattcacttcagtga

SEQ ID NO: 63788 - DNA, 20 bp, Artificial Sequence
  Description of Artificial Sequence: Synthetic oligonucleotide
  Target: SCNA; (+) strand; PAM type: YTN; PAM sequence: TTC
acttcagtgaaagggaagca

SEQ ID NO: 63789 - DNA, 20 bp, Artificial Sequence
  Description of Artificial Sequence: Synthetic oligonucleotide
  Target: SCNA; (+) strand; PAM type: YTN; PAM sequence: CTT
cagtgaaagggaagcaccga

SEQ ID NO: 63790 - DNA, 20 bp, Artificial Sequence
  Description of Artificial Sequence: Synthetic oligonucleotide
  Target: SCNA; (+) strand; PAM type: YTN; PAM sequence: TTC
agtgaaagggaagcaccgaa

SEQ ID NO: 63791 - DNA, 20 bp, Artificial Sequence
  Description of Artificial Sequence: Synthetic oligonucleotide
  Target: SCNA; (+) strand; PAM type: YTN; PAM sequence: CTG
agtgggggcaggtacagata

SEQ ID NO: 63792 - DNA, 20 bp, Artificial Sequence
  Description of Artificial Sequence: Synthetic oligonucleotide
  Target: SCNA; (+) strand; PAM type: YTN; PAM sequence: CTT
caatcactgctgatggaaga

SEQ ID NO: 63793 - DNA, 20 bp, Artificial Sequence
  Description of Artificial Sequence: Synthetic oligonucleotide
  Target: SCNA; (+) strand; PAM type: YTN; PAM sequence: TTC
aatcactgctgatggaagac

SEQ ID NO: 63794 - DNA, 20 bp, Artificial Sequence
  Description of Artificial Sequence: Synthetic oligonucleotide
  Target: SCNA; (+) strand; PAM type: YTN; PAM sequence: CTG
ctgatggaagacttcgagat

SEQ ID NO: 63795 - DNA, 20 bp, Artificial Sequence
  Description of Artificial Sequence: Synthetic oligonucleotide
  Target: SCNA; (+) strand; PAM type: YTN; PAM sequence: CTG
atggaagacttcgagataca

SEQ ID NO: 63796 - DNA, 20 bp, Artificial Sequence
  Description of Artificial Sequence: Synthetic oligonucleotide
  Target: SCNA; (+) strand; PAM type: YTN; PAM sequence: CTT
cgagatacactgtaaaaact

SEQ ID NO: 63797 - DNA, 20 bp, Artificial Sequence
  Description of Artificial Sequence: Synthetic oligonucleotide
  Target: SCNA; (+) strand; PAM type: YTN; PAM sequence: TTC
gagatacactgtaaaaactt

SEQ ID NO: 63798 - DNA, 20 bp, Artificial Sequence
  Description of Artificial Sequence: Synthetic oligonucleotide
  Target: SCNA; (+) strand; PAM type: YTN; PAM sequence: CTG
taaaaactttgagaaatgtc

SEQ ID NO: 63799 - DNA, 20 bp, Artificial Sequence
  Description of Artificial Sequence: Synthetic oligonucleotide
  Target: SCNA; (+) strand; PAM type: YTN; PAM sequence: CTT
tgagaaatgtcatgactggg

SEQ ID NO: 63800 - DNA, 20 bp, Artificial Sequence
  Description of Artificial Sequence: Synthetic oligonucleotide
  Target: SCNA; (+) strand; PAM type: YTN; PAM sequence: TTT
gagaaatgtcatgactgggc

SEQ ID NO: 63801 - DNA, 20 bp, Artificial Sequence
  Description of Artificial Sequence: Synthetic oligonucleotide
  Target: SCNA; (+) strand; PAM type: YTN; PAM sequence: TTG
agaaatgtcatgactgggca

SEQ ID NO: 63802 - DNA, 20 bp, Artificial Sequence
  Description of Artificial Sequence: Synthetic oligonucleotide
  Target: SCNA; (+) strand; PAM type: YTN; PAM sequence: CTG
ggcacattggaactgagcac

SEQ ID NO: 63803 - DNA, 20 bp, Artificial Sequence
  Description of Artificial Sequence: Synthetic oligonucleotide
  Target: SCNA; (+) strand; PAM type: YTN; PAM sequence: TTG
gaactgagcacttgtacagg

SEQ ID NO: 63804 - DNA, 20 bp, Artificial Sequence
  Description of Artificial Sequence: Synthetic oligonucleotide
  Target: SCNA; (+) strand; PAM type: YTN; PAM sequence: CTG
agcacttgtacaggatggaa

SEQ ID NO: 63805 - DNA, 20 bp, Artificial Sequence
  Description of Artificial Sequence: Synthetic oligonucleotide
  Target: SCNA; (+) strand; PAM type: YTN; PAM sequence: CTT
gtacaggatggaacatctgt

SEQ ID NO: 63806 - DNA, 20 bp, Artificial Sequence
  Description of Artificial Sequence: Synthetic oligonucleotide
  Target: SCNA; (+) strand; PAM type: YTN; PAM sequence: TTG
tacaggatggaacatctgtc

SEQ ID NO: 63807 - DNA, 20 bp, Artificial Sequence
  Description of Artificial Sequence: Synthetic oligonucleotide
  Target: SCNA; (+) strand; PAM type: YTN; PAM sequence: CTG
tcagcagatctcaagaaact

SEQ ID NO: 63808 - DNA, 20 bp, Artificial Sequence
  Description of Artificial Sequence: Synthetic oligonucleotide
  Target: SCNA; (+) strand; PAM type: YTN; PAM sequence: CTC
aagaaactgggagcaaagat

SEQ ID NO: 63809 - DNA, 20 bp, Artificial Sequence
  Description of Artificial Sequence: Synthetic oligonucleotide
  Target: SCNA; (+) strand; PAM type: YTN; PAM sequence: CTG
ggagcaaagatatttcttag

SEQ ID NO: 63810 - DNA, 20 bp, Artificial Sequence
  Description of Artificial Sequence: Synthetic oligonucleotide
  Target: SCNA; (+) strand; PAM type: YTN; PAM sequence: TTT
cttaggcttcaggttcgtag

SEQ ID NO: 63811 - DNA, 20 bp, Artificial Sequence
  Description of Artificial Sequence: Synthetic oligonucleotide
  Target: SCNA; (+) strand; PAM type: YTN; PAM sequence: TTC
ttaggcttcaggttcgtagt

SEQ ID NO: 63812 - DNA, 20 bp, Artificial Sequence
  Description of Artificial Sequence: Synthetic oligonucleotide
  Target: SCNA; (+) strand; PAM type: YTN; PAM sequence: CTT
aggcttcaggttcgtagtct

SEQ ID NO: 63813 - DNA, 20 bp, Artificial Sequence
  Description of Artificial Sequence: Synthetic oligonucleotide
  Target: SCNA; (+) strand; PAM type: YTN; PAM sequence: TTA
ggcttcaggttcgtagtctt

SEQ ID NO: 63814 - DNA, 20 bp, Artificial Sequence
  Description of Artificial Sequence: Synthetic oligonucleotide
  Target: SCNA; (+) strand; PAM type: YTN; PAM sequence: CTT
caggttcgtagtcttgatac

SEQ ID NO: 63815 - DNA, 20 bp, Artificial Sequence
  Description of Artificial Sequence: Synthetic oligonucleotide
  Target: SCNA; (+) strand; PAM type: YTN; PAM sequence: TTC
aggttcgtagtcttgatacc

SEQ ID NO: 63816 - DNA, 20 bp, Artificial Sequence
  Description of Artificial Sequence: Synthetic oligonucleotide
  Target: SCNA; (+) strand; PAM type: YTN; PAM sequence: TTC
gtagtcttgatacccttcct

SEQ ID NO: 63817 - DNA, 20 bp, Artificial Sequence
  Description of Artificial Sequence: Synthetic oligonucleotide
  Target: SCNA; (+) strand; PAM type: YTN; PAM sequence: CTT
gatacccttcctaatattag

SEQ ID NO: 63818 - DNA, 20 bp, Artificial Sequence
  Description of Artificial Sequence: Synthetic oligonucleotide
  Target: SCNA; (+) strand; PAM type: YTN; PAM sequence: TTG
atacccttcctaatattaga

SEQ ID NO: 63819 - DNA, 20 bp, Artificial Sequence
  Description of Artificial Sequence: Synthetic oligonucleotide
  Target: SCNA; (+) strand; PAM type: YTN; PAM sequence: CTT
cctaatattagaaaaatcaa

SEQ ID NO: 63820 - DNA, 20 bp, Artificial Sequence
  Description of Artificial Sequence: Synthetic oligonucleotide
  Target: SCNA; (+) strand; PAM type: YTN; PAM sequence: TTC
ctaatattagaaaaatcaaa

SEQ ID NO: 63821 - DNA, 20 bp, Artificial Sequence
  Description of Artificial Sequence: Synthetic oligonucleotide
  Target: SCNA; (+) strand; PAM type: YTN; PAM sequence: CTA
atattagaaaaatcaaaaag

SEQ ID NO: 63822 - DNA, 20 bp, Artificial Sequence
  Description of Artificial Sequence: Synthetic oligonucleotide
  Target: SCNA; (+) strand; PAM type: YTN; PAM sequence: TTA
gaaaaatcaaaaagacagca

SEQ ID NO: 63823 - DNA, 20 bp, Artificial Sequence
  Description of Artificial Sequence: Synthetic oligonucleotide
  Target: SCNA; (+) strand; PAM type: YTN; PAM sequence: CTG
ttagtataagtttcaattac

SEQ ID NO: 63824 - DNA, 20 bp, Artificial Sequence
  Description of Artificial Sequence: Synthetic oligonucleotide
  Target: SCNA; (+) strand; PAM type: YTN; PAM sequence: TTA
gtataagtttcaattacgca

SEQ ID NO: 63825 - DNA, 20 bp, Artificial Sequence
  Description of Artificial Sequence: Synthetic oligonucleotide
  Target: SCNA; (+) strand; PAM type: YTN; PAM sequence: TTT
caattacgcatcagcactga

SEQ ID NO: 63826 - DNA, 20 bp, Artificial Sequence
  Description of Artificial Sequence: Synthetic oligonucleotide
  Target: SCNA; (+) strand; PAM type: YTN; PAM sequence: TTC
aattacgcatcagcactgac

SEQ ID NO: 63827 - DNA, 20 bp, Artificial Sequence
  Description of Artificial Sequence: Synthetic oligonucleotide
  Target: SCNA; (+) strand; PAM type: YTN; PAM sequence: TTA
cgcatcagcactgacagcca

SEQ ID NO: 63828 - DNA, 20 bp, Artificial Sequence
  Description of Artificial Sequence: Synthetic oligonucleotide
  Target: SCNA; (+) strand; PAM type: YTN; PAM sequence: CTG
acagccaatgagataggaaa

SEQ ID NO: 63829 - DNA, 20 bp, Artificial Sequence
  Description of Artificial Sequence: Synthetic oligonucleotide
  Target: SCNA; (+) strand; PAM type: YTN; PAM sequence: CTC
cccacttacactaaaattta

SEQ ID NO: 63830 - DNA, 20 bp, Artificial Sequence
  Description of Artificial Sequence: Synthetic oligonucleotide
  Target: SCNA; (+) strand; PAM type: YTN; PAM sequence: CTT
acactaaaatttacaatcaa

SEQ ID NO: 63831 - DNA, 20 bp, Artificial Sequence
  Description of Artificial Sequence: Synthetic oligonucleotide
  Target: SCNA; (+) strand; PAM type: YTN; PAM sequence: TTA
cactaaaatttacaatcaat

SEQ ID NO: 63832 - DNA, 20 bp, Artificial Sequence
  Description of Artificial Sequence: Synthetic oligonucleotide
  Target: SCNA; (+) strand; PAM type: YTN; PAM sequence: CTA
aaatttacaatcaatgtttt

SEQ ID NO: 63833 - DNA, 20 bp, Artificial Sequence
  Description of Artificial Sequence: Synthetic oligonucleotide
  Target: SCNA; (+) strand; PAM type: YTN; PAM sequence: TTT
acaatcaatgtttttgcaaa

SEQ ID NO: 63834 - DNA, 20 bp, Artificial Sequence
  Description of Artificial Sequence: Synthetic oligonucleotide
  Target: SCNA; (+) strand; PAM type: YTN; PAM sequence: TTA
caatcaatgtttttgcaaat

SEQ ID NO: 63835 - DNA, 20 bp, Artificial Sequence
  Description of Artificial Sequence: Synthetic oligonucleotide
  Target: SCNA; (+) strand; PAM type: YTN; PAM sequence: TTT
ttgcaaatattctgcagcaa

SEQ ID NO: 63836 - DNA, 20 bp, Artificial Sequence
  Description of Artificial Sequence: Synthetic oligonucleotide
  Target: SCNA; (+) strand; PAM type: YTN; PAM sequence: TTT
tgcaaatattctgcagcaaa

SEQ ID NO: 63837 - DNA, 20 bp, Artificial Sequence
  Description of Artificial Sequence: Synthetic oligonucleotide
  Target: SCNA; (+) strand; PAM type: YTN; PAM sequence: TTT
gcaaatattctgcagcaaat

SEQ ID NO: 63838 - DNA, 20 bp, Artificial Sequence
  Description of Artificial Sequence: Synthetic oligonucleotide
  Target: SCNA; (+) strand; PAM type: YTN; PAM sequence: TTG
caaatattctgcagcaaata

SEQ ID NO: 63839 - DNA, 20 bp, Artificial Sequence
  Description of Artificial Sequence: Synthetic oligonucleotide
  Target: SCNA; (+) strand; PAM type: YTN; PAM sequence: TTC
tgcagcaaatattatcttat

SEQ ID NO: 63840 - DNA, 20 bp, Artificial Sequence
  Description of Artificial Sequence: Synthetic oligonucleotide
  Target: SCNA; (+) strand; PAM type: YTN; PAM sequence: CTG
cagcaaatattatcttattt

SEQ ID NO: 63841 - DNA, 20 bp, Artificial Sequence
  Description of Artificial Sequence: Synthetic oligonucleotide
  Target: SCNA; (+) strand; PAM type: YTN; PAM sequence: TTA
tcttatttttaatagttgtg

SEQ ID NO: 63842 - DNA, 20 bp, Artificial Sequence
  Description of Artificial Sequence: Synthetic oligonucleotide
  Target: SCNA; (+) strand; PAM type: YTN; PAM sequence: CTT
atttttaatagttgtgtctt

SEQ ID NO: 63843 - DNA, 20 bp, Artificial Sequence
  Description of Artificial Sequence: Synthetic oligonucleotide
  Target: SCNA; (+) strand; PAM type: YTN; PAM sequence: TTA
tttttaatagttgtgtcttt

SEQ ID NO: 63844 - DNA, 20 bp, Artificial Sequence
  Description of Artificial Sequence: Synthetic oligonucleotide
  Target: SCNA; (+) strand; PAM type: YTN; PAM sequence: TTT
ttaatagttgtgtctttctt

SEQ ID NO: 63845 - DNA, 20 bp, Artificial Sequence
  Description of Artificial Sequence: Synthetic oligonucleotide
  Target: SCNA; (+) strand; PAM type: YTN; PAM sequence: TTT
taatagttgtgtctttcttg

SEQ ID NO: 63846 - DNA, 20 bp, Artificial Sequence
  Description of Artificial Sequence: Synthetic oligonucleotide
  Target: SCNA; (+) strand; PAM type: YTN; PAM sequence: TTT
aatagttgtgtctttcttgt

SEQ ID NO: 63847 - DNA, 20 bp, Artificial Sequence
  Description of Artificial Sequence: Synthetic oligonucleotide
  Target: SCNA; (+) strand; PAM type: YTN; PAM sequence: TTA
atagttgtgtctttcttgtc

SEQ ID NO: 63848 - DNA, 20 bp, Artificial Sequence
  Description of Artificial Sequence: Synthetic oligonucleotide
  Target: SCNA; (+) strand; PAM type: YTN; PAM sequence: TTG
tgtctttcttgtctgatata

SEQ ID NO: 63849 - DNA, 20 bp, Artificial Sequence
  Description of Artificial Sequence: Synthetic oligonucleotide
  Target: SCNA; (+) strand; PAM type: YTN; PAM sequence: CTT
tcttgtctgatataaaagtg

SEQ ID NO: 63850 - DNA, 20 bp, Artificial Sequence
  Description of Artificial Sequence: Synthetic oligonucleotide
  Target: SCNA; (+) strand; PAM type: YTN; PAM sequence: TTT
cttgtctgatataaaagtga

SEQ ID NO: 63851 - DNA, 20 bp, Artificial Sequence
  Description of Artificial Sequence: Synthetic oligonucleotide
  Target: SCNA; (+) strand; PAM type: YTN; PAM sequence: TTC
ttgtctgatataaaagtgaa

SEQ ID NO: 63852 - DNA, 20 bp, Artificial Sequence
  Description of Artificial Sequence: Synthetic oligonucleotide
  Target: SCNA; (+) strand; PAM type: YTN; PAM sequence: CTT
gtctgatataaaagtgaatt

SEQ ID NO: 63853 - DNA, 20 bp, Artificial Sequence
  Description of Artificial Sequence: Synthetic oligonucleotide
  Target: SCNA; (+) strand; PAM type: YTN; PAM sequence: TTG
tctgatataaaagtgaatta

SEQ ID NO: 63854 - DNA, 20 bp, Artificial Sequence
  Description of Artificial Sequence: Synthetic oligonucleotide
  Target: SCNA; (+) strand; PAM type: YTN; PAM sequence: CTG
atataaaagtgaattacagt

SEQ ID NO: 63855 - DNA, 20 bp, Artificial Sequence
  Description of Artificial Sequence: Synthetic oligonucleotide
  Target: SCNA; (+) strand; PAM type: YTN; PAM sequence: TTA
cagtagtagtcagagttaaa

SEQ ID NO: 63856 - DNA, 20 bp, Artificial Sequence
  Description of Artificial Sequence: Synthetic oligonucleotide
  Target: SCNA; (+) strand; PAM type: YTN; PAM sequence: TTA
aaatatctaggttctgatcc

SEQ ID NO: 63857 - DNA, 20 bp, Artificial Sequence
  Description of Artificial Sequence: Synthetic oligonucleotide
  Target: SCNA; (+) strand; PAM type: YTN; PAM sequence: CTA
ggttctgatccggatgcacc

SEQ ID NO: 63858 - DNA, 20 bp, Artificial Sequence
  Description of Artificial Sequence: Synthetic oligonucleotide
  Target: SCNA; (+) strand; PAM type: YTN; PAM sequence: TTC
tgatccggatgcaccattta

SEQ ID NO: 63859 - DNA, 20 bp, Artificial Sequence
  Description of Artificial Sequence: Synthetic oligonucleotide
  Target: SCNA; (+) strand; PAM type: YTN; PAM sequence: CTG
atccggatgcaccatttaat

SEQ ID NO: 63860 - DNA, 20 bp, Artificial Sequence
  Description of Artificial Sequence: Synthetic oligonucleotide
  Target: SCNA; (+) strand; PAM type: YTN; PAM sequence: TTT
aatgatcatatacctagttt

SEQ ID NO: 63861 - DNA, 20 bp, Artificial Sequence
  Description of Artificial Sequence: Synthetic oligonucleotide
  Target: SCNA; (+) strand; PAM type: YTN; PAM sequence: TTA
atgatcatatacctagtttg

SEQ ID NO: 63862 - DNA, 20 bp, Artificial Sequence
  Description of Artificial Sequence: Synthetic oligonucleotide
  Target: SCNA; (+) strand; PAM type: YTN; PAM sequence: CTA
gtttggtaggacaaataagt

SEQ ID NO: 63863 - DNA, 20 bp, Artificial Sequence
  Description of Artificial Sequence: Synthetic oligonucleotide
  Target: SCNA; (+) strand; PAM type: YTN; PAM sequence: TTT
ggtaggacaaataagttgga

SEQ ID NO: 63864 - DNA, 20 bp, Artificial Sequence
  Description of Artificial Sequence: Synthetic oligonucleotide
  Target: SCNA; (+) strand; PAM type: YTN; PAM sequence: TTG
gtaggacaaataagttggac

SEQ ID NO: 63865 - DNA, 20 bp, Artificial Sequence
  Description of Artificial Sequence: Synthetic oligonucleotide
  Target: SCNA; (+) strand; PAM type: YTN; PAM sequence: TTG
gactgtctggttctcagttt

SEQ ID NO: 63866 - DNA, 20 bp, Artificial Sequence
  Description of Artificial Sequence: Synthetic oligonucleotide
  Target: SCNA; (+) strand; PAM type: YTN; PAM sequence: CTG
tctggttctcagtttcttca

SEQ ID NO: 63867 - DNA, 20 bp, Artificial Sequence
  Description of Artificial Sequence: Synthetic oligonucleotide
  Target: SCNA; (+) strand; PAM type: YTN; PAM sequence: CTG
gttctcagtttcttcacctg

SEQ ID NO: 63868 - DNA, 20 bp, Artificial Sequence
  Description of Artificial Sequence: Synthetic oligonucleotide
  Target: SCNA; (+) strand; PAM type: YTN; PAM sequence: TTC
tcagtttcttcacctgtaaa

SEQ ID NO: 63869 - DNA, 20 bp, Artificial Sequence
  Description of Artificial Sequence: Synthetic oligonucleotide
  Target: SCNA; (+) strand; PAM type: YTN; PAM sequence: CTC
agtttcttcacctgtaaaat

SEQ ID NO: 63870 - DNA, 20 bp, Artificial Sequence
  Description of Artificial Sequence: Synthetic oligonucleotide
  Target: SCNA; (+) strand; PAM type: YTN; PAM sequence: TTT
cttcacctgtaaaatgtgag

SEQ ID NO: 63871 - DNA, 20 bp, Artificial Sequence
  Description of Artificial Sequence: Synthetic oligonucleotide
  Target: SCNA; (+) strand; PAM type: YTN; PAM sequence: TTC
ttcacctgtaaaatgtgaga

SEQ ID NO: 63872 - DNA, 20 bp, Artificial Sequence
  Description of Artificial Sequence: Synthetic oligonucleotide
  Target: SCNA; (+) strand; PAM type: YTN; PAM sequence: CTT
cacctgtaaaatgtgagaac

SEQ ID NO: 63873 - DNA, 20 bp, Artificial Sequence
  Description of Artificial Sequence: Synthetic oligonucleotide
  Target: SCNA; (+) strand; PAM type: YTN; PAM sequence: TTC
acctgtaaaatgtgagaaca

SEQ ID NO: 63874 - DNA, 20 bp, Artificial Sequence
  Description of Artificial Sequence: Synthetic oligonucleotide
  Target: SCNA; (+) strand; PAM type: YTN; PAM sequence: CTG
taaaatgtgagaacaaaatc

SEQ ID NO: 63875 - DNA, 20 bp, Artificial Sequence
  Description of Artificial Sequence: Synthetic oligonucleotide
  Target: SCNA; (+) strand; PAM type: YTN; PAM sequence: CTG
tctataaagccttttccaga

SEQ ID NO: 63876 - DNA, 20 bp, Artificial Sequence
  Description of Artificial Sequence: Synthetic oligonucleotide
  Target: SCNA; (+) strand; PAM type: YTN; PAM sequence: CTA
taaagccttttccagactaa

SEQ ID NO: 63877 - DNA, 20 bp, Artificial Sequence
  Description of Artificial Sequence: Synthetic oligonucleotide
  Target: SCNA; (+) strand; PAM type: YTN; PAM sequence: CTT
ttccagactaagatgctcta

SEQ ID NO: 63878 - DNA, 20 bp, Artificial Sequence
  Description of Artificial Sequence: Synthetic oligonucleotide
  Target: SCNA; (+) strand; PAM type: YTN; PAM sequence: TTT
tccagactaagatgctctaa

SEQ ID NO: 63879 - DNA, 20 bp, Artificial Sequence
  Description of Artificial Sequence: Synthetic oligonucleotide
  Target: SCNA; (+) strand; PAM type: YTN; PAM sequence: TTT
ccagactaagatgctctaat

SEQ ID NO: 63880 - DNA, 20 bp, Artificial Sequence
  Description of Artificial Sequence: Synthetic oligonucleotide
  Target: SCNA; (+) strand; PAM type: YTN; PAM sequence: TTC
cagactaagatgctctaatt

SEQ ID NO: 63881 - DNA, 20 bp, Artificial Sequence
  Description of Artificial Sequence: Synthetic oligonucleotide
  Target: SCNA; (+) strand; PAM type: YTN; PAM sequence: CTA
agatgctctaattctcagaa

SEQ ID NO: 63882 - DNA, 20 bp, Artificial Sequence
  Description of Artificial Sequence: Synthetic oligonucleotide
  Target: SCNA; (+) strand; PAM type: YTN; PAM sequence: CTC
taattctcagaaggaaatta

SEQ ID NO: 63883 - DNA, 20 bp, Artificial Sequence
  Description of Artificial Sequence: Synthetic oligonucleotide
  Target: SCNA; (+) strand; PAM type: YTN; PAM sequence: CTA
attctcagaaggaaattaag

SEQ ID NO: 63884 - DNA, 20 bp, Artificial Sequence
  Description of Artificial Sequence: Synthetic oligonucleotide
  Target: SCNA; (+) strand; PAM type: YTN; PAM sequence: TTC
tcagaaggaaattaagatgt

SEQ ID NO: 63885 - DNA, 20 bp, Artificial Sequence
  Description of Artificial Sequence: Synthetic oligonucleotide
  Target: SCNA; (+) strand; PAM type: YTN; PAM sequence: CTC
agaaggaaattaagatgttt

SEQ ID NO: 63886 - DNA, 20 bp, Artificial Sequence
  Description of Artificial Sequence: Synthetic oligonucleotide
  Target: SCNA; (+) strand; PAM type: YTN; PAM sequence: TTA
agatgtttgaaggcaagata

SEQ ID NO: 63887 - DNA, 20 bp, Artificial Sequence
  Description of Artificial Sequence: Synthetic oligonucleotide
  Target: SCNA; (+) strand; PAM type: YTN; PAM sequence: TTT
gaaggcaagatacattttcc

SEQ ID NO: 63888 - DNA, 20 bp, Artificial Sequence
  Description of Artificial Sequence: Synthetic oligonucleotide
  Target: SCNA; (+) strand; PAM type: YTN; PAM sequence: TTG
aaggcaagatacattttccc

SEQ ID NO: 63889 - DNA, 20 bp, Artificial Sequence
  Description of Artificial Sequence: Synthetic oligonucleotide
  Target: SCNA; (+) strand; PAM type: YTN; PAM sequence: TTT
tccctactttcactctccca

SEQ ID NO: 63890 - DNA, 20 bp, Artificial Sequence
  Description of Artificial Sequence: Synthetic oligonucleotide
  Target: SCNA; (+) strand; PAM type: YTN; PAM sequence: TTT
ccctactttcactctcccag

SEQ ID NO: 63891 - DNA, 20 bp, Artificial Sequence
  Description of Artificial Sequence: Synthetic oligonucleotide
  Target: SCNA; (+) strand; PAM type: YTN; PAM sequence: TTC
cctactttcactctcccagt

SEQ ID NO: 63892 - DNA, 20 bp, Artificial Sequence
  Description of Artificial Sequence: Synthetic oligonucleotide
  Target: SCNA; (+) strand; PAM type: YTN; PAM sequence: CTA
ctttcactctcccagttgaa

SEQ ID NO: 63893 - DNA, 20 bp, Artificial Sequence
  Description of Artificial Sequence: Synthetic oligonucleotide
  Target: SCNA; (+) strand; PAM type: YTN; PAM sequence: CTT
tcactctcccagttgaaaat

SEQ ID NO: 63894 - DNA, 20 bp, Artificial Sequence
  Description of Artificial Sequence: Synthetic oligonucleotide
  Target: SCNA; (+) strand; PAM type: YTN; PAM sequence: TTT
cactctcccagttgaaaatt

SEQ ID NO: 63895 - DNA, 20 bp, Artificial Sequence
  Description of Artificial Sequence: Synthetic oligonucleotide
  Target: SCNA; (+) strand; PAM type: YTN; PAM sequence: TTC
actctcccagttgaaaattt

SEQ ID NO: 63896 - DNA, 20 bp, Artificial Sequence
  Description of Artificial Sequence: Synthetic oligonucleotide
  Target: SCNA; (+) strand; PAM type: YTN; PAM sequence: CTC
tcccagttgaaaatttcgtc

SEQ ID NO: 63897 - DNA, 20 bp, Artificial Sequence
  Description of Artificial Sequence: Synthetic oligonucleotide
  Target: SCNA; (+) strand; PAM type: YTN; PAM sequence: CTC
ccagttgaaaatttcgtctt

SEQ ID NO: 63898 - DNA, 20 bp, Artificial Sequence
  Description of Artificial Sequence: Synthetic oligonucleotide
  Target: SCNA; (+) strand; PAM type: YTN; PAM sequence: TTG
aaaatttcgtcttcatctat

SEQ ID NO: 63899 - DNA, 20 bp, Artificial Sequence
  Description of Artificial Sequence: Synthetic oligonucleotide
  Target: SCNA; (+) strand; PAM type: YTN; PAM sequence: TTT
cgtcttcatctatggcttca

SEQ ID NO: 63900 - DNA, 20 bp, Artificial Sequence
  Description of Artificial Sequence: Synthetic oligonucleotide
  Target: SCNA; (+) strand; PAM type: YTN; PAM sequence: TTC
gtcttcatctatggcttcaa

SEQ ID NO: 63901 - DNA, 20 bp, Artificial Sequence
  Description of Artificial Sequence: Synthetic oligonucleotide
  Target: SCNA; (+) strand; PAM type: YTN; PAM sequence: CTT
catctatggcttcaattatt

SEQ ID NO: 63902 - DNA, 20 bp, Artificial Sequence
  Description of Artificial Sequence: Synthetic oligonucleotide
  Target: SCNA; (+) strand; PAM type: YTN; PAM sequence: TTC
atctatggcttcaattatta

SEQ ID NO: 63903 - DNA, 20 bp, Artificial Sequence
  Description of Artificial Sequence: Synthetic oligonucleotide
  Target: SCNA; (+) strand; PAM type: YTN; PAM sequence: CTA
tggcttcaattattacttgt

SEQ ID NO: 63904 - DNA, 20 bp, Artificial Sequence
  Description of Artificial Sequence: Synthetic oligonucleotide
  Target: SCNA; (+) strand; PAM type: YTN; PAM sequence: CTT
caattattacttgtatttca

SEQ ID NO: 63905 - DNA, 20 bp, Artificial Sequence
  Description of Artificial Sequence: Synthetic oligonucleotide
  Target: SCNA; (+) strand; PAM type: YTN; PAM sequence: TTC
aattattacttgtatttcaa

SEQ ID NO: 63906 - DNA, 20 bp, Artificial Sequence
  Description of Artificial Sequence: Synthetic oligonucleotide
  Target: SCNA; (+) strand; PAM type: YTN; PAM sequence: TTA
ttacttgtatttcaaacctc

SEQ ID NO: 63907 - DNA, 20 bp, Artificial Sequence
  Description of Artificial Sequence: Synthetic oligonucleotide
  Target: SCNA; (+) strand; PAM type: YTN; PAM sequence: TTA
cttgtatttcaaacctcaag

SEQ ID NO: 63908 - DNA, 20 bp, Artificial Sequence
  Description of Artificial Sequence: Synthetic oligonucleotide
  Target: SCNA; (+) strand; PAM type: YTN; PAM sequence: CTT
gtatttcaaacctcaagctc

SEQ ID NO: 63909 - DNA, 20 bp, Artificial Sequence
  Description of Artificial Sequence: Synthetic oligonucleotide
  Target: SCNA; (+) strand; PAM type: YTN; PAM sequence: TTG
tatttcaaacctcaagctct

SEQ ID NO: 63910 - DNA, 20 bp, Artificial Sequence
  Description of Artificial Sequence: Synthetic oligonucleotide
  Target: SCNA; (+) strand; PAM type: YTN; PAM sequence: TTT
caaacctcaagctctccata

SEQ ID NO: 63911 - DNA, 20 bp, Artificial Sequence
  Description of Artificial Sequence: Synthetic oligonucleotide
  Target: SCNA; (+) strand; PAM type: YTN; PAM sequence: TTC
aaacctcaagctctccatac

SEQ ID NO: 63912 - DNA, 20 bp, Artificial Sequence
  Description of Artificial Sequence: Synthetic oligonucleotide
  Target: SCNA; (+) strand; PAM type: YTN; PAM sequence: CTC
aagctctccatacagtatct

SEQ ID NO: 63913 - DNA, 20 bp, Artificial Sequence
  Description of Artificial Sequence: Synthetic oligonucleotide
  Target: SCNA; (+) strand; PAM type: YTN; PAM sequence: CTC
tccatacagtatctggatag

SEQ ID NO: 63914 - DNA, 20 bp, Artificial Sequence
  Description of Artificial Sequence: Synthetic oligonucleotide
  Target: SCNA; (+) strand; PAM type: YTN; PAM sequence: CTC
catacagtatctggatagca

SEQ ID NO: 63915 - DNA, 20 bp, Artificial Sequence
  Description of Artificial Sequence: Synthetic oligonucleotide
  Target: SCNA; (+) strand; PAM type: YTN; PAM sequence: CTG
gatagcatccacaacacaaa

SEQ ID NO: 63916 - DNA, 20 bp, Artificial Sequence
  Description of Artificial Sequence: Synthetic oligonucleotide
  Target: SCNA; (+) strand; PAM type: YTN; PAM sequence: TTA
atggatttaattaaagggat

SEQ ID NO: 63917 - DNA, 20 bp, Artificial Sequence
  Description of Artificial Sequence: Synthetic oligonucleotide
  Target: SCNA; (+) strand; PAM type: YTN; PAM sequence: TTT
aattaaagggatcagattat

SEQ ID NO: 63918 - DNA, 20 bp, Artificial Sequence
  Description of Artificial Sequence: Synthetic oligonucleotide
  Target: SCNA; (+) strand; PAM type: YTN; PAM sequence: TTA
attaaagggatcagattatt

SEQ ID NO: 63919 - DNA, 20 bp, Artificial Sequence
  Description of Artificial Sequence: Synthetic oligonucleotide
  Target: SCNA; (+) strand; PAM type: YTN; PAM sequence: TTA
aagggatcagattattcctc

SEQ ID NO: 63920 - DNA, 20 bp, Artificial Sequence
  Description of Artificial Sequence: Synthetic oligonucleotide
  Target: SCNA; (+) strand; PAM type: YTN; PAM sequence: TTA
ttcctcctaaagagcaactc

SEQ ID NO: 63921 - DNA, 20 bp, Artificial Sequence
  Description of Artificial Sequence: Synthetic oligonucleotide
  Target: SCNA; (+) strand; PAM type: YTN; PAM sequence: TTC
ctcctaaagagcaactctaa

SEQ ID NO: 63922 - DNA, 20 bp, Artificial Sequence
  Description of Artificial Sequence: Synthetic oligonucleotide
  Target: SCNA; (+) strand; PAM type: YTN; PAM sequence: CTC
ctaaagagcaactctaataa

SEQ ID NO: 63923 - DNA, 20 bp, Artificial Sequence
  Description of Artificial Sequence: Synthetic oligonucleotide
  Target: SCNA; (+) strand; PAM type: YTN; PAM sequence: CTA
aagagcaactctaataatat

SEQ ID NO: 63924 - DNA, 20 bp, Artificial Sequence
  Description of Artificial Sequence: Synthetic oligonucleotide
  Target: SCNA; (+) strand; PAM type: YTN; PAM sequence: CTC
taataatatcaggattctgc

SEQ ID NO: 63925 - DNA, 20 bp, Artificial Sequence
  Description of Artificial Sequence: Synthetic oligonucleotide
  Target: SCNA; (+) strand; PAM type: YTN; PAM sequence: CTA
ataatatcaggattctgctt

SEQ ID NO: 63926 - DNA, 20 bp, Artificial Sequence
  Description of Artificial Sequence: Synthetic oligonucleotide
  Target: SCNA; (+) strand; PAM type: YTN; PAM sequence: TTC
tgcttaaaaacaaacaaata

SEQ ID NO: 63927 - DNA, 20 bp, Artificial Sequence
  Description of Artificial Sequence: Synthetic oligonucleotide
  Target: SCNA; (+) strand; PAM type: YTN; PAM sequence: CTG
cttaaaaacaaacaaataag

SEQ ID NO: 63928 - DNA, 20 bp, Artificial Sequence
  Description of Artificial Sequence: Synthetic oligonucleotide
  Target: SCNA; (+) strand; PAM type: YTN; PAM sequence: CTT
aaaaacaaacaaataagcat

SEQ ID NO: 63929 - DNA, 20 bp, Artificial Sequence
  Description of Artificial Sequence: Synthetic oligonucleotide
  Target: SCNA; (+) strand; PAM type: YTN; PAM sequence: TTA
aaaacaaacaaataagcata

SEQ ID NO: 63930 - DNA, 20 bp, Artificial Sequence
  Description of Artificial Sequence: Synthetic oligonucleotide
  Target: SCNA; (+) strand; PAM type: YTN; PAM sequence: CTT
caataactcaagttgttttc

SEQ ID NO: 63931 - DNA, 20 bp, Artificial Sequence
  Description of Artificial Sequence: Synthetic oligonucleotide
  Target: SCNA; (+) strand; PAM type: YTN; PAM sequence: TTC
aataactcaagttgttttct

SEQ ID NO: 63932 - DNA, 20 bp, Artificial Sequence
  Description of Artificial Sequence: Synthetic oligonucleotide
  Target: SCNA; (+) strand; PAM type: YTN; PAM sequence: CTC
aagttgttttctgaatagaa

SEQ ID NO: 63933 - DNA, 20 bp, Artificial Sequence
  Description of Artificial Sequence: Synthetic oligonucleotide
  Target: SCNA; (+) strand; PAM type: YTN; PAM sequence: TTG
ttttctgaatagaatacaag

SEQ ID NO: 63934 - DNA, 20 bp, Artificial Sequence
  Description of Artificial Sequence: Synthetic oligonucleotide
  Target: SCNA; (+) strand; PAM type: YTN; PAM sequence: TTT
tctgaatagaatacaagctg

SEQ ID NO: 63935 - DNA, 20 bp, Artificial Sequence
  Description of Artificial Sequence: Synthetic oligonucleotide
  Target: SCNA; (+) strand; PAM type: YTN; PAM sequence: TTT
ctgaatagaatacaagctga

SEQ ID NO: 63936 - DNA, 20 bp, Artificial Sequence
  Description of Artificial Sequence: Synthetic oligonucleotide
  Target: SCNA; (+) strand; PAM type: YTN; PAM sequence: TTC
tgaatagaatacaagctgaa

SEQ ID NO: 63937 - DNA, 20 bp, Artificial Sequence
  Description of Artificial Sequence: Synthetic oligonucleotide
  Target: SCNA; (+) strand; PAM type: YTN; PAM sequence: CTG
aatagaatacaagctgaaat

SEQ ID NO: 63938 - DNA, 20 bp, Artificial Sequence
  Description of Artificial Sequence: Synthetic oligonucleotide
  Target: SCNA; (+) strand; PAM type: YTN; PAM sequence: CTG
aaatgacaagattatcctaa

SEQ ID NO: 63939 - DNA, 20 bp, Artificial Sequence
  Description of Artificial Sequence: Synthetic oligonucleotide
  Target: SCNA; (+) strand; PAM type: YTN; PAM sequence: TTA
tcctaatactctataacttg

SEQ ID NO: 63940 - DNA, 20 bp, Artificial Sequence
  Description of Artificial Sequence: Synthetic oligonucleotide
  Target: SCNA; (+) strand; PAM type: YTN; PAM sequence: CTA
atactctataacttgtcttt

SEQ ID NO: 63941 - DNA, 20 bp, Artificial Sequence
  Description of Artificial Sequence: Synthetic oligonucleotide
  Target: SCNA; (+) strand; PAM type: YTN; PAM sequence: CTC
tataacttgtctttgaccca

SEQ ID NO: 63942 - DNA, 20 bp, Artificial Sequence
  Description of Artificial Sequence: Synthetic oligonucleotide
  Target: SCNA; (+) strand; PAM type: YTN; PAM sequence: CTA
taacttgtctttgacccata

SEQ ID NO: 63943 - DNA, 20 bp, Artificial Sequence
  Description of Artificial Sequence: Synthetic oligonucleotide
  Target: SCNA; (+) strand; PAM type: YTN; PAM sequence: CTT
gtctttgacccatagctgca

SEQ ID NO: 63944 - DNA, 20 bp, Artificial Sequence
  Description of Artificial Sequence: Synthetic oligonucleotide
  Target: SCNA; (+) strand; PAM type: YTN; PAM sequence: TTG
tctttgacccatagctgcaa

SEQ ID NO: 63945 - DNA, 20 bp, Artificial Sequence
  Description of Artificial Sequence: Synthetic oligonucleotide
  Target: SCNA; (+) strand; PAM type: YTN; PAM sequence: CTT
tgacccatagctgcaaattc

SEQ ID NO: 63946 - DNA, 20 bp, Artificial Sequence
  Description of Artificial Sequence: Synthetic oligonucleotide
  Target: SCNA; (+) strand; PAM type: YTN; PAM sequence: TTT
gacccatagctgcaaattca

SEQ ID NO: 63947 - DNA, 20 bp, Artificial Sequence
  Description of Artificial Sequence: Synthetic oligonucleotide
  Target: SCNA; (+) strand; PAM type: YTN; PAM sequence: TTG
acccatagctgcaaattcaa

SEQ ID NO: 63948 - DNA, 20 bp, Artificial Sequence
  Description of Artificial Sequence: Synthetic oligonucleotide
  Target: SCNA; (+) strand; PAM type: YTN; PAM sequence: CTG
caaattcaatctatcaccat

SEQ ID NO: 63949 - DNA, 20 bp, Artificial Sequence
  Description of Artificial Sequence: Synthetic oligonucleotide
  Target: SCNA; (+) strand; PAM type: YTN; PAM sequence: TTC
aatctatcaccattttcctt

SEQ ID NO: 63950 - DNA, 20 bp, Artificial Sequence
  Description of Artificial Sequence: Synthetic oligonucleotide
  Target: SCNA; (+) strand; PAM type: YTN; PAM sequence: CTA
tcaccattttccttgttcct

SEQ ID NO: 63951 - DNA, 20 bp, Artificial Sequence
  Description of Artificial Sequence: Synthetic oligonucleotide
  Target: SCNA; (+) strand; PAM type: YTN; PAM sequence: TTT
tccttgttcctaagcttgag

SEQ ID NO: 63952 - DNA, 20 bp, Artificial Sequence
  Description of Artificial Sequence: Synthetic oligonucleotide
  Target: SCNA; (+) strand; PAM type: YTN; PAM sequence: TTT
ccttgttcctaagcttgagt

SEQ ID NO: 63953 - DNA, 20 bp, Artificial Sequence
  Description of Artificial Sequence: Synthetic oligonucleotide
  Target: SCNA; (+) strand; PAM type: YTN; PAM sequence: TTC
cttgttcctaagcttgagtc

SEQ ID NO: 63954 - DNA, 20 bp, Artificial Sequence
  Description of Artificial Sequence: Synthetic oligonucleotide
  Target: SCNA; (+) strand; PAM type: YTN; PAM sequence: CTT
gttcctaagcttgagtcata

SEQ ID NO: 63955 - DNA, 20 bp, Artificial Sequence
  Description of Artificial Sequence: Synthetic oligonucleotide
  Target: SCNA; (+) strand; PAM type: YTN; PAM sequence: TTG
ttcctaagcttgagtcataa

SEQ ID NO: 63956 - DNA, 20 bp, Artificial Sequence
  Description of Artificial Sequence: Synthetic oligonucleotide
  Target: SCNA; (+) strand; PAM type: YTN; PAM sequence: TTC
ctaagcttgagtcataatta

SEQ ID NO: 63957 - DNA, 20 bp, Artificial Sequence
  Description of Artificial Sequence: Synthetic oligonucleotide
  Target: SCNA; (+) strand; PAM type: YTN; PAM sequence: CTA
agcttgagtcataattattc

SEQ ID NO: 63958 - DNA, 20 bp, Artificial Sequence
  Description of Artificial Sequence: Synthetic oligonucleotide
  Target: SCNA; (+) strand; PAM type: YTN; PAM sequence: CTT
gagtcataattattcactgt

SEQ ID NO: 63959 - DNA, 20 bp, Artificial Sequence
  Description of Artificial Sequence: Synthetic oligonucleotide
  Target: SCNA; (+) strand; PAM type: YTN; PAM sequence: TTG
agtcataattattcactgtt

SEQ ID NO: 63960 - DNA, 20 bp, Artificial Sequence
  Description of Artificial Sequence: Synthetic oligonucleotide
  Target: SCNA; (+) strand; PAM type: YTN; PAM sequence: TTA
ttcactgttctcagacatat

SEQ ID NO: 63961 - DNA, 20 bp, Artificial Sequence
  Description of Artificial Sequence: Synthetic oligonucleotide
  Target: SCNA; (+) strand; PAM type: YTN; PAM sequence: TTC
actgttctcagacatatcca

SEQ ID NO: 63962 - DNA, 20 bp, Artificial Sequence
  Description of Artificial Sequence: Synthetic oligonucleotide
  Target: SCNA; (+) strand; PAM type: YTN; PAM sequence: CTG
ttctcagacatatccatttg

SEQ ID NO: 63963 - DNA, 20 bp, Artificial Sequence
  Description of Artificial Sequence: Synthetic oligonucleotide
  Target: SCNA; (+) strand; PAM type: YTN; PAM sequence: TTC
tcagacatatccatttgcat

SEQ ID NO: 63964 - DNA, 20 bp, Artificial Sequence
  Description of Artificial Sequence: Synthetic oligonucleotide
  Target: SCNA; (+) strand; PAM type: YTN; PAM sequence: CTC
agacatatccatttgcatgc

SEQ ID NO: 63965 - DNA, 20 bp, Artificial Sequence
  Description of Artificial Sequence: Synthetic oligonucleotide
  Target: SCNA; (+) strand; PAM type: YTN; PAM sequence: TTT
gcatgctcagacatacatgc

SEQ ID NO: 63966 - DNA, 20 bp, Artificial Sequence
  Description of Artificial Sequence: Synthetic oligonucleotide
  Target: SCNA; (+) strand; PAM type: YTN; PAM sequence: TTG
catgctcagacatacatgcc

SEQ ID NO: 63967 - DNA, 20 bp, Artificial Sequence
  Description of Artificial Sequence: Synthetic oligonucleotide
  Target: SCNA; (+) strand; PAM type: YTN; PAM sequence: CTC
agacatacatgcctttgctt

SEQ ID NO: 63968 - DNA, 20 bp, Artificial Sequence
  Description of Artificial Sequence: Synthetic oligonucleotide
  Target: SCNA; (+) strand; PAM type: YTN; PAM sequence: CTT
tgcttctgatattcccttgt

SEQ ID NO: 63969 - DNA, 20 bp, Artificial Sequence
  Description of Artificial Sequence: Synthetic oligonucleotide
  Target: SCNA; (+) strand; PAM type: YTN; PAM sequence: TTT
gcttctgatattcccttgtg

SEQ ID NO: 63970 - DNA, 20 bp, Artificial Sequence
  Description of Artificial Sequence: Synthetic oligonucleotide
  Target: SCNA; (+) strand; PAM type: YTN; PAM sequence: TTG
cttctgatattcccttgtgc

SEQ ID NO: 63971 - DNA, 20 bp, Artificial Sequence
  Description of Artificial Sequence: Synthetic oligonucleotide
  Target: SCNA; (+) strand; PAM type: YTN; PAM sequence: CTT
ctgatattcccttgtgccag

SEQ ID NO: 63972 - DNA, 20 bp, Artificial Sequence
  Description of Artificial Sequence: Synthetic oligonucleotide
  Target: SCNA; (+) strand; PAM type: YTN; PAM sequence: TTC
tgatattcccttgtgccaga

SEQ ID NO: 63973 - DNA, 20 bp, Artificial Sequence
  Description of Artificial Sequence: Synthetic oligonucleotide
  Target: SCNA; (+) strand; PAM type: YTN; PAM sequence: CTG
atattcccttgtgccagaat

SEQ ID NO: 63974 - DNA, 20 bp, Artificial Sequence
  Description of Artificial Sequence: Synthetic oligonucleotide
  Target: SCNA; (+) strand; PAM type: YTN; PAM sequence: TTC
ccttgtgccagaatgtcctc

SEQ ID NO: 63975 - DNA, 20 bp, Artificial Sequence
  Description of Artificial Sequence: Synthetic oligonucleotide
  Target: SCNA; (+) strand; PAM type: YTN; PAM sequence: CTT
gtgccagaatgtcctctgtt

SEQ ID NO: 63976 - DNA, 20 bp, Artificial Sequence
  Description of Artificial Sequence: Synthetic oligonucleotide
  Target: SCNA; (+) strand; PAM type: YTN; PAM sequence: TTG
tgccagaatgtcctctgttt

SEQ ID NO: 63977 - DNA, 20 bp, Artificial Sequence
  Description of Artificial Sequence: Synthetic oligonucleotide
  Target: SCNA; (+) strand; PAM type: YTN; PAM sequence: CTC
tgtttgttttgacctactat

SEQ ID NO: 63978 - DNA, 20 bp, Artificial Sequence
  Description of Artificial Sequence: Synthetic oligonucleotide
  Target: SCNA; (+) strand; PAM type: YTN; PAM sequence: CTG
tttgttttgacctactatat

SEQ ID NO: 63979 - DNA, 20 bp, Artificial Sequence
  Description of Artificial Sequence: Synthetic oligonucleotide
  Target: SCNA; (+) strand; PAM type: YTN; PAM sequence: TTT
gttttgacctactatatctc

SEQ ID NO: 63980 - DNA, 20 bp, Artificial Sequence
  Description of Artificial Sequence: Synthetic oligonucleotide
  Target: SCNA; (+) strand; PAM type: YTN; PAM sequence: TTG
ttttgacctactatatctct

SEQ ID NO: 63981 - DNA, 20 bp, Artificial Sequence
  Description of Artificial Sequence: Synthetic oligonucleotide
  Target: SCNA; (+) strand; PAM type: YTN; PAM sequence: TTT
tgacctactatatctcttac

SEQ ID NO: 63982 - DNA, 20 bp, Artificial Sequence
  Description of Artificial Sequence: Synthetic oligonucleotide
  Target: SCNA; (+) strand; PAM type: YTN; PAM sequence: TTT
gacctactatatctcttacc

SEQ ID NO: 63983 - DNA, 20 bp, Artificial Sequence
  Description of Artificial Sequence: Synthetic oligonucleotide
  Target: SCNA; (+) strand; PAM type: YTN; PAM sequence: TTG
acctactatatctcttacct

SEQ ID NO: 63984 - DNA, 20 bp, Artificial Sequence
  Description of Artificial Sequence: Synthetic oligonucleotide
  Target: SCNA; (+) strand; PAM type: YTN; PAM sequence: CTA
ctatatctcttaccttttcc

SEQ ID NO: 63985 - DNA, 20 bp, Artificial Sequence
  Description of Artificial Sequence: Synthetic oligonucleotide
  Target: SCNA; (+) strand; PAM type: YTN; PAM sequence: CTA
tatctcttaccttttcccac

SEQ ID NO: 63986 - DNA, 20 bp, Artificial Sequence
  Description of Artificial Sequence: Synthetic oligonucleotide
  Target: SCNA; (+) strand; PAM type: YTN; PAM sequence: CTC
ttaccttttcccacccagat

SEQ ID NO: 63987 - DNA, 20 bp, Artificial Sequence
  Description of Artificial Sequence: Synthetic oligonucleotide
  Target: SCNA; (+) strand; PAM type: YTN; PAM sequence: CTT
accttttcccacccagatca

SEQ ID NO: 63988 - DNA, 20 bp, Artificial Sequence
  Description of Artificial Sequence: Synthetic oligonucleotide
  Target: SCNA; (+) strand; PAM type: YTN; PAM sequence: TTA
ccttttcccacccagatcaa

SEQ ID NO: 63989 - DNA, 20 bp, Artificial Sequence
  Description of Artificial Sequence: Synthetic oligonucleotide
  Target: SCNA; (+) strand; PAM type: YTN; PAM sequence: CTT
ttcccacccagatcaacatt

SEQ ID NO: 63990 - DNA, 20 bp, Artificial Sequence
  Description of Artificial Sequence: Synthetic oligonucleotide
  Target: SCNA; (+) strand; PAM type: YTN; PAM sequence: TTT
tcccacccagatcaacatta

SEQ ID NO: 63991 - DNA, 20 bp, Artificial Sequence
  Description of Artificial Sequence: Synthetic oligonucleotide
  Target: SCNA; (+) strand; PAM type: YTN; PAM sequence: TTT
cccacccagatcaacattac

SEQ ID NO: 63992 - DNA, 20 bp, Artificial Sequence
  Description of Artificial Sequence: Synthetic oligonucleotide
  Target: SCNA; (+) strand; PAM type: YTN; PAM sequence: TTC
ccacccagatcaacattacc

SEQ ID NO: 63993 - DNA, 20 bp, Artificial Sequence
  Description of Artificial Sequence: Synthetic oligonucleotide
  Target: SCNA; (+) strand; PAM type: YTN; PAM sequence: TTA
cctcctcaataaaacttctc

SEQ ID NO: 63994 - DNA, 20 bp, Artificial Sequence
  Description of Artificial Sequence: Synthetic oligonucleotide
  Target: SCNA; (+) strand; PAM type: YTN; PAM sequence: CTC
ctcaataaaacttctcctga

SEQ ID NO: 63995 - DNA, 20 bp, Artificial Sequence
  Description of Artificial Sequence: Synthetic oligonucleotide
  Target: SCNA; (+) strand; PAM type: YTN; PAM sequence: CTC
aataaaacttctcctgattg

SEQ ID NO: 63996 - DNA, 20 bp, Artificial Sequence
  Description of Artificial Sequence: Synthetic oligonucleotide
  Target: SCNA; (+) strand; PAM type: YTN; PAM sequence: CTT
ctcctgattgattgaaacag

SEQ ID NO: 63997 - DNA, 20 bp, Artificial Sequence
  Description of Artificial Sequence: Synthetic oligonucleotide
  Target: SCNA; (+) strand; PAM type: YTN; PAM sequence: TTC
tcctgattgattgaaacaga

SEQ ID NO: 63998 - DNA, 20 bp, Artificial Sequence
  Description of Artificial Sequence: Synthetic oligonucleotide
  Target: SCNA; (+) strand; PAM type: YTN; PAM sequence: CTC
ctgattgattgaaacagatc

SEQ ID NO: 63999 - DNA, 20 bp, Artificial Sequence
  Description of Artificial Sequence: Synthetic oligonucleotide
  Target: SCNA; (+) strand; PAM type: YTN; PAM sequence: CTG
attgattgaaacagatcttt

SEQ ID NO: 64000 - DNA, 20 bp, Artificial Sequence
  Description of Artificial Sequence: Synthetic oligonucleotide
  Target: SCNA; (+) strand; PAM type: YTN; PAM sequence: TTG
attgaaacagatctttaaaa

SEQ ID NO: 64001 - DNA, 20 bp, Artificial Sequence
  Description of Artificial Sequence: Synthetic oligonucleotide
  Target: SCNA; (+) strand; PAM type: YTN; PAM sequence: TTG
aaacagatctttaaaatgtt

SEQ ID NO: 64002 - DNA, 20 bp, Artificial Sequence
  Description of Artificial Sequence: Synthetic oligonucleotide
  Target: SCNA; (+) strand; PAM type: YTN; PAM sequence: CTT
taaaatgttttactttttag

SEQ ID NO: 64003 - DNA, 20 bp, Artificial Sequence
  Description of Artificial Sequence: Synthetic oligonucleotide
  Target: SCNA; (+) strand; PAM type: YTN; PAM sequence: TTT
aaaatgttttactttttagt

SEQ ID NO: 64004 - DNA, 20 bp, Artificial Sequence
  Description of Artificial Sequence: Synthetic oligonucleotide
  Target: SCNA; (+) strand; PAM type: YTN; PAM sequence: TTA
aaatgttttactttttagta

SEQ ID NO: 64005 - DNA, 20 bp, Artificial Sequence
  Description of Artificial Sequence: Synthetic oligonucleotide
  Target: SCNA; (+) strand; PAM type: YTN; PAM sequence: TTT
tactttttagtatgtcttat

SEQ ID NO: 64006 - DNA, 20 bp, Artificial Sequence
  Description of Artificial Sequence: Synthetic oligonucleotide
  Target: SCNA; (+) strand; PAM type: YTN; PAM sequence: TTT
actttttagtatgtcttata

SEQ ID NO: 64007 - DNA, 20 bp, Artificial Sequence
  Description of Artificial Sequence: Synthetic oligonucleotide
  Target: SCNA; (+) strand; PAM type: YTN; PAM sequence: TTA
ctttttagtatgtcttatat

SEQ ID NO: 64008 - DNA, 20 bp, Artificial Sequence
  Description of Artificial Sequence: Synthetic oligonucleotide
  Target: SCNA; (+) strand; PAM type: YTN; PAM sequence: CTT
tttagtatgtcttatatatt

SEQ ID NO: 64009 - DNA, 20 bp, Artificial Sequence
  Description of Artificial Sequence: Synthetic oligonucleotide
  Target: SCNA; (+) strand; PAM type: YTN; PAM sequence: TTT
ttagtatgtcttatatattt

SEQ ID NO: 64010 - DNA, 20 bp, Artificial Sequence
  Description of Artificial Sequence: Synthetic oligonucleotide
  Target: SCNA; (+) strand; PAM type: YTN; PAM sequence: TTT
tagtatgtcttatatatttt

SEQ ID NO: 64011 - DNA, 20 bp, Artificial Sequence
  Description of Artificial Sequence: Synthetic oligonucleotide
  Target: SCNA; (+) strand; PAM type: YTN; PAM sequence: TTT
agtatgtcttatatattttt

SEQ ID NO: 64012 - DNA, 20 bp, Artificial Sequence
  Description of Artificial Sequence: Synthetic oligonucleotide
  Target: SCNA; (+) strand; PAM type: YTN; PAM sequence: TTA
gtatgtcttatatatttttg

SEQ ID NO: 64013 - DNA, 20 bp, Artificial Sequence
  Description of Artificial Sequence: Synthetic oligonucleotide
  Target: SCNA; (+) strand; PAM type: YTN; PAM sequence: CTT
atatatttttgctcctgtga

SEQ ID NO: 64014 - DNA, 20 bp, Artificial Sequence
  Description of Artificial Sequence: Synthetic oligonucleotide
  Target: SCNA; (+) strand; PAM type: YTN; PAM sequence: TTA
tatatttttgctcctgtgat

SEQ ID NO: 64015 - DNA, 20 bp, Artificial Sequence
  Description of Artificial Sequence: Synthetic oligonucleotide
  Target: SCNA; (+) strand; PAM type: YTN; PAM sequence: TTT
ttgctcctgtgatgcctggt

SEQ ID NO: 64016 - DNA, 20 bp, Artificial Sequence
  Description of Artificial Sequence: Synthetic oligonucleotide
  Target: SCNA; (+) strand; PAM type: YTN; PAM sequence: TTT
tgctcctgtgatgcctggta

SEQ ID NO: 64017 - DNA, 20 bp, Artificial Sequence
  Description of Artificial Sequence: Synthetic oligonucleotide
  Target: SCNA; (+) strand; PAM type: YTN; PAM sequence: TTT
gctcctgtgatgcctggtac

SEQ ID NO: 64018 - DNA, 20 bp, Artificial Sequence
  Description of Artificial Sequence: Synthetic oligonucleotide
  Target: SCNA; (+) strand; PAM type: YTN; PAM sequence: TTG
ctcctgtgatgcctggtaca

SEQ ID NO: 64019 - DNA, 20 bp, Artificial Sequence
  Description of Artificial Sequence: Synthetic oligonucleotide
  Target: SCNA; (+) strand; PAM type: YTN; PAM sequence: CTC
ctgtgatgcctggtacatcg

SEQ ID NO: 64020 - DNA, 20 bp, Artificial Sequence
  Description of Artificial Sequence: Synthetic oligonucleotide
  Target: SCNA; (+) strand; PAM type: YTN; PAM sequence: CTG
tgatgcctggtacatcgaag

SEQ ID NO: 64021 - DNA, 20 bp, Artificial Sequence
  Description of Artificial Sequence: Synthetic oligonucleotide
  Target: SCNA; (+) strand; PAM type: YTN; PAM sequence: CTG
gtacatcgaagacaatcaat

SEQ ID NO: 64022 - DNA, 20 bp, Artificial Sequence
  Description of Artificial Sequence: Synthetic oligonucleotide
  Target: SCNA; (+) strand; PAM type: YTN; PAM sequence: TTA
tgtttgttaaaggaatcata

SEQ ID NO: 64023 - DNA, 20 bp, Artificial Sequence
  Description of Artificial Sequence: Synthetic oligonucleotide
  Target: SCNA; (+) strand; PAM type: YTN; PAM sequence: TTT
gttaaaggaatcataatgaa

SEQ ID NO: 64024 - DNA, 20 bp, Artificial Sequence
  Description of Artificial Sequence: Synthetic oligonucleotide
  Target: SCNA; (+) strand; PAM type: YTN; PAM sequence: TTG
ttaaaggaatcataatgaag

SEQ ID NO: 64025 - DNA, 20 bp, Artificial Sequence
  Description of Artificial Sequence: Synthetic oligonucleotide
  Target: SCNA; (+) strand; PAM type: YTN; PAM sequence: TTA
aaggaatcataatgaagaaa

SEQ ID NO: 64026 - DNA, 20 bp, Artificial Sequence
  Description of Artificial Sequence: Synthetic oligonucleotide
  Target: SCNA; (+) strand; PAM type: YTN; PAM sequence: TTT
ctattttttttcatcaaacc

SEQ ID NO: 64027 - DNA, 20 bp, Artificial Sequence
  Description of Artificial Sequence: Synthetic oligonucleotide
  Target: SCNA; (+) strand; PAM type: YTN; PAM sequence: TTC
tattttttttcatcaaacct

SEQ ID NO: 64028 - DNA, 20 bp, Artificial Sequence
  Description of Artificial Sequence: Synthetic oligonucleotide
  Target: SCNA; (+) strand; PAM type: YTN; PAM sequence: CTA
ttttttttcatcaaacctac

SEQ ID NO: 64029 - DNA, 20 bp, Artificial Sequence
  Description of Artificial Sequence: Synthetic oligonucleotide
  Target: SCNA; (+) strand; PAM type: YTN; PAM sequence: TTT
tttttcatcaaacctaccag

SEQ ID NO: 64030 - DNA, 20 bp, Artificial Sequence
  Description of Artificial Sequence: Synthetic oligonucleotide
  Target: SCNA; (+) strand; PAM type: YTN; PAM sequence: TTT
ttttcatcaaacctaccaga

SEQ ID NO: 64031 - DNA, 20 bp, Artificial Sequence
  Description of Artificial Sequence: Synthetic oligonucleotide
  Target: SCNA; (+) strand; PAM type: YTN; PAM sequence: TTT
tttcatcaaacctaccagac

SEQ ID NO: 64032 - DNA, 20 bp, Artificial Sequence
  Description of Artificial Sequence: Synthetic oligonucleotide
  Target: SCNA; (+) strand; PAM type: YTN; PAM sequence: TTT
ttcatcaaacctaccagact

SEQ ID NO: 64033 - DNA, 20 bp, Artificial Sequence
  Description of Artificial Sequence: Synthetic oligonucleotide
  Target: SCNA; (+) strand; PAM type: YTN; PAM sequence: TTT
tcatcaaacctaccagactg

SEQ ID NO: 64034 - DNA, 20 bp, Artificial Sequence
  Description of Artificial Sequence: Synthetic oligonucleotide
  Target: SCNA; (+) strand; PAM type: YTN; PAM sequence: TTT
catcaaacctaccagactgt

SEQ ID NO: 64035 - DNA, 20 bp, Artificial Sequence
  Description of Artificial Sequence: Synthetic oligonucleotide
  Target: SCNA; (+) strand; PAM type: YTN; PAM sequence: TTC
atcaaacctaccagactgta

SEQ ID NO: 64036 - DNA, 20 bp, Artificial Sequence
  Description of Artificial Sequence: Synthetic oligonucleotide
  Target: SCNA; (+) strand; PAM type: YTN; PAM sequence: CTA
ccagactgtaaactccttat

SEQ ID NO: 64037 - DNA, 20 bp, Artificial Sequence
  Description of Artificial Sequence: Synthetic oligonucleotide
  Target: SCNA; (+) strand; PAM type: YTN; PAM sequence: CTG
taaactccttatgtcctggt

SEQ ID NO: 64038 - DNA, 20 bp, Artificial Sequence
  Description of Artificial Sequence: Synthetic oligonucleotide
  Target: SCNA; (+) strand; PAM type: YTN; PAM sequence: CTC
cttatgtcctggtaatgtca

SEQ ID NO: 64039 - DNA, 20 bp, Artificial Sequence
  Description of Artificial Sequence: Synthetic oligonucleotide
  Target: SCNA; (+) strand; PAM type: YTN; PAM sequence: CTT
atgtcctggtaatgtcaatt

SEQ ID NO: 64040 - DNA, 20 bp, Artificial Sequence
  Description of Artificial Sequence: Synthetic oligonucleotide
  Target: SCNA; (+) strand; PAM type: YTN; PAM sequence: TTA
tgtcctggtaatgtcaatta

SEQ ID NO: 64041 - DNA, 20 bp, Artificial Sequence
  Description of Artificial Sequence: Synthetic oligonucleotide
  Target: SCNA; (+) strand; PAM type: YTN; PAM sequence: CTG
gtaatgtcaattactctata

SEQ ID NO: 64042 - DNA, 20 bp, Artificial Sequence
  Description of Artificial Sequence: Synthetic oligonucleotide
  Target: SCNA; (+) strand; PAM type: YTN; PAM sequence: TTA
ctctatagttttccattgtg

SEQ ID NO: 64043 - DNA, 20 bp, Artificial Sequence
  Description of Artificial Sequence: Synthetic oligonucleotide
  Target: SCNA; (+) strand; PAM type: YTN; PAM sequence: CTC
tatagttttccattgtgttt

SEQ ID NO: 64044 - DNA, 20 bp, Artificial Sequence
  Description of Artificial Sequence: Synthetic oligonucleotide
  Target: SCNA; (+) strand; PAM type: YTN; PAM sequence: CTA
tagttttccattgtgtttag

SEQ ID NO: 64045 - DNA, 20 bp, Artificial Sequence
  Description of Artificial Sequence: Synthetic oligonucleotide
  Target: SCNA; (+) strand; PAM type: YTN; PAM sequence: TTT
tccattgtgtttagtactgt

SEQ ID NO: 64046 - DNA, 20 bp, Artificial Sequence
  Description of Artificial Sequence: Synthetic oligonucleotide
  Target: SCNA; (+) strand; PAM type: YTN; PAM sequence: TTT
ccattgtgtttagtactgtg

SEQ ID NO: 64047 - DNA, 20 bp, Artificial Sequence
  Description of Artificial Sequence: Synthetic oligonucleotide
  Target: SCNA; (+) strand; PAM type: YTN; PAM sequence: TTC
cattgtgtttagtactgtgt

SEQ ID NO: 64048 - DNA, 20 bp, Artificial Sequence
  Description of Artificial Sequence: Synthetic oligonucleotide
  Target: SCNA; (+) strand; PAM type: YTN; PAM sequence: TTG
tgtttagtactgtgtcttgc

SEQ ID NO: 64049 - DNA, 20 bp, Artificial Sequence
  Description of Artificial Sequence: Synthetic oligonucleotide
  Target: SCNA; (+) strand; PAM type: YTN; PAM sequence: TTT
agtactgtgtcttgcataaa

SEQ ID NO: 64050 - DNA, 20 bp, Artificial Sequence
  Description of Artificial Sequence: Synthetic oligonucleotide
  Target: SCNA; (+) strand; PAM type: YTN; PAM sequence: TTA
gtactgtgtcttgcataaaa

SEQ ID NO: 64051 - DNA, 20 bp, Artificial Sequence
  Description of Artificial Sequence: Synthetic oligonucleotide
  Target: SCNA; (+) strand; PAM type: YTN; PAM sequence: CTG
tgtcttgcataaaagacccc

SEQ ID NO: 64052 - DNA, 20 bp, Artificial Sequence
  Description of Artificial Sequence: Synthetic oligonucleotide
  Target: SCNA; (+) strand; PAM type: YTN; PAM sequence: CTT
gcataaaagaccccaaaata

SEQ ID NO: 64053 - DNA, 20 bp, Artificial Sequence
  Description of Artificial Sequence: Synthetic oligonucleotide
  Target: SCNA; (+) strand; PAM type: YTN; PAM sequence: TTG
cataaaagaccccaaaatat

SEQ ID NO: 64054 - DNA, 20 bp, Artificial Sequence
  Description of Artificial Sequence: Synthetic oligonucleotide
  Target: SCNA; (+) strand; PAM type: YTN; PAM sequence: TTG
gaaattcttattaggcaaac

SEQ ID NO: 64055 - DNA, 20 bp, Artificial Sequence
  Description of Artificial Sequence: Synthetic oligonucleotide
  Target: SCNA; (+) strand; PAM type: YTN; PAM sequence: TTC
ttattaggcaaacaaacaat

SEQ ID NO: 64056 - DNA, 20 bp, Artificial Sequence
  Description of Artificial Sequence: Synthetic oligonucleotide
  Target: SCNA; (+) strand; PAM type: YTN; PAM sequence: CTT
attaggcaaacaaacaattt

SEQ ID NO: 64057 - DNA, 20 bp, Artificial Sequence
  Description of Artificial Sequence: Synthetic oligonucleotide
  Target: SCNA; (+) strand; PAM type: YTN; PAM sequence: TTA
ttaggcaaacaaacaattta

SEQ ID NO: 64058 - DNA, 20 bp, Artificial Sequence
  Description of Artificial Sequence: Synthetic oligonucleotide
  Target: SCNA; (+) strand; PAM type: YTN; PAM sequence: TTA
ggcaaacaaacaatttaatc

SEQ ID NO: 64059 - DNA, 20 bp, Artificial Sequence
  Description of Artificial Sequence: Synthetic oligonucleotide
  Target: SCNA; (+) strand; PAM type: YTN; PAM sequence: TTT
aatctcaatttctataagtt

SEQ ID NO: 64060 - DNA, 20 bp, Artificial Sequence
  Description of Artificial Sequence: Synthetic oligonucleotide
  Target: SCNA; (+) strand; PAM type: YTN; PAM sequence: TTA
atctcaatttctataagttg

SEQ ID NO: 64061 - DNA, 20 bp, Artificial Sequence
  Description of Artificial Sequence: Synthetic oligonucleotide
  Target: SCNA; (+) strand; PAM type: YTN; PAM sequence: CTC
aatttctataagttgaatta

SEQ ID NO: 64062 - DNA, 20 bp, Artificial Sequence
  Description of Artificial Sequence: Synthetic oligonucleotide
  Target: SCNA; (+) strand; PAM type: YTN; PAM sequence: TTT
ctataagttgaattattatc

SEQ ID NO: 64063 - DNA, 20 bp, Artificial Sequence
  Description of Artificial Sequence: Synthetic oligonucleotide
  Target: SCNA; (+) strand; PAM type: YTN; PAM sequence: TTC
tataagttgaattattatca

SEQ ID NO: 64064 - DNA, 20 bp, Artificial Sequence
  Description of Artificial Sequence: Synthetic oligonucleotide
  Target: SCNA; (+) strand; PAM type: YTN; PAM sequence: CTA
taagttgaattattatcaat

SEQ ID NO: 64065 - DNA, 20 bp, Artificial Sequence
  Description of Artificial Sequence: Synthetic oligonucleotide
  Target: SCNA; (+) strand; PAM type: YTN; PAM sequence: TTG
aattattatcaatatgcctt

SEQ ID NO: 64066 - DNA, 20 bp, Artificial Sequence
  Description of Artificial Sequence: Synthetic oligonucleotide
  Target: SCNA; (+) strand; PAM type: YTN; PAM sequence: TTA
ttatcaatatgcctttcgtg

SEQ ID NO: 64067 - DNA, 20 bp, Artificial Sequence
  Description of Artificial Sequence: Synthetic oligonucleotide
  Target: SCNA; (+) strand; PAM type: YTN; PAM sequence: TTA
tcaatatgcctttcgtgtgt

SEQ ID NO: 64068 - DNA, 20 bp, Artificial Sequence
  Description of Artificial Sequence: Synthetic oligonucleotide
  Target: SCNA; (+) strand; PAM type: YTN; PAM sequence: CTT
tcgtgtgtctgtgtgagaca

SEQ ID NO: 64069 - DNA, 20 bp, Artificial Sequence
  Description of Artificial Sequence: Synthetic oligonucleotide
  Target: SCNA; (+) strand; PAM type: YTN; PAM sequence: TTT
cgtgtgtctgtgtgagacag

SEQ ID NO: 64070 - DNA, 20 bp, Artificial Sequence
  Description of Artificial Sequence: Synthetic oligonucleotide
  Target: SCNA; (+) strand; PAM type: YTN; PAM sequence: TTC
gtgtgtctgtgtgagacagt

SEQ ID NO: 64071 - DNA, 20 bp, Artificial Sequence
  Description of Artificial Sequence: Synthetic oligonucleotide
  Target: SCNA; (+) strand; PAM type: YTN; PAM sequence: CTG
tgtgagacagtcttgctctg

SEQ ID NO: 64072 - DNA, 20 bp, Artificial Sequence
  Description of Artificial Sequence: Synthetic oligonucleotide
  Target: SCNA; (+) strand; PAM type: YTN; PAM sequence: CTT
gctctgttaccaagattgga

SEQ ID NO: 64073 - DNA, 20 bp, Artificial Sequence
  Description of Artificial Sequence: Synthetic oligonucleotide
  Target: SCNA; (+) strand; PAM type: YTN; PAM sequence: TTG
ctctgttaccaagattggag

SEQ ID NO: 64074 - DNA, 20 bp, Artificial Sequence
  Description of Artificial Sequence: Synthetic oligonucleotide
  Target: SCNA; (+) strand; PAM type: YTN; PAM sequence: CTC
tgttaccaagattggagtgc

SEQ ID NO: 64075 - DNA, 20 bp, Artificial Sequence
  Description of Artificial Sequence: Synthetic oligonucleotide
  Target: SCNA; (+) strand; PAM type: YTN; PAM sequence: CTG
ttaccaagattggagtgcag

SEQ ID NO: 64076 - DNA, 20 bp, Artificial Sequence
  Description of Artificial Sequence: Synthetic oligonucleotide
  Target: SCNA; (+) strand; PAM type: YTN; PAM sequence: TTA
ccaagattggagtgcagggg

SEQ ID NO: 64077 - DNA, 20 bp, Artificial Sequence
  Description of Artificial Sequence: Synthetic oligonucleotide
  Target: SCNA; (+) strand; PAM type: YTN; PAM sequence: TTG
gagtgcaggggtgccatctc

SEQ ID NO: 64078 - DNA, 20 bp, Artificial Sequence
  Description of Artificial Sequence: Synthetic oligonucleotide
  Target: SCNA; (+) strand; PAM type: YTN; PAM sequence: CTC
agctcactgcaacctctgcc

SEQ ID NO: 64079 - DNA, 20 bp, Artificial Sequence
  Description of Artificial Sequence: Synthetic oligonucleotide
  Target: SCNA; (+) strand; PAM type: YTN; PAM sequence: CTC
actgcaacctctgcctcctg

SEQ ID NO: 64080 - DNA, 20 bp, Artificial Sequence
  Description of Artificial Sequence: Synthetic oligonucleotide
  Target: SCNA; (+) strand; PAM type: YTN; PAM sequence: CTG
caacctctgcctcctgggtt

SEQ ID NO: 64081 - DNA, 20 bp, Artificial Sequence
  Description of Artificial Sequence: Synthetic oligonucleotide
  Target: SCNA; (+) strand; PAM type: YTN; PAM sequence: CTC
tgcctcctgggttcaagtga

SEQ ID NO: 64082 - DNA, 20 bp, Artificial Sequence
  Description of Artificial Sequence: Synthetic oligonucleotide
  Target: SCNA; (+) strand; PAM type: YTN; PAM sequence: CTG
cctcctgggttcaagtgact

SEQ ID NO: 64083 - DNA, 20 bp, Artificial Sequence
  Description of Artificial Sequence: Synthetic oligonucleotide
  Target: SCNA; (+) strand; PAM type: YTN; PAM sequence: CTC
ctgggttcaagtgactctca

SEQ ID NO: 64084 - DNA, 20 bp, Artificial Sequence
  Description of Artificial Sequence: Synthetic oligonucleotide
  Target: SCNA; (+) strand; PAM type: YTN; PAM sequence: CTG
ggttcaagtgactctcatgc

SEQ ID NO: 64085 - DNA, 20 bp, Artificial Sequence
  Description of Artificial Sequence: Synthetic oligonucleotide
  Target: SCNA; (+) strand; PAM type: YTN; PAM sequence: TTC
aagtgactctcatgcctcag

SEQ ID NO: 64086 - DNA, 20 bp, Artificial Sequence
  Description of Artificial Sequence: Synthetic oligonucleotide
  Target: SCNA; (+) strand; PAM type: YTN; PAM sequence: CTC
tcatgcctcagcctcccaag

SEQ ID NO: 64087 - DNA, 20 bp, Artificial Sequence
  Description of Artificial Sequence: Synthetic oligonucleotide
  Target: SCNA; (+) strand; PAM type: YTN; PAM sequence: CTC
atgcctcagcctcccaagta

SEQ ID NO: 64088 - DNA, 20 bp, Artificial Sequence
  Description of Artificial Sequence: Synthetic oligonucleotide
  Target: SCNA; (+) strand; PAM type: YTN; PAM sequence: CTC
agcctcccaagtagctggaa

SEQ ID NO: 64089 - DNA, 20 bp, Artificial Sequence
  Description of Artificial Sequence: Synthetic oligonucleotide
  Target: SCNA; (+) strand; PAM type: YTN; PAM sequence: CTC
ccaagtagctggaaccatag

SEQ ID NO: 64090 - DNA, 20 bp, Artificial Sequence
  Description of Artificial Sequence: Synthetic oligonucleotide
  Target: SCNA; (+) strand; PAM type: YTN; PAM sequence: CTG
gaaccataggcgtgtaccac

SEQ ID NO: 64091 - DNA, 20 bp, Artificial Sequence
  Description of Artificial Sequence: Synthetic oligonucleotide
  Target: SCNA; (+) strand; PAM type: YTN; PAM sequence: CTA
atttttgtatttttagtaga

SEQ ID NO: 64092 - DNA, 20 bp, Artificial Sequence
  Description of Artificial Sequence: Synthetic oligonucleotide
  Target: SCNA; (+) strand; PAM type: YTN; PAM sequence: TTT
ttgtatttttagtagagatg

SEQ ID NO: 64093 - DNA, 20 bp, Artificial Sequence
  Description of Artificial Sequence: Synthetic oligonucleotide
  Target: SCNA; (+) strand; PAM type: YTN; PAM sequence: TTT
tgtatttttagtagagatgg

SEQ ID NO: 64094 - DNA, 20 bp, Artificial Sequence
  Description of Artificial Sequence: Synthetic oligonucleotide
  Target: SCNA; (+) strand; PAM type: YTN; PAM sequence: TTT
gtatttttagtagagatggg

SEQ ID NO: 64095 - DNA, 20 bp, Artificial Sequence
  Description of Artificial Sequence: Synthetic oligonucleotide
  Target: SCNA; (+) strand; PAM type: YTN; PAM sequence: TTG
tatttttagtagagatgggg

SEQ ID NO: 64096 - DNA, 20 bp, Artificial Sequence
  Description of Artificial Sequence: Synthetic oligonucleotide
  Target: SCNA; (+) strand; PAM type: YTN; PAM sequence: TTT
ttagtagagatggggtttca

SEQ ID NO: 64097 - DNA, 20 bp, Artificial Sequence
  Description of Artificial Sequence: Synthetic oligonucleotide
  Target: SCNA; (+) strand; PAM type: YTN; PAM sequence: TTT
tagtagagatggggtttcac

SEQ ID NO: 64098 - DNA, 20 bp, Artificial Sequence
  Description of Artificial Sequence: Synthetic oligonucleotide
  Target: SCNA; (+) strand; PAM type: YTN; PAM sequence: TTT
agtagagatggggtttcacc

SEQ ID NO: 64099 - DNA, 20 bp, Artificial Sequence
  Description of Artificial Sequence: Synthetic oligonucleotide
  Target: SCNA; (+) strand; PAM type: YTN; PAM sequence: TTA
gtagagatggggtttcacca

SEQ ID NO: 64100 - DNA, 20 bp, Artificial Sequence
  Description of Artificial Sequence: Synthetic oligonucleotide
  Target: SCNA; (+) strand; PAM type: YTN; PAM sequence: TTT
caccatgttggccagactgg

SEQ ID NO: 64101 - DNA, 20 bp, Artificial Sequence
  Description of Artificial Sequence: Synthetic oligonucleotide
  Target: SCNA; (+) strand; PAM type: YTN; PAM sequence: TTC
accatgttggccagactggt

SEQ ID NO: 64102 - DNA, 20 bp, Artificial Sequence
  Description of Artificial Sequence: Synthetic oligonucleotide
  Target: SCNA; (+) strand; PAM type: YTN; PAM sequence: TTG
gccagactggtctccaactc

SEQ ID NO: 64103 - DNA, 20 bp, Artificial Sequence
  Description of Artificial Sequence: Synthetic oligonucleotide
  Target: SCNA; (+) strand; PAM type: YTN; PAM sequence: CTG
gtctccaactcctggcctca

SEQ ID NO: 64104 - DNA, 20 bp, Artificial Sequence
  Description of Artificial Sequence: Synthetic oligonucleotide
  Target: SCNA; (+) strand; PAM type: YTN; PAM sequence: CTC
caactcctggcctcaagtaa

SEQ ID NO: 64105 - DNA, 20 bp, Artificial Sequence
  Description of Artificial Sequence: Synthetic oligonucleotide
  Target: SCNA; (+) strand; PAM type: YTN; PAM sequence: CTC
ctggcctcaagtaacctggc

SEQ ID NO: 64106 - DNA, 20 bp, Artificial Sequence
  Description of Artificial Sequence: Synthetic oligonucleotide
  Target: SCNA; (+) strand; PAM type: YTN; PAM sequence: CTG
gcctcaagtaacctggccac

SEQ ID NO: 64107 - DNA, 20 bp, Artificial Sequence
  Description of Artificial Sequence: Synthetic oligonucleotide
  Target: SCNA; (+) strand; PAM type: YTN; PAM sequence: CTC
aagtaacctggccactttgg

SEQ ID NO: 64108 - DNA, 20 bp, Artificial Sequence
  Description of Artificial Sequence: Synthetic oligonucleotide
  Target: SCNA; (+) strand; PAM type: YTN; PAM sequence: CTG
gccactttggctcacaaagt

SEQ ID NO: 64109 - DNA, 20 bp, Artificial Sequence
  Description of Artificial Sequence: Synthetic oligonucleotide
  Target: SCNA; (+) strand; PAM type: YTN; PAM sequence: CTT
tggctcacaaagtgcgggat

SEQ ID NO: 64110 - DNA, 20 bp, Artificial Sequence
  Description of Artificial Sequence: Synthetic oligonucleotide
  Target: SCNA; (+) strand; PAM type: YTN; PAM sequence: TTT
ggctcacaaagtgcgggatt

SEQ ID NO: 64111 - DNA, 20 bp, Artificial Sequence
  Description of Artificial Sequence: Synthetic oligonucleotide
  Target: SCNA; (+) strand; PAM type: YTN; PAM sequence: TTG
gctcacaaagtgcgggatta

SEQ ID NO: 64112 - DNA, 20 bp, Artificial Sequence
  Description of Artificial Sequence: Synthetic oligonucleotide
  Target: SCNA; (+) strand; PAM type: YTN; PAM sequence: CTC
acaaagtgcgggattacagg

SEQ ID NO: 64113 - DNA, 20 bp, Artificial Sequence
  Description of Artificial Sequence: Synthetic oligonucleotide
  Target: SCNA; (+) strand; PAM type: YTN; PAM sequence: TTA
caggtgtgaactgctgtgcc

SEQ ID NO: 64114 - DNA, 20 bp, Artificial Sequence
  Description of Artificial Sequence: Synthetic oligonucleotide
  Target: SCNA; (+) strand; PAM type: YTN; PAM sequence: CTG
ctgtgcccatcctcgacatg

SEQ ID NO: 64115 - DNA, 20 bp, Artificial Sequence
  Description of Artificial Sequence: Synthetic oligonucleotide
  Target: SCNA; (+) strand; PAM type: YTN; PAM sequence: CTG
tgcccatcctcgacatgcct

SEQ ID NO: 64116 - DNA, 20 bp, Artificial Sequence
  Description of Artificial Sequence: Synthetic oligonucleotide
  Target: SCNA; (+) strand; PAM type: YTN; PAM sequence: CTC
gacatgccttttaataatgc

SEQ ID NO: 64117 - DNA, 20 bp, Artificial Sequence
  Description of Artificial Sequence: Synthetic oligonucleotide
  Target: SCNA; (+) strand; PAM type: YTN; PAM sequence: CTT
ttaataatgccgtgaggaat

SEQ ID NO: 64118 - DNA, 20 bp, Artificial Sequence
  Description of Artificial Sequence: Synthetic oligonucleotide
  Target: SCNA; (+) strand; PAM type: YTN; PAM sequence: TTT
taataatgccgtgaggaata

SEQ ID NO: 64119 - DNA, 20 bp, Artificial Sequence
  Description of Artificial Sequence: Synthetic oligonucleotide
  Target: SCNA; (+) strand; PAM type: YTN; PAM sequence: TTT
aataatgccgtgaggaataa

SEQ ID NO: 64120 - DNA, 20 bp, Artificial Sequence
  Description of Artificial Sequence: Synthetic oligonucleotide
  Target: SCNA; (+) strand; PAM type: YTN; PAM sequence: TTA
ataatgccgtgaggaataat

SEQ ID NO: 64121 - DNA, 20 bp, Artificial Sequence
  Description of Artificial Sequence: Synthetic oligonucleotide
  Target: SCNA; (+) strand; PAM type: YTN; PAM sequence: CTA
caacatacttgaactcaatt

SEQ ID NO: 64122 - DNA, 20 bp, Artificial Sequence
  Description of Artificial Sequence: Synthetic oligonucleotide
  Target: SCNA; (+) strand; PAM type: YTN; PAM sequence: CTT
gaactcaatttttaatggag

SEQ ID NO: 64123 - DNA, 20 bp, Artificial Sequence
  Description of Artificial Sequence: Synthetic oligonucleotide
  Target: SCNA; (+) strand; PAM type: YTN; PAM sequence: TTG
aactcaatttttaatggagc

SEQ ID NO: 64124 - DNA, 20 bp, Artificial Sequence
  Description of Artificial Sequence: Synthetic oligonucleotide
  Target: SCNA; (+) strand; PAM type: YTN; PAM sequence: CTC
aatttttaatggagccatta

SEQ ID NO: 64125 - DNA, 20 bp, Artificial Sequence
  Description of Artificial Sequence: Synthetic oligonucleotide
  Target: SCNA; (+) strand; PAM type: YTN; PAM sequence: TTT
ttaatggagccattatatag

SEQ ID NO: 64126 - DNA, 20 bp, Artificial Sequence
  Description of Artificial Sequence: Synthetic oligonucleotide
  Target: SCNA; (+) strand; PAM type: YTN; PAM sequence: TTT
taatggagccattatatagt

SEQ ID NO: 64127 - DNA, 20 bp, Artificial Sequence
  Description of Artificial Sequence: Synthetic oligonucleotide
  Target: SCNA; (+) strand; PAM type: YTN; PAM sequence: TTT
aatggagccattatatagtt

SEQ ID NO: 64128 - DNA, 20 bp, Artificial Sequence
  Description of Artificial Sequence: Synthetic oligonucleotide
  Target: SCNA; (+) strand; PAM type: YTN; PAM sequence: TTA
atggagccattatatagttt

SEQ ID NO: 64129 - DNA, 20 bp, Artificial Sequence
  Description of Artificial Sequence: Synthetic oligonucleotide
  Target: SCNA; (+) strand; PAM type: YTN; PAM sequence: TTA
tatagtttcttttcttgtga

SEQ ID NO: 64130 - DNA, 20 bp, Artificial Sequence
  Description of Artificial Sequence: Synthetic oligonucleotide
  Target: SCNA; (+) strand; PAM type: YTN; PAM sequence: TTT
cttttcttgtgatatcttca

SEQ ID NO: 64131 - DNA, 20 bp, Artificial Sequence
  Description of Artificial Sequence: Synthetic oligonucleotide
  Target: SCNA; (+) strand; PAM type: YTN; PAM sequence: TTC
ttttcttgtgatatcttcat

SEQ ID NO: 64132 - DNA, 20 bp, Artificial Sequence
  Description of Artificial Sequence: Synthetic oligonucleotide
  Target: SCNA; (+) strand; PAM type: YTN; PAM sequence: CTT
ttcttgtgatatcttcattt

SEQ ID NO: 64133 - DNA, 20 bp, Artificial Sequence
  Description of Artificial Sequence: Synthetic oligonucleotide
  Target: SCNA; (+) strand; PAM type: YTN; PAM sequence: TTT
tcttgtgatatcttcatttg

SEQ ID NO: 64134 - DNA, 20 bp, Artificial Sequence
  Description of Artificial Sequence: Synthetic oligonucleotide
  Target: SCNA; (+) strand; PAM type: YTN; PAM sequence: TTT
cttgtgatatcttcatttgg

SEQ ID NO: 64135 - DNA, 20 bp, Artificial Sequence
  Description of Artificial Sequence: Synthetic oligonucleotide
  Target: SCNA; (+) strand; PAM type: YTN; PAM sequence: TTC
ttgtgatatcttcatttggt

SEQ ID NO: 64136 - DNA, 20 bp, Artificial Sequence
  Description of Artificial Sequence: Synthetic oligonucleotide
  Target: SCNA; (+) strand; PAM type: YTN; PAM sequence: CTT
gtgatatcttcatttggttt

SEQ ID NO: 64137 - DNA, 20 bp, Artificial Sequence
  Description of Artificial Sequence: Synthetic oligonucleotide
  Target: SCNA; (+) strand; PAM type: YTN; PAM sequence: TTG
tgatatcttcatttggtttt

SEQ ID NO: 64138 - DNA, 20 bp, Artificial Sequence
  Description of Artificial Sequence: Synthetic oligonucleotide
  Target: SCNA; (+) strand; PAM type: YTN; PAM sequence: CTT
catttggttttgattatcag

SEQ ID NO: 64139 - DNA, 20 bp, Artificial Sequence
  Description of Artificial Sequence: Synthetic oligonucleotide
  Target: SCNA; (+) strand; PAM type: YTN; PAM sequence: TTC
atttggttttgattatcagg

SEQ ID NO: 64140 - DNA, 20 bp, Artificial Sequence
  Description of Artificial Sequence: Synthetic oligonucleotide
  Target: SCNA; (+) strand; PAM type: YTN; PAM sequence: TTT
ggttttgattatcagggtaa

SEQ ID NO: 64141 - DNA, 20 bp, Artificial Sequence
  Description of Artificial Sequence: Synthetic oligonucleotide
  Target: SCNA; (+) strand; PAM type: YTN; PAM sequence: TTG
gttttgattatcagggtaat

SEQ ID NO: 64142 - DNA, 20 bp, Artificial Sequence
  Description of Artificial Sequence: Synthetic oligonucleotide
  Target: SCNA; (+) strand; PAM type: YTN; PAM sequence: TTT
tgattatcagggtaatattg

SEQ ID NO: 64143 - DNA, 20 bp, Artificial Sequence
  Description of Artificial Sequence: Synthetic oligonucleotide
  Target: SCNA; (+) strand; PAM type: YTN; PAM sequence: TTT
gattatcagggtaatattgg

SEQ ID NO: 64144 - DNA, 20 bp, Artificial Sequence
  Description of Artificial Sequence: Synthetic oligonucleotide
  Target: SCNA; (+) strand; PAM type: YTN; PAM sequence: TTG
attatcagggtaatattggt

SEQ ID NO: 64145 - DNA, 20 bp, Artificial Sequence
  Description of Artificial Sequence: Synthetic oligonucleotide
  Target: SCNA; (+) strand; PAM type: YTN; PAM sequence: TTA
tcagggtaatattggtctca

SEQ ID NO: 64146 - DNA, 20 bp, Artificial Sequence
  Description of Artificial Sequence: Synthetic oligonucleotide
  Target: SCNA; (+) strand; PAM type: YTN; PAM sequence: TTG
gtctcacaaaattagttggg

SEQ ID NO: 64147 - DNA, 20 bp, Artificial Sequence
  Description of Artificial Sequence: Synthetic oligonucleotide
  Target: SCNA; (+) strand; PAM type: YTN; PAM sequence: CTC
acaaaattagttgggaaatg

SEQ ID NO: 64148 - DNA, 20 bp, Artificial Sequence
  Description of Artificial Sequence: Synthetic oligonucleotide
  Target: SCNA; (+) strand; PAM type: YTN; PAM sequence: TTA
gttgggaaatgtctcctctt

SEQ ID NO: 64149 - DNA, 20 bp, Artificial Sequence
  Description of Artificial Sequence: Synthetic oligonucleotide
  Target: SCNA; (+) strand; PAM type: YTN; PAM sequence: TTG
ggaaatgtctcctcttctgt

SEQ ID NO: 64150 - DNA, 20 bp, Artificial Sequence
  Description of Artificial Sequence: Synthetic oligonucleotide
  Target: SCNA; (+) strand; PAM type: YTN; PAM sequence: CTC
ctcttctgttttgtaagaga

SEQ ID NO: 64151 - DNA, 20 bp, Artificial Sequence
  Description of Artificial Sequence: Synthetic oligonucleotide
  Target: SCNA; (+) strand; PAM type: YTN; PAM sequence: CTC
ttctgttttgtaagagatat

SEQ ID NO: 64152 - DNA, 20 bp, Artificial Sequence
  Description of Artificial Sequence: Synthetic oligonucleotide
  Target: SCNA; (+) strand; PAM type: YTN; PAM sequence: CTT
ctgttttgtaagagatatta

SEQ ID NO: 64153 - DNA, 20 bp, Artificial Sequence
  Description of Artificial Sequence: Synthetic oligonucleotide
  Target: SCNA; (+) strand; PAM type: YTN; PAM sequence: TTC
tgttttgtaagagatattaa

SEQ ID NO: 64154 - DNA, 20 bp, Artificial Sequence
  Description of Artificial Sequence: Synthetic oligonucleotide
  Target: SCNA; (+) strand; PAM type: YTN; PAM sequence: CTG
ttttgtaagagatattaatt

SEQ ID NO: 64155 - DNA, 20 bp, Artificial Sequence
  Description of Artificial Sequence: Synthetic oligonucleotide
  Target: SCNA; (+) strand; PAM type: YTN; PAM sequence: TTT
tgtaagagatattaattggt

SEQ ID NO: 64156 - DNA, 20 bp, Artificial Sequence
  Description of Artificial Sequence: Synthetic oligonucleotide
  Target: SCNA; (+) strand; PAM type: YTN; PAM sequence: TTT
gtaagagatattaattggtg

SEQ ID NO: 64157 - DNA, 20 bp, Artificial Sequence
  Description of Artificial Sequence: Synthetic oligonucleotide
  Target: SCNA; (+) strand; PAM type: YTN; PAM sequence: TTG
taagagatattaattggtgt

SEQ ID NO: 64158 - DNA, 20 bp, Artificial Sequence
  Description of Artificial Sequence: Synthetic oligonucleotide
  Target: SCNA; (+) strand; PAM type: YTN; PAM sequence: TTA
attggtgttaactaattagt

SEQ ID NO: 64159 - DNA, 20 bp, Artificial Sequence
  Description of Artificial Sequence: Synthetic oligonucleotide
  Target: SCNA; (+) strand; PAM type: YTN; PAM sequence: TTG
gtgttaactaattagtatta

SEQ ID NO: 64160 - DNA, 20 bp, Artificial Sequence
  Description of Artificial Sequence: Synthetic oligonucleotide
  Target: SCNA; (+) strand; PAM type: YTN; PAM sequence: TTA
actaattagtattaattcct

SEQ ID NO: 64161 - DNA, 20 bp, Artificial Sequence
  Description of Artificial Sequence: Synthetic oligonucleotide
  Target: SCNA; (+) strand; PAM type: YTN; PAM sequence: CTA
attagtattaattcctcttt

SEQ ID NO: 64162 - DNA, 20 bp, Artificial Sequence
  Description of Artificial Sequence: Synthetic oligonucleotide
  Target: SCNA; (+) strand; PAM type: YTN; PAM sequence: TTA
gtattaattcctctttaaat

SEQ ID NO: 64163 - DNA, 20 bp, Artificial Sequence
  Description of Artificial Sequence: Synthetic oligonucleotide
  Target: SCNA; (+) strand; PAM type: YTN; PAM sequence: TTA
attcctctttaaatgtttgg

SEQ ID NO: 64164 - DNA, 20 bp, Artificial Sequence
  Description of Artificial Sequence: Synthetic oligonucleotide
  Target: SCNA; (+) strand; PAM type: YTN; PAM sequence: TTC
ctctttaaatgtttggtaga

SEQ ID NO: 64165 - DNA, 20 bp, Artificial Sequence
  Description of Artificial Sequence: Synthetic oligonucleotide
  Target: SCNA; (+) strand; PAM type: YTN; PAM sequence: CTC
tttaaatgtttggtagaatt

SEQ ID NO: 64166 - DNA, 20 bp, Artificial Sequence
  Description of Artificial Sequence: Synthetic oligonucleotide
  Target: SCNA; (+) strand; PAM type: YTN; PAM sequence: CTT
taaatgtttggtagaattta

SEQ ID NO: 64167 - DNA, 20 bp, Artificial Sequence
  Description of Artificial Sequence: Synthetic oligonucleotide
  Target: SCNA; (+) strand; PAM type: YTN; PAM sequence: TTT
aaatgtttggtagaatttac

SEQ ID NO: 64168 - DNA, 20 bp, Artificial Sequence
  Description of Artificial Sequence: Synthetic oligonucleotide
  Target: SCNA; (+) strand; PAM type: YTN; PAM sequence: TTA
aatgtttggtagaatttacc

SEQ ID NO: 64169 - DNA, 20 bp, Artificial Sequence
  Description of Artificial Sequence: Synthetic oligonucleotide
  Target: SCNA; (+) strand; PAM type: YTN; PAM sequence: TTT
ggtagaatttaccagtgatg

SEQ ID NO: 64170 - DNA, 20 bp, Artificial Sequence
  Description of Artificial Sequence: Synthetic oligonucleotide
  Target: SCNA; (+) strand; PAM type: YTN; PAM sequence: TTG
gtagaatttaccagtgatgc

SEQ ID NO: 64171 - DNA, 20 bp, Artificial Sequence
  Description of Artificial Sequence: Synthetic oligonucleotide
  Target: SCNA; (+) strand; PAM type: YTN; PAM sequence: TTT
accagtgatgccatctcggc

SEQ ID NO: 64172 - DNA, 20 bp, Artificial Sequence
  Description of Artificial Sequence: Synthetic oligonucleotide
  Target: SCNA; (+) strand; PAM type: YTN; PAM sequence: TTA
ccagtgatgccatctcggcc

SEQ ID NO: 64173 - DNA, 20 bp, Artificial Sequence
  Description of Artificial Sequence: Synthetic oligonucleotide
  Target: SCNA; (+) strand; PAM type: YTN; PAM sequence: CTC
ggcctgggattttctttgca

SEQ ID NO: 64174 - DNA, 20 bp, Artificial Sequence
  Description of Artificial Sequence: Synthetic oligonucleotide
  Target: SCNA; (+) strand; PAM type: YTN; PAM sequence: CTG
ggattttctttgcaggtagg

SEQ ID NO: 64175 - DNA, 20 bp, Artificial Sequence
  Description of Artificial Sequence: Synthetic oligonucleotide
  Target: SCNA; (+) strand; PAM type: YTN; PAM sequence: TTT
tctttgcaggtaggtttttt

SEQ ID NO: 64176 - DNA, 20 bp, Artificial Sequence
  Description of Artificial Sequence: Synthetic oligonucleotide
  Target: SCNA; (+) strand; PAM type: YTN; PAM sequence: TTT
ctttgcaggtaggttttttt

SEQ ID NO: 64177 - DNA, 20 bp, Artificial Sequence
  Description of Artificial Sequence: Synthetic oligonucleotide
  Target: SCNA; (+) strand; PAM type: YTN; PAM sequence: TTC
tttgcaggtaggtttttttt

SEQ ID NO: 64178 - DNA, 20 bp, Artificial Sequence
  Description of Artificial Sequence: Synthetic oligonucleotide
  Target: SCNA; (+) strand; PAM type: YTN; PAM sequence: CTT
tgcaggtaggtttttttttt

SEQ ID NO: 64179 - DNA, 20 bp, Artificial Sequence
  Description of Artificial Sequence: Synthetic oligonucleotide
  Target: SCNA; (+) strand; PAM type: YTN; PAM sequence: TTT
gcaggtaggttttttttttt

SEQ ID NO: 64180 - DNA, 20 bp, Artificial Sequence
  Description of Artificial Sequence: Synthetic oligonucleotide
  Target: SCNA; (+) strand; PAM type: YTN; PAM sequence: TTG
caggtaggttttttttttta

SEQ ID NO: 64181 - DNA, 20 bp, Artificial Sequence
  Description of Artificial Sequence: Synthetic oligonucleotide
  Target: SCNA; (+) strand; PAM type: YTN; PAM sequence: TTT
ttttttttattactaattta

SEQ ID NO: 64182 - DNA, 20 bp, Artificial Sequence
  Description of Artificial Sequence: Synthetic oligonucleotide
  Target: SCNA; (+) strand; PAM type: YTN; PAM sequence: TTT
tttttttattactaatttaa

SEQ ID NO: 64183 - DNA, 20 bp, Artificial Sequence
  Description of Artificial Sequence: Synthetic oligonucleotide
  Target: SCNA; (+) strand; PAM type: YTN; PAM sequence: TTT
ttttttattactaatttaat

SEQ ID NO: 64184 - DNA, 20 bp, Artificial Sequence
  Description of Artificial Sequence: Synthetic oligonucleotide
  Target: SCNA; (+) strand; PAM type: YTN; PAM sequence: TTT
tttttattactaatttaatc

SEQ ID NO: 64185 - DNA, 20 bp, Artificial Sequence
  Description of Artificial Sequence: Synthetic oligonucleotide
  Target: SCNA; (+) strand; PAM type: YTN; PAM sequence: TTT
ttttattactaatttaatct

SEQ ID NO: 64186 - DNA, 20 bp, Artificial Sequence
  Description of Artificial Sequence: Synthetic oligonucleotide
  Target: SCNA; (+) strand; PAM type: YTN; PAM sequence: TTT
tttattactaatttaatcta

SEQ ID NO: 64187 - DNA, 20 bp, Artificial Sequence
  Description of Artificial Sequence: Synthetic oligonucleotide
  Target: SCNA; (+) strand; PAM type: YTN; PAM sequence: TTT
ttattactaatttaatctat

SEQ ID NO: 64188 - DNA, 20 bp, Artificial Sequence
  Description of Artificial Sequence: Synthetic oligonucleotide
  Target: SCNA; (+) strand; PAM type: YTN; PAM sequence: TTT
tattactaatttaatctatt

SEQ ID NO: 64189 - DNA, 20 bp, Artificial Sequence
  Description of Artificial Sequence: Synthetic oligonucleotide
  Target: SCNA; (+) strand; PAM type: YTN; PAM sequence: TTT
attactaatttaatctattc

SEQ ID NO: 64190 - DNA, 20 bp, Artificial Sequence
  Description of Artificial Sequence: Synthetic oligonucleotide
  Target: SCNA; (+) strand; PAM type: YTN; PAM sequence: TTA
ttactaatttaatctattcg

SEQ ID NO: 64191 - DNA, 20 bp, Artificial Sequence
  Description of Artificial Sequence: Synthetic oligonucleotide
  Target: SCNA; (+) strand; PAM type: YTN; PAM sequence: TTA
ctaatttaatctattcgctg

SEQ ID NO: 64192 - DNA, 20 bp, Artificial Sequence
  Description of Artificial Sequence: Synthetic oligonucleotide
  Target: SCNA; (+) strand; PAM type: YTN; PAM sequence: CTA
atttaatctattcgctgtgt

SEQ ID NO: 64193 - DNA, 20 bp, Artificial Sequence
  Description of Artificial Sequence: Synthetic oligonucleotide
  Target: SCNA; (+) strand; PAM type: YTN; PAM sequence: TTT
aatctattcgctgtgttaca

SEQ ID NO: 64194 - DNA, 20 bp, Artificial Sequence
  Description of Artificial Sequence: Synthetic oligonucleotide
  Target: SCNA; (+) strand; PAM type: YTN; PAM sequence: TTA
atctattcgctgtgttacaa

SEQ ID NO: 64195 - DNA, 20 bp, Artificial Sequence
  Description of Artificial Sequence: Synthetic oligonucleotide
  Target: SCNA; (+) strand; PAM type: YTN; PAM sequence: CTA
ttcgctgtgttacaaatcta

SEQ ID NO: 64196 - DNA, 20 bp, Artificial Sequence
  Description of Artificial Sequence: Synthetic oligonucleotide
  Target: SCNA; (+) strand; PAM type: YTN; PAM sequence: TTC
gctgtgttacaaatctattc

SEQ ID NO: 64197 - DNA, 20 bp, Artificial Sequence
  Description of Artificial Sequence: Synthetic oligonucleotide
  Target: SCNA; (+) strand; PAM type: YTN; PAM sequence: CTG
tgttacaaatctattcagat

SEQ ID NO: 64198 - DNA, 20 bp, Artificial Sequence
  Description of Artificial Sequence: Synthetic oligonucleotide
  Target: SCNA; (+) strand; PAM type: YTN; PAM sequence: TTA
caaatctattcagatttact

SEQ ID NO: 64199 - DNA, 20 bp, Artificial Sequence
  Description of Artificial Sequence: Synthetic oligonucleotide
  Target: SCNA; (+) strand; PAM type: YTN; PAM sequence: CTA
ttcagatttactgtttcttc

SEQ ID NO: 64200 - DNA, 20 bp, Artificial Sequence
  Description of Artificial Sequence: Synthetic oligonucleotide
  Target: SCNA; (+) strand; PAM type: YTN; PAM sequence: TTC
agatttactgtttcttcttg

SEQ ID NO: 64201 - DNA, 20 bp, Artificial Sequence
  Description of Artificial Sequence: Synthetic oligonucleotide
  Target: SCNA; (+) strand; PAM type: YTN; PAM sequence: TTT
actgtttcttcttgggccag

SEQ ID NO: 64202 - DNA, 20 bp, Artificial Sequence
  Description of Artificial Sequence: Synthetic oligonucleotide
  Target: SCNA; (+) strand; PAM type: YTN; PAM sequence: TTA
ctgtttcttcttgggccagt

SEQ ID NO: 64203 - DNA, 20 bp, Artificial Sequence
  Description of Artificial Sequence: Synthetic oligonucleotide
  Target: SCNA; (+) strand; PAM type: YTN; PAM sequence: CTG
tttcttcttgggccagtttt

SEQ ID NO: 64204 - DNA, 20 bp, Artificial Sequence
  Description of Artificial Sequence: Synthetic oligonucleotide
  Target: SCNA; (+) strand; PAM type: YTN; PAM sequence: TTT
cttcttgggccagttttatt

SEQ ID NO: 64205 - DNA, 20 bp, Artificial Sequence
  Description of Artificial Sequence: Synthetic oligonucleotide
  Target: SCNA; (+) strand; PAM type: YTN; PAM sequence: TTC
ttcttgggccagttttattc

SEQ ID NO: 64206 - DNA, 20 bp, Artificial Sequence
  Description of Artificial Sequence: Synthetic oligonucleotide
  Target: SCNA; (+) strand; PAM type: YTN; PAM sequence: CTT
cttgggccagttttattcat

SEQ ID NO: 64207 - DNA, 20 bp, Artificial Sequence
  Description of Artificial Sequence: Synthetic oligonucleotide
  Target: SCNA; (+) strand; PAM type: YTN; PAM sequence: TTC
ttgggccagttttattcatc

SEQ ID NO: 64208 - DNA, 20 bp, Artificial Sequence
  Description of Artificial Sequence: Synthetic oligonucleotide
  Target: SCNA; (+) strand; PAM type: YTN; PAM sequence: CTT
gggccagttttattcatcta

SEQ ID NO: 64209 - DNA, 20 bp, Artificial Sequence
  Description of Artificial Sequence: Synthetic oligonucleotide
  Target: SCNA; (+) strand; PAM type: YTN; PAM sequence: TTG
ggccagttttattcatctaa

SEQ ID NO: 64210 - DNA, 20 bp, Artificial Sequence
  Description of Artificial Sequence: Synthetic oligonucleotide
  Target: SCNA; (+) strand; PAM type: YTN; PAM sequence: TTT
tattcatctaacagtatttt

SEQ ID NO: 64211 - DNA, 20 bp, Artificial Sequence
  Description of Artificial Sequence: Synthetic oligonucleotide
  Target: SCNA; (+) strand; PAM type: YTN; PAM sequence: TTT
attcatctaacagtattttc

SEQ ID NO: 64212 - DNA, 20 bp, Artificial Sequence
  Description of Artificial Sequence: Synthetic oligonucleotide
  Target: SCNA; (+) strand; PAM type: YTN; PAM sequence: TTA
ttcatctaacagtattttct

SEQ ID NO: 64213 - DNA, 20 bp, Artificial Sequence
  Description of Artificial Sequence: Synthetic oligonucleotide
  Target: SCNA; (+) strand; PAM type: YTN; PAM sequence: TTC
atctaacagtattttctaat

SEQ ID NO: 64214 - DNA, 20 bp, Artificial Sequence
  Description of Artificial Sequence: Synthetic oligonucleotide
  Target: SCNA; (+) strand; PAM type: YTN; PAM sequence: CTA
acagtattttctaatttccc

SEQ ID NO: 64215 - DNA, 20 bp, Artificial Sequence
  Description of Artificial Sequence: Synthetic oligonucleotide
  Target: SCNA; (+) strand; PAM type: YTN; PAM sequence: TTT
tctaatttcccttttgatac

SEQ ID NO: 64216 - DNA, 20 bp, Artificial Sequence
  Description of Artificial Sequence: Synthetic oligonucleotide
  Target: SCNA; (+) strand; PAM type: YTN; PAM sequence: TTT
ctaatttcccttttgataca

SEQ ID NO: 64217 - DNA, 20 bp, Artificial Sequence
  Description of Artificial Sequence: Synthetic oligonucleotide
  Target: SCNA; (+) strand; PAM type: YTN; PAM sequence: TTC
taatttcccttttgatacat

SEQ ID NO: 64218 - DNA, 20 bp, Artificial Sequence
  Description of Artificial Sequence: Synthetic oligonucleotide
  Target: SCNA; (+) strand; PAM type: YTN; PAM sequence: CTA
atttcccttttgatacattt

SEQ ID NO: 64219 - DNA, 20 bp, Artificial Sequence
  Description of Artificial Sequence: Synthetic oligonucleotide
  Target: SCNA; (+) strand; PAM type: YTN; PAM sequence: TTT
cccttttgatacattttcta

SEQ ID NO: 64220 - DNA, 20 bp, Artificial Sequence
  Description of Artificial Sequence: Synthetic oligonucleotide
  Target: SCNA; (+) strand; PAM type: YTN; PAM sequence: TTC
ccttttgatacattttctat

SEQ ID NO: 64221 - DNA, 20 bp, Artificial Sequence
  Description of Artificial Sequence: Synthetic oligonucleotide
  Target: SCNA; (+) strand; PAM type: YTN; PAM sequence: CTT
ttgatacattttctattaaa

SEQ ID NO: 64222 - DNA, 20 bp, Artificial Sequence
  Description of Artificial Sequence: Synthetic oligonucleotide
  Target: SCNA; (+) strand; PAM type: YTN; PAM sequence: TTT
tgatacattttctattaaag

SEQ ID NO: 64223 - DNA, 20 bp, Artificial Sequence
  Description of Artificial Sequence: Synthetic oligonucleotide
  Target: SCNA; (+) strand; PAM type: YTN; PAM sequence: TTT
gatacattttctattaaaga

SEQ ID NO: 64224 - DNA, 20 bp, Artificial Sequence
  Description of Artificial Sequence: Synthetic oligonucleotide
  Target: SCNA; (+) strand; PAM type: YTN; PAM sequence: TTG
atacattttctattaaagat

SEQ ID NO: 64225 - DNA, 20 bp, Artificial Sequence
  Description of Artificial Sequence: Synthetic oligonucleotide
  Target: SCNA; (+) strand; PAM type: YTN; PAM sequence: TTT
tctattaaagatactttcat

SEQ ID NO: 64226 - DNA, 20 bp, Artificial Sequence
  Description of Artificial Sequence: Synthetic oligonucleotide
  Target: SCNA; (+) strand; PAM type: YTN; PAM sequence: TTT
ctattaaagatactttcatt

SEQ ID NO: 64227 - DNA, 20 bp, Artificial Sequence
  Description of Artificial Sequence: Synthetic oligonucleotide
  Target: SCNA; (+) strand; PAM type: YTN; PAM sequence: TTC
tattaaagatactttcattt

SEQ ID NO: 64228 - DNA, 20 bp, Artificial Sequence
  Description of Artificial Sequence: Synthetic oligonucleotide
  Target: SCNA; (+) strand; PAM type: YTN; PAM sequence: CTA
ttaaagatactttcattttc

SEQ ID NO: 64229 - DNA, 20 bp, Artificial Sequence
  Description of Artificial Sequence: Synthetic oligonucleotide
  Target: SCNA; (+) strand; PAM type: YTN; PAM sequence: TTA
aagatactttcattttcaat

SEQ ID NO: 64230 - DNA, 20 bp, Artificial Sequence
  Description of Artificial Sequence: Synthetic oligonucleotide
  Target: SCNA; (+) strand; PAM type: YTN; PAM sequence: CTT
tcattttcaatcaaaataaa

SEQ ID NO: 64231 - DNA, 20 bp, Artificial Sequence
  Description of Artificial Sequence: Synthetic oligonucleotide
  Target: SCNA; (+) strand; PAM type: YTN; PAM sequence: TTT
cattttcaatcaaaataaaa

SEQ ID NO: 64232 - DNA, 20 bp, Artificial Sequence
  Description of Artificial Sequence: Synthetic oligonucleotide
  Target: SCNA; (+) strand; PAM type: YTN; PAM sequence: TTC
attttcaatcaaaataaaat

SEQ ID NO: 64233 - DNA, 20 bp, Artificial Sequence
  Description of Artificial Sequence: Synthetic oligonucleotide
  Target: SCNA; (+) strand; PAM type: YTN; PAM sequence: TTT
tcaatcaaaataaaattaac

SEQ ID NO: 64234 - DNA, 20 bp, Artificial Sequence
  Description of Artificial Sequence: Synthetic oligonucleotide
  Target: SCNA; (+) strand; PAM type: YTN; PAM sequence: TTT
caatcaaaataaaattaaca

SEQ ID NO: 64235 - DNA, 20 bp, Artificial Sequence
  Description of Artificial Sequence: Synthetic oligonucleotide
  Target: SCNA; (+) strand; PAM type: YTN; PAM sequence: TTC
aatcaaaataaaattaacaa

SEQ ID NO: 64236 - DNA, 20 bp, Artificial Sequence
  Description of Artificial Sequence: Synthetic oligonucleotide
  Target: SCNA; (+) strand; PAM type: YTN; PAM sequence: TTA
acaatcatattgtgttgttt

SEQ ID NO: 64237 - DNA, 20 bp, Artificial Sequence
  Description of Artificial Sequence: Synthetic oligonucleotide
  Target: SCNA; (+) strand; PAM type: YTN; PAM sequence: TTG
tgttgtttaaaacattatac

SEQ ID NO: 64238 - DNA, 20 bp, Artificial Sequence
  Description of Artificial Sequence: Synthetic oligonucleotide
  Target: SCNA; (+) strand; PAM type: YTN; PAM sequence: TTG
tttaaaacattatactggaa

SEQ ID NO: 64239 - DNA, 20 bp, Artificial Sequence
  Description of Artificial Sequence: Synthetic oligonucleotide
  Target: SCNA; (+) strand; PAM type: YTN; PAM sequence: TTT
aaaacattatactggaatat

SEQ ID NO: 64240 - DNA, 20 bp, Artificial Sequence
  Description of Artificial Sequence: Synthetic oligonucleotide
  Target: SCNA; (+) strand; PAM type: YTN; PAM sequence: TTA
aaacattatactggaatata

SEQ ID NO: 64241 - DNA, 20 bp, Artificial Sequence
  Description of Artificial Sequence: Synthetic oligonucleotide
  Target: SCNA; (+) strand; PAM type: YTN; PAM sequence: TTA
tactggaatatatcaattgt

SEQ ID NO: 64242 - DNA, 20 bp, Artificial Sequence
  Description of Artificial Sequence: Synthetic oligonucleotide
  Target: SCNA; (+) strand; PAM type: YTN; PAM sequence: CTG
gaatatatcaattgtcgcaa

SEQ ID NO: 64243 - DNA, 20 bp, Artificial Sequence
  Description of Artificial Sequence: Synthetic oligonucleotide
  Target: SCNA; (+) strand; PAM type: YTN; PAM sequence: TTG
tcgcaaatcatgcatttatc

SEQ ID NO: 64244 - DNA, 20 bp, Artificial Sequence
  Description of Artificial Sequence: Synthetic oligonucleotide
  Target: SCNA; (+) strand; PAM type: YTN; PAM sequence: TTT
atctttttattctataactt

SEQ ID NO: 64245 - DNA, 20 bp, Artificial Sequence
  Description of Artificial Sequence: Synthetic oligonucleotide
  Target: SCNA; (+) strand; PAM type: YTN; PAM sequence: TTA
tctttttattctataacttg

SEQ ID NO: 64246 - DNA, 20 bp, Artificial Sequence
  Description of Artificial Sequence: Synthetic oligonucleotide
  Target: SCNA; (+) strand; PAM type: YTN; PAM sequence: CTT
tttattctataacttgtgtg

SEQ ID NO: 64247 - DNA, 20 bp, Artificial Sequence
  Description of Artificial Sequence: Synthetic oligonucleotide
  Target: SCNA; (+) strand; PAM type: YTN; PAM sequence: TTT
ttattctataacttgtgtgg

SEQ ID NO: 64248 - DNA, 20 bp, Artificial Sequence
  Description of Artificial Sequence: Synthetic oligonucleotide
  Target: SCNA; (+) strand; PAM type: YTN; PAM sequence: TTT
tattctataacttgtgtggg

SEQ ID NO: 64249 - DNA, 20 bp, Artificial Sequence
  Description of Artificial Sequence: Synthetic oligonucleotide
  Target: SCNA; (+) strand; PAM type: YTN; PAM sequence: TTT
attctataacttgtgtgggt

SEQ ID NO: 64250 - DNA, 20 bp, Artificial Sequence
  Description of Artificial Sequence: Synthetic oligonucleotide
  Target: SCNA; (+) strand; PAM type: YTN; PAM sequence: TTA
ttctataacttgtgtgggta

SEQ ID NO: 64251 - DNA, 20 bp, Artificial Sequence
  Description of Artificial Sequence: Synthetic oligonucleotide
  Target: SCNA; (+) strand; PAM type: YTN; PAM sequence: TTC
tataacttgtgtgggtaact

SEQ ID NO: 64252 - DNA, 20 bp, Artificial Sequence
  Description of Artificial Sequence: Synthetic oligonucleotide
  Target: SCNA; (+) strand; PAM type: YTN; PAM sequence: CTA
taacttgtgtgggtaacttt

SEQ ID NO: 64253 - DNA, 20 bp, Artificial Sequence
  Description of Artificial Sequence: Synthetic oligonucleotide
  Target: SCNA; (+) strand; PAM type: YTN; PAM sequence: CTT
gtgtgggtaacttttatttt

SEQ ID NO: 64254 - DNA, 20 bp, Artificial Sequence
  Description of Artificial Sequence: Synthetic oligonucleotide
  Target: SCNA; (+) strand; PAM type: YTN; PAM sequence: TTG
tgtgggtaacttttatttta

SEQ ID NO: 64255 - DNA, 20 bp, Artificial Sequence
  Description of Artificial Sequence: Synthetic oligonucleotide
  Target: SCNA; (+) strand; PAM type: YTN; PAM sequence: CTT
ttattttactatgcgtcatc

SEQ ID NO: 64256 - DNA, 20 bp, Artificial Sequence
  Description of Artificial Sequence: Synthetic oligonucleotide
  Target: SCNA; (+) strand; PAM type: YTN; PAM sequence: TTT
tattttactatgcgtcatcc

SEQ ID NO: 64257 - DNA, 20 bp, Artificial Sequence
  Description of Artificial Sequence: Synthetic oligonucleotide
  Target: SCNA; (+) strand; PAM type: YTN; PAM sequence: TTT
attttactatgcgtcatccc

SEQ ID NO: 64258 - DNA, 20 bp, Artificial Sequence
  Description of Artificial Sequence: Synthetic oligonucleotide
  Target: SCNA; (+) strand; PAM type: YTN; PAM sequence: TTA
ttttactatgcgtcatccca

SEQ ID NO: 64259 - DNA, 20 bp, Artificial Sequence
  Description of Artificial Sequence: Synthetic oligonucleotide
  Target: SCNA; (+) strand; PAM type: YTN; PAM sequence: TTT
tactatgcgtcatcccattg

SEQ ID NO: 64260 - DNA, 20 bp, Artificial Sequence
  Description of Artificial Sequence: Synthetic oligonucleotide
  Target: SCNA; (+) strand; PAM type: YTN; PAM sequence: TTT
actatgcgtcatcccattgg

SEQ ID NO: 64261 - DNA, 20 bp, Artificial Sequence
  Description of Artificial Sequence: Synthetic oligonucleotide
  Target: SCNA; (+) strand; PAM type: YTN; PAM sequence: TTA
ctatgcgtcatcccattgga

SEQ ID NO: 64262 - DNA, 20 bp, Artificial Sequence
  Description of Artificial Sequence: Synthetic oligonucleotide
  Target: SCNA; (+) strand; PAM type: YTN; PAM sequence: CTA
tgcgtcatcccattggacat

SEQ ID NO: 64263 - DNA, 20 bp, Artificial Sequence
  Description of Artificial Sequence: Synthetic oligonucleotide
  Target: SCNA; (+) strand; PAM type: YTN; PAM sequence: TTG
gacatgtatggcaaaaaata

SEQ ID NO: 64264 - DNA, 20 bp, Artificial Sequence
  Description of Artificial Sequence: Synthetic oligonucleotide
  Target: SCNA; (+) strand; PAM type: YTN; PAM sequence: CTT
cctttggcattccattgatt

SEQ ID NO: 64265 - DNA, 20 bp, Artificial Sequence
  Description of Artificial Sequence: Synthetic oligonucleotide
  Target: SCNA; (+) strand; PAM type: YTN; PAM sequence: TTC
ctttggcattccattgattt

SEQ ID NO: 64266 - DNA, 20 bp, Artificial Sequence
  Description of Artificial Sequence: Synthetic oligonucleotide
  Target: SCNA; (+) strand; PAM type: YTN; PAM sequence: CTT
tggcattccattgatttccc

SEQ ID NO: 64267 - DNA, 20 bp, Artificial Sequence
  Description of Artificial Sequence: Synthetic oligonucleotide
  Target: SCNA; (+) strand; PAM type: YTN; PAM sequence: TTT
ggcattccattgatttccct

SEQ ID NO: 64268 - DNA, 20 bp, Artificial Sequence
  Description of Artificial Sequence: Synthetic oligonucleotide
  Target: SCNA; (+) strand; PAM type: YTN; PAM sequence: TTG
gcattccattgatttcccta

SEQ ID NO: 64269 - DNA, 20 bp, Artificial Sequence
  Description of Artificial Sequence: Synthetic oligonucleotide
  Target: SCNA; (+) strand; PAM type: YTN; PAM sequence: TTC
cattgatttccctaactttc

SEQ ID NO: 64270 - DNA, 20 bp, Artificial Sequence
  Description of Artificial Sequence: Synthetic oligonucleotide
  Target: SCNA; (+) strand; PAM type: YTN; PAM sequence: TTG
atttccctaactttccattt

SEQ ID NO: 64271 - DNA, 20 bp, Artificial Sequence
  Description of Artificial Sequence: Synthetic oligonucleotide
  Target: SCNA; (+) strand; PAM type: YTN; PAM sequence: TTT
ccctaactttccatttagaa

SEQ ID NO: 64272 - DNA, 20 bp, Artificial Sequence
  Description of Artificial Sequence: Synthetic oligonucleotide
  Target: SCNA; (+) strand; PAM type: YTN; PAM sequence: TTC
cctaactttccatttagaaa

SEQ ID NO: 64273 - DNA, 20 bp, Artificial Sequence
  Description of Artificial Sequence: Synthetic oligonucleotide
  Target: SCNA; (+) strand; PAM type: YTN; PAM sequence: CTA
actttccatttagaaattta

SEQ ID NO: 64274 - DNA, 20 bp, Artificial Sequence
  Description of Artificial Sequence: Synthetic oligonucleotide
  Target: SCNA; (+) strand; PAM type: YTN; PAM sequence: CTT
tccatttagaaatttatttt

SEQ ID NO: 64275 - DNA, 20 bp, Artificial Sequence
  Description of Artificial Sequence: Synthetic oligonucleotide
  Target: SCNA; (+) strand; PAM type: YTN; PAM sequence: TTT
ccatttagaaatttatttta

SEQ ID NO: 64276 - DNA, 20 bp, Artificial Sequence
  Description of Artificial Sequence: Synthetic oligonucleotide
  Target: SCNA; (+) strand; PAM type: YTN; PAM sequence: TTC
catttagaaatttattttag

SEQ ID NO: 64277 - DNA, 20 bp, Artificial Sequence
  Description of Artificial Sequence: Synthetic oligonucleotide
  Target: SCNA; (+) strand; PAM type: YTN; PAM sequence: TTT
agaaatttattttagaatgt

SEQ ID NO: 64278 - DNA, 20 bp, Artificial Sequence
  Description of Artificial Sequence: Synthetic oligonucleotide
  Target: SCNA; (+) strand; PAM type: YTN; PAM sequence: TTA
gaaatttattttagaatgta

SEQ ID NO: 64279 - DNA, 20 bp, Artificial Sequence
  Description of Artificial Sequence: Synthetic oligonucleotide
  Target: SCNA; (+) strand; PAM type: YTN; PAM sequence: TTT
attttagaatgtaaagtttc

SEQ ID NO: 64280 - DNA, 20 bp, Artificial Sequence
  Description of Artificial Sequence: Synthetic oligonucleotide
  Target: SCNA; (+) strand; PAM type: YTN; PAM sequence: TTA
ttttagaatgtaaagtttct

SEQ ID NO: 64281 - DNA, 20 bp, Artificial Sequence
  Description of Artificial Sequence: Synthetic oligonucleotide
  Target: SCNA; (+) strand; PAM type: YTN; PAM sequence: TTT
tagaatgtaaagtttctaaa

SEQ ID NO: 64282 - DNA, 20 bp, Artificial Sequence
  Description of Artificial Sequence: Synthetic oligonucleotide
  Target: SCNA; (+) strand; PAM type: YTN; PAM sequence: TTT
agaatgtaaagtttctaaaa

SEQ ID NO: 64283 - DNA, 20 bp, Artificial Sequence
  Description of Artificial Sequence: Synthetic oligonucleotide
  Target: SCNA; (+) strand; PAM type: YTN; PAM sequence: TTA
gaatgtaaagtttctaaaaa

SEQ ID NO: 64284 - DNA, 20 bp, Artificial Sequence
  Description of Artificial Sequence: Synthetic oligonucleotide
  Target: SCNA; (+) strand; PAM type: YTN; PAM sequence: TTT
ctaaaaatatattctctaat

SEQ ID NO: 64285 - DNA, 20 bp, Artificial Sequence
  Description of Artificial Sequence: Synthetic oligonucleotide
  Target: SCNA; (+) strand; PAM type: YTN; PAM sequence: TTC
taaaaatatattctctaatg

SEQ ID NO: 64286 - DNA, 20 bp, Artificial Sequence
  Description of Artificial Sequence: Synthetic oligonucleotide
  Target: SCNA; (+) strand; PAM type: YTN; PAM sequence: CTA
aaaatatattctctaatgca

SEQ ID NO: 64287 - DNA, 20 bp, Artificial Sequence
  Description of Artificial Sequence: Synthetic oligonucleotide
  Target: SCNA; (+) strand; PAM type: YTN; PAM sequence: TTC
tctaatgcaggggttagtaa

SEQ ID NO: 64288 - DNA, 20 bp, Artificial Sequence
  Description of Artificial Sequence: Synthetic oligonucleotide
  Target: SCNA; (+) strand; PAM type: YTN; PAM sequence: CTC
taatgcaggggttagtaaac

SEQ ID NO: 64289 - DNA, 20 bp, Artificial Sequence
  Description of Artificial Sequence: Synthetic oligonucleotide
  Target: SCNA; (+) strand; PAM type: YTN; PAM sequence: CTA
atgcaggggttagtaaactt

SEQ ID NO: 64290 - DNA, 20 bp, Artificial Sequence
  Description of Artificial Sequence: Synthetic oligonucleotide
  Target: SCNA; (+) strand; PAM type: YTN; PAM sequence: TTA
gtaaacttttcctgtaaagg

SEQ ID NO: 64291 - DNA, 20 bp, Artificial Sequence
  Description of Artificial Sequence: Synthetic oligonucleotide
  Target: SCNA; (+) strand; PAM type: YTN; PAM sequence: CTT
ttcctgtaaagggtcaagta

SEQ ID NO: 64292 - DNA, 20 bp, Artificial Sequence
  Description of Artificial Sequence: Synthetic oligonucleotide
  Target: SCNA; (+) strand; PAM type: YTN; PAM sequence: TTT
tcctgtaaagggtcaagtag

SEQ ID NO: 64293 - DNA, 20 bp, Artificial Sequence
  Description of Artificial Sequence: Synthetic oligonucleotide
  Target: SCNA; (+) strand; PAM type: YTN; PAM sequence: TTT
cctgtaaagggtcaagtagt

SEQ ID NO: 64294 - DNA, 20 bp, Artificial Sequence
  Description of Artificial Sequence: Synthetic oligonucleotide
  Target: SCNA; (+) strand; PAM type: YTN; PAM sequence: TTC
ctgtaaagggtcaagtagta

SEQ ID NO: 64295 - DNA, 20 bp, Artificial Sequence
  Description of Artificial Sequence: Synthetic oligonucleotide
  Target: SCNA; (+) strand; PAM type: YTN; PAM sequence: CTG
taaagggtcaagtagtaagt

SEQ ID NO: 64296 - DNA, 20 bp, Artificial Sequence
  Description of Artificial Sequence: Synthetic oligonucleotide
  Target: SCNA; (+) strand; PAM type: YTN; PAM sequence: TTA
agctatgtggactacatatg

SEQ ID NO: 64297 - DNA, 20 bp, Artificial Sequence
  Description of Artificial Sequence: Synthetic oligonucleotide
  Target: SCNA; (+) strand; PAM type: YTN; PAM sequence: CTA
tgtggactacatatgatttc

SEQ ID NO: 64298 - DNA, 20 bp, Artificial Sequence
  Description of Artificial Sequence: Synthetic oligonucleotide
  Target: SCNA; (+) strand; PAM type: YTN; PAM sequence: CTA
catatgatttcttttacatc

SEQ ID NO: 64299 - DNA, 20 bp, Artificial Sequence
  Description of Artificial Sequence: Synthetic oligonucleotide
  Target: SCNA; (+) strand; PAM type: YTN; PAM sequence: TTT
cttttacatcctttcttcct

SEQ ID NO: 64300 - DNA, 20 bp, Artificial Sequence
  Description of Artificial Sequence: Synthetic oligonucleotide
  Target: SCNA; (+) strand; PAM type: YTN; PAM sequence: TTC
ttttacatcctttcttcctc

SEQ ID NO: 64301 - DNA, 20 bp, Artificial Sequence
  Description of Artificial Sequence: Synthetic oligonucleotide
  Target: SCNA; (+) strand; PAM type: YTN; PAM sequence: CTT
ttacatcctttcttcctctt

SEQ ID NO: 64302 - DNA, 20 bp, Artificial Sequence
  Description of Artificial Sequence: Synthetic oligonucleotide
  Target: SCNA; (+) strand; PAM type: YTN; PAM sequence: TTT
tacatcctttcttcctcttc

SEQ ID NO: 64303 - DNA, 20 bp, Artificial Sequence
  Description of Artificial Sequence: Synthetic oligonucleotide
  Target: SCNA; (+) strand; PAM type: YTN; PAM sequence: TTT
acatcctttcttcctcttct

SEQ ID NO: 64304 - DNA, 20 bp, Artificial Sequence
  Description of Artificial Sequence: Synthetic oligonucleotide
  Target: SCNA; (+) strand; PAM type: YTN; PAM sequence: TTA
catcctttcttcctcttctt

SEQ ID NO: 64305 - DNA, 20 bp, Artificial Sequence
  Description of Artificial Sequence: Synthetic oligonucleotide
  Target: SCNA; (+) strand; PAM type: YTN; PAM sequence: CTT
tcttcctcttcttcatcttc

SEQ ID NO: 64306 - DNA, 20 bp, Artificial Sequence
  Description of Artificial Sequence: Synthetic oligonucleotide
  Target: SCNA; (+) strand; PAM type: YTN; PAM sequence: TTT
cttcctcttcttcatcttcc

SEQ ID NO: 64307 - DNA, 20 bp, Artificial Sequence
  Description of Artificial Sequence: Synthetic oligonucleotide
  Target: SCNA; (+) strand; PAM type: YTN; PAM sequence: TTC
ttcctcttcttcatcttcct

SEQ ID NO: 64308 - DNA, 20 bp, Artificial Sequence
  Description of Artificial Sequence: Synthetic oligonucleotide
  Target: SCNA; (+) strand; PAM type: YTN; PAM sequence: CTT
cctcttcttcatcttcctcc

SEQ ID NO: 64309 - DNA, 20 bp, Artificial Sequence
  Description of Artificial Sequence: Synthetic oligonucleotide
  Target: SCNA; (+) strand; PAM type: YTN; PAM sequence: TTC
ctcttcttcatcttcctcct

SEQ ID NO: 64310 - DNA, 20 bp, Artificial Sequence
  Description of Artificial Sequence: Synthetic oligonucleotide
  Target: SCNA; (+) strand; PAM type: YTN; PAM sequence: CTC
ttcttcatcttcctcctcct

SEQ ID NO: 64311 - DNA, 20 bp, Artificial Sequence
  Description of Artificial Sequence: Synthetic oligonucleotide
  Target: SCNA; (+) strand; PAM type: YTN; PAM sequence: CTT
cttcatcttcctcctcctct

SEQ ID NO: 64312 - DNA, 20 bp, Artificial Sequence
  Description of Artificial Sequence: Synthetic oligonucleotide
  Target: SCNA; (+) strand; PAM type: YTN; PAM sequence: TTC
ttcatcttcctcctcctctt

SEQ ID NO: 64313 - DNA, 20 bp, Artificial Sequence
  Description of Artificial Sequence: Synthetic oligonucleotide
  Target: SCNA; (+) strand; PAM type: YTN; PAM sequence: CTT
catcttcctcctcctctttt

SEQ ID NO: 64314 - DNA, 20 bp, Artificial Sequence
  Description of Artificial Sequence: Synthetic oligonucleotide
  Target: SCNA; (+) strand; PAM type: YTN; PAM sequence: TTC
atcttcctcctcctcttttt

SEQ ID NO: 64315 - DNA, 20 bp, Artificial Sequence
  Description of Artificial Sequence: Synthetic oligonucleotide
  Target: SCNA; (+) strand; PAM type: YTN; PAM sequence: CTT
cctcctcctcttttttttta

SEQ ID NO: 64316 - DNA, 20 bp, Artificial Sequence
  Description of Artificial Sequence: Synthetic oligonucleotide
  Target: SCNA; (+) strand; PAM type: YTN; PAM sequence: TTC
ctcctcctctttttttttaa

SEQ ID NO: 64317 - DNA, 20 bp, Artificial Sequence
  Description of Artificial Sequence: Synthetic oligonucleotide
  Target: SCNA; (+) strand; PAM type: YTN; PAM sequence: CTC
ctcctctttttttttaagga

SEQ ID NO: 64318 - DNA, 20 bp, Artificial Sequence
  Description of Artificial Sequence: Synthetic oligonucleotide
  Target: SCNA; (+) strand; PAM type: YTN; PAM sequence: CTC
ctctttttttttaaggaccc

SEQ ID NO: 64319 - DNA, 20 bp, Artificial Sequence
  Description of Artificial Sequence: Synthetic oligonucleotide
  Target: SCNA; (+) strand; PAM type: YTN; PAM sequence: CTC
tttttttttaaggacccttt

SEQ ID NO: 64320 - DNA, 20 bp, Artificial Sequence
  Description of Artificial Sequence: Synthetic oligonucleotide
  Target: SCNA; (+) strand; PAM type: YTN; PAM sequence: CTT
tttttttaaggaccctttaa

SEQ ID NO: 64321 - DNA, 20 bp, Artificial Sequence
  Description of Artificial Sequence: Synthetic oligonucleotide
  Target: SCNA; (+) strand; PAM type: YTN; PAM sequence: TTT
ttttttaaggaccctttaaa

SEQ ID NO: 64322 - DNA, 20 bp, Artificial Sequence
  Description of Artificial Sequence: Synthetic oligonucleotide
  Target: SCNA; (+) strand; PAM type: YTN; PAM sequence: TTT
tttttaaggaccctttaaaa

SEQ ID NO: 64323 - DNA, 20 bp, Artificial Sequence
  Description of Artificial Sequence: Synthetic oligonucleotide
  Target: SCNA; (+) strand; PAM type: YTN; PAM sequence: TTT
ttttaaggaccctttaaaaa

SEQ ID NO: 64324 - DNA, 20 bp, Artificial Sequence
  Description of Artificial Sequence: Synthetic oligonucleotide
  Target: SCNA; (+) strand; PAM type: YTN; PAM sequence: TTT
tttaaggaccctttaaaaat

SEQ ID NO: 64325 - DNA, 20 bp, Artificial Sequence
  Description of Artificial Sequence: Synthetic oligonucleotide
  Target: SCNA; (+) strand; PAM type: YTN; PAM sequence: TTT
ttaaggaccctttaaaaatg

SEQ ID NO: 64326 - DNA, 20 bp, Artificial Sequence
  Description of Artificial Sequence: Synthetic oligonucleotide
  Target: SCNA; (+) strand; PAM type: YTN; PAM sequence: TTT
taaggaccctttaaaaatgt

SEQ ID NO: 64327 - DNA, 20 bp, Artificial Sequence
  Description of Artificial Sequence: Synthetic oligonucleotide
  Target: SCNA; (+) strand; PAM type: YTN; PAM sequence: TTT
aaggaccctttaaaaatgta

SEQ ID NO: 64328 - DNA, 20 bp, Artificial Sequence
  Description of Artificial Sequence: Synthetic oligonucleotide
  Target: SCNA; (+) strand; PAM type: YTN; PAM sequence: TTA
aggaccctttaaaaatgtaa

SEQ ID NO: 64329 - DNA, 20 bp, Artificial Sequence
  Description of Artificial Sequence: Synthetic oligonucleotide
  Target: SCNA; (+) strand; PAM type: YTN; PAM sequence: CTT
taaaaatgtaaaaactattc

SEQ ID NO: 64330 - DNA, 20 bp, Artificial Sequence
  Description of Artificial Sequence: Synthetic oligonucleotide
  Target: SCNA; (+) strand; PAM type: YTN; PAM sequence: TTT
aaaaatgtaaaaactattct

SEQ ID NO: 64331 - DNA, 20 bp, Artificial Sequence
  Description of Artificial Sequence: Synthetic oligonucleotide
  Target: SCNA; (+) strand; PAM type: YTN; PAM sequence: TTA
aaaatgtaaaaactattctt

SEQ ID NO: 64332 - DNA, 20 bp, Artificial Sequence
  Description of Artificial Sequence: Synthetic oligonucleotide
  Target: SCNA; (+) strand; PAM type: YTN; PAM sequence: CTA
ttcttaacttgcaagttgtc

SEQ ID NO: 64333 - DNA, 20 bp, Artificial Sequence
  Description of Artificial Sequence: Synthetic oligonucleotide
  Target: SCNA; (+) strand; PAM type: YTN; PAM sequence: TTC
ttaacttgcaagttgtccac

SEQ ID NO: 64334 - DNA, 20 bp, Artificial Sequence
  Description of Artificial Sequence: Synthetic oligonucleotide
  Target: SCNA; (+) strand; PAM type: YTN; PAM sequence: CTT
aacttgcaagttgtccacgt

SEQ ID NO: 64335 - DNA, 20 bp, Artificial Sequence
  Description of Artificial Sequence: Synthetic oligonucleotide
  Target: SCNA; (+) strand; PAM type: YTN; PAM sequence: TTA
acttgcaagttgtccacgta

SEQ ID NO: 64336 - DNA, 20 bp, Artificial Sequence
  Description of Artificial Sequence: Synthetic oligonucleotide
  Target: SCNA; (+) strand; PAM type: YTN; PAM sequence: CTT
gcaagttgtccacgtaatga

SEQ ID NO: 64337 - DNA, 20 bp, Artificial Sequence
  Description of Artificial Sequence: Synthetic oligonucleotide
  Target: SCNA; (+) strand; PAM type: YTN; PAM sequence: TTG
caagttgtccacgtaatgag

SEQ ID NO: 64338 - DNA, 20 bp, Artificial Sequence
  Description of Artificial Sequence: Synthetic oligonucleotide
  Target: SCNA; (+) strand; PAM type: YTN; PAM sequence: TTG
tccacgtaatgagcatgtag

SEQ ID NO: 64339 - DNA, 20 bp, Artificial Sequence
  Description of Artificial Sequence: Synthetic oligonucleotide
  Target: SCNA; (+) strand; PAM type: YTN; PAM sequence: TTC
tcactaagcactaatgaaag

SEQ ID NO: 64340 - DNA, 20 bp, Artificial Sequence
  Description of Artificial Sequence: Synthetic oligonucleotide
  Target: SCNA; (+) strand; PAM type: YTN; PAM sequence: CTC
actaagcactaatgaaagag

SEQ ID NO: 64341 - DNA, 20 bp, Artificial Sequence
  Description of Artificial Sequence: Synthetic oligonucleotide
  Target: SCNA; (+) strand; PAM type: YTN; PAM sequence: CTA
agcactaatgaaagagaaat

SEQ ID NO: 64342 - DNA, 20 bp, Artificial Sequence
  Description of Artificial Sequence: Synthetic oligonucleotide
  Target: SCNA; (+) strand; PAM type: YTN; PAM sequence: CTA
atgaaagagaaatgtgacaa

SEQ ID NO: 64343 - DNA, 20 bp, Artificial Sequence
  Description of Artificial Sequence: Synthetic oligonucleotide
  Target: SCNA; (+) strand; PAM type: YTN; PAM sequence: TTT
ttggtactgtcttgttagaa

SEQ ID NO: 64344 - DNA, 20 bp, Artificial Sequence
  Description of Artificial Sequence: Synthetic oligonucleotide
  Target: SCNA; (+) strand; PAM type: YTN; PAM sequence: TTT
tggtactgtcttgttagaaa

SEQ ID NO: 64345 - DNA, 20 bp, Artificial Sequence
  Description of Artificial Sequence: Synthetic oligonucleotide
  Target: SCNA; (+) strand; PAM type: YTN; PAM sequence: TTT
ggtactgtcttgttagaaag

SEQ ID NO: 64346 - DNA, 20 bp, Artificial Sequence
  Description of Artificial Sequence: Synthetic oligonucleotide
  Target: SCNA; (+) strand; PAM type: YTN; PAM sequence: TTG
gtactgtcttgttagaaaga

SEQ ID NO: 64347 - DNA, 20 bp, Artificial Sequence
  Description of Artificial Sequence: Synthetic oligonucleotide
  Target: SCNA; (+) strand; PAM type: YTN; PAM sequence: CTG
tcttgttagaaagattcagc

SEQ ID NO: 64348 - DNA, 20 bp, Artificial Sequence
  Description of Artificial Sequence: Synthetic oligonucleotide
  Target: SCNA; (+) strand; PAM type: YTN; PAM sequence: CTT
gttagaaagattcagcttgg

SEQ ID NO: 64349 - DNA, 20 bp, Artificial Sequence
  Description of Artificial Sequence: Synthetic oligonucleotide
  Target: SCNA; (+) strand; PAM type: YTN; PAM sequence: TTG
ttagaaagattcagcttgga

SEQ ID NO: 64350 - DNA, 20 bp, Artificial Sequence
  Description of Artificial Sequence: Synthetic oligonucleotide
  Target: SCNA; (+) strand; PAM type: YTN; PAM sequence: TTA
gaaagattcagcttggactc

SEQ ID NO: 64351 - DNA, 20 bp, Artificial Sequence
  Description of Artificial Sequence: Synthetic oligonucleotide
  Target: SCNA; (+) strand; PAM type: YTN; PAM sequence: TTC
agcttggactcctacctcag

SEQ ID NO: 64352 - DNA, 20 bp, Artificial Sequence
  Description of Artificial Sequence: Synthetic oligonucleotide
  Target: SCNA; (+) strand; PAM type: YTN; PAM sequence: CTT
ggactcctacctcagaaggc

SEQ ID NO: 64353 - DNA, 20 bp, Artificial Sequence
  Description of Artificial Sequence: Synthetic oligonucleotide
  Target: SCNA; (+) strand; PAM type: YTN; PAM sequence: TTG
gactcctacctcagaaggca

SEQ ID NO: 64354 - DNA, 20 bp, Artificial Sequence
  Description of Artificial Sequence: Synthetic oligonucleotide
  Target: SCNA; (+) strand; PAM type: YTN; PAM sequence: CTC
ctacctcagaaggcatttca

SEQ ID NO: 64355 - DNA, 20 bp, Artificial Sequence
  Description of Artificial Sequence: Synthetic oligonucleotide
  Target: SCNA; (+) strand; PAM type: YTN; PAM sequence: CTA
cctcagaaggcatttcataa

SEQ ID NO: 64356 - DNA, 20 bp, Artificial Sequence
  Description of Artificial Sequence: Synthetic oligonucleotide
  Target: SCNA; (+) strand; PAM type: YTN; PAM sequence: CTC
agaaggcatttcataagcct

SEQ ID NO: 64357 - DNA, 20 bp, Artificial Sequence
  Description of Artificial Sequence: Synthetic oligonucleotide
  Target: SCNA; (+) strand; PAM type: YTN; PAM sequence: TTT
cataagcctcattgtcagga

SEQ ID NO: 64358 - DNA, 20 bp, Artificial Sequence
  Description of Artificial Sequence: Synthetic oligonucleotide
  Target: SCNA; (+) strand; PAM type: YTN; PAM sequence: TTC
ataagcctcattgtcaggat

SEQ ID NO: 64359 - DNA, 20 bp, Artificial Sequence
  Description of Artificial Sequence: Synthetic oligonucleotide
  Target: SCNA; (+) strand; PAM type: YTN; PAM sequence: CTC
attgtcaggatccacaggca

SEQ ID NO: 64360 - DNA, 20 bp, Artificial Sequence
  Description of Artificial Sequence: Synthetic oligonucleotide
  Target: SCNA; (+) strand; PAM type: YTN; PAM sequence: TTG
tcaggatccacaggcatatc

SEQ ID NO: 64361 - DNA, 20 bp, Artificial Sequence
  Description of Artificial Sequence: Synthetic oligonucleotide
  Target: SCNA; (+) strand; PAM type: YTN; PAM sequence: CTT
ccagaattccttcctgtggg

SEQ ID NO: 64362 - DNA, 20 bp, Artificial Sequence
  Description of Artificial Sequence: Synthetic oligonucleotide
  Target: SCNA; (+) strand; PAM type: YTN; PAM sequence: TTC
cagaattccttcctgtgggg

SEQ ID NO: 64363 - DNA, 20 bp, Artificial Sequence
  Description of Artificial Sequence: Synthetic oligonucleotide
  Target: SCNA; (+) strand; PAM type: YTN; PAM sequence: TTC
cttcctgtggggctccttct

SEQ ID NO: 64364 - DNA, 20 bp, Artificial Sequence
  Description of Artificial Sequence: Synthetic oligonucleotide
  Target: SCNA; (+) strand; PAM type: YTN; PAM sequence: CTT
cctgtggggctccttcttca

SEQ ID NO: 64365 - DNA, 20 bp, Artificial Sequence
  Description of Artificial Sequence: Synthetic oligonucleotide
  Target: SCNA; (+) strand; PAM type: YTN; PAM sequence: TTC
ctgtggggctccttcttcat

SEQ ID NO: 64366 - DNA, 20 bp, Artificial Sequence
  Description of Artificial Sequence: Synthetic oligonucleotide
  Target: SCNA; (+) strand; PAM type: YTN; PAM sequence: CTG
tggggctccttcttcattct

SEQ ID NO: 64367 - DNA, 20 bp, Artificial Sequence
  Description of Artificial Sequence: Synthetic oligonucleotide
  Target: SCNA; (+) strand; PAM type: YTN; PAM sequence: CTC
cttcttcattctaatattta

SEQ ID NO: 64368 - DNA, 20 bp, Artificial Sequence
  Description of Artificial Sequence: Synthetic oligonucleotide
  Target: SCNA; (+) strand; PAM type: YTN; PAM sequence: CTT
cttcattctaatatttaaag

SEQ ID NO: 64369 - DNA, 20 bp, Artificial Sequence
  Description of Artificial Sequence: Synthetic oligonucleotide
  Target: SCNA; (+) strand; PAM type: YTN; PAM sequence: TTC
ttcattctaatatttaaagt

SEQ ID NO: 64370 - DNA, 20 bp, Artificial Sequence
  Description of Artificial Sequence: Synthetic oligonucleotide
  Target: SCNA; (+) strand; PAM type: YTN; PAM sequence: CTT
cattctaatatttaaagtaa

SEQ ID NO: 64371 - DNA, 20 bp, Artificial Sequence
  Description of Artificial Sequence: Synthetic oligonucleotide
  Target: SCNA; (+) strand; PAM type: YTN; PAM sequence: TTC
attctaatatttaaagtaag

SEQ ID NO: 64372 - DNA, 20 bp, Artificial Sequence
  Description of Artificial Sequence: Synthetic oligonucleotide
  Target: SCNA; (+) strand; PAM type: YTN; PAM sequence: TTC
taatatttaaagtaagaagc

SEQ ID NO: 64373 - DNA, 20 bp, Artificial Sequence
  Description of Artificial Sequence: Synthetic oligonucleotide
  Target: SCNA; (+) strand; PAM type: YTN; PAM sequence: CTA
atatttaaagtaagaagcac

SEQ ID NO: 64374 - DNA, 20 bp, Artificial Sequence
  Description of Artificial Sequence: Synthetic oligonucleotide
  Target: SCNA; (+) strand; PAM type: YTN; PAM sequence: TTT
aaagtaagaagcacaaaaag

SEQ ID NO: 64375 - DNA, 20 bp, Artificial Sequence
  Description of Artificial Sequence: Synthetic oligonucleotide
  Target: SCNA; (+) strand; PAM type: YTN; PAM sequence: TTA
aagtaagaagcacaaaaaga

SEQ ID NO: 64376 - DNA, 20 bp, Artificial Sequence
  Description of Artificial Sequence: Synthetic oligonucleotide
  Target: SCNA; (+) strand; PAM type: YTN; PAM sequence: TTT
ttcacttttaaaaatcagaa

SEQ ID NO: 64377 - DNA, 20 bp, Artificial Sequence
  Description of Artificial Sequence: Synthetic oligonucleotide
  Target: SCNA; (+) strand; PAM type: YTN; PAM sequence: TTT
tcacttttaaaaatcagaac

SEQ ID NO: 64378 - DNA, 20 bp, Artificial Sequence
  Description of Artificial Sequence: Synthetic oligonucleotide
  Target: SCNA; (+) strand; PAM type: YTN; PAM sequence: TTT
cacttttaaaaatcagaacc

SEQ ID NO: 64379 - DNA, 20 bp, Artificial Sequence
  Description of Artificial Sequence: Synthetic oligonucleotide
  Target: SCNA; (+) strand; PAM type: YTN; PAM sequence: TTC
acttttaaaaatcagaacca

SEQ ID NO: 64380 - DNA, 20 bp, Artificial Sequence
  Description of Artificial Sequence: Synthetic oligonucleotide
  Target: SCNA; (+) strand; PAM type: YTN; PAM sequence: CTT
ttaaaaatcagaaccatgtt

SEQ ID NO: 64381 - DNA, 20 bp, Artificial Sequence
  Description of Artificial Sequence: Synthetic oligonucleotide
  Target: SCNA; (+) strand; PAM type: YTN; PAM sequence: TTT
taaaaatcagaaccatgttt

SEQ ID NO: 64382 - DNA, 20 bp, Artificial Sequence
  Description of Artificial Sequence: Synthetic oligonucleotide
  Target: SCNA; (+) strand; PAM type: YTN; PAM sequence: TTT
aaaaatcagaaccatgtttt

SEQ ID NO: 64383 - DNA, 20 bp, Artificial Sequence
  Description of Artificial Sequence: Synthetic oligonucleotide
  Target: SCNA; (+) strand; PAM type: YTN; PAM sequence: TTA
aaaatcagaaccatgttttg

SEQ ID NO: 64384 - DNA, 20 bp, Artificial Sequence
  Description of Artificial Sequence: Synthetic oligonucleotide
  Target: SCNA; (+) strand; PAM type: YTN; PAM sequence: TTT
tggaaaaatcttacatatag

SEQ ID NO: 64385 - DNA, 20 bp, Artificial Sequence
  Description of Artificial Sequence: Synthetic oligonucleotide
  Target: SCNA; (+) strand; PAM type: YTN; PAM sequence: TTT
ggaaaaatcttacatatagg

SEQ ID NO: 64386 - DNA, 20 bp, Artificial Sequence
  Description of Artificial Sequence: Synthetic oligonucleotide
  Target: SCNA; (+) strand; PAM type: YTN; PAM sequence: TTG
gaaaaatcttacatataggg

SEQ ID NO: 64387 - DNA, 20 bp, Artificial Sequence
  Description of Artificial Sequence: Synthetic oligonucleotide
  Target: SCNA; (+) strand; PAM type: YTN; PAM sequence: CTT
acatatagggatgttggcca

SEQ ID NO: 64388 - DNA, 20 bp, Artificial Sequence
  Description of Artificial Sequence: Synthetic oligonucleotide
  Target: SCNA; (+) strand; PAM type: YTN; PAM sequence: TTA
catatagggatgttggccac

SEQ ID NO: 64389 - DNA, 20 bp, Artificial Sequence
  Description of Artificial Sequence: Synthetic oligonucleotide
  Target: SCNA; (+) strand; PAM type: YTN; PAM sequence: TTG
gccacggatcttgaaaatgg

SEQ ID NO: 64390 - DNA, 20 bp, Artificial Sequence
  Description of Artificial Sequence: Synthetic oligonucleotide
  Target: SCNA; (+) strand; PAM type: YTN; PAM sequence: CTT
gaaaatggcacaccttaata

SEQ ID NO: 64391 - DNA, 20 bp, Artificial Sequence
  Description of Artificial Sequence: Synthetic oligonucleotide
  Target: SCNA; (+) strand; PAM type: YTN; PAM sequence: TTG
aaaatggcacaccttaatat

SEQ ID NO: 64392 - DNA, 20 bp, Artificial Sequence
  Description of Artificial Sequence: Synthetic oligonucleotide
  Target: SCNA; (+) strand; PAM type: YTN; PAM sequence: CTT
aatattactactggcattct

SEQ ID NO: 64393 - DNA, 20 bp, Artificial Sequence
  Description of Artificial Sequence: Synthetic oligonucleotide
  Target: SCNA; (+) strand; PAM type: YTN; PAM sequence: TTA
atattactactggcattcta

SEQ ID NO: 64394 - DNA, 20 bp, Artificial Sequence
  Description of Artificial Sequence: Synthetic oligonucleotide
  Target: SCNA; (+) strand; PAM type: YTN; PAM sequence: TTA
ctactggcattctaaactcc

SEQ ID NO: 64395 - DNA, 20 bp, Artificial Sequence
  Description of Artificial Sequence: Synthetic oligonucleotide
  Target: SCNA; (+) strand; PAM type: YTN; PAM sequence: CTA
ctggcattctaaactccaca

SEQ ID NO: 64396 - DNA, 20 bp, Artificial Sequence
  Description of Artificial Sequence: Synthetic oligonucleotide
  Target: SCNA; (+) strand; PAM type: YTN; PAM sequence: CTG
gcattctaaactccacaatg

SEQ ID NO: 64397 - DNA, 20 bp, Artificial Sequence
  Description of Artificial Sequence: Synthetic oligonucleotide
  Target: SCNA; (+) strand; PAM type: YTN; PAM sequence: TTC
taaactccacaatgcctccg

SEQ ID NO: 64398 - DNA, 20 bp, Artificial Sequence
  Description of Artificial Sequence: Synthetic oligonucleotide
  Target: SCNA; (+) strand; PAM type: YTN; PAM sequence: CTA
aactccacaatgcctccggg

SEQ ID NO: 64399 - DNA, 20 bp, Artificial Sequence
  Description of Artificial Sequence: Synthetic oligonucleotide
  Target: SCNA; (+) strand; PAM type: YTN; PAM sequence: CTC
cacaatgcctccggggaaac

SEQ ID NO: 64400 - DNA, 20 bp, Artificial Sequence
  Description of Artificial Sequence: Synthetic oligonucleotide
  Target: SCNA; (+) strand; PAM type: YTN; PAM sequence: CTC
cggggaaacattgcggcaac

SEQ ID NO: 64401 - DNA, 20 bp, Artificial Sequence
  Description of Artificial Sequence: Synthetic oligonucleotide
  Target: SCNA; (+) strand; PAM type: YTN; PAM sequence: TTG
cggcaacatgggttatcaac

SEQ ID NO: 64402 - DNA, 20 bp, Artificial Sequence
  Description of Artificial Sequence: Synthetic oligonucleotide
  Target: SCNA; (+) strand; PAM type: YTN; PAM sequence: TTA
tcaaccctcaaagtatgtaa

SEQ ID NO: 64403 - DNA, 20 bp, Artificial Sequence
  Description of Artificial Sequence: Synthetic oligonucleotide
  Target: SCNA; (+) strand; PAM type: YTN; PAM sequence: CTC
aaagtatgtaaactttttgc

SEQ ID NO: 64404 - DNA, 20 bp, Artificial Sequence
  Description of Artificial Sequence: Synthetic oligonucleotide
  Target: SCNA; (+) strand; PAM type: YTN; PAM sequence: CTT
tttgctcaagtaatttacta

SEQ ID NO: 64405 - DNA, 20 bp, Artificial Sequence
  Description of Artificial Sequence: Synthetic oligonucleotide
  Target: SCNA; (+) strand; PAM type: YTN; PAM sequence: TTT
ttgctcaagtaatttactat

SEQ ID NO: 64406 - DNA, 20 bp, Artificial Sequence
  Description of Artificial Sequence: Synthetic oligonucleotide
  Target: SCNA; (+) strand; PAM type: YTN; PAM sequence: TTT
tgctcaagtaatttactatt

SEQ ID NO: 64407 - DNA, 20 bp, Artificial Sequence
  Description of Artificial Sequence: Synthetic oligonucleotide
  Target: SCNA; (+) strand; PAM type: YTN; PAM sequence: TTT
gctcaagtaatttactattt

SEQ ID NO: 64408 - DNA, 20 bp, Artificial Sequence
  Description of Artificial Sequence: Synthetic oligonucleotide
  Target: SCNA; (+) strand; PAM type: YTN; PAM sequence: TTG
ctcaagtaatttactattta

SEQ ID NO: 64409 - DNA, 20 bp, Artificial Sequence
  Description of Artificial Sequence: Synthetic oligonucleotide
  Target: SCNA; (+) strand; PAM type: YTN; PAM sequence: CTC
aagtaatttactatttagga

SEQ ID NO: 64410 - DNA, 20 bp, Artificial Sequence
  Description of Artificial Sequence: Synthetic oligonucleotide
  Target: SCNA; (+) strand; PAM type: YTN; PAM sequence: TTT
actatttaggaaataatcca

SEQ ID NO: 64411 - DNA, 20 bp, Artificial Sequence
  Description of Artificial Sequence: Synthetic oligonucleotide
  Target: SCNA; (+) strand; PAM type: YTN; PAM sequence: TTA
ctatttaggaaataatccac

SEQ ID NO: 64412 - DNA, 20 bp, Artificial Sequence
  Description of Artificial Sequence: Synthetic oligonucleotide
  Target: SCNA; (+) strand; PAM type: YTN; PAM sequence: CTA
tttaggaaataatccacagc

SEQ ID NO: 64413 - DNA, 20 bp, Artificial Sequence
  Description of Artificial Sequence: Synthetic oligonucleotide
  Target: SCNA; (+) strand; PAM type: YTN; PAM sequence: TTT
aggaaataatccacagctat

SEQ ID NO: 64414 - DNA, 20 bp, Artificial Sequence
  Description of Artificial Sequence: Synthetic oligonucleotide
  Target: SCNA; (+) strand; PAM type: YTN; PAM sequence: TTA
ggaaataatccacagctata

SEQ ID NO: 64415 - DNA, 20 bp, Artificial Sequence
  Description of Artificial Sequence: Synthetic oligonucleotide
  Target: SCNA; (+) strand; PAM type: YTN; PAM sequence: CTA
tagtccaaagatatttttca

SEQ ID NO: 64416 - DNA, 20 bp, Artificial Sequence
  Description of Artificial Sequence: Synthetic oligonucleotide
  Target: SCNA; (+) strand; PAM type: YTN; PAM sequence: TTT
ttcacaagatcaatgacagc

SEQ ID NO: 64417 - DNA, 20 bp, Artificial Sequence
  Description of Artificial Sequence: Synthetic oligonucleotide
  Target: SCNA; (+) strand; PAM type: YTN; PAM sequence: TTT
tcacaagatcaatgacagca

SEQ ID NO: 64418 - DNA, 20 bp, Artificial Sequence
  Description of Artificial Sequence: Synthetic oligonucleotide
  Target: SCNA; (+) strand; PAM type: YTN; PAM sequence: TTT
cacaagatcaatgacagcag

SEQ ID NO: 64419 - DNA, 20 bp, Artificial Sequence
  Description of Artificial Sequence: Synthetic oligonucleotide
  Target: SCNA; (+) strand; PAM type: YTN; PAM sequence: TTC
acaagatcaatgacagcagg

SEQ ID NO: 64420 - DNA, 20 bp, Artificial Sequence
  Description of Artificial Sequence: Synthetic oligonucleotide
  Target: SCNA; (+) strand; PAM type: YTN; PAM sequence: TTT
ttagaattgttaactaaatg

SEQ ID NO: 64421 - DNA, 20 bp, Artificial Sequence
  Description of Artificial Sequence: Synthetic oligonucleotide
  Target: SCNA; (+) strand; PAM type: YTN; PAM sequence: TTT
tagaattgttaactaaatgt

SEQ ID NO: 64422 - DNA, 20 bp, Artificial Sequence
  Description of Artificial Sequence: Synthetic oligonucleotide
  Target: SCNA; (+) strand; PAM type: YTN; PAM sequence: TTT
agaattgttaactaaatgtt

SEQ ID NO: 64423 - DNA, 20 bp, Artificial Sequence
  Description of Artificial Sequence: Synthetic oligonucleotide
  Target: SCNA; (+) strand; PAM type: YTN; PAM sequence: TTA
gaattgttaactaaatgttc

SEQ ID NO: 64424 - DNA, 20 bp, Artificial Sequence
  Description of Artificial Sequence: Synthetic oligonucleotide
  Target: SCNA; (+) strand; PAM type: YTN; PAM sequence: TTG
ttaactaaatgttcaatgaa

SEQ ID NO: 64425 - DNA, 20 bp, Artificial Sequence
  Description of Artificial Sequence: Synthetic oligonucleotide
  Target: SCNA; (+) strand; PAM type: YTN; PAM sequence: TTA
actaaatgttcaatgaataa

SEQ ID NO: 64426 - DNA, 20 bp, Artificial Sequence
  Description of Artificial Sequence: Synthetic oligonucleotide
  Target: SCNA; (+) strand; PAM type: YTN; PAM sequence: CTA
aatgttcaatgaataatgaa

SEQ ID NO: 64427 - DNA, 20 bp, Artificial Sequence
  Description of Artificial Sequence: Synthetic oligonucleotide
  Target: SCNA; (+) strand; PAM type: YTN; PAM sequence: TTC
aatgaataatgaagagttaa

SEQ ID NO: 64428 - DNA, 20 bp, Artificial Sequence
  Description of Artificial Sequence: Synthetic oligonucleotide
  Target: SCNA; (+) strand; PAM type: YTN; PAM sequence: TTA
aaaaattattgctgggtgca

SEQ ID NO: 64429 - DNA, 20 bp, Artificial Sequence
  Description of Artificial Sequence: Synthetic oligonucleotide
  Target: SCNA; (+) strand; PAM type: YTN; PAM sequence: TTA
ttgctgggtgcagtggttca

SEQ ID NO: 64430 - DNA, 20 bp, Artificial Sequence
  Description of Artificial Sequence: Synthetic oligonucleotide
  Target: SCNA; (+) strand; PAM type: YTN; PAM sequence: TTG
ctgggtgcagtggttcactc

SEQ ID NO: 64431 - DNA, 20 bp, Artificial Sequence
  Description of Artificial Sequence: Synthetic oligonucleotide
  Target: SCNA; (+) strand; PAM type: YTN; PAM sequence: CTG
ggtgcagtggttcactcctg

SEQ ID NO: 64432 - DNA, 20 bp, Artificial Sequence
  Description of Artificial Sequence: Synthetic oligonucleotide
  Target: SCNA; (+) strand; PAM type: YTN; PAM sequence: TTC
actcctgtgatttcagcact

SEQ ID NO: 64433 - DNA, 20 bp, Artificial Sequence
  Description of Artificial Sequence: Synthetic oligonucleotide
  Target: SCNA; (+) strand; PAM type: YTN; PAM sequence: CTC
ctgtgatttcagcactttgg

SEQ ID NO: 64434 - DNA, 20 bp, Artificial Sequence
  Description of Artificial Sequence: Synthetic oligonucleotide
  Target: SCNA; (+) strand; PAM type: YTN; PAM sequence: CTG
tgatttcagcactttgggag

SEQ ID NO: 64435 - DNA, 20 bp, Artificial Sequence
  Description of Artificial Sequence: Synthetic oligonucleotide
  Target: SCNA; (+) strand; PAM type: YTN; PAM sequence: TTT
cagcactttgggaggctgag

SEQ ID NO: 64436 - DNA, 20 bp, Artificial Sequence
  Description of Artificial Sequence: Synthetic oligonucleotide
  Target: SCNA; (+) strand; PAM type: YTN; PAM sequence: TTC
agcactttgggaggctgagg

SEQ ID NO: 64437 - DNA, 20 bp, Artificial Sequence
  Description of Artificial Sequence: Synthetic oligonucleotide
  Target: SCNA; (+) strand; PAM type: YTN; PAM sequence: CTT
tgggaggctgaggcaggtgg

SEQ ID NO: 64438 - DNA, 20 bp, Artificial Sequence
  Description of Artificial Sequence: Synthetic oligonucleotide
  Target: SCNA; (+) strand; PAM type: YTN; PAM sequence: TTT
gggaggctgaggcaggtgga

SEQ ID NO: 64439 - DNA, 20 bp, Artificial Sequence
  Description of Artificial Sequence: Synthetic oligonucleotide
  Target: SCNA; (+) strand; PAM type: YTN; PAM sequence: TTG
ggaggctgaggcaggtggat

SEQ ID NO: 64440 - DNA, 20 bp, Artificial Sequence
  Description of Artificial Sequence: Synthetic oligonucleotide
  Target: SCNA; (+) strand; PAM type: YTN; PAM sequence: CTG
aggcaggtggatcatttgag

SEQ ID NO: 64441 - DNA, 20 bp, Artificial Sequence
  Description of Artificial Sequence: Synthetic oligonucleotide
  Target: SCNA; (+) strand; PAM type: YTN; PAM sequence: TTT
gagtccaggagttcaagacc

SEQ ID NO: 64442 - DNA, 20 bp, Artificial Sequence
  Description of Artificial Sequence: Synthetic oligonucleotide
  Target: SCNA; (+) strand; PAM type: YTN; PAM sequence: TTG
agtccaggagttcaagacca

SEQ ID NO: 64443 - DNA, 20 bp, Artificial Sequence
  Description of Artificial Sequence: Synthetic oligonucleotide
  Target: SCNA; (+) strand; PAM type: YTN; PAM sequence: TTC
aagaccagcctgggctgtta

SEQ ID NO: 64444 - DNA, 20 bp, Artificial Sequence
  Description of Artificial Sequence: Synthetic oligonucleotide
  Target: SCNA; (+) strand; PAM type: YTN; PAM sequence: CTG
ggctgttacaatgaaacccc

SEQ ID NO: 64445 - DNA, 20 bp, Artificial Sequence
  Description of Artificial Sequence: Synthetic oligonucleotide
  Target: SCNA; (+) strand; PAM type: YTN; PAM sequence: CTG
ttacaatgaaaccccatctc

SEQ ID NO: 64446 - DNA, 20 bp, Artificial Sequence
  Description of Artificial Sequence: Synthetic oligonucleotide
  Target: SCNA; (+) strand; PAM type: YTN; PAM sequence: TTA
caatgaaaccccatctctac

SEQ ID NO: 64447 - DNA, 20 bp, Artificial Sequence
  Description of Artificial Sequence: Synthetic oligonucleotide
  Target: SCNA; (+) strand; PAM type: YTN; PAM sequence: CTC
tactaaaaatacaaataaat

SEQ ID NO: 64448 - DNA, 20 bp, Artificial Sequence
  Description of Artificial Sequence: Synthetic oligonucleotide
  Target: SCNA; (+) strand; PAM type: YTN; PAM sequence: CTA
ctaaaaatacaaataaatag

SEQ ID NO: 64449 - DNA, 20 bp, Artificial Sequence
  Description of Artificial Sequence: Synthetic oligonucleotide
  Target: SCNA; (+) strand; PAM type: YTN; PAM sequence: CTA
aaaatacaaataaatagctg

SEQ ID NO: 64450 - DNA, 20 bp, Artificial Sequence
  Description of Artificial Sequence: Synthetic oligonucleotide
  Target: SCNA; (+) strand; PAM type: YTN; PAM sequence: CTG
ggcatggtggcacatgccta

SEQ ID NO: 64451 - DNA, 20 bp, Artificial Sequence
  Description of Artificial Sequence: Synthetic oligonucleotide
  Target: SCNA; (+) strand; PAM type: YTN; PAM sequence: CTA
cagtcccagccacttgggag

SEQ ID NO: 64452 - DNA, 20 bp, Artificial Sequence
  Description of Artificial Sequence: Synthetic oligonucleotide
  Target: SCNA; (+) strand; PAM type: YTN; PAM sequence: CTT
gggaggctgaggcaggagga

SEQ ID NO: 64453 - DNA, 20 bp, Artificial Sequence
  Description of Artificial Sequence: Synthetic oligonucleotide
  Target: SCNA; (+) strand; PAM type: YTN; PAM sequence: TTG
ggaggctgaggcaggaggat

SEQ ID NO: 64454 - DNA, 20 bp, Artificial Sequence
  Description of Artificial Sequence: Synthetic oligonucleotide
  Target: SCNA; (+) strand; PAM type: YTN; PAM sequence: CTG
aggcaggaggatcacttgag

SEQ ID NO: 64455 - DNA, 20 bp, Artificial Sequence
  Description of Artificial Sequence: Synthetic oligonucleotide
  Target: SCNA; (+) strand; PAM type: YTN; PAM sequence: CTT
gagcctgggaggtagaggct

SEQ ID NO: 64456 - DNA, 20 bp, Artificial Sequence
  Description of Artificial Sequence: Synthetic oligonucleotide
  Target: SCNA; (+) strand; PAM type: YTN; PAM sequence: TTG
agcctgggaggtagaggcta

SEQ ID NO: 64457 - DNA, 20 bp, Artificial Sequence
  Description of Artificial Sequence: Synthetic oligonucleotide
  Target: SCNA; (+) strand; PAM type: YTN; PAM sequence: CTG
ggaggtagaggctacagtga

SEQ ID NO: 64458 - DNA, 20 bp, Artificial Sequence
  Description of Artificial Sequence: Synthetic oligonucleotide
  Target: SCNA; (+) strand; PAM type: YTN; PAM sequence: CTA
cagtgagccatgtgcatgcc

SEQ ID NO: 64459 - DNA, 20 bp, Artificial Sequence
  Description of Artificial Sequence: Synthetic oligonucleotide
  Target: SCNA; (+) strand; PAM type: YTN; PAM sequence: CTG
cattctagcctgggtgacag

SEQ ID NO: 64460 - DNA, 20 bp, Artificial Sequence
  Description of Artificial Sequence: Synthetic oligonucleotide
  Target: SCNA; (+) strand; PAM type: YTN; PAM sequence: TTC
tagcctgggtgacagaggga

SEQ ID NO: 64461 - DNA, 20 bp, Artificial Sequence
  Description of Artificial Sequence: Synthetic oligonucleotide
  Target: SCNA; (+) strand; PAM type: YTN; PAM sequence: CTA
gcctgggtgacagagggaga

SEQ ID NO: 64462 - DNA, 20 bp, Artificial Sequence
  Description of Artificial Sequence: Synthetic oligonucleotide
  Target: SCNA; (+) strand; PAM type: YTN; PAM sequence: CTG
ggtgacagagggagaccttg

SEQ ID NO: 64463 - DNA, 20 bp, Artificial Sequence
  Description of Artificial Sequence: Synthetic oligonucleotide
  Target: SCNA; (+) strand; PAM type: YTN; PAM sequence: CTT
gtcttaaaaaaaattatcat

SEQ ID NO: 64464 - DNA, 20 bp, Artificial Sequence
  Description of Artificial Sequence: Synthetic oligonucleotide
  Target: SCNA; (+) strand; PAM type: YTN; PAM sequence: TTG
tcttaaaaaaaattatcatt

SEQ ID NO: 64465 - DNA, 20 bp, Artificial Sequence
  Description of Artificial Sequence: Synthetic oligonucleotide
  Target: SCNA; (+) strand; PAM type: YTN; PAM sequence: CTT
aaaaaaaattatcattcaac

SEQ ID NO: 64466 - DNA, 20 bp, Artificial Sequence
  Description of Artificial Sequence: Synthetic oligonucleotide
  Target: SCNA; (+) strand; PAM type: YTN; PAM sequence: TTA
aaaaaaattatcattcaact

SEQ ID NO: 64467 - DNA, 20 bp, Artificial Sequence
  Description of Artificial Sequence: Synthetic oligonucleotide
  Target: SCNA; (+) strand; PAM type: YTN; PAM sequence: TTA
tcattcaactactcagtaga

SEQ ID NO: 64468 - DNA, 20 bp, Artificial Sequence
  Description of Artificial Sequence: Synthetic oligonucleotide
  Target: SCNA; (+) strand; PAM type: YTN; PAM sequence: TTC
aactactcagtagattatga

SEQ ID NO: 64469 - DNA, 20 bp, Artificial Sequence
  Description of Artificial Sequence: Synthetic oligonucleotide
  Target: SCNA; (+) strand; PAM type: YTN; PAM sequence: CTA
ctcagtagattatgataaag

SEQ ID NO: 64470 - DNA, 20 bp, Artificial Sequence
  Description of Artificial Sequence: Synthetic oligonucleotide
  Target: SCNA; (+) strand; PAM type: YTN; PAM sequence: CTC
agtagattatgataaagacc

SEQ ID NO: 64471 - DNA, 20 bp, Artificial Sequence
  Description of Artificial Sequence: Synthetic oligonucleotide
  Target: SCNA; (+) strand; PAM type: YTN; PAM sequence: TTA
tgataaagacctgtattact

SEQ ID NO: 64472 - DNA, 20 bp, Artificial Sequence
  Description of Artificial Sequence: Synthetic oligonucleotide
  Target: SCNA; (+) strand; PAM type: YTN; PAM sequence: CTG
tattactattacctgagaat

SEQ ID NO: 64473 - DNA, 20 bp, Artificial Sequence
  Description of Artificial Sequence: Synthetic oligonucleotide
  Target: SCNA; (+) strand; PAM type: YTN; PAM sequence: TTA
ctattacctgagaattatgt

SEQ ID NO: 64474 - DNA, 20 bp, Artificial Sequence
  Description of Artificial Sequence: Synthetic oligonucleotide
  Target: SCNA; (+) strand; PAM type: YTN; PAM sequence: CTA
ttacctgagaattatgtaac

SEQ ID NO: 64475 - DNA, 20 bp, Artificial Sequence
  Description of Artificial Sequence: Synthetic oligonucleotide
  Target: SCNA; (+) strand; PAM type: YTN; PAM sequence: TTA
cctgagaattatgtaacaac

SEQ ID NO: 64476 - DNA, 20 bp, Artificial Sequence
  Description of Artificial Sequence: Synthetic oligonucleotide
  Target: SCNA; (+) strand; PAM type: YTN; PAM sequence: CTG
agaattatgtaacaactacc

SEQ ID NO: 64477 - DNA, 20 bp, Artificial Sequence
  Description of Artificial Sequence: Synthetic oligonucleotide
  Target: SCNA; (+) strand; PAM type: YTN; PAM sequence: TTA
tgtaacaactacctatttat

SEQ ID NO: 64478 - DNA, 20 bp, Artificial Sequence
  Description of Artificial Sequence: Synthetic oligonucleotide
  Target: SCNA; (+) strand; PAM type: YTN; PAM sequence: CTA
cctatttatggtataatatt

SEQ ID NO: 64479 - DNA, 20 bp, Artificial Sequence
  Description of Artificial Sequence: Synthetic oligonucleotide
  Target: SCNA; (+) strand; PAM type: YTN; PAM sequence: CTA
tttatggtataatatttagc

SEQ ID NO: 64480 - DNA, 20 bp, Artificial Sequence
  Description of Artificial Sequence: Synthetic oligonucleotide
  Target: SCNA; (+) strand; PAM type: YTN; PAM sequence: TTT
atggtataatatttagcagg

SEQ ID NO: 64481 - DNA, 20 bp, Artificial Sequence
  Description of Artificial Sequence: Synthetic oligonucleotide
  Target: SCNA; (+) strand; PAM type: YTN; PAM sequence: TTA
tggtataatatttagcaggc

SEQ ID NO: 64482 - DNA, 20 bp, Artificial Sequence
  Description of Artificial Sequence: Synthetic oligonucleotide
  Target: SCNA; (+) strand; PAM type: YTN; PAM sequence: TTT
agcaggctataaagtgttgt

SEQ ID NO: 64483 - DNA, 20 bp, Artificial Sequence
  Description of Artificial Sequence: Synthetic oligonucleotide
  Target: SCNA; (+) strand; PAM type: YTN; PAM sequence: TTA
gcaggctataaagtgttgtc

SEQ ID NO: 64484 - DNA, 20 bp, Artificial Sequence
  Description of Artificial Sequence: Synthetic oligonucleotide
  Target: SCNA; (+) strand; PAM type: YTN; PAM sequence: CTA
taaagtgttgtctatattat

SEQ ID NO: 64485 - DNA, 20 bp, Artificial Sequence
  Description of Artificial Sequence: Synthetic oligonucleotide
  Target: SCNA; (+) strand; PAM type: YTN; PAM sequence: TTG
tctatattatagatacaacc

SEQ ID NO: 64486 - DNA, 20 bp, Artificial Sequence
  Description of Artificial Sequence: Synthetic oligonucleotide
  Target: SCNA; (+) strand; PAM type: YTN; PAM sequence: CTA
tattatagatacaacctaca

SEQ ID NO: 64487 - DNA, 20 bp, Artificial Sequence
  Description of Artificial Sequence: Synthetic oligonucleotide
  Target: SCNA; (+) strand; PAM type: YTN; PAM sequence: TTA
tagatacaacctacacagaa

SEQ ID NO: 64488 - DNA, 20 bp, Artificial Sequence
  Description of Artificial Sequence: Synthetic oligonucleotide
  Target: SCNA; (+) strand; PAM type: YTN; PAM sequence: CTA
cacagaattcagacgcaaag

SEQ ID NO: 64489 - DNA, 20 bp, Artificial Sequence
  Description of Artificial Sequence: Synthetic oligonucleotide
  Target: SCNA; (+) strand; PAM type: YTN; PAM sequence: TTC
agacgcaaaggtaaaaagtt

SEQ ID NO: 64490 - DNA, 20 bp, Artificial Sequence
  Description of Artificial Sequence: Synthetic oligonucleotide
  Target: SCNA; (+) strand; PAM type: YTN; PAM sequence: TTT
ggaagaaaacacaataaaat

SEQ ID NO: 64491 - DNA, 20 bp, Artificial Sequence
  Description of Artificial Sequence: Synthetic oligonucleotide
  Target: SCNA; (+) strand; PAM type: YTN; PAM sequence: TTG
gaagaaaacacaataaaata

SEQ ID NO: 64492 - DNA, 20 bp, Artificial Sequence
  Description of Artificial Sequence: Synthetic oligonucleotide
  Target: SCNA; (+) strand; PAM type: YTN; PAM sequence: TTA
ttttgttggatagtatgtat

SEQ ID NO: 64493 - DNA, 20 bp, Artificial Sequence
  Description of Artificial Sequence: Synthetic oligonucleotide
  Target: SCNA; (+) strand; PAM type: YTN; PAM sequence: TTT
tgttggatagtatgtatgtt

SEQ ID NO: 64494 - DNA, 20 bp, Artificial Sequence
  Description of Artificial Sequence: Synthetic oligonucleotide
  Target: SCNA; (+) strand; PAM type: YTN; PAM sequence: TTT
gttggatagtatgtatgtta

SEQ ID NO: 64495 - DNA, 20 bp, Artificial Sequence
  Description of Artificial Sequence: Synthetic oligonucleotide
  Target: SCNA; (+) strand; PAM type: YTN; PAM sequence: TTG
ttggatagtatgtatgttat

SEQ ID NO: 64496 - DNA, 20 bp, Artificial Sequence
  Description of Artificial Sequence: Synthetic oligonucleotide
  Target: SCNA; (+) strand; PAM type: YTN; PAM sequence: TTG
gatagtatgtatgttatttt

SEQ ID NO: 64497 - DNA, 20 bp, Artificial Sequence
  Description of Artificial Sequence: Synthetic oligonucleotide
  Target: SCNA; (+) strand; PAM type: YTN; PAM sequence: TTA
ttttgactttttttctaagt

SEQ ID NO: 64498 - DNA, 20 bp, Artificial Sequence
  Description of Artificial Sequence: Synthetic oligonucleotide
  Target: SCNA; (+) strand; PAM type: YTN; PAM sequence: TTT
tgactttttttctaagtgtt

SEQ ID NO: 64499 - DNA, 20 bp, Artificial Sequence
  Description of Artificial Sequence: Synthetic oligonucleotide
  Target: SCNA; (+) strand; PAM type: YTN; PAM sequence: TTT
gactttttttctaagtgttt

SEQ ID NO: 64500 - DNA, 20 bp, Artificial Sequence
  Description of Artificial Sequence: Synthetic oligonucleotide
  Target: SCNA; (+) strand; PAM type: YTN; PAM sequence: TTG
actttttttctaagtgttta

SEQ ID NO: 64501 - DNA, 20 bp, Artificial Sequence
  Description of Artificial Sequence: Synthetic oligonucleotide
  Target: SCNA; (+) strand; PAM type: YTN; PAM sequence: CTT
tttttctaagtgtttaactt

SEQ ID NO: 64502 - DNA, 20 bp, Artificial Sequence
  Description of Artificial Sequence: Synthetic oligonucleotide
  Target: SCNA; (+) strand; PAM type: YTN; PAM sequence: TTT
ttttctaagtgtttaacttt

SEQ ID NO: 64503 - DNA, 20 bp, Artificial Sequence
  Description of Artificial Sequence: Synthetic oligonucleotide
  Target: SCNA; (+) strand; PAM type: YTN; PAM sequence: TTT
tttctaagtgtttaactttt

SEQ ID NO: 64504 - DNA, 20 bp, Artificial Sequence
  Description of Artificial Sequence: Synthetic oligonucleotide
  Target: SCNA; (+) strand; PAM type: YTN; PAM sequence: TTT
ttctaagtgtttaactttta

SEQ ID NO: 64505 - DNA, 20 bp, Artificial Sequence
  Description of Artificial Sequence: Synthetic oligonucleotide
  Target: SCNA; (+) strand; PAM type: YTN; PAM sequence: TTT
tctaagtgtttaacttttat

SEQ ID NO: 64506 - DNA, 20 bp, Artificial Sequence
  Description of Artificial Sequence: Synthetic oligonucleotide
  Target: SCNA; (+) strand; PAM type: YTN; PAM sequence: TTT
ctaagtgtttaacttttata

SEQ ID NO: 64507 - DNA, 20 bp, Artificial Sequence
  Description of Artificial Sequence: Synthetic oligonucleotide
  Target: SCNA; (+) strand; PAM type: YTN; PAM sequence: TTC
taagtgtttaacttttataa

SEQ ID NO: 64508 - DNA, 20 bp, Artificial Sequence
  Description of Artificial Sequence: Synthetic oligonucleotide
  Target: SCNA; (+) strand; PAM type: YTN; PAM sequence: CTA
agtgtttaacttttataacc

SEQ ID NO: 64509 - DNA, 20 bp, Artificial Sequence
  Description of Artificial Sequence: Synthetic oligonucleotide
  Target: SCNA; (+) strand; PAM type: YTN; PAM sequence: TTT
aacttttataaccacttata

SEQ ID NO: 64510 - DNA, 20 bp, Artificial Sequence
  Description of Artificial Sequence: Synthetic oligonucleotide
  Target: SCNA; (+) strand; PAM type: YTN; PAM sequence: TTA
acttttataaccacttataa

SEQ ID NO: 64511 - DNA, 20 bp, Artificial Sequence
  Description of Artificial Sequence: Synthetic oligonucleotide
  Target: SCNA; (+) strand; PAM type: YTN; PAM sequence: CTT
ttataaccacttataatgta

SEQ ID NO: 64512 - DNA, 20 bp, Artificial Sequence
  Description of Artificial Sequence: Synthetic oligonucleotide
  Target: SCNA; (+) strand; PAM type: YTN; PAM sequence: TTT
tataaccacttataatgtaa

SEQ ID NO: 64513 - DNA, 20 bp, Artificial Sequence
  Description of Artificial Sequence: Synthetic oligonucleotide
  Target: SCNA; (+) strand; PAM type: YTN; PAM sequence: TTT
ataaccacttataatgtaaa

SEQ ID NO: 64514 - DNA, 20 bp, Artificial Sequence
  Description of Artificial Sequence: Synthetic oligonucleotide
  Target: SCNA; (+) strand; PAM type: YTN; PAM sequence: TTA
taaccacttataatgtaaaa

SEQ ID NO: 64515 - DNA, 20 bp, Artificial Sequence
  Description of Artificial Sequence: Synthetic oligonucleotide
  Target: SCNA; (+) strand; PAM type: YTN; PAM sequence: CTT
ataatgtaaaagcatacata

SEQ ID NO: 64516 - DNA, 20 bp, Artificial Sequence
  Description of Artificial Sequence: Synthetic oligonucleotide
  Target: SCNA; (+) strand; PAM type: YTN; PAM sequence: TTA
taatgtaaaagcatacatat

SEQ ID NO: 64517 - DNA, 20 bp, Artificial Sequence
  Description of Artificial Sequence: Synthetic oligonucleotide
  Target: SCNA; (+) strand; PAM type: YTN; PAM sequence: TTT
aacacattaattttaaatga

SEQ ID NO: 64518 - DNA, 20 bp, Artificial Sequence
  Description of Artificial Sequence: Synthetic oligonucleotide
  Target: SCNA; (+) strand; PAM type: YTN; PAM sequence: TTA
acacattaattttaaatgac

SEQ ID NO: 64519 - DNA, 20 bp, Artificial Sequence
  Description of Artificial Sequence: Synthetic oligonucleotide
  Target: SCNA; (+) strand; PAM type: YTN; PAM sequence: TTA
attttaaatgacaatgaaga

SEQ ID NO: 64520 - DNA, 20 bp, Artificial Sequence
  Description of Artificial Sequence: Synthetic oligonucleotide
  Target: SCNA; (+) strand; PAM type: YTN; PAM sequence: TTT
taaatgacaatgaagaaaca

SEQ ID NO: 64521 - DNA, 20 bp, Artificial Sequence
  Description of Artificial Sequence: Synthetic oligonucleotide
  Target: SCNA; (+) strand; PAM type: YTN; PAM sequence: TTT
aaatgacaatgaagaaacaa

SEQ ID NO: 64522 - DNA, 20 bp, Artificial Sequence
  Description of Artificial Sequence: Synthetic oligonucleotide
  Target: SCNA; (+) strand; PAM type: YTN; PAM sequence: TTA
aatgacaatgaagaaacaaa

SEQ ID NO: 64523 - DNA, 20 bp, Artificial Sequence
  Description of Artificial Sequence: Synthetic oligonucleotide
  Target: SCNA; (+) strand; PAM type: YTN; PAM sequence: TTC
ttttctgaaatttgaagact

SEQ ID NO: 64524 - DNA, 20 bp, Artificial Sequence
  Description of Artificial Sequence: Synthetic oligonucleotide
  Target: SCNA; (+) strand; PAM type: YTN; PAM sequence: CTT
ttctgaaatttgaagactga

SEQ ID NO: 64525 - DNA, 20 bp, Artificial Sequence
  Description of Artificial Sequence: Synthetic oligonucleotide
  Target: SCNA; (+) strand; PAM type: YTN; PAM sequence: TTT
tctgaaatttgaagactgag

SEQ ID NO: 64526 - DNA, 20 bp, Artificial Sequence
  Description of Artificial Sequence: Synthetic oligonucleotide
  Target: SCNA; (+) strand; PAM type: YTN; PAM sequence: TTT
ctgaaatttgaagactgaga

SEQ ID NO: 64527 - DNA, 20 bp, Artificial Sequence
  Description of Artificial Sequence: Synthetic oligonucleotide
  Target: SCNA; (+) strand; PAM type: YTN; PAM sequence: TTC
tgaaatttgaagactgagac

SEQ ID NO: 64528 - DNA, 20 bp, Artificial Sequence
  Description of Artificial Sequence: Synthetic oligonucleotide
  Target: SCNA; (+) strand; PAM type: YTN; PAM sequence: CTG
aaatttgaagactgagacta

SEQ ID NO: 64529 - DNA, 20 bp, Artificial Sequence
  Description of Artificial Sequence: Synthetic oligonucleotide
  Target: SCNA; (+) strand; PAM type: YTN; PAM sequence: TTT
gaagactgagactatacata

SEQ ID NO: 64530 - DNA, 20 bp, Artificial Sequence
  Description of Artificial Sequence: Synthetic oligonucleotide
  Target: SCNA; (+) strand; PAM type: YTN; PAM sequence: TTG
aagactgagactatacatat

SEQ ID NO: 64531 - DNA, 20 bp, Artificial Sequence
  Description of Artificial Sequence: Synthetic oligonucleotide
  Target: SCNA; (+) strand; PAM type: YTN; PAM sequence: CTG
agactatacatattgaagga

SEQ ID NO: 64532 - DNA, 20 bp, Artificial Sequence
  Description of Artificial Sequence: Synthetic oligonucleotide
  Target: SCNA; (+) strand; PAM type: YTN; PAM sequence: CTA
tacatattgaaggaaaataa

SEQ ID NO: 64533 - DNA, 20 bp, Artificial Sequence
  Description of Artificial Sequence: Synthetic oligonucleotide
  Target: SCNA; (+) strand; PAM type: YTN; PAM sequence: TTG
aaggaaaataatcaaataca

SEQ ID NO: 64534 - DNA, 20 bp, Artificial Sequence
  Description of Artificial Sequence: Synthetic oligonucleotide
  Target: SCNA; (+) strand; PAM type: YTN; PAM sequence: TTT
ttctaggtatctcttcctag

SEQ ID NO: 64535 - DNA, 20 bp, Artificial Sequence
  Description of Artificial Sequence: Synthetic oligonucleotide
  Target: SCNA; (+) strand; PAM type: YTN; PAM sequence: TTT
tctaggtatctcttcctaga

SEQ ID NO: 64536 - DNA, 20 bp, Artificial Sequence
  Description of Artificial Sequence: Synthetic oligonucleotide
  Target: SCNA; (+) strand; PAM type: YTN; PAM sequence: TTT
ctaggtatctcttcctagac

SEQ ID NO: 64537 - DNA, 20 bp, Artificial Sequence
  Description of Artificial Sequence: Synthetic oligonucleotide
  Target: SCNA; (+) strand; PAM type: YTN; PAM sequence: TTC
taggtatctcttcctagaca

SEQ ID NO: 64538 - DNA, 20 bp, Artificial Sequence
  Description of Artificial Sequence: Synthetic oligonucleotide
  Target: SCNA; (+) strand; PAM type: YTN; PAM sequence: CTA
ggtatctcttcctagacaaa

SEQ ID NO: 64539 - DNA, 20 bp, Artificial Sequence
  Description of Artificial Sequence: Synthetic oligonucleotide
  Target: SCNA; (+) strand; PAM type: YTN; PAM sequence: CTC
ttcctagacaaagaatacta

SEQ ID NO: 64540 - DNA, 20 bp, Artificial Sequence
  Description of Artificial Sequence: Synthetic oligonucleotide
  Target: SCNA; (+) strand; PAM type: YTN; PAM sequence: CTT
cctagacaaagaatactaca

SEQ ID NO: 64541 - DNA, 20 bp, Artificial Sequence
  Description of Artificial Sequence: Synthetic oligonucleotide
  Target: SCNA; (+) strand; PAM type: YTN; PAM sequence: TTC
ctagacaaagaatactacaa

SEQ ID NO: 64542 - DNA, 20 bp, Artificial Sequence
  Description of Artificial Sequence: Synthetic oligonucleotide
  Target: SCNA; (+) strand; PAM type: YTN; PAM sequence: CTA
gacaaagaatactacaaaac

SEQ ID NO: 64543 - DNA, 20 bp, Artificial Sequence
  Description of Artificial Sequence: Synthetic oligonucleotide
  Target: SCNA; (+) strand; PAM type: YTN; PAM sequence: CTA
caaaactcagcctgaaatgg

SEQ ID NO: 64544 - DNA, 20 bp, Artificial Sequence
  Description of Artificial Sequence: Synthetic oligonucleotide
  Target: SCNA; (+) strand; PAM type: YTN; PAM sequence: CTC
agcctgaaatggtcatggct

SEQ ID NO: 64545 - DNA, 20 bp, Artificial Sequence
  Description of Artificial Sequence: Synthetic oligonucleotide
  Target: SCNA; (+) strand; PAM type: YTN; PAM sequence: CTG
aaatggtcatggctttgttg

SEQ ID NO: 64546 - DNA, 20 bp, Artificial Sequence
  Description of Artificial Sequence: Synthetic oligonucleotide
  Target: SCNA; (+) strand; PAM type: YTN; PAM sequence: CTT
tgttggtattcttcactaaa

SEQ ID NO: 64547 - DNA, 20 bp, Artificial Sequence
  Description of Artificial Sequence: Synthetic oligonucleotide
  Target: SCNA; (+) strand; PAM type: YTN; PAM sequence: TTT
gttggtattcttcactaaat

SEQ ID NO: 64548 - DNA, 20 bp, Artificial Sequence
  Description of Artificial Sequence: Synthetic oligonucleotide
  Target: SCNA; (+) strand; PAM type: YTN; PAM sequence: TTG
ttggtattcttcactaaata

SEQ ID NO: 64549 - DNA, 20 bp, Artificial Sequence
  Description of Artificial Sequence: Synthetic oligonucleotide
  Target: SCNA; (+) strand; PAM type: YTN; PAM sequence: TTG
gtattcttcactaaatacct

SEQ ID NO: 64550 - DNA, 20 bp, Artificial Sequence
  Description of Artificial Sequence: Synthetic oligonucleotide
  Target: SCNA; (+) strand; PAM type: YTN; PAM sequence: TTC
ttcactaaataccttttgtt

SEQ ID NO: 64551 - DNA, 20 bp, Artificial Sequence
  Description of Artificial Sequence: Synthetic oligonucleotide
  Target: SCNA; (+) strand; PAM type: YTN; PAM sequence: CTT
cactaaataccttttgttgc

SEQ ID NO: 64552 - DNA, 20 bp, Artificial Sequence
  Description of Artificial Sequence: Synthetic oligonucleotide
  Target: SCNA; (+) strand; PAM type: YTN; PAM sequence: TTC
actaaataccttttgttgct

SEQ ID NO: 64553 - DNA, 20 bp, Artificial Sequence
  Description of Artificial Sequence: Synthetic oligonucleotide
  Target: SCNA; (+) strand; PAM type: YTN; PAM sequence: CTA
aataccttttgttgctttgc

SEQ ID NO: 64554 - DNA, 20 bp, Artificial Sequence
  Description of Artificial Sequence: Synthetic oligonucleotide
  Target: SCNA; (+) strand; PAM type: YTN; PAM sequence: CTT
ttgttgctttgcatttattt

SEQ ID NO: 64555 - DNA, 20 bp, Artificial Sequence
  Description of Artificial Sequence: Synthetic oligonucleotide
  Target: SCNA; (+) strand; PAM type: YTN; PAM sequence: TTT
tgttgctttgcatttatttc

SEQ ID NO: 64556 - DNA, 20 bp, Artificial Sequence
  Description of Artificial Sequence: Synthetic oligonucleotide
  Target: SCNA; (+) strand; PAM type: YTN; PAM sequence: TTT
gttgctttgcatttatttca

SEQ ID NO: 64557 - DNA, 20 bp, Artificial Sequence
  Description of Artificial Sequence: Synthetic oligonucleotide
  Target: SCNA; (+) strand; PAM type: YTN; PAM sequence: TTG
ttgctttgcatttatttcag

SEQ ID NO: 64558 - DNA, 20 bp, Artificial Sequence
  Description of Artificial Sequence: Synthetic oligonucleotide
  Target: SCNA; (+) strand; PAM type: YTN; PAM sequence: TTG
ctttgcatttatttcagcaa

SEQ ID NO: 64559 - DNA, 20 bp, Artificial Sequence
  Description of Artificial Sequence: Synthetic oligonucleotide
  Target: SCNA; (+) strand; PAM type: YTN; PAM sequence: CTT
tgcatttatttcagcaaagt

SEQ ID NO: 64560 - DNA, 20 bp, Artificial Sequence
  Description of Artificial Sequence: Synthetic oligonucleotide
  Target: SCNA; (+) strand; PAM type: YTN; PAM sequence: TTT
gcatttatttcagcaaagta

SEQ ID NO: 64561 - DNA, 20 bp, Artificial Sequence
  Description of Artificial Sequence: Synthetic oligonucleotide
  Target: SCNA; (+) strand; PAM type: YTN; PAM sequence: TTG
catttatttcagcaaagtaa

SEQ ID NO: 64562 - DNA, 20 bp, Artificial Sequence
  Description of Artificial Sequence: Synthetic oligonucleotide
  Target: SCNA; (+) strand; PAM type: YTN; PAM sequence: TTT
atttcagcaaagtaattata

SEQ ID NO: 64563 - DNA, 20 bp, Artificial Sequence
  Description of Artificial Sequence: Synthetic oligonucleotide
  Target: SCNA; (+) strand; PAM type: YTN; PAM sequence: TTA
tttcagcaaagtaattataa

SEQ ID NO: 64564 - DNA, 20 bp, Artificial Sequence
  Description of Artificial Sequence: Synthetic oligonucleotide
  Target: SCNA; (+) strand; PAM type: YTN; PAM sequence: TTT
cagcaaagtaattataagaa

SEQ ID NO: 64565 - DNA, 20 bp, Artificial Sequence
  Description of Artificial Sequence: Synthetic oligonucleotide
  Target: SCNA; (+) strand; PAM type: YTN; PAM sequence: TTC
agcaaagtaattataagaag

SEQ ID NO: 64566 - DNA, 20 bp, Artificial Sequence
  Description of Artificial Sequence: Synthetic oligonucleotide
  Target: SCNA; (+) strand; PAM type: YTN; PAM sequence: TTA
taagaagataaaggtaagtg

SEQ ID NO: 64567 - DNA, 20 bp, Artificial Sequence
  Description of Artificial Sequence: Synthetic oligonucleotide
  Target: SCNA; (+) strand; PAM type: YTN; PAM sequence: TTC
aaagaacagagaggcaatgt

SEQ ID NO: 64568 - DNA, 20 bp, Artificial Sequence
  Description of Artificial Sequence: Synthetic oligonucleotide
  Target: SCNA; (+) strand; PAM type: YTN; PAM sequence: CTA
aagggacttggagaaagaga

SEQ ID NO: 64569 - DNA, 20 bp, Artificial Sequence
  Description of Artificial Sequence: Synthetic oligonucleotide
  Target: SCNA; (+) strand; PAM type: YTN; PAM sequence: CTT
ggagaaagagatcaaataat

SEQ ID NO: 64570 - DNA, 20 bp, Artificial Sequence
  Description of Artificial Sequence: Synthetic oligonucleotide
  Target: SCNA; (+) strand; PAM type: YTN; PAM sequence: TTG
gagaaagagatcaaataatc

SEQ ID NO: 64571 - DNA, 20 bp, Artificial Sequence
  Description of Artificial Sequence: Synthetic oligonucleotide
  Target: SCNA; (+) strand; PAM type: YTN; PAM sequence: CTC
agccaacgcggctgattttc

SEQ ID NO: 64572 - DNA, 20 bp, Artificial Sequence
  Description of Artificial Sequence: Synthetic oligonucleotide
  Target: SCNA; (+) strand; PAM type: YTN; PAM sequence: CTG
attttcaacaacatgtctga

SEQ ID NO: 64573 - DNA, 20 bp, Artificial Sequence
  Description of Artificial Sequence: Synthetic oligonucleotide
  Target: SCNA; (+) strand; PAM type: YTN; PAM sequence: TTT
tcaacaacatgtctgatgta

SEQ ID NO: 64574 - DNA, 20 bp, Artificial Sequence
  Description of Artificial Sequence: Synthetic oligonucleotide
  Target: SCNA; (+) strand; PAM type: YTN; PAM sequence: TTT
caacaacatgtctgatgtaa

SEQ ID NO: 64575 - DNA, 20 bp, Artificial Sequence
  Description of Artificial Sequence: Synthetic oligonucleotide
  Target: SCNA; (+) strand; PAM type: YTN; PAM sequence: TTC
aacaacatgtctgatgtaaa

SEQ ID NO: 64576 - DNA, 20 bp, Artificial Sequence
  Description of Artificial Sequence: Synthetic oligonucleotide
  Target: SCNA; (+) strand; PAM type: YTN; PAM sequence: CTG
atgtaaaaaagcttccccat

SEQ ID NO: 64577 - DNA, 20 bp, Artificial Sequence
  Description of Artificial Sequence: Synthetic oligonucleotide
  Target: SCNA; (+) strand; PAM type: YTN; PAM sequence: CTT
ccccatgtcttcacatggaa

SEQ ID NO: 64578 - DNA, 20 bp, Artificial Sequence
  Description of Artificial Sequence: Synthetic oligonucleotide
  Target: SCNA; (+) strand; PAM type: YTN; PAM sequence: TTC
cccatgtcttcacatggaag

SEQ ID NO: 64579 - DNA, 20 bp, Artificial Sequence
  Description of Artificial Sequence: Synthetic oligonucleotide
  Target: SCNA; (+) strand; PAM type: YTN; PAM sequence: CTT
cacatggaagtgactgacag

SEQ ID NO: 64580 - DNA, 20 bp, Artificial Sequence
  Description of Artificial Sequence: Synthetic oligonucleotide
  Target: SCNA; (+) strand; PAM type: YTN; PAM sequence: TTC
acatggaagtgactgacagg

SEQ ID NO: 64581 - DNA, 20 bp, Artificial Sequence
  Description of Artificial Sequence: Synthetic oligonucleotide
  Target: SCNA; (+) strand; PAM type: YTN; PAM sequence: CTG
acagggacgcagaagtataa

SEQ ID NO: 64582 - DNA, 20 bp, Artificial Sequence
  Description of Artificial Sequence: Synthetic oligonucleotide
  Target: SCNA; (+) strand; PAM type: YTN; PAM sequence: CTA
acagtaagaaaaggtcacac

SEQ ID NO: 64583 - DNA, 20 bp, Artificial Sequence
  Description of Artificial Sequence: Synthetic oligonucleotide
  Target: SCNA; (+) strand; PAM type: YTN; PAM sequence: CTA
aagatcatgcttatggtagg

SEQ ID NO: 64584 - DNA, 20 bp, Artificial Sequence
  Description of Artificial Sequence: Synthetic oligonucleotide
  Target: SCNA; (+) strand; PAM type: YTN; PAM sequence: CTT
atggtaggtgggcagagaag

SEQ ID NO: 64585 - DNA, 20 bp, Artificial Sequence
  Description of Artificial Sequence: Synthetic oligonucleotide
  Target: SCNA; (+) strand; PAM type: YTN; PAM sequence: TTA
tggtaggtgggcagagaagc

SEQ ID NO: 64586 - DNA, 20 bp, Artificial Sequence
  Description of Artificial Sequence: Synthetic oligonucleotide
  Target: SCNA; (+) strand; PAM type: YTN; PAM sequence: CTT
acagatcattctgcccttgc

SEQ ID NO: 64587 - DNA, 20 bp, Artificial Sequence
  Description of Artificial Sequence: Synthetic oligonucleotide
  Target: SCNA; (+) strand; PAM type: YTN; PAM sequence: TTA
cagatcattctgcccttgcc

SEQ ID NO: 64588 - DNA, 20 bp, Artificial Sequence
  Description of Artificial Sequence: Synthetic oligonucleotide
  Target: SCNA; (+) strand; PAM type: YTN; PAM sequence: TTC
tgcccttgccaatgcccttt

SEQ ID NO: 64589 - DNA, 20 bp, Artificial Sequence
  Description of Artificial Sequence: Synthetic oligonucleotide
  Target: SCNA; (+) strand; PAM type: YTN; PAM sequence: CTG
cccttgccaatgcccttttt

SEQ ID NO: 64590 - DNA, 20 bp, Artificial Sequence
  Description of Artificial Sequence: Synthetic oligonucleotide
  Target: SCNA; (+) strand; PAM type: YTN; PAM sequence: CTT
gccaatgccctttttataaa

SEQ ID NO: 64591 - DNA, 20 bp, Artificial Sequence
  Description of Artificial Sequence: Synthetic oligonucleotide
  Target: SCNA; (+) strand; PAM type: YTN; PAM sequence: TTG
ccaatgccctttttataaac

SEQ ID NO: 64592 - DNA, 20 bp, Artificial Sequence
  Description of Artificial Sequence: Synthetic oligonucleotide
  Target: SCNA; (+) strand; PAM type: YTN; PAM sequence: CTT
tttataaactaaaaaaaatc

SEQ ID NO: 64593 - DNA, 20 bp, Artificial Sequence
  Description of Artificial Sequence: Synthetic oligonucleotide
  Target: SCNA; (+) strand; PAM type: YTN; PAM sequence: TTT
ttataaactaaaaaaaatcc

SEQ ID NO: 64594 - DNA, 20 bp, Artificial Sequence
  Description of Artificial Sequence: Synthetic oligonucleotide
  Target: SCNA; (+) strand; PAM type: YTN; PAM sequence: TTT
tataaactaaaaaaaatcca

SEQ ID NO: 64595 - DNA, 20 bp, Artificial Sequence
  Description of Artificial Sequence: Synthetic oligonucleotide
  Target: SCNA; (+) strand; PAM type: YTN; PAM sequence: TTT
ataaactaaaaaaaatccaa

SEQ ID NO: 64596 - DNA, 20 bp, Artificial Sequence
  Description of Artificial Sequence: Synthetic oligonucleotide
  Target: SCNA; (+) strand; PAM type: YTN; PAM sequence: TTA
taaactaaaaaaaatccaaa

SEQ ID NO: 64597 - DNA, 20 bp, Artificial Sequence
  Description of Artificial Sequence: Synthetic oligonucleotide
  Target: SCNA; (+) strand; PAM type: YTN; PAM sequence: CTA
aaaaaaatccaaataatata

SEQ ID NO: 64598 - DNA, 20 bp, Artificial Sequence
  Description of Artificial Sequence: Synthetic oligonucleotide
  Target: SCNA; (+) strand; PAM type: YTN; PAM sequence: TTA
aataaaatatgaaccacccc

SEQ ID NO: 64599 - DNA, 20 bp, Artificial Sequence
  Description of Artificial Sequence: Synthetic oligonucleotide
  Target: SCNA; (+) strand; PAM type: YTN; PAM sequence: CTA
cctcactttaaaatgtggag

SEQ ID NO: 64600 - DNA, 20 bp, Artificial Sequence
  Description of Artificial Sequence: Synthetic oligonucleotide
  Target: SCNA; (+) strand; PAM type: YTN; PAM sequence: CTC
actttaaaatgtggagtaaa

SEQ ID NO: 64601 - DNA, 20 bp, Artificial Sequence
  Description of Artificial Sequence: Synthetic oligonucleotide
  Target: SCNA; (+) strand; PAM type: YTN; PAM sequence: CTT
taaaatgtggagtaaacata

SEQ ID NO: 64602 - DNA, 20 bp, Artificial Sequence
  Description of Artificial Sequence: Synthetic oligonucleotide
  Target: SCNA; (+) strand; PAM type: YTN; PAM sequence: TTT
aaaatgtggagtaaacatac

SEQ ID NO: 64603 - DNA, 20 bp, Artificial Sequence
  Description of Artificial Sequence: Synthetic oligonucleotide
  Target: SCNA; (+) strand; PAM type: YTN; PAM sequence: TTA
aaatgtggagtaaacatact

SEQ ID NO: 64604 - DNA, 20 bp, Artificial Sequence
  Description of Artificial Sequence: Synthetic oligonucleotide
  Target: SCNA; (+) strand; PAM type: YTN; PAM sequence: CTG
ttttcgtagtgtttcacttc

SEQ ID NO: 64605 - DNA, 20 bp, Artificial Sequence
  Description of Artificial Sequence: Synthetic oligonucleotide
  Target: SCNA; (+) strand; PAM type: YTN; PAM sequence: TTT
tcgtagtgtttcacttcttg

SEQ ID NO: 64606 - DNA, 20 bp, Artificial Sequence
  Description of Artificial Sequence: Synthetic oligonucleotide
  Target: SCNA; (+) strand; PAM type: YTN; PAM sequence: TTT
cgtagtgtttcacttcttgg

SEQ ID NO: 64607 - DNA, 20 bp, Artificial Sequence
  Description of Artificial Sequence: Synthetic oligonucleotide
  Target: SCNA; (+) strand; PAM type: YTN; PAM sequence: TTC
gtagtgtttcacttcttggt

SEQ ID NO: 64608 - DNA, 20 bp, Artificial Sequence
  Description of Artificial Sequence: Synthetic oligonucleotide
  Target: SCNA; (+) strand; PAM type: YTN; PAM sequence: TTT
cacttcttggtagatacgcc

SEQ ID NO: 64609 - DNA, 20 bp, Artificial Sequence
  Description of Artificial Sequence: Synthetic oligonucleotide
  Target: SCNA; (+) strand; PAM type: YTN; PAM sequence: TTC
acttcttggtagatacgcct

SEQ ID NO: 64610 - DNA, 20 bp, Artificial Sequence
  Description of Artificial Sequence: Synthetic oligonucleotide
  Target: SCNA; (+) strand; PAM type: YTN; PAM sequence: CTT
cttggtagatacgcctctgc

SEQ ID NO: 64611 - DNA, 20 bp, Artificial Sequence
  Description of Artificial Sequence: Synthetic oligonucleotide
  Target: SCNA; (+) strand; PAM type: YTN; PAM sequence: TTC
ttggtagatacgcctctgct

SEQ ID NO: 64612 - DNA, 20 bp, Artificial Sequence
  Description of Artificial Sequence: Synthetic oligonucleotide
  Target: SCNA; (+) strand; PAM type: YTN; PAM sequence: CTT
ggtagatacgcctctgctgc

SEQ ID NO: 64613 - DNA, 20 bp, Artificial Sequence
  Description of Artificial Sequence: Synthetic oligonucleotide
  Target: SCNA; (+) strand; PAM type: YTN; PAM sequence: TTG
gtagatacgcctctgctgca

SEQ ID NO: 64614 - DNA, 20 bp, Artificial Sequence
  Description of Artificial Sequence: Synthetic oligonucleotide
  Target: SCNA; (+) strand; PAM type: YTN; PAM sequence: CTC
tgctgcaggatggctaggca

SEQ ID NO: 64615 - DNA, 20 bp, Artificial Sequence
  Description of Artificial Sequence: Synthetic oligonucleotide
  Target: SCNA; (+) strand; PAM type: YTN; PAM sequence: CTG
ctgcaggatggctaggcaca

SEQ ID NO: 64616 - DNA, 20 bp, Artificial Sequence
  Description of Artificial Sequence: Synthetic oligonucleotide
  Target: SCNA; (+) strand; PAM type: YTN; PAM sequence: CTG
caggatggctaggcacaagg

SEQ ID NO: 64617 - DNA, 20 bp, Artificial Sequence
  Description of Artificial Sequence: Synthetic oligonucleotide
  Target: SCNA; (+) strand; PAM type: YTN; PAM sequence: CTA
ggcacaaggccttccatgtc

SEQ ID NO: 64618 - DNA, 20 bp, Artificial Sequence
  Description of Artificial Sequence: Synthetic oligonucleotide
  Target: SCNA; (+) strand; PAM type: YTN; PAM sequence: CTT
ccatgtcacaggacttgagc

SEQ ID NO: 64619 - DNA, 20 bp, Artificial Sequence
  Description of Artificial Sequence: Synthetic oligonucleotide
  Target: SCNA; (+) strand; PAM type: YTN; PAM sequence: TTC
catgtcacaggacttgagct

SEQ ID NO: 64620 - DNA, 20 bp, Artificial Sequence
  Description of Artificial Sequence: Synthetic oligonucleotide
  Target: SCNA; (+) strand; PAM type: YTN; PAM sequence: CTT
gagctcaagtcctagcttct

SEQ ID NO: 64621 - DNA, 20 bp, Artificial Sequence
  Description of Artificial Sequence: Synthetic oligonucleotide
  Target: SCNA; (+) strand; PAM type: YTN; PAM sequence: TTG
agctcaagtcctagcttctc

SEQ ID NO: 64622 - DNA, 20 bp, Artificial Sequence
  Description of Artificial Sequence: Synthetic oligonucleotide
  Target: SCNA; (+) strand; PAM type: YTN; PAM sequence: CTC
aagtcctagcttctctagat

SEQ ID NO: 64623 - DNA, 20 bp, Artificial Sequence
  Description of Artificial Sequence: Synthetic oligonucleotide
  Target: SCNA; (+) strand; PAM type: YTN; PAM sequence: CTA
gcttctctagatgacagagc

SEQ ID NO: 64624 - DNA, 20 bp, Artificial Sequence
  Description of Artificial Sequence: Synthetic oligonucleotide
  Target: SCNA; (+) strand; PAM type: YTN; PAM sequence: CTT
ctctagatgacagagctttt

SEQ ID NO: 64625 - DNA, 20 bp, Artificial Sequence
  Description of Artificial Sequence: Synthetic oligonucleotide
  Target: SCNA; (+) strand; PAM type: YTN; PAM sequence: TTC
tctagatgacagagcttttg

SEQ ID NO: 64626 - DNA, 20 bp, Artificial Sequence
  Description of Artificial Sequence: Synthetic oligonucleotide
  Target: SCNA; (+) strand; PAM type: YTN; PAM sequence: CTC
tagatgacagagcttttgtg

SEQ ID NO: 64627 - DNA, 20 bp, Artificial Sequence
  Description of Artificial Sequence: Synthetic oligonucleotide
  Target: SCNA; (+) strand; PAM type: YTN; PAM sequence: CTA
gatgacagagcttttgtgat

SEQ ID NO: 64628 - DNA, 20 bp, Artificial Sequence
  Description of Artificial Sequence: Synthetic oligonucleotide
  Target: SCNA; (+) strand; PAM type: YTN; PAM sequence: CTT
ttgtgatgctgagaagtttc

SEQ ID NO: 64629 - DNA, 20 bp, Artificial Sequence
  Description of Artificial Sequence: Synthetic oligonucleotide
  Target: SCNA; (+) strand; PAM type: YTN; PAM sequence: TTT
tgtgatgctgagaagtttcc

SEQ ID NO: 64630 - DNA, 20 bp, Artificial Sequence
  Description of Artificial Sequence: Synthetic oligonucleotide
  Target: SCNA; (+) strand; PAM type: YTN; PAM sequence: TTT
gtgatgctgagaagtttcct

SEQ ID NO: 64631 - DNA, 20 bp, Artificial Sequence
  Description of Artificial Sequence: Synthetic oligonucleotide
  Target: SCNA; (+) strand; PAM type: YTN; PAM sequence: TTG
tgatgctgagaagtttccta

SEQ ID NO: 64632 - DNA, 20 bp, Artificial Sequence
  Description of Artificial Sequence: Synthetic oligonucleotide
  Target: SCNA; (+) strand; PAM type: YTN; PAM sequence: CTG
agaagtttcctatgcttttt

SEQ ID NO: 64633 - DNA, 20 bp, Artificial Sequence
  Description of Artificial Sequence: Synthetic oligonucleotide
  Target: SCNA; (+) strand; PAM type: YTN; PAM sequence: TTT
cctatgctttttctgagtgt

SEQ ID NO: 64634 - DNA, 20 bp, Artificial Sequence
  Description of Artificial Sequence: Synthetic oligonucleotide
  Target: SCNA; (+) strand; PAM type: YTN; PAM sequence: TTC
ctatgctttttctgagtgtc

SEQ ID NO: 64635 - DNA, 20 bp, Artificial Sequence
  Description of Artificial Sequence: Synthetic oligonucleotide
  Target: SCNA; (+) strand; PAM type: YTN; PAM sequence: CTA
tgctttttctgagtgtcaat

SEQ ID NO: 64636 - DNA, 20 bp, Artificial Sequence
  Description of Artificial Sequence: Synthetic oligonucleotide
  Target: SCNA; (+) strand; PAM type: YTN; PAM sequence: CTT
tttctgagtgtcaattagtc

SEQ ID NO: 64637 - DNA, 20 bp, Artificial Sequence
  Description of Artificial Sequence: Synthetic oligonucleotide
  Target: SCNA; (+) strand; PAM type: YTN; PAM sequence: TTT
ttctgagtgtcaattagtct

SEQ ID NO: 64638 - DNA, 20 bp, Artificial Sequence
  Description of Artificial Sequence: Synthetic oligonucleotide
  Target: SCNA; (+) strand; PAM type: YTN; PAM sequence: TTT
tctgagtgtcaattagtctt

SEQ ID NO: 64639 - DNA, 20 bp, Artificial Sequence
  Description of Artificial Sequence: Synthetic oligonucleotide
  Target: SCNA; (+) strand; PAM type: YTN; PAM sequence: TTT
ctgagtgtcaattagtctta

SEQ ID NO: 64640 - DNA, 20 bp, Artificial Sequence
  Description of Artificial Sequence: Synthetic oligonucleotide
  Target: SCNA; (+) strand; PAM type: YTN; PAM sequence: TTC
tgagtgtcaattagtcttag

SEQ ID NO: 64641 - DNA, 20 bp, Artificial Sequence
  Description of Artificial Sequence: Synthetic oligonucleotide
  Target: SCNA; (+) strand; PAM type: YTN; PAM sequence: CTG
agtgtcaattagtcttagtg

SEQ ID NO: 64642 - DNA, 20 bp, Artificial Sequence
  Description of Artificial Sequence: Synthetic oligonucleotide
  Target: SCNA; (+) strand; PAM type: YTN; PAM sequence: TTA
gtcttagtgatcaaacggga

SEQ ID NO: 64643 - DNA, 20 bp, Artificial Sequence
  Description of Artificial Sequence: Synthetic oligonucleotide
  Target: SCNA; (+) strand; PAM type: YTN; PAM sequence: CTT
agtgatcaaacgggacagca

SEQ ID NO: 64644 - DNA, 20 bp, Artificial Sequence
  Description of Artificial Sequence: Synthetic oligonucleotide
  Target: SCNA; (+) strand; PAM type: YTN; PAM sequence: TTA
gtgatcaaacgggacagcaa

SEQ ID NO: 64645 - DNA, 20 bp, Artificial Sequence
  Description of Artificial Sequence: Synthetic oligonucleotide
  Target: SCNA; (+) strand; PAM type: YTN; PAM sequence: CTT
ctttacaacagggagaagga

SEQ ID NO: 64646 - DNA, 20 bp, Artificial Sequence
  Description of Artificial Sequence: Synthetic oligonucleotide
  Target: SCNA; (+) strand; PAM type: YTN; PAM sequence: TTC
tttacaacagggagaaggaa

SEQ ID NO: 64647 - DNA, 20 bp, Artificial Sequence
  Description of Artificial Sequence: Synthetic oligonucleotide
  Target: SCNA; (+) strand; PAM type: YTN; PAM sequence: CTT
tacaacagggagaaggaaac

SEQ ID NO: 64648 - DNA, 20 bp, Artificial Sequence
  Description of Artificial Sequence: Synthetic oligonucleotide
  Target: SCNA; (+) strand; PAM type: YTN; PAM sequence: TTT
acaacagggagaaggaaacg

SEQ ID NO: 64649 - DNA, 20 bp, Artificial Sequence
  Description of Artificial Sequence: Synthetic oligonucleotide
  Target: SCNA; (+) strand; PAM type: YTN; PAM sequence: TTA
caacagggagaaggaaacga

SEQ ID NO: 64650 - DNA, 20 bp, Artificial Sequence
  Description of Artificial Sequence: Synthetic oligonucleotide
  Target: SCNA; (+) strand; PAM type: YTN; PAM sequence: TTA
actttctcattaatatttag

SEQ ID NO: 64651 - DNA, 20 bp, Artificial Sequence
  Description of Artificial Sequence: Synthetic oligonucleotide
  Target: SCNA; (+) strand; PAM type: YTN; PAM sequence: CTT
tctcattaatatttagatta

SEQ ID NO: 64652 - DNA, 20 bp, Artificial Sequence
  Description of Artificial Sequence: Synthetic oligonucleotide
  Target: SCNA; (+) strand; PAM type: YTN; PAM sequence: TTT
ctcattaatatttagattac

SEQ ID NO: 64653 - DNA, 20 bp, Artificial Sequence
  Description of Artificial Sequence: Synthetic oligonucleotide
  Target: SCNA; (+) strand; PAM type: YTN; PAM sequence: TTC
tcattaatatttagattact

SEQ ID NO: 64654 - DNA, 20 bp, Artificial Sequence
  Description of Artificial Sequence: Synthetic oligonucleotide
  Target: SCNA; (+) strand; PAM type: YTN; PAM sequence: CTC
attaatatttagattactgt

SEQ ID NO: 64655 - DNA, 20 bp, Artificial Sequence
  Description of Artificial Sequence: Synthetic oligonucleotide
  Target: SCNA; (+) strand; PAM type: YTN; PAM sequence: TTA
atatttagattactgttagg

SEQ ID NO: 64656 - DNA, 20 bp, Artificial Sequence
  Description of Artificial Sequence: Synthetic oligonucleotide
  Target: SCNA; (+) strand; PAM type: YTN; PAM sequence: TTT
agattactgttaggatatcc

SEQ ID NO: 64657 - DNA, 20 bp, Artificial Sequence
  Description of Artificial Sequence: Synthetic oligonucleotide
  Target: SCNA; (+) strand; PAM type: YTN; PAM sequence: TTA
gattactgttaggatatcca

SEQ ID NO: 64658 - DNA, 20 bp, Artificial Sequence
  Description of Artificial Sequence: Synthetic oligonucleotide
  Target: SCNA; (+) strand; PAM type: YTN; PAM sequence: TTA
ctgttaggatatccaagtat

SEQ ID NO: 64659 - DNA, 20 bp, Artificial Sequence
  Description of Artificial Sequence: Synthetic oligonucleotide
  Target: SCNA; (+) strand; PAM type: YTN; PAM sequence: CTG
ttaggatatccaagtataag

SEQ ID NO: 64660 - DNA, 20 bp, Artificial Sequence
  Description of Artificial Sequence: Synthetic oligonucleotide
  Target: SCNA; (+) strand; PAM type: YTN; PAM sequence: TTA
ggatatccaagtataaggga

SEQ ID NO: 64661 - DNA, 20 bp, Artificial Sequence
  Description of Artificial Sequence: Synthetic oligonucleotide
  Target: SCNA; (+) strand; PAM type: YTN; PAM sequence: TTT
ttttccatgattttgaaact

SEQ ID NO: 64662 - DNA, 20 bp, Artificial Sequence
  Description of Artificial Sequence: Synthetic oligonucleotide
  Target: SCNA; (+) strand; PAM type: YTN; PAM sequence: TTT
tttccatgattttgaaactg

SEQ ID NO: 64663 - DNA, 20 bp, Artificial Sequence
  Description of Artificial Sequence: Synthetic oligonucleotide
  Target: SCNA; (+) strand; PAM type: YTN; PAM sequence: TTT
ttccatgattttgaaactga

SEQ ID NO: 64664 - DNA, 20 bp, Artificial Sequence
  Description of Artificial Sequence: Synthetic oligonucleotide
  Target: SCNA; (+) strand; PAM type: YTN; PAM sequence: TTT
tccatgattttgaaactgac

SEQ ID NO: 64665 - DNA, 20 bp, Artificial Sequence
  Description of Artificial Sequence: Synthetic oligonucleotide
  Target: SCNA; (+) strand; PAM type: YTN; PAM sequence: TTT
ccatgattttgaaactgaca

SEQ ID NO: 64666 - DNA, 20 bp, Artificial Sequence
  Description of Artificial Sequence: Synthetic oligonucleotide
  Target: SCNA; (+) strand; PAM type: YTN; PAM sequence: TTC
catgattttgaaactgacag

SEQ ID NO: 64667 - DNA, 20 bp, Artificial Sequence
  Description of Artificial Sequence: Synthetic oligonucleotide
  Target: SCNA; (+) strand; PAM type: YTN; PAM sequence: TTT
tgaaactgacagagatttga

SEQ ID NO: 64668 - DNA, 20 bp, Artificial Sequence
  Description of Artificial Sequence: Synthetic oligonucleotide
  Target: SCNA; (+) strand; PAM type: YTN; PAM sequence: TTT
gaaactgacagagatttgat

SEQ ID NO: 64669 - DNA, 20 bp, Artificial Sequence
  Description of Artificial Sequence: Synthetic oligonucleotide
  Target: SCNA; (+) strand; PAM type: YTN; PAM sequence: TTG
aaactgacagagatttgatt

SEQ ID NO: 64670 - DNA, 20 bp, Artificial Sequence
  Description of Artificial Sequence: Synthetic oligonucleotide
  Target: SCNA; (+) strand; PAM type: YTN; PAM sequence: CTG
acagagatttgattttctaa

SEQ ID NO: 64671 - DNA, 20 bp, Artificial Sequence
  Description of Artificial Sequence: Synthetic oligonucleotide
  Target: SCNA; (+) strand; PAM type: YTN; PAM sequence: TTT
gattttctaatataatttgt

SEQ ID NO: 64672 - DNA, 20 bp, Artificial Sequence
  Description of Artificial Sequence: Synthetic oligonucleotide
  Target: SCNA; (+) strand; PAM type: YTN; PAM sequence: TTG
attttctaatataatttgtt

SEQ ID NO: 64673 - DNA, 20 bp, Artificial Sequence
  Description of Artificial Sequence: Synthetic oligonucleotide
  Target: SCNA; (+) strand; PAM type: YTN; PAM sequence: TTT
tctaatataatttgttagaa

SEQ ID NO: 64674 - DNA, 20 bp, Artificial Sequence
  Description of Artificial Sequence: Synthetic oligonucleotide
  Target: SCNA; (+) strand; PAM type: YTN; PAM sequence: TTT
ctaatataatttgttagaaa

SEQ ID NO: 64675 - DNA, 20 bp, Artificial Sequence
  Description of Artificial Sequence: Synthetic oligonucleotide
  Target: SCNA; (+) strand; PAM type: YTN; PAM sequence: TTC
taatataatttgttagaaaa

SEQ ID NO: 64676 - DNA, 20 bp, Artificial Sequence
  Description of Artificial Sequence: Synthetic oligonucleotide
  Target: SCNA; (+) strand; PAM type: YTN; PAM sequence: CTA
atataatttgttagaaaatt

SEQ ID NO: 64677 - DNA, 20 bp, Artificial Sequence
  Description of Artificial Sequence: Synthetic oligonucleotide
  Target: SCNA; (+) strand; PAM type: YTN; PAM sequence: TTT
gttagaaaattttgatatgg

SEQ ID NO: 64678 - DNA, 20 bp, Artificial Sequence
  Description of Artificial Sequence: Synthetic oligonucleotide
  Target: SCNA; (+) strand; PAM type: YTN; PAM sequence: TTG
ttagaaaattttgatatgga

SEQ ID NO: 64679 - DNA, 20 bp, Artificial Sequence
  Description of Artificial Sequence: Synthetic oligonucleotide
  Target: SCNA; (+) strand; PAM type: YTN; PAM sequence: TTA
gaaaattttgatatggacca

SEQ ID NO: 64680 - DNA, 20 bp, Artificial Sequence
  Description of Artificial Sequence: Synthetic oligonucleotide
  Target: SCNA; (+) strand; PAM type: YTN; PAM sequence: TTT
tgatatggaccagacaagta

SEQ ID NO: 64681 - DNA, 20 bp, Artificial Sequence
  Description of Artificial Sequence: Synthetic oligonucleotide
  Target: SCNA; (+) strand; PAM type: YTN; PAM sequence: TTT
gatatggaccagacaagtaa

SEQ ID NO: 64682 - DNA, 20 bp, Artificial Sequence
  Description of Artificial Sequence: Synthetic oligonucleotide
  Target: SCNA; (+) strand; PAM type: YTN; PAM sequence: TTG
atatggaccagacaagtaaa

SEQ ID NO: 64683 - DNA, 20 bp, Artificial Sequence
  Description of Artificial Sequence: Synthetic oligonucleotide
  Target: SCNA; (+) strand; PAM type: YTN; PAM sequence: CTA
ccctgtttgttgtttgatga

SEQ ID NO: 64684 - DNA, 20 bp, Artificial Sequence
  Description of Artificial Sequence: Synthetic oligonucleotide
  Target: SCNA; (+) strand; PAM type: YTN; PAM sequence: CTG
tttgttgtttgatgatcaaa

SEQ ID NO: 64685 - DNA, 20 bp, Artificial Sequence
  Description of Artificial Sequence: Synthetic oligonucleotide
  Target: SCNA; (+) strand; PAM type: YTN; PAM sequence: TTT
gttgtttgatgatcaaaaag

SEQ ID NO: 64686 - DNA, 20 bp, Artificial Sequence
  Description of Artificial Sequence: Synthetic oligonucleotide
  Target: SCNA; (+) strand; PAM type: YTN; PAM sequence: TTG
ttgtttgatgatcaaaaagg

SEQ ID NO: 64687 - DNA, 20 bp, Artificial Sequence
  Description of Artificial Sequence: Synthetic oligonucleotide
  Target: SCNA; (+) strand; PAM type: YTN; PAM sequence: TTG
tttgatgatcaaaaaggagt

SEQ ID NO: 64688 - DNA, 20 bp, Artificial Sequence
  Description of Artificial Sequence: Synthetic oligonucleotide
  Target: SCNA; (+) strand; PAM type: YTN; PAM sequence: TTT
gatgatcaaaaaggagttgt

SEQ ID NO: 64689 - DNA, 20 bp, Artificial Sequence
  Description of Artificial Sequence: Synthetic oligonucleotide
  Target: SCNA; (+) strand; PAM type: YTN; PAM sequence: TTG
atgatcaaaaaggagttgtt

SEQ ID NO: 64690 - DNA, 20 bp, Artificial Sequence
  Description of Artificial Sequence: Synthetic oligonucleotide
  Target: SCNA; (+) strand; PAM type: YTN; PAM sequence: TTG
ttatgacggaactaagactg

SEQ ID NO: 64691 - DNA, 20 bp, Artificial Sequence
  Description of Artificial Sequence: Synthetic oligonucleotide
  Target: SCNA; (+) strand; PAM type: YTN; PAM sequence: TTA
tgacggaactaagactgatg

SEQ ID NO: 64692 - DNA, 20 bp, Artificial Sequence
  Description of Artificial Sequence: Synthetic oligonucleotide
  Target: SCNA; (+) strand; PAM type: YTN; PAM sequence: CTA
agactgatggatattactgg

SEQ ID NO: 64693 - DNA, 20 bp, Artificial Sequence
  Description of Artificial Sequence: Synthetic oligonucleotide
  Target: SCNA; (+) strand; PAM type: YTN; PAM sequence: CTG
atggatattactggatttgt

SEQ ID NO: 64694 - DNA, 20 bp, Artificial Sequence
  Description of Artificial Sequence: Synthetic oligonucleotide
  Target: SCNA; (+) strand; PAM type: YTN; PAM sequence: TTA
ctggatttgtttatatgtta

SEQ ID NO: 64695 - DNA, 20 bp, Artificial Sequence
  Description of Artificial Sequence: Synthetic oligonucleotide
  Target: SCNA; (+) strand; PAM type: YTN; PAM sequence: CTG
gatttgtttatatgttattt

SEQ ID NO: 64696 - DNA, 20 bp, Artificial Sequence
  Description of Artificial Sequence: Synthetic oligonucleotide
  Target: SCNA; (+) strand; PAM type: YTN; PAM sequence: TTT
gtttatatgttatttggctg

SEQ ID NO: 64697 - DNA, 20 bp, Artificial Sequence
  Description of Artificial Sequence: Synthetic oligonucleotide
  Target: SCNA; (+) strand; PAM type: YTN; PAM sequence: TTG
tttatatgttatttggctga

SEQ ID NO: 64698 - DNA, 20 bp, Artificial Sequence
  Description of Artificial Sequence: Synthetic oligonucleotide
  Target: SCNA; (+) strand; PAM type: YTN; PAM sequence: TTT
atatgttatttggctgaact

SEQ ID NO: 64699 - DNA, 20 bp, Artificial Sequence
  Description of Artificial Sequence: Synthetic oligonucleotide
  Target: SCNA; (+) strand; PAM type: YTN; PAM sequence: TTA
tatgttatttggctgaactt

SEQ ID NO: 64700 - DNA, 20 bp, Artificial Sequence
  Description of Artificial Sequence: Synthetic oligonucleotide
  Target: SCNA; (+) strand; PAM type: YTN; PAM sequence: TTA
tttggctgaactttgaagga

SEQ ID NO: 64701 - DNA, 20 bp, Artificial Sequence
  Description of Artificial Sequence: Synthetic oligonucleotide
  Target: SCNA; (+) strand; PAM type: YTN; PAM sequence: TTT
ggctgaactttgaaggatgt

SEQ ID NO: 64702 - DNA, 20 bp, Artificial Sequence
  Description of Artificial Sequence: Synthetic oligonucleotide
  Target: SCNA; (+) strand; PAM type: YTN; PAM sequence: TTG
gctgaactttgaaggatgta

SEQ ID NO: 64703 - DNA, 20 bp, Artificial Sequence
  Description of Artificial Sequence: Synthetic oligonucleotide
  Target: SCNA; (+) strand; PAM type: YTN; PAM sequence: CTG
aactttgaaggatgtacaca

SEQ ID NO: 64704 - DNA, 20 bp, Artificial Sequence
  Description of Artificial Sequence: Synthetic oligonucleotide
  Target: SCNA; (+) strand; PAM type: YTN; PAM sequence: CTT
tgaaggatgtacacagatgt

SEQ ID NO: 64705 - DNA, 20 bp, Artificial Sequence
  Description of Artificial Sequence: Synthetic oligonucleotide
  Target: SCNA; (+) strand; PAM type: YTN; PAM sequence: TTT
gaaggatgtacacagatgtg

SEQ ID NO: 64706 - DNA, 20 bp, Artificial Sequence
  Description of Artificial Sequence: Synthetic oligonucleotide
  Target: SCNA; (+) strand; PAM type: YTN; PAM sequence: TTG
aaggatgtacacagatgtgt

SEQ ID NO: 64707 - DNA, 20 bp, Artificial Sequence
  Description of Artificial Sequence: Synthetic oligonucleotide
  Target: SCNA; (+) strand; PAM type: YTN; PAM sequence: TTA
ggtgagtgtgtgtgtctgca

SEQ ID NO: 64708 - DNA, 20 bp, Artificial Sequence
  Description of Artificial Sequence: Synthetic oligonucleotide
  Target: SCNA; (+) strand; PAM type: YTN; PAM sequence: CTG
catggttccagcctgggtga

SEQ ID NO: 64709 - DNA, 20 bp, Artificial Sequence
  Description of Artificial Sequence: Synthetic oligonucleotide
  Target: SCNA; (+) strand; PAM type: YTN; PAM sequence: TTC
cagcctgggtgagtgggtgt

SEQ ID NO: 64710 - DNA, 20 bp, Artificial Sequence
  Description of Artificial Sequence: Synthetic oligonucleotide
  Target: SCNA; (+) strand; PAM type: YTN; PAM sequence: CTG
ggtgagtgggtgtgtacaag

SEQ ID NO: 64711 - DNA, 20 bp, Artificial Sequence
  Description of Artificial Sequence: Synthetic oligonucleotide
  Target: SCNA; (+) strand; PAM type: YTN; PAM sequence: CTG
cagtaatggaacagcgtcct

SEQ ID NO: 64712 - DNA, 20 bp, Artificial Sequence
  Description of Artificial Sequence: Synthetic oligonucleotide
  Target: SCNA; (+) strand; PAM type: YTN; PAM sequence: CTG
tccggggtgggttcccatat

SEQ ID NO: 64713 - DNA, 20 bp, Artificial Sequence
  Description of Artificial Sequence: Synthetic oligonucleotide
  Target: SCNA; (+) strand; PAM type: YTN; PAM sequence: TTC
ccatattgctccctgagctg

SEQ ID NO: 64714 - DNA, 20 bp, Artificial Sequence
  Description of Artificial Sequence: Synthetic oligonucleotide
  Target: SCNA; (+) strand; PAM type: YTN; PAM sequence: TTG
ctccctgagctgccaggata

SEQ ID NO: 64715 - DNA, 20 bp, Artificial Sequence
  Description of Artificial Sequence: Synthetic oligonucleotide
  Target: SCNA; (+) strand; PAM type: YTN; PAM sequence: CTC
cctgagctgccaggataggc

SEQ ID NO: 64716 - DNA, 20 bp, Artificial Sequence
  Description of Artificial Sequence: Synthetic oligonucleotide
  Target: SCNA; (+) strand; PAM type: YTN; PAM sequence: CTG
agctgccaggataggctcca

SEQ ID NO: 64717 - DNA, 20 bp, Artificial Sequence
  Description of Artificial Sequence: Synthetic oligonucleotide
  Target: SCNA; (+) strand; PAM type: YTN; PAM sequence: CTG
ccaggataggctccaaccac

SEQ ID NO: 64718 - DNA, 20 bp, Artificial Sequence
  Description of Artificial Sequence: Synthetic oligonucleotide
  Target: SCNA; (+) strand; PAM type: YTN; PAM sequence: CTC
caaccacctgcggcctccac

SEQ ID NO: 64719 - DNA, 20 bp, Artificial Sequence
  Description of Artificial Sequence: Synthetic oligonucleotide
  Target: SCNA; (+) strand; PAM type: YTN; PAM sequence: CTG
cggcctccaccgaaataatt

SEQ ID NO: 64720 - DNA, 20 bp, Artificial Sequence
  Description of Artificial Sequence: Synthetic oligonucleotide
  Target: SCNA; (+) strand; PAM type: YTN; PAM sequence: CTC
caccgaaataattaggtaag

SEQ ID NO: 64721 - DNA, 20 bp, Artificial Sequence
  Description of Artificial Sequence: Synthetic oligonucleotide
  Target: SCNA; (+) strand; PAM type: YTN; PAM sequence: TTA
ggtaagttatttgacttgtt

SEQ ID NO: 64722 - DNA, 20 bp, Artificial Sequence
  Description of Artificial Sequence: Synthetic oligonucleotide
  Target: SCNA; (+) strand; PAM type: YTN; PAM sequence: TTA
tttgacttgtttgtattaat

SEQ ID NO: 64723 - DNA, 20 bp, Artificial Sequence
  Description of Artificial Sequence: Synthetic oligonucleotide
  Target: SCNA; (+) strand; PAM type: YTN; PAM sequence: TTT
gacttgtttgtattaatctt

SEQ ID NO: 64724 - DNA, 20 bp, Artificial Sequence
  Description of Artificial Sequence: Synthetic oligonucleotide
  Target: SCNA; (+) strand; PAM type: YTN; PAM sequence: TTG
acttgtttgtattaatcttt

SEQ ID NO: 64725 - DNA, 20 bp, Artificial Sequence
  Description of Artificial Sequence: Synthetic oligonucleotide
  Target: SCNA; (+) strand; PAM type: YTN; PAM sequence: CTT
gtttgtattaatctttctta

SEQ ID NO: 64726 - DNA, 20 bp, Artificial Sequence
  Description of Artificial Sequence: Synthetic oligonucleotide
  Target: SCNA; (+) strand; PAM type: YTN; PAM sequence: TTG
tttgtattaatctttcttaa

SEQ ID NO: 64727 - DNA, 20 bp, Artificial Sequence
  Description of Artificial Sequence: Synthetic oligonucleotide
  Target: SCNA; (+) strand; PAM type: YTN; PAM sequence: TTT
gtattaatctttcttaaacg

SEQ ID NO: 64728 - DNA, 20 bp, Artificial Sequence
  Description of Artificial Sequence: Synthetic oligonucleotide
  Target: SCNA; (+) strand; PAM type: YTN; PAM sequence: TTG
tattaatctttcttaaacgt

SEQ ID NO: 64729 - DNA, 20 bp, Artificial Sequence
  Description of Artificial Sequence: Synthetic oligonucleotide
  Target: SCNA; (+) strand; PAM type: YTN; PAM sequence: TTA
atctttcttaaacgtatata

SEQ ID NO: 64730 - DNA, 20 bp, Artificial Sequence
  Description of Artificial Sequence: Synthetic oligonucleotide
  Target: SCNA; (+) strand; PAM type: YTN; PAM sequence: CTT
tcttaaacgtatatatagct

SEQ ID NO: 64731 - DNA, 20 bp, Artificial Sequence
  Description of Artificial Sequence: Synthetic oligonucleotide
  Target: SCNA; (+) strand; PAM type: YTN; PAM sequence: TTT
cttaaacgtatatatagctc

SEQ ID NO: 64732 - DNA, 20 bp, Artificial Sequence
  Description of Artificial Sequence: Synthetic oligonucleotide
  Target: SCNA; (+) strand; PAM type: YTN; PAM sequence: TTC
ttaaacgtatatatagctca

SEQ ID NO: 64733 - DNA, 20 bp, Artificial Sequence
  Description of Artificial Sequence: Synthetic oligonucleotide
  Target: SCNA; (+) strand; PAM type: YTN; PAM sequence: CTT
aaacgtatatatagctcaca

SEQ ID NO: 64734 - DNA, 20 bp, Artificial Sequence
  Description of Artificial Sequence: Synthetic oligonucleotide
  Target: SCNA; (+) strand; PAM type: YTN; PAM sequence: TTA
aacgtatatatagctcacat

SEQ ID NO: 64735 - DNA, 20 bp, Artificial Sequence
  Description of Artificial Sequence: Synthetic oligonucleotide
  Target: SCNA; (+) strand; PAM type: YTN; PAM sequence: CTC
acattaatttcaatgtttaa

SEQ ID NO: 64736 - DNA, 20 bp, Artificial Sequence
  Description of Artificial Sequence: Synthetic oligonucleotide
  Target: SCNA; (+) strand; PAM type: YTN; PAM sequence: TTA
atttcaatgtttaatgtcag

SEQ ID NO: 64737 - DNA, 20 bp, Artificial Sequence
  Description of Artificial Sequence: Synthetic oligonucleotide
  Target: SCNA; (+) strand; PAM type: YTN; PAM sequence: TTT
caatgtttaatgtcagaagt

SEQ ID NO: 64738 - DNA, 20 bp, Artificial Sequence
  Description of Artificial Sequence: Synthetic oligonucleotide
  Target: SCNA; (+) strand; PAM type: YTN; PAM sequence: TTC
aatgtttaatgtcagaagtg

SEQ ID NO: 64739 - DNA, 20 bp, Artificial Sequence
  Description of Artificial Sequence: Synthetic oligonucleotide
  Target: SCNA; (+) strand; PAM type: YTN; PAM sequence: TTT
aatgtcagaagtgatttatc

SEQ ID NO: 64740 - DNA, 20 bp, Artificial Sequence
  Description of Artificial Sequence: Synthetic oligonucleotide
  Target: SCNA; (+) strand; PAM type: YTN; PAM sequence: TTA
atgtcagaagtgatttatct

SEQ ID NO: 64741 - DNA, 20 bp, Artificial Sequence
  Description of Artificial Sequence: Synthetic oligonucleotide
  Target: SCNA; (+) strand; PAM type: YTN; PAM sequence: TTT
atctttatttaggagtttga

SEQ ID NO: 64742 - DNA, 20 bp, Artificial Sequence
  Description of Artificial Sequence: Synthetic oligonucleotide
  Target: SCNA; (+) strand; PAM type: YTN; PAM sequence: TTA
tctttatttaggagtttgat

SEQ ID NO: 64743 - DNA, 20 bp, Artificial Sequence
  Description of Artificial Sequence: Synthetic oligonucleotide
  Target: SCNA; (+) strand; PAM type: YTN; PAM sequence: CTT
tatttaggagtttgatggtg

SEQ ID NO: 64744 - DNA, 20 bp, Artificial Sequence
  Description of Artificial Sequence: Synthetic oligonucleotide
  Target: SCNA; (+) strand; PAM type: YTN; PAM sequence: TTT
atttaggagtttgatggtgt

SEQ ID NO: 64745 - DNA, 20 bp, Artificial Sequence
  Description of Artificial Sequence: Synthetic oligonucleotide
  Target: SCNA; (+) strand; PAM type: YTN; PAM sequence: TTA
tttaggagtttgatggtgtt

SEQ ID NO: 64746 - DNA, 20 bp, Artificial Sequence
  Description of Artificial Sequence: Synthetic oligonucleotide
  Target: SCNA; (+) strand; PAM type: YTN; PAM sequence: TTT
aggagtttgatggtgttttt

SEQ ID NO: 64747 - DNA, 20 bp, Artificial Sequence
  Description of Artificial Sequence: Synthetic oligonucleotide
  Target: SCNA; (+) strand; PAM type: YTN; PAM sequence: TTA
ggagtttgatggtgtttttg

SEQ ID NO: 64748 - DNA, 20 bp, Artificial Sequence
  Description of Artificial Sequence: Synthetic oligonucleotide
  Target: SCNA; (+) strand; PAM type: YTN; PAM sequence: TTT
gatggtgtttttgtgtccag

SEQ ID NO: 64749 - DNA, 20 bp, Artificial Sequence
  Description of Artificial Sequence: Synthetic oligonucleotide
  Target: SCNA; (+) strand; PAM type: YTN; PAM sequence: TTG
atggtgtttttgtgtccaga

SEQ ID NO: 64750 - DNA, 20 bp, Artificial Sequence
  Description of Artificial Sequence: Synthetic oligonucleotide
  Target: SCNA; (+) strand; PAM type: YTN; PAM sequence: TTT
ttgtgtccagaaatttgcca

SEQ ID NO: 64751 - DNA, 20 bp, Artificial Sequence
  Description of Artificial Sequence: Synthetic oligonucleotide
  Target: SCNA; (+) strand; PAM type: YTN; PAM sequence: TTT
tgtgtccagaaatttgccat

SEQ ID NO: 64752 - DNA, 20 bp, Artificial Sequence
  Description of Artificial Sequence: Synthetic oligonucleotide
  Target: SCNA; (+) strand; PAM type: YTN; PAM sequence: TTT
gtgtccagaaatttgccata

SEQ ID NO: 64753 - DNA, 20 bp, Artificial Sequence
  Description of Artificial Sequence: Synthetic oligonucleotide
  Target: SCNA; (+) strand; PAM type: YTN; PAM sequence: TTG
tgtccagaaatttgccatag

SEQ ID NO: 64754 - DNA, 20 bp, Artificial Sequence
  Description of Artificial Sequence: Synthetic oligonucleotide
  Target: SCNA; (+) strand; PAM type: YTN; PAM sequence: TTT
gccataggacttaattcttg

SEQ ID NO: 64755 - DNA, 20 bp, Artificial Sequence
  Description of Artificial Sequence: Synthetic oligonucleotide
  Target: SCNA; (+) strand; PAM type: YTN; PAM sequence: TTG
ccataggacttaattcttgc

SEQ ID NO: 64756 - DNA, 20 bp, Artificial Sequence
  Description of Artificial Sequence: Synthetic oligonucleotide
  Target: SCNA; (+) strand; PAM type: YTN; PAM sequence: CTT
aattcttgcttatatcaatt

SEQ ID NO: 64757 - DNA, 20 bp, Artificial Sequence
  Description of Artificial Sequence: Synthetic oligonucleotide
  Target: SCNA; (+) strand; PAM type: YTN; PAM sequence: TTA
attcttgcttatatcaatta

SEQ ID NO: 64758 - DNA, 20 bp, Artificial Sequence
  Description of Artificial Sequence: Synthetic oligonucleotide
  Target: SCNA; (+) strand; PAM type: YTN; PAM sequence: TTC
ttgcttatatcaattagcca

SEQ ID NO: 64759 - DNA, 20 bp, Artificial Sequence
  Description of Artificial Sequence: Synthetic oligonucleotide
  Target: SCNA; (+) strand; PAM type: YTN; PAM sequence: CTT
gcttatatcaattagccaat

SEQ ID NO: 64760 - DNA, 20 bp, Artificial Sequence
  Description of Artificial Sequence: Synthetic oligonucleotide
  Target: SCNA; (+) strand; PAM type: YTN; PAM sequence: TTG
cttatatcaattagccaatg

SEQ ID NO: 64761 - DNA, 20 bp, Artificial Sequence
  Description of Artificial Sequence: Synthetic oligonucleotide
  Target: SCNA; (+) strand; PAM type: YTN; PAM sequence: CTT
atatcaattagccaatggta

SEQ ID NO: 64762 - DNA, 20 bp, Artificial Sequence
  Description of Artificial Sequence: Synthetic oligonucleotide
  Target: SCNA; (+) strand; PAM type: YTN; PAM sequence: TTA
tatcaattagccaatggtaa

SEQ ID NO: 64763 - DNA, 20 bp, Artificial Sequence
  Description of Artificial Sequence: Synthetic oligonucleotide
  Target: SCNA; (+) strand; PAM type: YTN; PAM sequence: TTA
gccaatggtaaaactggttt

SEQ ID NO: 64764 - DNA, 20 bp, Artificial Sequence
  Description of Artificial Sequence: Synthetic oligonucleotide
  Target: SCNA; (+) strand; PAM type: YTN; PAM sequence: CTG
gttttgttatatgttgtttt

SEQ ID NO: 64765 - DNA, 20 bp, Artificial Sequence
  Description of Artificial Sequence: Synthetic oligonucleotide
  Target: SCNA; (+) strand; PAM type: YTN; PAM sequence: TTT
tgttatatgttgttttgctt

SEQ ID NO: 64766 - DNA, 20 bp, Artificial Sequence
  Description of Artificial Sequence: Synthetic oligonucleotide
  Target: SCNA; (+) strand; PAM type: YTN; PAM sequence: TTT
gttatatgttgttttgcttc

SEQ ID NO: 64767 - DNA, 20 bp, Artificial Sequence
  Description of Artificial Sequence: Synthetic oligonucleotide
  Target: SCNA; (+) strand; PAM type: YTN; PAM sequence: TTG
ttatatgttgttttgcttca

SEQ ID NO: 64768 - DNA, 20 bp, Artificial Sequence
  Description of Artificial Sequence: Synthetic oligonucleotide
  Target: SCNA; (+) strand; PAM type: YTN; PAM sequence: TTA
tatgttgttttgcttcaagt

SEQ ID NO: 64769 - DNA, 20 bp, Artificial Sequence
  Description of Artificial Sequence: Synthetic oligonucleotide
  Target: SCNA; (+) strand; PAM type: YTN; PAM sequence: TTG
ttttgcttcaagtcacagtt

SEQ ID NO: 64770 - DNA, 20 bp, Artificial Sequence
  Description of Artificial Sequence: Synthetic oligonucleotide
  Target: SCNA; (+) strand; PAM type: YTN; PAM sequence: TTT
tgcttcaagtcacagtttcc

SEQ ID NO: 64771 - DNA, 20 bp, Artificial Sequence
  Description of Artificial Sequence: Synthetic oligonucleotide
  Target: SCNA; (+) strand; PAM type: YTN; PAM sequence: TTT
gcttcaagtcacagtttcca

SEQ ID NO: 64772 - DNA, 20 bp, Artificial Sequence
  Description of Artificial Sequence: Synthetic oligonucleotide
  Target: SCNA; (+) strand; PAM type: YTN; PAM sequence: TTG
cttcaagtcacagtttccag

SEQ ID NO: 64773 - DNA, 20 bp, Artificial Sequence
  Description of Artificial Sequence: Synthetic oligonucleotide
  Target: SCNA; (+) strand; PAM type: YTN; PAM sequence: CTT
caagtcacagtttccagaaa

SEQ ID NO: 64774 - DNA, 20 bp, Artificial Sequence
  Description of Artificial Sequence: Synthetic oligonucleotide
  Target: SCNA; (+) strand; PAM type: YTN; PAM sequence: TTC
aagtcacagtttccagaaac

SEQ ID NO: 64775 - DNA, 20 bp, Artificial Sequence
  Description of Artificial Sequence: Synthetic oligonucleotide
  Target: SCNA; (+) strand; PAM type: YTN; PAM sequence: TTT
ccagaaactattgatgaagt

SEQ ID NO: 64776 - DNA, 20 bp, Artificial Sequence
  Description of Artificial Sequence: Synthetic oligonucleotide
  Target: SCNA; (+) strand; PAM type: YTN; PAM sequence: TTC
cagaaactattgatgaagtt

SEQ ID NO: 64777 - DNA, 20 bp, Artificial Sequence
  Description of Artificial Sequence: Synthetic oligonucleotide
  Target: SCNA; (+) strand; PAM type: YTN; PAM sequence: CTA
ttgatgaagttaagtgagga

SEQ ID NO: 64778 - DNA, 20 bp, Artificial Sequence
  Description of Artificial Sequence: Synthetic oligonucleotide
  Target: SCNA; (+) strand; PAM type: YTN; PAM sequence: TTG
atgaagttaagtgaggattt

SEQ ID NO: 64779 - DNA, 20 bp, Artificial Sequence
  Description of Artificial Sequence: Synthetic oligonucleotide
  Target: SCNA; (+) strand; PAM type: YTN; PAM sequence: TTA
agtgaggatttactgtatta

SEQ ID NO: 64780 - DNA, 20 bp, Artificial Sequence
  Description of Artificial Sequence: Synthetic oligonucleotide
  Target: SCNA; (+) strand; PAM type: YTN; PAM sequence: TTT
actgtattatgtgccctctg

SEQ ID NO: 64781 - DNA, 20 bp, Artificial Sequence
  Description of Artificial Sequence: Synthetic oligonucleotide
  Target: SCNA; (+) strand; PAM type: YTN; PAM sequence: TTA
ctgtattatgtgccctctga

SEQ ID NO: 64782 - DNA, 20 bp, Artificial Sequence
  Description of Artificial Sequence: Synthetic oligonucleotide
  Target: SCNA; (+) strand; PAM type: YTN; PAM sequence: CTG
tattatgtgccctctgatgg

SEQ ID NO: 64783 - DNA, 20 bp, Artificial Sequence
  Description of Artificial Sequence: Synthetic oligonucleotide
  Target: SCNA; (+) strand; PAM type: YTN; PAM sequence: TTA
tgtgccctctgatggaagta

SEQ ID NO: 64784 - DNA, 20 bp, Artificial Sequence
  Description of Artificial Sequence: Synthetic oligonucleotide
  Target: SCNA; (+) strand; PAM type: YTN; PAM sequence: CTC
tgatggaagtacatacacat

SEQ ID NO: 64785 - DNA, 20 bp, Artificial Sequence
  Description of Artificial Sequence: Synthetic oligonucleotide
  Target: SCNA; (+) strand; PAM type: YTN; PAM sequence: CTG
atggaagtacatacacatca

SEQ ID NO: 64786 - DNA, 20 bp, Artificial Sequence
  Description of Artificial Sequence: Synthetic oligonucleotide
  Target: SCNA; (+) strand; PAM type: YTN; PAM sequence: CTT
aaactaagactgtactagtt

SEQ ID NO: 64787 - DNA, 20 bp, Artificial Sequence
  Description of Artificial Sequence: Synthetic oligonucleotide
  Target: SCNA; (+) strand; PAM type: YTN; PAM sequence: TTA
aactaagactgtactagttt

SEQ ID NO: 64788 - DNA, 20 bp, Artificial Sequence
  Description of Artificial Sequence: Synthetic oligonucleotide
  Target: SCNA; (+) strand; PAM type: YTN; PAM sequence: CTA
agactgtactagtttaagtg

SEQ ID NO: 64789 - DNA, 20 bp, Artificial Sequence
  Description of Artificial Sequence: Synthetic oligonucleotide
  Target: SCNA; (+) strand; PAM type: YTN; PAM sequence: CTG
tactagtttaagtgggctat

SEQ ID NO: 64790 - DNA, 20 bp, Artificial Sequence
  Description of Artificial Sequence: Synthetic oligonucleotide
  Target: SCNA; (+) strand; PAM type: YTN; PAM sequence: CTA
gtttaagtgggctattgttc

SEQ ID NO: 64791 - DNA, 20 bp, Artificial Sequence
  Description of Artificial Sequence: Synthetic oligonucleotide
  Target: SCNA; (+) strand; PAM type: YTN; PAM sequence: TTT
aagtgggctattgttcactg

SEQ ID NO: 64792 - DNA, 20 bp, Artificial Sequence
  Description of Artificial Sequence: Synthetic oligonucleotide
  Target: SCNA; (+) strand; PAM type: YTN; PAM sequence: TTA
agtgggctattgttcactga

SEQ ID NO: 64793 - DNA, 20 bp, Artificial Sequence
  Description of Artificial Sequence: Synthetic oligonucleotide
  Target: SCNA; (+) strand; PAM type: YTN; PAM sequence: CTA
ttgttcactgatccaataac

SEQ ID NO: 64794 - DNA, 20 bp, Artificial Sequence
  Description of Artificial Sequence: Synthetic oligonucleotide
  Target: SCNA; (+) strand; PAM type: YTN; PAM sequence: TTG
ttcactgatccaataacttc

SEQ ID NO: 64795 - DNA, 20 bp, Artificial Sequence
  Description of Artificial Sequence: Synthetic oligonucleotide
  Target: SCNA; (+) strand; PAM type: YTN; PAM sequence: TTC
actgatccaataacttcatc

SEQ ID NO: 64796 - DNA, 20 bp, Artificial Sequence
  Description of Artificial Sequence: Synthetic oligonucleotide
  Target: SCNA; (+) strand; PAM type: YTN; PAM sequence: CTG
atccaataacttcatcaagt

SEQ ID NO: 64797 - DNA, 20 bp, Artificial Sequence
  Description of Artificial Sequence: Synthetic oligonucleotide
  Target: SCNA; (+) strand; PAM type: YTN; PAM sequence: CTT
catcaagtgggaacaagcta

SEQ ID NO: 64798 - DNA, 20 bp, Artificial Sequence
  Description of Artificial Sequence: Synthetic oligonucleotide
  Target: SCNA; (+) strand; PAM type: YTN; PAM sequence: TTC
atcaagtgggaacaagctac

SEQ ID NO: 64799 - DNA, 20 bp, Artificial Sequence
  Description of Artificial Sequence: Synthetic oligonucleotide
  Target: SCNA; (+) strand; PAM type: YTN; PAM sequence: CTA
cactagggatgacagcacaa

SEQ ID NO: 64800 - DNA, 20 bp, Artificial Sequence
  Description of Artificial Sequence: Synthetic oligonucleotide
  Target: SCNA; (+) strand; PAM type: YTN; PAM sequence: CTA
gggatgacagcacaatccta

SEQ ID NO: 64801 - DNA, 20 bp, Artificial Sequence
  Description of Artificial Sequence: Synthetic oligonucleotide
  Target: SCNA; (+) strand; PAM type: YTN; PAM sequence: CTA
ttctagagtccaaatcgaca

SEQ ID NO: 64802 - DNA, 20 bp, Artificial Sequence
  Description of Artificial Sequence: Synthetic oligonucleotide
  Target: SCNA; (+) strand; PAM type: YTN; PAM sequence: TTC
tagagtccaaatcgacaata

SEQ ID NO: 64803 - DNA, 20 bp, Artificial Sequence
  Description of Artificial Sequence: Synthetic oligonucleotide
  Target: SCNA; (+) strand; PAM type: YTN; PAM sequence: CTA
gagtccaaatcgacaatagg

SEQ ID NO: 64804 - DNA, 20 bp, Artificial Sequence
  Description of Artificial Sequence: Synthetic oligonucleotide
  Target: SCNA; (+) strand; PAM type: YTN; PAM sequence: TTT
acgacctcgatgttggatca

SEQ ID NO: 64805 - DNA, 20 bp, Artificial Sequence
  Description of Artificial Sequence: Synthetic oligonucleotide
  Target: SCNA; (+) strand; PAM type: YTN; PAM sequence: TTA
cgacctcgatgttggatcag

SEQ ID NO: 64806 - DNA, 20 bp, Artificial Sequence
  Description of Artificial Sequence: Synthetic oligonucleotide
  Target: SCNA; (+) strand; PAM type: YTN; PAM sequence: CTC
gatgttggatcaggtcatcc

SEQ ID NO: 64807 - DNA, 20 bp, Artificial Sequence
  Description of Artificial Sequence: Synthetic oligonucleotide
  Target: SCNA; (+) strand; PAM type: YTN; PAM sequence: TTG
gatcaggtcatcctaatggt

SEQ ID NO: 64808 - DNA, 20 bp, Artificial Sequence
  Description of Artificial Sequence: Synthetic oligonucleotide
  Target: SCNA; (+) strand; PAM type: YTN; PAM sequence: CTA
atggtgtaactgctattaaa

SEQ ID NO: 64809 - DNA, 20 bp, Artificial Sequence
  Description of Artificial Sequence: Synthetic oligonucleotide
  Target: SCNA; (+) strand; PAM type: YTN; PAM sequence: CTG
ctattaaaggttcgtttgtt

SEQ ID NO: 64810 - DNA, 20 bp, Artificial Sequence
  Description of Artificial Sequence: Synthetic oligonucleotide
  Target: SCNA; (+) strand; PAM type: YTN; PAM sequence: CTA
ttaaaggttcgtttgttcga

SEQ ID NO: 64811 - DNA, 20 bp, Artificial Sequence
  Description of Artificial Sequence: Synthetic oligonucleotide
  Target: SCNA; (+) strand; PAM type: YTN; PAM sequence: TTA
aaggttcgtttgttcgacaa

SEQ ID NO: 64812 - DNA, 20 bp, Artificial Sequence
  Description of Artificial Sequence: Synthetic oligonucleotide
  Target: SCNA; (+) strand; PAM type: YTN; PAM sequence: TTC
gtttgttcgacaattgaagt

SEQ ID NO: 64813 - DNA, 20 bp, Artificial Sequence
  Description of Artificial Sequence: Synthetic oligonucleotide
  Target: SCNA; (+) strand; PAM type: YTN; PAM sequence: TTT
gttcgacaattgaagtccta

SEQ ID NO: 64814 - DNA, 20 bp, Artificial Sequence
  Description of Artificial Sequence: Synthetic oligonucleotide
  Target: SCNA; (+) strand; PAM type: YTN; PAM sequence: TTG
ttcgacaattgaagtcctac

SEQ ID NO: 64815 - DNA, 20 bp, Artificial Sequence
  Description of Artificial Sequence: Synthetic oligonucleotide
  Target: SCNA; (+) strand; PAM type: YTN; PAM sequence: TTC
gacaattgaagtcctacatg

SEQ ID NO: 64816 - DNA, 20 bp, Artificial Sequence
  Description of Artificial Sequence: Synthetic oligonucleotide
  Target: SCNA; (+) strand; PAM type: YTN; PAM sequence: TTG
aagtcctacatgatcggtga

SEQ ID NO: 64817 - DNA, 20 bp, Artificial Sequence
  Description of Artificial Sequence: Synthetic oligonucleotide
  Target: SCNA; (+) strand; PAM type: YTN; PAM sequence: CTA
catgatcggtgaggtcagga

SEQ ID NO: 64818 - DNA, 20 bp, Artificial Sequence
  Description of Artificial Sequence: Synthetic oligonucleotide
  Target: SCNA; (+) strand; PAM type: YTN; PAM sequence: CTA
tagcatcctggccaacatgg

SEQ ID NO: 64819 - DNA, 20 bp, Artificial Sequence
  Description of Artificial Sequence: Synthetic oligonucleotide
  Target: SCNA; (+) strand; PAM type: YTN; PAM sequence: CTG
gccaacatggtgaaacccca

SEQ ID NO: 64820 - DNA, 20 bp, Artificial Sequence
  Description of Artificial Sequence: Synthetic oligonucleotide
  Target: SCNA; (+) strand; PAM type: YTN; PAM sequence: CTC
tactaaaatacaaaaagtta

SEQ ID NO: 64821 - DNA, 20 bp, Artificial Sequence
  Description of Artificial Sequence: Synthetic oligonucleotide
  Target: SCNA; (+) strand; PAM type: YTN; PAM sequence: CTA
ctaaaatacaaaaagttagc

SEQ ID NO: 64822 - DNA, 20 bp, Artificial Sequence
  Description of Artificial Sequence: Synthetic oligonucleotide
  Target: SCNA; (+) strand; PAM type: YTN; PAM sequence: CTA
aaatacaaaaagttagccgg

SEQ ID NO: 64823 - DNA, 20 bp, Artificial Sequence
  Description of Artificial Sequence: Synthetic oligonucleotide
  Target: SCNA; (+) strand; PAM type: YTN; PAM sequence: TTA
gccgggcgtggtggttctcc

SEQ ID NO: 64824 - DNA, 20 bp, Artificial Sequence
  Description of Artificial Sequence: Synthetic oligonucleotide
  Target: SCNA; (+) strand; PAM type: YTN; PAM sequence: TTC
tcctatagtcccagctactc

SEQ ID NO: 64825 - DNA, 20 bp, Artificial Sequence
  Description of Artificial Sequence: Synthetic oligonucleotide
  Target: SCNA; (+) strand; PAM type: YTN; PAM sequence: CTC
ctatagtcccagctactcgg

SEQ ID NO: 64826 - DNA, 20 bp, Artificial Sequence
  Description of Artificial Sequence: Synthetic oligonucleotide
  Target: SCNA; (+) strand; PAM type: YTN; PAM sequence: CTA
tagtcccagctactcgggag

SEQ ID NO: 64827 - DNA, 20 bp, Artificial Sequence
  Description of Artificial Sequence: Synthetic oligonucleotide
  Target: SCNA; (+) strand; PAM type: YTN; PAM sequence: CTA
ctcgggagactgagccaggg

SEQ ID NO: 64828 - DNA, 20 bp, Artificial Sequence
  Description of Artificial Sequence: Synthetic oligonucleotide
  Target: SCNA; (+) strand; PAM type: YTN; PAM sequence: CTC
gggagactgagccaggggaa

SEQ ID NO: 64829 - DNA, 20 bp, Artificial Sequence
  Description of Artificial Sequence: Synthetic oligonucleotide
  Target: SCNA; (+) strand; PAM type: YTN; PAM sequence: CTG
agccaggggaatcacttgaa

SEQ ID NO: 64830 - DNA, 20 bp, Artificial Sequence
  Description of Artificial Sequence: Synthetic oligonucleotide
  Target: SCNA; (+) strand; PAM type: YTN; PAM sequence: CTT
gaacccgggaggtggagatt

SEQ ID NO: 64831 - DNA, 20 bp, Artificial Sequence
  Description of Artificial Sequence: Synthetic oligonucleotide
  Target: SCNA; (+) strand; PAM type: YTN; PAM sequence: TTG
aacccgggaggtggagattg

SEQ ID NO: 64832 - DNA, 20 bp, Artificial Sequence
  Description of Artificial Sequence: Synthetic oligonucleotide
  Target: SCNA; (+) strand; PAM type: YTN; PAM sequence: TTG
cagtgagcccagatcacacc

SEQ ID NO: 64833 - DNA, 20 bp, Artificial Sequence
  Description of Artificial Sequence: Synthetic oligonucleotide
  Target: SCNA; (+) strand; PAM type: YTN; PAM sequence: TTG
cactccagcctggtgacgga

SEQ ID NO: 64834 - DNA, 20 bp, Artificial Sequence
  Description of Artificial Sequence: Synthetic oligonucleotide
  Target: SCNA; (+) strand; PAM type: YTN; PAM sequence: CTC
cagcctggtgacggagtgag

SEQ ID NO: 64835 - DNA, 20 bp, Artificial Sequence
  Description of Artificial Sequence: Synthetic oligonucleotide
  Target: SCNA; (+) strand; PAM type: YTN; PAM sequence: CTG
gtgacggagtgagactccgt

SEQ ID NO: 64836 - DNA, 20 bp, Artificial Sequence
  Description of Artificial Sequence: Synthetic oligonucleotide
  Target: SCNA; (+) strand; PAM type: YTN; PAM sequence: CTC
cgtctcaaaataaataaata

SEQ ID NO: 64837 - DNA, 20 bp, Artificial Sequence
  Description of Artificial Sequence: Synthetic oligonucleotide
  Target: SCNA; (+) strand; PAM type: YTN; PAM sequence: CTC
aaaataaataaataaatata

SEQ ID NO: 64838 - DNA, 20 bp, Artificial Sequence
  Description of Artificial Sequence: Synthetic oligonucleotide
  Target: SCNA; (+) strand; PAM type: YTN; PAM sequence: CTA
cgtgatccgaatttgaattt

SEQ ID NO: 64839 - DNA, 20 bp, Artificial Sequence
  Description of Artificial Sequence: Synthetic oligonucleotide
  Target: SCNA; (+) strand; PAM type: YTN; PAM sequence: TTT
gaatttgattaacatttaac

SEQ ID NO: 64840 - DNA, 20 bp, Artificial Sequence
  Description of Artificial Sequence: Synthetic oligonucleotide
  Target: SCNA; (+) strand; PAM type: YTN; PAM sequence: TTG
aatttgattaacatttaact

SEQ ID NO: 64841 - DNA, 20 bp, Artificial Sequence
  Description of Artificial Sequence: Synthetic oligonucleotide
  Target: SCNA; (+) strand; PAM type: YTN; PAM sequence: TTT
gattaacatttaactatcac

SEQ ID NO: 64842 - DNA, 20 bp, Artificial Sequence
  Description of Artificial Sequence: Synthetic oligonucleotide
  Target: SCNA; (+) strand; PAM type: YTN; PAM sequence: TTG
attaacatttaactatcact

SEQ ID NO: 64843 - DNA, 20 bp, Artificial Sequence
  Description of Artificial Sequence: Synthetic oligonucleotide
  Target: SCNA; (+) strand; PAM type: YTN; PAM sequence: TTA
acatttaactatcactgaca

SEQ ID NO: 64844 - DNA, 20 bp, Artificial Sequence
  Description of Artificial Sequence: Synthetic oligonucleotide
  Target: SCNA; (+) strand; PAM type: YTN; PAM sequence: TTT
aactatcactgacaacttac

SEQ ID NO: 64845 - DNA, 20 bp, Artificial Sequence
  Description of Artificial Sequence: Synthetic oligonucleotide
  Target: SCNA; (+) strand; PAM type: YTN; PAM sequence: TTA
actatcactgacaacttaca

SEQ ID NO: 64846 - DNA, 20 bp, Artificial Sequence
  Description of Artificial Sequence: Synthetic oligonucleotide
  Target: SCNA; (+) strand; PAM type: YTN; PAM sequence: CTA
tcactgacaacttacagcaa

SEQ ID NO: 64847 - DNA, 20 bp, Artificial Sequence
  Description of Artificial Sequence: Synthetic oligonucleotide
  Target: SCNA; (+) strand; PAM type: YTN; PAM sequence: CTG
acaacttacagcaaatataa

SEQ ID NO: 64848 - DNA, 20 bp, Artificial Sequence
  Description of Artificial Sequence: Synthetic oligonucleotide
  Target: SCNA; (+) strand; PAM type: YTN; PAM sequence: CTT
acagcaaatataaggtggtg

SEQ ID NO: 64849 - DNA, 20 bp, Artificial Sequence
  Description of Artificial Sequence: Synthetic oligonucleotide
  Target: SCNA; (+) strand; PAM type: YTN; PAM sequence: TTA
cagcaaatataaggtggtga

SEQ ID NO: 64850 - DNA, 20 bp, Artificial Sequence
  Description of Artificial Sequence: Synthetic oligonucleotide
  Target: SCNA; (+) strand; PAM type: YTN; PAM sequence: TTC
attgcttacaacagtggcta

SEQ ID NO: 64851 - DNA, 20 bp, Artificial Sequence
  Description of Artificial Sequence: Synthetic oligonucleotide
  Target: SCNA; (+) strand; PAM type: YTN; PAM sequence: TTG
cttacaacagtggctacaat

SEQ ID NO: 64852 - DNA, 20 bp, Artificial Sequence
  Description of Artificial Sequence: Synthetic oligonucleotide
  Target: SCNA; (+) strand; PAM type: YTN; PAM sequence: CTT
acaacagtggctacaatcag

SEQ ID NO: 64853 - DNA, 20 bp, Artificial Sequence
  Description of Artificial Sequence: Synthetic oligonucleotide
  Target: SCNA; (+) strand; PAM type: YTN; PAM sequence: TTA
caacagtggctacaatcagc

SEQ ID NO: 64854 - DNA, 20 bp, Artificial Sequence
  Description of Artificial Sequence: Synthetic oligonucleotide
  Target: SCNA; (+) strand; PAM type: YTN; PAM sequence: CTA
caatcagcaaattttgcact

SEQ ID NO: 64855 - DNA, 20 bp, Artificial Sequence
  Description of Artificial Sequence: Synthetic oligonucleotide
  Target: SCNA; (+) strand; PAM type: YTN; PAM sequence: TTT
tgcactgtgagaaactacac

SEQ ID NO: 64856 - DNA, 20 bp, Artificial Sequence
  Description of Artificial Sequence: Synthetic oligonucleotide
  Target: SCNA; (+) strand; PAM type: YTN; PAM sequence: TTT
gcactgtgagaaactacaca

SEQ ID NO: 64857 - DNA, 20 bp, Artificial Sequence
  Description of Artificial Sequence: Synthetic oligonucleotide
  Target: SCNA; (+) strand; PAM type: YTN; PAM sequence: TTG
cactgtgagaaactacacaa

SEQ ID NO: 64858 - DNA, 20 bp, Artificial Sequence
  Description of Artificial Sequence: Synthetic oligonucleotide
  Target: SCNA; (+) strand; PAM type: YTN; PAM sequence: CTG
tgagaaactacacaagacaa

SEQ ID NO: 64859 - DNA, 20 bp, Artificial Sequence
  Description of Artificial Sequence: Synthetic oligonucleotide
  Target: SCNA; (+) strand; PAM type: YTN; PAM sequence: CTA
cacaagacaaagaatacgtc

SEQ ID NO: 64860 - DNA, 20 bp, Artificial Sequence
  Description of Artificial Sequence: Synthetic oligonucleotide
  Target: SCNA; (+) strand; PAM type: YTN; PAM sequence: CTA
atttcaataagtaaattgca

SEQ ID NO: 64861 - DNA, 20 bp, Artificial Sequence
  Description of Artificial Sequence: Synthetic oligonucleotide
  Target: SCNA; (+) strand; PAM type: YTN; PAM sequence: TTT
caataagtaaattgcaacta

SEQ ID NO: 64862 - DNA, 20 bp, Artificial Sequence
  Description of Artificial Sequence: Synthetic oligonucleotide
  Target: SCNA; (+) strand; PAM type: YTN; PAM sequence: TTC
aataagtaaattgcaactaa

SEQ ID NO: 64863 - DNA, 20 bp, Artificial Sequence
  Description of Artificial Sequence: Synthetic oligonucleotide
  Target: SCNA; (+) strand; PAM type: YTN; PAM sequence: TTG
caactaaaaagaagttagtg

SEQ ID NO: 64864 - DNA, 20 bp, Artificial Sequence
  Description of Artificial Sequence: Synthetic oligonucleotide
  Target: SCNA; (+) strand; PAM type: YTN; PAM sequence: CTA
aaaagaagttagtgggaacc

SEQ ID NO: 64865 - DNA, 20 bp, Artificial Sequence
  Description of Artificial Sequence: Synthetic oligonucleotide
  Target: SCNA; (+) strand; PAM type: YTN; PAM sequence: TTA
gtgggaacctgccgcttaaa

SEQ ID NO: 64866 - DNA, 20 bp, Artificial Sequence
  Description of Artificial Sequence: Synthetic oligonucleotide
  Target: SCNA; (+) strand; PAM type: YTN; PAM sequence: CTG
ccgcttaaagtagaagtgag

SEQ ID NO: 64867 - DNA, 20 bp, Artificial Sequence
  Description of Artificial Sequence: Synthetic oligonucleotide
  Target: SCNA; (+) strand; PAM type: YTN; PAM sequence: CTT
aaagtagaagtgagagagca

SEQ ID NO: 64868 - DNA, 20 bp, Artificial Sequence
  Description of Artificial Sequence: Synthetic oligonucleotide
  Target: SCNA; (+) strand; PAM type: YTN; PAM sequence: TTA
aagtagaagtgagagagcat

SEQ ID NO: 64869 - DNA, 20 bp, Artificial Sequence
  Description of Artificial Sequence: Synthetic oligonucleotide
  Target: SCNA; (+) strand; PAM type: YTN; PAM sequence: TTA
gccaattgcaacctaagaac

SEQ ID NO: 64870 - DNA, 20 bp, Artificial Sequence
  Description of Artificial Sequence: Synthetic oligonucleotide
  Target: SCNA; (+) strand; PAM type: YTN; PAM sequence: TTG
caacctaagaactttatttc

SEQ ID NO: 64871 - DNA, 20 bp, Artificial Sequence
  Description of Artificial Sequence: Synthetic oligonucleotide
  Target: SCNA; (+) strand; PAM type: YTN; PAM sequence: CTA
agaactttatttcattctca

SEQ ID NO: 64872 - DNA, 20 bp, Artificial Sequence
  Description of Artificial Sequence: Synthetic oligonucleotide
  Target: SCNA; (+) strand; PAM type: YTN; PAM sequence: CTT
tatttcattctcattgggaa

SEQ ID NO: 64873 - DNA, 20 bp, Artificial Sequence
  Description of Artificial Sequence: Synthetic oligonucleotide
  Target: SCNA; (+) strand; PAM type: YTN; PAM sequence: TTT
atttcattctcattgggaac

SEQ ID NO: 64874 - DNA, 20 bp, Artificial Sequence
  Description of Artificial Sequence: Synthetic oligonucleotide
  Target: SCNA; (+) strand; PAM type: YTN; PAM sequence: TTA
tttcattctcattgggaacc

SEQ ID NO: 64875 - DNA, 20 bp, Artificial Sequence
  Description of Artificial Sequence: Synthetic oligonucleotide
  Target: SCNA; (+) strand; PAM type: YTN; PAM sequence: TTT
cattctcattgggaacccta

SEQ ID NO: 64876 - DNA, 20 bp, Artificial Sequence
  Description of Artificial Sequence: Synthetic oligonucleotide
  Target: SCNA; (+) strand; PAM type: YTN; PAM sequence: TTC
attctcattgggaaccctac

SEQ ID NO: 64877 - DNA, 20 bp, Artificial Sequence
  Description of Artificial Sequence: Synthetic oligonucleotide
  Target: SCNA; (+) strand; PAM type: YTN; PAM sequence: TTC
tcattgggaaccctacataa

SEQ ID NO: 64878 - DNA, 20 bp, Artificial Sequence
  Description of Artificial Sequence: Synthetic oligonucleotide
  Target: SCNA; (+) strand; PAM type: YTN; PAM sequence: CTC
attgggaaccctacataagc

SEQ ID NO: 64879 - DNA, 20 bp, Artificial Sequence
  Description of Artificial Sequence: Synthetic oligonucleotide
  Target: SCNA; (+) strand; PAM type: YTN; PAM sequence: TTG
ggaaccctacataagcaaat

SEQ ID NO: 64880 - DNA, 20 bp, Artificial Sequence
  Description of Artificial Sequence: Synthetic oligonucleotide
  Target: SCNA; (+) strand; PAM type: YTN; PAM sequence: CTA
cataagcaaatggaaaacac

SEQ ID NO: 64881 - DNA, 20 bp, Artificial Sequence
  Description of Artificial Sequence: Synthetic oligonucleotide
  Target: SCNA; (+) strand; PAM type: YTN; PAM sequence: TTG
gggaaatttgaacactgact

SEQ ID NO: 64882 - DNA, 20 bp, Artificial Sequence
  Description of Artificial Sequence: Synthetic oligonucleotide
  Target: SCNA; (+) strand; PAM type: YTN; PAM sequence: TTT
gaacactgacttgatattta

SEQ ID NO: 64883 - DNA, 20 bp, Artificial Sequence
  Description of Artificial Sequence: Synthetic oligonucleotide
  Target: SCNA; (+) strand; PAM type: YTN; PAM sequence: TTG
aacactgacttgatatttaa

SEQ ID NO: 64884 - DNA, 20 bp, Artificial Sequence
  Description of Artificial Sequence: Synthetic oligonucleotide
  Target: SCNA; (+) strand; PAM type: YTN; PAM sequence: CTG
acttgatatttaagaattat

SEQ ID NO: 64885 - DNA, 20 bp, Artificial Sequence
  Description of Artificial Sequence: Synthetic oligonucleotide
  Target: SCNA; (+) strand; PAM type: YTN; PAM sequence: CTT
gatatttaagaattattgtt

SEQ ID NO: 64886 - DNA, 20 bp, Artificial Sequence
  Description of Artificial Sequence: Synthetic oligonucleotide
  Target: SCNA; (+) strand; PAM type: YTN; PAM sequence: TTG
atatttaagaattattgttt

SEQ ID NO: 64887 - DNA, 20 bp, Artificial Sequence
  Description of Artificial Sequence: Synthetic oligonucleotide
  Target: SCNA; (+) strand; PAM type: YTN; PAM sequence: TTT
aagaattattgtttatttct

SEQ ID NO: 64888 - DNA, 20 bp, Artificial Sequence
  Description of Artificial Sequence: Synthetic oligonucleotide
  Target: SCNA; (+) strand; PAM type: YTN; PAM sequence: TTA
agaattattgtttatttctt

SEQ ID NO: 64889 - DNA, 20 bp, Artificial Sequence
  Description of Artificial Sequence: Synthetic oligonucleotide
  Target: SCNA; (+) strand; PAM type: YTN; PAM sequence: TTA
ttgtttatttctttaggtgt

SEQ ID NO: 64890 - DNA, 20 bp, Artificial Sequence
  Description of Artificial Sequence: Synthetic oligonucleotide
  Target: SCNA; (+) strand; PAM type: YTN; PAM sequence: TTG
tttatttctttaggtgtgat

SEQ ID NO: 64891 - DNA, 20 bp, Artificial Sequence
  Description of Artificial Sequence: Synthetic oligonucleotide
  Target: SCNA; (+) strand; PAM type: YTN; PAM sequence: TTT
atttctttaggtgtgatgat

SEQ ID NO: 64892 - DNA, 20 bp, Artificial Sequence
  Description of Artificial Sequence: Synthetic oligonucleotide
  Target: SCNA; (+) strand; PAM type: YTN; PAM sequence: TTA
tttctttaggtgtgatgata

SEQ ID NO: 64893 - DNA, 20 bp, Artificial Sequence
  Description of Artificial Sequence: Synthetic oligonucleotide
  Target: SCNA; (+) strand; PAM type: YTN; PAM sequence: TTT
ctttaggtgtgatgatatat

SEQ ID NO: 64894 - DNA, 20 bp, Artificial Sequence
  Description of Artificial Sequence: Synthetic oligonucleotide
  Target: SCNA; (+) strand; PAM type: YTN; PAM sequence: TTC
tttaggtgtgatgatatatt

SEQ ID NO: 64895 - DNA, 20 bp, Artificial Sequence
  Description of Artificial Sequence: Synthetic oligonucleotide
  Target: SCNA; (+) strand; PAM type: YTN; PAM sequence: CTT
taggtgtgatgatatattgc

SEQ ID NO: 64896 - DNA, 20 bp, Artificial Sequence
  Description of Artificial Sequence: Synthetic oligonucleotide
  Target: SCNA; (+) strand; PAM type: YTN; PAM sequence: TTT
aggtgtgatgatatattgca

SEQ ID NO: 64897 - DNA, 20 bp, Artificial Sequence
  Description of Artificial Sequence: Synthetic oligonucleotide
  Target: SCNA; (+) strand; PAM type: YTN; PAM sequence: TTA
ggtgtgatgatatattgcag

SEQ ID NO: 64898 - DNA, 20 bp, Artificial Sequence
  Description of Artificial Sequence: Synthetic oligonucleotide
  Target: SCNA; (+) strand; PAM type: YTN; PAM sequence: TTG
cagttttacttcaaaaagtt

SEQ ID NO: 64899 - DNA, 20 bp, Artificial Sequence
  Description of Artificial Sequence: Synthetic oligonucleotide
  Target: SCNA; (+) strand; PAM type: YTN; PAM sequence: TTT
tacttcaaaaagttcttaac

SEQ ID NO: 64900 - DNA, 20 bp, Artificial Sequence
  Description of Artificial Sequence: Synthetic oligonucleotide
  Target: SCNA; (+) strand; PAM type: YTN; PAM sequence: TTT
acttcaaaaagttcttaact

SEQ ID NO: 64901 - DNA, 20 bp, Artificial Sequence
  Description of Artificial Sequence: Synthetic oligonucleotide
  Target: SCNA; (+) strand; PAM type: YTN; PAM sequence: TTA
cttcaaaaagttcttaactt

SEQ ID NO: 64902 - DNA, 20 bp, Artificial Sequence
  Description of Artificial Sequence: Synthetic oligonucleotide
  Target: SCNA; (+) strand; PAM type: YTN; PAM sequence: CTT
caaaaagttcttaactttta

SEQ ID NO: 64903 - DNA, 20 bp, Artificial Sequence
  Description of Artificial Sequence: Synthetic oligonucleotide
  Target: SCNA; (+) strand; PAM type: YTN; PAM sequence: TTC
aaaaagttcttaacttttac

SEQ ID NO: 64904 - DNA, 20 bp, Artificial Sequence
  Description of Artificial Sequence: Synthetic oligonucleotide
  Target: SCNA; (+) strand; PAM type: YTN; PAM sequence: TTC
ttaacttttacaaattaatt

SEQ ID NO: 64905 - DNA, 20 bp, Artificial Sequence
  Description of Artificial Sequence: Synthetic oligonucleotide
  Target: SCNA; (+) strand; PAM type: YTN; PAM sequence: CTT
aacttttacaaattaattaa

SEQ ID NO: 64906 - DNA, 20 bp, Artificial Sequence
  Description of Artificial Sequence: Synthetic oligonucleotide
  Target: SCNA; (+) strand; PAM type: YTN; PAM sequence: TTA
acttttacaaattaattaaa

SEQ ID NO: 64907 - DNA, 20 bp, Artificial Sequence
  Description of Artificial Sequence: Synthetic oligonucleotide
  Target: SCNA; (+) strand; PAM type: YTN; PAM sequence: CTT
ttacaaattaattaaatgtt

SEQ ID NO: 64908 - DNA, 20 bp, Artificial Sequence
  Description of Artificial Sequence: Synthetic oligonucleotide
  Target: SCNA; (+) strand; PAM type: YTN; PAM sequence: TTT
tacaaattaattaaatgttt

SEQ ID NO: 64909 - DNA, 20 bp, Artificial Sequence
  Description of Artificial Sequence: Synthetic oligonucleotide
  Target: SCNA; (+) strand; PAM type: YTN; PAM sequence: TTT
acaaattaattaaatgttta

SEQ ID NO: 64910 - DNA, 20 bp, Artificial Sequence
  Description of Artificial Sequence: Synthetic oligonucleotide
  Target: SCNA; (+) strand; PAM type: YTN; PAM sequence: TTA
caaattaattaaatgtttac

SEQ ID NO: 64911 - DNA, 20 bp, Artificial Sequence
  Description of Artificial Sequence: Synthetic oligonucleotide
  Target: SCNA; (+) strand; PAM type: YTN; PAM sequence: TTA
attaaatgtttacagatcaa

SEQ ID NO: 64912 - DNA, 20 bp, Artificial Sequence
  Description of Artificial Sequence: Synthetic oligonucleotide
  Target: SCNA; (+) strand; PAM type: YTN; PAM sequence: TTA
aatgtttacagatcaaataa

SEQ ID NO: 64913 - DNA, 20 bp, Artificial Sequence
  Description of Artificial Sequence: Synthetic oligonucleotide
  Target: SCNA; (+) strand; PAM type: YTN; PAM sequence: TTT
acagatcaaataagatatct

SEQ ID NO: 64914 - DNA, 20 bp, Artificial Sequence
  Description of Artificial Sequence: Synthetic oligonucleotide
  Target: SCNA; (+) strand; PAM type: YTN; PAM sequence: TTA
cagatcaaataagatatcta

SEQ ID NO: 64915 - DNA, 20 bp, Artificial Sequence
  Description of Artificial Sequence: Synthetic oligonucleotide
  Target: SCNA; (+) strand; PAM type: YTN; PAM sequence: CTA
tctaggtttgggtgggggaa

SEQ ID NO: 64916 - DNA, 20 bp, Artificial Sequence
  Description of Artificial Sequence: Synthetic oligonucleotide
  Target: SCNA; (+) strand; PAM type: YTN; PAM sequence: CTA
ggtttgggtgggggaaatgg

SEQ ID NO: 64917 - DNA, 20 bp, Artificial Sequence
  Description of Artificial Sequence: Synthetic oligonucleotide
  Target: SCNA; (+) strand; PAM type: YTN; PAM sequence: TTT
gggtgggggaaatgggtggg

SEQ ID NO: 64918 - DNA, 20 bp, Artificial Sequence
  Description of Artificial Sequence: Synthetic oligonucleotide
  Target: SCNA; (+) strand; PAM type: YTN; PAM sequence: TTG
ggtgggggaaatgggtggga

SEQ ID NO: 64919 - DNA, 20 bp, Artificial Sequence
  Description of Artificial Sequence: Synthetic oligonucleotide
  Target: SCNA; (+) strand; PAM type: YTN; PAM sequence: TTT
aatatttcatcagttttaaa

SEQ ID NO: 64920 - DNA, 20 bp, Artificial Sequence
  Description of Artificial Sequence: Synthetic oligonucleotide
  Target: SCNA; (+) strand; PAM type: YTN; PAM sequence: TTA
atatttcatcagttttaaaa

SEQ ID NO: 64921 - DNA, 20 bp, Artificial Sequence
  Description of Artificial Sequence: Synthetic oligonucleotide
  Target: SCNA; (+) strand; PAM type: YTN; PAM sequence: TTT
catcagttttaaaaagtata

SEQ ID NO: 64922 - DNA, 20 bp, Artificial Sequence
  Description of Artificial Sequence: Synthetic oligonucleotide
  Target: SCNA; (+) strand; PAM type: YTN; PAM sequence: TTC
atcagttttaaaaagtatat

SEQ ID NO: 64923 - DNA, 20 bp, Artificial Sequence
  Description of Artificial Sequence: Synthetic oligonucleotide
  Target: SCNA; (+) strand; PAM type: YTN; PAM sequence: TTT
taaaaagtatatacagtagt

SEQ ID NO: 64924 - DNA, 20 bp, Artificial Sequence
  Description of Artificial Sequence: Synthetic oligonucleotide
  Target: SCNA; (+) strand; PAM type: YTN; PAM sequence: TTT
aaaaagtatatacagtagtc

SEQ ID NO: 64925 - DNA, 20 bp, Artificial Sequence
  Description of Artificial Sequence: Synthetic oligonucleotide
  Target: SCNA; (+) strand; PAM type: YTN; PAM sequence: TTA
aaaagtatatacagtagtct

SEQ ID NO: 64926 - DNA, 20 bp, Artificial Sequence
  Description of Artificial Sequence: Synthetic oligonucleotide
  Target: SCNA; (+) strand; PAM type: YTN; PAM sequence: CTC
cttttatccgtggttttgtt

SEQ ID NO: 64927 - DNA, 20 bp, Artificial Sequence
  Description of Artificial Sequence: Synthetic oligonucleotide
  Target: SCNA; (+) strand; PAM type: YTN; PAM sequence: CTT
ttatccgtggttttgttttc

SEQ ID NO: 64928 - DNA, 20 bp, Artificial Sequence
  Description of Artificial Sequence: Synthetic oligonucleotide
  Target: SCNA; (+) strand; PAM type: YTN; PAM sequence: TTT
tatccgtggttttgttttcc

SEQ ID NO: 64929 - DNA, 20 bp, Artificial Sequence
  Description of Artificial Sequence: Synthetic oligonucleotide
  Target: SCNA; (+) strand; PAM type: YTN; PAM sequence: TTT
atccgtggttttgttttcca

SEQ ID NO: 64930 - DNA, 20 bp, Artificial Sequence
  Description of Artificial Sequence: Synthetic oligonucleotide
  Target: SCNA; (+) strand; PAM type: YTN; PAM sequence: TTA
tccgtggttttgttttccat

SEQ ID NO: 64931 - DNA, 20 bp, Artificial Sequence
  Description of Artificial Sequence: Synthetic oligonucleotide
  Target: SCNA; (+) strand; PAM type: YTN; PAM sequence: TTT
tgttttccatggtttcagtt

SEQ ID NO: 64932 - DNA, 20 bp, Artificial Sequence
  Description of Artificial Sequence: Synthetic oligonucleotide
  Target: SCNA; (+) strand; PAM type: YTN; PAM sequence: TTT
gttttccatggtttcagttg

SEQ ID NO: 64933 - DNA, 20 bp, Artificial Sequence
  Description of Artificial Sequence: Synthetic oligonucleotide
  Target: SCNA; (+) strand; PAM type: YTN; PAM sequence: TTG
ttttccatggtttcagttgc

SEQ ID NO: 64934 - DNA, 20 bp, Artificial Sequence
  Description of Artificial Sequence: Synthetic oligonucleotide
  Target: SCNA; (+) strand; PAM type: YTN; PAM sequence: TTT
tccatggtttcagttgccca

SEQ ID NO: 64935 - DNA, 20 bp, Artificial Sequence
  Description of Artificial Sequence: Synthetic oligonucleotide
  Target: SCNA; (+) strand; PAM type: YTN; PAM sequence: TTT
ccatggtttcagttgcccac

SEQ ID NO: 64936 - DNA, 20 bp, Artificial Sequence
  Description of Artificial Sequence: Synthetic oligonucleotide
  Target: SCNA; (+) strand; PAM type: YTN; PAM sequence: TTC
catggtttcagttgcccacc

SEQ ID NO: 64937 - DNA, 20 bp, Artificial Sequence
  Description of Artificial Sequence: Synthetic oligonucleotide
  Target: SCNA; (+) strand; PAM type: YTN; PAM sequence: TTT
cagttgcccaccaccaattg

SEQ ID NO: 64938 - DNA, 20 bp, Artificial Sequence
  Description of Artificial Sequence: Synthetic oligonucleotide
  Target: SCNA; (+) strand; PAM type: YTN; PAM sequence: TTC
agttgcccaccaccaattgc

SEQ ID NO: 64939 - DNA, 20 bp, Artificial Sequence
  Description of Artificial Sequence: Synthetic oligonucleotide
  Target: SCNA; (+) strand; PAM type: YTN; PAM sequence: TTG
cccaccaccaattgcaaccc

SEQ ID NO: 64940 - DNA, 20 bp, Artificial Sequence
  Description of Artificial Sequence: Synthetic oligonucleotide
  Target: SCNA; (+) strand; PAM type: YTN; PAM sequence: TTG
caaccccaaaatactaagat

SEQ ID NO: 64941 - DNA, 20 bp, Artificial Sequence
  Description of Artificial Sequence: Synthetic oligonucleotide
  Target: SCNA; (+) strand; PAM type: YTN; PAM sequence: CTA
agatatttagagacagagag

SEQ ID NO: 64942 - DNA, 20 bp, Artificial Sequence
  Description of Artificial Sequence: Synthetic oligonucleotide
  Target: SCNA; (+) strand; PAM type: YTN; PAM sequence: TTT
agagacagagagagagggaa

SEQ ID NO: 64943 - DNA, 20 bp, Artificial Sequence
  Description of Artificial Sequence: Synthetic oligonucleotide
  Target: SCNA; (+) strand; PAM type: YTN; PAM sequence: TTA
gagacagagagagagggaaa

SEQ ID NO: 64944 - DNA, 20 bp, Artificial Sequence
  Description of Artificial Sequence: Synthetic oligonucleotide
  Target: SCNA; (+) strand; PAM type: YTN; PAM sequence: CTT
ttattacagtatattattat

SEQ ID NO: 64945 - DNA, 20 bp, Artificial Sequence
  Description of Artificial Sequence: Synthetic oligonucleotide
  Target: SCNA; (+) strand; PAM type: YTN; PAM sequence: TTT
tattacagtatattattata

SEQ ID NO: 64946 - DNA, 20 bp, Artificial Sequence
  Description of Artificial Sequence: Synthetic oligonucleotide
  Target: SCNA; (+) strand; PAM type: YTN; PAM sequence: TTT
attacagtatattattataa

SEQ ID NO: 64947 - DNA, 20 bp, Artificial Sequence
  Description of Artificial Sequence: Synthetic oligonucleotide
  Target: SCNA; (+) strand; PAM type: YTN; PAM sequence: TTA
ttacagtatattattataat

SEQ ID NO: 64948 - DNA, 20 bp, Artificial Sequence
  Description of Artificial Sequence: Synthetic oligonucleotide
  Target: SCNA; (+) strand; PAM type: YTN; PAM sequence: TTA
cagtatattattataattgt

SEQ ID NO: 64949 - DNA, 20 bp, Artificial Sequence
  Description of Artificial Sequence: Synthetic oligonucleotide
  Target: SCNA; (+) strand; PAM type: YTN; PAM sequence: TTA
ttataattgttctcttttgt

SEQ ID NO: 64950 - DNA, 20 bp, Artificial Sequence
  Description of Artificial Sequence: Synthetic oligonucleotide
  Target: SCNA; (+) strand; PAM type: YTN; PAM sequence: TTA
taattgttctcttttgttat

SEQ ID NO: 64951 - DNA, 20 bp, Artificial Sequence
  Description of Artificial Sequence: Synthetic oligonucleotide
  Target: SCNA; (+) strand; PAM type: YTN; PAM sequence: TTG
ttctcttttgttattagtta

SEQ ID NO: 64952 - DNA, 20 bp, Artificial Sequence
  Description of Artificial Sequence: Synthetic oligonucleotide
  Target: SCNA; (+) strand; PAM type: YTN; PAM sequence: TTC
tcttttgttattagttattg

SEQ ID NO: 64953 - DNA, 20 bp, Artificial Sequence
  Description of Artificial Sequence: Synthetic oligonucleotide
  Target: SCNA; (+) strand; PAM type: YTN; PAM sequence: CTC
ttttgttattagttattgtt

SEQ ID NO: 64954 - DNA, 20 bp, Artificial Sequence
  Description of Artificial Sequence: Synthetic oligonucleotide
  Target: SCNA; (+) strand; PAM type: YTN; PAM sequence: CTT
ttgttattagttattgttgt

SEQ ID NO: 64955 - DNA, 20 bp, Artificial Sequence
  Description of Artificial Sequence: Synthetic oligonucleotide
  Target: SCNA; (+) strand; PAM type: YTN; PAM sequence: TTT
tgttattagttattgttgtt

SEQ ID NO: 64956 - DNA, 20 bp, Artificial Sequence
  Description of Artificial Sequence: Synthetic oligonucleotide
  Target: SCNA; (+) strand; PAM type: YTN; PAM sequence: TTT
gttattagttattgttgtta

SEQ ID NO: 64957 - DNA, 20 bp, Artificial Sequence
  Description of Artificial Sequence: Synthetic oligonucleotide
  Target: SCNA; (+) strand; PAM type: YTN; PAM sequence: TTG
ttattagttattgttgttaa

SEQ ID NO: 64958 - DNA, 20 bp, Artificial Sequence
  Description of Artificial Sequence: Synthetic oligonucleotide
  Target: SCNA; (+) strand; PAM type: YTN; PAM sequence: TTA
ttagttattgttgttaatct

SEQ ID NO: 64959 - DNA, 20 bp, Artificial Sequence
  Description of Artificial Sequence: Synthetic oligonucleotide
  Target: SCNA; (+) strand; PAM type: YTN; PAM sequence: TTA
gttattgttgttaatctctt

SEQ ID NO: 64960 - DNA, 20 bp, Artificial Sequence
  Description of Artificial Sequence: Synthetic oligonucleotide
  Target: SCNA; (+) strand; PAM type: YTN; PAM sequence: TTA
ttgttgttaatctcttactg

SEQ ID NO: 64961 - DNA, 20 bp, Artificial Sequence
  Description of Artificial Sequence: Synthetic oligonucleotide
  Target: SCNA; (+) strand; PAM type: YTN; PAM sequence: TTG
ttgttaatctcttactgtgc

SEQ ID NO: 64962 - DNA, 20 bp, Artificial Sequence
  Description of Artificial Sequence: Synthetic oligonucleotide
  Target: SCNA; (+) strand; PAM type: YTN; PAM sequence: TTG
ttaatctcttactgtgccta

SEQ ID NO: 64963 - DNA, 20 bp, Artificial Sequence
  Description of Artificial Sequence: Synthetic oligonucleotide
  Target: SCNA; (+) strand; PAM type: YTN; PAM sequence: TTA
atctcttactgtgcctagtt

SEQ ID NO: 64964 - DNA, 20 bp, Artificial Sequence
  Description of Artificial Sequence: Synthetic oligonucleotide
  Target: SCNA; (+) strand; PAM type: YTN; PAM sequence: CTC
ttactgtgcctagtttataa

SEQ ID NO: 64965 - DNA, 20 bp, Artificial Sequence
  Description of Artificial Sequence: Synthetic oligonucleotide
  Target: SCNA; (+) strand; PAM type: YTN; PAM sequence: CTT
actgtgcctagtttataaat

SEQ ID NO: 64966 - DNA, 20 bp, Artificial Sequence
  Description of Artificial Sequence: Synthetic oligonucleotide
  Target: SCNA; (+) strand; PAM type: YTN; PAM sequence: TTA
ctgtgcctagtttataaatt

SEQ ID NO: 64967 - DNA, 20 bp, Artificial Sequence
  Description of Artificial Sequence: Synthetic oligonucleotide
  Target: SCNA; (+) strand; PAM type: YTN; PAM sequence: CTG
tgcctagtttataaattaaa

SEQ ID NO: 64968 - DNA, 20 bp, Artificial Sequence
  Description of Artificial Sequence: Synthetic oligonucleotide
  Target: SCNA; (+) strand; PAM type: YTN; PAM sequence: CTA
gtttataaattaaacttttt

SEQ ID NO: 64969 - DNA, 20 bp, Artificial Sequence
  Description of Artificial Sequence: Synthetic oligonucleotide
  Target: SCNA; (+) strand; PAM type: YTN; PAM sequence: TTT
ataaattaaactttttcata

SEQ ID NO: 64970 - DNA, 20 bp, Artificial Sequence
  Description of Artificial Sequence: Synthetic oligonucleotide
  Target: SCNA; (+) strand; PAM type: YTN; PAM sequence: TTA
taaattaaactttttcatag

SEQ ID NO: 64971 - DNA, 20 bp, Artificial Sequence
  Description of Artificial Sequence: Synthetic oligonucleotide
  Target: SCNA; (+) strand; PAM type: YTN; PAM sequence: TTA
aactttttcataggtacata

SEQ ID NO: 64972 - DNA, 20 bp, Artificial Sequence
  Description of Artificial Sequence: Synthetic oligonucleotide
  Target: SCNA; (+) strand; PAM type: YTN; PAM sequence: CTT
tttcataggtacataagcat

SEQ ID NO: 64973 - DNA, 20 bp, Artificial Sequence
  Description of Artificial Sequence: Synthetic oligonucleotide
  Target: SCNA; (+) strand; PAM type: YTN; PAM sequence: TTT
ttcataggtacataagcatt

SEQ ID NO: 64974 - DNA, 20 bp, Artificial Sequence
  Description of Artificial Sequence: Synthetic oligonucleotide
  Target: SCNA; (+) strand; PAM type: YTN; PAM sequence: TTT
tcataggtacataagcattg

SEQ ID NO: 64975 - DNA, 20 bp, Artificial Sequence
  Description of Artificial Sequence: Synthetic oligonucleotide
  Target: SCNA; (+) strand; PAM type: YTN; PAM sequence: TTT
cataggtacataagcattgg

SEQ ID NO: 64976 - DNA, 20 bp, Artificial Sequence
  Description of Artificial Sequence: Synthetic oligonucleotide
  Target: SCNA; (+) strand; PAM type: YTN; PAM sequence: TTC
ataggtacataagcattgga

SEQ ID NO: 64977 - DNA, 20 bp, Artificial Sequence
  Description of Artificial Sequence: Synthetic oligonucleotide
  Target: SCNA; (+) strand; PAM type: YTN; PAM sequence: TTG
gaaaaaacagtatatgtagg

SEQ ID NO: 64978 - DNA, 20 bp, Artificial Sequence
  Description of Artificial Sequence: Synthetic oligonucleotide
  Target: SCNA; (+) strand; PAM type: YTN; PAM sequence: TTT
gctactatccgcaatttcag

SEQ ID NO: 64979 - DNA, 20 bp, Artificial Sequence
  Description of Artificial Sequence: Synthetic oligonucleotide
  Target: SCNA; (+) strand; PAM type: YTN; PAM sequence: TTG
ctactatccgcaatttcagg

SEQ ID NO: 64980 - DNA, 20 bp, Artificial Sequence
  Description of Artificial Sequence: Synthetic oligonucleotide
  Target: SCNA; (+) strand; PAM type: YTN; PAM sequence: CTA
ctatccgcaatttcaggtgt

SEQ ID NO: 64981 - DNA, 20 bp, Artificial Sequence
  Description of Artificial Sequence: Synthetic oligonucleotide
  Target: SCNA; (+) strand; PAM type: YTN; PAM sequence: CTA
tccgcaatttcaggtgtcct

SEQ ID NO: 64982 - DNA, 20 bp, Artificial Sequence
  Description of Artificial Sequence: Synthetic oligonucleotide
  Target: SCNA; (+) strand; PAM type: YTN; PAM sequence: TTT
caggtgtcctagtgggggtt

SEQ ID NO: 64983 - DNA, 20 bp, Artificial Sequence
  Description of Artificial Sequence: Synthetic oligonucleotide
  Target: SCNA; (+) strand; PAM type: YTN; PAM sequence: TTC
aggtgtcctagtgggggttt

SEQ ID NO: 64984 - DNA, 20 bp, Artificial Sequence
  Description of Artificial Sequence: Synthetic oligonucleotide
  Target: SCNA; (+) strand; PAM type: YTN; PAM sequence: CTA
gtgggggtttcagaatgtat

SEQ ID NO: 64985 - DNA, 20 bp, Artificial Sequence
  Description of Artificial Sequence: Synthetic oligonucleotide
  Target: SCNA; (+) strand; PAM type: YTN; PAM sequence: TTT
cagaatgtatccctgtagat

SEQ ID NO: 64986 - DNA, 20 bp, Artificial Sequence
  Description of Artificial Sequence: Synthetic oligonucleotide
  Target: SCNA; (+) strand; PAM type: YTN; PAM sequence: TTC
agaatgtatccctgtagata

SEQ ID NO: 64987 - DNA, 20 bp, Artificial Sequence
  Description of Artificial Sequence: Synthetic oligonucleotide
  Target: SCNA; (+) strand; PAM type: YTN; PAM sequence: CTG
tagataaaggaagactgctg

SEQ ID NO: 64988 - DNA, 20 bp, Artificial Sequence
  Description of Artificial Sequence: Synthetic oligonucleotide
  Target: SCNA; (+) strand; PAM type: YTN; PAM sequence: CTG
ctgtatgctcatttcaatag

SEQ ID NO: 64989 - DNA, 20 bp, Artificial Sequence
  Description of Artificial Sequence: Synthetic oligonucleotide
  Target: SCNA; (+) strand; PAM type: YTN; PAM sequence: CTG
tatgctcatttcaatagtta

SEQ ID NO: 64990 - DNA, 20 bp, Artificial Sequence
  Description of Artificial Sequence: Synthetic oligonucleotide
  Target: SCNA; (+) strand; PAM type: YTN; PAM sequence: CTC
atttcaatagttagttctct

SEQ ID NO: 64991 - DNA, 20 bp, Artificial Sequence
  Description of Artificial Sequence: Synthetic oligonucleotide
  Target: SCNA; (+) strand; PAM type: YTN; PAM sequence: TTT
caatagttagttctctaact

SEQ ID NO: 64992 - DNA, 20 bp, Artificial Sequence
  Description of Artificial Sequence: Synthetic oligonucleotide
  Target: SCNA; (+) strand; PAM type: YTN; PAM sequence: TTC
aatagttagttctctaacta

SEQ ID NO: 64993 - DNA, 20 bp, Artificial Sequence
  Description of Artificial Sequence: Synthetic oligonucleotide
  Target: SCNA; (+) strand; PAM type: YTN; PAM sequence: TTA
gttctctaactatgtttttc

SEQ ID NO: 64994 - DNA, 20 bp, Artificial Sequence
  Description of Artificial Sequence: Synthetic oligonucleotide
  Target: SCNA; (+) strand; PAM type: YTN; PAM sequence: TTC
tctaactatgtttttctgaa

SEQ ID NO: 64995 - DNA, 20 bp, Artificial Sequence
  Description of Artificial Sequence: Synthetic oligonucleotide
  Target: SCNA; (+) strand; PAM type: YTN; PAM sequence: CTC
taactatgtttttctgaata

SEQ ID NO: 64996 - DNA, 20 bp, Artificial Sequence
  Description of Artificial Sequence: Synthetic oligonucleotide
  Target: SCNA; (+) strand; PAM type: YTN; PAM sequence: CTA
actatgtttttctgaatatg

SEQ ID NO: 64997 - DNA, 20 bp, Artificial Sequence
  Description of Artificial Sequence: Synthetic oligonucleotide
  Target: SCNA; (+) strand; PAM type: YTN; PAM sequence: CTA
tgtttttctgaatatgtgat

SEQ ID NO: 64998 - DNA, 20 bp, Artificial Sequence
  Description of Artificial Sequence: Synthetic oligonucleotide
  Target: SCNA; (+) strand; PAM type: YTN; PAM sequence: TTT
ttctgaatatgtgatctaaa

SEQ ID NO: 64999 - DNA, 20 bp, Artificial Sequence
  Description of Artificial Sequence: Synthetic oligonucleotide
  Target: SCNA; (+) strand; PAM type: YTN; PAM sequence: TTT
tctgaatatgtgatctaaat

SEQ ID NO: 65000 - DNA, 20 bp, Artificial Sequence
  Description of Artificial Sequence: Synthetic oligonucleotide
  Target: SCNA; (+) strand; PAM type: YTN; PAM sequence: TTT
ctgaatatgtgatctaaatt

SEQ ID NO: 65001 - DNA, 20 bp, Artificial Sequence
  Description of Artificial Sequence: Synthetic oligonucleotide
  Target: SCNA; (+) strand; PAM type: YTN; PAM sequence: TTC
tgaatatgtgatctaaattt

SEQ ID NO: 65002 - DNA, 20 bp, Artificial Sequence
  Description of Artificial Sequence: Synthetic oligonucleotide
  Target: SCNA; (+) strand; PAM type: YTN; PAM sequence: CTG
aatatgtgatctaaatttgt

SEQ ID NO: 65003 - DNA, 20 bp, Artificial Sequence
  Description of Artificial Sequence: Synthetic oligonucleotide
  Target: SCNA; (+) strand; PAM type: YTN; PAM sequence: CTA
aatttgttgactctatcaca

SEQ ID NO: 65004 - DNA, 20 bp, Artificial Sequence
  Description of Artificial Sequence: Synthetic oligonucleotide
  Target: SCNA; (+) strand; PAM type: YTN; PAM sequence: TTT
gttgactctatcacattcgt

SEQ ID NO: 65005 - DNA, 20 bp, Artificial Sequence
  Description of Artificial Sequence: Synthetic oligonucleotide
  Target: SCNA; (+) strand; PAM type: YTN; PAM sequence: TTG
ttgactctatcacattcgta

SEQ ID NO: 65006 - DNA, 20 bp, Artificial Sequence
  Description of Artificial Sequence: Synthetic oligonucleotide
  Target: SCNA; (+) strand; PAM type: YTN; PAM sequence: TTG
actctatcacattcgtagat

SEQ ID NO: 65007 - DNA, 20 bp, Artificial Sequence
  Description of Artificial Sequence: Synthetic oligonucleotide
  Target: SCNA; (+) strand; PAM type: YTN; PAM sequence: CTC
tatcacattcgtagatttta

SEQ ID NO: 65008 - DNA, 20 bp, Artificial Sequence
  Description of Artificial Sequence: Synthetic oligonucleotide
  Target: SCNA; (+) strand; PAM type: YTN; PAM sequence: CTA
tcacattcgtagattttaag

SEQ ID NO: 65009 - DNA, 20 bp, Artificial Sequence
  Description of Artificial Sequence: Synthetic oligonucleotide
  Target: SCNA; (+) strand; PAM type: YTN; PAM sequence: TTC
gtagattttaagcatactaa

SEQ ID NO: 65010 - DNA, 20 bp, Artificial Sequence
  Description of Artificial Sequence: Synthetic oligonucleotide
  Target: SCNA; (+) strand; PAM type: YTN; PAM sequence: TTT
taagcatactaaaatatttg

SEQ ID NO: 65011 - DNA, 20 bp, Artificial Sequence
  Description of Artificial Sequence: Synthetic oligonucleotide
  Target: SCNA; (+) strand; PAM type: YTN; PAM sequence: TTT
aagcatactaaaatatttgg

SEQ ID NO: 65012 - DNA, 20 bp, Artificial Sequence
  Description of Artificial Sequence: Synthetic oligonucleotide
  Target: SCNA; (+) strand; PAM type: YTN; PAM sequence: TTA
agcatactaaaatatttggc

SEQ ID NO: 65013 - DNA, 20 bp, Artificial Sequence
  Description of Artificial Sequence: Synthetic oligonucleotide
  Target: SCNA; (+) strand; PAM type: YTN; PAM sequence: CTA
aaatatttggcagctattcc

SEQ ID NO: 65014 - DNA, 20 bp, Artificial Sequence
  Description of Artificial Sequence: Synthetic oligonucleotide
  Target: SCNA; (+) strand; PAM type: YTN; PAM sequence: TTT
ggcagctattccaaggagaa

SEQ ID NO: 65015 - DNA, 20 bp, Artificial Sequence
  Description of Artificial Sequence: Synthetic oligonucleotide
  Target: SCNA; (+) strand; PAM type: YTN; PAM sequence: TTG
gcagctattccaaggagaat

SEQ ID NO: 65016 - DNA, 20 bp, Artificial Sequence
  Description of Artificial Sequence: Synthetic oligonucleotide
  Target: SCNA; (+) strand; PAM type: YTN; PAM sequence: CTA
ttccaaggagaatataacaa

SEQ ID NO: 65017 - DNA, 20 bp, Artificial Sequence
  Description of Artificial Sequence: Synthetic oligonucleotide
  Target: SCNA; (+) strand; PAM type: YTN; PAM sequence: TTC
caaggagaatataacaacaa

SEQ ID NO: 65018 - DNA, 20 bp, Artificial Sequence
  Description of Artificial Sequence: Synthetic oligonucleotide
  Target: SCNA; (+) strand; PAM type: YTN; PAM sequence: CTT
catatgaccatcagacacaa

SEQ ID NO: 65019 - DNA, 20 bp, Artificial Sequence
  Description of Artificial Sequence: Synthetic oligonucleotide
  Target: SCNA; (+) strand; PAM type: YTN; PAM sequence: TTC
atatgaccatcagacacaat

SEQ ID NO: 65020 - DNA, 20 bp, Artificial Sequence
  Description of Artificial Sequence: Synthetic oligonucleotide
  Target: SCNA; (+) strand; PAM type: YTN; PAM sequence: TTT
tatccctatacctgtatatt

SEQ ID NO: 65021 - DNA, 20 bp, Artificial Sequence
  Description of Artificial Sequence: Synthetic oligonucleotide
  Target: SCNA; (+) strand; PAM type: YTN; PAM sequence: TTT
atccctatacctgtatattt

SEQ ID NO: 65022 - DNA, 20 bp, Artificial Sequence
  Description of Artificial Sequence: Synthetic oligonucleotide
  Target: SCNA; (+) strand; PAM type: YTN; PAM sequence: TTA
tccctatacctgtatattta

SEQ ID NO: 65023 - DNA, 20 bp, Artificial Sequence
  Description of Artificial Sequence: Synthetic oligonucleotide
  Target: SCNA; (+) strand; PAM type: YTN; PAM sequence: CTA
tacctgtatatttactgttt

SEQ ID NO: 65024 - DNA, 20 bp, Artificial Sequence
  Description of Artificial Sequence: Synthetic oligonucleotide
  Target: SCNA; (+) strand; PAM type: YTN; PAM sequence: CTG
tatatttactgtttcataaa

SEQ ID NO: 65025 - DNA, 20 bp, Artificial Sequence
  Description of Artificial Sequence: Synthetic oligonucleotide
  Target: SCNA; (+) strand; PAM type: YTN; PAM sequence: TTT
actgtttcataaacctattt

SEQ ID NO: 65026 - DNA, 20 bp, Artificial Sequence
  Description of Artificial Sequence: Synthetic oligonucleotide
  Target: SCNA; (+) strand; PAM type: YTN; PAM sequence: TTA
ctgtttcataaacctatttc

SEQ ID NO: 65027 - DNA, 20 bp, Artificial Sequence
  Description of Artificial Sequence: Synthetic oligonucleotide
  Target: SCNA; (+) strand; PAM type: YTN; PAM sequence: CTG
tttcataaacctatttctaa

SEQ ID NO: 65028 - DNA, 20 bp, Artificial Sequence
  Description of Artificial Sequence: Synthetic oligonucleotide
  Target: SCNA; (+) strand; PAM type: YTN; PAM sequence: TTT
cataaacctatttctaaaaa

SEQ ID NO: 65029 - DNA, 20 bp, Artificial Sequence
  Description of Artificial Sequence: Synthetic oligonucleotide
  Target: SCNA; (+) strand; PAM type: YTN; PAM sequence: TTC
ataaacctatttctaaaaac

SEQ ID NO: 65030 - DNA, 20 bp, Artificial Sequence
  Description of Artificial Sequence: Synthetic oligonucleotide
  Target: SCNA; (+) strand; PAM type: YTN; PAM sequence: CTA
tttctaaaaacattgttatc

SEQ ID NO: 65031 - DNA, 20 bp, Artificial Sequence
  Description of Artificial Sequence: Synthetic oligonucleotide
  Target: SCNA; (+) strand; PAM type: YTN; PAM sequence: TTT
ctaaaaacattgttatctat

SEQ ID NO: 65032 - DNA, 20 bp, Artificial Sequence
  Description of Artificial Sequence: Synthetic oligonucleotide
  Target: SCNA; (+) strand; PAM type: YTN; PAM sequence: TTC
taaaaacattgttatctata

SEQ ID NO: 65033 - DNA, 20 bp, Artificial Sequence
  Description of Artificial Sequence: Synthetic oligonucleotide
  Target: SCNA; (+) strand; PAM type: YTN; PAM sequence: CTA
aaaacattgttatctataaa

SEQ ID NO: 65034 - DNA, 20 bp, Artificial Sequence
  Description of Artificial Sequence: Synthetic oligonucleotide
  Target: SCNA; (+) strand; PAM type: YTN; PAM sequence: TTG
ttatctataaagaaatatta

SEQ ID NO: 65035 - DNA, 20 bp, Artificial Sequence
  Description of Artificial Sequence: Synthetic oligonucleotide
  Target: SCNA; (+) strand; PAM type: YTN; PAM sequence: TTA
tctataaagaaatattaaat

SEQ ID NO: 65036 - DNA, 20 bp, Artificial Sequence
  Description of Artificial Sequence: Synthetic oligonucleotide
  Target: SCNA; (+) strand; PAM type: YTN; PAM sequence: CTA
taaagaaatattaaatttca

SEQ ID NO: 65037 - DNA, 20 bp, Artificial Sequence
  Description of Artificial Sequence: Synthetic oligonucleotide
  Target: SCNA; (+) strand; PAM type: YTN; PAM sequence: TTA
aatttcaactccaatttaca

SEQ ID NO: 65038 - DNA, 20 bp, Artificial Sequence
  Description of Artificial Sequence: Synthetic oligonucleotide
  Target: SCNA; (+) strand; PAM type: YTN; PAM sequence: TTT
caactccaatttacaactgt

SEQ ID NO: 65039 - DNA, 20 bp, Artificial Sequence
  Description of Artificial Sequence: Synthetic oligonucleotide
  Target: SCNA; (+) strand; PAM type: YTN; PAM sequence: TTC
aactccaatttacaactgtg

SEQ ID NO: 65040 - DNA, 20 bp, Artificial Sequence
  Description of Artificial Sequence: Synthetic oligonucleotide
  Target: SCNA; (+) strand; PAM type: YTN; PAM sequence: CTC
caatttacaactgtgcctaa

SEQ ID NO: 65041 - DNA, 20 bp, Artificial Sequence
  Description of Artificial Sequence: Synthetic oligonucleotide
  Target: SCNA; (+) strand; PAM type: YTN; PAM sequence: TTT
acaactgtgcctaatatagt

SEQ ID NO: 65042 - DNA, 20 bp, Artificial Sequence
  Description of Artificial Sequence: Synthetic oligonucleotide
  Target: SCNA; (+) strand; PAM type: YTN; PAM sequence: TTA
caactgtgcctaatatagtt

SEQ ID NO: 65043 - DNA, 20 bp, Artificial Sequence
  Description of Artificial Sequence: Synthetic oligonucleotide
  Target: SCNA; (+) strand; PAM type: YTN; PAM sequence: CTG
tgcctaatatagtttggctg

SEQ ID NO: 65044 - DNA, 20 bp, Artificial Sequence
  Description of Artificial Sequence: Synthetic oligonucleotide
  Target: SCNA; (+) strand; PAM type: YTN; PAM sequence: CTA
atatagtttggctgtaacaa

SEQ ID NO: 65045 - DNA, 20 bp, Artificial Sequence
  Description of Artificial Sequence: Synthetic oligonucleotide
  Target: SCNA; (+) strand; PAM type: YTN; PAM sequence: TTT
ggctgtaacaaaaaaagaac

SEQ ID NO: 65046 - DNA, 20 bp, Artificial Sequence
  Description of Artificial Sequence: Synthetic oligonucleotide
  Target: SCNA; (+) strand; PAM type: YTN; PAM sequence: TTG
gctgtaacaaaaaaagaaca

SEQ ID NO: 65047 - DNA, 20 bp, Artificial Sequence
  Description of Artificial Sequence: Synthetic oligonucleotide
  Target: SCNA; (+) strand; PAM type: YTN; PAM sequence: CTG
taacaaaaaaagaacattaa

SEQ ID NO: 65048 - DNA, 20 bp, Artificial Sequence
  Description of Artificial Sequence: Synthetic oligonucleotide
  Target: SCNA; (+) strand; PAM type: YTN; PAM sequence: TTA
aaatttgcattttatgagta

SEQ ID NO: 65049 - DNA, 20 bp, Artificial Sequence
  Description of Artificial Sequence: Synthetic oligonucleotide
  Target: SCNA; (+) strand; PAM type: YTN; PAM sequence: TTT
gcattttatgagtattcatg

SEQ ID NO: 65050 - DNA, 20 bp, Artificial Sequence
  Description of Artificial Sequence: Synthetic oligonucleotide
  Target: SCNA; (+) strand; PAM type: YTN; PAM sequence: TTG
cattttatgagtattcatga

SEQ ID NO: 65051 - DNA, 20 bp, Artificial Sequence
  Description of Artificial Sequence: Synthetic oligonucleotide
  Target: SCNA; (+) strand; PAM type: YTN; PAM sequence: TTT
tatgagtattcatgacttgt

SEQ ID NO: 65052 - DNA, 20 bp, Artificial Sequence
  Description of Artificial Sequence: Synthetic oligonucleotide
  Target: SCNA; (+) strand; PAM type: YTN; PAM sequence: TTT
atgagtattcatgacttgtt

SEQ ID NO: 65053 - DNA, 20 bp, Artificial Sequence
  Description of Artificial Sequence: Synthetic oligonucleotide
  Target: SCNA; (+) strand; PAM type: YTN; PAM sequence: TTA
tgagtattcatgacttgttt

SEQ ID NO: 65054 - DNA, 20 bp, Artificial Sequence
  Description of Artificial Sequence: Synthetic oligonucleotide
  Target: SCNA; (+) strand; PAM type: YTN; PAM sequence: TTC
atgacttgttttcaaaatat

SEQ ID NO: 65055 - DNA, 20 bp, Artificial Sequence
  Description of Artificial Sequence: Synthetic oligonucleotide
  Target: SCNA; (+) strand; PAM type: YTN; PAM sequence: CTT
gttttcaaaatataatcata

SEQ ID NO: 65056 - DNA, 20 bp, Artificial Sequence
  Description of Artificial Sequence: Synthetic oligonucleotide
  Target: SCNA; (+) strand; PAM type: YTN; PAM sequence: TTG
ttttcaaaatataatcatac

SEQ ID NO: 65057 - DNA, 20 bp, Artificial Sequence
  Description of Artificial Sequence: Synthetic oligonucleotide
  Target: SCNA; (+) strand; PAM type: YTN; PAM sequence: TTT
tcaaaatataatcatacttg

SEQ ID NO: 65058 - DNA, 20 bp, Artificial Sequence
  Description of Artificial Sequence: Synthetic oligonucleotide
  Target: SCNA; (+) strand; PAM type: YTN; PAM sequence: TTT
caaaatataatcatacttga

SEQ ID NO: 65059 - DNA, 20 bp, Artificial Sequence
  Description of Artificial Sequence: Synthetic oligonucleotide
  Target: SCNA; (+) strand; PAM type: YTN; PAM sequence: TTC
aaaatataatcatacttgaa

SEQ ID NO: 65060 - DNA, 20 bp, Artificial Sequence
  Description of Artificial Sequence: Synthetic oligonucleotide
  Target: SCNA; (+) strand; PAM type: YTN; PAM sequence: CTT
gaaggtgtgaagtgcacctt

SEQ ID NO: 65061 - DNA, 20 bp, Artificial Sequence
  Description of Artificial Sequence: Synthetic oligonucleotide
  Target: SCNA; (+) strand; PAM type: YTN; PAM sequence: TTG
aaggtgtgaagtgcaccttc

SEQ ID NO: 65062 - DNA, 20 bp, Artificial Sequence
  Description of Artificial Sequence: Synthetic oligonucleotide
  Target: SCNA; (+) strand; PAM type: YTN; PAM sequence: CTT
ctatttatttttaccacaaa

SEQ ID NO: 65063 - DNA, 20 bp, Artificial Sequence
  Description of Artificial Sequence: Synthetic oligonucleotide
  Target: SCNA; (+) strand; PAM type: YTN; PAM sequence: TTC
tatttatttttaccacaaac

SEQ ID NO: 65064 - DNA, 20 bp, Artificial Sequence
  Description of Artificial Sequence: Synthetic oligonucleotide
  Target: SCNA; (+) strand; PAM type: YTN; PAM sequence: CTA
tttatttttaccacaaacaa

SEQ ID NO: 65065 - DNA, 20 bp, Artificial Sequence
  Description of Artificial Sequence: Synthetic oligonucleotide
  Target: SCNA; (+) strand; PAM type: YTN; PAM sequence: TTT
atttttaccacaaacaagaa

SEQ ID NO: 65066 - DNA, 20 bp, Artificial Sequence
  Description of Artificial Sequence: Synthetic oligonucleotide
  Target: SCNA; (+) strand; PAM type: YTN; PAM sequence: TTA
tttttaccacaaacaagaaa

SEQ ID NO: 65067 - DNA, 20 bp, Artificial Sequence
  Description of Artificial Sequence: Synthetic oligonucleotide
  Target: SCNA; (+) strand; PAM type: YTN; PAM sequence: TTT
ttaccacaaacaagaaaaaa

SEQ ID NO: 65068 - DNA, 20 bp, Artificial Sequence
  Description of Artificial Sequence: Synthetic oligonucleotide
  Target: SCNA; (+) strand; PAM type: YTN; PAM sequence: TTT
taccacaaacaagaaaaaaa

SEQ ID NO: 65069 - DNA, 20 bp, Artificial Sequence
  Description of Artificial Sequence: Synthetic oligonucleotide
  Target: SCNA; (+) strand; PAM type: YTN; PAM sequence: TTT
accacaaacaagaaaaaaaa

SEQ ID NO: 65070 - DNA, 20 bp, Artificial Sequence
  Description of Artificial Sequence: Synthetic oligonucleotide
  Target: SCNA; (+) strand; PAM type: YTN; PAM sequence: TTA
ccacaaacaagaaaaaaaac

SEQ ID NO: 65071 - DNA, 20 bp, Artificial Sequence
  Description of Artificial Sequence: Synthetic oligonucleotide
  Target: SCNA; (+) strand; PAM type: YTN; PAM sequence: CTA
ccaatataacaaatgttaaa

SEQ ID NO: 65072 - DNA, 20 bp, Artificial Sequence
  Description of Artificial Sequence: Synthetic oligonucleotide
  Target: SCNA; (+) strand; PAM type: YTN; PAM sequence: TTA
aacacttttgaaaaaatcaa

SEQ ID NO: 65073 - DNA, 20 bp, Artificial Sequence
  Description of Artificial Sequence: Synthetic oligonucleotide
  Target: SCNA; (+) strand; PAM type: YTN; PAM sequence: CTT
ttgaaaaaatcaattttttc

SEQ ID NO: 65074 - DNA, 20 bp, Artificial Sequence
  Description of Artificial Sequence: Synthetic oligonucleotide
  Target: SCNA; (+) strand; PAM type: YTN; PAM sequence: TTT
tgaaaaaatcaattttttct

SEQ ID NO: 65075 - DNA, 20 bp, Artificial Sequence
  Description of Artificial Sequence: Synthetic oligonucleotide
  Target: SCNA; (+) strand; PAM type: YTN; PAM sequence: TTT
gaaaaaatcaattttttctc

SEQ ID NO: 65076 - DNA, 20 bp, Artificial Sequence
  Description of Artificial Sequence: Synthetic oligonucleotide
  Target: SCNA; (+) strand; PAM type: YTN; PAM sequence: TTG
aaaaaatcaattttttctca

SEQ ID NO: 65077 - DNA, 20 bp, Artificial Sequence
  Description of Artificial Sequence: Synthetic oligonucleotide
  Target: SCNA; (+) strand; PAM type: YTN; PAM sequence: TTT
tttctcaaattttcattatg

SEQ ID NO: 65078 - DNA, 20 bp, Artificial Sequence
  Description of Artificial Sequence: Synthetic oligonucleotide
  Target: SCNA; (+) strand; PAM type: YTN; PAM sequence: TTT
ttctcaaattttcattatga

SEQ ID NO: 65079 - DNA, 20 bp, Artificial Sequence
  Description of Artificial Sequence: Synthetic oligonucleotide
  Target: SCNA; (+) strand; PAM type: YTN; PAM sequence: TTT
tctcaaattttcattatgat

SEQ ID NO: 65080 - DNA, 20 bp, Artificial Sequence
  Description of Artificial Sequence: Synthetic oligonucleotide
  Target: SCNA; (+) strand; PAM type: YTN; PAM sequence: TTT
ctcaaattttcattatgata

SEQ ID NO: 65081 - DNA, 20 bp, Artificial Sequence
  Description of Artificial Sequence: Synthetic oligonucleotide
  Target: SCNA; (+) strand; PAM type: YTN; PAM sequence: TTC
tcaaattttcattatgatat

SEQ ID NO: 65082 - DNA, 20 bp, Artificial Sequence
  Description of Artificial Sequence: Synthetic oligonucleotide
  Target: SCNA; (+) strand; PAM type: YTN; PAM sequence: CTC
aaattttcattatgatatta

SEQ ID NO: 65083 - DNA, 20 bp, Artificial Sequence
  Description of Artificial Sequence: Synthetic oligonucleotide
  Target: SCNA; (+) strand; PAM type: YTN; PAM sequence: TTT
tcattatgatattatattaa

SEQ ID NO: 65084 - DNA, 20 bp, Artificial Sequence
  Description of Artificial Sequence: Synthetic oligonucleotide
  Target: SCNA; (+) strand; PAM type: YTN; PAM sequence: TTT
cattatgatattatattaac

SEQ ID NO: 65085 - DNA, 20 bp, Artificial Sequence
  Description of Artificial Sequence: Synthetic oligonucleotide
  Target: SCNA; (+) strand; PAM type: YTN; PAM sequence: TTC
attatgatattatattaacc

SEQ ID NO: 65086 - DNA, 20 bp, Artificial Sequence
  Description of Artificial Sequence: Synthetic oligonucleotide
  Target: SCNA; (+) strand; PAM type: YTN; PAM sequence: TTA
tgatattatattaacccaga

SEQ ID NO: 65087 - DNA, 20 bp, Artificial Sequence
  Description of Artificial Sequence: Synthetic oligonucleotide
  Target: SCNA; (+) strand; PAM type: YTN; PAM sequence: TTA
tattaacccagaatatgtta

SEQ ID NO: 65088 - DNA, 20 bp, Artificial Sequence
  Description of Artificial Sequence: Synthetic oligonucleotide
  Target: SCNA; (+) strand; PAM type: YTN; PAM sequence: TTA
acccagaatatgttagggca

SEQ ID NO: 65089 - DNA, 20 bp, Artificial Sequence
  Description of Artificial Sequence: Synthetic oligonucleotide
  Target: SCNA; (+) strand; PAM type: YTN; PAM sequence: TTA
gggcaataaaataaatgaga

SEQ ID NO: 65090 - DNA, 20 bp, Artificial Sequence
  Description of Artificial Sequence: Synthetic oligonucleotide
  Target: SCNA; (+) strand; PAM type: YTN; PAM sequence: CTG
gattttggtatatgcctgta

SEQ ID NO: 65091 - DNA, 20 bp, Artificial Sequence
  Description of Artificial Sequence: Synthetic oligonucleotide
  Target: SCNA; (+) strand; PAM type: YTN; PAM sequence: TTT
tggtatatgcctgtatgctt

SEQ ID NO: 65092 - DNA, 20 bp, Artificial Sequence
  Description of Artificial Sequence: Synthetic oligonucleotide
  Target: SCNA; (+) strand; PAM type: YTN; PAM sequence: TTT
ggtatatgcctgtatgctta

SEQ ID NO: 65093 - DNA, 20 bp, Artificial Sequence
  Description of Artificial Sequence: Synthetic oligonucleotide
  Target: SCNA; (+) strand; PAM type: YTN; PAM sequence: TTG
gtatatgcctgtatgcttaa

SEQ ID NO: 65094 - DNA, 20 bp, Artificial Sequence
  Description of Artificial Sequence: Synthetic oligonucleotide
  Target: SCNA; (+) strand; PAM type: YTN; PAM sequence: CTG
tatgcttaataagagaacct

SEQ ID NO: 65095 - DNA, 20 bp, Artificial Sequence
  Description of Artificial Sequence: Synthetic oligonucleotide
  Target: SCNA; (+) strand; PAM type: YTN; PAM sequence: CTT
aataagagaacctacagggt

SEQ ID NO: 65096 - DNA, 20 bp, Artificial Sequence
  Description of Artificial Sequence: Synthetic oligonucleotide
  Target: SCNA; (+) strand; PAM type: YTN; PAM sequence: TTA
ataagagaacctacagggta

SEQ ID NO: 65097 - DNA, 20 bp, Artificial Sequence
  Description of Artificial Sequence: Synthetic oligonucleotide
  Target: SCNA; (+) strand; PAM type: YTN; PAM sequence: CTA
cagggtaggatatagagaca

SEQ ID NO: 65098 - DNA, 20 bp, Artificial Sequence
  Description of Artificial Sequence: Synthetic oligonucleotide
  Target: SCNA; (+) strand; PAM type: YTN; PAM sequence: CTT
ttattctctctctactaggc

SEQ ID NO: 65099 - DNA, 20 bp, Artificial Sequence
  Description of Artificial Sequence: Synthetic oligonucleotide
  Target: SCNA; (+) strand; PAM type: YTN; PAM sequence: TTT
tattctctctctactaggcc

SEQ ID NO: 65100 - DNA, 20 bp, Artificial Sequence
  Description of Artificial Sequence: Synthetic oligonucleotide
  Target: SCNA; (+) strand; PAM type: YTN; PAM sequence: TTT
attctctctctactaggccc

SEQ ID NO: 65101 - DNA, 20 bp, Artificial Sequence
  Description of Artificial Sequence: Synthetic oligonucleotide
  Target: SCNA; (+) strand; PAM type: YTN; PAM sequence: TTA
ttctctctctactaggccct

SEQ ID NO: 65102 - DNA, 20 bp, Artificial Sequence
  Description of Artificial Sequence: Synthetic oligonucleotide
  Target: SCNA; (+) strand; PAM type: YTN; PAM sequence: TTC
tctctctactaggccctatc

SEQ ID NO: 65103 - DNA, 20 bp, Artificial Sequence
  Description of Artificial Sequence: Synthetic oligonucleotide
  Target: SCNA; (+) strand; PAM type: YTN; PAM sequence: CTC
tctctactaggccctatccc

SEQ ID NO: 65104 - DNA, 20 bp, Artificial Sequence
  Description of Artificial Sequence: Synthetic oligonucleotide
  Target: SCNA; (+) strand; PAM type: YTN; PAM sequence: CTC
tctactaggccctatccctg

SEQ ID NO: 65105 - DNA, 20 bp, Artificial Sequence
  Description of Artificial Sequence: Synthetic oligonucleotide
  Target: SCNA; (+) strand; PAM type: YTN; PAM sequence: CTC
tactaggccctatccctgga

SEQ ID NO: 65106 - DNA, 20 bp, Artificial Sequence
  Description of Artificial Sequence: Synthetic oligonucleotide
  Target: SCNA; (+) strand; PAM type: YTN; PAM sequence: CTA
ctaggccctatccctggaat

SEQ ID NO: 65107 - DNA, 20 bp, Artificial Sequence
  Description of Artificial Sequence: Synthetic oligonucleotide
  Target: SCNA; (+) strand; PAM type: YTN; PAM sequence: CTA
ggccctatccctggaatagc

SEQ ID NO: 65108 - DNA, 20 bp, Artificial Sequence
  Description of Artificial Sequence: Synthetic oligonucleotide
  Target: SCNA; (+) strand; PAM type: YTN; PAM sequence: CTA
tccctggaatagctgtagac

SEQ ID NO: 65109 - DNA, 20 bp, Artificial Sequence
  Description of Artificial Sequence: Synthetic oligonucleotide
  Target: SCNA; (+) strand; PAM type: YTN; PAM sequence: CTG
gaatagctgtagactttttt

SEQ ID NO: 65110 - DNA, 20 bp, Artificial Sequence
  Description of Artificial Sequence: Synthetic oligonucleotide
  Target: SCNA; (+) strand; PAM type: YTN; PAM sequence: CTG
tagacttttttttttcaaat

SEQ ID NO: 65111 - DNA, 20 bp, Artificial Sequence
  Description of Artificial Sequence: Synthetic oligonucleotide
  Target: SCNA; (+) strand; PAM type: YTN; PAM sequence: CTT
ttttttttcaaatgggattg

SEQ ID NO: 65112 - DNA, 20 bp, Artificial Sequence
  Description of Artificial Sequence: Synthetic oligonucleotide
  Target: SCNA; (+) strand; PAM type: YTN; PAM sequence: TTT
tttttttcaaatgggattgt

SEQ ID NO: 65113 - DNA, 20 bp, Artificial Sequence
  Description of Artificial Sequence: Synthetic oligonucleotide
  Target: SCNA; (+) strand; PAM type: YTN; PAM sequence: TTT
ttttttcaaatgggattgtt

SEQ ID NO: 65114 - DNA, 20 bp, Artificial Sequence
  Description of Artificial Sequence: Synthetic oligonucleotide
  Target: SCNA; (+) strand; PAM type: YTN; PAM sequence: TTT
tttttcaaatgggattgttt

SEQ ID NO: 65115 - DNA, 20 bp, Artificial Sequence
  Description of Artificial Sequence: Synthetic oligonucleotide
  Target: SCNA; (+) strand; PAM type: YTN; PAM sequence: TTT
ttttcaaatgggattgtttt

SEQ ID NO: 65116 - DNA, 20 bp, Artificial Sequence
  Description of Artificial Sequence: Synthetic oligonucleotide
  Target: SCNA; (+) strand; PAM type: YTN; PAM sequence: TTT
tttcaaatgggattgtttta

SEQ ID NO: 65117 - DNA, 20 bp, Artificial Sequence
  Description of Artificial Sequence: Synthetic oligonucleotide
  Target: SCNA; (+) strand; PAM type: YTN; PAM sequence: TTT
ttcaaatgggattgttttac

SEQ ID NO: 65118 - DNA, 20 bp, Artificial Sequence
  Description of Artificial Sequence: Synthetic oligonucleotide
  Target: SCNA; (+) strand; PAM type: YTN; PAM sequence: TTT
tcaaatgggattgttttacg

SEQ ID NO: 65119 - DNA, 20 bp, Artificial Sequence
  Description of Artificial Sequence: Synthetic oligonucleotide
  Target: SCNA; (+) strand; PAM type: YTN; PAM sequence: TTT
caaatgggattgttttacga

SEQ ID NO: 65120 - DNA, 20 bp, Artificial Sequence
  Description of Artificial Sequence: Synthetic oligonucleotide
  Target: SCNA; (+) strand; PAM type: YTN; PAM sequence: TTC
aaatgggattgttttacgaa

SEQ ID NO: 65121 - DNA, 20 bp, Artificial Sequence
  Description of Artificial Sequence: Synthetic oligonucleotide
  Target: SCNA; (+) strand; PAM type: YTN; PAM sequence: TTG
ttttacgaacagtgaaatag

SEQ ID NO: 65122 - DNA, 20 bp, Artificial Sequence
  Description of Artificial Sequence: Synthetic oligonucleotide
  Target: SCNA; (+) strand; PAM type: YTN; PAM sequence: TTT
tacgaacagtgaaatagact

SEQ ID NO: 65123 - DNA, 20 bp, Artificial Sequence
  Description of Artificial Sequence: Synthetic oligonucleotide
  Target: SCNA; (+) strand; PAM type: YTN; PAM sequence: TTT
acgaacagtgaaatagactc

SEQ ID NO: 65124 - DNA, 20 bp, Artificial Sequence
  Description of Artificial Sequence: Synthetic oligonucleotide
  Target: SCNA; (+) strand; PAM type: YTN; PAM sequence: TTA
cgaacagtgaaatagactca

SEQ ID NO: 65125 - DNA, 20 bp, Artificial Sequence
  Description of Artificial Sequence: Synthetic oligonucleotide
  Target: SCNA; (+) strand; PAM type: YTN; PAM sequence: CTC
agttcagtatcttatatctg

SEQ ID NO: 65126 - DNA, 20 bp, Artificial Sequence
  Description of Artificial Sequence: Synthetic oligonucleotide
  Target: SCNA; (+) strand; PAM type: YTN; PAM sequence: TTC
agtatcttatatctgcattt

SEQ ID NO: 65127 - DNA, 20 bp, Artificial Sequence
  Description of Artificial Sequence: Synthetic oligonucleotide
  Target: SCNA; (+) strand; PAM type: YTN; PAM sequence: CTT
atatctgcatttgacacaca

SEQ ID NO: 65128 - DNA, 20 bp, Artificial Sequence
  Description of Artificial Sequence: Synthetic oligonucleotide
  Target: SCNA; (+) strand; PAM type: YTN; PAM sequence: TTA
tatctgcatttgacacacag

SEQ ID NO: 65129 - DNA, 20 bp, Artificial Sequence
  Description of Artificial Sequence: Synthetic oligonucleotide
  Target: SCNA; (+) strand; PAM type: YTN; PAM sequence: CTG
catttgacacacagaaagaa

SEQ ID NO: 65130 - DNA, 20 bp, Artificial Sequence
  Description of Artificial Sequence: Synthetic oligonucleotide
  Target: SCNA; (+) strand; PAM type: YTN; PAM sequence: TTT
gacacacagaaagaaaaatg

SEQ ID NO: 65131 - DNA, 20 bp, Artificial Sequence
  Description of Artificial Sequence: Synthetic oligonucleotide
  Target: SCNA; (+) strand; PAM type: YTN; PAM sequence: TTG
acacacagaaagaaaaatgg

SEQ ID NO: 65132 - DNA, 20 bp, Artificial Sequence
  Description of Artificial Sequence: Synthetic oligonucleotide
  Target: SCNA; (+) strand; PAM type: YTN; PAM sequence: TTA
tcaaaaaattacaatggaat

SEQ ID NO: 65133 - DNA, 20 bp, Artificial Sequence
  Description of Artificial Sequence: Synthetic oligonucleotide
  Target: SCNA; (+) strand; PAM type: YTN; PAM sequence: TTA
caatggaatgaccctcattg

SEQ ID NO: 65134 - DNA, 20 bp, Artificial Sequence
  Description of Artificial Sequence: Synthetic oligonucleotide
  Target: SCNA; (+) strand; PAM type: YTN; PAM sequence: CTC
attgctaataaggaaagact

SEQ ID NO: 65135 - DNA, 20 bp, Artificial Sequence
  Description of Artificial Sequence: Synthetic oligonucleotide
  Target: SCNA; (+) strand; PAM type: YTN; PAM sequence: TTG
ctaataaggaaagacttaaa

SEQ ID NO: 65136 - DNA, 20 bp, Artificial Sequence
  Description of Artificial Sequence: Synthetic oligonucleotide
  Target: SCNA; (+) strand; PAM type: YTN; PAM sequence: CTA
ataaggaaagacttaaaagc

SEQ ID NO: 65137 - DNA, 20 bp, Artificial Sequence
  Description of Artificial Sequence: Synthetic oligonucleotide
  Target: SCNA; (+) strand; PAM type: YTN; PAM sequence: CTT
aaaagctatattaggaaaca

SEQ ID NO: 65138 - DNA, 20 bp, Artificial Sequence
  Description of Artificial Sequence: Synthetic oligonucleotide
  Target: SCNA; (+) strand; PAM type: YTN; PAM sequence: TTA
aaagctatattaggaaacag

SEQ ID NO: 65139 - DNA, 20 bp, Artificial Sequence
  Description of Artificial Sequence: Synthetic oligonucleotide
  Target: SCNA; (+) strand; PAM type: YTN; PAM sequence: CTA
tattaggaaacagaaatggc

SEQ ID NO: 65140 - DNA, 20 bp, Artificial Sequence
  Description of Artificial Sequence: Synthetic oligonucleotide
  Target: SCNA; (+) strand; PAM type: YTN; PAM sequence: TTA
ggaaacagaaatggctgaga

SEQ ID NO: 65141 - DNA, 20 bp, Artificial Sequence
  Description of Artificial Sequence: Synthetic oligonucleotide
  Target: SCNA; (+) strand; PAM type: YTN; PAM sequence: CTG
agactgacctctttctccct

SEQ ID NO: 65142 - DNA, 20 bp, Artificial Sequence
  Description of Artificial Sequence: Synthetic oligonucleotide
  Target: SCNA; (+) strand; PAM type: YTN; PAM sequence: CTG
acctctttctccctaaaaag

SEQ ID NO: 65143 - DNA, 20 bp, Artificial Sequence
  Description of Artificial Sequence: Synthetic oligonucleotide
  Target: SCNA; (+) strand; PAM type: YTN; PAM sequence: CTC
tttctccctaaaaagcttat

SEQ ID NO: 65144 - DNA, 20 bp, Artificial Sequence
  Description of Artificial Sequence: Synthetic oligonucleotide
  Target: SCNA; (+) strand; PAM type: YTN; PAM sequence: CTT
tctccctaaaaagcttattc

SEQ ID NO: 65145 - DNA, 20 bp, Artificial Sequence
  Description of Artificial Sequence: Synthetic oligonucleotide
  Target: SCNA; (+) strand; PAM type: YTN; PAM sequence: TTT
ctccctaaaaagcttattca

SEQ ID NO: 65146 - DNA, 20 bp, Artificial Sequence
  Description of Artificial Sequence: Synthetic oligonucleotide
  Target: SCNA; (+) strand; PAM type: YTN; PAM sequence: TTC
tccctaaaaagcttattcaa

SEQ ID NO: 65147 - DNA, 20 bp, Artificial Sequence
  Description of Artificial Sequence: Synthetic oligonucleotide
  Target: SCNA; (+) strand; PAM type: YTN; PAM sequence: CTC
cctaaaaagcttattcaagt

SEQ ID NO: 65148 - DNA, 20 bp, Artificial Sequence
  Description of Artificial Sequence: Synthetic oligonucleotide
  Target: SCNA; (+) strand; PAM type: YTN; PAM sequence: CTA
aaaagcttattcaagttctt

SEQ ID NO: 65149 - DNA, 20 bp, Artificial Sequence
  Description of Artificial Sequence: Synthetic oligonucleotide
  Target: SCNA; (+) strand; PAM type: YTN; PAM sequence: CTT
attcaagttctttttaaata

SEQ ID NO: 65150 - DNA, 20 bp, Artificial Sequence
  Description of Artificial Sequence: Synthetic oligonucleotide
  Target: SCNA; (+) strand; PAM type: YTN; PAM sequence: TTA
ttcaagttctttttaaataa

SEQ ID NO: 65151 - DNA, 20 bp, Artificial Sequence
  Description of Artificial Sequence: Synthetic oligonucleotide
  Target: SCNA; (+) strand; PAM type: YTN; PAM sequence: TTC
aagttctttttaaataaacc

SEQ ID NO: 65152 - DNA, 20 bp, Artificial Sequence
  Description of Artificial Sequence: Synthetic oligonucleotide
  Target: SCNA; (+) strand; PAM type: YTN; PAM sequence: TTC
tttttaaataaacctgtagg

SEQ ID NO: 65153 - DNA, 20 bp, Artificial Sequence
  Description of Artificial Sequence: Synthetic oligonucleotide
  Target: SCNA; (+) strand; PAM type: YTN; PAM sequence: CTT
tttaaataaacctgtagggt

SEQ ID NO: 65154 - DNA, 20 bp, Artificial Sequence
  Description of Artificial Sequence: Synthetic oligonucleotide
  Target: SCNA; (+) strand; PAM type: YTN; PAM sequence: TTT
ttaaataaacctgtagggtt

SEQ ID NO: 65155 - DNA, 20 bp, Artificial Sequence
  Description of Artificial Sequence: Synthetic oligonucleotide
  Target: SCNA; (+) strand; PAM type: YTN; PAM sequence: TTT
taaataaacctgtagggttg

SEQ ID NO: 65156 - DNA, 20 bp, Artificial Sequence
  Description of Artificial Sequence: Synthetic oligonucleotide
  Target: SCNA; (+) strand; PAM type: YTN; PAM sequence: TTT
aaataaacctgtagggttga

SEQ ID NO: 65157 - DNA, 20 bp, Artificial Sequence
  Description of Artificial Sequence: Synthetic oligonucleotide
  Target: SCNA; (+) strand; PAM type: YTN; PAM sequence: TTA
aataaacctgtagggttgaa

SEQ ID NO: 65158 - DNA, 20 bp, Artificial Sequence
  Description of Artificial Sequence: Synthetic oligonucleotide
  Target: SCNA; (+) strand; PAM type: YTN; PAM sequence: CTG
tagggttgaatagctgatat

SEQ ID NO: 65159 - DNA, 20 bp, Artificial Sequence
  Description of Artificial Sequence: Synthetic oligonucleotide
  Target: SCNA; (+) strand; PAM type: YTN; PAM sequence: TTG
aatagctgatataactgatt

SEQ ID NO: 65160 - DNA, 20 bp, Artificial Sequence
  Description of Artificial Sequence: Synthetic oligonucleotide
  Target: SCNA; (+) strand; PAM type: YTN; PAM sequence: CTG
atataactgattatcatttc

SEQ ID NO: 65161 - DNA, 20 bp, Artificial Sequence
  Description of Artificial Sequence: Synthetic oligonucleotide
  Target: SCNA; (+) strand; PAM type: YTN; PAM sequence: CTG
attatcatttcgtactcgtc

SEQ ID NO: 65162 - DNA, 20 bp, Artificial Sequence
  Description of Artificial Sequence: Synthetic oligonucleotide
  Target: SCNA; (+) strand; PAM type: YTN; PAM sequence: TTA
tcatttcgtactcgtcccag

SEQ ID NO: 65163 - DNA, 20 bp, Artificial Sequence
  Description of Artificial Sequence: Synthetic oligonucleotide
  Target: SCNA; (+) strand; PAM type: YTN; PAM sequence: TTT
cgtactcgtcccagctgaag

SEQ ID NO: 65164 - DNA, 20 bp, Artificial Sequence
  Description of Artificial Sequence: Synthetic oligonucleotide
  Target: SCNA; (+) strand; PAM type: YTN; PAM sequence: TTC
gtactcgtcccagctgaagt

SEQ ID NO: 65165 - DNA, 20 bp, Artificial Sequence
  Description of Artificial Sequence: Synthetic oligonucleotide
  Target: SCNA; (+) strand; PAM type: YTN; PAM sequence: CTC
gtcccagctgaagtgctcta

SEQ ID NO: 65166 - DNA, 20 bp, Artificial Sequence
  Description of Artificial Sequence: Synthetic oligonucleotide
  Target: SCNA; (+) strand; PAM type: YTN; PAM sequence: CTG
aagtgctctataaaacagat

SEQ ID NO: 65167 - DNA, 20 bp, Artificial Sequence
  Description of Artificial Sequence: Synthetic oligonucleotide
  Target: SCNA; (+) strand; PAM type: YTN; PAM sequence: CTC
tataaaacagatcatgagac

SEQ ID NO: 65168 - DNA, 20 bp, Artificial Sequence
  Description of Artificial Sequence: Synthetic oligonucleotide
  Target: SCNA; (+) strand; PAM type: YTN; PAM sequence: CTA
taaaacagatcatgagacga

SEQ ID NO: 65169 - DNA, 20 bp, Artificial Sequence
  Description of Artificial Sequence: Synthetic oligonucleotide
  Target: SCNA; (+) strand; PAM type: YTN; PAM sequence: CTT
ccttcactgctaatagctta

SEQ ID NO: 65170 - DNA, 20 bp, Artificial Sequence
  Description of Artificial Sequence: Synthetic oligonucleotide
  Target: SCNA; (+) strand; PAM type: YTN; PAM sequence: TTC
cttcactgctaatagcttat

SEQ ID NO: 65171 - DNA, 20 bp, Artificial Sequence
  Description of Artificial Sequence: Synthetic oligonucleotide
  Target: SCNA; (+) strand; PAM type: YTN; PAM sequence: CTT
cactgctaatagcttattgg

SEQ ID NO: 65172 - DNA, 20 bp, Artificial Sequence
  Description of Artificial Sequence: Synthetic oligonucleotide
  Target: SCNA; (+) strand; PAM type: YTN; PAM sequence: TTC
actgctaatagcttattggg

SEQ ID NO: 65173 - DNA, 20 bp, Artificial Sequence
  Description of Artificial Sequence: Synthetic oligonucleotide
  Target: SCNA; (+) strand; PAM type: YTN; PAM sequence: CTG
ctaatagcttattgggaagt

SEQ ID NO: 65174 - DNA, 20 bp, Artificial Sequence
  Description of Artificial Sequence: Synthetic oligonucleotide
  Target: SCNA; (+) strand; PAM type: YTN; PAM sequence: CTA
atagcttattgggaagtaca

SEQ ID NO: 65175 - DNA, 20 bp, Artificial Sequence
  Description of Artificial Sequence: Synthetic oligonucleotide
  Target: SCNA; (+) strand; PAM type: YTN; PAM sequence: CTT
attgggaagtacaattccag

SEQ ID NO: 65176 - DNA, 20 bp, Artificial Sequence
  Description of Artificial Sequence: Synthetic oligonucleotide
  Target: SCNA; (+) strand; PAM type: YTN; PAM sequence: TTA
ttgggaagtacaattccagg

SEQ ID NO: 65177 - DNA, 20 bp, Artificial Sequence
  Description of Artificial Sequence: Synthetic oligonucleotide
  Target: SCNA; (+) strand; PAM type: YTN; PAM sequence: TTG
ggaagtacaattccagggaa

SEQ ID NO: 65178 - DNA, 20 bp, Artificial Sequence
  Description of Artificial Sequence: Synthetic oligonucleotide
  Target: SCNA; (+) strand; PAM type: YTN; PAM sequence: TTC
cagggaagtgaaagtgaagg

SEQ ID NO: 65179 - DNA, 20 bp, Artificial Sequence
  Description of Artificial Sequence: Synthetic oligonucleotide
  Target: SCNA; (+) strand; PAM type: YTN; PAM sequence: TTT
cagctactgtctttaggaat

SEQ ID NO: 65180 - DNA, 20 bp, Artificial Sequence
  Description of Artificial Sequence: Synthetic oligonucleotide
  Target: SCNA; (+) strand; PAM type: YTN; PAM sequence: TTC
agctactgtctttaggaata

SEQ ID NO: 65181 - DNA, 20 bp, Artificial Sequence
  Description of Artificial Sequence: Synthetic oligonucleotide
  Target: SCNA; (+) strand; PAM type: YTN; PAM sequence: CTA
ctgtctttaggaatacaact

SEQ ID NO: 65182 - DNA, 20 bp, Artificial Sequence
  Description of Artificial Sequence: Synthetic oligonucleotide
  Target: SCNA; (+) strand; PAM type: YTN; PAM sequence: CTG
tctttaggaatacaactaca

SEQ ID NO: 65183 - DNA, 20 bp, Artificial Sequence
  Description of Artificial Sequence: Synthetic oligonucleotide
  Target: SCNA; (+) strand; PAM type: YTN; PAM sequence: CTT
taggaatacaactacagaat

SEQ ID NO: 65184 - DNA, 20 bp, Artificial Sequence
  Description of Artificial Sequence: Synthetic oligonucleotide
  Target: SCNA; (+) strand; PAM type: YTN; PAM sequence: TTT
aggaatacaactacagaatt

SEQ ID NO: 65185 - DNA, 20 bp, Artificial Sequence
  Description of Artificial Sequence: Synthetic oligonucleotide
  Target: SCNA; (+) strand; PAM type: YTN; PAM sequence: TTA
ggaatacaactacagaattt

SEQ ID NO: 65186 - DNA, 20 bp, Artificial Sequence
  Description of Artificial Sequence: Synthetic oligonucleotide
  Target: SCNA; (+) strand; PAM type: YTN; PAM sequence: CTA
cagaatttacataatctttt

SEQ ID NO: 65187 - DNA, 20 bp, Artificial Sequence
  Description of Artificial Sequence: Synthetic oligonucleotide
  Target: SCNA; (+) strand; PAM type: YTN; PAM sequence: TTT
acataatctttttaaatttc

SEQ ID NO: 65188 - DNA, 20 bp, Artificial Sequence
  Description of Artificial Sequence: Synthetic oligonucleotide
  Target: SCNA; (+) strand; PAM type: YTN; PAM sequence: TTA
cataatctttttaaatttcc

SEQ ID NO: 65189 - DNA, 20 bp, Artificial Sequence
  Description of Artificial Sequence: Synthetic oligonucleotide
  Target: SCNA; (+) strand; PAM type: YTN; PAM sequence: CTT
tttaaatttcctgttttgaa

SEQ ID NO: 65190 - DNA, 20 bp, Artificial Sequence
  Description of Artificial Sequence: Synthetic oligonucleotide
  Target: SCNA; (+) strand; PAM type: YTN; PAM sequence: TTT
ttaaatttcctgttttgaac

SEQ ID NO: 65191 - DNA, 20 bp, Artificial Sequence
  Description of Artificial Sequence: Synthetic oligonucleotide
  Target: SCNA; (+) strand; PAM type: YTN; PAM sequence: TTT
taaatttcctgttttgaacc

SEQ ID NO: 65192 - DNA, 20 bp, Artificial Sequence
  Description of Artificial Sequence: Synthetic oligonucleotide
  Target: SCNA; (+) strand; PAM type: YTN; PAM sequence: TTT
aaatttcctgttttgaacca

SEQ ID NO: 65193 - DNA, 20 bp, Artificial Sequence
  Description of Artificial Sequence: Synthetic oligonucleotide
  Target: SCNA; (+) strand; PAM type: YTN; PAM sequence: TTA
aatttcctgttttgaaccat

SEQ ID NO: 65194 - DNA, 20 bp, Artificial Sequence
  Description of Artificial Sequence: Synthetic oligonucleotide
  Target: SCNA; (+) strand; PAM type: YTN; PAM sequence: TTT
cctgttttgaaccatattgt

SEQ ID NO: 65195 - DNA, 20 bp, Artificial Sequence
  Description of Artificial Sequence: Synthetic oligonucleotide
  Target: SCNA; (+) strand; PAM type: YTN; PAM sequence: TTC
ctgttttgaaccatattgta

SEQ ID NO: 65196 - DNA, 20 bp, Artificial Sequence
  Description of Artificial Sequence: Synthetic oligonucleotide
  Target: SCNA; (+) strand; PAM type: YTN; PAM sequence: CTG
ttttgaaccatattgtattt

SEQ ID NO: 65197 - DNA, 20 bp, Artificial Sequence
  Description of Artificial Sequence: Synthetic oligonucleotide
  Target: SCNA; (+) strand; PAM type: YTN; PAM sequence: TTT
tgaaccatattgtatttaga

SEQ ID NO: 65198 - DNA, 20 bp, Artificial Sequence
  Description of Artificial Sequence: Synthetic oligonucleotide
  Target: SCNA; (+) strand; PAM type: YTN; PAM sequence: TTT
gaaccatattgtatttagat

SEQ ID NO: 65199 - DNA, 20 bp, Artificial Sequence
  Description of Artificial Sequence: Synthetic oligonucleotide
  Target: SCNA; (+) strand; PAM type: YTN; PAM sequence: TTG
aaccatattgtatttagata

SEQ ID NO: 65200 - DNA, 20 bp, Artificial Sequence
  Description of Artificial Sequence: Synthetic oligonucleotide
  Target: SCNA; (+) strand; PAM type: YTN; PAM sequence: TTG
tatttagatacctagtaata

SEQ ID NO: 65201 - DNA, 20 bp, Artificial Sequence
  Description of Artificial Sequence: Synthetic oligonucleotide
  Target: SCNA; (+) strand; PAM type: YTN; PAM sequence: TTT
agatacctagtaatactttc

SEQ ID NO: 65202 - DNA, 20 bp, Artificial Sequence
  Description of Artificial Sequence: Synthetic oligonucleotide
  Target: SCNA; (+) strand; PAM type: YTN; PAM sequence: TTA
gatacctagtaatactttct

SEQ ID NO: 65203 - DNA, 20 bp, Artificial Sequence
  Description of Artificial Sequence: Synthetic oligonucleotide
  Target: SCNA; (+) strand; PAM type: YTN; PAM sequence: CTA
gtaatactttctgtaaggaa

SEQ ID NO: 65204 - DNA, 20 bp, Artificial Sequence
  Description of Artificial Sequence: Synthetic oligonucleotide
  Target: SCNA; (+) strand; PAM type: YTN; PAM sequence: CTT
tctgtaaggaaattatcttt

SEQ ID NO: 65205 - DNA, 20 bp, Artificial Sequence
  Description of Artificial Sequence: Synthetic oligonucleotide
  Target: SCNA; (+) strand; PAM type: YTN; PAM sequence: TTT
ctgtaaggaaattatcttta

SEQ ID NO: 65206 - DNA, 20 bp, Artificial Sequence
  Description of Artificial Sequence: Synthetic oligonucleotide
  Target: SCNA; (+) strand; PAM type: YTN; PAM sequence: TTC
tgtaaggaaattatctttat

SEQ ID NO: 65207 - DNA, 20 bp, Artificial Sequence
  Description of Artificial Sequence: Synthetic oligonucleotide
  Target: SCNA; (+) strand; PAM type: YTN; PAM sequence: CTG
taaggaaattatctttattc

SEQ ID NO: 65208 - DNA, 20 bp, Artificial Sequence
  Description of Artificial Sequence: Synthetic oligonucleotide
  Target: SCNA; (+) strand; PAM type: YTN; PAM sequence: TTA
tctttattcaattctatgac

SEQ ID NO: 65209 - DNA, 20 bp, Artificial Sequence
  Description of Artificial Sequence: Synthetic oligonucleotide
  Target: SCNA; (+) strand; PAM type: YTN; PAM sequence: CTT
tattcaattctatgacttat

SEQ ID NO: 65210 - DNA, 20 bp, Artificial Sequence
  Description of Artificial Sequence: Synthetic oligonucleotide
  Target: SCNA; (+) strand; PAM type: YTN; PAM sequence: TTT
attcaattctatgacttata

SEQ ID NO: 65211 - DNA, 20 bp, Artificial Sequence
  Description of Artificial Sequence: Synthetic oligonucleotide
  Target: SCNA; (+) strand; PAM type: YTN; PAM sequence: TTA
ttcaattctatgacttataa

SEQ ID NO: 65212 - DNA, 20 bp, Artificial Sequence
  Description of Artificial Sequence: Synthetic oligonucleotide
  Target: SCNA; (+) strand; PAM type: YTN; PAM sequence: TTC
aattctatgacttataactt

SEQ ID NO: 65213 - DNA, 20 bp, Artificial Sequence
  Description of Artificial Sequence: Synthetic oligonucleotide
  Target: SCNA; (+) strand; PAM type: YTN; PAM sequence: TTC
tatgacttataactttaatt

SEQ ID NO: 65214 - DNA, 20 bp, Artificial Sequence
  Description of Artificial Sequence: Synthetic oligonucleotide
  Target: SCNA; (+) strand; PAM type: YTN; PAM sequence: CTA
tgacttataactttaatttt

SEQ ID NO: 65215 - DNA, 20 bp, Artificial Sequence
  Description of Artificial Sequence: Synthetic oligonucleotide
  Target: SCNA; (+) strand; PAM type: YTN; PAM sequence: CTT
ataactttaattttaaatat

SEQ ID NO: 65216 - DNA, 20 bp, Artificial Sequence
  Description of Artificial Sequence: Synthetic oligonucleotide
  Target: SCNA; (+) strand; PAM type: YTN; PAM sequence: TTA
taactttaattttaaatata

SEQ ID NO: 65217 - DNA, 20 bp, Artificial Sequence
  Description of Artificial Sequence: Synthetic oligonucleotide
  Target: SCNA; (+) strand; PAM type: YTN; PAM sequence: CTT
taattttaaatatatttaaa

SEQ ID NO: 65218 - DNA, 20 bp, Artificial Sequence
  Description of Artificial Sequence: Synthetic oligonucleotide
  Target: SCNA; (+) strand; PAM type: YTN; PAM sequence: TTT
aattttaaatatatttaaaa

SEQ ID NO: 65219 - DNA, 20 bp, Artificial Sequence
  Description of Artificial Sequence: Synthetic oligonucleotide
  Target: SCNA; (+) strand; PAM type: YTN; PAM sequence: TTA
attttaaatatatttaaaat

SEQ ID NO: 65220 - DNA, 20 bp, Artificial Sequence
  Description of Artificial Sequence: Synthetic oligonucleotide
  Target: SCNA; (+) strand; PAM type: YTN; PAM sequence: TTT
taaatatatttaaaatgaca

SEQ ID NO: 65221 - DNA, 20 bp, Artificial Sequence
  Description of Artificial Sequence: Synthetic oligonucleotide
  Target: SCNA; (+) strand; PAM type: YTN; PAM sequence: TTT
aaatatatttaaaatgacac

SEQ ID NO: 65222 - DNA, 20 bp, Artificial Sequence
  Description of Artificial Sequence: Synthetic oligonucleotide
  Target: SCNA; (+) strand; PAM type: YTN; PAM sequence: TTA
aatatatttaaaatgacaca

SEQ ID NO: 65223 - DNA, 20 bp, Artificial Sequence
  Description of Artificial Sequence: Synthetic oligonucleotide
  Target: SCNA; (+) strand; PAM type: YTN; PAM sequence: TTT
aaaatgacacataataaagg

SEQ ID NO: 65224 - DNA, 20 bp, Artificial Sequence
  Description of Artificial Sequence: Synthetic oligonucleotide
  Target: SCNA; (+) strand; PAM type: YTN; PAM sequence: TTA
aaatgacacataataaaggc

SEQ ID NO: 65225 - DNA, 20 bp, Artificial Sequence
  Description of Artificial Sequence: Synthetic oligonucleotide
  Target: SCNA; (+) strand; PAM type: YTN; PAM sequence: TTG
ctttccaaaccacactcttc

SEQ ID NO: 65226 - DNA, 20 bp, Artificial Sequence
  Description of Artificial Sequence: Synthetic oligonucleotide
  Target: SCNA; (+) strand; PAM type: YTN; PAM sequence: CTT
tccaaaccacactcttctag

SEQ ID NO: 65227 - DNA, 20 bp, Artificial Sequence
  Description of Artificial Sequence: Synthetic oligonucleotide
  Target: SCNA; (+) strand; PAM type: YTN; PAM sequence: TTT
ccaaaccacactcttctaga

SEQ ID NO: 65228 - DNA, 20 bp, Artificial Sequence
  Description of Artificial Sequence: Synthetic oligonucleotide
  Target: SCNA; (+) strand; PAM type: YTN; PAM sequence: TTC
caaaccacactcttctagaa

SEQ ID NO: 65229 - DNA, 20 bp, Artificial Sequence
  Description of Artificial Sequence: Synthetic oligonucleotide
  Target: SCNA; (+) strand; PAM type: YTN; PAM sequence: CTC
ttctagaatcatctagggcc

SEQ ID NO: 65230 - DNA, 20 bp, Artificial Sequence
  Description of Artificial Sequence: Synthetic oligonucleotide
  Target: SCNA; (+) strand; PAM type: YTN; PAM sequence: CTT
ctagaatcatctagggccct

SEQ ID NO: 65231 - DNA, 20 bp, Artificial Sequence
  Description of Artificial Sequence: Synthetic oligonucleotide
  Target: SCNA; (+) strand; PAM type: YTN; PAM sequence: TTC
tagaatcatctagggccctt

SEQ ID NO: 65232 - DNA, 20 bp, Artificial Sequence
  Description of Artificial Sequence: Synthetic oligonucleotide
  Target: SCNA; (+) strand; PAM type: YTN; PAM sequence: CTA
gaatcatctagggcccttgt

SEQ ID NO: 65233 - DNA, 20 bp, Artificial Sequence
  Description of Artificial Sequence: Synthetic oligonucleotide
  Target: SCNA; (+) strand; PAM type: YTN; PAM sequence: CTA
gggcccttgttaaaaatgca

SEQ ID NO: 65234 - DNA, 20 bp, Artificial Sequence
  Description of Artificial Sequence: Synthetic oligonucleotide
  Target: SCNA; (+) strand; PAM type: YTN; PAM sequence: CTT
gttaaaaatgcaggtttgta

SEQ ID NO: 65235 - DNA, 20 bp, Artificial Sequence
  Description of Artificial Sequence: Synthetic oligonucleotide
  Target: SCNA; (+) strand; PAM type: YTN; PAM sequence: TTG
ttaaaaatgcaggtttgtag

SEQ ID NO: 65236 - DNA, 20 bp, Artificial Sequence
  Description of Artificial Sequence: Synthetic oligonucleotide
  Target: SCNA; (+) strand; PAM type: YTN; PAM sequence: TTA
aaaatgcaggtttgtagggc

SEQ ID NO: 65237 - DNA, 20 bp, Artificial Sequence
  Description of Artificial Sequence: Synthetic oligonucleotide
  Target: SCNA; (+) strand; PAM type: YTN; PAM sequence: TTT
gtagggccttgtgagtgtct

SEQ ID NO: 65238 - DNA, 20 bp, Artificial Sequence
  Description of Artificial Sequence: Synthetic oligonucleotide
  Target: SCNA; (+) strand; PAM type: YTN; PAM sequence: TTG
tagggccttgtgagtgtctt

SEQ ID NO: 65239 - DNA, 20 bp, Artificial Sequence
  Description of Artificial Sequence: Synthetic oligonucleotide
  Target: SCNA; (+) strand; PAM type: YTN; PAM sequence: CTT
gtgagtgtcttgttaagtat

SEQ ID NO: 65240 - DNA, 20 bp, Artificial Sequence
  Description of Artificial Sequence: Synthetic oligonucleotide
  Target: SCNA; (+) strand; PAM type: YTN; PAM sequence: TTG
tgagtgtcttgttaagtatg

SEQ ID NO: 65241 - DNA, 20 bp, Artificial Sequence
  Description of Artificial Sequence: Synthetic oligonucleotide
  Target: SCNA; (+) strand; PAM type: YTN; PAM sequence: CTT
gttaagtatgttccttggaa

SEQ ID NO: 65242 - DNA, 20 bp, Artificial Sequence
  Description of Artificial Sequence: Synthetic oligonucleotide
  Target: SCNA; (+) strand; PAM type: YTN; PAM sequence: TTG
ttaagtatgttccttggaaa

SEQ ID NO: 65243 - DNA, 20 bp, Artificial Sequence
  Description of Artificial Sequence: Synthetic oligonucleotide
  Target: SCNA; (+) strand; PAM type: YTN; PAM sequence: TTA
agtatgttccttggaaacca

SEQ ID NO: 65244 - DNA, 20 bp, Artificial Sequence
  Description of Artificial Sequence: Synthetic oligonucleotide
  Target: SCNA; (+) strand; PAM type: YTN; PAM sequence: TTC
cttggaaaccactgcccgac

SEQ ID NO: 65245 - DNA, 20 bp, Artificial Sequence
  Description of Artificial Sequence: Synthetic oligonucleotide
  Target: SCNA; (+) strand; PAM type: YTN; PAM sequence: CTT
ggaaaccactgcccgacatc

SEQ ID NO: 65246 - DNA, 20 bp, Artificial Sequence
  Description of Artificial Sequence: Synthetic oligonucleotide
  Target: SCNA; (+) strand; PAM type: YTN; PAM sequence: TTG
gaaaccactgcccgacatca

SEQ ID NO: 65247 - DNA, 20 bp, Artificial Sequence
  Description of Artificial Sequence: Synthetic oligonucleotide
  Target: SCNA; (+) strand; PAM type: YTN; PAM sequence: CTG
cccgacatcaccaattgttt

SEQ ID NO: 65248 - DNA, 20 bp, Artificial Sequence
  Description of Artificial Sequence: Synthetic oligonucleotide
  Target: SCNA; (+) strand; PAM type: YTN; PAM sequence: TTG
tttgtaaaccctgtggtata

SEQ ID NO: 65249 - DNA, 20 bp, Artificial Sequence
  Description of Artificial Sequence: Synthetic oligonucleotide
  Target: SCNA; (+) strand; PAM type: YTN; PAM sequence: TTT
gtaaaccctgtggtataatt

SEQ ID NO: 65250 - DNA, 20 bp, Artificial Sequence
  Description of Artificial Sequence: Synthetic oligonucleotide
  Target: SCNA; (+) strand; PAM type: YTN; PAM sequence: TTG
taaaccctgtggtataattt

SEQ ID NO: 65251 - DNA, 20 bp, Artificial Sequence
  Description of Artificial Sequence: Synthetic oligonucleotide
  Target: SCNA; (+) strand; PAM type: YTN; PAM sequence: CTG
tggtataatttaatatagag

SEQ ID NO: 65252 - DNA, 20 bp, Artificial Sequence
  Description of Artificial Sequence: Synthetic oligonucleotide
  Target: SCNA; (+) strand; PAM type: YTN; PAM sequence: TTT
aatatagagtataccaatgt

SEQ ID NO: 65253 - DNA, 20 bp, Artificial Sequence
  Description of Artificial Sequence: Synthetic oligonucleotide
  Target: SCNA; (+) strand; PAM type: YTN; PAM sequence: TTA
atatagagtataccaatgta

SEQ ID NO: 65254 - DNA, 20 bp, Artificial Sequence
  Description of Artificial Sequence: Synthetic oligonucleotide
  Target: SCNA; (+) strand; PAM type: YTN; PAM sequence: CTT
gctgtcagtgtgaataattt

SEQ ID NO: 65255 - DNA, 20 bp, Artificial Sequence
  Description of Artificial Sequence: Synthetic oligonucleotide
  Target: SCNA; (+) strand; PAM type: YTN; PAM sequence: TTG
ctgtcagtgtgaataatttt

SEQ ID NO: 65256 - DNA, 20 bp, Artificial Sequence
  Description of Artificial Sequence: Synthetic oligonucleotide
  Target: SCNA; (+) strand; PAM type: YTN; PAM sequence: CTG
tcagtgtgaataattttttt

SEQ ID NO: 65257 - DNA, 20 bp, Artificial Sequence
  Description of Artificial Sequence: Synthetic oligonucleotide
  Target: SCNA; (+) strand; PAM type: YTN; PAM sequence: TTT
tttttaaaaaagatatgctc

SEQ ID NO: 65258 - DNA, 20 bp, Artificial Sequence
  Description of Artificial Sequence: Synthetic oligonucleotide
  Target: SCNA; (+) strand; PAM type: YTN; PAM sequence: TTT
ttttaaaaaagatatgctca

SEQ ID NO: 65259 - DNA, 20 bp, Artificial Sequence
  Description of Artificial Sequence: Synthetic oligonucleotide
  Target: SCNA; (+) strand; PAM type: YTN; PAM sequence: TTT
tttaaaaaagatatgctcat

SEQ ID NO: 65260 - DNA, 20 bp, Artificial Sequence
  Description of Artificial Sequence: Synthetic oligonucleotide
  Target: SCNA; (+) strand; PAM type: YTN; PAM sequence: TTT
ttaaaaaagatatgctcatt

SEQ ID NO: 65261 - DNA, 20 bp, Artificial Sequence
  Description of Artificial Sequence: Synthetic oligonucleotide
  Target: SCNA; (+) strand; PAM type: YTN; PAM sequence: TTT
taaaaaagatatgctcattt

SEQ ID NO: 65262 - DNA, 20 bp, Artificial Sequence
  Description of Artificial Sequence: Synthetic oligonucleotide
  Target: SCNA; (+) strand; PAM type: YTN; PAM sequence: TTT
aaaaaagatatgctcatttt

SEQ ID NO: 65263 - DNA, 20 bp, Artificial Sequence
  Description of Artificial Sequence: Synthetic oligonucleotide
  Target: SCNA; (+) strand; PAM type: YTN; PAM sequence: TTA
aaaaagatatgctcattttg

SEQ ID NO: 65264 - DNA, 20 bp, Artificial Sequence
  Description of Artificial Sequence: Synthetic oligonucleotide
  Target: SCNA; (+) strand; PAM type: YTN; PAM sequence: CTC
attttgaagtccatcaaatg

SEQ ID NO: 65265 - DNA, 20 bp, Artificial Sequence
  Description of Artificial Sequence: Synthetic oligonucleotide
  Target: SCNA; (+) strand; PAM type: YTN; PAM sequence: TTT
tgaagtccatcaaatgttgg

SEQ ID NO: 65266 - DNA, 20 bp, Artificial Sequence
  Description of Artificial Sequence: Synthetic oligonucleotide
  Target: SCNA; (+) strand; PAM type: YTN; PAM sequence: TTT
gaagtccatcaaatgttggc

SEQ ID NO: 65267 - DNA, 20 bp, Artificial Sequence
  Description of Artificial Sequence: Synthetic oligonucleotide
  Target: SCNA; (+) strand; PAM type: YTN; PAM sequence: TTG
aagtccatcaaatgttggca

SEQ ID NO: 65268 - DNA, 20 bp, Artificial Sequence
  Description of Artificial Sequence: Synthetic oligonucleotide
  Target: SCNA; (+) strand; PAM type: YTN; PAM sequence: TTG
gcaaatgttgagggttatct

SEQ ID NO: 65269 - DNA, 20 bp, Artificial Sequence
  Description of Artificial Sequence: Synthetic oligonucleotide
  Target: SCNA; (+) strand; PAM type: YTN; PAM sequence: TTG
agggttatctgaagacactg

SEQ ID NO: 65270 - DNA, 20 bp, Artificial Sequence
  Description of Artificial Sequence: Synthetic oligonucleotide
  Target: SCNA; (+) strand; PAM type: YTN; PAM sequence: TTA
tctgaagacactgggaagta

SEQ ID NO: 65271 - DNA, 20 bp, Artificial Sequence
  Description of Artificial Sequence: Synthetic oligonucleotide
  Target: SCNA; (+) strand; PAM type: YTN; PAM sequence: CTG
aagacactgggaagtaatcc

SEQ ID NO: 65272 - DNA, 20 bp, Artificial Sequence
  Description of Artificial Sequence: Synthetic oligonucleotide
  Target: SCNA; (+) strand; PAM type: YTN; PAM sequence: CTG
ggaagtaatccatggtgatc

SEQ ID NO: 65273 - DNA, 20 bp, Artificial Sequence
  Description of Artificial Sequence: Synthetic oligonucleotide
  Target: SCNA; (+) strand; PAM type: YTN; PAM sequence: TTA
aaatagcaaggtttcatcaa

SEQ ID NO: 65274 - DNA, 20 bp, Artificial Sequence
  Description of Artificial Sequence: Synthetic oligonucleotide
  Target: SCNA; (+) strand; PAM type: YTN; PAM sequence: TTT
catcaattatctggtatcta

SEQ ID NO: 65275 - DNA, 20 bp, Artificial Sequence
  Description of Artificial Sequence: Synthetic oligonucleotide
  Target: SCNA; (+) strand; PAM type: YTN; PAM sequence: TTC
atcaattatctggtatctat

SEQ ID NO: 65276 - DNA, 20 bp, Artificial Sequence
  Description of Artificial Sequence: Synthetic oligonucleotide
  Target: SCNA; (+) strand; PAM type: YTN; PAM sequence: TTA
tctggtatctatgctttgtc

SEQ ID NO: 65277 - DNA, 20 bp, Artificial Sequence
  Description of Artificial Sequence: Synthetic oligonucleotide
  Target: SCNA; (+) strand; PAM type: YTN; PAM sequence: CTG
gtatctatgctttgtcaaag

SEQ ID NO: 65278 - DNA, 20 bp, Artificial Sequence
  Description of Artificial Sequence: Synthetic oligonucleotide
  Target: SCNA; (+) strand; PAM type: YTN; PAM sequence: CTA
tgctttgtcaaagttagaaa

SEQ ID NO: 65279 - DNA, 20 bp, Artificial Sequence
  Description of Artificial Sequence: Synthetic oligonucleotide
  Target: SCNA; (+) strand; PAM type: YTN; PAM sequence: CTT
tgtcaaagttagaaatgtag

SEQ ID NO: 65280 - DNA, 20 bp, Artificial Sequence
  Description of Artificial Sequence: Synthetic oligonucleotide
  Target: SCNA; (+) strand; PAM type: YTN; PAM sequence: TTT
gtcaaagttagaaatgtaga

SEQ ID NO: 65281 - DNA, 20 bp, Artificial Sequence
  Description of Artificial Sequence: Synthetic oligonucleotide
  Target: SCNA; (+) strand; PAM type: YTN; PAM sequence: TTG
tcaaagttagaaatgtagag

SEQ ID NO: 65282 - DNA, 20 bp, Artificial Sequence
  Description of Artificial Sequence: Synthetic oligonucleotide
  Target: SCNA; (+) strand; PAM type: YTN; PAM sequence: TTA
gaaatgtagagatacatttc

SEQ ID NO: 65283 - DNA, 20 bp, Artificial Sequence
  Description of Artificial Sequence: Synthetic oligonucleotide
  Target: SCNA; (+) strand; PAM type: YTN; PAM sequence: TTT
ctaaattaaaacttttatgt

SEQ ID NO: 65284 - DNA, 20 bp, Artificial Sequence
  Description of Artificial Sequence: Synthetic oligonucleotide
  Target: SCNA; (+) strand; PAM type: YTN; PAM sequence: TTC
taaattaaaacttttatgtg

SEQ ID NO: 65285 - DNA, 20 bp, Artificial Sequence
  Description of Artificial Sequence: Synthetic oligonucleotide
  Target: SCNA; (+) strand; PAM type: YTN; PAM sequence: CTA
aattaaaacttttatgtggg

SEQ ID NO: 65286 - DNA, 20 bp, Artificial Sequence
  Description of Artificial Sequence: Synthetic oligonucleotide
  Target: SCNA; (+) strand; PAM type: YTN; PAM sequence: TTA
aaacttttatgtgggaagaa

SEQ ID NO: 65287 - DNA, 20 bp, Artificial Sequence
  Description of Artificial Sequence: Synthetic oligonucleotide
  Target: SCNA; (+) strand; PAM type: YTN; PAM sequence: CTT
ttatgtgggaagaaaaattg

SEQ ID NO: 65288 - DNA, 20 bp, Artificial Sequence
  Description of Artificial Sequence: Synthetic oligonucleotide
  Target: SCNA; (+) strand; PAM type: YTN; PAM sequence: TTT
tatgtgggaagaaaaattga

SEQ ID NO: 65289 - DNA, 20 bp, Artificial Sequence
  Description of Artificial Sequence: Synthetic oligonucleotide
  Target: SCNA; (+) strand; PAM type: YTN; PAM sequence: TTT
atgtgggaagaaaaattgaa

SEQ ID NO: 65290 - DNA, 20 bp, Artificial Sequence
  Description of Artificial Sequence: Synthetic oligonucleotide
  Target: SCNA; (+) strand; PAM type: YTN; PAM sequence: TTA
tgtgggaagaaaaattgaaa

SEQ ID NO: 65291 - DNA, 20 bp, Artificial Sequence
  Description of Artificial Sequence: Synthetic oligonucleotide
  Target: SCNA; (+) strand; PAM type: YTN; PAM sequence: TTG
aaattcaaggctggttggtc

SEQ ID NO: 65292 - DNA, 20 bp, Artificial Sequence
  Description of Artificial Sequence: Synthetic oligonucleotide
  Target: SCNA; (+) strand; PAM type: YTN; PAM sequence: TTC
aaggctggttggtctttggt

SEQ ID NO: 65293 - DNA, 20 bp, Artificial Sequence
  Description of Artificial Sequence: Synthetic oligonucleotide
  Target: SCNA; (+) strand; PAM type: YTN; PAM sequence: CTG
gttggtctttggtataccca

SEQ ID NO: 65294 - DNA, 20 bp, Artificial Sequence
  Description of Artificial Sequence: Synthetic oligonucleotide
  Target: SCNA; (+) strand; PAM type: YTN; PAM sequence: TTG
gtctttggtatacccaaaga

SEQ ID NO: 65295 - DNA, 20 bp, Artificial Sequence
  Description of Artificial Sequence: Synthetic oligonucleotide
  Target: SCNA; (+) strand; PAM type: YTN; PAM sequence: CTT
tggtatacccaaagaacaaa

SEQ ID NO: 65296 - DNA, 20 bp, Artificial Sequence
  Description of Artificial Sequence: Synthetic oligonucleotide
  Target: SCNA; (+) strand; PAM type: YTN; PAM sequence: TTT
ggtatacccaaagaacaaag

SEQ ID NO: 65297 - DNA, 20 bp, Artificial Sequence
  Description of Artificial Sequence: Synthetic oligonucleotide
  Target: SCNA; (+) strand; PAM type: YTN; PAM sequence: TTG
gtatacccaaagaacaaaga

SEQ ID NO: 65298 - DNA, 20 bp, Artificial Sequence
  Description of Artificial Sequence: Synthetic oligonucleotide
  Target: SCNA; (+) strand; PAM type: YTN; PAM sequence: TTG
gaggtgttctgaaaaagaga

SEQ ID NO: 65299 - DNA, 20 bp, Artificial Sequence
  Description of Artificial Sequence: Synthetic oligonucleotide
  Target: SCNA; (+) strand; PAM type: YTN; PAM sequence: TTC
tgaaaaagagaaatgataca

SEQ ID NO: 65300 - DNA, 20 bp, Artificial Sequence
  Description of Artificial Sequence: Synthetic oligonucleotide
  Target: SCNA; (+) strand; PAM type: YTN; PAM sequence: CTG
aaaaagagaaatgatacacg

SEQ ID NO: 65301 - DNA, 20 bp, Artificial Sequence
  Description of Artificial Sequence: Synthetic oligonucleotide
  Target: SCNA; (+) strand; PAM type: YTN; PAM sequence: CTG
ctctttgagaaagttcattg

SEQ ID NO: 65302 - DNA, 20 bp, Artificial Sequence
  Description of Artificial Sequence: Synthetic oligonucleotide
  Target: SCNA; (+) strand; PAM type: YTN; PAM sequence: CTC
tttgagaaagttcattggca

SEQ ID NO: 65303 - DNA, 20 bp, Artificial Sequence
  Description of Artificial Sequence: Synthetic oligonucleotide
  Target: SCNA; (+) strand; PAM type: YTN; PAM sequence: CTT
tgagaaagttcattggcact

SEQ ID NO: 65304 - DNA, 20 bp, Artificial Sequence
  Description of Artificial Sequence: Synthetic oligonucleotide
  Target: SCNA; (+) strand; PAM type: YTN; PAM sequence: TTT
gagaaagttcattggcacta

SEQ ID NO: 65305 - DNA, 20 bp, Artificial Sequence
  Description of Artificial Sequence: Synthetic oligonucleotide
  Target: SCNA; (+) strand; PAM type: YTN; PAM sequence: TTG
agaaagttcattggcactag

SEQ ID NO: 65306 - DNA, 20 bp, Artificial Sequence
  Description of Artificial Sequence: Synthetic oligonucleotide
  Target: SCNA; (+) strand; PAM type: YTN; PAM sequence: TTC
attggcactagaaaggttct

SEQ ID NO: 65307 - DNA, 20 bp, Artificial Sequence
  Description of Artificial Sequence: Synthetic oligonucleotide
  Target: SCNA; (+) strand; PAM type: YTN; PAM sequence: TTG
gcactagaaaggttctgggg

SEQ ID NO: 65308 - DNA, 20 bp, Artificial Sequence
  Description of Artificial Sequence: Synthetic oligonucleotide
  Target: SCNA; (+) strand; PAM type: YTN; PAM sequence: CTA
gaaaggttctggggagctag

SEQ ID NO: 65309 - DNA, 20 bp, Artificial Sequence
  Description of Artificial Sequence: Synthetic oligonucleotide
  Target: SCNA; (+) strand; PAM type: YTN; PAM sequence: TTC
tggggagctagtaagcttca

SEQ ID NO: 65310 - DNA, 20 bp, Artificial Sequence
  Description of Artificial Sequence: Synthetic oligonucleotide
  Target: SCNA; (+) strand; PAM type: YTN; PAM sequence: CTG
gggagctagtaagcttcaat

SEQ ID NO: 65311 - DNA, 20 bp, Artificial Sequence
  Description of Artificial Sequence: Synthetic oligonucleotide
  Target: SCNA; (+) strand; PAM type: YTN; PAM sequence: CTA
gtaagcttcaattggtgagt

SEQ ID NO: 65312 - DNA, 20 bp, Artificial Sequence
  Description of Artificial Sequence: Synthetic oligonucleotide
  Target: SCNA; (+) strand; PAM type: YTN; PAM sequence: CTT
caattggtgagtgacagtgg

SEQ ID NO: 65313 - DNA, 20 bp, Artificial Sequence
  Description of Artificial Sequence: Synthetic oligonucleotide
  Target: SCNA; (+) strand; PAM type: YTN; PAM sequence: TTC
aattggtgagtgacagtggt

SEQ ID NO: 65314 - DNA, 20 bp, Artificial Sequence
  Description of Artificial Sequence: Synthetic oligonucleotide
  Target: SCNA; (+) strand; PAM type: YTN; PAM sequence: TTG
gtgagtgacagtggtgggca

SEQ ID NO: 65315 - DNA, 20 bp, Artificial Sequence
  Description of Artificial Sequence: Synthetic oligonucleotide
  Target: SCNA; (+) strand; PAM type: YTN; PAM sequence: TTA
gtcctagagctgcagcaagt

SEQ ID NO: 65316 - DNA, 20 bp, Artificial Sequence
  Description of Artificial Sequence: Synthetic oligonucleotide
  Target: SCNA; (+) strand; PAM type: YTN; PAM sequence: CTA
gagctgcagcaagttttttc

SEQ ID NO: 65317 - DNA, 20 bp, Artificial Sequence
  Description of Artificial Sequence: Synthetic oligonucleotide
  Target: SCNA; (+) strand; PAM type: YTN; PAM sequence: CTG
cagcaagttttttcagcagt

SEQ ID NO: 65318 - DNA, 20 bp, Artificial Sequence
  Description of Artificial Sequence: Synthetic oligonucleotide
  Target: SCNA; (+) strand; PAM type: YTN; PAM sequence: TTT
tttcagcagttacagaaaaa

SEQ ID NO: 65319 - DNA, 20 bp, Artificial Sequence
  Description of Artificial Sequence: Synthetic oligonucleotide
  Target: SCNA; (+) strand; PAM type: YTN; PAM sequence: TTT
ttcagcagttacagaaaaaa

SEQ ID NO: 65320 - DNA, 20 bp, Artificial Sequence
  Description of Artificial Sequence: Synthetic oligonucleotide
  Target: SCNA; (+) strand; PAM type: YTN; PAM sequence: TTT
tcagcagttacagaaaaaat

SEQ ID NO: 65321 - DNA, 20 bp, Artificial Sequence
  Description of Artificial Sequence: Synthetic oligonucleotide
  Target: SCNA; (+) strand; PAM type: YTN; PAM sequence: TTT
cagcagttacagaaaaaatt

SEQ ID NO: 65322 - DNA, 20 bp, Artificial Sequence
  Description of Artificial Sequence: Synthetic oligonucleotide
  Target: SCNA; (+) strand; PAM type: YTN; PAM sequence: TTC
agcagttacagaaaaaattg

SEQ ID NO: 65323 - DNA, 20 bp, Artificial Sequence
  Description of Artificial Sequence: Synthetic oligonucleotide
  Target: SCNA; (+) strand; PAM type: YTN; PAM sequence: TTA
cagaaaaaattggtcccagg

SEQ ID NO: 65324 - DNA, 20 bp, Artificial Sequence
  Description of Artificial Sequence: Synthetic oligonucleotide
  Target: SCNA; (+) strand; PAM type: YTN; PAM sequence: TTG
gtcccaggttacaacaggca

SEQ ID NO: 65325 - DNA, 20 bp, Artificial Sequence
  Description of Artificial Sequence: Synthetic oligonucleotide
  Target: SCNA; (+) strand; PAM type: YTN; PAM sequence: TTA
caacaggcagcctcagcatg

SEQ ID NO: 65326 - DNA, 20 bp, Artificial Sequence
  Description of Artificial Sequence: Synthetic oligonucleotide
  Target: SCNA; (+) strand; PAM type: YTN; PAM sequence: CTC
agcatgcggacttgtagaaa

SEQ ID NO: 65327 - DNA, 20 bp, Artificial Sequence
  Description of Artificial Sequence: Synthetic oligonucleotide
  Target: SCNA; (+) strand; PAM type: YTN; PAM sequence: CTT
gtagaaaattacacttttgg

SEQ ID NO: 65328 - DNA, 20 bp, Artificial Sequence
  Description of Artificial Sequence: Synthetic oligonucleotide
  Target: SCNA; (+) strand; PAM type: YTN; PAM sequence: TTG
tagaaaattacacttttgga

SEQ ID NO: 65329 - DNA, 20 bp, Artificial Sequence
  Description of Artificial Sequence: Synthetic oligonucleotide
  Target: SCNA; (+) strand; PAM type: YTN; PAM sequence: TTA
cacttttggagcaatgtgat

SEQ ID NO: 65330 - DNA, 20 bp, Artificial Sequence
  Description of Artificial Sequence: Synthetic oligonucleotide
  Target: SCNA; (+) strand; PAM type: YTN; PAM sequence: CTT
ttggagcaatgtgatgtttc

SEQ ID NO: 65331 - DNA, 20 bp, Artificial Sequence
  Description of Artificial Sequence: Synthetic oligonucleotide
  Target: SCNA; (+) strand; PAM type: YTN; PAM sequence: TTT
tggagcaatgtgatgtttct

SEQ ID NO: 65332 - DNA, 20 bp, Artificial Sequence
  Description of Artificial Sequence: Synthetic oligonucleotide
  Target: SCNA; (+) strand; PAM type: YTN; PAM sequence: TTT
ggagcaatgtgatgtttctt

SEQ ID NO: 65333 - DNA, 20 bp, Artificial Sequence
  Description of Artificial Sequence: Synthetic oligonucleotide
  Target: SCNA; (+) strand; PAM type: YTN; PAM sequence: TTG
gagcaatgtgatgtttcttg

SEQ ID NO: 65334 - DNA, 20 bp, Artificial Sequence
  Description of Artificial Sequence: Synthetic oligonucleotide
  Target: SCNA; (+) strand; PAM type: YTN; PAM sequence: TTT
cttgaatgcttttcctccca

SEQ ID NO: 65335 - DNA, 20 bp, Artificial Sequence
  Description of Artificial Sequence: Synthetic oligonucleotide
  Target: SCNA; (+) strand; PAM type: YTN; PAM sequence: TTC
ttgaatgcttttcctcccag

SEQ ID NO: 65336 - DNA, 20 bp, Artificial Sequence
  Description of Artificial Sequence: Synthetic oligonucleotide
  Target: SCNA; (+) strand; PAM type: YTN; PAM sequence: CTT
gaatgcttttcctcccaggc

SEQ ID NO: 65337 - DNA, 20 bp, Artificial Sequence
  Description of Artificial Sequence: Synthetic oligonucleotide
  Target: SCNA; (+) strand; PAM type: YTN; PAM sequence: TTG
aatgcttttcctcccaggct

SEQ ID NO: 65338 - DNA, 20 bp, Artificial Sequence
  Description of Artificial Sequence: Synthetic oligonucleotide
  Target: SCNA; (+) strand; PAM type: YTN; PAM sequence: CTT
ttcctcccaggcttcttgat

SEQ ID NO: 65339 - DNA, 20 bp, Artificial Sequence
  Description of Artificial Sequence: Synthetic oligonucleotide
  Target: SCNA; (+) strand; PAM type: YTN; PAM sequence: TTT
tcctcccaggcttcttgatt

SEQ ID NO: 65340 - DNA, 20 bp, Artificial Sequence
  Description of Artificial Sequence: Synthetic oligonucleotide
  Target: SCNA; (+) strand; PAM type: YTN; PAM sequence: TTT
cctcccaggcttcttgattg

SEQ ID NO: 65341 - DNA, 20 bp, Artificial Sequence
  Description of Artificial Sequence: Synthetic oligonucleotide
  Target: SCNA; (+) strand; PAM type: YTN; PAM sequence: TTC
ctcccaggcttcttgattgt

SEQ ID NO: 65342 - DNA, 20 bp, Artificial Sequence
  Description of Artificial Sequence: Synthetic oligonucleotide
  Target: SCNA; (+) strand; PAM type: YTN; PAM sequence: CTC
ccaggcttcttgattgtttt

SEQ ID NO: 65343 - DNA, 20 bp, Artificial Sequence
  Description of Artificial Sequence: Synthetic oligonucleotide
  Target: SCNA; (+) strand; PAM type: YTN; PAM sequence: CTT
cttgattgttttagttgggt

SEQ ID NO: 65344 - DNA, 20 bp, Artificial Sequence
  Description of Artificial Sequence: Synthetic oligonucleotide
  Target: SCNA; (+) strand; PAM type: YTN; PAM sequence: TTC
ttgattgttttagttgggta

SEQ ID NO: 65345 - DNA, 20 bp, Artificial Sequence
  Description of Artificial Sequence: Synthetic oligonucleotide
  Target: SCNA; (+) strand; PAM type: YTN; PAM sequence: CTT
gattgttttagttgggtata

SEQ ID NO: 65346 - DNA, 20 bp, Artificial Sequence
  Description of Artificial Sequence: Synthetic oligonucleotide
  Target: SCNA; (+) strand; PAM type: YTN; PAM sequence: TTG
attgttttagttgggtataa

SEQ ID NO: 65347 - DNA, 20 bp, Artificial Sequence
  Description of Artificial Sequence: Synthetic oligonucleotide
  Target: SCNA; (+) strand; PAM type: YTN; PAM sequence: TTG
ttttagttgggtataacaag

SEQ ID NO: 65348 - DNA, 20 bp, Artificial Sequence
  Description of Artificial Sequence: Synthetic oligonucleotide
  Target: SCNA; (+) strand; PAM type: YTN; PAM sequence: TTT
tagttgggtataacaagaat

SEQ ID NO: 65349 - DNA, 20 bp, Artificial Sequence
  Description of Artificial Sequence: Synthetic oligonucleotide
  Target: SCNA; (+) strand; PAM type: YTN; PAM sequence: TTT
agttgggtataacaagaatg

SEQ ID NO: 65350 - DNA, 20 bp, Artificial Sequence
  Description of Artificial Sequence: Synthetic oligonucleotide
  Target: SCNA; (+) strand; PAM type: YTN; PAM sequence: TTA
gttgggtataacaagaatga

SEQ ID NO: 65351 - DNA, 20 bp, Artificial Sequence
  Description of Artificial Sequence: Synthetic oligonucleotide
  Target: SCNA; (+) strand; PAM type: YTN; PAM sequence: TTG
ggtataacaagaatgaccca

SEQ ID NO: 65352 - DNA, 20 bp, Artificial Sequence
  Description of Artificial Sequence: Synthetic oligonucleotide
  Target: SCNA; (+) strand; PAM type: YTN; PAM sequence: TTT
gtgtgatcaactttcacagc

SEQ ID NO: 65353 - DNA, 20 bp, Artificial Sequence
  Description of Artificial Sequence: Synthetic oligonucleotide
  Target: SCNA; (+) strand; PAM type: YTN; PAM sequence: TTG
tgtgatcaactttcacagcc

SEQ ID NO: 65354 - DNA, 20 bp, Artificial Sequence
  Description of Artificial Sequence: Synthetic oligonucleotide
  Target: SCNA; (+) strand; PAM type: YTN; PAM sequence: CTT
tcacagccttaaacattcaa

SEQ ID NO: 65355 - DNA, 20 bp, Artificial Sequence
  Description of Artificial Sequence: Synthetic oligonucleotide
  Target: SCNA; (+) strand; PAM type: YTN; PAM sequence: TTT
cacagccttaaacattcaaa

SEQ ID NO: 65356 - DNA, 20 bp, Artificial Sequence
  Description of Artificial Sequence: Synthetic oligonucleotide
  Target: SCNA; (+) strand; PAM type: YTN; PAM sequence: TTC
acagccttaaacattcaaag

SEQ ID NO: 65357 - DNA, 20 bp, Artificial Sequence
  Description of Artificial Sequence: Synthetic oligonucleotide
  Target: SCNA; (+) strand; PAM type: YTN; PAM sequence: CTT
aaacattcaaagcagcagaa

SEQ ID NO: 65358 - DNA, 20 bp, Artificial Sequence
  Description of Artificial Sequence: Synthetic oligonucleotide
  Target: SCNA; (+) strand; PAM type: YTN; PAM sequence: TTA
aacattcaaagcagcagaag

SEQ ID NO: 65359 - DNA, 20 bp, Artificial Sequence
  Description of Artificial Sequence: Synthetic oligonucleotide
  Target: SCNA; (+) strand; PAM type: YTN; PAM sequence: TTC
aaagcagcagaagcgcactt

SEQ ID NO: 65360 - DNA, 20 bp, Artificial Sequence
  Description of Artificial Sequence: Synthetic oligonucleotide
  Target: SCNA; (+) strand; PAM type: YTN; PAM sequence: CTT
tctcttttgcccactgcttt

SEQ ID NO: 65361 - DNA, 20 bp, Artificial Sequence
  Description of Artificial Sequence: Synthetic oligonucleotide
  Target: SCNA; (+) strand; PAM type: YTN; PAM sequence: TTT
ctcttttgcccactgctttt

SEQ ID NO: 65362 - DNA, 20 bp, Artificial Sequence
  Description of Artificial Sequence: Synthetic oligonucleotide
  Target: SCNA; (+) strand; PAM type: YTN; PAM sequence: TTC
tcttttgcccactgctttta

SEQ ID NO: 65363 - DNA, 20 bp, Artificial Sequence
  Description of Artificial Sequence: Synthetic oligonucleotide
  Target: SCNA; (+) strand; PAM type: YTN; PAM sequence: CTC
ttttgcccactgcttttaca

SEQ ID NO: 65364 - DNA, 20 bp, Artificial Sequence
  Description of Artificial Sequence: Synthetic oligonucleotide
  Target: SCNA; (+) strand; PAM type: YTN; PAM sequence: CTT
ttgcccactgcttttacact

SEQ ID NO: 65365 - DNA, 20 bp, Artificial Sequence
  Description of Artificial Sequence: Synthetic oligonucleotide
  Target: SCNA; (+) strand; PAM type: YTN; PAM sequence: TTT
tgcccactgcttttacactt

SEQ ID NO: 65366 - DNA, 20 bp, Artificial Sequence
  Description of Artificial Sequence: Synthetic oligonucleotide
  Target: SCNA; (+) strand; PAM type: YTN; PAM sequence: TTT
gcccactgcttttacacttg

SEQ ID NO: 65367 - DNA, 20 bp, Artificial Sequence
  Description of Artificial Sequence: Synthetic oligonucleotide
  Target: SCNA; (+) strand; PAM type: YTN; PAM sequence: TTG
cccactgcttttacacttga

SEQ ID NO: 65368 - DNA, 20 bp, Artificial Sequence
  Description of Artificial Sequence: Synthetic oligonucleotide
  Target: SCNA; (+) strand; PAM type: YTN; PAM sequence: CTG
cttttacacttgaagatatt

SEQ ID NO: 65369 - DNA, 20 bp, Artificial Sequence
  Description of Artificial Sequence: Synthetic oligonucleotide
  Target: SCNA; (+) strand; PAM type: YTN; PAM sequence: CTT
ttacacttgaagatattttg

SEQ ID NO: 65370 - DNA, 20 bp, Artificial Sequence
  Description of Artificial Sequence: Synthetic oligonucleotide
  Target: SCNA; (+) strand; PAM type: YTN; PAM sequence: TTT
tacacttgaagatattttgg

SEQ ID NO: 65371 - DNA, 20 bp, Artificial Sequence
  Description of Artificial Sequence: Synthetic oligonucleotide
  Target: SCNA; (+) strand; PAM type: YTN; PAM sequence: TTT
acacttgaagatattttggg

SEQ ID NO: 65372 - DNA, 20 bp, Artificial Sequence
  Description of Artificial Sequence: Synthetic oligonucleotide
  Target: SCNA; (+) strand; PAM type: YTN; PAM sequence: TTA
cacttgaagatattttgggt

SEQ ID NO: 65373 - DNA, 20 bp, Artificial Sequence
  Description of Artificial Sequence: Synthetic oligonucleotide
  Target: SCNA; (+) strand; PAM type: YTN; PAM sequence: CTT
gaagatattttgggtagaac

SEQ ID NO: 65374 - DNA, 20 bp, Artificial Sequence
  Description of Artificial Sequence: Synthetic oligonucleotide
  Target: SCNA; (+) strand; PAM type: YTN; PAM sequence: TTG
aagatattttgggtagaacc

SEQ ID NO: 65375 - DNA, 20 bp, Artificial Sequence
  Description of Artificial Sequence: Synthetic oligonucleotide
  Target: SCNA; (+) strand; PAM type: YTN; PAM sequence: TTT
tgggtagaaccattgttttg

SEQ ID NO: 65376 - DNA, 20 bp, Artificial Sequence
  Description of Artificial Sequence: Synthetic oligonucleotide
  Target: SCNA; (+) strand; PAM type: YTN; PAM sequence: TTT
gggtagaaccattgttttgc

SEQ ID NO: 65377 - DNA, 20 bp, Artificial Sequence
  Description of Artificial Sequence: Synthetic oligonucleotide
  Target: SCNA; (+) strand; PAM type: YTN; PAM sequence: TTG
ggtagaaccattgttttgct

SEQ ID NO: 65378 - DNA, 20 bp, Artificial Sequence
  Description of Artificial Sequence: Synthetic oligonucleotide
  Target: SCNA; (+) strand; PAM type: YTN; PAM sequence: TTG
ttttgctgcattattgaaca

SEQ ID NO: 65379 - DNA, 20 bp, Artificial Sequence
  Description of Artificial Sequence: Synthetic oligonucleotide
  Target: SCNA; (+) strand; PAM type: YTN; PAM sequence: TTT
tgctgcattattgaacaatg

SEQ ID NO: 65380 - DNA, 20 bp, Artificial Sequence
  Description of Artificial Sequence: Synthetic oligonucleotide
  Target: SCNA; (+) strand; PAM type: YTN; PAM sequence: TTT
gctgcattattgaacaatgt

SEQ ID NO: 65381 - DNA, 20 bp, Artificial Sequence
  Description of Artificial Sequence: Synthetic oligonucleotide
  Target: SCNA; (+) strand; PAM type: YTN; PAM sequence: TTG
ctgcattattgaacaatgtc

SEQ ID NO: 65382 - DNA, 20 bp, Artificial Sequence
  Description of Artificial Sequence: Synthetic oligonucleotide
  Target: SCNA; (+) strand; PAM type: YTN; PAM sequence: CTG
cattattgaacaatgtcact

SEQ ID NO: 65383 - DNA, 20 bp, Artificial Sequence
  Description of Artificial Sequence: Synthetic oligonucleotide
  Target: SCNA; (+) strand; PAM type: YTN; PAM sequence: TTA
ttgaacaatgtcacttagcc

SEQ ID NO: 65384 - DNA, 20 bp, Artificial Sequence
  Description of Artificial Sequence: Synthetic oligonucleotide
  Target: SCNA; (+) strand; PAM type: YTN; PAM sequence: TTG
aacaatgtcacttagcctca

SEQ ID NO: 65385 - DNA, 20 bp, Artificial Sequence
  Description of Artificial Sequence: Synthetic oligonucleotide
  Target: SCNA; (+) strand; PAM type: YTN; PAM sequence: CTT
agcctcaaataatggaatta

SEQ ID NO: 65386 - DNA, 20 bp, Artificial Sequence
  Description of Artificial Sequence: Synthetic oligonucleotide
  Target: SCNA; (+) strand; PAM type: YTN; PAM sequence: TTA
gcctcaaataatggaattaa

SEQ ID NO: 65387 - DNA, 20 bp, Artificial Sequence
  Description of Artificial Sequence: Synthetic oligonucleotide
  Target: SCNA; (+) strand; PAM type: YTN; PAM sequence: CTC
aaataatggaattaatacct

SEQ ID NO: 65388 - DNA, 20 bp, Artificial Sequence
  Description of Artificial Sequence: Synthetic oligonucleotide
  Target: SCNA; (+) strand; PAM type: YTN; PAM sequence: TTA
ataccttcactcaacaactc

SEQ ID NO: 65389 - DNA, 20 bp, Artificial Sequence
  Description of Artificial Sequence: Synthetic oligonucleotide
  Target: SCNA; (+) strand; PAM type: YTN; PAM sequence: CTT
cactcaacaactcacaccag

SEQ ID NO: 65390 - DNA, 20 bp, Artificial Sequence
  Description of Artificial Sequence: Synthetic oligonucleotide
  Target: SCNA; (+) strand; PAM type: YTN; PAM sequence: TTC
actcaacaactcacaccagg

SEQ ID NO: 65391 - DNA, 20 bp, Artificial Sequence
  Description of Artificial Sequence: Synthetic oligonucleotide
  Target: SCNA; (+) strand; PAM type: YTN; PAM sequence: CTC
aacaactcacaccaggagga

SEQ ID NO: 65392 - DNA, 20 bp, Artificial Sequence
  Description of Artificial Sequence: Synthetic oligonucleotide
  Target: SCNA; (+) strand; PAM type: YTN; PAM sequence: CTC
acaccaggaggatgaaggag

SEQ ID NO: 65393 - DNA, 20 bp, Artificial Sequence
  Description of Artificial Sequence: Synthetic oligonucleotide
  Target: SCNA; (+) strand; PAM type: YTN; PAM sequence: CTA
aaaaagaactttgacttaag

SEQ ID NO: 65394 - DNA, 20 bp, Artificial Sequence
  Description of Artificial Sequence: Synthetic oligonucleotide
  Target: SCNA; (+) strand; PAM type: YTN; PAM sequence: CTT
tgacttaagaggaaaaaaag

SEQ ID NO: 65395 - DNA, 20 bp, Artificial Sequence
  Description of Artificial Sequence: Synthetic oligonucleotide
  Target: SCNA; (+) strand; PAM type: YTN; PAM sequence: TTT
gacttaagaggaaaaaaagg

SEQ ID NO: 65396 - DNA, 20 bp, Artificial Sequence
  Description of Artificial Sequence: Synthetic oligonucleotide
  Target: SCNA; (+) strand; PAM type: YTN; PAM sequence: TTG
acttaagaggaaaaaaaggt

SEQ ID NO: 65397 - DNA, 20 bp, Artificial Sequence
  Description of Artificial Sequence: Synthetic oligonucleotide
  Target: SCNA; (+) strand; PAM type: YTN; PAM sequence: CTT
aagaggaaaaaaaggttcaa

SEQ ID NO: 65398 - DNA, 20 bp, Artificial Sequence
  Description of Artificial Sequence: Synthetic oligonucleotide
  Target: SCNA; (+) strand; PAM type: YTN; PAM sequence: TTA
agaggaaaaaaaggttcaac

SEQ ID NO: 65399 - DNA, 20 bp, Artificial Sequence
  Description of Artificial Sequence: Synthetic oligonucleotide
  Target: SCNA; (+) strand; PAM type: YTN; PAM sequence: TTC
aacttaagcacacacccgtg

SEQ ID NO: 65400 - DNA, 20 bp, Artificial Sequence
  Description of Artificial Sequence: Synthetic oligonucleotide
  Target: SCNA; (+) strand; PAM type: YTN; PAM sequence: CTT
aagcacacacccgtgttcca

SEQ ID NO: 65401 - DNA, 20 bp, Artificial Sequence
  Description of Artificial Sequence: Synthetic oligonucleotide
  Target: SCNA; (+) strand; PAM type: YTN; PAM sequence: TTA
agcacacacccgtgttccaa

SEQ ID NO: 65402 - DNA, 20 bp, Artificial Sequence
  Description of Artificial Sequence: Synthetic oligonucleotide
  Target: SCNA; (+) strand; PAM type: YTN; PAM sequence: TTC
caaaatgaaatcaagcccag

SEQ ID NO: 65403 - DNA, 20 bp, Artificial Sequence
  Description of Artificial Sequence: Synthetic oligonucleotide
  Target: SCNA; (+) strand; PAM type: YTN; PAM sequence: CTC
gtatttaaataaaaatagca

SEQ ID NO: 65404 - DNA, 20 bp, Artificial Sequence
  Description of Artificial Sequence: Synthetic oligonucleotide
  Target: SCNA; (+) strand; PAM type: YTN; PAM sequence: TTT
aaataaaaatagcatagacg

SEQ ID NO: 65405 - DNA, 20 bp, Artificial Sequence
  Description of Artificial Sequence: Synthetic oligonucleotide
  Target: SCNA; (+) strand; PAM type: YTN; PAM sequence: TTA
aataaaaatagcatagacgt

SEQ ID NO: 65406 - DNA, 20 bp, Artificial Sequence
  Description of Artificial Sequence: Synthetic oligonucleotide
  Target: SCNA; (+) strand; PAM type: YTN; PAM sequence: TTT
caaaaatgtgaatattctct

SEQ ID NO: 65407 - DNA, 20 bp, Artificial Sequence
  Description of Artificial Sequence: Synthetic oligonucleotide
  Target: SCNA; (+) strand; PAM type: YTN; PAM sequence: TTC
aaaaatgtgaatattctcta

SEQ ID NO: 65408 - DNA, 20 bp, Artificial Sequence
  Description of Artificial Sequence: Synthetic oligonucleotide
  Target: SCNA; (+) strand; PAM type: YTN; PAM sequence: TTC
tctacttctctacctcagac

SEQ ID NO: 65409 - DNA, 20 bp, Artificial Sequence
  Description of Artificial Sequence: Synthetic oligonucleotide
  Target: SCNA; (+) strand; PAM type: YTN; PAM sequence: CTC
tacttctctacctcagacag

SEQ ID NO: 65410 - DNA, 20 bp, Artificial Sequence
  Description of Artificial Sequence: Synthetic oligonucleotide
  Target: SCNA; (+) strand; PAM type: YTN; PAM sequence: CTA
cttctctacctcagacaggg

SEQ ID NO: 65411 - DNA, 20 bp, Artificial Sequence
  Description of Artificial Sequence: Synthetic oligonucleotide
  Target: SCNA; (+) strand; PAM type: YTN; PAM sequence: CTT
ctctacctcagacaggggag

SEQ ID NO: 65412 - DNA, 20 bp, Artificial Sequence
  Description of Artificial Sequence: Synthetic oligonucleotide
  Target: SCNA; (+) strand; PAM type: YTN; PAM sequence: TTC
tctacctcagacaggggagt

SEQ ID NO: 65413 - DNA, 20 bp, Artificial Sequence
  Description of Artificial Sequence: Synthetic oligonucleotide
  Target: SCNA; (+) strand; PAM type: YTN; PAM sequence: CTC
tacctcagacaggggagtgt

SEQ ID NO: 65414 - DNA, 20 bp, Artificial Sequence
  Description of Artificial Sequence: Synthetic oligonucleotide
  Target: SCNA; (+) strand; PAM type: YTN; PAM sequence: CTA
cctcagacaggggagtgtgt

SEQ ID NO: 65415 - DNA, 20 bp, Artificial Sequence
  Description of Artificial Sequence: Synthetic oligonucleotide
  Target: SCNA; (+) strand; PAM type: YTN; PAM sequence: CTC
agacaggggagtgtgtacat

SEQ ID NO: 65416 - DNA, 20 bp, Artificial Sequence
  Description of Artificial Sequence: Synthetic oligonucleotide
  Target: SCNA; (+) strand; PAM type: YTN; PAM sequence: TTT
cactaagagaattaccatgt

SEQ ID NO: 65417 - DNA, 20 bp, Artificial Sequence
  Description of Artificial Sequence: Synthetic oligonucleotide
  Target: SCNA; (+) strand; PAM type: YTN; PAM sequence: TTC
actaagagaattaccatgta

SEQ ID NO: 65418 - DNA, 20 bp, Artificial Sequence
  Description of Artificial Sequence: Synthetic oligonucleotide
  Target: SCNA; (+) strand; PAM type: YTN; PAM sequence: CTA
agagaattaccatgtatttt

SEQ ID NO: 65419 - DNA, 20 bp, Artificial Sequence
  Description of Artificial Sequence: Synthetic oligonucleotide
  Target: SCNA; (+) strand; PAM type: YTN; PAM sequence: TTA
ccatgtattttattgatgca

SEQ ID NO: 65420 - DNA, 20 bp, Artificial Sequence
  Description of Artificial Sequence: Synthetic oligonucleotide
  Target: SCNA; (+) strand; PAM type: YTN; PAM sequence: TTT
tattgatgcacttaaaaatg

SEQ ID NO: 65421 - DNA, 20 bp, Artificial Sequence
  Description of Artificial Sequence: Synthetic oligonucleotide
  Target: SCNA; (+) strand; PAM type: YTN; PAM sequence: TTT
attgatgcacttaaaaatga

SEQ ID NO: 65422 - DNA, 20 bp, Artificial Sequence
  Description of Artificial Sequence: Synthetic oligonucleotide
  Target: SCNA; (+) strand; PAM type: YTN; PAM sequence: TTA
ttgatgcacttaaaaatgaa

SEQ ID NO: 65423 - DNA, 20 bp, Artificial Sequence
  Description of Artificial Sequence: Synthetic oligonucleotide
  Target: SCNA; (+) strand; PAM type: YTN; PAM sequence: TTG
atgcacttaaaaatgaaggc

SEQ ID NO: 65424 - DNA, 20 bp, Artificial Sequence
  Description of Artificial Sequence: Synthetic oligonucleotide
  Target: SCNA; (+) strand; PAM type: YTN; PAM sequence: CTT
aaaaatgaaggcgatagaca

SEQ ID NO: 65425 - DNA, 20 bp, Artificial Sequence
  Description of Artificial Sequence: Synthetic oligonucleotide
  Target: SCNA; (+) strand; PAM type: YTN; PAM sequence: TTA
aaaatgaaggcgatagacat

SEQ ID NO: 65426 - DNA, 20 bp, Artificial Sequence
  Description of Artificial Sequence: Synthetic oligonucleotide
  Target: SCNA; (+) strand; PAM type: YTN; PAM sequence: CTT
gttaaaaagcaaggtaaaga

SEQ ID NO: 65427 - DNA, 20 bp, Artificial Sequence
  Description of Artificial Sequence: Synthetic oligonucleotide
  Target: SCNA; (+) strand; PAM type: YTN; PAM sequence: TTG
ttaaaaagcaaggtaaagat

SEQ ID NO: 65428 - DNA, 20 bp, Artificial Sequence
  Description of Artificial Sequence: Synthetic oligonucleotide
  Target: SCNA; (+) strand; PAM type: YTN; PAM sequence: TTA
aaaagcaaggtaaagatata

SEQ ID NO: 65429 - DNA, 20 bp, Artificial Sequence
  Description of Artificial Sequence: Synthetic oligonucleotide
  Target: SCNA; (+) strand; PAM type: YTN; PAM sequence: TTT
catatgttcaattttctatt

SEQ ID NO: 65430 - DNA, 20 bp, Artificial Sequence
  Description of Artificial Sequence: Synthetic oligonucleotide
  Target: SCNA; (+) strand; PAM type: YTN; PAM sequence: TTC
atatgttcaattttctatta

SEQ ID NO: 65431 - DNA, 20 bp, Artificial Sequence
  Description of Artificial Sequence: Synthetic oligonucleotide
  Target: SCNA; (+) strand; PAM type: YTN; PAM sequence: TTC
aattttctattatcaattcc

SEQ ID NO: 65432 - DNA, 20 bp, Artificial Sequence
  Description of Artificial Sequence: Synthetic oligonucleotide
  Target: SCNA; (+) strand; PAM type: YTN; PAM sequence: TTT
tctattatcaattcctagtc

SEQ ID NO: 65433 - DNA, 20 bp, Artificial Sequence
  Description of Artificial Sequence: Synthetic oligonucleotide
  Target: SCNA; (+) strand; PAM type: YTN; PAM sequence: TTT
ctattatcaattcctagtct

SEQ ID NO: 65434 - DNA, 20 bp, Artificial Sequence
  Description of Artificial Sequence: Synthetic oligonucleotide
  Target: SCNA; (+) strand; PAM type: YTN; PAM sequence: TTC
tattatcaattcctagtctg

SEQ ID NO: 65435 - DNA, 20 bp, Artificial Sequence
  Description of Artificial Sequence: Synthetic oligonucleotide
  Target: SCNA; (+) strand; PAM type: YTN; PAM sequence: CTA
ttatcaattcctagtctgct

SEQ ID NO: 65436 - DNA, 20 bp, Artificial Sequence
  Description of Artificial Sequence: Synthetic oligonucleotide
  Target: SCNA; (+) strand; PAM type: YTN; PAM sequence: TTA
tcaattcctagtctgctcat

SEQ ID NO: 65437 - DNA, 20 bp, Artificial Sequence
  Description of Artificial Sequence: Synthetic oligonucleotide
  Target: SCNA; (+) strand; PAM type: YTN; PAM sequence: TTC
ctagtctgctcataatgcca

SEQ ID NO: 65438 - DNA, 20 bp, Artificial Sequence
  Description of Artificial Sequence: Synthetic oligonucleotide
  Target: SCNA; (+) strand; PAM type: YTN; PAM sequence: CTA
gtctgctcataatgccattt

SEQ ID NO: 65439 - DNA, 20 bp, Artificial Sequence
  Description of Artificial Sequence: Synthetic oligonucleotide
  Target: SCNA; (+) strand; PAM type: YTN; PAM sequence: CTG
ctcataatgccattttgggg

SEQ ID NO: 65440 - DNA, 20 bp, Artificial Sequence
  Description of Artificial Sequence: Synthetic oligonucleotide
  Target: SCNA; (+) strand; PAM type: YTN; PAM sequence: CTC
ataatgccattttggggtgg

SEQ ID NO: 65441 - DNA, 20 bp, Artificial Sequence
  Description of Artificial Sequence: Synthetic oligonucleotide
  Target: SCNA; (+) strand; PAM type: YTN; PAM sequence: TTT
tggggtggggagcaaagggc

SEQ ID NO: 65442 - DNA, 20 bp, Artificial Sequence
  Description of Artificial Sequence: Synthetic oligonucleotide
  Target: SCNA; (+) strand; PAM type: YTN; PAM sequence: TTT
ggggtggggagcaaagggca

SEQ ID NO: 65443 - DNA, 20 bp, Artificial Sequence
  Description of Artificial Sequence: Synthetic oligonucleotide
  Target: SCNA; (+) strand; PAM type: YTN; PAM sequence: TTG
gggtggggagcaaagggcat

SEQ ID NO: 65444 - DNA, 20 bp, Artificial Sequence
  Description of Artificial Sequence: Synthetic oligonucleotide
  Target: SCNA; (+) strand; PAM type: YTN; PAM sequence: CTG
attcaaaatcaaactaatct

SEQ ID NO: 65445 - DNA, 20 bp, Artificial Sequence
  Description of Artificial Sequence: Synthetic oligonucleotide
  Target: SCNA; (+) strand; PAM type: YTN; PAM sequence: TTC
aaaatcaaactaatctcaat

SEQ ID NO: 65446 - DNA, 20 bp, Artificial Sequence
  Description of Artificial Sequence: Synthetic oligonucleotide
  Target: SCNA; (+) strand; PAM type: YTN; PAM sequence: CTA
atctcaatttttgataaaat

SEQ ID NO: 65447 - DNA, 20 bp, Artificial Sequence
  Description of Artificial Sequence: Synthetic oligonucleotide
  Target: SCNA; (+) strand; PAM type: YTN; PAM sequence: CTC
aatttttgataaaatctaag

SEQ ID NO: 65448 - DNA, 20 bp, Artificial Sequence
  Description of Artificial Sequence: Synthetic oligonucleotide
  Target: SCNA; (+) strand; PAM type: YTN; PAM sequence: TTT
ttgataaaatctaaggaatt

SEQ ID NO: 65449 - DNA, 20 bp, Artificial Sequence
  Description of Artificial Sequence: Synthetic oligonucleotide
  Target: SCNA; (+) strand; PAM type: YTN; PAM sequence: TTT
tgataaaatctaaggaattt

SEQ ID NO: 65450 - DNA, 20 bp, Artificial Sequence
  Description of Artificial Sequence: Synthetic oligonucleotide
  Target: SCNA; (+) strand; PAM type: YTN; PAM sequence: TTT
gataaaatctaaggaatttt

SEQ ID NO: 65451 - DNA, 20 bp, Artificial Sequence
  Description of Artificial Sequence: Synthetic oligonucleotide
  Target: SCNA; (+) strand; PAM type: YTN; PAM sequence: TTG
ataaaatctaaggaatttta

SEQ ID NO: 65452 - DNA, 20 bp, Artificial Sequence
  Description of Artificial Sequence: Synthetic oligonucleotide
  Target: SCNA; (+) strand; PAM type: YTN; PAM sequence: CTA
aggaattttatttttaaaac

SEQ ID NO: 65453 - DNA, 20 bp, Artificial Sequence
  Description of Artificial Sequence: Synthetic oligonucleotide
  Target: SCNA; (+) strand; PAM type: YTN; PAM sequence: TTT
tatttttaaaacattgaatt

SEQ ID NO: 65454 - DNA, 20 bp, Artificial Sequence
  Description of Artificial Sequence: Synthetic oligonucleotide
  Target: SCNA; (+) strand; PAM type: YTN; PAM sequence: TTT
atttttaaaacattgaatta

SEQ ID NO: 65455 - DNA, 20 bp, Artificial Sequence
  Description of Artificial Sequence: Synthetic oligonucleotide
  Target: SCNA; (+) strand; PAM type: YTN; PAM sequence: TTA
tttttaaaacattgaattaa

SEQ ID NO: 65456 - DNA, 20 bp, Artificial Sequence
  Description of Artificial Sequence: Synthetic oligonucleotide
  Target: SCNA; (+) strand; PAM type: YTN; PAM sequence: TTT
ttaaaacattgaattaaagc

SEQ ID NO: 65457 - DNA, 20 bp, Artificial Sequence
  Description of Artificial Sequence: Synthetic oligonucleotide
  Target: SCNA; (+) strand; PAM type: YTN; PAM sequence: TTT
taaaacattgaattaaagca

SEQ ID NO: 65458 - DNA, 20 bp, Artificial Sequence
  Description of Artificial Sequence: Synthetic oligonucleotide
  Target: SCNA; (+) strand; PAM type: YTN; PAM sequence: TTT
aaaacattgaattaaagcaa

SEQ ID NO: 65459 - DNA, 20 bp, Artificial Sequence
  Description of Artificial Sequence: Synthetic oligonucleotide
  Target: SCNA; (+) strand; PAM type: YTN; PAM sequence: TTA
aaacattgaattaaagcaaa

SEQ ID NO: 65460 - DNA, 20 bp, Artificial Sequence
  Description of Artificial Sequence: Synthetic oligonucleotide
  Target: SCNA; (+) strand; PAM type: YTN; PAM sequence: TTG
aattaaagcaaactttggat

SEQ ID NO: 65461 - DNA, 20 bp, Artificial Sequence
  Description of Artificial Sequence: Synthetic oligonucleotide
  Target: SCNA; (+) strand; PAM type: YTN; PAM sequence: TTA
aagcaaactttggatactct

SEQ ID NO: 65462 - DNA, 20 bp, Artificial Sequence
  Description of Artificial Sequence: Synthetic oligonucleotide
  Target: SCNA; (+) strand; PAM type: YTN; PAM sequence: CTT
tggatactctgatttctctt

SEQ ID NO: 65463 - DNA, 20 bp, Artificial Sequence
  Description of Artificial Sequence: Synthetic oligonucleotide
  Target: SCNA; (+) strand; PAM type: YTN; PAM sequence: TTT
ggatactctgatttctcttg

SEQ ID NO: 65464 - DNA, 20 bp, Artificial Sequence
  Description of Artificial Sequence: Synthetic oligonucleotide
  Target: SCNA; (+) strand; PAM type: YTN; PAM sequence: TTG
gatactctgatttctcttga

SEQ ID NO: 65465 - DNA, 20 bp, Artificial Sequence
  Description of Artificial Sequence: Synthetic oligonucleotide
  Target: SCNA; (+) strand; PAM type: YTN; PAM sequence: CTC
tgatttctcttgaggtcata

SEQ ID NO: 65466 - DNA, 20 bp, Artificial Sequence
  Description of Artificial Sequence: Synthetic oligonucleotide
  Target: SCNA; (+) strand; PAM type: YTN; PAM sequence: CTG
atttctcttgaggtcataaa

SEQ ID NO: 65467 - DNA, 20 bp, Artificial Sequence
  Description of Artificial Sequence: Synthetic oligonucleotide
  Target: SCNA; (+) strand; PAM type: YTN; PAM sequence: TTT
ctcttgaggtcataaatcct

SEQ ID NO: 65468 - DNA, 20 bp, Artificial Sequence
  Description of Artificial Sequence: Synthetic oligonucleotide
  Target: SCNA; (+) strand; PAM type: YTN; PAM sequence: TTC
tcttgaggtcataaatcctc

SEQ ID NO: 65469 - DNA, 20 bp, Artificial Sequence
  Description of Artificial Sequence: Synthetic oligonucleotide
  Target: SCNA; (+) strand; PAM type: YTN; PAM sequence: CTC
ttgaggtcataaatcctctg

SEQ ID NO: 65470 - DNA, 20 bp, Artificial Sequence
  Description of Artificial Sequence: Synthetic oligonucleotide
  Target: SCNA; (+) strand; PAM type: YTN; PAM sequence: CTT
gaggtcataaatcctctgcc

SEQ ID NO: 65471 - DNA, 20 bp, Artificial Sequence
  Description of Artificial Sequence: Synthetic oligonucleotide
  Target: SCNA; (+) strand; PAM type: YTN; PAM sequence: TTG
aggtcataaatcctctgcct

SEQ ID NO: 65472 - DNA, 20 bp, Artificial Sequence
  Description of Artificial Sequence: Synthetic oligonucleotide
  Target: SCNA; (+) strand; PAM type: YTN; PAM sequence: CTC
tgcctttttaagagatctat

SEQ ID NO: 65473 - DNA, 20 bp, Artificial Sequence
  Description of Artificial Sequence: Synthetic oligonucleotide
  Target: SCNA; (+) strand; PAM type: YTN; PAM sequence: CTG
cctttttaagagatctatgt

SEQ ID NO: 65474 - DNA, 20 bp, Artificial Sequence
  Description of Artificial Sequence: Synthetic oligonucleotide
  Target: SCNA; (+) strand; PAM type: YTN; PAM sequence: CTT
tttaagagatctatgtggag

SEQ ID NO: 65475 - DNA, 20 bp, Artificial Sequence
  Description of Artificial Sequence: Synthetic oligonucleotide
  Target: SCNA; (+) strand; PAM type: YTN; PAM sequence: TTT
ttaagagatctatgtggaga

SEQ ID NO: 65476 - DNA, 20 bp, Artificial Sequence
  Description of Artificial Sequence: Synthetic oligonucleotide
  Target: SCNA; (+) strand; PAM type: YTN; PAM sequence: TTT
taagagatctatgtggagag

SEQ ID NO: 65477 - DNA, 20 bp, Artificial Sequence
  Description of Artificial Sequence: Synthetic oligonucleotide
  Target: SCNA; (+) strand; PAM type: YTN; PAM sequence: TTT
aagagatctatgtggagagg

SEQ ID NO: 65478 - DNA, 20 bp, Artificial Sequence
  Description of Artificial Sequence: Synthetic oligonucleotide
  Target: SCNA; (+) strand; PAM type: YTN; PAM sequence: TTA
agagatctatgtggagagga

SEQ ID NO: 65479 - DNA, 20 bp, Artificial Sequence
  Description of Artificial Sequence: Synthetic oligonucleotide
  Target: SCNA; (+) strand; PAM type: YTN; PAM sequence: CTA
tgtggagaggaacaactctg

SEQ ID NO: 65480 - DNA, 20 bp, Artificial Sequence
  Description of Artificial Sequence: Synthetic oligonucleotide
  Target: SCNA; (+) strand; PAM type: YTN; PAM sequence: CTC
tgggtcttaaacgaattatt

SEQ ID NO: 65481 - DNA, 20 bp, Artificial Sequence
  Description of Artificial Sequence: Synthetic oligonucleotide
  Target: SCNA; (+) strand; PAM type: YTN; PAM sequence: CTG
ggtcttaaacgaattattga

SEQ ID NO: 65482 - DNA, 20 bp, Artificial Sequence
  Description of Artificial Sequence: Synthetic oligonucleotide
  Target: SCNA; (+) strand; PAM type: YTN; PAM sequence: CTT
aaacgaattattgaggtctt

SEQ ID NO: 65483 - DNA, 20 bp, Artificial Sequence
  Description of Artificial Sequence: Synthetic oligonucleotide
  Target: SCNA; (+) strand; PAM type: YTN; PAM sequence: TTA
aacgaattattgaggtcttg

SEQ ID NO: 65484 - DNA, 20 bp, Artificial Sequence
  Description of Artificial Sequence: Synthetic oligonucleotide
  Target: SCNA; (+) strand; PAM type: YTN; PAM sequence: TTA
ttgaggtcttgttttggaaa

SEQ ID NO: 65485 - DNA, 20 bp, Artificial Sequence
  Description of Artificial Sequence: Synthetic oligonucleotide
  Target: SCNA; (+) strand; PAM type: YTN; PAM sequence: TTG
aggtcttgttttggaaaggc

SEQ ID NO: 65486 - DNA, 20 bp, Artificial Sequence
  Description of Artificial Sequence: Synthetic oligonucleotide
  Target: SCNA; (+) strand; PAM type: YTN; PAM sequence: CTT
gttttggaaaggctagatat

SEQ ID NO: 65487 - DNA, 20 bp, Artificial Sequence
  Description of Artificial Sequence: Synthetic oligonucleotide
  Target: SCNA; (+) strand; PAM type: YTN; PAM sequence: TTG
ttttggaaaggctagatatt

SEQ ID NO: 65488 - DNA, 20 bp, Artificial Sequence
  Description of Artificial Sequence: Synthetic oligonucleotide
  Target: SCNA; (+) strand; PAM type: YTN; PAM sequence: TTT
tggaaaggctagatattttg

SEQ ID NO: 65489 - DNA, 20 bp, Artificial Sequence
  Description of Artificial Sequence: Synthetic oligonucleotide
  Target: SCNA; (+) strand; PAM type: YTN; PAM sequence: TTT
ggaaaggctagatattttgt

SEQ ID NO: 65490 - DNA, 20 bp, Artificial Sequence
  Description of Artificial Sequence: Synthetic oligonucleotide
  Target: SCNA; (+) strand; PAM type: YTN; PAM sequence: TTG
gaaaggctagatattttgtt

SEQ ID NO: 65491 - DNA, 20 bp, Artificial Sequence
  Description of Artificial Sequence: Synthetic oligonucleotide
  Target: SCNA; (+) strand; PAM type: YTN; PAM sequence: CTA
gatattttgttaaaaaatat

SEQ ID NO: 65492 - DNA, 20 bp, Artificial Sequence
  Description of Artificial Sequence: Synthetic oligonucleotide
  Target: SCNA; (+) strand; PAM type: YTN; PAM sequence: TTT
tgttaaaaaatataagattt

SEQ ID NO: 65493 - DNA, 20 bp, Artificial Sequence
  Description of Artificial Sequence: Synthetic oligonucleotide
  Target: SCNA; (+) strand; PAM type: YTN; PAM sequence: TTT
gttaaaaaatataagatttc

SEQ ID NO: 65494 - DNA, 20 bp, Artificial Sequence
  Description of Artificial Sequence: Synthetic oligonucleotide
  Target: SCNA; (+) strand; PAM type: YTN; PAM sequence: TTG
ttaaaaaatataagatttca

SEQ ID NO: 65495 - DNA, 20 bp, Artificial Sequence
  Description of Artificial Sequence: Synthetic oligonucleotide
  Target: SCNA; (+) strand; PAM type: YTN; PAM sequence: TTA
aaaaatataagatttcaaaa

SEQ ID NO: 65496 - DNA, 20 bp, Artificial Sequence
  Description of Artificial Sequence: Synthetic oligonucleotide
  Target: SCNA; (+) strand; PAM type: YTN; PAM sequence: TTT
caaaaaacctaaaactttgg

SEQ ID NO: 65497 - DNA, 20 bp, Artificial Sequence
  Description of Artificial Sequence: Synthetic oligonucleotide
  Target: SCNA; (+) strand; PAM type: YTN; PAM sequence: TTC
aaaaaacctaaaactttgga

SEQ ID NO: 65498 - DNA, 20 bp, Artificial Sequence
  Description of Artificial Sequence: Synthetic oligonucleotide
  Target: SCNA; (+) strand; PAM type: YTN; PAM sequence: CTA
aaactttggacaatgttatt

SEQ ID NO: 65499 - DNA, 20 bp, Artificial Sequence
  Description of Artificial Sequence: Synthetic oligonucleotide
  Target: SCNA; (+) strand; PAM type: YTN; PAM sequence: CTT
tggacaatgttatttaatca

SEQ ID NO: 65500 - DNA, 20 bp, Artificial Sequence
  Description of Artificial Sequence: Synthetic oligonucleotide
  Target: SCNA; (+) strand; PAM type: YTN; PAM sequence: TTT
ggacaatgttatttaatcat

SEQ ID NO: 65501 - DNA, 20 bp, Artificial Sequence
  Description of Artificial Sequence: Synthetic oligonucleotide
  Target: SCNA; (+) strand; PAM type: YTN; PAM sequence: TTG
gacaatgttatttaatcatc

SEQ ID NO: 65502 - DNA, 20 bp, Artificial Sequence
  Description of Artificial Sequence: Synthetic oligonucleotide
  Target: SCNA; (+) strand; PAM type: YTN; PAM sequence: TTA
tttaatcatcaaaagcaaaa

SEQ ID NO: 65503 - DNA, 20 bp, Artificial Sequence
  Description of Artificial Sequence: Synthetic oligonucleotide
  Target: SCNA; (+) strand; PAM type: YTN; PAM sequence: TTT
aatcatcaaaagcaaaacaa

SEQ ID NO: 65504 - DNA, 20 bp, Artificial Sequence
  Description of Artificial Sequence: Synthetic oligonucleotide
  Target: SCNA; (+) strand; PAM type: YTN; PAM sequence: TTA
atcatcaaaagcaaaacaat

SEQ ID NO: 65505 - DNA, 20 bp, Artificial Sequence
  Description of Artificial Sequence: Synthetic oligonucleotide
  Target: SCNA; (+) strand; PAM type: YTN; PAM sequence: TTT
cagaaataacactatatttt

SEQ ID NO: 65506 - DNA, 20 bp, Artificial Sequence
  Description of Artificial Sequence: Synthetic oligonucleotide
  Target: SCNA; (+) strand; PAM type: YTN; PAM sequence: TTC
agaaataacactatattttc

SEQ ID NO: 65507 - DNA, 20 bp, Artificial Sequence
  Description of Artificial Sequence: Synthetic oligonucleotide
  Target: SCNA; (+) strand; PAM type: YTN; PAM sequence: CTA
tattttcagtcttactatta

SEQ ID NO: 65508 - DNA, 20 bp, Artificial Sequence
  Description of Artificial Sequence: Synthetic oligonucleotide
  Target: SCNA; (+) strand; PAM type: YTN; PAM sequence: TTT
tcagtcttactattatgcat

SEQ ID NO: 65509 - DNA, 20 bp, Artificial Sequence
  Description of Artificial Sequence: Synthetic oligonucleotide
  Target: SCNA; (+) strand; PAM type: YTN; PAM sequence: TTT
cagtcttactattatgcata

SEQ ID NO: 65510 - DNA, 20 bp, Artificial Sequence
  Description of Artificial Sequence: Synthetic oligonucleotide
  Target: SCNA; (+) strand; PAM type: YTN; PAM sequence: TTC
agtcttactattatgcataa

SEQ ID NO: 65511 - DNA, 20 bp, Artificial Sequence
  Description of Artificial Sequence: Synthetic oligonucleotide
  Target: SCNA; (+) strand; PAM type: YTN; PAM sequence: CTT
actattatgcataagaaaga

SEQ ID NO: 65512 - DNA, 20 bp, Artificial Sequence
  Description of Artificial Sequence: Synthetic oligonucleotide
  Target: SCNA; (+) strand; PAM type: YTN; PAM sequence: TTA
ctattatgcataagaaagaa

SEQ ID NO: 65513 - DNA, 20 bp, Artificial Sequence
  Description of Artificial Sequence: Synthetic oligonucleotide
  Target: SCNA; (+) strand; PAM type: YTN; PAM sequence: CTA
ttatgcataagaaagaacaa

SEQ ID NO: 65514 - DNA, 20 bp, Artificial Sequence
  Description of Artificial Sequence: Synthetic oligonucleotide
  Target: SCNA; (+) strand; PAM type: YTN; PAM sequence: TTA
tgcataagaaagaacaatat

SEQ ID NO: 65515 - DNA, 20 bp, Artificial Sequence
  Description of Artificial Sequence: Synthetic oligonucleotide
  Target: SCNA; (+) strand; PAM type: YTN; PAM sequence: TTA
catttattgtttacatactc

SEQ ID NO: 65516 - DNA, 20 bp, Artificial Sequence
  Description of Artificial Sequence: Synthetic oligonucleotide
  Target: SCNA; (+) strand; PAM type: YTN; PAM sequence: TTT
attgtttacatactctgagg

SEQ ID NO: 65517 - DNA, 20 bp, Artificial Sequence
  Description of Artificial Sequence: Synthetic oligonucleotide
  Target: SCNA; (+) strand; PAM type: YTN; PAM sequence: TTA
ttgtttacatactctgagga

SEQ ID NO: 65518 - DNA, 20 bp, Artificial Sequence
  Description of Artificial Sequence: Synthetic oligonucleotide
  Target: SCNA; (+) strand; PAM type: YTN; PAM sequence: TTG
tttacatactctgaggagta

SEQ ID NO: 65519 - DNA, 20 bp, Artificial Sequence
  Description of Artificial Sequence: Synthetic oligonucleotide
  Target: SCNA; (+) strand; PAM type: YTN; PAM sequence: TTT
acatactctgaggagtattt

SEQ ID NO: 65520 - DNA, 20 bp, Artificial Sequence
  Description of Artificial Sequence: Synthetic oligonucleotide
  Target: SCNA; (+) strand; PAM type: YTN; PAM sequence: TTA
catactctgaggagtattta

SEQ ID NO: 65521 - DNA, 20 bp, Artificial Sequence
  Description of Artificial Sequence: Synthetic oligonucleotide
  Target: SCNA; (+) strand; PAM type: YTN; PAM sequence: CTC
tgaggagtatttaattgcat

SEQ ID NO: 65522 - DNA, 20 bp, Artificial Sequence
  Description of Artificial Sequence: Synthetic oligonucleotide
  Target: SCNA; (+) strand; PAM type: YTN; PAM sequence: CTG
aggagtatttaattgcatcc

SEQ ID NO: 65523 - DNA, 20 bp, Artificial Sequence
  Description of Artificial Sequence: Synthetic oligonucleotide
  Target: SCNA; (+) strand; PAM type: YTN; PAM sequence: TTT
aattgcatcctagtaagtat

SEQ ID NO: 65524 - DNA, 20 bp, Artificial Sequence
  Description of Artificial Sequence: Synthetic oligonucleotide
  Target: SCNA; (+) strand; PAM type: YTN; PAM sequence: TTA
attgcatcctagtaagtata

SEQ ID NO: 65525 - DNA, 20 bp, Artificial Sequence
  Description of Artificial Sequence: Synthetic oligonucleotide
  Target: SCNA; (+) strand; PAM type: YTN; PAM sequence: TTG
catcctagtaagtatattct

SEQ ID NO: 65526 - DNA, 20 bp, Artificial Sequence
  Description of Artificial Sequence: Synthetic oligonucleotide
  Target: SCNA; (+) strand; PAM type: YTN; PAM sequence: CTA
gtaagtatattctgtcacat

SEQ ID NO: 65527 - DNA, 20 bp, Artificial Sequence
  Description of Artificial Sequence: Synthetic oligonucleotide
  Target: SCNA; (+) strand; PAM type: YTN; PAM sequence: TTC
tgtcacatgagaagccatag

SEQ ID NO: 65528 - DNA, 20 bp, Artificial Sequence
  Description of Artificial Sequence: Synthetic oligonucleotide
  Target: SCNA; (+) strand; PAM type: YTN; PAM sequence: CTG
tcacatgagaagccatagaa

SEQ ID NO: 65529 - DNA, 20 bp, Artificial Sequence
  Description of Artificial Sequence: Synthetic oligonucleotide
  Target: SCNA; (+) strand; PAM type: YTN; PAM sequence: TTG
gcatgttctgctgtatccaa

SEQ ID NO: 65530 - DNA, 20 bp, Artificial Sequence
  Description of Artificial Sequence: Synthetic oligonucleotide
  Target: SCNA; (+) strand; PAM type: YTN; PAM sequence: TTC
tgctgtatccaatgcccaaa

SEQ ID NO: 65531 - DNA, 20 bp, Artificial Sequence
  Description of Artificial Sequence: Synthetic oligonucleotide
  Target: SCNA; (+) strand; PAM type: YTN; PAM sequence: CTG
ctgtatccaatgcccaaagg

SEQ ID NO: 65532 - DNA, 20 bp, Artificial Sequence
  Description of Artificial Sequence: Synthetic oligonucleotide
  Target: SCNA; (+) strand; PAM type: YTN; PAM sequence: CTG
tatccaatgcccaaaggata

SEQ ID NO: 65533 - DNA, 20 bp, Artificial Sequence
  Description of Artificial Sequence: Synthetic oligonucleotide
  Target: SCNA; (+) strand; PAM type: YTN; PAM sequence: TTA
cacttaacgaacccaacctc

SEQ ID NO: 65534 - DNA, 20 bp, Artificial Sequence
  Description of Artificial Sequence: Synthetic oligonucleotide
  Target: SCNA; (+) strand; PAM type: YTN; PAM sequence: CTT
aacgaacccaacctcctttt

SEQ ID NO: 65535 - DNA, 20 bp, Artificial Sequence
  Description of Artificial Sequence: Synthetic oligonucleotide
  Target: SCNA; (+) strand; PAM type: YTN; PAM sequence: TTA
acgaacccaacctccttttc

SEQ ID NO: 65536 - DNA, 20 bp, Artificial Sequence
  Description of Artificial Sequence: Synthetic oligonucleotide
  Target: SCNA; (+) strand; PAM type: YTN; PAM sequence: CTC
cttttccaattatatatggt

SEQ ID NO: 65537 - DNA, 20 bp, Artificial Sequence
  Description of Artificial Sequence: Synthetic oligonucleotide
  Target: SCNA; (+) strand; PAM type: YTN; PAM sequence: CTT
ttccaattatatatggttaa

SEQ ID NO: 65538 - DNA, 20 bp, Artificial Sequence
  Description of Artificial Sequence: Synthetic oligonucleotide
  Target: SCNA; (+) strand; PAM type: YTN; PAM sequence: TTT
tccaattatatatggttaag

SEQ ID NO: 65539 - DNA, 20 bp, Artificial Sequence
  Description of Artificial Sequence: Synthetic oligonucleotide
  Target: SCNA; (+) strand; PAM type: YTN; PAM sequence: TTT
ccaattatatatggttaagt

SEQ ID NO: 65540 - DNA, 20 bp, Artificial Sequence
  Description of Artificial Sequence: Synthetic oligonucleotide
  Target: SCNA; (+) strand; PAM type: YTN; PAM sequence: TTC
caattatatatggttaagtt

SEQ ID NO: 65541 - DNA, 20 bp, Artificial Sequence
  Description of Artificial Sequence: Synthetic oligonucleotide
  Target: SCNA; (+) strand; PAM type: YTN; PAM sequence: TTA
tatatggttaagttaaaatt

SEQ ID NO: 65542 - DNA, 20 bp, Artificial Sequence
  Description of Artificial Sequence: Synthetic oligonucleotide
  Target: SCNA; (+) strand; PAM type: YTN; PAM sequence: TTA
agttaaaattcaaactttaa

SEQ ID NO: 65543 - DNA, 20 bp, Artificial Sequence
  Description of Artificial Sequence: Synthetic oligonucleotide
  Target: SCNA; (+) strand; PAM type: YTN; PAM sequence: TTA
aaattcaaactttaattttt

SEQ ID NO: 65544 - DNA, 20 bp, Artificial Sequence
  Description of Artificial Sequence: Synthetic oligonucleotide
  Target: SCNA; (+) strand; PAM type: YTN; PAM sequence: TTC
aaactttaatttttgggaaa

SEQ ID NO: 65545 - DNA, 20 bp, Artificial Sequence
  Description of Artificial Sequence: Synthetic oligonucleotide
  Target: SCNA; (+) strand; PAM type: YTN; PAM sequence: CTT
taatttttgggaaagtatag

SEQ ID NO: 65546 - DNA, 20 bp, Artificial Sequence
  Description of Artificial Sequence: Synthetic oligonucleotide
  Target: SCNA; (+) strand; PAM type: YTN; PAM sequence: TTT
aatttttgggaaagtatagt

SEQ ID NO: 65547 - DNA, 20 bp, Artificial Sequence
  Description of Artificial Sequence: Synthetic oligonucleotide
  Target: SCNA; (+) strand; PAM type: YTN; PAM sequence: TTA
atttttgggaaagtatagtt

SEQ ID NO: 65548 - DNA, 20 bp, Artificial Sequence
  Description of Artificial Sequence: Synthetic oligonucleotide
  Target: SCNA; (+) strand; PAM type: YTN; PAM sequence: TTT
ttgggaaagtatagttatgg

SEQ ID NO: 65549 - DNA, 20 bp, Artificial Sequence
  Description of Artificial Sequence: Synthetic oligonucleotide
  Target: SCNA; (+) strand; PAM type: YTN; PAM sequence: TTT
tgggaaagtatagttatggc

SEQ ID NO: 65550 - DNA, 20 bp, Artificial Sequence
  Description of Artificial Sequence: Synthetic oligonucleotide
  Target: SCNA; (+) strand; PAM type: YTN; PAM sequence: TTT
gggaaagtatagttatggct

SEQ ID NO: 65551 - DNA, 20 bp, Artificial Sequence
  Description of Artificial Sequence: Synthetic oligonucleotide
  Target: SCNA; (+) strand; PAM type: YTN; PAM sequence: TTG
ggaaagtatagttatggctt

SEQ ID NO: 65552 - DNA, 20 bp, Artificial Sequence
  Description of Artificial Sequence: Synthetic oligonucleotide
  Target: SCNA; (+) strand; PAM type: YTN; PAM sequence: TTA
tggcttagatctaaggtaga

SEQ ID NO: 65553 - DNA, 20 bp, Artificial Sequence
  Description of Artificial Sequence: Synthetic oligonucleotide
  Target: SCNA; (+) strand; PAM type: YTN; PAM sequence: CTT
agatctaaggtagaaataaa

SEQ ID NO: 65554 - DNA, 20 bp, Artificial Sequence
  Description of Artificial Sequence: Synthetic oligonucleotide
  Target: SCNA; (+) strand; PAM type: YTN; PAM sequence: TTA
gatctaaggtagaaataaaa

SEQ ID NO: 65555 - DNA, 20 bp, Artificial Sequence
  Description of Artificial Sequence: Synthetic oligonucleotide
  Target: SCNA; (+) strand; PAM type: YTN; PAM sequence: CTA
aggtagaaataaaatgacca

SEQ ID NO: 65556 - DNA, 20 bp, Artificial Sequence
  Description of Artificial Sequence: Synthetic oligonucleotide
  Target: SCNA; (+) strand; PAM type: YTN; PAM sequence: CTT
ggtgcatttaacattctata

SEQ ID NO: 65557 - DNA, 20 bp, Artificial Sequence
  Description of Artificial Sequence: Synthetic oligonucleotide
  Target: SCNA; (+) strand; PAM type: YTN; PAM sequence: TTG
gtgcatttaacattctataa

SEQ ID NO: 65558 - DNA, 20 bp, Artificial Sequence
  Description of Artificial Sequence: Synthetic oligonucleotide
  Target: SCNA; (+) strand; PAM type: YTN; PAM sequence: TTT
aacattctataactttagaa

SEQ ID NO: 65559 - DNA, 20 bp, Artificial Sequence
  Description of Artificial Sequence: Synthetic oligonucleotide
  Target: SCNA; (+) strand; PAM type: YTN; PAM sequence: TTA
acattctataactttagaaa

SEQ ID NO: 65560 - DNA, 20 bp, Artificial Sequence
  Description of Artificial Sequence: Synthetic oligonucleotide
  Target: SCNA; (+) strand; PAM type: YTN; PAM sequence: TTC
tataactttagaaatgcatc

SEQ ID NO: 65561 - DNA, 20 bp, Artificial Sequence
  Description of Artificial Sequence: Synthetic oligonucleotide
  Target: SCNA; (+) strand; PAM type: YTN; PAM sequence: CTA
taactttagaaatgcatcaa

SEQ ID NO: 65562 - DNA, 20 bp, Artificial Sequence
  Description of Artificial Sequence: Synthetic oligonucleotide
  Target: SCNA; (+) strand; PAM type: YTN; PAM sequence: CTT
tagaaatgcatcaaagtggc

SEQ ID NO: 65563 - DNA, 20 bp, Artificial Sequence
  Description of Artificial Sequence: Synthetic oligonucleotide
  Target: SCNA; (+) strand; PAM type: YTN; PAM sequence: TTT
agaaatgcatcaaagtggca

SEQ ID NO: 65564 - DNA, 20 bp, Artificial Sequence
  Description of Artificial Sequence: Synthetic oligonucleotide
  Target: SCNA; (+) strand; PAM type: YTN; PAM sequence: TTA
gaaatgcatcaaagtggcaa

SEQ ID NO: 65565 - DNA, 20 bp, Artificial Sequence
  Description of Artificial Sequence: Synthetic oligonucleotide
  Target: SCNA; (+) strand; PAM type: YTN; PAM sequence: TTA
agagctatttgtcactaagg

SEQ ID NO: 65566 - DNA, 20 bp, Artificial Sequence
  Description of Artificial Sequence: Synthetic oligonucleotide
  Target: SCNA; (+) strand; PAM type: YTN; PAM sequence: CTA
tttgtcactaagggcctgtg

SEQ ID NO: 65567 - DNA, 20 bp, Artificial Sequence
  Description of Artificial Sequence: Synthetic oligonucleotide
  Target: SCNA; (+) strand; PAM type: YTN; PAM sequence: TTT
gtcactaagggcctgtggtt

SEQ ID NO: 65568 - DNA, 20 bp, Artificial Sequence
  Description of Artificial Sequence: Synthetic oligonucleotide
  Target: SCNA; (+) strand; PAM type: YTN; PAM sequence: TTG
tcactaagggcctgtggttg

SEQ ID NO: 65569 - DNA, 20 bp, Artificial Sequence
  Description of Artificial Sequence: Synthetic oligonucleotide
  Target: SCNA; (+) strand; PAM type: YTN; PAM sequence: CTA
agggcctgtggttgaagtct

SEQ ID NO: 65570 - DNA, 20 bp, Artificial Sequence
  Description of Artificial Sequence: Synthetic oligonucleotide
  Target: SCNA; (+) strand; PAM type: YTN; PAM sequence: CTG
tggttgaagtctgttggatc

SEQ ID NO: 65571 - DNA, 20 bp, Artificial Sequence
  Description of Artificial Sequence: Synthetic oligonucleotide
  Target: SCNA; (+) strand; PAM type: YTN; PAM sequence: TTG
aagtctgttggatccatctg

SEQ ID NO: 65572 - DNA, 20 bp, Artificial Sequence
  Description of Artificial Sequence: Synthetic oligonucleotide
  Target: SCNA; (+) strand; PAM type: YTN; PAM sequence: CTG
ttggatccatctgttctttc

SEQ ID NO: 65573 - DNA, 20 bp, Artificial Sequence
  Description of Artificial Sequence: Synthetic oligonucleotide
  Target: SCNA; (+) strand; PAM type: YTN; PAM sequence: TTG
gatccatctgttctttctga

SEQ ID NO: 65574 - DNA, 20 bp, Artificial Sequence
  Description of Artificial Sequence: Synthetic oligonucleotide
  Target: SCNA; (+) strand; PAM type: YTN; PAM sequence: CTG
ttctttctgaggcaatatgc

SEQ ID NO: 65575 - DNA, 20 bp, Artificial Sequence
  Description of Artificial Sequence: Synthetic oligonucleotide
  Target: SCNA; (+) strand; PAM type: YTN; PAM sequence: TTC
tttctgaggcaatatgcaga

SEQ ID NO: 65576 - DNA, 20 bp, Artificial Sequence
  Description of Artificial Sequence: Synthetic oligonucleotide
  Target: SCNA; (+) strand; PAM type: YTN; PAM sequence: CTT
tctgaggcaatatgcagacg

SEQ ID NO: 65577 - DNA, 20 bp, Artificial Sequence
  Description of Artificial Sequence: Synthetic oligonucleotide
  Target: SCNA; (+) strand; PAM type: YTN; PAM sequence: TTT
ctgaggcaatatgcagacga

SEQ ID NO: 65578 - DNA, 20 bp, Artificial Sequence
  Description of Artificial Sequence: Synthetic oligonucleotide
  Target: SCNA; (+) strand; PAM type: YTN; PAM sequence: TTC
tgaggcaatatgcagacgaa

SEQ ID NO: 65579 - DNA, 20 bp, Artificial Sequence
  Description of Artificial Sequence: Synthetic oligonucleotide
  Target: SCNA; (+) strand; PAM type: YTN; PAM sequence: CTG
aggcaatatgcagacgaaag

SEQ ID NO: 65580 - DNA, 20 bp, Artificial Sequence
  Description of Artificial Sequence: Synthetic oligonucleotide
  Target: SCNA; (+) strand; PAM type: YTN; PAM sequence: TTG
caacataatttgtaatattt

SEQ ID NO: 65581 - DNA, 20 bp, Artificial Sequence
  Description of Artificial Sequence: Synthetic oligonucleotide
  Target: SCNA; (+) strand; PAM type: YTN; PAM sequence: TTT
gtaatatttgatacattata

SEQ ID NO: 65582 - DNA, 20 bp, Artificial Sequence
  Description of Artificial Sequence: Synthetic oligonucleotide
  Target: SCNA; (+) strand; PAM type: YTN; PAM sequence: TTG
taatatttgatacattataa

SEQ ID NO: 65583 - DNA, 20 bp, Artificial Sequence
  Description of Artificial Sequence: Synthetic oligonucleotide
  Target: SCNA; (+) strand; PAM type: YTN; PAM sequence: TTT
gatacattataatacatgat

SEQ ID NO: 65584 - DNA, 20 bp, Artificial Sequence
  Description of Artificial Sequence: Synthetic oligonucleotide
  Target: SCNA; (+) strand; PAM type: YTN; PAM sequence: TTG
atacattataatacatgata

SEQ ID NO: 65585 - DNA, 20 bp, Artificial Sequence
  Description of Artificial Sequence: Synthetic oligonucleotide
  Target: SCNA; (+) strand; PAM type: YTN; PAM sequence: TTA
taatacatgataaattataa

SEQ ID NO: 65586 - DNA, 20 bp, Artificial Sequence
  Description of Artificial Sequence: Synthetic oligonucleotide
  Target: SCNA; (+) strand; PAM type: YTN; PAM sequence: TTA
taatatattagaaatataat

SEQ ID NO: 65587 - DNA, 20 bp, Artificial Sequence
  Description of Artificial Sequence: Synthetic oligonucleotide
  Target: SCNA; (+) strand; PAM type: YTN; PAM sequence: TTA
gaaatataatttatagcatt

SEQ ID NO: 65588 - DNA, 20 bp, Artificial Sequence
  Description of Artificial Sequence: Synthetic oligonucleotide
  Target: SCNA; (+) strand; PAM type: YTN; PAM sequence: TTT
atagcattacatctagtaag

SEQ ID NO: 65589 - DNA, 20 bp, Artificial Sequence
  Description of Artificial Sequence: Synthetic oligonucleotide
  Target: SCNA; (+) strand; PAM type: YTN; PAM sequence: TTA
tagcattacatctagtaaga

SEQ ID NO: 65590 - DNA, 20 bp, Artificial Sequence
  Description of Artificial Sequence: Synthetic oligonucleotide
  Target: SCNA; (+) strand; PAM type: YTN; PAM sequence: TTA
catctagtaagatagatgta

SEQ ID NO: 65591 - DNA, 20 bp, Artificial Sequence
  Description of Artificial Sequence: Synthetic oligonucleotide
  Target: SCNA; (+) strand; PAM type: YTN; PAM sequence: CTA
gtaagatagatgtaaaaggg

SEQ ID NO: 65592 - DNA, 20 bp, Artificial Sequence
  Description of Artificial Sequence: Synthetic oligonucleotide
  Target: SCNA; (+) strand; PAM type: YTN; PAM sequence: CTT
gtatagagtgacaggtctgg

SEQ ID NO: 65593 - DNA, 20 bp, Artificial Sequence
  Description of Artificial Sequence: Synthetic oligonucleotide
  Target: SCNA; (+) strand; PAM type: YTN; PAM sequence: TTG
tatagagtgacaggtctggt

SEQ ID NO: 65594 - DNA, 20 bp, Artificial Sequence
  Description of Artificial Sequence: Synthetic oligonucleotide
  Target: SCNA; (+) strand; PAM type: YTN; PAM sequence: CTG
gtacagtcctactaccaaat

SEQ ID NO: 65595 - DNA, 20 bp, Artificial Sequence
  Description of Artificial Sequence: Synthetic oligonucleotide
  Target: SCNA; (+) strand; PAM type: YTN; PAM sequence: CTA
ctaccaaatctataactata

SEQ ID NO: 65596 - DNA, 20 bp, Artificial Sequence
  Description of Artificial Sequence: Synthetic oligonucleotide
  Target: SCNA; (+) strand; PAM type: YTN; PAM sequence: CTA
ccaaatctataactatagta

SEQ ID NO: 65597 - DNA, 20 bp, Artificial Sequence
  Description of Artificial Sequence: Synthetic oligonucleotide
  Target: SCNA; (+) strand; PAM type: YTN; PAM sequence: CTA
taactatagtattttgaata

SEQ ID NO: 65598 - DNA, 20 bp, Artificial Sequence
  Description of Artificial Sequence: Synthetic oligonucleotide
  Target: SCNA; (+) strand; PAM type: YTN; PAM sequence: CTA
tagtattttgaatattttgc

SEQ ID NO: 65599 - DNA, 20 bp, Artificial Sequence
  Description of Artificial Sequence: Synthetic oligonucleotide
  Target: SCNA; (+) strand; PAM type: YTN; PAM sequence: TTT
tgaatattttgcactatttc

SEQ ID NO: 65600 - DNA, 20 bp, Artificial Sequence
  Description of Artificial Sequence: Synthetic oligonucleotide
  Target: SCNA; (+) strand; PAM type: YTN; PAM sequence: TTT
gaatattttgcactatttca

SEQ ID NO: 65601 - DNA, 20 bp, Artificial Sequence
  Description of Artificial Sequence: Synthetic oligonucleotide
  Target: SCNA; (+) strand; PAM type: YTN; PAM sequence: TTG
aatattttgcactatttcaa

SEQ ID NO: 65602 - DNA, 20 bp, Artificial Sequence
  Description of Artificial Sequence: Synthetic oligonucleotide
  Target: SCNA; (+) strand; PAM type: YTN; PAM sequence: TTT
tgcactatttcaatgtagca

SEQ ID NO: 65603 - DNA, 20 bp, Artificial Sequence
  Description of Artificial Sequence: Synthetic oligonucleotide
  Target: SCNA; (+) strand; PAM type: YTN; PAM sequence: TTT
gcactatttcaatgtagcag

SEQ ID NO: 65604 - DNA, 20 bp, Artificial Sequence
  Description of Artificial Sequence: Synthetic oligonucleotide
  Target: SCNA; (+) strand; PAM type: YTN; PAM sequence: TTG
cactatttcaatgtagcagt

SEQ ID NO: 65605 - DNA, 20 bp, Artificial Sequence
  Description of Artificial Sequence: Synthetic oligonucleotide
  Target: SCNA; (+) strand; PAM type: YTN; PAM sequence: CTA
tttcaatgtagcagtatttt

SEQ ID NO: 65606 - DNA, 20 bp, Artificial Sequence
  Description of Artificial Sequence: Synthetic oligonucleotide
  Target: SCNA; (+) strand; PAM type: YTN; PAM sequence: TTT
caatgtagcagtattttagg

SEQ ID NO: 65607 - DNA, 20 bp, Artificial Sequence
  Description of Artificial Sequence: Synthetic oligonucleotide
  Target: SCNA; (+) strand; PAM type: YTN; PAM sequence: TTC
aatgtagcagtattttaggt

SEQ ID NO: 65608 - DNA, 20 bp, Artificial Sequence
  Description of Artificial Sequence: Synthetic oligonucleotide
  Target: SCNA; (+) strand; PAM type: YTN; PAM sequence: TTT
taggtttggttggcctgact

SEQ ID NO: 65609 - DNA, 20 bp, Artificial Sequence
  Description of Artificial Sequence: Synthetic oligonucleotide
  Target: SCNA; (+) strand; PAM type: YTN; PAM sequence: TTT
aggtttggttggcctgactt

SEQ ID NO: 65610 - DNA, 20 bp, Artificial Sequence
  Description of Artificial Sequence: Synthetic oligonucleotide
  Target: SCNA; (+) strand; PAM type: YTN; PAM sequence: TTA
ggtttggttggcctgacttt

SEQ ID NO: 65611 - DNA, 20 bp, Artificial Sequence
  Description of Artificial Sequence: Synthetic oligonucleotide
  Target: SCNA; (+) strand; PAM type: YTN; PAM sequence: TTT
ggttggcctgactttacaac

SEQ ID NO: 65612 - DNA, 20 bp, Artificial Sequence
  Description of Artificial Sequence: Synthetic oligonucleotide
  Target: SCNA; (+) strand; PAM type: YTN; PAM sequence: TTG
gttggcctgactttacaaca

SEQ ID NO: 65613 - DNA, 20 bp, Artificial Sequence
  Description of Artificial Sequence: Synthetic oligonucleotide
  Target: SCNA; (+) strand; PAM type: YTN; PAM sequence: TTG
gcctgactttacaacaagat

SEQ ID NO: 65614 - DNA, 20 bp, Artificial Sequence
  Description of Artificial Sequence: Synthetic oligonucleotide
  Target: SCNA; (+) strand; PAM type: YTN; PAM sequence: CTG
actttacaacaagataaaaa

SEQ ID NO: 65615 - DNA, 20 bp, Artificial Sequence
  Description of Artificial Sequence: Synthetic oligonucleotide
  Target: SCNA; (+) strand; PAM type: YTN; PAM sequence: CTT
tacaacaagataaaaaattc

SEQ ID NO: 65616 - DNA, 20 bp, Artificial Sequence
  Description of Artificial Sequence: Synthetic oligonucleotide
  Target: SCNA; (+) strand; PAM type: YTN; PAM sequence: TTT
acaacaagataaaaaattcc

SEQ ID NO: 65617 - DNA, 20 bp, Artificial Sequence
  Description of Artificial Sequence: Synthetic oligonucleotide
  Target: SCNA; (+) strand; PAM type: YTN; PAM sequence: TTA
caacaagataaaaaattcca

SEQ ID NO: 65618 - DNA, 20 bp, Artificial Sequence
  Description of Artificial Sequence: Synthetic oligonucleotide
  Target: SCNA; (+) strand; PAM type: YTN; PAM sequence: TTC
caagttttaacaatgtagtg

SEQ ID NO: 65619 - DNA, 20 bp, Artificial Sequence
  Description of Artificial Sequence: Synthetic oligonucleotide
  Target: SCNA; (+) strand; PAM type: YTN; PAM sequence: TTT
taacaatgtagtgacctact

SEQ ID NO: 65620 - DNA, 20 bp, Artificial Sequence
  Description of Artificial Sequence: Synthetic oligonucleotide
  Target: SCNA; (+) strand; PAM type: YTN; PAM sequence: TTT
aacaatgtagtgacctactg

SEQ ID NO: 65621 - DNA, 20 bp, Artificial Sequence
  Description of Artificial Sequence: Synthetic oligonucleotide
  Target: SCNA; (+) strand; PAM type: YTN; PAM sequence: TTA
acaatgtagtgacctactgt

SEQ ID NO: 65622 - DNA, 20 bp, Artificial Sequence
  Description of Artificial Sequence: Synthetic oligonucleotide
  Target: SCNA; (+) strand; PAM type: YTN; PAM sequence: CTA
ctgtgttttagatgttgaaa

SEQ ID NO: 65623 - DNA, 20 bp, Artificial Sequence
  Description of Artificial Sequence: Synthetic oligonucleotide
  Target: SCNA; (+) strand; PAM type: YTN; PAM sequence: CTG
tgttttagatgttgaaatct

SEQ ID NO: 65624 - DNA, 20 bp, Artificial Sequence
  Description of Artificial Sequence: Synthetic oligonucleotide
  Target: SCNA; (+) strand; PAM type: YTN; PAM sequence: TTT
tagatgttgaaatctataat

SEQ ID NO: 65625 - DNA, 20 bp, Artificial Sequence
  Description of Artificial Sequence: Synthetic oligonucleotide
  Target: SCNA; (+) strand; PAM type: YTN; PAM sequence: TTT
agatgttgaaatctataatt

SEQ ID NO: 65626 - DNA, 20 bp, Artificial Sequence
  Description of Artificial Sequence: Synthetic oligonucleotide
  Target: SCNA; (+) strand; PAM type: YTN; PAM sequence: TTA
gatgttgaaatctataattt

SEQ ID NO: 65627 - DNA, 20 bp, Artificial Sequence
  Description of Artificial Sequence: Synthetic oligonucleotide
  Target: SCNA; (+) strand; PAM type: YTN; PAM sequence: TTG
aaatctataattttctatca

SEQ ID NO: 65628 - DNA, 20 bp, Artificial Sequence
  Description of Artificial Sequence: Synthetic oligonucleotide
  Target: SCNA; (+) strand; PAM type: YTN; PAM sequence: CTA
taattttctatcaacatttt

SEQ ID NO: 65629 - DNA, 20 bp, Artificial Sequence
  Description of Artificial Sequence: Synthetic oligonucleotide
  Target: SCNA; (+) strand; PAM type: YTN; PAM sequence: TTT
tctatcaacattttctacta

SEQ ID NO: 65630 - DNA, 20 bp, Artificial Sequence
  Description of Artificial Sequence: Synthetic oligonucleotide
  Target: SCNA; (+) strand; PAM type: YTN; PAM sequence: TTT
ctatcaacattttctactaa

SEQ ID NO: 65631 - DNA, 20 bp, Artificial Sequence
  Description of Artificial Sequence: Synthetic oligonucleotide
  Target: SCNA; (+) strand; PAM type: YTN; PAM sequence: TTC
tatcaacattttctactaac

SEQ ID NO: 65632 - DNA, 20 bp, Artificial Sequence
  Description of Artificial Sequence: Synthetic oligonucleotide
  Target: SCNA; (+) strand; PAM type: YTN; PAM sequence: CTA
tcaacattttctactaacct

SEQ ID NO: 65633 - DNA, 20 bp, Artificial Sequence
  Description of Artificial Sequence: Synthetic oligonucleotide
  Target: SCNA; (+) strand; PAM type: YTN; PAM sequence: TTT
tctactaacctgtaaaagac

SEQ ID NO: 65634 - DNA, 20 bp, Artificial Sequence
  Description of Artificial Sequence: Synthetic oligonucleotide
  Target: SCNA; (+) strand; PAM type: YTN; PAM sequence: TTT
ctactaacctgtaaaagaca

SEQ ID NO: 65635 - DNA, 20 bp, Artificial Sequence
  Description of Artificial Sequence: Synthetic oligonucleotide
  Target: SCNA; (+) strand; PAM type: YTN; PAM sequence: TTC
tactaacctgtaaaagacat

SEQ ID NO: 65636 - DNA, 20 bp, Artificial Sequence
  Description of Artificial Sequence: Synthetic oligonucleotide
  Target: SCNA; (+) strand; PAM type: YTN; PAM sequence: CTA
ctaacctgtaaaagacatgc

SEQ ID NO: 65637 - DNA, 20 bp, Artificial Sequence
  Description of Artificial Sequence: Synthetic oligonucleotide
  Target: SCNA; (+) strand; PAM type: YTN; PAM sequence: CTA
acctgtaaaagacatgcctt

SEQ ID NO: 65638 - DNA, 20 bp, Artificial Sequence
  Description of Artificial Sequence: Synthetic oligonucleotide
  Target: SCNA; (+) strand; PAM type: YTN; PAM sequence: CTG
taaaagacatgccttagaat

SEQ ID NO: 65639 - DNA, 20 bp, Artificial Sequence
  Description of Artificial Sequence: Synthetic oligonucleotide
  Target: SCNA; (+) strand; PAM type: YTN; PAM sequence: CTT
agaatgtgggaacacacaca

SEQ ID NO: 65640 - DNA, 20 bp, Artificial Sequence
  Description of Artificial Sequence: Synthetic oligonucleotide
  Target: SCNA; (+) strand; PAM type: YTN; PAM sequence: TTA
gaatgtgggaacacacacaa

SEQ ID NO: 65641 - DNA, 20 bp, Artificial Sequence
  Description of Artificial Sequence: Synthetic oligonucleotide
  Target: SCNA; (+) strand; PAM type: YTN; PAM sequence: CTC
acagacacatacacacgaag

SEQ ID NO: 65642 - DNA, 20 bp, Artificial Sequence
  Description of Artificial Sequence: Synthetic oligonucleotide
  Target: SCNA; (+) strand; PAM type: YTN; PAM sequence: CTG
atgatctctggtgccacttc

SEQ ID NO: 65643 - DNA, 20 bp, Artificial Sequence
  Description of Artificial Sequence: Synthetic oligonucleotide
  Target: SCNA; (+) strand; PAM type: YTN; PAM sequence: CTC
tggtgccacttcctgagatc

SEQ ID NO: 65644 - DNA, 20 bp, Artificial Sequence
  Description of Artificial Sequence: Synthetic oligonucleotide
  Target: SCNA; (+) strand; PAM type: YTN; PAM sequence: CTG
gtgccacttcctgagatcat

SEQ ID NO: 65645 - DNA, 20 bp, Artificial Sequence
  Description of Artificial Sequence: Synthetic oligonucleotide
  Target: SCNA; (+) strand; PAM type: YTN; PAM sequence: CTT
cctgagatcattttgaatgt

SEQ ID NO: 65646 - DNA, 20 bp, Artificial Sequence
  Description of Artificial Sequence: Synthetic oligonucleotide
  Target: SCNA; (+) strand; PAM type: YTN; PAM sequence: TTC
ctgagatcattttgaatgtt

SEQ ID NO: 65647 - DNA, 20 bp, Artificial Sequence
  Description of Artificial Sequence: Synthetic oligonucleotide
  Target: SCNA; (+) strand; PAM type: YTN; PAM sequence: CTG
agatcattttgaatgttcta

SEQ ID NO: 65648 - DNA, 20 bp, Artificial Sequence
  Description of Artificial Sequence: Synthetic oligonucleotide
  Target: SCNA; (+) strand; PAM type: YTN; PAM sequence: TTT
tgaatgttctaattaaaaag

SEQ ID NO: 65649 - DNA, 20 bp, Artificial Sequence
  Description of Artificial Sequence: Synthetic oligonucleotide
  Target: SCNA; (+) strand; PAM type: YTN; PAM sequence: TTT
gaatgttctaattaaaaagt

SEQ ID NO: 65650 - DNA, 20 bp, Artificial Sequence
  Description of Artificial Sequence: Synthetic oligonucleotide
  Target: SCNA; (+) strand; PAM type: YTN; PAM sequence: TTG
aatgttctaattaaaaagtg

SEQ ID NO: 65651 - DNA, 20 bp, Artificial Sequence
  Description of Artificial Sequence: Synthetic oligonucleotide
  Target: SCNA; (+) strand; PAM type: YTN; PAM sequence: TTC
taattaaaaagtgcaaagta

SEQ ID NO: 65652 - DNA, 20 bp, Artificial Sequence
  Description of Artificial Sequence: Synthetic oligonucleotide
  Target: SCNA; (+) strand; PAM type: YTN; PAM sequence: CTA
attaaaaagtgcaaagtata

SEQ ID NO: 65653 - DNA, 20 bp, Artificial Sequence
  Description of Artificial Sequence: Synthetic oligonucleotide
  Target: SCNA; (+) strand; PAM type: YTN; PAM sequence: TTA
aaaagtgcaaagtataattt

SEQ ID NO: 65654 - DNA, 20 bp, Artificial Sequence
  Description of Artificial Sequence: Synthetic oligonucleotide
  Target: SCNA; (+) strand; PAM type: YTN; PAM sequence: TTT
tttgtcataaattatacatg

SEQ ID NO: 65655 - DNA, 20 bp, Artificial Sequence
  Description of Artificial Sequence: Synthetic oligonucleotide
  Target: SCNA; (+) strand; PAM type: YTN; PAM sequence: TTT
ttgtcataaattatacatgc

SEQ ID NO: 65656 - DNA, 20 bp, Artificial Sequence
  Description of Artificial Sequence: Synthetic oligonucleotide
  Target: SCNA; (+) strand; PAM type: YTN; PAM sequence: TTT
tgtcataaattatacatgct

SEQ ID NO: 65657 - DNA, 20 bp, Artificial Sequence
  Description of Artificial Sequence: Synthetic oligonucleotide
  Target: SCNA; (+) strand; PAM type: YTN; PAM sequence: TTT
gtcataaattatacatgcta

SEQ ID NO: 65658 - DNA, 20 bp, Artificial Sequence
  Description of Artificial Sequence: Synthetic oligonucleotide
  Target: SCNA; (+) strand; PAM type: YTN; PAM sequence: TTG
tcataaattatacatgctat

SEQ ID NO: 65659 - DNA, 20 bp, Artificial Sequence
  Description of Artificial Sequence: Synthetic oligonucleotide
  Target: SCNA; (+) strand; PAM type: YTN; PAM sequence: TTA
tacatgctatgctattatat

SEQ ID NO: 65660 - DNA, 20 bp, Artificial Sequence
  Description of Artificial Sequence: Synthetic oligonucleotide
  Target: SCNA; (+) strand; PAM type: YTN; PAM sequence: CTA
tgctattatatatgctaagc

SEQ ID NO: 65661 - DNA, 20 bp, Artificial Sequence
  Description of Artificial Sequence: Synthetic oligonucleotide
  Target: SCNA; (+) strand; PAM type: YTN; PAM sequence: CTA
ttatatatgctaagccaaac

SEQ ID NO: 65662 - DNA, 20 bp, Artificial Sequence
  Description of Artificial Sequence: Synthetic oligonucleotide
  Target: SCNA; (+) strand; PAM type: YTN; PAM sequence: TTA
tatatgctaagccaaaccta

SEQ ID NO: 65663 - DNA, 20 bp, Artificial Sequence
  Description of Artificial Sequence: Synthetic oligonucleotide
  Target: SCNA; (+) strand; PAM type: YTN; PAM sequence: CTA
agccaaacctagcaacaagg

SEQ ID NO: 65664 - DNA, 20 bp, Artificial Sequence
  Description of Artificial Sequence: Synthetic oligonucleotide
  Target: SCNA; (+) strand; PAM type: YTN; PAM sequence: CTA
gcaacaaggctgagtgaaga

SEQ ID NO: 65665 - DNA, 20 bp, Artificial Sequence
  Description of Artificial Sequence: Synthetic oligonucleotide
  Target: SCNA; (+) strand; PAM type: YTN; PAM sequence: CTG
agtgaagatgtggctcctgg

SEQ ID NO: 65666 - DNA, 20 bp, Artificial Sequence
  Description of Artificial Sequence: Synthetic oligonucleotide
  Target: SCNA; (+) strand; PAM type: YTN; PAM sequence: CTC
ctgggtcatatgctaggctt

SEQ ID NO: 65667 - DNA, 20 bp, Artificial Sequence
  Description of Artificial Sequence: Synthetic oligonucleotide
  Target: SCNA; (+) strand; PAM type: YTN; PAM sequence: CTG
ggtcatatgctaggctttct

SEQ ID NO: 65668 - DNA, 20 bp, Artificial Sequence
  Description of Artificial Sequence: Synthetic oligonucleotide
  Target: SCNA; (+) strand; PAM type: YTN; PAM sequence: CTA
ggctttctttcggcaaatgg

SEQ ID NO: 65669 - DNA, 20 bp, Artificial Sequence
  Description of Artificial Sequence: Synthetic oligonucleotide
  Target: SCNA; (+) strand; PAM type: YTN; PAM sequence: CTT
tctttcggcaaatggacttg

SEQ ID NO: 65670 - DNA, 20 bp, Artificial Sequence
  Description of Artificial Sequence: Synthetic oligonucleotide
  Target: SCNA; (+) strand; PAM type: YTN; PAM sequence: TTT
ctttcggcaaatggacttgc

SEQ ID NO: 65671 - DNA, 20 bp, Artificial Sequence
  Description of Artificial Sequence: Synthetic oligonucleotide
  Target: SCNA; (+) strand; PAM type: YTN; PAM sequence: TTC
tttcggcaaatggacttgct

SEQ ID NO: 65672 - DNA, 20 bp, Artificial Sequence
  Description of Artificial Sequence: Synthetic oligonucleotide
  Target: SCNA; (+) strand; PAM type: YTN; PAM sequence: CTT
tcggcaaatggacttgctct

SEQ ID NO: 65673 - DNA, 20 bp, Artificial Sequence
  Description of Artificial Sequence: Synthetic oligonucleotide
  Target: SCNA; (+) strand; PAM type: YTN; PAM sequence: TTT
cggcaaatggacttgctctc

SEQ ID NO: 65674 - DNA, 20 bp, Artificial Sequence
  Description of Artificial Sequence: Synthetic oligonucleotide
  Target: SCNA; (+) strand; PAM type: YTN; PAM sequence: TTC
ggcaaatggacttgctctcc

SEQ ID NO: 65675 - DNA, 20 bp, Artificial Sequence
  Description of Artificial Sequence: Synthetic oligonucleotide
  Target: SCNA; (+) strand; PAM type: YTN; PAM sequence: CTT
gctctccctcagttatgtta

SEQ ID NO: 65676 - DNA, 20 bp, Artificial Sequence
  Description of Artificial Sequence: Synthetic oligonucleotide
  Target: SCNA; (+) strand; PAM type: YTN; PAM sequence: TTG
ctctccctcagttatgttac

SEQ ID NO: 65677 - DNA, 20 bp, Artificial Sequence
  Description of Artificial Sequence: Synthetic oligonucleotide
  Target: SCNA; (+) strand; PAM type: YTN; PAM sequence: CTC
tccctcagttatgttacata

SEQ ID NO: 65678 - DNA, 20 bp, Artificial Sequence
  Description of Artificial Sequence: Synthetic oligonucleotide
  Target: SCNA; (+) strand; PAM type: YTN; PAM sequence: CTC
cctcagttatgttacatacc

SEQ ID NO: 65679 - DNA, 20 bp, Artificial Sequence
  Description of Artificial Sequence: Synthetic oligonucleotide
  Target: SCNA; (+) strand; PAM type: YTN; PAM sequence: CTC
agttatgttacatacctact

SEQ ID NO: 65680 - DNA, 20 bp, Artificial Sequence
  Description of Artificial Sequence: Synthetic oligonucleotide
  Target: SCNA; (+) strand; PAM type: YTN; PAM sequence: TTA
tgttacatacctactcagat

SEQ ID NO: 65681 - DNA, 20 bp, Artificial Sequence
  Description of Artificial Sequence: Synthetic oligonucleotide
  Target: SCNA; (+) strand; PAM type: YTN; PAM sequence: TTA
catacctactcagatcaggt

SEQ ID NO: 65682 - DNA, 20 bp, Artificial Sequence
  Description of Artificial Sequence: Synthetic oligonucleotide
  Target: SCNA; (+) strand; PAM type: YTN; PAM sequence: CTA
ctcagatcaggtctcagcaa

SEQ ID NO: 65683 - DNA, 20 bp, Artificial Sequence
  Description of Artificial Sequence: Synthetic oligonucleotide
  Target: SCNA; (+) strand; PAM type: YTN; PAM sequence: CTC
agatcaggtctcagcaaatg

SEQ ID NO: 65684 - DNA, 20 bp, Artificial Sequence
  Description of Artificial Sequence: Synthetic oligonucleotide
  Target: SCNA; (+) strand; PAM type: YTN; PAM sequence: CTC
agcaaatgtacaaattacta

SEQ ID NO: 65685 - DNA, 20 bp, Artificial Sequence
  Description of Artificial Sequence: Synthetic oligonucleotide
  Target: SCNA; (+) strand; PAM type: YTN; PAM sequence: TTA
ctatgtcatcagccatctgg

SEQ ID NO: 65686 - DNA, 20 bp, Artificial Sequence
  Description of Artificial Sequence: Synthetic oligonucleotide
  Target: SCNA; (+) strand; PAM type: YTN; PAM sequence: CTA
tgtcatcagccatctggatc

SEQ ID NO: 65687 - DNA, 20 bp, Artificial Sequence
  Description of Artificial Sequence: Synthetic oligonucleotide
  Target: SCNA; (+) strand; PAM type: YTN; PAM sequence: CTG
gatcacttgggaatagtcac

SEQ ID NO: 65688 - DNA, 20 bp, Artificial Sequence
  Description of Artificial Sequence: Synthetic oligonucleotide
  Target: SCNA; (+) strand; PAM type: YTN; PAM sequence: CTT
gggaatagtcacattggtga

SEQ ID NO: 65689 - DNA, 20 bp, Artificial Sequence
  Description of Artificial Sequence: Synthetic oligonucleotide
  Target: SCNA; (+) strand; PAM type: YTN; PAM sequence: TTG
ggaatagtcacattggtgaa

SEQ ID NO: 65690 - DNA, 20 bp, Artificial Sequence
  Description of Artificial Sequence: Synthetic oligonucleotide
  Target: SCNA; (+) strand; PAM type: YTN; PAM sequence: TTG
gtgaacgctgtaagtcatat

SEQ ID NO: 65691 - DNA, 20 bp, Artificial Sequence
  Description of Artificial Sequence: Synthetic oligonucleotide
  Target: SCNA; (+) strand; PAM type: YTN; PAM sequence: CTG
taagtcatatcttaaataca

SEQ ID NO: 65692 - DNA, 20 bp, Artificial Sequence
  Description of Artificial Sequence: Synthetic oligonucleotide
  Target: SCNA; (+) strand; PAM type: YTN; PAM sequence: CTT
aaatacattatacataatcc

SEQ ID NO: 65693 - DNA, 20 bp, Artificial Sequence
  Description of Artificial Sequence: Synthetic oligonucleotide
  Target: SCNA; (+) strand; PAM type: YTN; PAM sequence: TTA
aatacattatacataatcca

SEQ ID NO: 65694 - DNA, 20 bp, Artificial Sequence
  Description of Artificial Sequence: Synthetic oligonucleotide
  Target: SCNA; (+) strand; PAM type: YTN; PAM sequence: TTA
tacataatccatacctacag

SEQ ID NO: 65695 - DNA, 20 bp, Artificial Sequence
  Description of Artificial Sequence: Synthetic oligonucleotide
  Target: SCNA; (+) strand; PAM type: YTN; PAM sequence: CTA
cagattgagaatgcaaatct

SEQ ID NO: 65696 - DNA, 20 bp, Artificial Sequence
  Description of Artificial Sequence: Synthetic oligonucleotide
  Target: SCNA; (+) strand; PAM type: YTN; PAM sequence: TTG
agaatgcaaatctattttaa

SEQ ID NO: 65697 - DNA, 20 bp, Artificial Sequence
  Description of Artificial Sequence: Synthetic oligonucleotide
  Target: SCNA; (+) strand; PAM type: YTN; PAM sequence: CTA
ttttaattaaatgatacctt

SEQ ID NO: 65698 - DNA, 20 bp, Artificial Sequence
  Description of Artificial Sequence: Synthetic oligonucleotide
  Target: SCNA; (+) strand; PAM type: YTN; PAM sequence: TTT
taattaaatgatacctttag

SEQ ID NO: 65699 - DNA, 20 bp, Artificial Sequence
  Description of Artificial Sequence: Synthetic oligonucleotide
  Target: SCNA; (+) strand; PAM type: YTN; PAM sequence: TTT
aattaaatgatacctttaga

SEQ ID NO: 65700 - DNA, 20 bp, Artificial Sequence
  Description of Artificial Sequence: Synthetic oligonucleotide
  Target: SCNA; (+) strand; PAM type: YTN; PAM sequence: TTA
attaaatgatacctttagag

SEQ ID NO: 65701 - DNA, 20 bp, Artificial Sequence
  Description of Artificial Sequence: Synthetic oligonucleotide
  Target: SCNA; (+) strand; PAM type: YTN; PAM sequence: TTA
aatgatacctttagagaacc

SEQ ID NO: 65702 - DNA, 20 bp, Artificial Sequence
  Description of Artificial Sequence: Synthetic oligonucleotide
  Target: SCNA; (+) strand; PAM type: YTN; PAM sequence: CTT
tagagaacccagtcttacac

SEQ ID NO: 65703 - DNA, 20 bp, Artificial Sequence
  Description of Artificial Sequence: Synthetic oligonucleotide
  Target: SCNA; (+) strand; PAM type: YTN; PAM sequence: TTT
agagaacccagtcttacaca

SEQ ID NO: 65704 - DNA, 20 bp, Artificial Sequence
  Description of Artificial Sequence: Synthetic oligonucleotide
  Target: SCNA; (+) strand; PAM type: YTN; PAM sequence: TTA
gagaacccagtcttacacat

SEQ ID NO: 65705 - DNA, 20 bp, Artificial Sequence
  Description of Artificial Sequence: Synthetic oligonucleotide
  Target: SCNA; (+) strand; PAM type: YTN; PAM sequence: CTT
acacataaataacatatatt

SEQ ID NO: 65706 - DNA, 20 bp, Artificial Sequence
  Description of Artificial Sequence: Synthetic oligonucleotide
  Target: SCNA; (+) strand; PAM type: YTN; PAM sequence: TTA
cacataaataacatatattt

SEQ ID NO: 65707 - DNA, 20 bp, Artificial Sequence
  Description of Artificial Sequence: Synthetic oligonucleotide
  Target: SCNA; (+) strand; PAM type: YTN; PAM sequence: TTT
agaagccatttatgctctac

SEQ ID NO: 65708 - DNA, 20 bp, Artificial Sequence
  Description of Artificial Sequence: Synthetic oligonucleotide
  Target: SCNA; (+) strand; PAM type: YTN; PAM sequence: TTA
gaagccatttatgctctact

SEQ ID NO: 65709 - DNA, 20 bp, Artificial Sequence
  Description of Artificial Sequence: Synthetic oligonucleotide
  Target: SCNA; (+) strand; PAM type: YTN; PAM sequence: TTT
atgctctactttgtttatct

SEQ ID NO: 65710 - DNA, 20 bp, Artificial Sequence
  Description of Artificial Sequence: Synthetic oligonucleotide
  Target: SCNA; (+) strand; PAM type: YTN; PAM sequence: TTA
tgctctactttgtttatctt

SEQ ID NO: 65711 - DNA, 20 bp, Artificial Sequence
  Description of Artificial Sequence: Synthetic oligonucleotide
  Target: SCNA; (+) strand; PAM type: YTN; PAM sequence: CTC
tactttgtttatcttttgtt

SEQ ID NO: 65712 - DNA, 20 bp, Artificial Sequence
  Description of Artificial Sequence: Synthetic oligonucleotide
  Target: SCNA; (+) strand; PAM type: YTN; PAM sequence: CTA
ctttgtttatcttttgttta

SEQ ID NO: 65713 - DNA, 20 bp, Artificial Sequence
  Description of Artificial Sequence: Synthetic oligonucleotide
  Target: SCNA; (+) strand; PAM type: YTN; PAM sequence: CTT
tgtttatcttttgtttagag

SEQ ID NO: 65714 - DNA, 20 bp, Artificial Sequence
  Description of Artificial Sequence: Synthetic oligonucleotide
  Target: SCNA; (+) strand; PAM type: YTN; PAM sequence: TTT
gtttatcttttgtttagagg

SEQ ID NO: 65715 - DNA, 20 bp, Artificial Sequence
  Description of Artificial Sequence: Synthetic oligonucleotide
  Target: SCNA; (+) strand; PAM type: YTN; PAM sequence: TTG
tttatcttttgtttagaggc

SEQ ID NO: 65716 - DNA, 20 bp, Artificial Sequence
  Description of Artificial Sequence: Synthetic oligonucleotide
  Target: SCNA; (+) strand; PAM type: YTN; PAM sequence: TTT
atcttttgtttagaggcagg

SEQ ID NO: 65717 - DNA, 20 bp, Artificial Sequence
  Description of Artificial Sequence: Synthetic oligonucleotide
  Target: SCNA; (+) strand; PAM type: YTN; PAM sequence: TTA
tcttttgtttagaggcaggg

SEQ ID NO: 65718 - DNA, 20 bp, Artificial Sequence
  Description of Artificial Sequence: Synthetic oligonucleotide
  Target: SCNA; (+) strand; PAM type: YTN; PAM sequence: CTT
ttgtttagaggcagggtctt

SEQ ID NO: 65719 - DNA, 20 bp, Artificial Sequence
  Description of Artificial Sequence: Synthetic oligonucleotide
  Target: SCNA; (+) strand; PAM type: YTN; PAM sequence: TTT
tgtttagaggcagggtcttg

SEQ ID NO: 65720 - DNA, 20 bp, Artificial Sequence
  Description of Artificial Sequence: Synthetic oligonucleotide
  Target: SCNA; (+) strand; PAM type: YTN; PAM sequence: TTT
gtttagaggcagggtcttgc

SEQ ID NO: 65721 - DNA, 20 bp, Artificial Sequence
  Description of Artificial Sequence: Synthetic oligonucleotide
  Target: SCNA; (+) strand; PAM type: YTN; PAM sequence: TTG
tttagaggcagggtcttgcc

SEQ ID NO: 65722 - DNA, 20 bp, Artificial Sequence
  Description of Artificial Sequence: Synthetic oligonucleotide
  Target: SCNA; (+) strand; PAM type: YTN; PAM sequence: TTT
agaggcagggtcttgcccta

SEQ ID NO: 65723 - DNA, 20 bp, Artificial Sequence
  Description of Artificial Sequence: Synthetic oligonucleotide
  Target: SCNA; (+) strand; PAM type: YTN; PAM sequence: TTA
gaggcagggtcttgccctat

SEQ ID NO: 65724 - DNA, 20 bp, Artificial Sequence
  Description of Artificial Sequence: Synthetic oligonucleotide
  Target: SCNA; (+) strand; PAM type: YTN; PAM sequence: CTT
gccctattgcccaggctgta

SEQ ID NO: 65725 - DNA, 20 bp, Artificial Sequence
  Description of Artificial Sequence: Synthetic oligonucleotide
  Target: SCNA; (+) strand; PAM type: YTN; PAM sequence: TTG
ccctattgcccaggctgtaa

SEQ ID NO: 65726 - DNA, 20 bp, Artificial Sequence
  Description of Artificial Sequence: Synthetic oligonucleotide
  Target: SCNA; (+) strand; PAM type: YTN; PAM sequence: CTA
ttgcccaggctgtaatgcag

SEQ ID NO: 65727 - DNA, 20 bp, Artificial Sequence
  Description of Artificial Sequence: Synthetic oligonucleotide
  Target: SCNA; (+) strand; PAM type: YTN; PAM sequence: TTG
cccaggctgtaatgcagtga

SEQ ID NO: 65728 - DNA, 20 bp, Artificial Sequence
  Description of Artificial Sequence: Synthetic oligonucleotide
  Target: SCNA; (+) strand; PAM type: YTN; PAM sequence: CTG
taatgcagtgatacaatcat

SEQ ID NO: 65729 - DNA, 20 bp, Artificial Sequence
  Description of Artificial Sequence: Synthetic oligonucleotide
  Target: SCNA; (+) strand; PAM type: YTN; PAM sequence: CTC
actgtagtctccaactcctg

SEQ ID NO: 65730 - DNA, 20 bp, Artificial Sequence
  Description of Artificial Sequence: Synthetic oligonucleotide
  Target: SCNA; (+) strand; PAM type: YTN; PAM sequence: CTG
tagtctccaactcctgggcc

SEQ ID NO: 65731 - DNA, 20 bp, Artificial Sequence
  Description of Artificial Sequence: Synthetic oligonucleotide
  Target: SCNA; (+) strand; PAM type: YTN; PAM sequence: CTC
caactcctgggcccaagtga

SEQ ID NO: 65732 - DNA, 20 bp, Artificial Sequence
  Description of Artificial Sequence: Synthetic oligonucleotide
  Target: SCNA; (+) strand; PAM type: YTN; PAM sequence: CTC
ctgggcccaagtgatcctcc

SEQ ID NO: 65733 - DNA, 20 bp, Artificial Sequence
  Description of Artificial Sequence: Synthetic oligonucleotide
  Target: SCNA; (+) strand; PAM type: YTN; PAM sequence: CTG
ggcccaagtgatcctccagc

SEQ ID NO: 65734 - DNA, 20 bp, Artificial Sequence
  Description of Artificial Sequence: Synthetic oligonucleotide
  Target: SCNA; (+) strand; PAM type: YTN; PAM sequence: CTC
cagcctcagcctcccaaata

SEQ ID NO: 65735 - DNA, 20 bp, Artificial Sequence
  Description of Artificial Sequence: Synthetic oligonucleotide
  Target: SCNA; (+) strand; PAM type: YTN; PAM sequence: CTC
agcctcccaaatagctggga

SEQ ID NO: 65736 - DNA, 20 bp, Artificial Sequence
  Description of Artificial Sequence: Synthetic oligonucleotide
  Target: SCNA; (+) strand; PAM type: YTN; PAM sequence: CTC
ccaaatagctgggactatag

SEQ ID NO: 65737 - DNA, 20 bp, Artificial Sequence
  Description of Artificial Sequence: Synthetic oligonucleotide
  Target: SCNA; (+) strand; PAM type: YTN; PAM sequence: CTG
ggactataggcttacaccac

SEQ ID NO: 65738 - DNA, 20 bp, Artificial Sequence
  Description of Artificial Sequence: Synthetic oligonucleotide
  Target: SCNA; (+) strand; PAM type: YTN; PAM sequence: CTA
taggcttacaccaccatgct

SEQ ID NO: 65739 - DNA, 20 bp, Artificial Sequence
  Description of Artificial Sequence: Synthetic oligonucleotide
  Target: SCNA; (+) strand; PAM type: YTN; PAM sequence: CTT
acaccaccatgctcggctat

SEQ ID NO: 65740 - DNA, 20 bp, Artificial Sequence
  Description of Artificial Sequence: Synthetic oligonucleotide
  Target: SCNA; (+) strand; PAM type: YTN; PAM sequence: TTA
caccaccatgctcggctatt

SEQ ID NO: 65741 - DNA, 20 bp, Artificial Sequence
  Description of Artificial Sequence: Synthetic oligonucleotide
  Target: SCNA; (+) strand; PAM type: YTN; PAM sequence: CTC
ggctatttaaattttttttt

SEQ ID NO: 65742 - DNA, 20 bp, Artificial Sequence
  Description of Artificial Sequence: Synthetic oligonucleotide
  Target: SCNA; (+) strand; PAM type: YTN; PAM sequence: CTA
tttaaattttttttttttat

SEQ ID NO: 65743 - DNA, 20 bp, Artificial Sequence
  Description of Artificial Sequence: Synthetic oligonucleotide
  Target: SCNA; (+) strand; PAM type: YTN; PAM sequence: TTT
aaattttttttttttataga

SEQ ID NO: 65744 - DNA, 20 bp, Artificial Sequence
  Description of Artificial Sequence: Synthetic oligonucleotide
  Target: SCNA; (+) strand; PAM type: YTN; PAM sequence: TTA
aattttttttttttatagag

SEQ ID NO: 65745 - DNA, 20 bp, Artificial Sequence
  Description of Artificial Sequence: Synthetic oligonucleotide
  Target: SCNA; (+) strand; PAM type: YTN; PAM sequence: TTT
tttttttttatagagatgaa

SEQ ID NO: 65746 - DNA, 20 bp, Artificial Sequence
  Description of Artificial Sequence: Synthetic oligonucleotide
  Target: SCNA; (+) strand; PAM type: YTN; PAM sequence: TTT
ttttttttatagagatgaag

SEQ ID NO: 65747 - DNA, 20 bp, Artificial Sequence
  Description of Artificial Sequence: Synthetic oligonucleotide
  Target: SCNA; (+) strand; PAM type: YTN; PAM sequence: TTT
tttttttatagagatgaagt

SEQ ID NO: 65748 - DNA, 20 bp, Artificial Sequence
  Description of Artificial Sequence: Synthetic oligonucleotide
  Target: SCNA; (+) strand; PAM type: YTN; PAM sequence: TTT
ttttttatagagatgaagtt

SEQ ID NO: 65749 - DNA, 20 bp, Artificial Sequence
  Description of Artificial Sequence: Synthetic oligonucleotide
  Target: SCNA; (+) strand; PAM type: YTN; PAM sequence: TTT
tttttatagagatgaagttt

SEQ ID NO: 65750 - DNA, 20 bp, Artificial Sequence
  Description of Artificial Sequence: Synthetic oligonucleotide
  Target: SCNA; (+) strand; PAM type: YTN; PAM sequence: TTT
ttttatagagatgaagtttc

SEQ ID NO: 65751 - DNA, 20 bp, Artificial Sequence
  Description of Artificial Sequence: Synthetic oligonucleotide
  Target: SCNA; (+) strand; PAM type: YTN; PAM sequence: TTT
tttatagagatgaagtttca

SEQ ID NO: 65752 - DNA, 20 bp, Artificial Sequence
  Description of Artificial Sequence: Synthetic oligonucleotide
  Target: SCNA; (+) strand; PAM type: YTN; PAM sequence: TTT
ttatagagatgaagtttcat

SEQ ID NO: 65753 - DNA, 20 bp, Artificial Sequence
  Description of Artificial Sequence: Synthetic oligonucleotide
  Target: SCNA; (+) strand; PAM type: YTN; PAM sequence: TTT
tatagagatgaagtttcatt

SEQ ID NO: 65754 - DNA, 20 bp, Artificial Sequence
  Description of Artificial Sequence: Synthetic oligonucleotide
  Target: SCNA; (+) strand; PAM type: YTN; PAM sequence: TTT
atagagatgaagtttcatta

SEQ ID NO: 65755 - DNA, 20 bp, Artificial Sequence
  Description of Artificial Sequence: Synthetic oligonucleotide
  Target: SCNA; (+) strand; PAM type: YTN; PAM sequence: TTA
tagagatgaagtttcattat

SEQ ID NO: 65756 - DNA, 20 bp, Artificial Sequence
  Description of Artificial Sequence: Synthetic oligonucleotide
  Target: SCNA; (+) strand; PAM type: YTN; PAM sequence: TTT
cattatgttgcccaggctgg

SEQ ID NO: 65757 - DNA, 20 bp, Artificial Sequence
  Description of Artificial Sequence: Synthetic oligonucleotide
  Target: SCNA; (+) strand; PAM type: YTN; PAM sequence: TTC
attatgttgcccaggctggt

SEQ ID NO: 65758 - DNA, 20 bp, Artificial Sequence
  Description of Artificial Sequence: Synthetic oligonucleotide
  Target: SCNA; (+) strand; PAM type: YTN; PAM sequence: TTA
tgttgcccaggctggtctca

SEQ ID NO: 65759 - DNA, 20 bp, Artificial Sequence
  Description of Artificial Sequence: Synthetic oligonucleotide
  Target: SCNA; (+) strand; PAM type: YTN; PAM sequence: TTG
cccaggctggtctcaaactc

SEQ ID NO: 65760 - DNA, 20 bp, Artificial Sequence
  Description of Artificial Sequence: Synthetic oligonucleotide
  Target: SCNA; (+) strand; PAM type: YTN; PAM sequence: CTG
gtctcaaactcctggactca

SEQ ID NO: 65761 - DNA, 20 bp, Artificial Sequence
  Description of Artificial Sequence: Synthetic oligonucleotide
  Target: SCNA; (+) strand; PAM type: YTN; PAM sequence: CTC
aaactcctggactcaagtga

SEQ ID NO: 65762 - DNA, 20 bp, Artificial Sequence
  Description of Artificial Sequence: Synthetic oligonucleotide
  Target: SCNA; (+) strand; PAM type: YTN; PAM sequence: CTC
ctggactcaagtgatcctcc

SEQ ID NO: 65763 - DNA, 20 bp, Artificial Sequence
  Description of Artificial Sequence: Synthetic oligonucleotide
  Target: SCNA; (+) strand; PAM type: YTN; PAM sequence: CTG
gactcaagtgatcctcctgc

SEQ ID NO: 65764 - DNA, 20 bp, Artificial Sequence
  Description of Artificial Sequence: Synthetic oligonucleotide
  Target: SCNA; (+) strand; PAM type: YTN; PAM sequence: CTC
aagtgatcctcctgcgtcag

SEQ ID NO: 65765 - DNA, 20 bp, Artificial Sequence
  Description of Artificial Sequence: Synthetic oligonucleotide
  Target: SCNA; (+) strand; PAM type: YTN; PAM sequence: CTC
ctgcgtcagcctccgaaagt

SEQ ID NO: 65766 - DNA, 20 bp, Artificial Sequence
  Description of Artificial Sequence: Synthetic oligonucleotide
  Target: SCNA; (+) strand; PAM type: YTN; PAM sequence: CTG
cgtcagcctccgaaagtgct

SEQ ID NO: 65767 - DNA, 20 bp, Artificial Sequence
  Description of Artificial Sequence: Synthetic oligonucleotide
  Target: SCNA; (+) strand; PAM type: YTN; PAM sequence: CTC
cgaaagtgctgggattacag

SEQ ID NO: 65768 - DNA, 20 bp, Artificial Sequence
  Description of Artificial Sequence: Synthetic oligonucleotide
  Target: SCNA; (+) strand; PAM type: YTN; PAM sequence: CTG
ggattacaggcatgagccac

SEQ ID NO: 65769 - DNA, 20 bp, Artificial Sequence
  Description of Artificial Sequence: Synthetic oligonucleotide
  Target: SCNA; (+) strand; PAM type: YTN; PAM sequence: TTA
caggcatgagccactgcacc

SEQ ID NO: 65770 - DNA, 20 bp, Artificial Sequence
  Description of Artificial Sequence: Synthetic oligonucleotide
  Target: SCNA; (+) strand; PAM type: YTN; PAM sequence: CTG
cacctgagccgtgctctact

SEQ ID NO: 65771 - DNA, 20 bp, Artificial Sequence
  Description of Artificial Sequence: Synthetic oligonucleotide
  Target: SCNA; (+) strand; PAM type: YTN; PAM sequence: CTG
agccgtgctctactttggat

SEQ ID NO: 65772 - DNA, 20 bp, Artificial Sequence
  Description of Artificial Sequence: Synthetic oligonucleotide
  Target: SCNA; (+) strand; PAM type: YTN; PAM sequence: CTC
tactttggataatctgttac

SEQ ID NO: 65773 - DNA, 20 bp, Artificial Sequence
  Description of Artificial Sequence: Synthetic oligonucleotide
  Target: SCNA; (+) strand; PAM type: YTN; PAM sequence: CTA
ctttggataatctgttacta

SEQ ID NO: 65774 - DNA, 20 bp, Artificial Sequence
  Description of Artificial Sequence: Synthetic oligonucleotide
  Target: SCNA; (+) strand; PAM type: YTN; PAM sequence: CTT
tggataatctgttactatct

SEQ ID NO: 65775 - DNA, 20 bp, Artificial Sequence
  Description of Artificial Sequence: Synthetic oligonucleotide
  Target: SCNA; (+) strand; PAM type: YTN; PAM sequence: TTT
ggataatctgttactatctt

SEQ ID NO: 65776 - DNA, 20 bp, Artificial Sequence
  Description of Artificial Sequence: Synthetic oligonucleotide
  Target: SCNA; (+) strand; PAM type: YTN; PAM sequence: TTG
gataatctgttactatctta

SEQ ID NO: 65777 - DNA, 20 bp, Artificial Sequence
  Description of Artificial Sequence: Synthetic oligonucleotide
  Target: SCNA; (+) strand; PAM type: YTN; PAM sequence: CTG
ttactatcttactgattttc

SEQ ID NO: 65778 - DNA, 20 bp, Artificial Sequence
  Description of Artificial Sequence: Synthetic oligonucleotide
  Target: SCNA; (+) strand; PAM type: YTN; PAM sequence: TTA
ctatcttactgattttcttg

SEQ ID NO: 65779 - DNA, 20 bp, Artificial Sequence
  Description of Artificial Sequence: Synthetic oligonucleotide
  Target: SCNA; (+) strand; PAM type: YTN; PAM sequence: CTA
tcttactgattttcttgtct

SEQ ID NO: 65780 - DNA, 20 bp, Artificial Sequence
  Description of Artificial Sequence: Synthetic oligonucleotide
  Target: SCNA; (+) strand; PAM type: YTN; PAM sequence: CTT
actgattttcttgtcttttg

SEQ ID NO: 65781 - DNA, 20 bp, Artificial Sequence
  Description of Artificial Sequence: Synthetic oligonucleotide
  Target: SCNA; (+) strand; PAM type: YTN; PAM sequence: TTA
ctgattttcttgtcttttgc

SEQ ID NO: 65782 - DNA, 20 bp, Artificial Sequence
  Description of Artificial Sequence: Synthetic oligonucleotide
  Target: SCNA; (+) strand; PAM type: YTN; PAM sequence: CTG
attttcttgtcttttgccct

SEQ ID NO: 65783 - DNA, 20 bp, Artificial Sequence
  Description of Artificial Sequence: Synthetic oligonucleotide
  Target: SCNA; (+) strand; PAM type: YTN; PAM sequence: TTT
tcttgtcttttgcccttcta

SEQ ID NO: 65784 - DNA, 20 bp, Artificial Sequence
  Description of Artificial Sequence: Synthetic oligonucleotide
  Target: SCNA; (+) strand; PAM type: YTN; PAM sequence: TTT
cttgtcttttgcccttctag

SEQ ID NO: 65785 - DNA, 20 bp, Artificial Sequence
  Description of Artificial Sequence: Synthetic oligonucleotide
  Target: SCNA; (+) strand; PAM type: YTN; PAM sequence: TTC
ttgtcttttgcccttctagc

SEQ ID NO: 65786 - DNA, 20 bp, Artificial Sequence
  Description of Artificial Sequence: Synthetic oligonucleotide
  Target: SCNA; (+) strand; PAM type: YTN; PAM sequence: CTT
gtcttttgcccttctagctg

SEQ ID NO: 65787 - DNA, 20 bp, Artificial Sequence
  Description of Artificial Sequence: Synthetic oligonucleotide
  Target: SCNA; (+) strand; PAM type: YTN; PAM sequence: TTG
tcttttgcccttctagctgt

SEQ ID NO: 65788 - DNA, 20 bp, Artificial Sequence
  Description of Artificial Sequence: Synthetic oligonucleotide
  Target: SCNA; (+) strand; PAM type: YTN; PAM sequence: CTT
ttgcccttctagctgtttct

SEQ ID NO: 65789 - DNA, 20 bp, Artificial Sequence
  Description of Artificial Sequence: Synthetic oligonucleotide
  Target: SCNA; (+) strand; PAM type: YTN; PAM sequence: TTT
tgcccttctagctgtttctt

SEQ ID NO: 65790 - DNA, 20 bp, Artificial Sequence
  Description of Artificial Sequence: Synthetic oligonucleotide
  Target: SCNA; (+) strand; PAM type: YTN; PAM sequence: TTT
gcccttctagctgtttcttt

SEQ ID NO: 65791 - DNA, 20 bp, Artificial Sequence
  Description of Artificial Sequence: Synthetic oligonucleotide
  Target: SCNA; (+) strand; PAM type: YTN; PAM sequence: TTG
cccttctagctgtttcttta

SEQ ID NO: 65792 - DNA, 20 bp, Artificial Sequence
  Description of Artificial Sequence: Synthetic oligonucleotide
  Target: SCNA; (+) strand; PAM type: YTN; PAM sequence: CTT
ctagctgtttctttagtctt

SEQ ID NO: 65793 - DNA, 20 bp, Artificial Sequence
  Description of Artificial Sequence: Synthetic oligonucleotide
  Target: SCNA; (+) strand; PAM type: YTN; PAM sequence: TTC
tagctgtttctttagtcttg

SEQ ID NO: 65794 - DNA, 20 bp, Artificial Sequence
  Description of Artificial Sequence: Synthetic oligonucleotide
  Target: SCNA; (+) strand; PAM type: YTN; PAM sequence: CTA
gctgtttctttagtcttggc

SEQ ID NO: 65795 - DNA, 20 bp, Artificial Sequence
  Description of Artificial Sequence: Synthetic oligonucleotide
  Target: SCNA; (+) strand; PAM type: YTN; PAM sequence: CTG
tttctttagtcttggcaatc

SEQ ID NO: 65796 - DNA, 20 bp, Artificial Sequence
  Description of Artificial Sequence: Synthetic oligonucleotide
  Target: SCNA; (+) strand; PAM type: YTN; PAM sequence: TTT
ctttagtcttggcaatcacc

SEQ ID NO: 65797 - DNA, 20 bp, Artificial Sequence
  Description of Artificial Sequence: Synthetic oligonucleotide
  Target: SCNA; (+) strand; PAM type: YTN; PAM sequence: TTC
tttagtcttggcaatcacct

SEQ ID NO: 65798 - DNA, 20 bp, Artificial Sequence
  Description of Artificial Sequence: Synthetic oligonucleotide
  Target: SCNA; (+) strand; PAM type: YTN; PAM sequence: CTT
tagtcttggcaatcacctta

SEQ ID NO: 65799 - DNA, 20 bp, Artificial Sequence
  Description of Artificial Sequence: Synthetic oligonucleotide
  Target: SCNA; (+) strand; PAM type: YTN; PAM sequence: TTT
agtcttggcaatcaccttag

SEQ ID NO: 65800 - DNA, 20 bp, Artificial Sequence
  Description of Artificial Sequence: Synthetic oligonucleotide
  Target: SCNA; (+) strand; PAM type: YTN; PAM sequence: TTA
gtcttggcaatcaccttaga

SEQ ID NO: 65801 - DNA, 20 bp, Artificial Sequence
  Description of Artificial Sequence: Synthetic oligonucleotide
  Target: SCNA; (+) strand; PAM type: YTN; PAM sequence: CTT
ggcaatcaccttagagagag

SEQ ID NO: 65802 - DNA, 20 bp, Artificial Sequence
  Description of Artificial Sequence: Synthetic oligonucleotide
  Target: SCNA; (+) strand; PAM type: YTN; PAM sequence: TTG
gcaatcaccttagagagaga

SEQ ID NO: 65803 - DNA, 20 bp, Artificial Sequence
  Description of Artificial Sequence: Synthetic oligonucleotide
  Target: SCNA; (+) strand; PAM type: YTN; PAM sequence: CTT
agagagagagaaaaagagaa

SEQ ID NO: 65804 - DNA, 20 bp, Artificial Sequence
  Description of Artificial Sequence: Synthetic oligonucleotide
  Target: SCNA; (+) strand; PAM type: YTN; PAM sequence: TTA
gagagagagaaaaagagaaa

SEQ ID NO: 65805 - DNA, 20 bp, Artificial Sequence
  Description of Artificial Sequence: Synthetic oligonucleotide
  Target: SCNA; (+) strand; PAM type: YTN; PAM sequence: TTT
atttcagtttttaaaggttt

SEQ ID NO: 65806 - DNA, 20 bp, Artificial Sequence
  Description of Artificial Sequence: Synthetic oligonucleotide
  Target: SCNA; (+) strand; PAM type: YTN; PAM sequence: TTA
tttcagtttttaaaggtttg

SEQ ID NO: 65807 - DNA, 20 bp, Artificial Sequence
  Description of Artificial Sequence: Synthetic oligonucleotide
  Target: SCNA; (+) strand; PAM type: YTN; PAM sequence: TTT
cagtttttaaaggtttggca

SEQ ID NO: 65808 - DNA, 20 bp, Artificial Sequence
  Description of Artificial Sequence: Synthetic oligonucleotide
  Target: SCNA; (+) strand; PAM type: YTN; PAM sequence: TTC
agtttttaaaggtttggcag

SEQ ID NO: 65809 - DNA, 20 bp, Artificial Sequence
  Description of Artificial Sequence: Synthetic oligonucleotide
  Target: SCNA; (+) strand; PAM type: YTN; PAM sequence: TTT
ttaaaggtttggcagtggag

SEQ ID NO: 65810 - DNA, 20 bp, Artificial Sequence
  Description of Artificial Sequence: Synthetic oligonucleotide
  Target: SCNA; (+) strand; PAM type: YTN; PAM sequence: TTT
taaaggtttggcagtggagg

SEQ ID NO: 65811 - DNA, 20 bp, Artificial Sequence
  Description of Artificial Sequence: Synthetic oligonucleotide
  Target: SCNA; (+) strand; PAM type: YTN; PAM sequence: TTT
aaaggtttggcagtggagga

SEQ ID NO: 65812 - DNA, 20 bp, Artificial Sequence
  Description of Artificial Sequence: Synthetic oligonucleotide
  Target: SCNA; (+) strand; PAM type: YTN; PAM sequence: TTA
aaggtttggcagtggaggag

SEQ ID NO: 65813 - DNA, 20 bp, Artificial Sequence
  Description of Artificial Sequence: Synthetic oligonucleotide
  Target: SCNA; (+) strand; PAM type: YTN; PAM sequence: TTT
ggcagtggaggagagagtaa

SEQ ID NO: 65814 - DNA, 20 bp, Artificial Sequence
  Description of Artificial Sequence: Synthetic oligonucleotide
  Target: SCNA; (+) strand; PAM type: YTN; PAM sequence: TTG
gcagtggaggagagagtaaa

SEQ ID NO: 65815 - DNA, 20 bp, Artificial Sequence
  Description of Artificial Sequence: Synthetic oligonucleotide
  Target: SCNA; (+) strand; PAM type: YTN; PAM sequence: CTA
atatattaaatatatttggg

SEQ ID NO: 65816 - DNA, 20 bp, Artificial Sequence
  Description of Artificial Sequence: Synthetic oligonucleotide
  Target: SCNA; (+) strand; PAM type: YTN; PAM sequence: TTA
aatatatttggggttatttt

SEQ ID NO: 65817 - DNA, 20 bp, Artificial Sequence
  Description of Artificial Sequence: Synthetic oligonucleotide
  Target: SCNA; (+) strand; PAM type: YTN; PAM sequence: TTT
ggggttattttggggagcta

SEQ ID NO: 65818 - DNA, 20 bp, Artificial Sequence
  Description of Artificial Sequence: Synthetic oligonucleotide
  Target: SCNA; (+) strand; PAM type: YTN; PAM sequence: TTG
gggttattttggggagctat

SEQ ID NO: 65819 - DNA, 20 bp, Artificial Sequence
  Description of Artificial Sequence: Synthetic oligonucleotide
  Target: SCNA; (+) strand; PAM type: YTN; PAM sequence: TTA
ttttggggagctatttacta

SEQ ID NO: 65820 - DNA, 20 bp, Artificial Sequence
  Description of Artificial Sequence: Synthetic oligonucleotide
  Target: SCNA; (+) strand; PAM type: YTN; PAM sequence: TTT
tggggagctatttactagtt

SEQ ID NO: 65821 - DNA, 20 bp, Artificial Sequence
  Description of Artificial Sequence: Synthetic oligonucleotide
  Target: SCNA; (+) strand; PAM type: YTN; PAM sequence: TTT
ggggagctatttactagttt

SEQ ID NO: 65822 - DNA, 20 bp, Artificial Sequence
  Description of Artificial Sequence: Synthetic oligonucleotide
  Target: SCNA; (+) strand; PAM type: YTN; PAM sequence: TTG
gggagctatttactagtttt

SEQ ID NO: 65823 - DNA, 20 bp, Artificial Sequence
  Description of Artificial Sequence: Synthetic oligonucleotide
  Target: SCNA; (+) strand; PAM type: YTN; PAM sequence: CTA
tttactagttttatctctga

SEQ ID NO: 65824 - DNA, 20 bp, Artificial Sequence
  Description of Artificial Sequence: Synthetic oligonucleotide
  Target: SCNA; (+) strand; PAM type: YTN; PAM sequence: TTT
actagttttatctctgaatt

SEQ ID NO: 65825 - DNA, 20 bp, Artificial Sequence
  Description of Artificial Sequence: Synthetic oligonucleotide
  Target: SCNA; (+) strand; PAM type: YTN; PAM sequence: TTA
ctagttttatctctgaattc

SEQ ID NO: 65826 - DNA, 20 bp, Artificial Sequence
  Description of Artificial Sequence: Synthetic oligonucleotide
  Target: SCNA; (+) strand; PAM type: YTN; PAM sequence: CTA
gttttatctctgaattcagg

SEQ ID NO: 65827 - DNA, 20 bp, Artificial Sequence
  Description of Artificial Sequence: Synthetic oligonucleotide
  Target: SCNA; (+) strand; PAM type: YTN; PAM sequence: TTT
tatctctgaattcaggttta

SEQ ID NO: 65828 - DNA, 20 bp, Artificial Sequence
  Description of Artificial Sequence: Synthetic oligonucleotide
  Target: SCNA; (+) strand; PAM type: YTN; PAM sequence: TTT
atctctgaattcaggtttaa

SEQ ID NO: 65829 - DNA, 20 bp, Artificial Sequence
  Description of Artificial Sequence: Synthetic oligonucleotide
  Target: SCNA; (+) strand; PAM type: YTN; PAM sequence: TTA
tctctgaattcaggtttaaa

SEQ ID NO: 65830 - DNA, 20 bp, Artificial Sequence
  Description of Artificial Sequence: Synthetic oligonucleotide
  Target: SCNA; (+) strand; PAM type: YTN; PAM sequence: CTC
tgaattcaggtttaaataca

SEQ ID NO: 65831 - DNA, 20 bp, Artificial Sequence
  Description of Artificial Sequence: Synthetic oligonucleotide
  Target: SCNA; (+) strand; PAM type: YTN; PAM sequence: CTG
aattcaggtttaaatacatt

SEQ ID NO: 65832 - DNA, 20 bp, Artificial Sequence
  Description of Artificial Sequence: Synthetic oligonucleotide
  Target: SCNA; (+) strand; PAM type: YTN; PAM sequence: TTC
aggtttaaatacattcaacc

SEQ ID NO: 65833 - DNA, 20 bp, Artificial Sequence
  Description of Artificial Sequence: Synthetic oligonucleotide
  Target: SCNA; (+) strand; PAM type: YTN; PAM sequence: TTT
aaatacattcaaccataaat

SEQ ID NO: 65834 - DNA, 20 bp, Artificial Sequence
  Description of Artificial Sequence: Synthetic oligonucleotide
  Target: SCNA; (+) strand; PAM type: YTN; PAM sequence: TTA
aatacattcaaccataaatt

SEQ ID NO: 65835 - DNA, 20 bp, Artificial Sequence
  Description of Artificial Sequence: Synthetic oligonucleotide
  Target: SCNA; (+) strand; PAM type: YTN; PAM sequence: TTC
aaccataaattaaaaaataa

SEQ ID NO: 65836 - DNA, 20 bp, Artificial Sequence
  Description of Artificial Sequence: Synthetic oligonucleotide
  Target: SCNA; (+) strand; PAM type: YTN; PAM sequence: TTA
aaaaataattggtggataaa

SEQ ID NO: 65837 - DNA, 20 bp, Artificial Sequence
  Description of Artificial Sequence: Synthetic oligonucleotide
  Target: SCNA; (+) strand; PAM type: YTN; PAM sequence: TTG
gtggataaatcaggaattgg

SEQ ID NO: 65838 - DNA, 20 bp, Artificial Sequence
  Description of Artificial Sequence: Synthetic oligonucleotide
  Target: SCNA; (+) strand; PAM type: YTN; PAM sequence: TTG
gtgcaaaatcatttttaaga

SEQ ID NO: 65839 - DNA, 20 bp, Artificial Sequence
  Description of Artificial Sequence: Synthetic oligonucleotide
  Target: SCNA; (+) strand; PAM type: YTN; PAM sequence: TTT
ttaagaagaaaatgtcatta

SEQ ID NO: 65840 - DNA, 20 bp, Artificial Sequence
  Description of Artificial Sequence: Synthetic oligonucleotide
  Target: SCNA; (+) strand; PAM type: YTN; PAM sequence: TTT
taagaagaaaatgtcattat

SEQ ID NO: 65841 - DNA, 20 bp, Artificial Sequence
  Description of Artificial Sequence: Synthetic oligonucleotide
  Target: SCNA; (+) strand; PAM type: YTN; PAM sequence: TTT
aagaagaaaatgtcattata

SEQ ID NO: 65842 - DNA, 20 bp, Artificial Sequence
  Description of Artificial Sequence: Synthetic oligonucleotide
  Target: SCNA; (+) strand; PAM type: YTN; PAM sequence: TTA
agaagaaaatgtcattatat

SEQ ID NO: 65843 - DNA, 20 bp, Artificial Sequence
  Description of Artificial Sequence: Synthetic oligonucleotide
  Target: SCNA; (+) strand; PAM type: YTN; PAM sequence: TTA
tatagcaaagaggtagtatg

SEQ ID NO: 65844 - DNA, 20 bp, Artificial Sequence
  Description of Artificial Sequence: Synthetic oligonucleotide
  Target: SCNA; (+) strand; PAM type: YTN; PAM sequence: CTG
ctttaaatccttattttcct

SEQ ID NO: 65845 - DNA, 20 bp, Artificial Sequence
  Description of Artificial Sequence: Synthetic oligonucleotide
  Target: SCNA; (+) strand; PAM type: YTN; PAM sequence: CTT
taaatccttattttccttgg

SEQ ID NO: 65846 - DNA, 20 bp, Artificial Sequence
  Description of Artificial Sequence: Synthetic oligonucleotide
  Target: SCNA; (+) strand; PAM type: YTN; PAM sequence: TTT
aaatccttattttccttggc

SEQ ID NO: 65847 - DNA, 20 bp, Artificial Sequence
  Description of Artificial Sequence: Synthetic oligonucleotide
  Target: SCNA; (+) strand; PAM type: YTN; PAM sequence: TTA
aatccttattttccttggca

SEQ ID NO: 65848 - DNA, 20 bp, Artificial Sequence
  Description of Artificial Sequence: Synthetic oligonucleotide
  Target: SCNA; (+) strand; PAM type: YTN; PAM sequence: CTT
attttccttggcaagcctaa

SEQ ID NO: 65849 - DNA, 20 bp, Artificial Sequence
  Description of Artificial Sequence: Synthetic oligonucleotide
  Target: SCNA; (+) strand; PAM type: YTN; PAM sequence: TTA
ttttccttggcaagcctaac

SEQ ID NO: 65850 - DNA, 20 bp, Artificial Sequence
  Description of Artificial Sequence: Synthetic oligonucleotide
  Target: SCNA; (+) strand; PAM type: YTN; PAM sequence: TTT
tccttggcaagcctaacaag

SEQ ID NO: 65851 - DNA, 20 bp, Artificial Sequence
  Description of Artificial Sequence: Synthetic oligonucleotide
  Target: SCNA; (+) strand; PAM type: YTN; PAM sequence: TTT
ccttggcaagcctaacaagc

SEQ ID NO: 65852 - DNA, 20 bp, Artificial Sequence
  Description of Artificial Sequence: Synthetic oligonucleotide
  Target: SCNA; (+) strand; PAM type: YTN; PAM sequence: TTC
cttggcaagcctaacaagca

SEQ ID NO: 65853 - DNA, 20 bp, Artificial Sequence
  Description of Artificial Sequence: Synthetic oligonucleotide
  Target: SCNA; (+) strand; PAM type: YTN; PAM sequence: CTT
ggcaagcctaacaagcaggg

SEQ ID NO: 65854 - DNA, 20 bp, Artificial Sequence
  Description of Artificial Sequence: Synthetic oligonucleotide
  Target: SCNA; (+) strand; PAM type: YTN; PAM sequence: TTG
gcaagcctaacaagcagggc

SEQ ID NO: 65855 - DNA, 20 bp, Artificial Sequence
  Description of Artificial Sequence: Synthetic oligonucleotide
  Target: SCNA; (+) strand; PAM type: YTN; PAM sequence: CTA
acaagcagggcagtgcctgc

SEQ ID NO: 65856 - DNA, 20 bp, Artificial Sequence
  Description of Artificial Sequence: Synthetic oligonucleotide
  Target: SCNA; (+) strand; PAM type: YTN; PAM sequence: CTG
ctgtatttatggtagtgcca

SEQ ID NO: 65857 - DNA, 20 bp, Artificial Sequence
  Description of Artificial Sequence: Synthetic oligonucleotide
  Target: SCNA; (+) strand; PAM type: YTN; PAM sequence: CTG
tatttatggtagtgccatat

SEQ ID NO: 65858 - DNA, 20 bp, Artificial Sequence
  Description of Artificial Sequence: Synthetic oligonucleotide
  Target: SCNA; (+) strand; PAM type: YTN; PAM sequence: TTT
atggtagtgccatataatta

SEQ ID NO: 65859 - DNA, 20 bp, Artificial Sequence
  Description of Artificial Sequence: Synthetic oligonucleotide
  Target: SCNA; (+) strand; PAM type: YTN; PAM sequence: TTA
tggtagtgccatataattag

SEQ ID NO: 65860 - DNA, 20 bp, Artificial Sequence
  Description of Artificial Sequence: Synthetic oligonucleotide
  Target: SCNA; (+) strand; PAM type: YTN; PAM sequence: TTA
gctgactcacctaataagac

SEQ ID NO: 65861 - DNA, 20 bp, Artificial Sequence
  Description of Artificial Sequence: Synthetic oligonucleotide
  Target: SCNA; (+) strand; PAM type: YTN; PAM sequence: CTG
actcacctaataagacttca

SEQ ID NO: 65862 - DNA, 20 bp, Artificial Sequence
  Description of Artificial Sequence: Synthetic oligonucleotide
  Target: SCNA; (+) strand; PAM type: YTN; PAM sequence: CTC
acctaataagacttcacagc

SEQ ID NO: 65863 - DNA, 20 bp, Artificial Sequence
  Description of Artificial Sequence: Synthetic oligonucleotide
  Target: SCNA; (+) strand; PAM type: YTN; PAM sequence: CTA
ataagacttcacagcgcagc

SEQ ID NO: 65864 - DNA, 20 bp, Artificial Sequence
  Description of Artificial Sequence: Synthetic oligonucleotide
  Target: SCNA; (+) strand; PAM type: YTN; PAM sequence: CTT
cacagcgcagcaacaactgc

SEQ ID NO: 65865 - DNA, 20 bp, Artificial Sequence
  Description of Artificial Sequence: Synthetic oligonucleotide
  Target: SCNA; (+) strand; PAM type: YTN; PAM sequence: TTC
acagcgcagcaacaactgcc

SEQ ID NO: 65866 - DNA, 20 bp, Artificial Sequence
  Description of Artificial Sequence: Synthetic oligonucleotide
  Target: SCNA; (+) strand; PAM type: YTN; PAM sequence: CTG
ccagctttttttgtcctgtt

SEQ ID NO: 65867 - DNA, 20 bp, Artificial Sequence
  Description of Artificial Sequence: Synthetic oligonucleotide
  Target: SCNA; (+) strand; PAM type: YTN; PAM sequence: CTT
tttttgtcctgttacttgga

SEQ ID NO: 65868 - DNA, 20 bp, Artificial Sequence
  Description of Artificial Sequence: Synthetic oligonucleotide
  Target: SCNA; (+) strand; PAM type: YTN; PAM sequence: TTT
ttttgtcctgttacttggat

SEQ ID NO: 65869 - DNA, 20 bp, Artificial Sequence
  Description of Artificial Sequence: Synthetic oligonucleotide
  Target: SCNA; (+) strand; PAM type: YTN; PAM sequence: TTT
tttgtcctgttacttggata

SEQ ID NO: 65870 - DNA, 20 bp, Artificial Sequence
  Description of Artificial Sequence: Synthetic oligonucleotide
  Target: SCNA; (+) strand; PAM type: YTN; PAM sequence: TTT
ttgtcctgttacttggatag

SEQ ID NO: 65871 - DNA, 20 bp, Artificial Sequence
  Description of Artificial Sequence: Synthetic oligonucleotide
  Target: SCNA; (+) strand; PAM type: YTN; PAM sequence: TTT
tgtcctgttacttggataga

SEQ ID NO: 65872 - DNA, 20 bp, Artificial Sequence
  Description of Artificial Sequence: Synthetic oligonucleotide
  Target: SCNA; (+) strand; PAM type: YTN; PAM sequence: TTT
gtcctgttacttggatagac

SEQ ID NO: 65873 - DNA, 20 bp, Artificial Sequence
  Description of Artificial Sequence: Synthetic oligonucleotide
  Target: SCNA; (+) strand; PAM type: YTN; PAM sequence: TTG
tcctgttacttggatagact

SEQ ID NO: 65874 - DNA, 20 bp, Artificial Sequence
  Description of Artificial Sequence: Synthetic oligonucleotide
  Target: SCNA; (+) strand; PAM type: YTN; PAM sequence: CTG
ttacttggatagactcggtt

SEQ ID NO: 65875 - DNA, 20 bp, Artificial Sequence
  Description of Artificial Sequence: Synthetic oligonucleotide
  Target: SCNA; (+) strand; PAM type: YTN; PAM sequence: TTA
cttggatagactcggttgaa

SEQ ID NO: 65876 - DNA, 20 bp, Artificial Sequence
  Description of Artificial Sequence: Synthetic oligonucleotide
  Target: SCNA; (+) strand; PAM type: YTN; PAM sequence: CTT
ggatagactcggttgaatat

SEQ ID NO: 65877 - DNA, 20 bp, Artificial Sequence
  Description of Artificial Sequence: Synthetic oligonucleotide
  Target: SCNA; (+) strand; PAM type: YTN; PAM sequence: TTG
gatagactcggttgaatata

SEQ ID NO: 65878 - DNA, 20 bp, Artificial Sequence
  Description of Artificial Sequence: Synthetic oligonucleotide
  Target: SCNA; (+) strand; PAM type: YTN; PAM sequence: CTC
ggttgaatatactaatgcac

SEQ ID NO: 65879 - DNA, 20 bp, Artificial Sequence
  Description of Artificial Sequence: Synthetic oligonucleotide
  Target: SCNA; (+) strand; PAM type: YTN; PAM sequence: TTG
aatatactaatgcacaaagg

SEQ ID NO: 65880 - DNA, 20 bp, Artificial Sequence
  Description of Artificial Sequence: Synthetic oligonucleotide
  Target: SCNA; (+) strand; PAM type: YTN; PAM sequence: CTA
atgcacaaagggaaatctgg

SEQ ID NO: 65881 - DNA, 20 bp, Artificial Sequence
  Description of Artificial Sequence: Synthetic oligonucleotide
  Target: SCNA; (+) strand; PAM type: YTN; PAM sequence: CTG
ggaataaactatttttactt

SEQ ID NO: 65882 - DNA, 20 bp, Artificial Sequence
  Description of Artificial Sequence: Synthetic oligonucleotide
  Target: SCNA; (+) strand; PAM type: YTN; PAM sequence: CTA
tttttacttttcatgtctaa

SEQ ID NO: 65883 - DNA, 20 bp, Artificial Sequence
  Description of Artificial Sequence: Synthetic oligonucleotide
  Target: SCNA; (+) strand; PAM type: YTN; PAM sequence: TTT
ttacttttcatgtctaaggg

SEQ ID NO: 65884 - DNA, 20 bp, Artificial Sequence
  Description of Artificial Sequence: Synthetic oligonucleotide
  Target: SCNA; (+) strand; PAM type: YTN; PAM sequence: TTT
tacttttcatgtctaagggc

SEQ ID NO: 65885 - DNA, 20 bp, Artificial Sequence
  Description of Artificial Sequence: Synthetic oligonucleotide
  Target: SCNA; (+) strand; PAM type: YTN; PAM sequence: TTT
acttttcatgtctaagggct

SEQ ID NO: 65886 - DNA, 20 bp, Artificial Sequence
  Description of Artificial Sequence: Synthetic oligonucleotide
  Target: SCNA; (+) strand; PAM type: YTN; PAM sequence: TTA
cttttcatgtctaagggctg

SEQ ID NO: 65887 - DNA, 20 bp, Artificial Sequence
  Description of Artificial Sequence: Synthetic oligonucleotide
  Target: SCNA; (+) strand; PAM type: YTN; PAM sequence: CTT
ttcatgtctaagggctgatc

SEQ ID NO: 65888 - DNA, 20 bp, Artificial Sequence
  Description of Artificial Sequence: Synthetic oligonucleotide
  Target: SCNA; (+) strand; PAM type: YTN; PAM sequence: TTT
tcatgtctaagggctgatcc

SEQ ID NO: 65889 - DNA, 20 bp, Artificial Sequence
  Description of Artificial Sequence: Synthetic oligonucleotide
  Target: SCNA; (+) strand; PAM type: YTN; PAM sequence: TTT
catgtctaagggctgatcct

SEQ ID NO: 65890 - DNA, 20 bp, Artificial Sequence
  Description of Artificial Sequence: Synthetic oligonucleotide
  Target: SCNA; (+) strand; PAM type: YTN; PAM sequence: TTC
atgtctaagggctgatcctc

SEQ ID NO: 65891 - DNA, 20 bp, Artificial Sequence
  Description of Artificial Sequence: Synthetic oligonucleotide
  Target: SCNA; (+) strand; PAM type: YTN; PAM sequence: CTA
agggctgatcctcctcttct

SEQ ID NO: 65892 - DNA, 20 bp, Artificial Sequence
  Description of Artificial Sequence: Synthetic oligonucleotide
  Target: SCNA; (+) strand; PAM type: YTN; PAM sequence: CTG
atcctcctcttctagaaata

SEQ ID NO: 65893 - DNA, 20 bp, Artificial Sequence
  Description of Artificial Sequence: Synthetic oligonucleotide
  Target: SCNA; (+) strand; PAM type: YTN; PAM sequence: CTC
ctcttctagaaataaaattt

SEQ ID NO: 65894 - DNA, 20 bp, Artificial Sequence
  Description of Artificial Sequence: Synthetic oligonucleotide
  Target: SCNA; (+) strand; PAM type: YTN; PAM sequence: CTC
ttctagaaataaaatttatt

SEQ ID NO: 65895 - DNA, 20 bp, Artificial Sequence
  Description of Artificial Sequence: Synthetic oligonucleotide
  Target: SCNA; (+) strand; PAM type: YTN; PAM sequence: CTT
ctagaaataaaatttattat

SEQ ID NO: 65896 - DNA, 20 bp, Artificial Sequence
  Description of Artificial Sequence: Synthetic oligonucleotide
  Target: SCNA; (+) strand; PAM type: YTN; PAM sequence: TTC
tagaaataaaatttattatg

SEQ ID NO: 65897 - DNA, 20 bp, Artificial Sequence
  Description of Artificial Sequence: Synthetic oligonucleotide
  Target: SCNA; (+) strand; PAM type: YTN; PAM sequence: CTA
gaaataaaatttattatgta

SEQ ID NO: 65898 - DNA, 20 bp, Artificial Sequence
  Description of Artificial Sequence: Synthetic oligonucleotide
  Target: SCNA; (+) strand; PAM type: YTN; PAM sequence: TTT
attatgtatgttaaactata

SEQ ID NO: 65899 - DNA, 20 bp, Artificial Sequence
  Description of Artificial Sequence: Synthetic oligonucleotide
  Target: SCNA; (+) strand; PAM type: YTN; PAM sequence: TTA
ttatgtatgttaaactatat

SEQ ID NO: 65900 - DNA, 20 bp, Artificial Sequence
  Description of Artificial Sequence: Synthetic oligonucleotide
  Target: SCNA; (+) strand; PAM type: YTN; PAM sequence: TTA
tgtatgttaaactatattca

SEQ ID NO: 65901 - DNA, 20 bp, Artificial Sequence
  Description of Artificial Sequence: Synthetic oligonucleotide
  Target: SCNA; (+) strand; PAM type: YTN; PAM sequence: TTA
aactatattcaaatttgttt

SEQ ID NO: 65902 - DNA, 20 bp, Artificial Sequence
  Description of Artificial Sequence: Synthetic oligonucleotide
  Target: SCNA; (+) strand; PAM type: YTN; PAM sequence: CTA
tattcaaatttgtttactat

SEQ ID NO: 65903 - DNA, 20 bp, Artificial Sequence
  Description of Artificial Sequence: Synthetic oligonucleotide
  Target: SCNA; (+) strand; PAM type: YTN; PAM sequence: TTC
aaatttgtttactattttaa

SEQ ID NO: 65904 - DNA, 20 bp, Artificial Sequence
  Description of Artificial Sequence: Synthetic oligonucleotide
  Target: SCNA; (+) strand; PAM type: YTN; PAM sequence: TTT
gtttactattttaagctttc

SEQ ID NO: 65905 - DNA, 20 bp, Artificial Sequence
  Description of Artificial Sequence: Synthetic oligonucleotide
  Target: SCNA; (+) strand; PAM type: YTN; PAM sequence: TTG
tttactattttaagctttca

SEQ ID NO: 65906 - DNA, 20 bp, Artificial Sequence
  Description of Artificial Sequence: Synthetic oligonucleotide
  Target: SCNA; (+) strand; PAM type: YTN; PAM sequence: TTT
actattttaagctttcatgg

SEQ ID NO: 65907 - DNA, 20 bp, Artificial Sequence
  Description of Artificial Sequence: Synthetic oligonucleotide
  Target: SCNA; (+) strand; PAM type: YTN; PAM sequence: TTA
ctattttaagctttcatgga

SEQ ID NO: 65908 - DNA, 20 bp, Artificial Sequence
  Description of Artificial Sequence: Synthetic oligonucleotide
  Target: SCNA; (+) strand; PAM type: YTN; PAM sequence: CTA
ttttaagctttcatggatta

SEQ ID NO: 65909 - DNA, 20 bp, Artificial Sequence
  Description of Artificial Sequence: Synthetic oligonucleotide
  Target: SCNA; (+) strand; PAM type: YTN; PAM sequence: TTT
taagctttcatggattagaa

SEQ ID NO: 65910 - DNA, 20 bp, Artificial Sequence
  Description of Artificial Sequence: Synthetic oligonucleotide
  Target: SCNA; (+) strand; PAM type: YTN; PAM sequence: TTT
aagctttcatggattagaat

SEQ ID NO: 65911 - DNA, 20 bp, Artificial Sequence
  Description of Artificial Sequence: Synthetic oligonucleotide
  Target: SCNA; (+) strand; PAM type: YTN; PAM sequence: TTA
agctttcatggattagaatc

SEQ ID NO: 65912 - DNA, 20 bp, Artificial Sequence
  Description of Artificial Sequence: Synthetic oligonucleotide
  Target: SCNA; (+) strand; PAM type: YTN; PAM sequence: CTT
tcatggattagaatcttgaa

SEQ ID NO: 65913 - DNA, 20 bp, Artificial Sequence
  Description of Artificial Sequence: Synthetic oligonucleotide
  Target: SCNA; (+) strand; PAM type: YTN; PAM sequence: TTT
catggattagaatcttgaag

SEQ ID NO: 65914 - DNA, 20 bp, Artificial Sequence
  Description of Artificial Sequence: Synthetic oligonucleotide
  Target: SCNA; (+) strand; PAM type: YTN; PAM sequence: TTC
atggattagaatcttgaagg

SEQ ID NO: 65915 - DNA, 20 bp, Artificial Sequence
  Description of Artificial Sequence: Synthetic oligonucleotide
  Target: SCNA; (+) strand; PAM type: YTN; PAM sequence: TTA
gaatcttgaaggtcagcccc

SEQ ID NO: 65916 - DNA, 20 bp, Artificial Sequence
  Description of Artificial Sequence: Synthetic oligonucleotide
  Target: SCNA; (+) strand; PAM type: YTN; PAM sequence: CTT
gaaggtcagccccttgggta

SEQ ID NO: 65917 - DNA, 20 bp, Artificial Sequence
  Description of Artificial Sequence: Synthetic oligonucleotide
  Target: SCNA; (+) strand; PAM type: YTN; PAM sequence: TTG
aaggtcagccccttgggtag

SEQ ID NO: 65918 - DNA, 20 bp, Artificial Sequence
  Description of Artificial Sequence: Synthetic oligonucleotide
  Target: SCNA; (+) strand; PAM type: YTN; PAM sequence: CTT
gggtagtgactgaataagac

SEQ ID NO: 65919 - DNA, 20 bp, Artificial Sequence
  Description of Artificial Sequence: Synthetic oligonucleotide
  Target: SCNA; (+) strand; PAM type: YTN; PAM sequence: TTG
ggtagtgactgaataagaca

SEQ ID NO: 65920 - DNA, 20 bp, Artificial Sequence
  Description of Artificial Sequence: Synthetic oligonucleotide
  Target: SCNA; (+) strand; PAM type: YTN; PAM sequence: CTG
aataagacattaacgatgtg

SEQ ID NO: 65921 - DNA, 20 bp, Artificial Sequence
  Description of Artificial Sequence: Synthetic oligonucleotide
  Target: SCNA; (+) strand; PAM type: YTN; PAM sequence: TTA
acgatgtgaagatgggtcaa

SEQ ID NO: 65922 - DNA, 20 bp, Artificial Sequence
  Description of Artificial Sequence: Synthetic oligonucleotide
  Target: SCNA; (+) strand; PAM type: YTN; PAM sequence: CTG
agaaaggtttgctcttgtgc

SEQ ID NO: 65923 - DNA, 20 bp, Artificial Sequence
  Description of Artificial Sequence: Synthetic oligonucleotide
  Target: SCNA; (+) strand; PAM type: YTN; PAM sequence: TTT
gctcttgtgctgagctcaga

SEQ ID NO: 65924 - DNA, 20 bp, Artificial Sequence
  Description of Artificial Sequence: Synthetic oligonucleotide
  Target: SCNA; (+) strand; PAM type: YTN; PAM sequence: TTG
ctcttgtgctgagctcagaa

SEQ ID NO: 65925 - DNA, 20 bp, Artificial Sequence
  Description of Artificial Sequence: Synthetic oligonucleotide
  Target: SCNA; (+) strand; PAM type: YTN; PAM sequence: CTC
ttgtgctgagctcagaatca

SEQ ID NO: 65926 - DNA, 20 bp, Artificial Sequence
  Description of Artificial Sequence: Synthetic oligonucleotide
  Target: SCNA; (+) strand; PAM type: YTN; PAM sequence: CTT
gtgctgagctcagaatcaat

SEQ ID NO: 65927 - DNA, 20 bp, Artificial Sequence
  Description of Artificial Sequence: Synthetic oligonucleotide
  Target: SCNA; (+) strand; PAM type: YTN; PAM sequence: TTG
tgctgagctcagaatcaata

SEQ ID NO: 65928 - DNA, 20 bp, Artificial Sequence
  Description of Artificial Sequence: Synthetic oligonucleotide
  Target: SCNA; (+) strand; PAM type: YTN; PAM sequence: CTG
agctcagaatcaataagtca

SEQ ID NO: 65929 - DNA, 20 bp, Artificial Sequence
  Description of Artificial Sequence: Synthetic oligonucleotide
  Target: SCNA; (+) strand; PAM type: YTN; PAM sequence: CTC
agaatcaataagtcatttca

SEQ ID NO: 65930 - DNA, 20 bp, Artificial Sequence
  Description of Artificial Sequence: Synthetic oligonucleotide
  Target: SCNA; (+) strand; PAM type: YTN; PAM sequence: TTT
catgtttgcaaatacaatga

SEQ ID NO: 65931 - DNA, 20 bp, Artificial Sequence
  Description of Artificial Sequence: Synthetic oligonucleotide
  Target: SCNA; (+) strand; PAM type: YTN; PAM sequence: TTC
atgtttgcaaatacaatgat

SEQ ID NO: 65932 - DNA, 20 bp, Artificial Sequence
  Description of Artificial Sequence: Synthetic oligonucleotide
  Target: SCNA; (+) strand; PAM type: YTN; PAM sequence: TTT
gcaaatacaatgatatttgg

SEQ ID NO: 65933 - DNA, 20 bp, Artificial Sequence
  Description of Artificial Sequence: Synthetic oligonucleotide
  Target: SCNA; (+) strand; PAM type: YTN; PAM sequence: TTG
caaatacaatgatatttgga

SEQ ID NO: 65934 - DNA, 20 bp, Artificial Sequence
  Description of Artificial Sequence: Synthetic oligonucleotide
  Target: SCNA; (+) strand; PAM type: YTN; PAM sequence: TTT
ggaggcaggtcttttttttt

SEQ ID NO: 65935 - DNA, 20 bp, Artificial Sequence
  Description of Artificial Sequence: Synthetic oligonucleotide
  Target: SCNA; (+) strand; PAM type: YTN; PAM sequence: TTG
gaggcaggtctttttttttt

SEQ ID NO: 65936 - DNA, 20 bp, Artificial Sequence
  Description of Artificial Sequence: Synthetic oligonucleotide
  Target: SCNA; (+) strand; PAM type: YTN; PAM sequence: CTT
tttttttttttttttttttt

SEQ ID NO: 65937 - DNA, 20 bp, Artificial Sequence
  Description of Artificial Sequence: Synthetic oligonucleotide
  Target: SCNA; (+) strand; PAM type: YTN; PAM sequence: TTT
tttttttttttttttttttt

SEQ ID NO: 65938 - DNA, 20 bp, Artificial Sequence
  Description of Artificial Sequence: Synthetic oligonucleotide
  Target: SCNA; (+) strand; PAM type: YTN; PAM sequence: TTT
tttttttttttttttttttt

SEQ ID NO: 65939 - DNA, 20 bp, Artificial Sequence
  Description of Artificial Sequence: Synthetic oligonucleotide
  Target: SCNA; (+) strand; PAM type: YTN; PAM sequence: TTT
tttttttttttttttttttt

SEQ ID NO: 65940 - DNA, 20 bp, Artificial Sequence
  Description of Artificial Sequence: Synthetic oligonucleotide
  Target: SCNA; (+) strand; PAM type: YTN; PAM sequence: TTT
tttttttttttttttttttt

SEQ ID NO: 65941 - DNA, 20 bp, Artificial Sequence
  Description of Artificial Sequence: Synthetic oligonucleotide
  Target: SCNA; (+) strand; PAM type: YTN; PAM sequence: TTT
tttttttttttttttttttt

SEQ ID NO: 65942 - DNA, 20 bp, Artificial Sequence
  Description of Artificial Sequence: Synthetic oligonucleotide
  Target: SCNA; (+) strand; PAM type: YTN; PAM sequence: TTT
tttttttttttttttttttt

SEQ ID NO: 65943 - DNA, 20 bp, Artificial Sequence
  Description of Artificial Sequence: Synthetic oligonucleotide
  Target: SCNA; (+) strand; PAM type: YTN; PAM sequence: TTT
tttttttttttttttttttt

SEQ ID NO: 65944 - DNA, 20 bp, Artificial Sequence
  Description of Artificial Sequence: Synthetic oligonucleotide
  Target: SCNA; (+) strand; PAM type: YTN; PAM sequence: TTT
tttttttttttttttttttt

SEQ ID NO: 65945 - DNA, 20 bp, Artificial Sequence
  Description of Artificial Sequence: Synthetic oligonucleotide
  Target: SCNA; (+) strand; PAM type: YTN; PAM sequence: TTT
tttttttttttttttttttt

SEQ ID NO: 65946 - DNA, 20 bp, Artificial Sequence
  Description of Artificial Sequence: Synthetic oligonucleotide
  Target: SCNA; (+) strand; PAM type: YTN; PAM sequence: TTT
tttttttttttttttttttg

SEQ ID NO: 65947 - DNA, 20 bp, Artificial Sequence
  Description of Artificial Sequence: Synthetic oligonucleotide
  Target: SCNA; (+) strand; PAM type: YTN; PAM sequence: TTT
ttttttttttttttttttga

SEQ ID NO: 65948 - DNA, 20 bp, Artificial Sequence
  Description of Artificial Sequence: Synthetic oligonucleotide
  Target: SCNA; (+) strand; PAM type: YTN; PAM sequence: TTT
tttttttttttttttttgag

SEQ ID NO: 65949 - DNA, 20 bp, Artificial Sequence
  Description of Artificial Sequence: Synthetic oligonucleotide
  Target: SCNA; (+) strand; PAM type: YTN; PAM sequence: TTT
ttttttttttttttttgaga

SEQ ID NO: 65950 - DNA, 20 bp, Artificial Sequence
  Description of Artificial Sequence: Synthetic oligonucleotide
  Target: SCNA; (+) strand; PAM type: YTN; PAM sequence: TTT
tttttttttttttttgagac

SEQ ID NO: 65951 - DNA, 20 bp, Artificial Sequence
  Description of Artificial Sequence: Synthetic oligonucleotide
  Target: SCNA; (+) strand; PAM type: YTN; PAM sequence: TTT
ttttttttttttttgagaca

SEQ ID NO: 65952 - DNA, 20 bp, Artificial Sequence
  Description of Artificial Sequence: Synthetic oligonucleotide
  Target: SCNA; (+) strand; PAM type: YTN; PAM sequence: TTT
tttttttttttttgagacag

SEQ ID NO: 65953 - DNA, 20 bp, Artificial Sequence
  Description of Artificial Sequence: Synthetic oligonucleotide
  Target: SCNA; (+) strand; PAM type: YTN; PAM sequence: TTT
ttttttttttttgagacaga

SEQ ID NO: 65954 - DNA, 20 bp, Artificial Sequence
  Description of Artificial Sequence: Synthetic oligonucleotide
  Target: SCNA; (+) strand; PAM type: YTN; PAM sequence: TTT
tttttttttttgagacagag

SEQ ID NO: 65955 - DNA, 20 bp, Artificial Sequence
  Description of Artificial Sequence: Synthetic oligonucleotide
  Target: SCNA; (+) strand; PAM type: YTN; PAM sequence: TTT
ttttttttttgagacagagt

SEQ ID NO: 65956 - DNA, 20 bp, Artificial Sequence
  Description of Artificial Sequence: Synthetic oligonucleotide
  Target: SCNA; (+) strand; PAM type: YTN; PAM sequence: TTT
tttttttttgagacagagtc

SEQ ID NO: 65957 - DNA, 20 bp, Artificial Sequence
  Description of Artificial Sequence: Synthetic oligonucleotide
  Target: SCNA; (+) strand; PAM type: YTN; PAM sequence: TTT
ttttttttgagacagagtct

SEQ ID NO: 65958 - DNA, 20 bp, Artificial Sequence
  Description of Artificial Sequence: Synthetic oligonucleotide
  Target: SCNA; (+) strand; PAM type: YTN; PAM sequence: TTT
tttttttgagacagagtctc

SEQ ID NO: 65959 - DNA, 20 bp, Artificial Sequence
  Description of Artificial Sequence: Synthetic oligonucleotide
  Target: SCNA; (+) strand; PAM type: YTN; PAM sequence: TTT
ttttttgagacagagtctcg

SEQ ID NO: 65960 - DNA, 20 bp, Artificial Sequence
  Description of Artificial Sequence: Synthetic oligonucleotide
  Target: SCNA; (+) strand; PAM type: YTN; PAM sequence: TTT
tttttgagacagagtctcgc

SEQ ID NO: 65961 - DNA, 20 bp, Artificial Sequence
  Description of Artificial Sequence: Synthetic oligonucleotide
  Target: SCNA; (+) strand; PAM type: YTN; PAM sequence: TTT
ttttgagacagagtctcgct

SEQ ID NO: 65962 - DNA, 20 bp, Artificial Sequence
  Description of Artificial Sequence: Synthetic oligonucleotide
  Target: SCNA; (+) strand; PAM type: YTN; PAM sequence: TTT
tttgagacagagtctcgctc

SEQ ID NO: 65963 - DNA, 20 bp, Artificial Sequence
  Description of Artificial Sequence: Synthetic oligonucleotide
  Target: SCNA; (+) strand; PAM type: YTN; PAM sequence: TTT
ttgagacagagtctcgctct

SEQ ID NO: 65964 - DNA, 20 bp, Artificial Sequence
  Description of Artificial Sequence: Synthetic oligonucleotide
  Target: SCNA; (+) strand; PAM type: YTN; PAM sequence: TTT
tgagacagagtctcgctctg

SEQ ID NO: 65965 - DNA, 20 bp, Artificial Sequence
  Description of Artificial Sequence: Synthetic oligonucleotide
  Target: SCNA; (+) strand; PAM type: YTN; PAM sequence: TTT
gagacagagtctcgctctgt

SEQ ID NO: 65966 - DNA, 20 bp, Artificial Sequence
  Description of Artificial Sequence: Synthetic oligonucleotide
  Target: SCNA; (+) strand; PAM type: YTN; PAM sequence: TTG
agacagagtctcgctctgtc

SEQ ID NO: 65967 - DNA, 20 bp, Artificial Sequence
  Description of Artificial Sequence: Synthetic oligonucleotide
  Target: SCNA; (+) strand; PAM type: YTN; PAM sequence: CTC
gctctgtcgcccaggctgga

SEQ ID NO: 65968 - DNA, 20 bp, Artificial Sequence
  Description of Artificial Sequence: Synthetic oligonucleotide
  Target: SCNA; (+) strand; PAM type: YTN; PAM sequence: CTC
tgtcgcccaggctggagtgc

SEQ ID NO: 65969 - DNA, 20 bp, Artificial Sequence
  Description of Artificial Sequence: Synthetic oligonucleotide
  Target: SCNA; (+) strand; PAM type: YTN; PAM sequence: CTG
tcgcccaggctggagtgcag

SEQ ID NO: 65970 - DNA, 20 bp, Artificial Sequence
  Description of Artificial Sequence: Synthetic oligonucleotide
  Target: SCNA; (+) strand; PAM type: YTN; PAM sequence: CTG
gagtgcagtggcgcgatctc

SEQ ID NO: 65971 - DNA, 20 bp, Artificial Sequence
  Description of Artificial Sequence: Synthetic oligonucleotide
  Target: SCNA; (+) strand; PAM type: YTN; PAM sequence: CTC
agctcactgcaagctctgcc

SEQ ID NO: 65972 - DNA, 20 bp, Artificial Sequence
  Description of Artificial Sequence: Synthetic oligonucleotide
  Target: SCNA; (+) strand; PAM type: YTN; PAM sequence: CTC
actgcaagctctgcctcacg

SEQ ID NO: 65973 - DNA, 20 bp, Artificial Sequence
  Description of Artificial Sequence: Synthetic oligonucleotide
  Target: SCNA; (+) strand; PAM type: YTN; PAM sequence: CTG
caagctctgcctcacgggat

SEQ ID NO: 65974 - DNA, 20 bp, Artificial Sequence
  Description of Artificial Sequence: Synthetic oligonucleotide
  Target: SCNA; (+) strand; PAM type: YTN; PAM sequence: CTC
tgcctcacgggatcacgcca

SEQ ID NO: 65975 - DNA, 20 bp, Artificial Sequence
  Description of Artificial Sequence: Synthetic oligonucleotide
  Target: SCNA; (+) strand; PAM type: YTN; PAM sequence: CTG
cctcacgggatcacgccatt

SEQ ID NO: 65976 - DNA, 20 bp, Artificial Sequence
  Description of Artificial Sequence: Synthetic oligonucleotide
  Target: SCNA; (+) strand; PAM type: YTN; PAM sequence: CTC
acgggatcacgccattctcc

SEQ ID NO: 65977 - DNA, 20 bp, Artificial Sequence
  Description of Artificial Sequence: Synthetic oligonucleotide
  Target: SCNA; (+) strand; PAM type: YTN; PAM sequence: TTC
tcctgcttcagcctcccgag

SEQ ID NO: 65978 - DNA, 20 bp, Artificial Sequence
  Description of Artificial Sequence: Synthetic oligonucleotide
  Target: SCNA; (+) strand; PAM type: YTN; PAM sequence: CTC
ctgcttcagcctcccgagta

SEQ ID NO: 65979 - DNA, 20 bp, Artificial Sequence
  Description of Artificial Sequence: Synthetic oligonucleotide
  Target: SCNA; (+) strand; PAM type: YTN; PAM sequence: CTG
cttcagcctcccgagtagct

SEQ ID NO: 65980 - DNA, 20 bp, Artificial Sequence
  Description of Artificial Sequence: Synthetic oligonucleotide
  Target: SCNA; (+) strand; PAM type: YTN; PAM sequence: CTT
cagcctcccgagtagctggg

SEQ ID NO: 65981 - DNA, 20 bp, Artificial Sequence
  Description of Artificial Sequence: Synthetic oligonucleotide
  Target: SCNA; (+) strand; PAM type: YTN; PAM sequence: TTC
agcctcccgagtagctggga

SEQ ID NO: 65982 - DNA, 20 bp, Artificial Sequence
  Description of Artificial Sequence: Synthetic oligonucleotide
  Target: SCNA; (+) strand; PAM type: YTN; PAM sequence: CTC
ccgagtagctgggactacag

SEQ ID NO: 65983 - DNA, 20 bp, Artificial Sequence
  Description of Artificial Sequence: Synthetic oligonucleotide
  Target: SCNA; (+) strand; PAM type: YTN; PAM sequence: CTG
ggactacaggcgctcaccac

SEQ ID NO: 65984 - DNA, 20 bp, Artificial Sequence
  Description of Artificial Sequence: Synthetic oligonucleotide
  Target: SCNA; (+) strand; PAM type: YTN; PAM sequence: CTA
caggcgctcaccaccacgcc

SEQ ID NO: 65985 - DNA, 20 bp, Artificial Sequence
  Description of Artificial Sequence: Synthetic oligonucleotide
  Target: SCNA; (+) strand; PAM type: YTN; PAM sequence: CTC
accaccacgcctggctaatt

SEQ ID NO: 65986 - DNA, 20 bp, Artificial Sequence
  Description of Artificial Sequence: Synthetic oligonucleotide
  Target: SCNA; (+) strand; PAM type: YTN; PAM sequence: CTG
gctaatttttttgtaatttt

SEQ ID NO: 65987 - DNA, 20 bp, Artificial Sequence
  Description of Artificial Sequence: Synthetic oligonucleotide
  Target: SCNA; (+) strand; PAM type: YTN; PAM sequence: CTA
atttttttgtaattttagta

SEQ ID NO: 65988 - DNA, 20 bp, Artificial Sequence
  Description of Artificial Sequence: Synthetic oligonucleotide
  Target: SCNA; (+) strand; PAM type: YTN; PAM sequence: TTT
ttttgtaattttagtagaga

SEQ ID NO: 65989 - DNA, 20 bp, Artificial Sequence
  Description of Artificial Sequence: Synthetic oligonucleotide
  Target: SCNA; (+) strand; PAM type: YTN; PAM sequence: TTT
tttgtaattttagtagagac

SEQ ID NO: 65990 - DNA, 20 bp, Artificial Sequence
  Description of Artificial Sequence: Synthetic oligonucleotide
  Target: SCNA; (+) strand; PAM type: YTN; PAM sequence: TTT
ttgtaattttagtagagaca

SEQ ID NO: 65991 - DNA, 20 bp, Artificial Sequence
  Description of Artificial Sequence: Synthetic oligonucleotide
  Target: SCNA; (+) strand; PAM type: YTN; PAM sequence: TTT
tgtaattttagtagagacag

SEQ ID NO: 65992 - DNA, 20 bp, Artificial Sequence
  Description of Artificial Sequence: Synthetic oligonucleotide
  Target: SCNA; (+) strand; PAM type: YTN; PAM sequence: TTT
gtaattttagtagagacagg

SEQ ID NO: 65993 - DNA, 20 bp, Artificial Sequence
  Description of Artificial Sequence: Synthetic oligonucleotide
  Target: SCNA; (+) strand; PAM type: YTN; PAM sequence: TTG
taattttagtagagacaggg

SEQ ID NO: 65994 - DNA, 20 bp, Artificial Sequence
  Description of Artificial Sequence: Synthetic oligonucleotide
  Target: SCNA; (+) strand; PAM type: YTN; PAM sequence: TTT
tagtagagacagggtttcac

SEQ ID NO: 65995 - DNA, 20 bp, Artificial Sequence
  Description of Artificial Sequence: Synthetic oligonucleotide
  Target: SCNA; (+) strand; PAM type: YTN; PAM sequence: TTT
agtagagacagggtttcact

SEQ ID NO: 65996 - DNA, 20 bp, Artificial Sequence
  Description of Artificial Sequence: Synthetic oligonucleotide
  Target: SCNA; (+) strand; PAM type: YTN; PAM sequence: TTA
gtagagacagggtttcactg

SEQ ID NO: 65997 - DNA, 20 bp, Artificial Sequence
  Description of Artificial Sequence: Synthetic oligonucleotide
  Target: SCNA; (+) strand; PAM type: YTN; PAM sequence: TTT
cactgtgttagccaggatgg

SEQ ID NO: 65998 - DNA, 20 bp, Artificial Sequence
  Description of Artificial Sequence: Synthetic oligonucleotide
  Target: SCNA; (+) strand; PAM type: YTN; PAM sequence: TTC
actgtgttagccaggatggt

SEQ ID NO: 65999 - DNA, 20 bp, Artificial Sequence
  Description of Artificial Sequence: Synthetic oligonucleotide
  Target: SCNA; (+) strand; PAM type: YTN; PAM sequence: CTG
tgttagccaggatggtctcg

SEQ ID NO: 66000 - DNA, 20 bp, Artificial Sequence
  Description of Artificial Sequence: Synthetic oligonucleotide
  Target: SCNA; (+) strand; PAM type: YTN; PAM sequence: TTA
gccaggatggtctcgatctc

SEQ ID NO: 66001 - DNA, 20 bp, Artificial Sequence
  Description of Artificial Sequence: Synthetic oligonucleotide
  Target: SCNA; (+) strand; PAM type: YTN; PAM sequence: CTC
gatctcctgacctcgtgatc

SEQ ID NO: 66002 - DNA, 20 bp, Artificial Sequence
  Description of Artificial Sequence: Synthetic oligonucleotide
  Target: SCNA; (+) strand; PAM type: YTN; PAM sequence: CTC
ctgacctcgtgatccaccta

SEQ ID NO: 66003 - DNA, 20 bp, Artificial Sequence
  Description of Artificial Sequence: Synthetic oligonucleotide
  Target: SCNA; (+) strand; PAM type: YTN; PAM sequence: CTG
acctcgtgatccacctacct

SEQ ID NO: 66004 - DNA, 20 bp, Artificial Sequence
  Description of Artificial Sequence: Synthetic oligonucleotide
  Target: SCNA; (+) strand; PAM type: YTN; PAM sequence: CTC
gtgatccacctaccttggcc

SEQ ID NO: 66005 - DNA, 20 bp, Artificial Sequence
  Description of Artificial Sequence: Synthetic oligonucleotide
  Target: SCNA; (+) strand; PAM type: YTN; PAM sequence: CTA
ccttggcctcccaaagtgct

SEQ ID NO: 66006 - DNA, 20 bp, Artificial Sequence
  Description of Artificial Sequence: Synthetic oligonucleotide
  Target: SCNA; (+) strand; PAM type: YTN; PAM sequence: CTT
ggcctcccaaagtgctggga

SEQ ID NO: 66007 - DNA, 20 bp, Artificial Sequence
  Description of Artificial Sequence: Synthetic oligonucleotide
  Target: SCNA; (+) strand; PAM type: YTN; PAM sequence: TTG
gcctcccaaagtgctgggat

SEQ ID NO: 66008 - DNA, 20 bp, Artificial Sequence
  Description of Artificial Sequence: Synthetic oligonucleotide
  Target: SCNA; (+) strand; PAM type: YTN; PAM sequence: CTC
ccaaagtgctgggattacag

SEQ ID NO: 66009 - DNA, 20 bp, Artificial Sequence
  Description of Artificial Sequence: Synthetic oligonucleotide
  Target: SCNA; (+) strand; PAM type: YTN; PAM sequence: CTG
ggattacaggcgtgagccac

SEQ ID NO: 66010 - DNA, 20 bp, Artificial Sequence
  Description of Artificial Sequence: Synthetic oligonucleotide
  Target: SCNA; (+) strand; PAM type: YTN; PAM sequence: TTA
caggcgtgagccactgcgcc

SEQ ID NO: 66011 - DNA, 20 bp, Artificial Sequence
  Description of Artificial Sequence: Synthetic oligonucleotide
  Target: SCNA; (+) strand; PAM type: YTN; PAM sequence: CTG
cgcccggccagaggcaggtc

SEQ ID NO: 66012 - DNA, 20 bp, Artificial Sequence
  Description of Artificial Sequence: Synthetic oligonucleotide
  Target: SCNA; (+) strand; PAM type: YTN; PAM sequence: CTT
aaaactagcaactgggtgag

SEQ ID NO: 66013 - DNA, 20 bp, Artificial Sequence
  Description of Artificial Sequence: Synthetic oligonucleotide
  Target: SCNA; (+) strand; PAM type: YTN; PAM sequence: TTA
aaactagcaactgggtgaga

SEQ ID NO: 66014 - DNA, 20 bp, Artificial Sequence
  Description of Artificial Sequence: Synthetic oligonucleotide
  Target: SCNA; (+) strand; PAM type: YTN; PAM sequence: CTA
gcaactgggtgagaaatcag

SEQ ID NO: 66015 - DNA, 20 bp, Artificial Sequence
  Description of Artificial Sequence: Synthetic oligonucleotide
  Target: SCNA; (+) strand; PAM type: YTN; PAM sequence: CTG
ggtgagaaatcagtggggag

SEQ ID NO: 66016 - DNA, 20 bp, Artificial Sequence
  Description of Artificial Sequence: Synthetic oligonucleotide
  Target: SCNA; (+) strand; PAM type: YTN; PAM sequence: CTT
tgacaaagtaagagataaag

SEQ ID NO: 66017 - DNA, 20 bp, Artificial Sequence
  Description of Artificial Sequence: Synthetic oligonucleotide
  Target: SCNA; (+) strand; PAM type: YTN; PAM sequence: TTT
gacaaagtaagagataaaga

SEQ ID NO: 66018 - DNA, 20 bp, Artificial Sequence
  Description of Artificial Sequence: Synthetic oligonucleotide
  Target: SCNA; (+) strand; PAM type: YTN; PAM sequence: TTG
acaaagtaagagataaagag

SEQ ID NO: 66019 - DNA, 20 bp, Artificial Sequence
  Description of Artificial Sequence: Synthetic oligonucleotide
  Target: SCNA; (+) strand; PAM type: YTN; PAM sequence: CTG
ctttcatattttagaaaaac

SEQ ID NO: 66020 - DNA, 20 bp, Artificial Sequence
  Description of Artificial Sequence: Synthetic oligonucleotide
  Target: SCNA; (+) strand; PAM type: YTN; PAM sequence: CTT
tcatattttagaaaaaccca

SEQ ID NO: 66021 - DNA, 20 bp, Artificial Sequence
  Description of Artificial Sequence: Synthetic oligonucleotide
  Target: SCNA; (+) strand; PAM type: YTN; PAM sequence: TTT
catattttagaaaaacccag

SEQ ID NO: 66022 - DNA, 20 bp, Artificial Sequence
  Description of Artificial Sequence: Synthetic oligonucleotide
  Target: SCNA; (+) strand; PAM type: YTN; PAM sequence: TTC
atattttagaaaaacccagg

SEQ ID NO: 66023 - DNA, 20 bp, Artificial Sequence
  Description of Artificial Sequence: Synthetic oligonucleotide
  Target: SCNA; (+) strand; PAM type: YTN; PAM sequence: TTT
tagaaaaacccagggaatgc

SEQ ID NO: 66024 - DNA, 20 bp, Artificial Sequence
  Description of Artificial Sequence: Synthetic oligonucleotide
  Target: SCNA; (+) strand; PAM type: YTN; PAM sequence: TTT
agaaaaacccagggaatgct

SEQ ID NO: 66025 - DNA, 20 bp, Artificial Sequence
  Description of Artificial Sequence: Synthetic oligonucleotide
  Target: SCNA; (+) strand; PAM type: YTN; PAM sequence: TTA
gaaaaacccagggaatgctg

SEQ ID NO: 66026 - DNA, 20 bp, Artificial Sequence
  Description of Artificial Sequence: Synthetic oligonucleotide
  Target: SCNA; (+) strand; PAM type: YTN; PAM sequence: CTG
aaaagcccataggaaagaag

SEQ ID NO: 66027 - DNA, 20 bp, Artificial Sequence
  Description of Artificial Sequence: Synthetic oligonucleotide
  Target: SCNA; (+) strand; PAM type: YTN; PAM sequence: CTG
tcaagatgttagtgagccaa

SEQ ID NO: 66028 - DNA, 20 bp, Artificial Sequence
  Description of Artificial Sequence: Synthetic oligonucleotide
  Target: SCNA; (+) strand; PAM type: YTN; PAM sequence: TTA
gtgagccaaggcccaggagt

SEQ ID NO: 66029 - DNA, 20 bp, Artificial Sequence
  Description of Artificial Sequence: Synthetic oligonucleotide
  Target: SCNA; (+) strand; PAM type: YTN; PAM sequence: TTT
gctctcaaaaacagatgaga

SEQ ID NO: 66030 - DNA, 20 bp, Artificial Sequence
  Description of Artificial Sequence: Synthetic oligonucleotide
  Target: SCNA; (+) strand; PAM type: YTN; PAM sequence: TTG
ctctcaaaaacagatgagaa

SEQ ID NO: 66031 - DNA, 20 bp, Artificial Sequence
  Description of Artificial Sequence: Synthetic oligonucleotide
  Target: SCNA; (+) strand; PAM type: YTN; PAM sequence: CTC
tcaaaaacagatgagaaact

SEQ ID NO: 66032 - DNA, 20 bp, Artificial Sequence
  Description of Artificial Sequence: Synthetic oligonucleotide
  Target: SCNA; (+) strand; PAM type: YTN; PAM sequence: CTC
aaaaacagatgagaaactgg

SEQ ID NO: 66033 - DNA, 20 bp, Artificial Sequence
  Description of Artificial Sequence: Synthetic oligonucleotide
  Target: SCNA; (+) strand; PAM type: YTN; PAM sequence: CTG
gacttaaaatctgactggga

SEQ ID NO: 66034 - DNA, 20 bp, Artificial Sequence
  Description of Artificial Sequence: Synthetic oligonucleotide
  Target: SCNA; (+) strand; PAM type: YTN; PAM sequence: CTT
aaaatctgactgggagaaag

SEQ ID NO: 66035 - DNA, 20 bp, Artificial Sequence
  Description of Artificial Sequence: Synthetic oligonucleotide
  Target: SCNA; (+) strand; PAM type: YTN; PAM sequence: TTA
aaatctgactgggagaaagt

SEQ ID NO: 66036 - DNA, 20 bp, Artificial Sequence
  Description of Artificial Sequence: Synthetic oligonucleotide
  Target: SCNA; (+) strand; PAM type: YTN; PAM sequence: CTG
actgggagaaagtactttag

SEQ ID NO: 66037 - DNA, 20 bp, Artificial Sequence
  Description of Artificial Sequence: Synthetic oligonucleotide
  Target: SCNA; (+) strand; PAM type: YTN; PAM sequence: CTG
ggagaaagtactttaggcaa

SEQ ID NO: 66038 - DNA, 20 bp, Artificial Sequence
  Description of Artificial Sequence: Synthetic oligonucleotide
  Target: SCNA; (+) strand; PAM type: YTN; PAM sequence: CTT
taggcaaaacaaactactca

SEQ ID NO: 66039 - DNA, 20 bp, Artificial Sequence
  Description of Artificial Sequence: Synthetic oligonucleotide
  Target: SCNA; (+) strand; PAM type: YTN; PAM sequence: TTT
aggcaaaacaaactactcat

SEQ ID NO: 66040 - DNA, 20 bp, Artificial Sequence
  Description of Artificial Sequence: Synthetic oligonucleotide
  Target: SCNA; (+) strand; PAM type: YTN; PAM sequence: TTA
ggcaaaacaaactactcata

SEQ ID NO: 66041 - DNA, 20 bp, Artificial Sequence
  Description of Artificial Sequence: Synthetic oligonucleotide
  Target: SCNA; (+) strand; PAM type: YTN; PAM sequence: CTA
ctcatatacaaaaggatggg

SEQ ID NO: 66042 - DNA, 20 bp, Artificial Sequence
  Description of Artificial Sequence: Synthetic oligonucleotide
  Target: SCNA; (+) strand; PAM type: YTN; PAM sequence: CTC
atatacaaaaggatgggctc

SEQ ID NO: 66043 - DNA, 20 bp, Artificial Sequence
  Description of Artificial Sequence: Synthetic oligonucleotide
  Target: SCNA; (+) strand; PAM type: YTN; PAM sequence: CTC
tgaagcagagagtgaaggca

SEQ ID NO: 66044 - DNA, 20 bp, Artificial Sequence
  Description of Artificial Sequence: Synthetic oligonucleotide
  Target: SCNA; (+) strand; PAM type: YTN; PAM sequence: CTG
aagcagagagtgaaggcaat

SEQ ID NO: 66045 - DNA, 20 bp, Artificial Sequence
  Description of Artificial Sequence: Synthetic oligonucleotide
  Target: SCNA; (+) strand; PAM type: YTN; PAM sequence: CTT
caagatcggtggatttaaaa

SEQ ID NO: 66046 - DNA, 20 bp, Artificial Sequence
  Description of Artificial Sequence: Synthetic oligonucleotide
  Target: SCNA; (+) strand; PAM type: YTN; PAM sequence: TTC
aagatcggtggatttaaaac

SEQ ID NO: 66047 - DNA, 20 bp, Artificial Sequence
  Description of Artificial Sequence: Synthetic oligonucleotide
  Target: SCNA; (+) strand; PAM type: YTN; PAM sequence: TTT
aaaacctagaagtatcttct

SEQ ID NO: 66048 - DNA, 20 bp, Artificial Sequence
  Description of Artificial Sequence: Synthetic oligonucleotide
  Target: SCNA; (+) strand; PAM type: YTN; PAM sequence: TTA
aaacctagaagtatcttctc

SEQ ID NO: 66049 - DNA, 20 bp, Artificial Sequence
  Description of Artificial Sequence: Synthetic oligonucleotide
  Target: SCNA; (+) strand; PAM type: YTN; PAM sequence: CTA
gaagtatcttctctaaaaga

SEQ ID NO: 66050 - DNA, 20 bp, Artificial Sequence
  Description of Artificial Sequence: Synthetic oligonucleotide
  Target: SCNA; (+) strand; PAM type: YTN; PAM sequence: CTT
ctctaaaagataaaagatta

SEQ ID NO: 66051 - DNA, 20 bp, Artificial Sequence
  Description of Artificial Sequence: Synthetic oligonucleotide
  Target: SCNA; (+) strand; PAM type: YTN; PAM sequence: TTC
tctaaaagataaaagattaa

SEQ ID NO: 66052 - DNA, 20 bp, Artificial Sequence
  Description of Artificial Sequence: Synthetic oligonucleotide
  Target: SCNA; (+) strand; PAM type: YTN; PAM sequence: CTC
taaaagataaaagattaaga

SEQ ID NO: 66053 - DNA, 20 bp, Artificial Sequence
  Description of Artificial Sequence: Synthetic oligonucleotide
  Target: SCNA; (+) strand; PAM type: YTN; PAM sequence: CTA
aaagataaaagattaagaaa

SEQ ID NO: 66054 - DNA, 20 bp, Artificial Sequence
  Description of Artificial Sequence: Synthetic oligonucleotide
  Target: SCNA; (+) strand; PAM type: YTN; PAM sequence: TTA
agaaaggctttaagatagct

SEQ ID NO: 66055 - DNA, 20 bp, Artificial Sequence
  Description of Artificial Sequence: Synthetic oligonucleotide
  Target: SCNA; (+) strand; PAM type: YTN; PAM sequence: CTT
taagatagctagagcaggaa

SEQ ID NO: 66056 - DNA, 20 bp, Artificial Sequence
  Description of Artificial Sequence: Synthetic oligonucleotide
  Target: SCNA; (+) strand; PAM type: YTN; PAM sequence: TTT
aagatagctagagcaggaat

SEQ ID NO: 66057 - DNA, 20 bp, Artificial Sequence
  Description of Artificial Sequence: Synthetic oligonucleotide
  Target: SCNA; (+) strand; PAM type: YTN; PAM sequence: TTA
agatagctagagcaggaata

SEQ ID NO: 66058 - DNA, 20 bp, Artificial Sequence
  Description of Artificial Sequence: Synthetic oligonucleotide
  Target: SCNA; (+) strand; PAM type: YTN; PAM sequence: CTA
gagcaggaataaagtagtca

SEQ ID NO: 66059 - DNA, 20 bp, Artificial Sequence
  Description of Artificial Sequence: Synthetic oligonucleotide
  Target: SCNA; (+) strand; PAM type: YTN; PAM sequence: TTC
cagaagtttccatactaata

SEQ ID NO: 66060 - DNA, 20 bp, Artificial Sequence
  Description of Artificial Sequence: Synthetic oligonucleotide
  Target: SCNA; (+) strand; PAM type: YTN; PAM sequence: TTT
ccatactaatagaaacagat

SEQ ID NO: 66061 - DNA, 20 bp, Artificial Sequence
  Description of Artificial Sequence: Synthetic oligonucleotide
  Target: SCNA; (+) strand; PAM type: YTN; PAM sequence: TTC
catactaatagaaacagata

SEQ ID NO: 66062 - DNA, 20 bp, Artificial Sequence
  Description of Artificial Sequence: Synthetic oligonucleotide
  Target: SCNA; (+) strand; PAM type: YTN; PAM sequence: CTA
atagaaacagatactaagtg

SEQ ID NO: 66063 - DNA, 20 bp, Artificial Sequence
  Description of Artificial Sequence: Synthetic oligonucleotide
  Target: SCNA; (+) strand; PAM type: YTN; PAM sequence: CTA
agtgaagtttgaggggccct

SEQ ID NO: 66064 - DNA, 20 bp, Artificial Sequence
  Description of Artificial Sequence: Synthetic oligonucleotide
  Target: SCNA; (+) strand; PAM type: YTN; PAM sequence: TTT
gaggggccctcacaatctgg

SEQ ID NO: 66065 - DNA, 20 bp, Artificial Sequence
  Description of Artificial Sequence: Synthetic oligonucleotide
  Target: SCNA; (+) strand; PAM type: YTN; PAM sequence: TTG
aggggccctcacaatctgga

SEQ ID NO: 66066 - DNA, 20 bp, Artificial Sequence
  Description of Artificial Sequence: Synthetic oligonucleotide
  Target: SCNA; (+) strand; PAM type: YTN; PAM sequence: CTC
acaatctggatagaaaactc

SEQ ID NO: 66067 - DNA, 20 bp, Artificial Sequence
  Description of Artificial Sequence: Synthetic oligonucleotide
  Target: SCNA; (+) strand; PAM type: YTN; PAM sequence: CTG
gatagaaaactcttcaagta

SEQ ID NO: 66068 - DNA, 20 bp, Artificial Sequence
  Description of Artificial Sequence: Synthetic oligonucleotide
  Target: SCNA; (+) strand; PAM type: YTN; PAM sequence: CTC
ttcaagtagatctcaacctt

SEQ ID NO: 66069 - DNA, 20 bp, Artificial Sequence
  Description of Artificial Sequence: Synthetic oligonucleotide
  Target: SCNA; (+) strand; PAM type: YTN; PAM sequence: CTT
caagtagatctcaaccttca

SEQ ID NO: 66070 - DNA, 20 bp, Artificial Sequence
  Description of Artificial Sequence: Synthetic oligonucleotide
  Target: SCNA; (+) strand; PAM type: YTN; PAM sequence: TTC
aagtagatctcaaccttcag

SEQ ID NO: 66071 - DNA, 20 bp, Artificial Sequence
  Description of Artificial Sequence: Synthetic oligonucleotide
  Target: SCNA; (+) strand; PAM type: YTN; PAM sequence: CTC
aaccttcaggctggaatatc

SEQ ID NO: 66072 - DNA, 20 bp, Artificial Sequence
  Description of Artificial Sequence: Synthetic oligonucleotide
  Target: SCNA; (+) strand; PAM type: YTN; PAM sequence: CTT
caggctggaatatctttgct

SEQ ID NO: 66073 - DNA, 20 bp, Artificial Sequence
  Description of Artificial Sequence: Synthetic oligonucleotide
  Target: SCNA; (+) strand; PAM type: YTN; PAM sequence: TTC
aggctggaatatctttgctt

SEQ ID NO: 66074 - DNA, 20 bp, Artificial Sequence
  Description of Artificial Sequence: Synthetic oligonucleotide
  Target: SCNA; (+) strand; PAM type: YTN; PAM sequence: CTG
gaatatctttgcttagctat

SEQ ID NO: 66075 - DNA, 20 bp, Artificial Sequence
  Description of Artificial Sequence: Synthetic oligonucleotide
  Target: SCNA; (+) strand; PAM type: YTN; PAM sequence: CTT
tgcttagctatcccagccag

SEQ ID NO: 66076 - DNA, 20 bp, Artificial Sequence
  Description of Artificial Sequence: Synthetic oligonucleotide
  Target: SCNA; (+) strand; PAM type: YTN; PAM sequence: TTT
gcttagctatcccagccaga

SEQ ID NO: 66077 - DNA, 20 bp, Artificial Sequence
  Description of Artificial Sequence: Synthetic oligonucleotide
  Target: SCNA; (+) strand; PAM type: YTN; PAM sequence: TTG
cttagctatcccagccagag

SEQ ID NO: 66078 - DNA, 20 bp, Artificial Sequence
  Description of Artificial Sequence: Synthetic oligonucleotide
  Target: SCNA; (+) strand; PAM type: YTN; PAM sequence: CTT
agctatcccagccagaggac

SEQ ID NO: 66079 - DNA, 20 bp, Artificial Sequence
  Description of Artificial Sequence: Synthetic oligonucleotide
  Target: SCNA; (+) strand; PAM type: YTN; PAM sequence: TTA
gctatcccagccagaggacc

SEQ ID NO: 66080 - DNA, 20 bp, Artificial Sequence
  Description of Artificial Sequence: Synthetic oligonucleotide
  Target: SCNA; (+) strand; PAM type: YTN; PAM sequence: CTA
tcccagccagaggaccatag

SEQ ID NO: 66081 - DNA, 20 bp, Artificial Sequence
  Description of Artificial Sequence: Synthetic oligonucleotide
  Target: SCNA; (+) strand; PAM type: YTN; PAM sequence: TTG
atttcaaaaggagttgcaat

SEQ ID NO: 66082 - DNA, 20 bp, Artificial Sequence
  Description of Artificial Sequence: Synthetic oligonucleotide
  Target: SCNA; (+) strand; PAM type: YTN; PAM sequence: TTT
caaaaggagttgcaattatt

SEQ ID NO: 66083 - DNA, 20 bp, Artificial Sequence
  Description of Artificial Sequence: Synthetic oligonucleotide
  Target: SCNA; (+) strand; PAM type: YTN; PAM sequence: TTC
aaaaggagttgcaattattc

SEQ ID NO: 66084 - DNA, 20 bp, Artificial Sequence
  Description of Artificial Sequence: Synthetic oligonucleotide
  Target: SCNA; (+) strand; PAM type: YTN; PAM sequence: TTG
caattattctatcttgtaaa

SEQ ID NO: 66085 - DNA, 20 bp, Artificial Sequence
  Description of Artificial Sequence: Synthetic oligonucleotide
  Target: SCNA; (+) strand; PAM type: YTN; PAM sequence: TTA
ttctatcttgtaaattctct

SEQ ID NO: 66086 - DNA, 20 bp, Artificial Sequence
  Description of Artificial Sequence: Synthetic oligonucleotide
  Target: SCNA; (+) strand; PAM type: YTN; PAM sequence: TTC
tatcttgtaaattctctcat

SEQ ID NO: 66087 - DNA, 20 bp, Artificial Sequence
  Description of Artificial Sequence: Synthetic oligonucleotide
  Target: SCNA; (+) strand; PAM type: YTN; PAM sequence: CTA
tcttgtaaattctctcattg

SEQ ID NO: 66088 - DNA, 20 bp, Artificial Sequence
  Description of Artificial Sequence: Synthetic oligonucleotide
  Target: SCNA; (+) strand; PAM type: YTN; PAM sequence: CTT
gtaaattctctcattgttaa

SEQ ID NO: 66089 - DNA, 20 bp, Artificial Sequence
  Description of Artificial Sequence: Synthetic oligonucleotide
  Target: SCNA; (+) strand; PAM type: YTN; PAM sequence: TTG
taaattctctcattgttaag

SEQ ID NO: 66090 - DNA, 20 bp, Artificial Sequence
  Description of Artificial Sequence: Synthetic oligonucleotide
  Target: SCNA; (+) strand; PAM type: YTN; PAM sequence: TTC
tctcattgttaagttttgtc

SEQ ID NO: 66091 - DNA, 20 bp, Artificial Sequence
  Description of Artificial Sequence: Synthetic oligonucleotide
  Target: SCNA; (+) strand; PAM type: YTN; PAM sequence: CTC
tcattgttaagttttgtcac

SEQ ID NO: 66092 - DNA, 20 bp, Artificial Sequence
  Description of Artificial Sequence: Synthetic oligonucleotide
  Target: SCNA; (+) strand; PAM type: YTN; PAM sequence: CTC
attgttaagttttgtcacag

SEQ ID NO: 66093 - DNA, 20 bp, Artificial Sequence
  Description of Artificial Sequence: Synthetic oligonucleotide
  Target: SCNA; (+) strand; PAM type: YTN; PAM sequence: TTG
ttaagttttgtcacagtttg

SEQ ID NO: 66094 - DNA, 20 bp, Artificial Sequence
  Description of Artificial Sequence: Synthetic oligonucleotide
  Target: SCNA; (+) strand; PAM type: YTN; PAM sequence: TTA
agttttgtcacagtttgttg

SEQ ID NO: 66095 - DNA, 20 bp, Artificial Sequence
  Description of Artificial Sequence: Synthetic oligonucleotide
  Target: SCNA; (+) strand; PAM type: YTN; PAM sequence: TTT
tgtcacagtttgttgttgct

SEQ ID NO: 66096 - DNA, 20 bp, Artificial Sequence
  Description of Artificial Sequence: Synthetic oligonucleotide
  Target: SCNA; (+) strand; PAM type: YTN; PAM sequence: TTT
gtcacagtttgttgttgcta

SEQ ID NO: 66097 - DNA, 20 bp, Artificial Sequence
  Description of Artificial Sequence: Synthetic oligonucleotide
  Target: SCNA; (+) strand; PAM type: YTN; PAM sequence: TTG
tcacagtttgttgttgctac

SEQ ID NO: 66098 - DNA, 20 bp, Artificial Sequence
  Description of Artificial Sequence: Synthetic oligonucleotide
  Target: SCNA; (+) strand; PAM type: YTN; PAM sequence: TTT
gttgttgctactttctttca

SEQ ID NO: 66099 - DNA, 20 bp, Artificial Sequence
  Description of Artificial Sequence: Synthetic oligonucleotide
  Target: SCNA; (+) strand; PAM type: YTN; PAM sequence: TTG
ttgttgctactttctttcag

SEQ ID NO: 66100 - DNA, 20 bp, Artificial Sequence
  Description of Artificial Sequence: Synthetic oligonucleotide
  Target: SCNA; (+) strand; PAM type: YTN; PAM sequence: TTG
ttgctactttctttcagtta

SEQ ID NO: 66101 - DNA, 20 bp, Artificial Sequence
  Description of Artificial Sequence: Synthetic oligonucleotide
  Target: SCNA; (+) strand; PAM type: YTN; PAM sequence: TTG
ctactttctttcagttacct

SEQ ID NO: 66102 - DNA, 20 bp, Artificial Sequence
  Description of Artificial Sequence: Synthetic oligonucleotide
  Target: SCNA; (+) strand; PAM type: YTN; PAM sequence: CTA
ctttctttcagttacctaga

SEQ ID NO: 66103 - DNA, 20 bp, Artificial Sequence
  Description of Artificial Sequence: Synthetic oligonucleotide
  Target: SCNA; (+) strand; PAM type: YTN; PAM sequence: CTT
tctttcagttacctagaaaa

SEQ ID NO: 66104 - DNA, 20 bp, Artificial Sequence
  Description of Artificial Sequence: Synthetic oligonucleotide
  Target: SCNA; (+) strand; PAM type: YTN; PAM sequence: TTT
ctttcagttacctagaaaat

SEQ ID NO: 66105 - DNA, 20 bp, Artificial Sequence
  Description of Artificial Sequence: Synthetic oligonucleotide
  Target: SCNA; (+) strand; PAM type: YTN; PAM sequence: TTC
tttcagttacctagaaaatg

SEQ ID NO: 66106 - DNA, 20 bp, Artificial Sequence
  Description of Artificial Sequence: Synthetic oligonucleotide
  Target: SCNA; (+) strand; PAM type: YTN; PAM sequence: CTT
tcagttacctagaaaatgtt

SEQ ID NO: 66107 - DNA, 20 bp, Artificial Sequence
  Description of Artificial Sequence: Synthetic oligonucleotide
  Target: SCNA; (+) strand; PAM type: YTN; PAM sequence: TTT
cagttacctagaaaatgttt

SEQ ID NO: 66108 - DNA, 20 bp, Artificial Sequence
  Description of Artificial Sequence: Synthetic oligonucleotide
  Target: SCNA; (+) strand; PAM type: YTN; PAM sequence: TTC
agttacctagaaaatgtttt

SEQ ID NO: 66109 - DNA, 20 bp, Artificial Sequence
  Description of Artificial Sequence: Synthetic oligonucleotide
  Target: SCNA; (+) strand; PAM type: YTN; PAM sequence: TTA
cctagaaaatgttttctctg

SEQ ID NO: 66110 - DNA, 20 bp, Artificial Sequence
  Description of Artificial Sequence: Synthetic oligonucleotide
  Target: SCNA; (+) strand; PAM type: YTN; PAM sequence: CTA
gaaaatgttttctctgaaaa

SEQ ID NO: 66111 - DNA, 20 bp, Artificial Sequence
  Description of Artificial Sequence: Synthetic oligonucleotide
  Target: SCNA; (+) strand; PAM type: YTN; PAM sequence: TTT
tctctgaaaacctctatcca

SEQ ID NO: 66112 - DNA, 20 bp, Artificial Sequence
  Description of Artificial Sequence: Synthetic oligonucleotide
  Target: SCNA; (+) strand; PAM type: YTN; PAM sequence: TTT
ctctgaaaacctctatccat

SEQ ID NO: 66113 - DNA, 20 bp, Artificial Sequence
  Description of Artificial Sequence: Synthetic oligonucleotide
  Target: SCNA; (+) strand; PAM type: YTN; PAM sequence: TTC
tctgaaaacctctatccatg

SEQ ID NO: 66114 - DNA, 20 bp, Artificial Sequence
  Description of Artificial Sequence: Synthetic oligonucleotide
  Target: SCNA; (+) strand; PAM type: YTN; PAM sequence: CTC
tgaaaacctctatccatgcc

SEQ ID NO: 66115 - DNA, 20 bp, Artificial Sequence
  Description of Artificial Sequence: Synthetic oligonucleotide
  Target: SCNA; (+) strand; PAM type: YTN; PAM sequence: CTG
aaaacctctatccatgcctc

SEQ ID NO: 66116 - DNA, 20 bp, Artificial Sequence
  Description of Artificial Sequence: Synthetic oligonucleotide
  Target: SCNA; (+) strand; PAM type: YTN; PAM sequence: CTC
tatccatgcctcaacagatc

SEQ ID NO: 66117 - DNA, 20 bp, Artificial Sequence
  Description of Artificial Sequence: Synthetic oligonucleotide
  Target: SCNA; (+) strand; PAM type: YTN; PAM sequence: CTA
tccatgcctcaacagatcgg

SEQ ID NO: 66118 - DNA, 20 bp, Artificial Sequence
  Description of Artificial Sequence: Synthetic oligonucleotide
  Target: SCNA; (+) strand; PAM type: YTN; PAM sequence: CTC
aacagatcggagataaaaaa

SEQ ID NO: 66119 - DNA, 20 bp, Artificial Sequence
  Description of Artificial Sequence: Synthetic oligonucleotide
  Target: SCNA; (+) strand; PAM type: YTN; PAM sequence: CTT
acaagattatcaagaaagat

SEQ ID NO: 66120 - DNA, 20 bp, Artificial Sequence
  Description of Artificial Sequence: Synthetic oligonucleotide
  Target: SCNA; (+) strand; PAM type: YTN; PAM sequence: TTA
caagattatcaagaaagata

SEQ ID NO: 66121 - DNA, 20 bp, Artificial Sequence
  Description of Artificial Sequence: Synthetic oligonucleotide
  Target: SCNA; (+) strand; PAM type: YTN; PAM sequence: TTA
tcaagaaagataatgggcta

SEQ ID NO: 66122 - DNA, 20 bp, Artificial Sequence
  Description of Artificial Sequence: Synthetic oligonucleotide
  Target: SCNA; (+) strand; PAM type: YTN; PAM sequence: CTA
ggtgtatccttaaaaggtca

SEQ ID NO: 66123 - DNA, 20 bp, Artificial Sequence
  Description of Artificial Sequence: Synthetic oligonucleotide
  Target: SCNA; (+) strand; PAM type: YTN; PAM sequence: CTT
aaaaggtcattcaaatgaaa

SEQ ID NO: 66124 - DNA, 20 bp, Artificial Sequence
  Description of Artificial Sequence: Synthetic oligonucleotide
  Target: SCNA; (+) strand; PAM type: YTN; PAM sequence: TTA
aaaggtcattcaaatgaaat

SEQ ID NO: 66125 - DNA, 20 bp, Artificial Sequence
  Description of Artificial Sequence: Synthetic oligonucleotide
  Target: SCNA; (+) strand; PAM type: YTN; PAM sequence: TTC
aaatgaaatattaaaattct

SEQ ID NO: 66126 - DNA, 20 bp, Artificial Sequence
  Description of Artificial Sequence: Synthetic oligonucleotide
  Target: SCNA; (+) strand; PAM type: YTN; PAM sequence: TTA
aaattcttacttttctgtgt

SEQ ID NO: 66127 - DNA, 20 bp, Artificial Sequence
  Description of Artificial Sequence: Synthetic oligonucleotide
  Target: SCNA; (+) strand; PAM type: YTN; PAM sequence: TTC
ttacttttctgtgttattcg

SEQ ID NO: 66128 - DNA, 20 bp, Artificial Sequence
  Description of Artificial Sequence: Synthetic oligonucleotide
  Target: SCNA; (+) strand; PAM type: YTN; PAM sequence: CTT
acttttctgtgttattcgga

SEQ ID NO: 66129 - DNA, 20 bp, Artificial Sequence
  Description of Artificial Sequence: Synthetic oligonucleotide
  Target: SCNA; (+) strand; PAM type: YTN; PAM sequence: TTA
cttttctgtgttattcggac

SEQ ID NO: 66130 - DNA, 20 bp, Artificial Sequence
  Description of Artificial Sequence: Synthetic oligonucleotide
  Target: SCNA; (+) strand; PAM type: YTN; PAM sequence: CTT
ttctgtgttattcggacatg

SEQ ID NO: 66131 - DNA, 20 bp, Artificial Sequence
  Description of Artificial Sequence: Synthetic oligonucleotide
  Target: SCNA; (+) strand; PAM type: YTN; PAM sequence: TTT
tctgtgttattcggacatgg

SEQ ID NO: 66132 - DNA, 20 bp, Artificial Sequence
  Description of Artificial Sequence: Synthetic oligonucleotide
  Target: SCNA; (+) strand; PAM type: YTN; PAM sequence: TTT
ctgtgttattcggacatgga

SEQ ID NO: 66133 - DNA, 20 bp, Artificial Sequence
  Description of Artificial Sequence: Synthetic oligonucleotide
  Target: SCNA; (+) strand; PAM type: YTN; PAM sequence: TTC
tgtgttattcggacatggaa

SEQ ID NO: 66134 - DNA, 20 bp, Artificial Sequence
  Description of Artificial Sequence: Synthetic oligonucleotide
  Target: SCNA; (+) strand; PAM type: YTN; PAM sequence: CTG
tgttattcggacatggaata

SEQ ID NO: 66135 - DNA, 20 bp, Artificial Sequence
  Description of Artificial Sequence: Synthetic oligonucleotide
  Target: SCNA; (+) strand; PAM type: YTN; PAM sequence: TTA
ttcggacatggaataacaat

SEQ ID NO: 66136 - DNA, 20 bp, Artificial Sequence
  Description of Artificial Sequence: Synthetic oligonucleotide
  Target: SCNA; (+) strand; PAM type: YTN; PAM sequence: TTC
ggacatggaataacaataac

SEQ ID NO: 66137 - DNA, 20 bp, Artificial Sequence
  Description of Artificial Sequence: Synthetic oligonucleotide
  Target: SCNA; (+) strand; PAM type: YTN; PAM sequence: TTA
atgtttatttggtgcttact

SEQ ID NO: 66138 - DNA, 20 bp, Artificial Sequence
  Description of Artificial Sequence: Synthetic oligonucleotide
  Target: SCNA; (+) strand; PAM type: YTN; PAM sequence: TTT
atttggtgcttactctgtat

SEQ ID NO: 66139 - DNA, 20 bp, Artificial Sequence
  Description of Artificial Sequence: Synthetic oligonucleotide
  Target: SCNA; (+) strand; PAM type: YTN; PAM sequence: TTA
tttggtgcttactctgtatt

SEQ ID NO: 66140 - DNA, 20 bp, Artificial Sequence
  Description of Artificial Sequence: Synthetic oligonucleotide
  Target: SCNA; (+) strand; PAM type: YTN; PAM sequence: TTT
ggtgcttactctgtatttgg

SEQ ID NO: 66141 - DNA, 20 bp, Artificial Sequence
  Description of Artificial Sequence: Synthetic oligonucleotide
  Target: SCNA; (+) strand; PAM type: YTN; PAM sequence: TTG
gtgcttactctgtatttggt

SEQ ID NO: 66142 - DNA, 20 bp, Artificial Sequence
  Description of Artificial Sequence: Synthetic oligonucleotide
  Target: SCNA; (+) strand; PAM type: YTN; PAM sequence: CTT
actctgtatttggtaccatt

SEQ ID NO: 66143 - DNA, 20 bp, Artificial Sequence
  Description of Artificial Sequence: Synthetic oligonucleotide
  Target: SCNA; (+) strand; PAM type: YTN; PAM sequence: TTA
ctctgtatttggtaccattt

SEQ ID NO: 66144 - DNA, 20 bp, Artificial Sequence
  Description of Artificial Sequence: Synthetic oligonucleotide
  Target: SCNA; (+) strand; PAM type: YTN; PAM sequence: CTC
tgtatttggtaccatttcaa

SEQ ID NO: 66145 - DNA, 20 bp, Artificial Sequence
  Description of Artificial Sequence: Synthetic oligonucleotide
  Target: SCNA; (+) strand; PAM type: YTN; PAM sequence: CTG
tatttggtaccatttcaaga

SEQ ID NO: 66146 - DNA, 20 bp, Artificial Sequence
  Description of Artificial Sequence: Synthetic oligonucleotide
  Target: SCNA; (+) strand; PAM type: YTN; PAM sequence: TTT
ggtaccatttcaagagtttt

SEQ ID NO: 66147 - DNA, 20 bp, Artificial Sequence
  Description of Artificial Sequence: Synthetic oligonucleotide
  Target: SCNA; (+) strand; PAM type: YTN; PAM sequence: TTG
gtaccatttcaagagtttta

SEQ ID NO: 66148 - DNA, 20 bp, Artificial Sequence
  Description of Artificial Sequence: Synthetic oligonucleotide
  Target: SCNA; (+) strand; PAM type: YTN; PAM sequence: TTT
caagagttttatatgcatta

SEQ ID NO: 66149 - DNA, 20 bp, Artificial Sequence
  Description of Artificial Sequence: Synthetic oligonucleotide
  Target: SCNA; (+) strand; PAM type: YTN; PAM sequence: TTC
aagagttttatatgcattat

SEQ ID NO: 66150 - DNA, 20 bp, Artificial Sequence
  Description of Artificial Sequence: Synthetic oligonucleotide
  Target: SCNA; (+) strand; PAM type: YTN; PAM sequence: TTT
tatatgcattatttgatctt

SEQ ID NO: 66151 - DNA, 20 bp, Artificial Sequence
  Description of Artificial Sequence: Synthetic oligonucleotide
  Target: SCNA; (+) strand; PAM type: YTN; PAM sequence: TTT
atatgcattatttgatctta

SEQ ID NO: 66152 - DNA, 20 bp, Artificial Sequence
  Description of Artificial Sequence: Synthetic oligonucleotide
  Target: SCNA; (+) strand; PAM type: YTN; PAM sequence: TTA
tatgcattatttgatcttaa

SEQ ID NO: 66153 - DNA, 20 bp, Artificial Sequence
  Description of Artificial Sequence: Synthetic oligonucleotide
  Target: SCNA; (+) strand; PAM type: YTN; PAM sequence: TTA
tttgatcttaaaaaacaact

SEQ ID NO: 66154 - DNA, 20 bp, Artificial Sequence
  Description of Artificial Sequence: Synthetic oligonucleotide
  Target: SCNA; (+) strand; PAM type: YTN; PAM sequence: TTT
gatcttaaaaaacaactctt

SEQ ID NO: 66155 - DNA, 20 bp, Artificial Sequence
  Description of Artificial Sequence: Synthetic oligonucleotide
  Target: SCNA; (+) strand; PAM type: YTN; PAM sequence: TTG
atcttaaaaaacaactcttt

SEQ ID NO: 66156 - DNA, 20 bp, Artificial Sequence
  Description of Artificial Sequence: Synthetic oligonucleotide
  Target: SCNA; (+) strand; PAM type: YTN; PAM sequence: CTT
aaaaaacaactctttgagga

SEQ ID NO: 66157 - DNA, 20 bp, Artificial Sequence
  Description of Artificial Sequence: Synthetic oligonucleotide
  Target: SCNA; (+) strand; PAM type: YTN; PAM sequence: TTA
aaaaacaactctttgaggaa

SEQ ID NO: 66158 - DNA, 20 bp, Artificial Sequence
  Description of Artificial Sequence: Synthetic oligonucleotide
  Target: SCNA; (+) strand; PAM type: YTN; PAM sequence: CTC
tttgaggaagttactactgt

SEQ ID NO: 66159 - DNA, 20 bp, Artificial Sequence
  Description of Artificial Sequence: Synthetic oligonucleotide
  Target: SCNA; (+) strand; PAM type: YTN; PAM sequence: CTT
tgaggaagttactactgtct

SEQ ID NO: 66160 - DNA, 20 bp, Artificial Sequence
  Description of Artificial Sequence: Synthetic oligonucleotide
  Target: SCNA; (+) strand; PAM type: YTN; PAM sequence: TTT
gaggaagttactactgtctc

SEQ ID NO: 66161 - DNA, 20 bp, Artificial Sequence
  Description of Artificial Sequence: Synthetic oligonucleotide
  Target: SCNA; (+) strand; PAM type: YTN; PAM sequence: TTG
aggaagttactactgtctcc

SEQ ID NO: 66162 - DNA, 20 bp, Artificial Sequence
  Description of Artificial Sequence: Synthetic oligonucleotide
  Target: SCNA; (+) strand; PAM type: YTN; PAM sequence: TTA
ctactgtctccattttatca

SEQ ID NO: 66163 - DNA, 20 bp, Artificial Sequence
  Description of Artificial Sequence: Synthetic oligonucleotide
  Target: SCNA; (+) strand; PAM type: YTN; PAM sequence: CTA
ctgtctccattttatcagtg

SEQ ID NO: 66164 - DNA, 20 bp, Artificial Sequence
  Description of Artificial Sequence: Synthetic oligonucleotide
  Target: SCNA; (+) strand; PAM type: YTN; PAM sequence: CTG
tctccattttatcagtgaat

SEQ ID NO: 66165 - DNA, 20 bp, Artificial Sequence
  Description of Artificial Sequence: Synthetic oligonucleotide
  Target: SCNA; (+) strand; PAM type: YTN; PAM sequence: CTC
cattttatcagtgaatgaac

SEQ ID NO: 66166 - DNA, 20 bp, Artificial Sequence
  Description of Artificial Sequence: Synthetic oligonucleotide
  Target: SCNA; (+) strand; PAM type: YTN; PAM sequence: TTT
tatcagtgaatgaacagaga

SEQ ID NO: 66167 - DNA, 20 bp, Artificial Sequence
  Description of Artificial Sequence: Synthetic oligonucleotide
  Target: SCNA; (+) strand; PAM type: YTN; PAM sequence: TTT
atcagtgaatgaacagagat

SEQ ID NO: 66168 - DNA, 20 bp, Artificial Sequence
  Description of Artificial Sequence: Synthetic oligonucleotide
  Target: SCNA; (+) strand; PAM type: YTN; PAM sequence: TTA
tcagtgaatgaacagagata

SEQ ID NO: 66169 - DNA, 20 bp, Artificial Sequence
  Description of Artificial Sequence: Synthetic oligonucleotide
  Target: SCNA; (+) strand; PAM type: YTN; PAM sequence: CTG
gctccaaagcccacactctt

SEQ ID NO: 66170 - DNA, 20 bp, Artificial Sequence
  Description of Artificial Sequence: Synthetic oligonucleotide
  Target: SCNA; (+) strand; PAM type: YTN; PAM sequence: CTC
caaagcccacactcttaact

SEQ ID NO: 66171 - DNA, 20 bp, Artificial Sequence
  Description of Artificial Sequence: Synthetic oligonucleotide
  Target: SCNA; (+) strand; PAM type: YTN; PAM sequence: CTC
ttaactattatgcaatatta

SEQ ID NO: 66172 - DNA, 20 bp, Artificial Sequence
  Description of Artificial Sequence: Synthetic oligonucleotide
  Target: SCNA; (+) strand; PAM type: YTN; PAM sequence: CTT
aactattatgcaatattagt

SEQ ID NO: 66173 - DNA, 20 bp, Artificial Sequence
  Description of Artificial Sequence: Synthetic oligonucleotide
  Target: SCNA; (+) strand; PAM type: YTN; PAM sequence: TTA
actattatgcaatattagtt

SEQ ID NO: 66174 - DNA, 20 bp, Artificial Sequence
  Description of Artificial Sequence: Synthetic oligonucleotide
  Target: SCNA; (+) strand; PAM type: YTN; PAM sequence: CTA
ttatgcaatattagttgtca

SEQ ID NO: 66175 - DNA, 20 bp, Artificial Sequence
  Description of Artificial Sequence: Synthetic oligonucleotide
  Target: SCNA; (+) strand; PAM type: YTN; PAM sequence: TTA
tgcaatattagttgtcaaat

SEQ ID NO: 66176 - DNA, 20 bp, Artificial Sequence
  Description of Artificial Sequence: Synthetic oligonucleotide
  Target: SCNA; (+) strand; PAM type: YTN; PAM sequence: TTA
gttgtcaaatgtcttgaaaa

SEQ ID NO: 66177 - DNA, 20 bp, Artificial Sequence
  Description of Artificial Sequence: Synthetic oligonucleotide
  Target: SCNA; (+) strand; PAM type: YTN; PAM sequence: TTG
tcaaatgtcttgaaaaaaaa

SEQ ID NO: 66178 - DNA, 20 bp, Artificial Sequence
  Description of Artificial Sequence: Synthetic oligonucleotide
  Target: SCNA; (+) strand; PAM type: YTN; PAM sequence: CTT
gaaaaaaaaatctgtgtaat

SEQ ID NO: 66179 - DNA, 20 bp, Artificial Sequence
  Description of Artificial Sequence: Synthetic oligonucleotide
  Target: SCNA; (+) strand; PAM type: YTN; PAM sequence: TTG
aaaaaaaaatctgtgtaatt

SEQ ID NO: 66180 - DNA, 20 bp, Artificial Sequence
  Description of Artificial Sequence: Synthetic oligonucleotide
  Target: SCNA; (+) strand; PAM type: YTN; PAM sequence: CTG
tgtaattactaaaatattac

SEQ ID NO: 66181 - DNA, 20 bp, Artificial Sequence
  Description of Artificial Sequence: Synthetic oligonucleotide
  Target: SCNA; (+) strand; PAM type: YTN; PAM sequence: TTA
ctaaaatattacgctgggct

SEQ ID NO: 66182 - DNA, 20 bp, Artificial Sequence
  Description of Artificial Sequence: Synthetic oligonucleotide
  Target: SCNA; (+) strand; PAM type: YTN; PAM sequence: CTA
aaatattacgctgggctact

SEQ ID NO: 66183 - DNA, 20 bp, Artificial Sequence
  Description of Artificial Sequence: Synthetic oligonucleotide
  Target: SCNA; (+) strand; PAM type: YTN; PAM sequence: TTA
cgctgggctacttattaagg

SEQ ID NO: 66184 - DNA, 20 bp, Artificial Sequence
  Description of Artificial Sequence: Synthetic oligonucleotide
  Target: SCNA; (+) strand; PAM type: YTN; PAM sequence: CTG
ggctacttattaaggtaaaa

SEQ ID NO: 66185 - DNA, 20 bp, Artificial Sequence
  Description of Artificial Sequence: Synthetic oligonucleotide
  Target: SCNA; (+) strand; PAM type: YTN; PAM sequence: CTA
cttattaaggtaaaattacg

SEQ ID NO: 66186 - DNA, 20 bp, Artificial Sequence
  Description of Artificial Sequence: Synthetic oligonucleotide
  Target: SCNA; (+) strand; PAM type: YTN; PAM sequence: CTT
attaaggtaaaattacgttt

SEQ ID NO: 66187 - DNA, 20 bp, Artificial Sequence
  Description of Artificial Sequence: Synthetic oligonucleotide
  Target: SCNA; (+) strand; PAM type: YTN; PAM sequence: TTA
ttaaggtaaaattacgtttc

SEQ ID NO: 66188 - DNA, 20 bp, Artificial Sequence
  Description of Artificial Sequence: Synthetic oligonucleotide
  Target: SCNA; (+) strand; PAM type: YTN; PAM sequence: TTA
aggtaaaattacgtttcaaa

SEQ ID NO: 66189 - DNA, 20 bp, Artificial Sequence
  Description of Artificial Sequence: Synthetic oligonucleotide
  Target: SCNA; (+) strand; PAM type: YTN; PAM sequence: TTA
cgtttcaaaaaaattaatcc

SEQ ID NO: 66190 - DNA, 20 bp, Artificial Sequence
  Description of Artificial Sequence: Synthetic oligonucleotide
  Target: SCNA; (+) strand; PAM type: YTN; PAM sequence: TTT
caaaaaaattaatcctttcc

SEQ ID NO: 66191 - DNA, 20 bp, Artificial Sequence
  Description of Artificial Sequence: Synthetic oligonucleotide
  Target: SCNA; (+) strand; PAM type: YTN; PAM sequence: TTC
aaaaaaattaatcctttcca

SEQ ID NO: 66192 - DNA, 20 bp, Artificial Sequence
  Description of Artificial Sequence: Synthetic oligonucleotide
  Target: SCNA; (+) strand; PAM type: YTN; PAM sequence: TTA
atcctttccaaatgcaatgt

SEQ ID NO: 66193 - DNA, 20 bp, Artificial Sequence
  Description of Artificial Sequence: Synthetic oligonucleotide
  Target: SCNA; (+) strand; PAM type: YTN; PAM sequence: CTT
tccaaatgcaatgttaacta

SEQ ID NO: 66194 - DNA, 20 bp, Artificial Sequence
  Description of Artificial Sequence: Synthetic oligonucleotide
  Target: SCNA; (+) strand; PAM type: YTN; PAM sequence: TTT
ccaaatgcaatgttaactat

SEQ ID NO: 66195 - DNA, 20 bp, Artificial Sequence
  Description of Artificial Sequence: Synthetic oligonucleotide
  Target: SCNA; (+) strand; PAM type: YTN; PAM sequence: TTC
caaatgcaatgttaactatt

SEQ ID NO: 66196 - DNA, 20 bp, Artificial Sequence
  Description of Artificial Sequence: Synthetic oligonucleotide
  Target: SCNA; (+) strand; PAM type: YTN; PAM sequence: TTA
actattcatgatgaaatatc

SEQ ID NO: 66197 - DNA, 20 bp, Artificial Sequence
  Description of Artificial Sequence: Synthetic oligonucleotide
  Target: SCNA; (+) strand; PAM type: YTN; PAM sequence: CTA
ttcatgatgaaatatcagaa

SEQ ID NO: 66198 - DNA, 20 bp, Artificial Sequence
  Description of Artificial Sequence: Synthetic oligonucleotide
  Target: SCNA; (+) strand; PAM type: YTN; PAM sequence: TTC
atgatgaaatatcagaacta

SEQ ID NO: 66199 - DNA, 20 bp, Artificial Sequence
  Description of Artificial Sequence: Synthetic oligonucleotide
  Target: SCNA; (+) strand; PAM type: YTN; PAM sequence: CTA
tctctaataccaatattttt

SEQ ID NO: 66200 - DNA, 20 bp, Artificial Sequence
  Description of Artificial Sequence: Synthetic oligonucleotide
  Target: SCNA; (+) strand; PAM type: YTN; PAM sequence: CTC
taataccaatatttttattg

SEQ ID NO: 66201 - DNA, 20 bp, Artificial Sequence
  Description of Artificial Sequence: Synthetic oligonucleotide
  Target: SCNA; (+) strand; PAM type: YTN; PAM sequence: CTA
ataccaatatttttattgga

SEQ ID NO: 66202 - DNA, 20 bp, Artificial Sequence
  Description of Artificial Sequence: Synthetic oligonucleotide
  Target: SCNA; (+) strand; PAM type: YTN; PAM sequence: TTT
ttattggaataaaataggag

SEQ ID NO: 66203 - DNA, 20 bp, Artificial Sequence
  Description of Artificial Sequence: Synthetic oligonucleotide
  Target: SCNA; (+) strand; PAM type: YTN; PAM sequence: TTT
tattggaataaaataggagg

SEQ ID NO: 66204 - DNA, 20 bp, Artificial Sequence
  Description of Artificial Sequence: Synthetic oligonucleotide
  Target: SCNA; (+) strand; PAM type: YTN; PAM sequence: TTT
attggaataaaataggaggt

SEQ ID NO: 66205 - DNA, 20 bp, Artificial Sequence
  Description of Artificial Sequence: Synthetic oligonucleotide
  Target: SCNA; (+) strand; PAM type: YTN; PAM sequence: TTA
ttggaataaaataggaggtt

SEQ ID NO: 66206 - DNA, 20 bp, Artificial Sequence
  Description of Artificial Sequence: Synthetic oligonucleotide
  Target: SCNA; (+) strand; PAM type: YTN; PAM sequence: TTG
gaataaaataggaggttaaa

SEQ ID NO: 66207 - DNA, 20 bp, Artificial Sequence
  Description of Artificial Sequence: Synthetic oligonucleotide
  Target: SCNA; (+) strand; PAM type: YTN; PAM sequence: TTA
aaggaaatgtttatatatat

SEQ ID NO: 66208 - DNA, 20 bp, Artificial Sequence
  Description of Artificial Sequence: Synthetic oligonucleotide
  Target: SCNA; (+) strand; PAM type: YTN; PAM sequence: TTT
atatatataaatgtgtgtat

SEQ ID NO: 66209 - DNA, 20 bp, Artificial Sequence
  Description of Artificial Sequence: Synthetic oligonucleotide
  Target: SCNA; (+) strand; PAM type: YTN; PAM sequence: TTA
tatatataaatgtgtgtata

SEQ ID NO: 66210 - DNA, 20 bp, Artificial Sequence
  Description of Artificial Sequence: Synthetic oligonucleotide
  Target: SCNA; (+) strand; PAM type: YTN; PAM sequence: CTA
tgcacacacacacatacata

SEQ ID NO: 66211 - DNA, 20 bp, Artificial Sequence
  Description of Artificial Sequence: Synthetic oligonucleotide
  Target: SCNA; (+) strand; PAM type: YTN; PAM sequence: CTA
tgtgtatatatatgattttt

SEQ ID NO: 66212 - DNA, 20 bp, Artificial Sequence
  Description of Artificial Sequence: Synthetic oligonucleotide
  Target: SCNA; (+) strand; PAM type: YTN; PAM sequence: TTT
tttgcaagggcaaaaaccag

SEQ ID NO: 66213 - DNA, 20 bp, Artificial Sequence
  Description of Artificial Sequence: Synthetic oligonucleotide
  Target: SCNA; (+) strand; PAM type: YTN; PAM sequence: TTT
ttgcaagggcaaaaaccaga

SEQ ID NO: 66214 - DNA, 20 bp, Artificial Sequence
  Description of Artificial Sequence: Synthetic oligonucleotide
  Target: SCNA; (+) strand; PAM type: YTN; PAM sequence: TTT
tgcaagggcaaaaaccagat

SEQ ID NO: 66215 - DNA, 20 bp, Artificial Sequence
  Description of Artificial Sequence: Synthetic oligonucleotide
  Target: SCNA; (+) strand; PAM type: YTN; PAM sequence: TTT
gcaagggcaaaaaccagatt

SEQ ID NO: 66216 - DNA, 20 bp, Artificial Sequence
  Description of Artificial Sequence: Synthetic oligonucleotide
  Target: SCNA; (+) strand; PAM type: YTN; PAM sequence: TTG
caagggcaaaaaccagattt

SEQ ID NO: 66217 - DNA, 20 bp, Artificial Sequence
  Description of Artificial Sequence: Synthetic oligonucleotide
  Target: SCNA; (+) strand; PAM type: YTN; PAM sequence: TTT
tttttaaacacataatcatt

SEQ ID NO: 66218 - DNA, 20 bp, Artificial Sequence
  Description of Artificial Sequence: Synthetic oligonucleotide
  Target: SCNA; (+) strand; PAM type: YTN; PAM sequence: TTT
ttttaaacacataatcatta

SEQ ID NO: 66219 - DNA, 20 bp, Artificial Sequence
  Description of Artificial Sequence: Synthetic oligonucleotide
  Target: SCNA; (+) strand; PAM type: YTN; PAM sequence: TTT
tttaaacacataatcattaa

SEQ ID NO: 66220 - DNA, 20 bp, Artificial Sequence
  Description of Artificial Sequence: Synthetic oligonucleotide
  Target: SCNA; (+) strand; PAM type: YTN; PAM sequence: TTT
ttaaacacataatcattaaa

SEQ ID NO: 66221 - DNA, 20 bp, Artificial Sequence
  Description of Artificial Sequence: Synthetic oligonucleotide
  Target: SCNA; (+) strand; PAM type: YTN; PAM sequence: TTT
taaacacataatcattaaat

SEQ ID NO: 66222 - DNA, 20 bp, Artificial Sequence
  Description of Artificial Sequence: Synthetic oligonucleotide
  Target: SCNA; (+) strand; PAM type: YTN; PAM sequence: TTT
aaacacataatcattaaatc

SEQ ID NO: 66223 - DNA, 20 bp, Artificial Sequence
  Description of Artificial Sequence: Synthetic oligonucleotide
  Target: SCNA; (+) strand; PAM type: YTN; PAM sequence: TTA
aacacataatcattaaatct

SEQ ID NO: 66224 - DNA, 20 bp, Artificial Sequence
  Description of Artificial Sequence: Synthetic oligonucleotide
  Target: SCNA; (+) strand; PAM type: YTN; PAM sequence: TTA
aatctgcaaatatcaagttt

SEQ ID NO: 66225 - DNA, 20 bp, Artificial Sequence
  Description of Artificial Sequence: Synthetic oligonucleotide
  Target: SCNA; (+) strand; PAM type: YTN; PAM sequence: CTG
caaatatcaagtttatcaat

SEQ ID NO: 66226 - DNA, 20 bp, Artificial Sequence
  Description of Artificial Sequence: Synthetic oligonucleotide
  Target: SCNA; (+) strand; PAM type: YTN; PAM sequence: TTT
atcaattttttgttacagga

SEQ ID NO: 66227 - DNA, 20 bp, Artificial Sequence
  Description of Artificial Sequence: Synthetic oligonucleotide
  Target: SCNA; (+) strand; PAM type: YTN; PAM sequence: TTA
tcaattttttgttacaggaa

SEQ ID NO: 66228 - DNA, 20 bp, Artificial Sequence
  Description of Artificial Sequence: Synthetic oligonucleotide
  Target: SCNA; (+) strand; PAM type: YTN; PAM sequence: TTT
tttgttacaggaaaaaatag

SEQ ID NO: 66229 - DNA, 20 bp, Artificial Sequence
  Description of Artificial Sequence: Synthetic oligonucleotide
  Target: SCNA; (+) strand; PAM type: YTN; PAM sequence: TTT
ttgttacaggaaaaaatagt

SEQ ID NO: 66230 - DNA, 20 bp, Artificial Sequence
  Description of Artificial Sequence: Synthetic oligonucleotide
  Target: SCNA; (+) strand; PAM type: YTN; PAM sequence: TTT
tgttacaggaaaaaatagtt

SEQ ID NO: 66231 - DNA, 20 bp, Artificial Sequence
  Description of Artificial Sequence: Synthetic oligonucleotide
  Target: SCNA; (+) strand; PAM type: YTN; PAM sequence: TTT
gttacaggaaaaaatagttt

SEQ ID NO: 66232 - DNA, 20 bp, Artificial Sequence
  Description of Artificial Sequence: Synthetic oligonucleotide
  Target: SCNA; (+) strand; PAM type: YTN; PAM sequence: TTG
ttacaggaaaaaatagttta

SEQ ID NO: 66233 - DNA, 20 bp, Artificial Sequence
  Description of Artificial Sequence: Synthetic oligonucleotide
  Target: SCNA; (+) strand; PAM type: YTN; PAM sequence: TTA
caggaaaaaatagtttatta

SEQ ID NO: 66234 - DNA, 20 bp, Artificial Sequence
  Description of Artificial Sequence: Synthetic oligonucleotide
  Target: SCNA; (+) strand; PAM type: YTN; PAM sequence: TTT
attataaattcaatgcatag

SEQ ID NO: 66235 - DNA, 20 bp, Artificial Sequence
  Description of Artificial Sequence: Synthetic oligonucleotide
  Target: SCNA; (+) strand; PAM type: YTN; PAM sequence: TTA
ttataaattcaatgcatagc

SEQ ID NO: 66236 - DNA, 20 bp, Artificial Sequence
  Description of Artificial Sequence: Synthetic oligonucleotide
  Target: SCNA; (+) strand; PAM type: YTN; PAM sequence: TTA
taaattcaatgcatagcatt

SEQ ID NO: 66237 - DNA, 20 bp, Artificial Sequence
  Description of Artificial Sequence: Synthetic oligonucleotide
  Target: SCNA; (+) strand; PAM type: YTN; PAM sequence: TTC
aatgcatagcattttctggt

SEQ ID NO: 66238 - DNA, 20 bp, Artificial Sequence
  Description of Artificial Sequence: Synthetic oligonucleotide
  Target: SCNA; (+) strand; PAM type: YTN; PAM sequence: TTT
tctggtttagacctttccat

SEQ ID NO: 66239 - DNA, 20 bp, Artificial Sequence
  Description of Artificial Sequence: Synthetic oligonucleotide
  Target: SCNA; (+) strand; PAM type: YTN; PAM sequence: TTT
ctggtttagacctttccatt

SEQ ID NO: 66240 - DNA, 20 bp, Artificial Sequence
  Description of Artificial Sequence: Synthetic oligonucleotide
  Target: SCNA; (+) strand; PAM type: YTN; PAM sequence: TTC
tggtttagacctttccatta

SEQ ID NO: 66241 - DNA, 20 bp, Artificial Sequence
  Description of Artificial Sequence: Synthetic oligonucleotide
  Target: SCNA; (+) strand; PAM type: YTN; PAM sequence: CTG
gtttagacctttccattatt

SEQ ID NO: 66242 - DNA, 20 bp, Artificial Sequence
  Description of Artificial Sequence: Synthetic oligonucleotide
  Target: SCNA; (+) strand; PAM type: YTN; PAM sequence: TTT
agacctttccattattgttc

SEQ ID NO: 66243 - DNA, 20 bp, Artificial Sequence
  Description of Artificial Sequence: Synthetic oligonucleotide
  Target: SCNA; (+) strand; PAM type: YTN; PAM sequence: TTA
gacctttccattattgttct

SEQ ID NO: 66244 - DNA, 20 bp, Artificial Sequence
  Description of Artificial Sequence: Synthetic oligonucleotide
  Target: SCNA; (+) strand; PAM type: YTN; PAM sequence: CTT
tccattattgttctgacaga

SEQ ID NO: 66245 - DNA, 20 bp, Artificial Sequence
  Description of Artificial Sequence: Synthetic oligonucleotide
  Target: SCNA; (+) strand; PAM type: YTN; PAM sequence: TTT
ccattattgttctgacagaa

SEQ ID NO: 66246 - DNA, 20 bp, Artificial Sequence
  Description of Artificial Sequence: Synthetic oligonucleotide
  Target: SCNA; (+) strand; PAM type: YTN; PAM sequence: TTC
cattattgttctgacagaac

SEQ ID NO: 66247 - DNA, 20 bp, Artificial Sequence
  Description of Artificial Sequence: Synthetic oligonucleotide
  Target: SCNA; (+) strand; PAM type: YTN; PAM sequence: TTA
ttgttctgacagaacaaaga

SEQ ID NO: 66248 - DNA, 20 bp, Artificial Sequence
  Description of Artificial Sequence: Synthetic oligonucleotide
  Target: SCNA; (+) strand; PAM type: YTN; PAM sequence: TTG
ttctgacagaacaaagacta

SEQ ID NO: 66249 - DNA, 20 bp, Artificial Sequence
  Description of Artificial Sequence: Synthetic oligonucleotide
  Target: SCNA; (+) strand; PAM type: YTN; PAM sequence: TTC
tgacagaacaaagactatga

SEQ ID NO: 66250 - DNA, 20 bp, Artificial Sequence
  Description of Artificial Sequence: Synthetic oligonucleotide
  Target: SCNA; (+) strand; PAM type: YTN; PAM sequence: CTG
acagaacaaagactatgagg

SEQ ID NO: 66251 - DNA, 20 bp, Artificial Sequence
  Description of Artificial Sequence: Synthetic oligonucleotide
  Target: SCNA; (+) strand; PAM type: YTN; PAM sequence: CTA
tgaggttgtcagaaataaat

SEQ ID NO: 66252 - DNA, 20 bp, Artificial Sequence
  Description of Artificial Sequence: Synthetic oligonucleotide
  Target: SCNA; (+) strand; PAM type: YTN; PAM sequence: TTG
tcagaaataaattgttcatt

SEQ ID NO: 66253 - DNA, 20 bp, Artificial Sequence
  Description of Artificial Sequence: Synthetic oligonucleotide
  Target: SCNA; (+) strand; PAM type: YTN; PAM sequence: TTG
ttcattttgtttcctaaata

SEQ ID NO: 66254 - DNA, 20 bp, Artificial Sequence
  Description of Artificial Sequence: Synthetic oligonucleotide
  Target: SCNA; (+) strand; PAM type: YTN; PAM sequence: TTC
attttgtttcctaaatatgt

SEQ ID NO: 66255 - DNA, 20 bp, Artificial Sequence
  Description of Artificial Sequence: Synthetic oligonucleotide
  Target: SCNA; (+) strand; PAM type: YTN; PAM sequence: TTT
tgtttcctaaatatgtggca

SEQ ID NO: 66256 - DNA, 20 bp, Artificial Sequence
  Description of Artificial Sequence: Synthetic oligonucleotide
  Target: SCNA; (+) strand; PAM type: YTN; PAM sequence: TTT
gtttcctaaatatgtggcaa

SEQ ID NO: 66257 - DNA, 20 bp, Artificial Sequence
  Description of Artificial Sequence: Synthetic oligonucleotide
  Target: SCNA; (+) strand; PAM type: YTN; PAM sequence: TTG
tttcctaaatatgtggcaaa

SEQ ID NO: 66258 - DNA, 20 bp, Artificial Sequence
  Description of Artificial Sequence: Synthetic oligonucleotide
  Target: SCNA; (+) strand; PAM type: YTN; PAM sequence: TTT
cctaaatatgtggcaaagac

SEQ ID NO: 66259 - DNA, 20 bp, Artificial Sequence
  Description of Artificial Sequence: Synthetic oligonucleotide
  Target: SCNA; (+) strand; PAM type: YTN; PAM sequence: TTC
ctaaatatgtggcaaagaca

SEQ ID NO: 66260 - DNA, 20 bp, Artificial Sequence
  Description of Artificial Sequence: Synthetic oligonucleotide
  Target: SCNA; (+) strand; PAM type: YTN; PAM sequence: CTA
aatatgtggcaaagacattg

SEQ ID NO: 66261 - DNA, 20 bp, Artificial Sequence
  Description of Artificial Sequence: Synthetic oligonucleotide
  Target: SCNA; (+) strand; PAM type: YTN; PAM sequence: TTG
tatgttttttgtttgtttgc

SEQ ID NO: 66262 - DNA, 20 bp, Artificial Sequence
  Description of Artificial Sequence: Synthetic oligonucleotide
  Target: SCNA; (+) strand; PAM type: YTN; PAM sequence: TTT
tttgtttgtttgcttgtttg

SEQ ID NO: 66263 - DNA, 20 bp, Artificial Sequence
  Description of Artificial Sequence: Synthetic oligonucleotide
  Target: SCNA; (+) strand; PAM type: YTN; PAM sequence: TTT
ttgtttgtttgcttgtttgt

SEQ ID NO: 66264 - DNA, 20 bp, Artificial Sequence
  Description of Artificial Sequence: Synthetic oligonucleotide
  Target: SCNA; (+) strand; PAM type: YTN; PAM sequence: TTT
tgtttgtttgcttgtttgtt

SEQ ID NO: 66265 - DNA, 20 bp, Artificial Sequence
  Description of Artificial Sequence: Synthetic oligonucleotide
  Target: SCNA; (+) strand; PAM type: YTN; PAM sequence: TTT
gtttgtttgcttgtttgttt

SEQ ID NO: 66266 - DNA, 20 bp, Artificial Sequence
  Description of Artificial Sequence: Synthetic oligonucleotide
  Target: SCNA; (+) strand; PAM type: YTN; PAM sequence: TTG
tttgtttgcttgtttgtttg

SEQ ID NO: 66267 - DNA, 20 bp, Artificial Sequence
  Description of Artificial Sequence: Synthetic oligonucleotide
  Target: SCNA; (+) strand; PAM type: YTN; PAM sequence: TTT
gtttgcttgtttgtttgttt

SEQ ID NO: 66268 - DNA, 20 bp, Artificial Sequence
  Description of Artificial Sequence: Synthetic oligonucleotide
  Target: SCNA; (+) strand; PAM type: YTN; PAM sequence: TTG
tttgcttgtttgtttgtttt

SEQ ID NO: 66269 - DNA, 20 bp, Artificial Sequence
  Description of Artificial Sequence: Synthetic oligonucleotide
  Target: SCNA; (+) strand; PAM type: YTN; PAM sequence: TTT
gcttgtttgtttgttttaga

SEQ ID NO: 66270 - DNA, 20 bp, Artificial Sequence
  Description of Artificial Sequence: Synthetic oligonucleotide
  Target: SCNA; (+) strand; PAM type: YTN; PAM sequence: TTG
cttgtttgtttgttttagaa

SEQ ID NO: 66271 - DNA, 20 bp, Artificial Sequence
  Description of Artificial Sequence: Synthetic oligonucleotide
  Target: SCNA; (+) strand; PAM type: YTN; PAM sequence: CTT
gtttgtttgttttagaatag

SEQ ID NO: 66272 - DNA, 20 bp, Artificial Sequence
  Description of Artificial Sequence: Synthetic oligonucleotide
  Target: SCNA; (+) strand; PAM type: YTN; PAM sequence: TTG
tttgtttgttttagaatagt

SEQ ID NO: 66273 - DNA, 20 bp, Artificial Sequence
  Description of Artificial Sequence: Synthetic oligonucleotide
  Target: SCNA; (+) strand; PAM type: YTN; PAM sequence: TTT
gtttgttttagaatagtttg

SEQ ID NO: 66274 - DNA, 20 bp, Artificial Sequence
  Description of Artificial Sequence: Synthetic oligonucleotide
  Target: SCNA; (+) strand; PAM type: YTN; PAM sequence: TTG
tttgttttagaatagtttga

SEQ ID NO: 66275 - DNA, 20 bp, Artificial Sequence
  Description of Artificial Sequence: Synthetic oligonucleotide
  Target: SCNA; (+) strand; PAM type: YTN; PAM sequence: TTT
gttttagaatagtttgaaat

SEQ ID NO: 66276 - DNA, 20 bp, Artificial Sequence
  Description of Artificial Sequence: Synthetic oligonucleotide
  Target: SCNA; (+) strand; PAM type: YTN; PAM sequence: TTG
ttttagaatagtttgaaatg

SEQ ID NO: 66277 - DNA, 20 bp, Artificial Sequence
  Description of Artificial Sequence: Synthetic oligonucleotide
  Target: SCNA; (+) strand; PAM type: YTN; PAM sequence: TTT
tagaatagtttgaaatgtct

SEQ ID NO: 66278 - DNA, 20 bp, Artificial Sequence
  Description of Artificial Sequence: Synthetic oligonucleotide
  Target: SCNA; (+) strand; PAM type: YTN; PAM sequence: TTT
agaatagtttgaaatgtctt

SEQ ID NO: 66279 - DNA, 20 bp, Artificial Sequence
  Description of Artificial Sequence: Synthetic oligonucleotide
  Target: SCNA; (+) strand; PAM type: YTN; PAM sequence: TTA
gaatagtttgaaatgtcttc

SEQ ID NO: 66280 - DNA, 20 bp, Artificial Sequence
  Description of Artificial Sequence: Synthetic oligonucleotide
  Target: SCNA; (+) strand; PAM type: YTN; PAM sequence: TTT
gaaatgtcttcaaacctttt

SEQ ID NO: 66281 - DNA, 20 bp, Artificial Sequence
  Description of Artificial Sequence: Synthetic oligonucleotide
  Target: SCNA; (+) strand; PAM type: YTN; PAM sequence: TTG
aaatgtcttcaaaccttttg

SEQ ID NO: 66282 - DNA, 20 bp, Artificial Sequence
  Description of Artificial Sequence: Synthetic oligonucleotide
  Target: SCNA; (+) strand; PAM type: YTN; PAM sequence: CTT
caaaccttttgaccaaccaa

SEQ ID NO: 66283 - DNA, 20 bp, Artificial Sequence
  Description of Artificial Sequence: Synthetic oligonucleotide
  Target: SCNA; (+) strand; PAM type: YTN; PAM sequence: TTC
aaaccttttgaccaaccaag

SEQ ID NO: 66284 - DNA, 20 bp, Artificial Sequence
  Description of Artificial Sequence: Synthetic oligonucleotide
  Target: SCNA; (+) strand; PAM type: YTN; PAM sequence: CTT
ttgaccaaccaagaaagctt

SEQ ID NO: 66285 - DNA, 20 bp, Artificial Sequence
  Description of Artificial Sequence: Synthetic oligonucleotide
  Target: SCNA; (+) strand; PAM type: YTN; PAM sequence: TTT
tgaccaaccaagaaagcttt

SEQ ID NO: 66286 - DNA, 20 bp, Artificial Sequence
  Description of Artificial Sequence: Synthetic oligonucleotide
  Target: SCNA; (+) strand; PAM type: YTN; PAM sequence: TTT
gaccaaccaagaaagctttt

SEQ ID NO: 66287 - DNA, 20 bp, Artificial Sequence
  Description of Artificial Sequence: Synthetic oligonucleotide
  Target: SCNA; (+) strand; PAM type: YTN; PAM sequence: TTG
accaaccaagaaagcttttg

SEQ ID NO: 66288 - DNA, 20 bp, Artificial Sequence
  Description of Artificial Sequence: Synthetic oligonucleotide
  Target: SCNA; (+) strand; PAM type: YTN; PAM sequence: CTT
ttgcctgggcacaggcttta

SEQ ID NO: 66289 - DNA, 20 bp, Artificial Sequence
  Description of Artificial Sequence: Synthetic oligonucleotide
  Target: SCNA; (+) strand; PAM type: YTN; PAM sequence: TTT
tgcctgggcacaggctttat

SEQ ID NO: 66290 - DNA, 20 bp, Artificial Sequence
  Description of Artificial Sequence: Synthetic oligonucleotide
  Target: SCNA; (+) strand; PAM type: YTN; PAM sequence: TTT
gcctgggcacaggctttatc

SEQ ID NO: 66291 - DNA, 20 bp, Artificial Sequence
  Description of Artificial Sequence: Synthetic oligonucleotide
  Target: SCNA; (+) strand; PAM type: YTN; PAM sequence: TTG
cctgggcacaggctttatct

SEQ ID NO: 66292 - DNA, 20 bp, Artificial Sequence
  Description of Artificial Sequence: Synthetic oligonucleotide
  Target: SCNA; (+) strand; PAM type: YTN; PAM sequence: CTG
ggcacaggctttatctttct

SEQ ID NO: 66293 - DNA, 20 bp, Artificial Sequence
  Description of Artificial Sequence: Synthetic oligonucleotide
  Target: SCNA; (+) strand; PAM type: YTN; PAM sequence: CTT
tatctttcttagcattacac

SEQ ID NO: 66294 - DNA, 20 bp, Artificial Sequence
  Description of Artificial Sequence: Synthetic oligonucleotide
  Target: SCNA; (+) strand; PAM type: YTN; PAM sequence: TTT
atctttcttagcattacact

SEQ ID NO: 66295 - DNA, 20 bp, Artificial Sequence
  Description of Artificial Sequence: Synthetic oligonucleotide
  Target: SCNA; (+) strand; PAM type: YTN; PAM sequence: TTA
tctttcttagcattacacta

SEQ ID NO: 66296 - DNA, 20 bp, Artificial Sequence
  Description of Artificial Sequence: Synthetic oligonucleotide
  Target: SCNA; (+) strand; PAM type: YTN; PAM sequence: CTT
tcttagcattacactagaga

SEQ ID NO: 66297 - DNA, 20 bp, Artificial Sequence
  Description of Artificial Sequence: Synthetic oligonucleotide
  Target: SCNA; (+) strand; PAM type: YTN; PAM sequence: TTT
cttagcattacactagagat

SEQ ID NO: 66298 - DNA, 20 bp, Artificial Sequence
  Description of Artificial Sequence: Synthetic oligonucleotide
  Target: SCNA; (+) strand; PAM type: YTN; PAM sequence: TTC
ttagcattacactagagata

SEQ ID NO: 66299 - DNA, 20 bp, Artificial Sequence
  Description of Artificial Sequence: Synthetic oligonucleotide
  Target: SCNA; (+) strand; PAM type: YTN; PAM sequence: CTT
agcattacactagagatact

SEQ ID NO: 66300 - DNA, 20 bp, Artificial Sequence
  Description of Artificial Sequence: Synthetic oligonucleotide
  Target: SCNA; (+) strand; PAM type: YTN; PAM sequence: TTA
gcattacactagagatacta

SEQ ID NO: 66301 - DNA, 20 bp, Artificial Sequence
  Description of Artificial Sequence: Synthetic oligonucleotide
  Target: SCNA; (+) strand; PAM type: YTN; PAM sequence: TTA
cactagagatactaatccct

SEQ ID NO: 66302 - DNA, 20 bp, Artificial Sequence
  Description of Artificial Sequence: Synthetic oligonucleotide
  Target: SCNA; (+) strand; PAM type: YTN; PAM sequence: CTA
gagatactaatccctcccaa

SEQ ID NO: 66303 - DNA, 20 bp, Artificial Sequence
  Description of Artificial Sequence: Synthetic oligonucleotide
  Target: SCNA; (+) strand; PAM type: YTN; PAM sequence: CTA
atccctcccaacaatttcat

SEQ ID NO: 66304 - DNA, 20 bp, Artificial Sequence
  Description of Artificial Sequence: Synthetic oligonucleotide
  Target: SCNA; (+) strand; PAM type: YTN; PAM sequence: CTC
ccaacaatttcattatgatt

SEQ ID NO: 66305 - DNA, 20 bp, Artificial Sequence
  Description of Artificial Sequence: Synthetic oligonucleotide
  Target: SCNA; (+) strand; PAM type: YTN; PAM sequence: TTT
cattatgattatcgcaataa

SEQ ID NO: 66306 - DNA, 20 bp, Artificial Sequence
  Description of Artificial Sequence: Synthetic oligonucleotide
  Target: SCNA; (+) strand; PAM type: YTN; PAM sequence: TTC
attatgattatcgcaataaa

SEQ ID NO: 66307 - DNA, 20 bp, Artificial Sequence
  Description of Artificial Sequence: Synthetic oligonucleotide
  Target: SCNA; (+) strand; PAM type: YTN; PAM sequence: TTA
tgattatcgcaataaaatat

SEQ ID NO: 66308 - DNA, 20 bp, Artificial Sequence
  Description of Artificial Sequence: Synthetic oligonucleotide
  Target: SCNA; (+) strand; PAM type: YTN; PAM sequence: TTA
tcgcaataaaatataacgat

SEQ ID NO: 66309 - DNA, 20 bp, Artificial Sequence
  Description of Artificial Sequence: Synthetic oligonucleotide
  Target: SCNA; (+) strand; PAM type: YTN; PAM sequence: TTA
agtccatggggcagatgttt

SEQ ID NO: 66310 - DNA, 20 bp, Artificial Sequence
  Description of Artificial Sequence: Synthetic oligonucleotide
  Target: SCNA; (+) strand; PAM type: YTN; PAM sequence: TTT
atttatttataaccatgcct

SEQ ID NO: 66311 - DNA, 20 bp, Artificial Sequence
  Description of Artificial Sequence: Synthetic oligonucleotide
  Target: SCNA; (+) strand; PAM type: YTN; PAM sequence: TTA
tttatttataaccatgcctt

SEQ ID NO: 66312 - DNA, 20 bp, Artificial Sequence
  Description of Artificial Sequence: Synthetic oligonucleotide
  Target: SCNA; (+) strand; PAM type: YTN; PAM sequence: TTT
atttataaccatgccttatt

SEQ ID NO: 66313 - DNA, 20 bp, Artificial Sequence
  Description of Artificial Sequence: Synthetic oligonucleotide
  Target: SCNA; (+) strand; PAM type: YTN; PAM sequence: TTA
tttataaccatgccttattc

SEQ ID NO: 66314 - DNA, 20 bp, Artificial Sequence
  Description of Artificial Sequence: Synthetic oligonucleotide
  Target: SCNA; (+) strand; PAM type: YTN; PAM sequence: TTT
ataaccatgccttattccac

SEQ ID NO: 66315 - DNA, 20 bp, Artificial Sequence
  Description of Artificial Sequence: Synthetic oligonucleotide
  Target: SCNA; (+) strand; PAM type: YTN; PAM sequence: TTA
taaccatgccttattccaca

SEQ ID NO: 66316 - DNA, 20 bp, Artificial Sequence
  Description of Artificial Sequence: Synthetic oligonucleotide
  Target: SCNA; (+) strand; PAM type: YTN; PAM sequence: CTT
attccacagagaatttaaag

SEQ ID NO: 66317 - DNA, 20 bp, Artificial Sequence
  Description of Artificial Sequence: Synthetic oligonucleotide
  Target: SCNA; (+) strand; PAM type: YTN; PAM sequence: TTA
ttccacagagaatttaaaga

SEQ ID NO: 66318 - DNA, 20 bp, Artificial Sequence
  Description of Artificial Sequence: Synthetic oligonucleotide
  Target: SCNA; (+) strand; PAM type: YTN; PAM sequence: TTC
cacagagaatttaaagagga

SEQ ID NO: 66319 - DNA, 20 bp, Artificial Sequence
  Description of Artificial Sequence: Synthetic oligonucleotide
  Target: SCNA; (+) strand; PAM type: YTN; PAM sequence: TTT
aaagaggaataaaagattat

SEQ ID NO: 66320 - DNA, 20 bp, Artificial Sequence
  Description of Artificial Sequence: Synthetic oligonucleotide
  Target: SCNA; (+) strand; PAM type: YTN; PAM sequence: TTA
aagaggaataaaagattatt

SEQ ID NO: 66321 - DNA, 20 bp, Artificial Sequence
  Description of Artificial Sequence: Synthetic oligonucleotide
  Target: SCNA; (+) strand; PAM type: YTN; PAM sequence: TTA
tttcctcattgcatcaaatg

SEQ ID NO: 66322 - DNA, 20 bp, Artificial Sequence
  Description of Artificial Sequence: Synthetic oligonucleotide
  Target: SCNA; (+) strand; PAM type: YTN; PAM sequence: TTT
cctcattgcatcaaatgaat

SEQ ID NO: 66323 - DNA, 20 bp, Artificial Sequence
  Description of Artificial Sequence: Synthetic oligonucleotide
  Target: SCNA; (+) strand; PAM type: YTN; PAM sequence: TTC
ctcattgcatcaaatgaata

SEQ ID NO: 66324 - DNA, 20 bp, Artificial Sequence
  Description of Artificial Sequence: Synthetic oligonucleotide
  Target: SCNA; (+) strand; PAM type: YTN; PAM sequence: CTC
attgcatcaaatgaatatct

SEQ ID NO: 66325 - DNA, 20 bp, Artificial Sequence
  Description of Artificial Sequence: Synthetic oligonucleotide
  Target: SCNA; (+) strand; PAM type: YTN; PAM sequence: TTG
catcaaatgaatatctttta

SEQ ID NO: 66326 - DNA, 20 bp, Artificial Sequence
  Description of Artificial Sequence: Synthetic oligonucleotide
  Target: SCNA; (+) strand; PAM type: YTN; PAM sequence: CTT
ttattttgtctaatgttgta

SEQ ID NO: 66327 - DNA, 20 bp, Artificial Sequence
  Description of Artificial Sequence: Synthetic oligonucleotide
  Target: SCNA; (+) strand; PAM type: YTN; PAM sequence: TTT
tattttgtctaatgttgtat

SEQ ID NO: 66328 - DNA, 20 bp, Artificial Sequence
  Description of Artificial Sequence: Synthetic oligonucleotide
  Target: SCNA; (+) strand; PAM type: YTN; PAM sequence: TTT
attttgtctaatgttgtatt

SEQ ID NO: 66329 - DNA, 20 bp, Artificial Sequence
  Description of Artificial Sequence: Synthetic oligonucleotide
  Target: SCNA; (+) strand; PAM type: YTN; PAM sequence: TTA
ttttgtctaatgttgtattt

SEQ ID NO: 66330 - DNA, 20 bp, Artificial Sequence
  Description of Artificial Sequence: Synthetic oligonucleotide
  Target: SCNA; (+) strand; PAM type: YTN; PAM sequence: TTT
tgtctaatgttgtatttctt

SEQ ID NO: 66331 - DNA, 20 bp, Artificial Sequence
  Description of Artificial Sequence: Synthetic oligonucleotide
  Target: SCNA; (+) strand; PAM type: YTN; PAM sequence: TTT
gtctaatgttgtatttcttt

SEQ ID NO: 66332 - DNA, 20 bp, Artificial Sequence
  Description of Artificial Sequence: Synthetic oligonucleotide
  Target: SCNA; (+) strand; PAM type: YTN; PAM sequence: TTG
tctaatgttgtatttctttt

SEQ ID NO: 66333 - DNA, 20 bp, Artificial Sequence
  Description of Artificial Sequence: Synthetic oligonucleotide
  Target: SCNA; (+) strand; PAM type: YTN; PAM sequence: CTA
atgttgtatttctttttctt

SEQ ID NO: 66334 - DNA, 20 bp, Artificial Sequence
  Description of Artificial Sequence: Synthetic oligonucleotide
  Target: SCNA; (+) strand; PAM type: YTN; PAM sequence: TTG
tatttctttttctttaattg

SEQ ID NO: 66335 - DNA, 20 bp, Artificial Sequence
  Description of Artificial Sequence: Synthetic oligonucleotide
  Target: SCNA; (+) strand; PAM type: YTN; PAM sequence: TTT
ctttttctttaattggcact

SEQ ID NO: 66336 - DNA, 20 bp, Artificial Sequence
  Description of Artificial Sequence: Synthetic oligonucleotide
  Target: SCNA; (+) strand; PAM type: YTN; PAM sequence: TTC
tttttctttaattggcacta

SEQ ID NO: 66337 - DNA, 20 bp, Artificial Sequence
  Description of Artificial Sequence: Synthetic oligonucleotide
  Target: SCNA; (+) strand; PAM type: YTN; PAM sequence: CTT
tttctttaattggcactaaa

SEQ ID NO: 66338 - DNA, 20 bp, Artificial Sequence
  Description of Artificial Sequence: Synthetic oligonucleotide
  Target: SCNA; (+) strand; PAM type: YTN; PAM sequence: TTT
ttctttaattggcactaaat

SEQ ID NO: 66339 - DNA, 20 bp, Artificial Sequence
  Description of Artificial Sequence: Synthetic oligonucleotide
  Target: SCNA; (+) strand; PAM type: YTN; PAM sequence: TTT
tctttaattggcactaaatg

SEQ ID NO: 66340 - DNA, 20 bp, Artificial Sequence
  Description of Artificial Sequence: Synthetic oligonucleotide
  Target: SCNA; (+) strand; PAM type: YTN; PAM sequence: TTT
ctttaattggcactaaatgt

SEQ ID NO: 66341 - DNA, 20 bp, Artificial Sequence
  Description of Artificial Sequence: Synthetic oligonucleotide
  Target: SCNA; (+) strand; PAM type: YTN; PAM sequence: TTC
tttaattggcactaaatgtt

SEQ ID NO: 66342 - DNA, 20 bp, Artificial Sequence
  Description of Artificial Sequence: Synthetic oligonucleotide
  Target: SCNA; (+) strand; PAM type: YTN; PAM sequence: CTT
taattggcactaaatgttta

SEQ ID NO: 66343 - DNA, 20 bp, Artificial Sequence
  Description of Artificial Sequence: Synthetic oligonucleotide
  Target: SCNA; (+) strand; PAM type: YTN; PAM sequence: TTT
aattggcactaaatgtttat

SEQ ID NO: 66344 - DNA, 20 bp, Artificial Sequence
  Description of Artificial Sequence: Synthetic oligonucleotide
  Target: SCNA; (+) strand; PAM type: YTN; PAM sequence: TTA
attggcactaaatgtttatt

SEQ ID NO: 66345 - DNA, 20 bp, Artificial Sequence
  Description of Artificial Sequence: Synthetic oligonucleotide
  Target: SCNA; (+) strand; PAM type: YTN; PAM sequence: TTG
gcactaaatgtttatttgca

SEQ ID NO: 66346 - DNA, 20 bp, Artificial Sequence
  Description of Artificial Sequence: Synthetic oligonucleotide
  Target: SCNA; (+) strand; PAM type: YTN; PAM sequence: CTA
aatgtttatttgcattcttt

SEQ ID NO: 66347 - DNA, 20 bp, Artificial Sequence
  Description of Artificial Sequence: Synthetic oligonucleotide
  Target: SCNA; (+) strand; PAM type: YTN; PAM sequence: TTT
atttgcattcttttaattac

SEQ ID NO: 66348 - DNA, 20 bp, Artificial Sequence
  Description of Artificial Sequence: Synthetic oligonucleotide
  Target: SCNA; (+) strand; PAM type: YTN; PAM sequence: TTA
tttgcattcttttaattact

SEQ ID NO: 66349 - DNA, 20 bp, Artificial Sequence
  Description of Artificial Sequence: Synthetic oligonucleotide
  Target: SCNA; (+) strand; PAM type: YTN; PAM sequence: TTT
gcattcttttaattactttt

SEQ ID NO: 66350 - DNA, 20 bp, Artificial Sequence
  Description of Artificial Sequence: Synthetic oligonucleotide
  Target: SCNA; (+) strand; PAM type: YTN; PAM sequence: TTG
cattcttttaattactttta

SEQ ID NO: 66351 - DNA, 20 bp, Artificial Sequence
  Description of Artificial Sequence: Synthetic oligonucleotide
  Target: SCNA; (+) strand; PAM type: YTN; PAM sequence: TTC
ttttaattacttttaaggca

SEQ ID NO: 66352 - DNA, 20 bp, Artificial Sequence
  Description of Artificial Sequence: Synthetic oligonucleotide
  Target: SCNA; (+) strand; PAM type: YTN; PAM sequence: CTT
ttaattacttttaaggcatc

SEQ ID NO: 66353 - DNA, 20 bp, Artificial Sequence
  Description of Artificial Sequence: Synthetic oligonucleotide
  Target: SCNA; (+) strand; PAM type: YTN; PAM sequence: TTT
taattacttttaaggcatcc

SEQ ID NO: 66354 - DNA, 20 bp, Artificial Sequence
  Description of Artificial Sequence: Synthetic oligonucleotide
  Target: SCNA; (+) strand; PAM type: YTN; PAM sequence: TTT
aattacttttaaggcatcca

SEQ ID NO: 66355 - DNA, 20 bp, Artificial Sequence
  Description of Artificial Sequence: Synthetic oligonucleotide
  Target: SCNA; (+) strand; PAM type: YTN; PAM sequence: TTA
attacttttaaggcatccat

SEQ ID NO: 66356 - DNA, 20 bp, Artificial Sequence
  Description of Artificial Sequence: Synthetic oligonucleotide
  Target: SCNA; (+) strand; PAM type: YTN; PAM sequence: TTA
cttttaaggcatccattatt

SEQ ID NO: 66357 - DNA, 20 bp, Artificial Sequence
  Description of Artificial Sequence: Synthetic oligonucleotide
  Target: SCNA; (+) strand; PAM type: YTN; PAM sequence: CTT
ttaaggcatccattatttct

SEQ ID NO: 66358 - DNA, 20 bp, Artificial Sequence
  Description of Artificial Sequence: Synthetic oligonucleotide
  Target: SCNA; (+) strand; PAM type: YTN; PAM sequence: TTT
taaggcatccattatttctg

SEQ ID NO: 66359 - DNA, 20 bp, Artificial Sequence
  Description of Artificial Sequence: Synthetic oligonucleotide
  Target: SCNA; (+) strand; PAM type: YTN; PAM sequence: TTT
aaggcatccattatttctgg

SEQ ID NO: 66360 - DNA, 20 bp, Artificial Sequence
  Description of Artificial Sequence: Synthetic oligonucleotide
  Target: SCNA; (+) strand; PAM type: YTN; PAM sequence: TTA
aggcatccattatttctgga

SEQ ID NO: 66361 - DNA, 20 bp, Artificial Sequence
  Description of Artificial Sequence: Synthetic oligonucleotide
  Target: SCNA; (+) strand; PAM type: YTN; PAM sequence: TTA
tttctggattacattactga

SEQ ID NO: 66362 - DNA, 20 bp, Artificial Sequence
  Description of Artificial Sequence: Synthetic oligonucleotide
  Target: SCNA; (+) strand; PAM type: YTN; PAM sequence: TTT
ctggattacattactgaact

SEQ ID NO: 66363 - DNA, 20 bp, Artificial Sequence
  Description of Artificial Sequence: Synthetic oligonucleotide
  Target: SCNA; (+) strand; PAM type: YTN; PAM sequence: TTC
tggattacattactgaactc

SEQ ID NO: 66364 - DNA, 20 bp, Artificial Sequence
  Description of Artificial Sequence: Synthetic oligonucleotide
  Target: SCNA; (+) strand; PAM type: YTN; PAM sequence: CTG
gattacattactgaactctc

SEQ ID NO: 66365 - DNA, 20 bp, Artificial Sequence
  Description of Artificial Sequence: Synthetic oligonucleotide
  Target: SCNA; (+) strand; PAM type: YTN; PAM sequence: TTA
cattactgaactctcaataa

SEQ ID NO: 66366 - DNA, 20 bp, Artificial Sequence
  Description of Artificial Sequence: Synthetic oligonucleotide
  Target: SCNA; (+) strand; PAM type: YTN; PAM sequence: TTA
ctgaactctcaataaatcaa

SEQ ID NO: 66367 - DNA, 20 bp, Artificial Sequence
  Description of Artificial Sequence: Synthetic oligonucleotide
  Target: SCNA; (+) strand; PAM type: YTN; PAM sequence: CTG
aactctcaataaatcaatac

SEQ ID NO: 66368 - DNA, 20 bp, Artificial Sequence
  Description of Artificial Sequence: Synthetic oligonucleotide
  Target: SCNA; (+) strand; PAM type: YTN; PAM sequence: CTC
tcaataaatcaatacatagt

SEQ ID NO: 66369 - DNA, 20 bp, Artificial Sequence
  Description of Artificial Sequence: Synthetic oligonucleotide
  Target: SCNA; (+) strand; PAM type: YTN; PAM sequence: CTC
aataaatcaatacatagttc

SEQ ID NO: 66370 - DNA, 20 bp, Artificial Sequence
  Description of Artificial Sequence: Synthetic oligonucleotide
  Target: SCNA; (+) strand; PAM type: YTN; PAM sequence: TTC
tgtatataattttttcaaca

SEQ ID NO: 66371 - DNA, 20 bp, Artificial Sequence
  Description of Artificial Sequence: Synthetic oligonucleotide
  Target: SCNA; (+) strand; PAM type: YTN; PAM sequence: CTG
tatataattttttcaacatt

SEQ ID NO: 66372 - DNA, 20 bp, Artificial Sequence
  Description of Artificial Sequence: Synthetic oligonucleotide
  Target: SCNA; (+) strand; PAM type: YTN; PAM sequence: TTT
tttcaacattttttccttct

SEQ ID NO: 66373 - DNA, 20 bp, Artificial Sequence
  Description of Artificial Sequence: Synthetic oligonucleotide
  Target: SCNA; (+) strand; PAM type: YTN; PAM sequence: TTT
ttcaacattttttccttctt

SEQ ID NO: 66374 - DNA, 20 bp, Artificial Sequence
  Description of Artificial Sequence: Synthetic oligonucleotide
  Target: SCNA; (+) strand; PAM type: YTN; PAM sequence: TTT
tcaacattttttccttcttt

SEQ ID NO: 66375 - DNA, 20 bp, Artificial Sequence
  Description of Artificial Sequence: Synthetic oligonucleotide
  Target: SCNA; (+) strand; PAM type: YTN; PAM sequence: TTT
caacattttttccttcttta

SEQ ID NO: 66376 - DNA, 20 bp, Artificial Sequence
  Description of Artificial Sequence: Synthetic oligonucleotide
  Target: SCNA; (+) strand; PAM type: YTN; PAM sequence: TTC
aacattttttccttctttaa

SEQ ID NO: 66377 - DNA, 20 bp, Artificial Sequence
  Description of Artificial Sequence: Synthetic oligonucleotide
  Target: SCNA; (+) strand; PAM type: YTN; PAM sequence: TTT
tttccttctttaatttggtt

SEQ ID NO: 66378 - DNA, 20 bp, Artificial Sequence
  Description of Artificial Sequence: Synthetic oligonucleotide
  Target: SCNA; (+) strand; PAM type: YTN; PAM sequence: TTT
ttccttctttaatttggttc

SEQ ID NO: 66379 - DNA, 20 bp, Artificial Sequence
  Description of Artificial Sequence: Synthetic oligonucleotide
  Target: SCNA; (+) strand; PAM type: YTN; PAM sequence: TTT
tccttctttaatttggttca

SEQ ID NO: 66380 - DNA, 20 bp, Artificial Sequence
  Description of Artificial Sequence: Synthetic oligonucleotide
  Target: SCNA; (+) strand; PAM type: YTN; PAM sequence: TTT
ccttctttaatttggttcat

SEQ ID NO: 66381 - DNA, 20 bp, Artificial Sequence
  Description of Artificial Sequence: Synthetic oligonucleotide
  Target: SCNA; (+) strand; PAM type: YTN; PAM sequence: TTC
cttctttaatttggttcatt

SEQ ID NO: 66382 - DNA, 20 bp, Artificial Sequence
  Description of Artificial Sequence: Synthetic oligonucleotide
  Target: SCNA; (+) strand; PAM type: YTN; PAM sequence: CTT
ctttaatttggttcatttgt

SEQ ID NO: 66383 - DNA, 20 bp, Artificial Sequence
  Description of Artificial Sequence: Synthetic oligonucleotide
  Target: SCNA; (+) strand; PAM type: YTN; PAM sequence: TTC
tttaatttggttcatttgta

SEQ ID NO: 66384 - DNA, 20 bp, Artificial Sequence
  Description of Artificial Sequence: Synthetic oligonucleotide
  Target: SCNA; (+) strand; PAM type: YTN; PAM sequence: CTT
taatttggttcatttgtatc

SEQ ID NO: 66385 - DNA, 20 bp, Artificial Sequence
  Description of Artificial Sequence: Synthetic oligonucleotide
  Target: SCNA; (+) strand; PAM type: YTN; PAM sequence: TTT
aatttggttcatttgtatct

SEQ ID NO: 66386 - DNA, 20 bp, Artificial Sequence
  Description of Artificial Sequence: Synthetic oligonucleotide
  Target: SCNA; (+) strand; PAM type: YTN; PAM sequence: TTA
atttggttcatttgtatctc

SEQ ID NO: 66387 - DNA, 20 bp, Artificial Sequence
  Description of Artificial Sequence: Synthetic oligonucleotide
  Target: SCNA; (+) strand; PAM type: YTN; PAM sequence: TTT
ggttcatttgtatctccctt

SEQ ID NO: 66388 - DNA, 20 bp, Artificial Sequence
  Description of Artificial Sequence: Synthetic oligonucleotide
  Target: SCNA; (+) strand; PAM type: YTN; PAM sequence: TTG
gttcatttgtatctcccttt

SEQ ID NO: 66389 - DNA, 20 bp, Artificial Sequence
  Description of Artificial Sequence: Synthetic oligonucleotide
  Target: SCNA; (+) strand; PAM type: YTN; PAM sequence: TTC
atttgtatctccctttgctg

SEQ ID NO: 66390 - DNA, 20 bp, Artificial Sequence
  Description of Artificial Sequence: Synthetic oligonucleotide
  Target: SCNA; (+) strand; PAM type: YTN; PAM sequence: TTT
gtatctccctttgctgttta

SEQ ID NO: 66391 - DNA, 20 bp, Artificial Sequence
  Description of Artificial Sequence: Synthetic oligonucleotide
  Target: SCNA; (+) strand; PAM type: YTN; PAM sequence: TTG
tatctccctttgctgtttat

SEQ ID NO: 66392 - DNA, 20 bp, Artificial Sequence
  Description of Artificial Sequence: Synthetic oligonucleotide
  Target: SCNA; (+) strand; PAM type: YTN; PAM sequence: CTC
cctttgctgtttattgagta

SEQ ID NO: 66393 - DNA, 20 bp, Artificial Sequence
  Description of Artificial Sequence: Synthetic oligonucleotide
  Target: SCNA; (+) strand; PAM type: YTN; PAM sequence: CTT
tgctgtttattgagtagaaa

SEQ ID NO: 66394 - DNA, 20 bp, Artificial Sequence
  Description of Artificial Sequence: Synthetic oligonucleotide
  Target: SCNA; (+) strand; PAM type: YTN; PAM sequence: TTT
gctgtttattgagtagaaat

SEQ ID NO: 66395 - DNA, 20 bp, Artificial Sequence
  Description of Artificial Sequence: Synthetic oligonucleotide
  Target: SCNA; (+) strand; PAM type: YTN; PAM sequence: TTG
ctgtttattgagtagaaatt

SEQ ID NO: 66396 - DNA, 20 bp, Artificial Sequence
  Description of Artificial Sequence: Synthetic oligonucleotide
  Target: SCNA; (+) strand; PAM type: YTN; PAM sequence: CTG
tttattgagtagaaattctg

SEQ ID NO: 66397 - DNA, 20 bp, Artificial Sequence
  Description of Artificial Sequence: Synthetic oligonucleotide
  Target: SCNA; (+) strand; PAM type: YTN; PAM sequence: TTT
attgagtagaaattctgatt

SEQ ID NO: 66398 - DNA, 20 bp, Artificial Sequence
  Description of Artificial Sequence: Synthetic oligonucleotide
  Target: SCNA; (+) strand; PAM type: YTN; PAM sequence: TTA
ttgagtagaaattctgattt

SEQ ID NO: 66399 - DNA, 20 bp, Artificial Sequence
  Description of Artificial Sequence: Synthetic oligonucleotide
  Target: SCNA; (+) strand; PAM type: YTN; PAM sequence: TTG
agtagaaattctgatttttg

SEQ ID NO: 66400 - DNA, 20 bp, Artificial Sequence
  Description of Artificial Sequence: Synthetic oligonucleotide
  Target: SCNA; (+) strand; PAM type: YTN; PAM sequence: TTC
tgatttttgtagcaaaggga

SEQ ID NO: 66401 - DNA, 20 bp, Artificial Sequence
  Description of Artificial Sequence: Synthetic oligonucleotide
  Target: SCNA; (+) strand; PAM type: YTN; PAM sequence: CTG
atttttgtagcaaagggaga

SEQ ID NO: 66402 - DNA, 20 bp, Artificial Sequence
  Description of Artificial Sequence: Synthetic oligonucleotide
  Target: SCNA; (+) strand; PAM type: YTN; PAM sequence: TTT
ttgtagcaaagggagaacaa

SEQ ID NO: 66403 - DNA, 20 bp, Artificial Sequence
  Description of Artificial Sequence: Synthetic oligonucleotide
  Target: SCNA; (+) strand; PAM type: YTN; PAM sequence: TTT
tgtagcaaagggagaacaaa

SEQ ID NO: 66404 - DNA, 20 bp, Artificial Sequence
  Description of Artificial Sequence: Synthetic oligonucleotide
  Target: SCNA; (+) strand; PAM type: YTN; PAM sequence: TTT
gtagcaaagggagaacaaac

SEQ ID NO: 66405 - DNA, 20 bp, Artificial Sequence
  Description of Artificial Sequence: Synthetic oligonucleotide
  Target: SCNA; (+) strand; PAM type: YTN; PAM sequence: TTG
tagcaaagggagaacaaaca

SEQ ID NO: 66406 - DNA, 20 bp, Artificial Sequence
  Description of Artificial Sequence: Synthetic oligonucleotide
  Target: SCNA; (+) strand; PAM type: YTN; PAM sequence: TTC
tgtatttaatgctgcaattg

SEQ ID NO: 66407 - DNA, 20 bp, Artificial Sequence
  Description of Artificial Sequence: Synthetic oligonucleotide
  Target: SCNA; (+) strand; PAM type: YTN; PAM sequence: CTG
tatttaatgctgcaattgtc

SEQ ID NO: 66408 - DNA, 20 bp, Artificial Sequence
  Description of Artificial Sequence: Synthetic oligonucleotide
  Target: SCNA; (+) strand; PAM type: YTN; PAM sequence: TTT
aatgctgcaattgtctctat

SEQ ID NO: 66409 - DNA, 20 bp, Artificial Sequence
  Description of Artificial Sequence: Synthetic oligonucleotide
  Target: SCNA; (+) strand; PAM type: YTN; PAM sequence: TTA
atgctgcaattgtctctatg

SEQ ID NO: 66410 - DNA, 20 bp, Artificial Sequence
  Description of Artificial Sequence: Synthetic oligonucleotide
  Target: SCNA; (+) strand; PAM type: YTN; PAM sequence: CTG
caattgtctctatggttgca

SEQ ID NO: 66411 - DNA, 20 bp, Artificial Sequence
  Description of Artificial Sequence: Synthetic oligonucleotide
  Target: SCNA; (+) strand; PAM type: YTN; PAM sequence: TTG
tctctatggttgcaatgtgt

SEQ ID NO: 66412 - DNA, 20 bp, Artificial Sequence
  Description of Artificial Sequence: Synthetic oligonucleotide
  Target: SCNA; (+) strand; PAM type: YTN; PAM sequence: CTC
tatggttgcaatgtgtaggt

SEQ ID NO: 66413 - DNA, 20 bp, Artificial Sequence
  Description of Artificial Sequence: Synthetic oligonucleotide
  Target: SCNA; (+) strand; PAM type: YTN; PAM sequence: CTA
tggttgcaatgtgtaggtgg

SEQ ID NO: 66414 - DNA, 20 bp, Artificial Sequence
  Description of Artificial Sequence: Synthetic oligonucleotide
  Target: SCNA; (+) strand; PAM type: YTN; PAM sequence: TTG
caatgtgtaggtggggtgca

SEQ ID NO: 66415 - DNA, 20 bp, Artificial Sequence
  Description of Artificial Sequence: Synthetic oligonucleotide
  Target: SCNA; (+) strand; PAM type: YTN; PAM sequence: TTC
aagtgggcttgtggtatttg

SEQ ID NO: 66416 - DNA, 20 bp, Artificial Sequence
  Description of Artificial Sequence: Synthetic oligonucleotide
  Target: SCNA; (+) strand; PAM type: YTN; PAM sequence: CTT
gtggtatttgtgtgtgtgtg

SEQ ID NO: 66417 - DNA, 20 bp, Artificial Sequence
  Description of Artificial Sequence: Synthetic oligonucleotide
  Target: SCNA; (+) strand; PAM type: YTN; PAM sequence: TTG
tggtatttgtgtgtgtgtgt

SEQ ID NO: 66418 - DNA, 20 bp, Artificial Sequence
  Description of Artificial Sequence: Synthetic oligonucleotide
  Target: SCNA; (+) strand; PAM type: YTN; PAM sequence: TTT
gtgtgtgtgtgtgtgtgtat

SEQ ID NO: 66419 - DNA, 20 bp, Artificial Sequence
  Description of Artificial Sequence: Synthetic oligonucleotide
  Target: SCNA; (+) strand; PAM type: YTN; PAM sequence: TTG
tgtgtgtgtgtgtgtgtatg

SEQ ID NO: 66420 - DNA, 20 bp, Artificial Sequence
  Description of Artificial Sequence: Synthetic oligonucleotide
  Target: SCNA; (+) strand; PAM type: YTN; PAM sequence: TTG
gaagaatatatattgaggat

SEQ ID NO: 66421 - DNA, 20 bp, Artificial Sequence
  Description of Artificial Sequence: Synthetic oligonucleotide
  Target: SCNA; (+) strand; PAM type: YTN; PAM sequence: TTG
aggatgattcctaattttat

SEQ ID NO: 66422 - DNA, 20 bp, Artificial Sequence
  Description of Artificial Sequence: Synthetic oligonucleotide
  Target: SCNA; (+) strand; PAM type: YTN; PAM sequence: TTC
ctaattttatcactttgttg

SEQ ID NO: 66423 - DNA, 20 bp, Artificial Sequence
  Description of Artificial Sequence: Synthetic oligonucleotide
  Target: SCNA; (+) strand; PAM type: YTN; PAM sequence: CTA
attttatcactttgttgagg

SEQ ID NO: 66424 - DNA, 20 bp, Artificial Sequence
  Description of Artificial Sequence: Synthetic oligonucleotide
  Target: SCNA; (+) strand; PAM type: YTN; PAM sequence: TTT
tatcactttgttgaggaact

SEQ ID NO: 66425 - DNA, 20 bp, Artificial Sequence
  Description of Artificial Sequence: Synthetic oligonucleotide
  Target: SCNA; (+) strand; PAM type: YTN; PAM sequence: TTT
atcactttgttgaggaactg

SEQ ID NO: 66426 - DNA, 20 bp, Artificial Sequence
  Description of Artificial Sequence: Synthetic oligonucleotide
  Target: SCNA; (+) strand; PAM type: YTN; PAM sequence: TTA
tcactttgttgaggaactga

SEQ ID NO: 66427 - DNA, 20 bp, Artificial Sequence
  Description of Artificial Sequence: Synthetic oligonucleotide
  Target: SCNA; (+) strand; PAM type: YTN; PAM sequence: CTT
tgttgaggaactgaaattgt

SEQ ID NO: 66428 - DNA, 20 bp, Artificial Sequence
  Description of Artificial Sequence: Synthetic oligonucleotide
  Target: SCNA; (+) strand; PAM type: YTN; PAM sequence: TTT
gttgaggaactgaaattgtg

SEQ ID NO: 66429 - DNA, 20 bp, Artificial Sequence
  Description of Artificial Sequence: Synthetic oligonucleotide
  Target: SCNA; (+) strand; PAM type: YTN; PAM sequence: TTG
ttgaggaactgaaattgtgg

SEQ ID NO: 66430 - DNA, 20 bp, Artificial Sequence
  Description of Artificial Sequence: Synthetic oligonucleotide
  Target: SCNA; (+) strand; PAM type: YTN; PAM sequence: TTG
aggaactgaaattgtggcta

SEQ ID NO: 66431 - DNA, 20 bp, Artificial Sequence
  Description of Artificial Sequence: Synthetic oligonucleotide
  Target: SCNA; (+) strand; PAM type: YTN; PAM sequence: CTG
aaattgtggctacacattca

SEQ ID NO: 66432 - DNA, 20 bp, Artificial Sequence
  Description of Artificial Sequence: Synthetic oligonucleotide
  Target: SCNA; (+) strand; PAM type: YTN; PAM sequence: TTG
tggctacacattcactctaa

SEQ ID NO: 66433 - DNA, 20 bp, Artificial Sequence
  Description of Artificial Sequence: Synthetic oligonucleotide
  Target: SCNA; (+) strand; PAM type: YTN; PAM sequence: CTA
cacattcactctaaatattt

SEQ ID NO: 66434 - DNA, 20 bp, Artificial Sequence
  Description of Artificial Sequence: Synthetic oligonucleotide
  Target: SCNA; (+) strand; PAM type: YTN; PAM sequence: TTC
actctaaatattttgtctca

SEQ ID NO: 66435 - DNA, 20 bp, Artificial Sequence
  Description of Artificial Sequence: Synthetic oligonucleotide
  Target: SCNA; (+) strand; PAM type: YTN; PAM sequence: CTC
taaatattttgtctcacagt

SEQ ID NO: 66436 - DNA, 20 bp, Artificial Sequence
  Description of Artificial Sequence: Synthetic oligonucleotide
  Target: SCNA; (+) strand; PAM type: YTN; PAM sequence: CTA
aatattttgtctcacagtcc

SEQ ID NO: 66437 - DNA, 20 bp, Artificial Sequence
  Description of Artificial Sequence: Synthetic oligonucleotide
  Target: SCNA; (+) strand; PAM type: YTN; PAM sequence: TTT
tgtctcacagtcccctccct

SEQ ID NO: 66438 - DNA, 20 bp, Artificial Sequence
  Description of Artificial Sequence: Synthetic oligonucleotide
  Target: SCNA; (+) strand; PAM type: YTN; PAM sequence: TTT
gtctcacagtcccctccctt

SEQ ID NO: 66439 - DNA, 20 bp, Artificial Sequence
  Description of Artificial Sequence: Synthetic oligonucleotide
  Target: SCNA; (+) strand; PAM type: YTN; PAM sequence: TTG
tctcacagtcccctcccttc

SEQ ID NO: 66440 - DNA, 20 bp, Artificial Sequence
  Description of Artificial Sequence: Synthetic oligonucleotide
  Target: SCNA; (+) strand; PAM type: YTN; PAM sequence: CTC
acagtcccctcccttcaaca

SEQ ID NO: 66441 - DNA, 20 bp, Artificial Sequence
  Description of Artificial Sequence: Synthetic oligonucleotide
  Target: SCNA; (+) strand; PAM type: YTN; PAM sequence: CTC
ccttcaacaattatatacag

SEQ ID NO: 66442 - DNA, 20 bp, Artificial Sequence
  Description of Artificial Sequence: Synthetic oligonucleotide
  Target: SCNA; (+) strand; PAM type: YTN; PAM sequence: CTT
caacaattatatacagtaca

SEQ ID NO: 66443 - DNA, 20 bp, Artificial Sequence
  Description of Artificial Sequence: Synthetic oligonucleotide
  Target: SCNA; (+) strand; PAM type: YTN; PAM sequence: TTC
aacaattatatacagtacac

SEQ ID NO: 66444 - DNA, 20 bp, Artificial Sequence
  Description of Artificial Sequence: Synthetic oligonucleotide
  Target: SCNA; (+) strand; PAM type: YTN; PAM sequence: TTA
tatacagtacactatttgtt

SEQ ID NO: 66445 - DNA, 20 bp, Artificial Sequence
  Description of Artificial Sequence: Synthetic oligonucleotide
  Target: SCNA; (+) strand; PAM type: YTN; PAM sequence: CTA
tttgttggaagctcaggaga

SEQ ID NO: 66446 - DNA, 20 bp, Artificial Sequence
  Description of Artificial Sequence: Synthetic oligonucleotide
  Target: SCNA; (+) strand; PAM type: YTN; PAM sequence: TTT
gttggaagctcaggagaaaa

SEQ ID NO: 66447 - DNA, 20 bp, Artificial Sequence
  Description of Artificial Sequence: Synthetic oligonucleotide
  Target: SCNA; (+) strand; PAM type: YTN; PAM sequence: TTG
ttggaagctcaggagaaaaa

SEQ ID NO: 66448 - DNA, 20 bp, Artificial Sequence
  Description of Artificial Sequence: Synthetic oligonucleotide
  Target: SCNA; (+) strand; PAM type: YTN; PAM sequence: TTG
gaagctcaggagaaaaaggg

SEQ ID NO: 66449 - DNA, 20 bp, Artificial Sequence
  Description of Artificial Sequence: Synthetic oligonucleotide
  Target: SCNA; (+) strand; PAM type: YTN; PAM sequence: CTC
aggagaaaaagggcatttaa

SEQ ID NO: 66450 - DNA, 20 bp, Artificial Sequence
  Description of Artificial Sequence: Synthetic oligonucleotide
  Target: SCNA; (+) strand; PAM type: YTN; PAM sequence: TTT
aagagcatgagatttggtgg

SEQ ID NO: 66451 - DNA, 20 bp, Artificial Sequence
  Description of Artificial Sequence: Synthetic oligonucleotide
  Target: SCNA; (+) strand; PAM type: YTN; PAM sequence: TTA
agagcatgagatttggtggc

SEQ ID NO: 66452 - DNA, 20 bp, Artificial Sequence
  Description of Artificial Sequence: Synthetic oligonucleotide
  Target: SCNA; (+) strand; PAM type: YTN; PAM sequence: TTT
ggtggcagactgacctaata

SEQ ID NO: 66453 - DNA, 20 bp, Artificial Sequence
  Description of Artificial Sequence: Synthetic oligonucleotide
  Target: SCNA; (+) strand; PAM type: YTN; PAM sequence: TTG
gtggcagactgacctaatag

SEQ ID NO: 66454 - DNA, 20 bp, Artificial Sequence
  Description of Artificial Sequence: Synthetic oligonucleotide
  Target: SCNA; (+) strand; PAM type: YTN; PAM sequence: CTG
acctaatagtagatggtacc

SEQ ID NO: 66455 - DNA, 20 bp, Artificial Sequence
  Description of Artificial Sequence: Synthetic oligonucleotide
  Target: SCNA; (+) strand; PAM type: YTN; PAM sequence: CTA
atagtagatggtaccagtga

SEQ ID NO: 66456 - DNA, 20 bp, Artificial Sequence
  Description of Artificial Sequence: Synthetic oligonucleotide
  Target: SCNA; (+) strand; PAM type: YTN; PAM sequence: CTT
gagcaacgtaaatgtttcaa

SEQ ID NO: 66457 - DNA, 20 bp, Artificial Sequence
  Description of Artificial Sequence: Synthetic oligonucleotide
  Target: SCNA; (+) strand; PAM type: YTN; PAM sequence: TTG
agcaacgtaaatgtttcaac

SEQ ID NO: 66458 - DNA, 20 bp, Artificial Sequence
  Description of Artificial Sequence: Synthetic oligonucleotide
  Target: SCNA; (+) strand; PAM type: YTN; PAM sequence: TTT
caactgaaaaacggtaacaa

SEQ ID NO: 66459 - DNA, 20 bp, Artificial Sequence
  Description of Artificial Sequence: Synthetic oligonucleotide
  Target: SCNA; (+) strand; PAM type: YTN; PAM sequence: TTC
aactgaaaaacggtaacaat

SEQ ID NO: 66460 - DNA, 20 bp, Artificial Sequence
  Description of Artificial Sequence: Synthetic oligonucleotide
  Target: SCNA; (+) strand; PAM type: YTN; PAM sequence: CTG
aaaaacggtaacaataaaac

SEQ ID NO: 66461 - DNA, 20 bp, Artificial Sequence
  Description of Artificial Sequence: Synthetic oligonucleotide
  Target: SCNA; (+) strand; PAM type: YTN; PAM sequence: TTT
ttcagagtgatgttgtacta

SEQ ID NO: 66462 - DNA, 20 bp, Artificial Sequence
  Description of Artificial Sequence: Synthetic oligonucleotide
  Target: SCNA; (+) strand; PAM type: YTN; PAM sequence: TTT
tcagagtgatgttgtactaa

SEQ ID NO: 66463 - DNA, 20 bp, Artificial Sequence
  Description of Artificial Sequence: Synthetic oligonucleotide
  Target: SCNA; (+) strand; PAM type: YTN; PAM sequence: TTT
cagagtgatgttgtactaaa

SEQ ID NO: 66464 - DNA, 20 bp, Artificial Sequence
  Description of Artificial Sequence: Synthetic oligonucleotide
  Target: SCNA; (+) strand; PAM type: YTN; PAM sequence: TTC
agagtgatgttgtactaaat

SEQ ID NO: 66465 - DNA, 20 bp, Artificial Sequence
  Description of Artificial Sequence: Synthetic oligonucleotide
  Target: SCNA; (+) strand; PAM type: YTN; PAM sequence: TTG
tactaaatgaaatgatatac

SEQ ID NO: 66466 - DNA, 20 bp, Artificial Sequence
  Description of Artificial Sequence: Synthetic oligonucleotide
  Target: SCNA; (+) strand; PAM type: YTN; PAM sequence: CTA
aatgaaatgatatacataaa

SEQ ID NO: 66467 - DNA, 20 bp, Artificial Sequence
  Description of Artificial Sequence: Synthetic oligonucleotide
  Target: SCNA; (+) strand; PAM type: YTN; PAM sequence: CTA
taatgacccatgcacagtca

SEQ ID NO: 66468 - DNA, 20 bp, Artificial Sequence
  Description of Artificial Sequence: Synthetic oligonucleotide
  Target: SCNA; (+) strand; PAM type: YTN; PAM sequence: TTT
actgagcatctactatgtgc

SEQ ID NO: 66469 - DNA, 20 bp, Artificial Sequence
  Description of Artificial Sequence: Synthetic oligonucleotide
  Target: SCNA; (+) strand; PAM type: YTN; PAM sequence: TTA
ctgagcatctactatgtgct

SEQ ID NO: 66470 - DNA, 20 bp, Artificial Sequence
  Description of Artificial Sequence: Synthetic oligonucleotide
  Target: SCNA; (+) strand; PAM type: YTN; PAM sequence: CTG
agcatctactatgtgctaga

SEQ ID NO: 66471 - DNA, 20 bp, Artificial Sequence
  Description of Artificial Sequence: Synthetic oligonucleotide
  Target: SCNA; (+) strand; PAM type: YTN; PAM sequence: CTA
ctatgtgctagattatttta

SEQ ID NO: 66472 - DNA, 20 bp, Artificial Sequence
  Description of Artificial Sequence: Synthetic oligonucleotide
  Target: SCNA; (+) strand; PAM type: YTN; PAM sequence: CTA
tgtgctagattattttaagc

SEQ ID NO: 66473 - DNA, 20 bp, Artificial Sequence
  Description of Artificial Sequence: Synthetic oligonucleotide
  Target: SCNA; (+) strand; PAM type: YTN; PAM sequence: CTA
gattattttaagcacttttg

SEQ ID NO: 66474 - DNA, 20 bp, Artificial Sequence
  Description of Artificial Sequence: Synthetic oligonucleotide
  Target: SCNA; (+) strand; PAM type: YTN; PAM sequence: TTA
ttttaagcacttttgaaaat

SEQ ID NO: 66475 - DNA, 20 bp, Artificial Sequence
  Description of Artificial Sequence: Synthetic oligonucleotide
  Target: SCNA; (+) strand; PAM type: YTN; PAM sequence: TTT
taagcacttttgaaaatata

SEQ ID NO: 66476 - DNA, 20 bp, Artificial Sequence
  Description of Artificial Sequence: Synthetic oligonucleotide
  Target: SCNA; (+) strand; PAM type: YTN; PAM sequence: TTT
aagcacttttgaaaatataa

SEQ ID NO: 66477 - DNA, 20 bp, Artificial Sequence
  Description of Artificial Sequence: Synthetic oligonucleotide
  Target: SCNA; (+) strand; PAM type: YTN; PAM sequence: TTA
agcacttttgaaaatataag

SEQ ID NO: 66478 - DNA, 20 bp, Artificial Sequence
  Description of Artificial Sequence: Synthetic oligonucleotide
  Target: SCNA; (+) strand; PAM type: YTN; PAM sequence: CTT
ttgaaaatataagtattttg

SEQ ID NO: 66479 - DNA, 20 bp, Artificial Sequence
  Description of Artificial Sequence: Synthetic oligonucleotide
  Target: SCNA; (+) strand; PAM type: YTN; PAM sequence: TTT
tgaaaatataagtattttga

SEQ ID NO: 66480 - DNA, 20 bp, Artificial Sequence
  Description of Artificial Sequence: Synthetic oligonucleotide
  Target: SCNA; (+) strand; PAM type: YTN; PAM sequence: TTT
gaaaatataagtattttgat

SEQ ID NO: 66481 - DNA, 20 bp, Artificial Sequence
  Description of Artificial Sequence: Synthetic oligonucleotide
  Target: SCNA; (+) strand; PAM type: YTN; PAM sequence: TTG
aaaatataagtattttgata

SEQ ID NO: 66482 - DNA, 20 bp, Artificial Sequence
  Description of Artificial Sequence: Synthetic oligonucleotide
  Target: SCNA; (+) strand; PAM type: YTN; PAM sequence: TTT
tgataaatgtatatcatata

SEQ ID NO: 66483 - DNA, 20 bp, Artificial Sequence
  Description of Artificial Sequence: Synthetic oligonucleotide
  Target: SCNA; (+) strand; PAM type: YTN; PAM sequence: TTT
gataaatgtatatcatatat

SEQ ID NO: 66484 - DNA, 20 bp, Artificial Sequence
  Description of Artificial Sequence: Synthetic oligonucleotide
  Target: SCNA; (+) strand; PAM type: YTN; PAM sequence: TTG
ataaatgtatatcatatatt

SEQ ID NO: 66485 - DNA, 20 bp, Artificial Sequence
  Description of Artificial Sequence: Synthetic oligonucleotide
  Target: SCNA; (+) strand; PAM type: YTN; PAM sequence: TTG
tcttaataagattatattgt

SEQ ID NO: 66486 - DNA, 20 bp, Artificial Sequence
  Description of Artificial Sequence: Synthetic oligonucleotide
  Target: SCNA; (+) strand; PAM type: YTN; PAM sequence: CTT
aataagattatattgttgtt

SEQ ID NO: 66487 - DNA, 20 bp, Artificial Sequence
  Description of Artificial Sequence: Synthetic oligonucleotide
  Target: SCNA; (+) strand; PAM type: YTN; PAM sequence: TTA
ataagattatattgttgtta

SEQ ID NO: 66488 - DNA, 20 bp, Artificial Sequence
  Description of Artificial Sequence: Synthetic oligonucleotide
  Target: SCNA; (+) strand; PAM type: YTN; PAM sequence: TTA
tattgttgttatatttcatc

SEQ ID NO: 66489 - DNA, 20 bp, Artificial Sequence
  Description of Artificial Sequence: Synthetic oligonucleotide
  Target: SCNA; (+) strand; PAM type: YTN; PAM sequence: TTG
ttgttatatttcatcttatt

SEQ ID NO: 66490 - DNA, 20 bp, Artificial Sequence
  Description of Artificial Sequence: Synthetic oligonucleotide
  Target: SCNA; (+) strand; PAM type: YTN; PAM sequence: TTG
ttatatttcatcttattgct

SEQ ID NO: 66491 - DNA, 20 bp, Artificial Sequence
  Description of Artificial Sequence: Synthetic oligonucleotide
  Target: SCNA; (+) strand; PAM type: YTN; PAM sequence: TTA
tatttcatcttattgctaat

SEQ ID NO: 66492 - DNA, 20 bp, Artificial Sequence
  Description of Artificial Sequence: Synthetic oligonucleotide
  Target: SCNA; (+) strand; PAM type: YTN; PAM sequence: TTT
catcttattgctaattttat

SEQ ID NO: 66493 - DNA, 20 bp, Artificial Sequence
  Description of Artificial Sequence: Synthetic oligonucleotide
  Target: SCNA; (+) strand; PAM type: YTN; PAM sequence: TTC
atcttattgctaattttatt

SEQ ID NO: 66494 - DNA, 20 bp, Artificial Sequence
  Description of Artificial Sequence: Synthetic oligonucleotide
  Target: SCNA; (+) strand; PAM type: YTN; PAM sequence: CTT
attgctaattttattttttt

SEQ ID NO: 66495 - DNA, 20 bp, Artificial Sequence
  Description of Artificial Sequence: Synthetic oligonucleotide
  Target: SCNA; (+) strand; PAM type: YTN; PAM sequence: TTA
ttgctaattttattttttta

SEQ ID NO: 66496 - DNA, 20 bp, Artificial Sequence
  Description of Artificial Sequence: Synthetic oligonucleotide
  Target: SCNA; (+) strand; PAM type: YTN; PAM sequence: TTG
ctaattttatttttttaaga

SEQ ID NO: 66497 - DNA, 20 bp, Artificial Sequence
  Description of Artificial Sequence: Synthetic oligonucleotide
  Target: SCNA; (+) strand; PAM type: YTN; PAM sequence: CTA
attttatttttttaagaaaa

SEQ ID NO: 66498 - DNA, 20 bp, Artificial Sequence
  Description of Artificial Sequence: Synthetic oligonucleotide
  Target: SCNA; (+) strand; PAM type: YTN; PAM sequence: TTT
tatttttttaagaaaacctt

SEQ ID NO: 66499 - DNA, 20 bp, Artificial Sequence
  Description of Artificial Sequence: Synthetic oligonucleotide
  Target: SCNA; (+) strand; PAM type: YTN; PAM sequence: TTT
atttttttaagaaaaccttt

SEQ ID NO: 66500 - DNA, 20 bp, Artificial Sequence
  Description of Artificial Sequence: Synthetic oligonucleotide
  Target: SCNA; (+) strand; PAM type: YTN; PAM sequence: TTA
tttttttaagaaaacctttt

SEQ ID NO: 66501 - DNA, 20 bp, Artificial Sequence
  Description of Artificial Sequence: Synthetic oligonucleotide
  Target: SCNA; (+) strand; PAM type: YTN; PAM sequence: TTT
ttttaagaaaaccttttttt

SEQ ID NO: 66502 - DNA, 20 bp, Artificial Sequence
  Description of Artificial Sequence: Synthetic oligonucleotide
  Target: SCNA; (+) strand; PAM type: YTN; PAM sequence: TTT
tttaagaaaacctttttttg

SEQ ID NO: 66503 - DNA, 20 bp, Artificial Sequence
  Description of Artificial Sequence: Synthetic oligonucleotide
  Target: SCNA; (+) strand; PAM type: YTN; PAM sequence: TTT
ttaagaaaacctttttttgg

SEQ ID NO: 66504 - DNA, 20 bp, Artificial Sequence
  Description of Artificial Sequence: Synthetic oligonucleotide
  Target: SCNA; (+) strand; PAM type: YTN; PAM sequence: TTT
taagaaaacctttttttgga

SEQ ID NO: 66505 - DNA, 20 bp, Artificial Sequence
  Description of Artificial Sequence: Synthetic oligonucleotide
  Target: SCNA; (+) strand; PAM type: YTN; PAM sequence: TTT
aagaaaacctttttttggaa

SEQ ID NO: 66506 - DNA, 20 bp, Artificial Sequence
  Description of Artificial Sequence: Synthetic oligonucleotide
  Target: SCNA; (+) strand; PAM type: YTN; PAM sequence: TTA
agaaaacctttttttggaaa

SEQ ID NO: 66507 - DNA, 20 bp, Artificial Sequence
  Description of Artificial Sequence: Synthetic oligonucleotide
  Target: SCNA; (+) strand; PAM type: YTN; PAM sequence: CTT
tttttggaaagaatcgaaac

SEQ ID NO: 66508 - DNA, 20 bp, Artificial Sequence
  Description of Artificial Sequence: Synthetic oligonucleotide
  Target: SCNA; (+) strand; PAM type: YTN; PAM sequence: TTT
ttttggaaagaatcgaaact

SEQ ID NO: 66509 - DNA, 20 bp, Artificial Sequence
  Description of Artificial Sequence: Synthetic oligonucleotide
  Target: SCNA; (+) strand; PAM type: YTN; PAM sequence: TTT
tttggaaagaatcgaaacta

SEQ ID NO: 66510 - DNA, 20 bp, Artificial Sequence
  Description of Artificial Sequence: Synthetic oligonucleotide
  Target: SCNA; (+) strand; PAM type: YTN; PAM sequence: TTT
ttggaaagaatcgaaactaa

SEQ ID NO: 66511 - DNA, 20 bp, Artificial Sequence
  Description of Artificial Sequence: Synthetic oligonucleotide
  Target: SCNA; (+) strand; PAM type: YTN; PAM sequence: TTT
tggaaagaatcgaaactaaa

SEQ ID NO: 66512 - DNA, 20 bp, Artificial Sequence
  Description of Artificial Sequence: Synthetic oligonucleotide
  Target: SCNA; (+) strand; PAM type: YTN; PAM sequence: TTT
ggaaagaatcgaaactaaaa

SEQ ID NO: 66513 - DNA, 20 bp, Artificial Sequence
  Description of Artificial Sequence: Synthetic oligonucleotide
  Target: SCNA; (+) strand; PAM type: YTN; PAM sequence: TTG
gaaagaatcgaaactaaaaa

SEQ ID NO: 66514 - DNA, 20 bp, Artificial Sequence
  Description of Artificial Sequence: Synthetic oligonucleotide
  Target: SCNA; (+) strand; PAM type: YTN; PAM sequence: CTA
aaaacccaactatttaaaaa

SEQ ID NO: 66515 - DNA, 20 bp, Artificial Sequence
  Description of Artificial Sequence: Synthetic oligonucleotide
  Target: SCNA; (+) strand; PAM type: YTN; PAM sequence: CTA
tttaaaaaatggaaactttt

SEQ ID NO: 66516 - DNA, 20 bp, Artificial Sequence
  Description of Artificial Sequence: Synthetic oligonucleotide
  Target: SCNA; (+) strand; PAM type: YTN; PAM sequence: TTT
aaaaaatggaaacttttggc

SEQ ID NO: 66517 - DNA, 20 bp, Artificial Sequence
  Description of Artificial Sequence: Synthetic oligonucleotide
  Target: SCNA; (+) strand; PAM type: YTN; PAM sequence: TTA
aaaaatggaaacttttggcc

SEQ ID NO: 66518 - DNA, 20 bp, Artificial Sequence
  Description of Artificial Sequence: Synthetic oligonucleotide
  Target: SCNA; (+) strand; PAM type: YTN; PAM sequence: CTT
ttggccgggaacggaggctc

SEQ ID NO: 66519 - DNA, 20 bp, Artificial Sequence
  Description of Artificial Sequence: Synthetic oligonucleotide
  Target: SCNA; (+) strand; PAM type: YTN; PAM sequence: TTT
tggccgggaacggaggctca

SEQ ID NO: 66520 - DNA, 20 bp, Artificial Sequence
  Description of Artificial Sequence: Synthetic oligonucleotide
  Target: SCNA; (+) strand; PAM type: YTN; PAM sequence: TTT
ggccgggaacggaggctcac

SEQ ID NO: 66521 - DNA, 20 bp, Artificial Sequence
  Description of Artificial Sequence: Synthetic oligonucleotide
  Target: SCNA; (+) strand; PAM type: YTN; PAM sequence: TTG
gccgggaacggaggctcaca

SEQ ID NO: 66522 - DNA, 20 bp, Artificial Sequence
  Description of Artificial Sequence: Synthetic oligonucleotide
  Target: SCNA; (+) strand; PAM type: YTN; PAM sequence: CTC
acacctataatctcagcact

SEQ ID NO: 66523 - DNA, 20 bp, Artificial Sequence
  Description of Artificial Sequence: Synthetic oligonucleotide
  Target: SCNA; (+) strand; PAM type: YTN; PAM sequence: CTA
taatctcagcactttgggag

SEQ ID NO: 66524 - DNA, 20 bp, Artificial Sequence
  Description of Artificial Sequence: Synthetic oligonucleotide
  Target: SCNA; (+) strand; PAM type: YTN; PAM sequence: CTC
agcactttgggaggccgaat

SEQ ID NO: 66525 - DNA, 20 bp, Artificial Sequence
  Description of Artificial Sequence: Synthetic oligonucleotide
  Target: SCNA; (+) strand; PAM type: YTN; PAM sequence: CTT
tgggaggccgaatgggcgga

SEQ ID NO: 66526 - DNA, 20 bp, Artificial Sequence
  Description of Artificial Sequence: Synthetic oligonucleotide
  Target: SCNA; (+) strand; PAM type: YTN; PAM sequence: TTT
gggaggccgaatgggcggat

SEQ ID NO: 66527 - DNA, 20 bp, Artificial Sequence
  Description of Artificial Sequence: Synthetic oligonucleotide
  Target: SCNA; (+) strand; PAM type: YTN; PAM sequence: TTG
ggaggccgaatgggcggatc

SEQ ID NO: 66528 - DNA, 20 bp, Artificial Sequence
  Description of Artificial Sequence: Synthetic oligonucleotide
  Target: SCNA; (+) strand; PAM type: YTN; PAM sequence: TTG
agaccatcctggccaacgtg

SEQ ID NO: 66529 - DNA, 20 bp, Artificial Sequence
  Description of Artificial Sequence: Synthetic oligonucleotide
  Target: SCNA; (+) strand; PAM type: YTN; PAM sequence: CTG
gccaacgtggtgaaactccg

SEQ ID NO: 66530 - DNA, 20 bp, Artificial Sequence
  Description of Artificial Sequence: Synthetic oligonucleotide
  Target: SCNA; (+) strand; PAM type: YTN; PAM sequence: CTC
cgtctctactaaaaatacaa

SEQ ID NO: 66531 - DNA, 20 bp, Artificial Sequence
  Description of Artificial Sequence: Synthetic oligonucleotide
  Target: SCNA; (+) strand; PAM type: YTN; PAM sequence: CTC
tactaaaaatacaaaagtta

SEQ ID NO: 66532 - DNA, 20 bp, Artificial Sequence
  Description of Artificial Sequence: Synthetic oligonucleotide
  Target: SCNA; (+) strand; PAM type: YTN; PAM sequence: CTA
ctaaaaatacaaaagttagc

SEQ ID NO: 66533 - DNA, 20 bp, Artificial Sequence
  Description of Artificial Sequence: Synthetic oligonucleotide
  Target: SCNA; (+) strand; PAM type: YTN; PAM sequence: CTA
aaaatacaaaagttagctgg

SEQ ID NO: 66534 - DNA, 20 bp, Artificial Sequence
  Description of Artificial Sequence: Synthetic oligonucleotide
  Target: SCNA; (+) strand; PAM type: YTN; PAM sequence: TTA
gctgggcatggtggcacatg

SEQ ID NO: 66535 - DNA, 20 bp, Artificial Sequence
  Description of Artificial Sequence: Synthetic oligonucleotide
  Target: SCNA; (+) strand; PAM type: YTN; PAM sequence: CTG
ggcatggtggcacatgcctg

SEQ ID NO: 66536 - DNA, 20 bp, Artificial Sequence
  Description of Artificial Sequence: Synthetic oligonucleotide
  Target: SCNA; (+) strand; PAM type: YTN; PAM sequence: CTG
tagtcccagctactcgggag

SEQ ID NO: 66537 - DNA, 20 bp, Artificial Sequence
  Description of Artificial Sequence: Synthetic oligonucleotide
  Target: SCNA; (+) strand; PAM type: YTN; PAM sequence: CTA
ctcgggaggctgaggcagaa

SEQ ID NO: 66538 - DNA, 20 bp, Artificial Sequence
  Description of Artificial Sequence: Synthetic oligonucleotide
  Target: SCNA; (+) strand; PAM type: YTN; PAM sequence: CTC
gggaggctgaggcagaagaa

SEQ ID NO: 66539 - DNA, 20 bp, Artificial Sequence
  Description of Artificial Sequence: Synthetic oligonucleotide
  Target: SCNA; (+) strand; PAM type: YTN; PAM sequence: CTG
aggcagaagaatcgctggaa

SEQ ID NO: 66540 - DNA, 20 bp, Artificial Sequence
  Description of Artificial Sequence: Synthetic oligonucleotide
  Target: SCNA; (+) strand; PAM type: YTN; PAM sequence: CTG
gaacccaggaggcggaggtt

SEQ ID NO: 66541 - DNA, 20 bp, Artificial Sequence
  Description of Artificial Sequence: Synthetic oligonucleotide
  Target: SCNA; (+) strand; PAM type: YTN; PAM sequence: TTG
cagtgagccgagacagcacc

SEQ ID NO: 66542 - DNA, 20 bp, Artificial Sequence
  Description of Artificial Sequence: Synthetic oligonucleotide
  Target: SCNA; (+) strand; PAM type: YTN; PAM sequence: CTG
cactccagactggcgacaga

SEQ ID NO: 66543 - DNA, 20 bp, Artificial Sequence
  Description of Artificial Sequence: Synthetic oligonucleotide
  Target: SCNA; (+) strand; PAM type: YTN; PAM sequence: CTC
cagactggcgacagagtgag

SEQ ID NO: 66544 - DNA, 20 bp, Artificial Sequence
  Description of Artificial Sequence: Synthetic oligonucleotide
  Target: SCNA; (+) strand; PAM type: YTN; PAM sequence: CTG
gcgacagagtgagactccat

SEQ ID NO: 66545 - DNA, 20 bp, Artificial Sequence
  Description of Artificial Sequence: Synthetic oligonucleotide
  Target: SCNA; (+) strand; PAM type: YTN; PAM sequence: CTC
catctaaaaaaaaaaaaaag

SEQ ID NO: 66546 - DNA, 20 bp, Artificial Sequence
  Description of Artificial Sequence: Synthetic oligonucleotide
  Target: SCNA; (+) strand; PAM type: YTN; PAM sequence: CTA
aaaaaaaaaaaaaggaacct

SEQ ID NO: 66547 - DNA, 20 bp, Artificial Sequence
  Description of Artificial Sequence: Synthetic oligonucleotide
  Target: SCNA; (+) strand; PAM type: YTN; PAM sequence: CTT
ttgccttacttcgtttgcta

SEQ ID NO: 66548 - DNA, 20 bp, Artificial Sequence
  Description of Artificial Sequence: Synthetic oligonucleotide
  Target: SCNA; (+) strand; PAM type: YTN; PAM sequence: TTT
tgccttacttcgtttgctag

SEQ ID NO: 66549 - DNA, 20 bp, Artificial Sequence
  Description of Artificial Sequence: Synthetic oligonucleotide
  Target: SCNA; (+) strand; PAM type: YTN; PAM sequence: TTT
gccttacttcgtttgctagc

SEQ ID NO: 66550 - DNA, 20 bp, Artificial Sequence
  Description of Artificial Sequence: Synthetic oligonucleotide
  Target: SCNA; (+) strand; PAM type: YTN; PAM sequence: TTG
ccttacttcgtttgctagct

SEQ ID NO: 66551 - DNA, 20 bp, Artificial Sequence
  Description of Artificial Sequence: Synthetic oligonucleotide
  Target: SCNA; (+) strand; PAM type: YTN; PAM sequence: CTT
acttcgtttgctagctacat

SEQ ID NO: 66552 - DNA, 20 bp, Artificial Sequence
  Description of Artificial Sequence: Synthetic oligonucleotide
  Target: SCNA; (+) strand; PAM type: YTN; PAM sequence: TTA
cttcgtttgctagctacatt

SEQ ID NO: 66553 - DNA, 20 bp, Artificial Sequence
  Description of Artificial Sequence: Synthetic oligonucleotide
  Target: SCNA; (+) strand; PAM type: YTN; PAM sequence: CTT
cgtttgctagctacattcaa

SEQ ID NO: 66554 - DNA, 20 bp, Artificial Sequence
  Description of Artificial Sequence: Synthetic oligonucleotide
  Target: SCNA; (+) strand; PAM type: YTN; PAM sequence: TTC
gtttgctagctacattcaag

SEQ ID NO: 66555 - DNA, 20 bp, Artificial Sequence
  Description of Artificial Sequence: Synthetic oligonucleotide
  Target: SCNA; (+) strand; PAM type: YTN; PAM sequence: TTT
gctagctacattcaagtctg

SEQ ID NO: 66556 - DNA, 20 bp, Artificial Sequence
  Description of Artificial Sequence: Synthetic oligonucleotide
  Target: SCNA; (+) strand; PAM type: YTN; PAM sequence: TTG
ctagctacattcaagtctgc

SEQ ID NO: 66557 - DNA, 20 bp, Artificial Sequence
  Description of Artificial Sequence: Synthetic oligonucleotide
  Target: SCNA; (+) strand; PAM type: YTN; PAM sequence: CTA
gctacattcaagtctgcaat

SEQ ID NO: 66558 - DNA, 20 bp, Artificial Sequence
  Description of Artificial Sequence: Synthetic oligonucleotide
  Target: SCNA; (+) strand; PAM type: YTN; PAM sequence: CTA
cattcaagtctgcaattaag

SEQ ID NO: 66559 - DNA, 20 bp, Artificial Sequence
  Description of Artificial Sequence: Synthetic oligonucleotide
  Target: SCNA; (+) strand; PAM type: YTN; PAM sequence: TTC
aagtctgcaattaagctcgg

SEQ ID NO: 66560 - DNA, 20 bp, Artificial Sequence
  Description of Artificial Sequence: Synthetic oligonucleotide
  Target: SCNA; (+) strand; PAM type: YTN; PAM sequence: CTG
caattaagctcggtgttttg

SEQ ID NO: 66561 - DNA, 20 bp, Artificial Sequence
  Description of Artificial Sequence: Synthetic oligonucleotide
  Target: SCNA; (+) strand; PAM type: YTN; PAM sequence: TTA
agctcggtgttttgcctttc

SEQ ID NO: 66562 - DNA, 20 bp, Artificial Sequence
  Description of Artificial Sequence: Synthetic oligonucleotide
  Target: SCNA; (+) strand; PAM type: YTN; PAM sequence: CTC
ggtgttttgcctttctcaaa

SEQ ID NO: 66563 - DNA, 20 bp, Artificial Sequence
  Description of Artificial Sequence: Synthetic oligonucleotide
  Target: SCNA; (+) strand; PAM type: YTN; PAM sequence: TTT
tgcctttctcaaactgtgca

SEQ ID NO: 66564 - DNA, 20 bp, Artificial Sequence
  Description of Artificial Sequence: Synthetic oligonucleotide
  Target: SCNA; (+) strand; PAM type: YTN; PAM sequence: TTT
gcctttctcaaactgtgcac

SEQ ID NO: 66565 - DNA, 20 bp, Artificial Sequence
  Description of Artificial Sequence: Synthetic oligonucleotide
  Target: SCNA; (+) strand; PAM type: YTN; PAM sequence: TTG
cctttctcaaactgtgcaca

SEQ ID NO: 66566 - DNA, 20 bp, Artificial Sequence
  Description of Artificial Sequence: Synthetic oligonucleotide
  Target: SCNA; (+) strand; PAM type: YTN; PAM sequence: CTT
tctcaaactgtgcacaggtc

SEQ ID NO: 66567 - DNA, 20 bp, Artificial Sequence
  Description of Artificial Sequence: Synthetic oligonucleotide
  Target: SCNA; (+) strand; PAM type: YTN; PAM sequence: TTT
ctcaaactgtgcacaggtcc

SEQ ID NO: 66568 - DNA, 20 bp, Artificial Sequence
  Description of Artificial Sequence: Synthetic oligonucleotide
  Target: SCNA; (+) strand; PAM type: YTN; PAM sequence: TTC
tcaaactgtgcacaggtcct

SEQ ID NO: 66569 - DNA, 20 bp, Artificial Sequence
  Description of Artificial Sequence: Synthetic oligonucleotide
  Target: SCNA; (+) strand; PAM type: YTN; PAM sequence: CTC
aaactgtgcacaggtcctct

SEQ ID NO: 66570 - DNA, 20 bp, Artificial Sequence
  Description of Artificial Sequence: Synthetic oligonucleotide
  Target: SCNA; (+) strand; PAM type: YTN; PAM sequence: CTG
tgcacaggtcctcttgtttg

SEQ ID NO: 66571 - DNA, 20 bp, Artificial Sequence
  Description of Artificial Sequence: Synthetic oligonucleotide
  Target: SCNA; (+) strand; PAM type: YTN; PAM sequence: CTC
ttgtttgttccccttctctc

SEQ ID NO: 66572 - DNA, 20 bp, Artificial Sequence
  Description of Artificial Sequence: Synthetic oligonucleotide
  Target: SCNA; (+) strand; PAM type: YTN; PAM sequence: CTT
gtttgttccccttctctctg

SEQ ID NO: 66573 - DNA, 20 bp, Artificial Sequence
  Description of Artificial Sequence: Synthetic oligonucleotide
  Target: SCNA; (+) strand; PAM type: YTN; PAM sequence: TTG
tttgttccccttctctctgt

SEQ ID NO: 66574 - DNA, 20 bp, Artificial Sequence
  Description of Artificial Sequence: Synthetic oligonucleotide
  Target: SCNA; (+) strand; PAM type: YTN; PAM sequence: TTT
gttccccttctctctgttgc

SEQ ID NO: 66575 - DNA, 20 bp, Artificial Sequence
  Description of Artificial Sequence: Synthetic oligonucleotide
  Target: SCNA; (+) strand; PAM type: YTN; PAM sequence: TTG
ttccccttctctctgttgcc

SEQ ID NO: 66576 - DNA, 20 bp, Artificial Sequence
  Description of Artificial Sequence: Synthetic oligonucleotide
  Target: SCNA; (+) strand; PAM type: YTN; PAM sequence: TTC
cccttctctctgttgcctag

SEQ ID NO: 66577 - DNA, 20 bp, Artificial Sequence
  Description of Artificial Sequence: Synthetic oligonucleotide
  Target: SCNA; (+) strand; PAM type: YTN; PAM sequence: CTT
ctctctgttgcctaggaata

SEQ ID NO: 66578 - DNA, 20 bp, Artificial Sequence
  Description of Artificial Sequence: Synthetic oligonucleotide
  Target: SCNA; (+) strand; PAM type: YTN; PAM sequence: TTC
tctctgttgcctaggaatac

SEQ ID NO: 66579 - DNA, 20 bp, Artificial Sequence
  Description of Artificial Sequence: Synthetic oligonucleotide
  Target: SCNA; (+) strand; PAM type: YTN; PAM sequence: CTC
tctgttgcctaggaatacag

SEQ ID NO: 66580 - DNA, 20 bp, Artificial Sequence
  Description of Artificial Sequence: Synthetic oligonucleotide
  Target: SCNA; (+) strand; PAM type: YTN; PAM sequence: CTC
tgttgcctaggaatacagcc

SEQ ID NO: 66581 - DNA, 20 bp, Artificial Sequence
  Description of Artificial Sequence: Synthetic oligonucleotide
  Target: SCNA; (+) strand; PAM type: YTN; PAM sequence: CTG
ttgcctaggaatacagccaa

SEQ ID NO: 66582 - DNA, 20 bp, Artificial Sequence
  Description of Artificial Sequence: Synthetic oligonucleotide
  Target: SCNA; (+) strand; PAM type: YTN; PAM sequence: TTG
cctaggaatacagccaaaaa

SEQ ID NO: 66583 - DNA, 20 bp, Artificial Sequence
  Description of Artificial Sequence: Synthetic oligonucleotide
  Target: SCNA; (+) strand; PAM type: YTN; PAM sequence: CTA
ggaatacagccaaaaacttg

SEQ ID NO: 66584 - DNA, 20 bp, Artificial Sequence
  Description of Artificial Sequence: Synthetic oligonucleotide
  Target: SCNA; (+) strand; PAM type: YTN; PAM sequence: CTT
gagtaatagatgatagatgg

SEQ ID NO: 66585 - DNA, 20 bp, Artificial Sequence
  Description of Artificial Sequence: Synthetic oligonucleotide
  Target: SCNA; (+) strand; PAM type: YTN; PAM sequence: TTG
agtaatagatgatagatggg

SEQ ID NO: 66586 - DNA, 20 bp, Artificial Sequence
  Description of Artificial Sequence: Synthetic oligonucleotide
  Target: SCNA; (+) strand; PAM type: YTN; PAM sequence: CTG
tcactaagcacatcctagtg

SEQ ID NO: 66587 - DNA, 20 bp, Artificial Sequence
  Description of Artificial Sequence: Synthetic oligonucleotide
  Target: SCNA; (+) strand; PAM type: YTN; PAM sequence: CTA
agcacatcctagtgacatag

SEQ ID NO: 66588 - DNA, 20 bp, Artificial Sequence
  Description of Artificial Sequence: Synthetic oligonucleotide
  Target: SCNA; (+) strand; PAM type: YTN; PAM sequence: CTA
gtgacatagataagaagcaa

SEQ ID NO: 66589 - DNA, 20 bp, Artificial Sequence
  Description of Artificial Sequence: Synthetic oligonucleotide
  Target: SCNA; (+) strand; PAM type: YTN; PAM sequence: CTA
caaaattataggtgcaaact

SEQ ID NO: 66590 - DNA, 20 bp, Artificial Sequence
  Description of Artificial Sequence: Synthetic oligonucleotide
  Target: SCNA; (+) strand; PAM type: YTN; PAM sequence: TTA
taggtgcaaactacaagttg

SEQ ID NO: 66591 - DNA, 20 bp, Artificial Sequence
  Description of Artificial Sequence: Synthetic oligonucleotide
  Target: SCNA; (+) strand; PAM type: YTN; PAM sequence: CTA
caagttgtgttttaattggt

SEQ ID NO: 66592 - DNA, 20 bp, Artificial Sequence
  Description of Artificial Sequence: Synthetic oligonucleotide
  Target: SCNA; (+) strand; PAM type: YTN; PAM sequence: TTG
tgttttaattggttttaaca

SEQ ID NO: 66593 - DNA, 20 bp, Artificial Sequence
  Description of Artificial Sequence: Synthetic oligonucleotide
  Target: SCNA; (+) strand; PAM type: YTN; PAM sequence: TTT
taattggttttaacaagtac

SEQ ID NO: 66594 - DNA, 20 bp, Artificial Sequence
  Description of Artificial Sequence: Synthetic oligonucleotide
  Target: SCNA; (+) strand; PAM type: YTN; PAM sequence: TTT
aattggttttaacaagtact

SEQ ID NO: 66595 - DNA, 20 bp, Artificial Sequence
  Description of Artificial Sequence: Synthetic oligonucleotide
  Target: SCNA; (+) strand; PAM type: YTN; PAM sequence: TTA
attggttttaacaagtactt

SEQ ID NO: 66596 - DNA, 20 bp, Artificial Sequence
  Description of Artificial Sequence: Synthetic oligonucleotide
  Target: SCNA; (+) strand; PAM type: YTN; PAM sequence: TTG
gttttaacaagtacttataa

SEQ ID NO: 66597 - DNA, 20 bp, Artificial Sequence
  Description of Artificial Sequence: Synthetic oligonucleotide
  Target: SCNA; (+) strand; PAM type: YTN; PAM sequence: TTT
taacaagtacttataagcag

SEQ ID NO: 66598 - DNA, 20 bp, Artificial Sequence
  Description of Artificial Sequence: Synthetic oligonucleotide
  Target: SCNA; (+) strand; PAM type: YTN; PAM sequence: TTT
aacaagtacttataagcaga

SEQ ID NO: 66599 - DNA, 20 bp, Artificial Sequence
  Description of Artificial Sequence: Synthetic oligonucleotide
  Target: SCNA; (+) strand; PAM type: YTN; PAM sequence: TTA
acaagtacttataagcagaa

SEQ ID NO: 66600 - DNA, 20 bp, Artificial Sequence
  Description of Artificial Sequence: Synthetic oligonucleotide
  Target: SCNA; (+) strand; PAM type: YTN; PAM sequence: CTT
ataagcagaagaactgtgaa

SEQ ID NO: 66601 - DNA, 20 bp, Artificial Sequence
  Description of Artificial Sequence: Synthetic oligonucleotide
  Target: SCNA; (+) strand; PAM type: YTN; PAM sequence: TTA
taagcagaagaactgtgaaa

SEQ ID NO: 66602 - DNA, 20 bp, Artificial Sequence
  Description of Artificial Sequence: Synthetic oligonucleotide
  Target: SCNA; (+) strand; PAM type: YTN; PAM sequence: CTG
tgaaaaatctaacattttgt

SEQ ID NO: 66603 - DNA, 20 bp, Artificial Sequence
  Description of Artificial Sequence: Synthetic oligonucleotide
  Target: SCNA; (+) strand; PAM type: YTN; PAM sequence: CTA
acattttgtcctacttgcaa

SEQ ID NO: 66604 - DNA, 20 bp, Artificial Sequence
  Description of Artificial Sequence: Synthetic oligonucleotide
  Target: SCNA; (+) strand; PAM type: YTN; PAM sequence: TTT
tgtcctacttgcaagcctgc

SEQ ID NO: 66605 - DNA, 20 bp, Artificial Sequence
  Description of Artificial Sequence: Synthetic oligonucleotide
  Target: SCNA; (+) strand; PAM type: YTN; PAM sequence: TTT
gtcctacttgcaagcctgcc

SEQ ID NO: 66606 - DNA, 20 bp, Artificial Sequence
  Description of Artificial Sequence: Synthetic oligonucleotide
  Target: SCNA; (+) strand; PAM type: YTN; PAM sequence: TTG
tcctacttgcaagcctgcca

SEQ ID NO: 66607 - DNA, 20 bp, Artificial Sequence
  Description of Artificial Sequence: Synthetic oligonucleotide
  Target: SCNA; (+) strand; PAM type: YTN; PAM sequence: CTA
cttgcaagcctgccagtctt

SEQ ID NO: 66608 - DNA, 20 bp, Artificial Sequence
  Description of Artificial Sequence: Synthetic oligonucleotide
  Target: SCNA; (+) strand; PAM type: YTN; PAM sequence: CTT
gcaagcctgccagtcttttg

SEQ ID NO: 66609 - DNA, 20 bp, Artificial Sequence
  Description of Artificial Sequence: Synthetic oligonucleotide
  Target: SCNA; (+) strand; PAM type: YTN; PAM sequence: TTG
caagcctgccagtcttttga

SEQ ID NO: 66610 - DNA, 20 bp, Artificial Sequence
  Description of Artificial Sequence: Synthetic oligonucleotide
  Target: SCNA; (+) strand; PAM type: YTN; PAM sequence: CTG
ccagtcttttgagtgctggg

SEQ ID NO: 66611 - DNA, 20 bp, Artificial Sequence
  Description of Artificial Sequence: Synthetic oligonucleotide
  Target: SCNA; (+) strand; PAM type: YTN; PAM sequence: CTT
ttgagtgctgggcaaagaca

SEQ ID NO: 66612 - DNA, 20 bp, Artificial Sequence
  Description of Artificial Sequence: Synthetic oligonucleotide
  Target: SCNA; (+) strand; PAM type: YTN; PAM sequence: TTT
tgagtgctgggcaaagacac

SEQ ID NO: 66613 - DNA, 20 bp, Artificial Sequence
  Description of Artificial Sequence: Synthetic oligonucleotide
  Target: SCNA; (+) strand; PAM type: YTN; PAM sequence: TTT
gagtgctgggcaaagacaca

SEQ ID NO: 66614 - DNA, 20 bp, Artificial Sequence
  Description of Artificial Sequence: Synthetic oligonucleotide
  Target: SCNA; (+) strand; PAM type: YTN; PAM sequence: TTG
agtgctgggcaaagacacaa

SEQ ID NO: 66615 - DNA, 20 bp, Artificial Sequence
  Description of Artificial Sequence: Synthetic oligonucleotide
  Target: SCNA; (+) strand; PAM type: YTN; PAM sequence: CTG
ggcaaagacacaatagtgct

SEQ ID NO: 66616 - DNA, 20 bp, Artificial Sequence
  Description of Artificial Sequence: Synthetic oligonucleotide
  Target: SCNA; (+) strand; PAM type: YTN; PAM sequence: CTG
ggtcagagacaattaacttt

SEQ ID NO: 66617 - DNA, 20 bp, Artificial Sequence
  Description of Artificial Sequence: Synthetic oligonucleotide
  Target: SCNA; (+) strand; PAM type: YTN; PAM sequence: TTA
actttactactcacattaat

SEQ ID NO: 66618 - DNA, 20 bp, Artificial Sequence
  Description of Artificial Sequence: Synthetic oligonucleotide
  Target: SCNA; (+) strand; PAM type: YTN; PAM sequence: CTT
tactactcacattaatagca

SEQ ID NO: 66619 - DNA, 20 bp, Artificial Sequence
  Description of Artificial Sequence: Synthetic oligonucleotide
  Target: SCNA; (+) strand; PAM type: YTN; PAM sequence: TTT
actactcacattaatagcat

SEQ ID NO: 66620 - DNA, 20 bp, Artificial Sequence
  Description of Artificial Sequence: Synthetic oligonucleotide
  Target: SCNA; (+) strand; PAM type: YTN; PAM sequence: TTA
ctactcacattaatagcatt

SEQ ID NO: 66621 - DNA, 20 bp, Artificial Sequence
  Description of Artificial Sequence: Synthetic oligonucleotide
  Target: SCNA; (+) strand; PAM type: YTN; PAM sequence: CTA
ctcacattaatagcattagc

SEQ ID NO: 66622 - DNA, 20 bp, Artificial Sequence
  Description of Artificial Sequence: Synthetic oligonucleotide
  Target: SCNA; (+) strand; PAM type: YTN; PAM sequence: CTC
acattaatagcattagcaag

SEQ ID NO: 66623 - DNA, 20 bp, Artificial Sequence
  Description of Artificial Sequence: Synthetic oligonucleotide
  Target: SCNA; (+) strand; PAM type: YTN; PAM sequence: TTA
atagcattagcaagagtatc

SEQ ID NO: 66624 - DNA, 20 bp, Artificial Sequence
  Description of Artificial Sequence: Synthetic oligonucleotide
  Target: SCNA; (+) strand; PAM type: YTN; PAM sequence: TTA
gcaagagtatcatgattttc

SEQ ID NO: 66625 - DNA, 20 bp, Artificial Sequence
  Description of Artificial Sequence: Synthetic oligonucleotide
  Target: SCNA; (+) strand; PAM type: YTN; PAM sequence: TTT
tcttgcactgattcctcaag

SEQ ID NO: 66626 - DNA, 20 bp, Artificial Sequence
  Description of Artificial Sequence: Synthetic oligonucleotide
  Target: SCNA; (+) strand; PAM type: YTN; PAM sequence: TTT
cttgcactgattcctcaagc

SEQ ID NO: 66627 - DNA, 20 bp, Artificial Sequence
  Description of Artificial Sequence: Synthetic oligonucleotide
  Target: SCNA; (+) strand; PAM type: YTN; PAM sequence: TTC
ttgcactgattcctcaagcc

SEQ ID NO: 66628 - DNA, 20 bp, Artificial Sequence
  Description of Artificial Sequence: Synthetic oligonucleotide
  Target: SCNA; (+) strand; PAM type: YTN; PAM sequence: CTT
gcactgattcctcaagccgc

SEQ ID NO: 66629 - DNA, 20 bp, Artificial Sequence
  Description of Artificial Sequence: Synthetic oligonucleotide
  Target: SCNA; (+) strand; PAM type: YTN; PAM sequence: TTG
cactgattcctcaagccgca

SEQ ID NO: 66630 - DNA, 20 bp, Artificial Sequence
  Description of Artificial Sequence: Synthetic oligonucleotide
  Target: SCNA; (+) strand; PAM type: YTN; PAM sequence: CTG
attcctcaagccgcaattcc

SEQ ID NO: 66631 - DNA, 20 bp, Artificial Sequence
  Description of Artificial Sequence: Synthetic oligonucleotide
  Target: SCNA; (+) strand; PAM type: YTN; PAM sequence: TTC
ctcaagccgcaattcccaca

SEQ ID NO: 66632 - DNA, 20 bp, Artificial Sequence
  Description of Artificial Sequence: Synthetic oligonucleotide
  Target: SCNA; (+) strand; PAM type: YTN; PAM sequence: CTC
aagccgcaattcccacagaa

SEQ ID NO: 66633 - DNA, 20 bp, Artificial Sequence
  Description of Artificial Sequence: Synthetic oligonucleotide
  Target: SCNA; (+) strand; PAM type: YTN; PAM sequence: TTC
ccacagaaaagctcaggtga

SEQ ID NO: 66634 - DNA, 20 bp, Artificial Sequence
  Description of Artificial Sequence: Synthetic oligonucleotide
  Target: SCNA; (+) strand; PAM type: YTN; PAM sequence: CTC
aggtgacacctacatgctca

SEQ ID NO: 66635 - DNA, 20 bp, Artificial Sequence
  Description of Artificial Sequence: Synthetic oligonucleotide
  Target: SCNA; (+) strand; PAM type: YTN; PAM sequence: CTA
catgctcagtgggttgcatt

SEQ ID NO: 66636 - DNA, 20 bp, Artificial Sequence
  Description of Artificial Sequence: Synthetic oligonucleotide
  Target: SCNA; (+) strand; PAM type: YTN; PAM sequence: CTC
agtgggttgcattagaaaag

SEQ ID NO: 66637 - DNA, 20 bp, Artificial Sequence
  Description of Artificial Sequence: Synthetic oligonucleotide
  Target: SCNA; (+) strand; PAM type: YTN; PAM sequence: TTG
cattagaaaagaggaacgca

SEQ ID NO: 66638 - DNA, 20 bp, Artificial Sequence
  Description of Artificial Sequence: Synthetic oligonucleotide
  Target: SCNA; (+) strand; PAM type: YTN; PAM sequence: TTA
gaaaagaggaacgcagagct

SEQ ID NO: 66639 - DNA, 20 bp, Artificial Sequence
  Description of Artificial Sequence: Synthetic oligonucleotide
  Target: SCNA; (+) strand; PAM type: YTN; PAM sequence: CTC
aggaaacatggatattttat

SEQ ID NO: 66640 - DNA, 20 bp, Artificial Sequence
  Description of Artificial Sequence: Synthetic oligonucleotide
  Target: SCNA; (+) strand; PAM type: YTN; PAM sequence: TTT
tataatggccagtaaagatg

SEQ ID NO: 66641 - DNA, 20 bp, Artificial Sequence
  Description of Artificial Sequence: Synthetic oligonucleotide
  Target: SCNA; (+) strand; PAM type: YTN; PAM sequence: TTT
ataatggccagtaaagatgt

SEQ ID NO: 66642 - DNA, 20 bp, Artificial Sequence
  Description of Artificial Sequence: Synthetic oligonucleotide
  Target: SCNA; (+) strand; PAM type: YTN; PAM sequence: TTA
taatggccagtaaagatgtc

SEQ ID NO: 66643 - DNA, 20 bp, Artificial Sequence
  Description of Artificial Sequence: Synthetic oligonucleotide
  Target: SCNA; (+) strand; PAM type: YTN; PAM sequence: CTT
tgctttagaaagaggcacta

SEQ ID NO: 66644 - DNA, 20 bp, Artificial Sequence
  Description of Artificial Sequence: Synthetic oligonucleotide
  Target: SCNA; (+) strand; PAM type: YTN; PAM sequence: TTT
gctttagaaagaggcactac

SEQ ID NO: 66645 - DNA, 20 bp, Artificial Sequence
  Description of Artificial Sequence: Synthetic oligonucleotide
  Target: SCNA; (+) strand; PAM type: YTN; PAM sequence: TTG
ctttagaaagaggcactacc

SEQ ID NO: 66646 - DNA, 20 bp, Artificial Sequence
  Description of Artificial Sequence: Synthetic oligonucleotide
  Target: SCNA; (+) strand; PAM type: YTN; PAM sequence: CTT
tagaaagaggcactacctct

SEQ ID NO: 66647 - DNA, 20 bp, Artificial Sequence
  Description of Artificial Sequence: Synthetic oligonucleotide
  Target: SCNA; (+) strand; PAM type: YTN; PAM sequence: TTT
agaaagaggcactacctcta

SEQ ID NO: 66648 - DNA, 20 bp, Artificial Sequence
  Description of Artificial Sequence: Synthetic oligonucleotide
  Target: SCNA; (+) strand; PAM type: YTN; PAM sequence: TTA
gaaagaggcactacctctat

SEQ ID NO: 66649 - DNA, 20 bp, Artificial Sequence
  Description of Artificial Sequence: Synthetic oligonucleotide
  Target: SCNA; (+) strand; PAM type: YTN; PAM sequence: CTA
cctctatccaaggctgcaag

SEQ ID NO: 66650 - DNA, 20 bp, Artificial Sequence
  Description of Artificial Sequence: Synthetic oligonucleotide
  Target: SCNA; (+) strand; PAM type: YTN; PAM sequence: CTC
tatccaaggctgcaagcaca

SEQ ID NO: 66651 - DNA, 20 bp, Artificial Sequence
  Description of Artificial Sequence: Synthetic oligonucleotide
  Target: SCNA; (+) strand; PAM type: YTN; PAM sequence: CTA
tccaaggctgcaagcacacc

SEQ ID NO: 66652 - DNA, 20 bp, Artificial Sequence
  Description of Artificial Sequence: Synthetic oligonucleotide
  Target: SCNA; (+) strand; PAM type: YTN; PAM sequence: CTG
caagcacacctgccttttgt

SEQ ID NO: 66653 - DNA, 20 bp, Artificial Sequence
  Description of Artificial Sequence: Synthetic oligonucleotide
  Target: SCNA; (+) strand; PAM type: YTN; PAM sequence: CTG
ccttttgttttagaaggaga

SEQ ID NO: 66654 - DNA, 20 bp, Artificial Sequence
  Description of Artificial Sequence: Synthetic oligonucleotide
  Target: SCNA; (+) strand; PAM type: YTN; PAM sequence: CTT
ttgttttagaaggagaaatg

SEQ ID NO: 66655 - DNA, 20 bp, Artificial Sequence
  Description of Artificial Sequence: Synthetic oligonucleotide
  Target: SCNA; (+) strand; PAM type: YTN; PAM sequence: TTT
tgttttagaaggagaaatga

SEQ ID NO: 66656 - DNA, 20 bp, Artificial Sequence
  Description of Artificial Sequence: Synthetic oligonucleotide
  Target: SCNA; (+) strand; PAM type: YTN; PAM sequence: TTT
gttttagaaggagaaatgat

SEQ ID NO: 66657 - DNA, 20 bp, Artificial Sequence
  Description of Artificial Sequence: Synthetic oligonucleotide
  Target: SCNA; (+) strand; PAM type: YTN; PAM sequence: TTG
ttttagaaggagaaatgatt

SEQ ID NO: 66658 - DNA, 20 bp, Artificial Sequence
  Description of Artificial Sequence: Synthetic oligonucleotide
  Target: SCNA; (+) strand; PAM type: YTN; PAM sequence: TTT
tagaaggagaaatgatttct

SEQ ID NO: 66659 - DNA, 20 bp, Artificial Sequence
  Description of Artificial Sequence: Synthetic oligonucleotide
  Target: SCNA; (+) strand; PAM type: YTN; PAM sequence: TTT
agaaggagaaatgatttcta

SEQ ID NO: 66660 - DNA, 20 bp, Artificial Sequence
  Description of Artificial Sequence: Synthetic oligonucleotide
  Target: SCNA; (+) strand; PAM type: YTN; PAM sequence: TTA
gaaggagaaatgatttctat

SEQ ID NO: 66661 - DNA, 20 bp, Artificial Sequence
  Description of Artificial Sequence: Synthetic oligonucleotide
  Target: SCNA; (+) strand; PAM type: YTN; PAM sequence: TTT
ctatcttccaaggctgttca

SEQ ID NO: 66662 - DNA, 20 bp, Artificial Sequence
  Description of Artificial Sequence: Synthetic oligonucleotide
  Target: SCNA; (+) strand; PAM type: YTN; PAM sequence: TTC
tatcttccaaggctgttcac

SEQ ID NO: 66663 - DNA, 20 bp, Artificial Sequence
  Description of Artificial Sequence: Synthetic oligonucleotide
  Target: SCNA; (+) strand; PAM type: YTN; PAM sequence: CTA
tcttccaaggctgttcacta

SEQ ID NO: 66664 - DNA, 20 bp, Artificial Sequence
  Description of Artificial Sequence: Synthetic oligonucleotide
  Target: SCNA; (+) strand; PAM type: YTN; PAM sequence: CTT
ccaaggctgttcactatatg

SEQ ID NO: 66665 - DNA, 20 bp, Artificial Sequence
  Description of Artificial Sequence: Synthetic oligonucleotide
  Target: SCNA; (+) strand; PAM type: YTN; PAM sequence: TTC
caaggctgttcactatatga

SEQ ID NO: 66666 - DNA, 20 bp, Artificial Sequence
  Description of Artificial Sequence: Synthetic oligonucleotide
  Target: SCNA; (+) strand; PAM type: YTN; PAM sequence: CTG
ttcactatatgaaaagacag

SEQ ID NO: 66667 - DNA, 20 bp, Artificial Sequence
  Description of Artificial Sequence: Synthetic oligonucleotide
  Target: SCNA; (+) strand; PAM type: YTN; PAM sequence: TTC
actatatgaaaagacagtcc

SEQ ID NO: 66668 - DNA, 20 bp, Artificial Sequence
  Description of Artificial Sequence: Synthetic oligonucleotide
  Target: SCNA; (+) strand; PAM type: YTN; PAM sequence: CTA
tatgaaaagacagtcccaaa

SEQ ID NO: 66669 - DNA, 20 bp, Artificial Sequence
  Description of Artificial Sequence: Synthetic oligonucleotide
  Target: SCNA; (+) strand; PAM type: YTN; PAM sequence: TTA
ctgacttgcttgaaaaatgt

SEQ ID NO: 66670 - DNA, 20 bp, Artificial Sequence
  Description of Artificial Sequence: Synthetic oligonucleotide
  Target: SCNA; (+) strand; PAM type: YTN; PAM sequence: CTG
acttgcttgaaaaatgtgca

SEQ ID NO: 66671 - DNA, 20 bp, Artificial Sequence
  Description of Artificial Sequence: Synthetic oligonucleotide
  Target: SCNA; (+) strand; PAM type: YTN; PAM sequence: CTT
gcttgaaaaatgtgcagaaa

SEQ ID NO: 66672 - DNA, 20 bp, Artificial Sequence
  Description of Artificial Sequence: Synthetic oligonucleotide
  Target: SCNA; (+) strand; PAM type: YTN; PAM sequence: TTG
cttgaaaaatgtgcagaaat

SEQ ID NO: 66673 - DNA, 20 bp, Artificial Sequence
  Description of Artificial Sequence: Synthetic oligonucleotide
  Target: SCNA; (+) strand; PAM type: YTN; PAM sequence: CTT
gaaaaatgtgcagaaatgat

SEQ ID NO: 66674 - DNA, 20 bp, Artificial Sequence
  Description of Artificial Sequence: Synthetic oligonucleotide
  Target: SCNA; (+) strand; PAM type: YTN; PAM sequence: TTG
aaaaatgtgcagaaatgata

SEQ ID NO: 66675 - DNA, 20 bp, Artificial Sequence
  Description of Artificial Sequence: Synthetic oligonucleotide
  Target: SCNA; (+) strand; PAM type: YTN; PAM sequence: CTG
cttgaatgtggacagctgac

SEQ ID NO: 66676 - DNA, 20 bp, Artificial Sequence
  Description of Artificial Sequence: Synthetic oligonucleotide
  Target: SCNA; (+) strand; PAM type: YTN; PAM sequence: CTT
gaatgtggacagctgacaca

SEQ ID NO: 66677 - DNA, 20 bp, Artificial Sequence
  Description of Artificial Sequence: Synthetic oligonucleotide
  Target: SCNA; (+) strand; PAM type: YTN; PAM sequence: TTG
aatgtggacagctgacacag

SEQ ID NO: 66678 - DNA, 20 bp, Artificial Sequence
  Description of Artificial Sequence: Synthetic oligonucleotide
  Target: SCNA; (+) strand; PAM type: YTN; PAM sequence: CTG
acacagggacaaggagtaaa

SEQ ID NO: 66679 - DNA, 20 bp, Artificial Sequence
  Description of Artificial Sequence: Synthetic oligonucleotide
  Target: SCNA; (+) strand; PAM type: YTN; PAM sequence: TTA
ggttttgagcttgaccaact

SEQ ID NO: 66680 - DNA, 20 bp, Artificial Sequence
  Description of Artificial Sequence: Synthetic oligonucleotide
  Target: SCNA; (+) strand; PAM type: YTN; PAM sequence: TTT
tgagcttgaccaactaggaa

SEQ ID NO: 66681 - DNA, 20 bp, Artificial Sequence
  Description of Artificial Sequence: Synthetic oligonucleotide
  Target: SCNA; (+) strand; PAM type: YTN; PAM sequence: TTT
gagcttgaccaactaggaag

SEQ ID NO: 66682 - DNA, 20 bp, Artificial Sequence
  Description of Artificial Sequence: Synthetic oligonucleotide
  Target: SCNA; (+) strand; PAM type: YTN; PAM sequence: TTG
agcttgaccaactaggaaga

SEQ ID NO: 66683 - DNA, 20 bp, Artificial Sequence
  Description of Artificial Sequence: Synthetic oligonucleotide
  Target: SCNA; (+) strand; PAM type: YTN; PAM sequence: CTT
gaccaactaggaagataatt

SEQ ID NO: 66684 - DNA, 20 bp, Artificial Sequence
  Description of Artificial Sequence: Synthetic oligonucleotide
  Target: SCNA; (+) strand; PAM type: YTN; PAM sequence: TTG
accaactaggaagataatta

SEQ ID NO: 66685 - DNA, 20 bp, Artificial Sequence
  Description of Artificial Sequence: Synthetic oligonucleotide
  Target: SCNA; (+) strand; PAM type: YTN; PAM sequence: CTA
ggaagataattattagcagt

SEQ ID NO: 66686 - DNA, 20 bp, Artificial Sequence
  Description of Artificial Sequence: Synthetic oligonucleotide
  Target: SCNA; (+) strand; PAM type: YTN; PAM sequence: TTA
ttagcagtagagaaaaaaag

SEQ ID NO: 66687 - DNA, 20 bp, Artificial Sequence
  Description of Artificial Sequence: Synthetic oligonucleotide
  Target: SCNA; (+) strand; PAM type: YTN; PAM sequence: TTA
gcagtagagaaaaaaagaac

SEQ ID NO: 66688 - DNA, 20 bp, Artificial Sequence
  Description of Artificial Sequence: Synthetic oligonucleotide
  Target: SCNA; (+) strand; PAM type: YTN; PAM sequence: TTT
tagggcagataagccatttt

SEQ ID NO: 66689 - DNA, 20 bp, Artificial Sequence
  Description of Artificial Sequence: Synthetic oligonucleotide
  Target: SCNA; (+) strand; PAM type: YTN; PAM sequence: TTT
agggcagataagccattttt

SEQ ID NO: 66690 - DNA, 20 bp, Artificial Sequence
  Description of Artificial Sequence: Synthetic oligonucleotide
  Target: SCNA; (+) strand; PAM type: YTN; PAM sequence: TTA
gggcagataagccatttttt

SEQ ID NO: 66691 - DNA, 20 bp, Artificial Sequence
  Description of Artificial Sequence: Synthetic oligonucleotide
  Target: SCNA; (+) strand; PAM type: YTN; PAM sequence: TTT
tttaggtaggttgagtctga

SEQ ID NO: 66692 - DNA, 20 bp, Artificial Sequence
  Description of Artificial Sequence: Synthetic oligonucleotide
  Target: SCNA; (+) strand; PAM type: YTN; PAM sequence: TTT
ttaggtaggttgagtctgag

SEQ ID NO: 66693 - DNA, 20 bp, Artificial Sequence
  Description of Artificial Sequence: Synthetic oligonucleotide
  Target: SCNA; (+) strand; PAM type: YTN; PAM sequence: TTT
taggtaggttgagtctgaga

SEQ ID NO: 66694 - DNA, 20 bp, Artificial Sequence
  Description of Artificial Sequence: Synthetic oligonucleotide
  Target: SCNA; (+) strand; PAM type: YTN; PAM sequence: TTT
aggtaggttgagtctgagat

SEQ ID NO: 66695 - DNA, 20 bp, Artificial Sequence
  Description of Artificial Sequence: Synthetic oligonucleotide
  Target: SCNA; (+) strand; PAM type: YTN; PAM sequence: TTA
ggtaggttgagtctgagatg

SEQ ID NO: 66696 - DNA, 20 bp, Artificial Sequence
  Description of Artificial Sequence: Synthetic oligonucleotide
  Target: SCNA; (+) strand; PAM type: YTN; PAM sequence: TTG
agtctgagatgcctccataa

SEQ ID NO: 66697 - DNA, 20 bp, Artificial Sequence
  Description of Artificial Sequence: Synthetic oligonucleotide
  Target: SCNA; (+) strand; PAM type: YTN; PAM sequence: CTG
agatgcctccataaatataa

SEQ ID NO: 66698 - DNA, 20 bp, Artificial Sequence
  Description of Artificial Sequence: Synthetic oligonucleotide
  Target: SCNA; (+) strand; PAM type: YTN; PAM sequence: CTC
cataaatataagttgaaaat

SEQ ID NO: 66699 - DNA, 20 bp, Artificial Sequence
  Description of Artificial Sequence: Synthetic oligonucleotide
  Target: SCNA; (+) strand; PAM type: YTN; PAM sequence: TTG
aaaatatgagattggagttg

SEQ ID NO: 66700 - DNA, 20 bp, Artificial Sequence
  Description of Artificial Sequence: Synthetic oligonucleotide
  Target: SCNA; (+) strand; PAM type: YTN; PAM sequence: TTG
gagttgagacttcagaaata

SEQ ID NO: 66701 - DNA, 20 bp, Artificial Sequence
  Description of Artificial Sequence: Synthetic oligonucleotide
  Target: SCNA; (+) strand; PAM type: YTN; PAM sequence: TTG
agacttcagaaatacatatt

SEQ ID NO: 66702 - DNA, 20 bp, Artificial Sequence
  Description of Artificial Sequence: Synthetic oligonucleotide
  Target: SCNA; (+) strand; PAM type: YTN; PAM sequence: CTT
cagaaatacatattttgagt

SEQ ID NO: 66703 - DNA, 20 bp, Artificial Sequence
  Description of Artificial Sequence: Synthetic oligonucleotide
  Target: SCNA; (+) strand; PAM type: YTN; PAM sequence: TTC
agaaatacatattttgagta

SEQ ID NO: 66704 - DNA, 20 bp, Artificial Sequence
  Description of Artificial Sequence: Synthetic oligonucleotide
  Target: SCNA; (+) strand; PAM type: YTN; PAM sequence: TTT
tgagtagttacactacagag

SEQ ID NO: 66705 - DNA, 20 bp, Artificial Sequence
  Description of Artificial Sequence: Synthetic oligonucleotide
  Target: SCNA; (+) strand; PAM type: YTN; PAM sequence: TTT
gagtagttacactacagagg

SEQ ID NO: 66706 - DNA, 20 bp, Artificial Sequence
  Description of Artificial Sequence: Synthetic oligonucleotide
  Target: SCNA; (+) strand; PAM type: YTN; PAM sequence: TTG
agtagttacactacagaggt

SEQ ID NO: 66707 - DNA, 20 bp, Artificial Sequence
  Description of Artificial Sequence: Synthetic oligonucleotide
  Target: SCNA; (+) strand; PAM type: YTN; PAM sequence: TTA
cactacagaggtaagtcatc

SEQ ID NO: 66708 - DNA, 20 bp, Artificial Sequence
  Description of Artificial Sequence: Synthetic oligonucleotide
  Target: SCNA; (+) strand; PAM type: YTN; PAM sequence: CTA
cagaggtaagtcatcagagt

SEQ ID NO: 66709 - DNA, 20 bp, Artificial Sequence
  Description of Artificial Sequence: Synthetic oligonucleotide
  Target: SCNA; (+) strand; PAM type: YTN; PAM sequence: TTC
ataaaattaaagtgagaaaa

SEQ ID NO: 66710 - DNA, 20 bp, Artificial Sequence
  Description of Artificial Sequence: Synthetic oligonucleotide
  Target: SCNA; (+) strand; PAM type: YTN; PAM sequence: TTA
aagtgagaaaaagaggcaag

SEQ ID NO: 66711 - DNA, 20 bp, Artificial Sequence
  Description of Artificial Sequence: Synthetic oligonucleotide
  Target: SCNA; (+) strand; PAM type: YTN; PAM sequence: TTG
catgaagaactttcttagga

SEQ ID NO: 66712 - DNA, 20 bp, Artificial Sequence
  Description of Artificial Sequence: Synthetic oligonucleotide
  Target: SCNA; (+) strand; PAM type: YTN; PAM sequence: CTT
tcttaggaaggaaggcagca

SEQ ID NO: 66713 - DNA, 20 bp, Artificial Sequence
  Description of Artificial Sequence: Synthetic oligonucleotide
  Target: SCNA; (+) strand; PAM type: YTN; PAM sequence: TTT
cttaggaaggaaggcagcaa

SEQ ID NO: 66714 - DNA, 20 bp, Artificial Sequence
  Description of Artificial Sequence: Synthetic oligonucleotide
  Target: SCNA; (+) strand; PAM type: YTN; PAM sequence: TTC
ttaggaaggaaggcagcaaa

SEQ ID NO: 66715 - DNA, 20 bp, Artificial Sequence
  Description of Artificial Sequence: Synthetic oligonucleotide
  Target: SCNA; (+) strand; PAM type: YTN; PAM sequence: CTT
aggaaggaaggcagcaaaga

SEQ ID NO: 66716 - DNA, 20 bp, Artificial Sequence
  Description of Artificial Sequence: Synthetic oligonucleotide
  Target: SCNA; (+) strand; PAM type: YTN; PAM sequence: TTA
ggaaggaaggcagcaaagag

SEQ ID NO: 66717 - DNA, 20 bp, Artificial Sequence
  Description of Artificial Sequence: Synthetic oligonucleotide
  Target: SCNA; (+) strand; PAM type: YTN; PAM sequence: TTG
gaggtgtagtcagagatgga

SEQ ID NO: 66718 - DNA, 20 bp, Artificial Sequence
  Description of Artificial Sequence: Synthetic oligonucleotide
  Target: SCNA; (+) strand; PAM type: YTN; PAM sequence: TTT
cagaaatgaaatgaaaaagg

SEQ ID NO: 66719 - DNA, 20 bp, Artificial Sequence
  Description of Artificial Sequence: Synthetic oligonucleotide
  Target: SCNA; (+) strand; PAM type: YTN; PAM sequence: TTC
agaaatgaaatgaaaaaggt

SEQ ID NO: 66720 - DNA, 20 bp, Artificial Sequence
  Description of Artificial Sequence: Synthetic oligonucleotide
  Target: SCNA; (+) strand; PAM type: YTN; PAM sequence: CTT
ttactaagtaattggtacta

SEQ ID NO: 66721 - DNA, 20 bp, Artificial Sequence
  Description of Artificial Sequence: Synthetic oligonucleotide
  Target: SCNA; (+) strand; PAM type: YTN; PAM sequence: TTT
tactaagtaattggtactac

SEQ ID NO: 66722 - DNA, 20 bp, Artificial Sequence
  Description of Artificial Sequence: Synthetic oligonucleotide
  Target: SCNA; (+) strand; PAM type: YTN; PAM sequence: TTT
actaagtaattggtactact

SEQ ID NO: 66723 - DNA, 20 bp, Artificial Sequence
  Description of Artificial Sequence: Synthetic oligonucleotide
  Target: SCNA; (+) strand; PAM type: YTN; PAM sequence: TTA
ctaagtaattggtactacta

SEQ ID NO: 66724 - DNA, 20 bp, Artificial Sequence
  Description of Artificial Sequence: Synthetic oligonucleotide
  Target: SCNA; (+) strand; PAM type: YTN; PAM sequence: CTA
agtaattggtactactactt

SEQ ID NO: 66725 - DNA, 20 bp, Artificial Sequence
  Description of Artificial Sequence: Synthetic oligonucleotide
  Target: SCNA; (+) strand; PAM type: YTN; PAM sequence: TTG
gtactactacttgtcagttt

SEQ ID NO: 66726 - DNA, 20 bp, Artificial Sequence
  Description of Artificial Sequence: Synthetic oligonucleotide
  Target: SCNA; (+) strand; PAM type: YTN; PAM sequence: CTA
ctacttgtcagtttcaagtg

SEQ ID NO: 66727 - DNA, 20 bp, Artificial Sequence
  Description of Artificial Sequence: Synthetic oligonucleotide
  Target: SCNA; (+) strand; PAM type: YTN; PAM sequence: CTA
cttgtcagtttcaagtgctg

SEQ ID NO: 66728 - DNA, 20 bp, Artificial Sequence
  Description of Artificial Sequence: Synthetic oligonucleotide
  Target: SCNA; (+) strand; PAM type: YTN; PAM sequence: CTT
gtcagtttcaagtgctgtaa

SEQ ID NO: 66729 - DNA, 20 bp, Artificial Sequence
  Description of Artificial Sequence: Synthetic oligonucleotide
  Target: SCNA; (+) strand; PAM type: YTN; PAM sequence: TTG
tcagtttcaagtgctgtaaa

SEQ ID NO: 66730 - DNA, 20 bp, Artificial Sequence
  Description of Artificial Sequence: Synthetic oligonucleotide
  Target: SCNA; (+) strand; PAM type: YTN; PAM sequence: TTT
caagtgctgtaaaaaaaatg

SEQ ID NO: 66731 - DNA, 20 bp, Artificial Sequence
  Description of Artificial Sequence: Synthetic oligonucleotide
  Target: SCNA; (+) strand; PAM type: YTN; PAM sequence: TTC
aagtgctgtaaaaaaaatgg

SEQ ID NO: 66732 - DNA, 20 bp, Artificial Sequence
  Description of Artificial Sequence: Synthetic oligonucleotide
  Target: SCNA; (+) strand; PAM type: YTN; PAM sequence: CTG
taaaaaaaatgggaagaacc

SEQ ID NO: 66733 - DNA, 20 bp, Artificial Sequence
  Description of Artificial Sequence: Synthetic oligonucleotide
  Target: SCNA; (+) strand; PAM type: YTN; PAM sequence: CTT
tcagtactatgtattttatg

SEQ ID NO: 66734 - DNA, 20 bp, Artificial Sequence
  Description of Artificial Sequence: Synthetic oligonucleotide
  Target: SCNA; (+) strand; PAM type: YTN; PAM sequence: TTT
cagtactatgtattttatgc

SEQ ID NO: 66735 - DNA, 20 bp, Artificial Sequence
  Description of Artificial Sequence: Synthetic oligonucleotide
  Target: SCNA; (+) strand; PAM type: YTN; PAM sequence: TTC
agtactatgtattttatgct

SEQ ID NO: 66736 - DNA, 20 bp, Artificial Sequence
  Description of Artificial Sequence: Synthetic oligonucleotide
  Target: SCNA; (+) strand; PAM type: YTN; PAM sequence: CTA
tgtattttatgcttcaggga

SEQ ID NO: 66737 - DNA, 20 bp, Artificial Sequence
  Description of Artificial Sequence: Synthetic oligonucleotide
  Target: SCNA; (+) strand; PAM type: YTN; PAM sequence: TTT
tatgcttcagggatgcatac

SEQ ID NO: 66738 - DNA, 20 bp, Artificial Sequence
  Description of Artificial Sequence: Synthetic oligonucleotide
  Target: SCNA; (+) strand; PAM type: YTN; PAM sequence: TTT
atgcttcagggatgcatacc

SEQ ID NO: 66739 - DNA, 20 bp, Artificial Sequence
  Description of Artificial Sequence: Synthetic oligonucleotide
  Target: SCNA; (+) strand; PAM type: YTN; PAM sequence: TTA
tgcttcagggatgcatacct

SEQ ID NO: 66740 - DNA, 20 bp, Artificial Sequence
  Description of Artificial Sequence: Synthetic oligonucleotide
  Target: SCNA; (+) strand; PAM type: YTN; PAM sequence: CTT
cagggatgcatacctgttta

SEQ ID NO: 66741 - DNA, 20 bp, Artificial Sequence
  Description of Artificial Sequence: Synthetic oligonucleotide
  Target: SCNA; (+) strand; PAM type: YTN; PAM sequence: TTC
agggatgcatacctgtttaa

SEQ ID NO: 66742 - DNA, 20 bp, Artificial Sequence
  Description of Artificial Sequence: Synthetic oligonucleotide
  Target: SCNA; (+) strand; PAM type: YTN; PAM sequence: CTG
tttaacaaaagtatgttttt

SEQ ID NO: 66743 - DNA, 20 bp, Artificial Sequence
  Description of Artificial Sequence: Synthetic oligonucleotide
  Target: SCNA; (+) strand; PAM type: YTN; PAM sequence: TTT
aacaaaagtatgttttttct

SEQ ID NO: 66744 - DNA, 20 bp, Artificial Sequence
  Description of Artificial Sequence: Synthetic oligonucleotide
  Target: SCNA; (+) strand; PAM type: YTN; PAM sequence: TTA
acaaaagtatgttttttctc

SEQ ID NO: 66745 - DNA, 20 bp, Artificial Sequence
  Description of Artificial Sequence: Synthetic oligonucleotide
  Target: SCNA; (+) strand; PAM type: YTN; PAM sequence: TTT
tttctcaaagtgtgttgaat

SEQ ID NO: 66746 - DNA, 20 bp, Artificial Sequence
  Description of Artificial Sequence: Synthetic oligonucleotide
  Target: SCNA; (+) strand; PAM type: YTN; PAM sequence: TTT
ttctcaaagtgtgttgaata

SEQ ID NO: 66747 - DNA, 20 bp, Artificial Sequence
  Description of Artificial Sequence: Synthetic oligonucleotide
  Target: SCNA; (+) strand; PAM type: YTN; PAM sequence: TTT
tctcaaagtgtgttgaatag

SEQ ID NO: 66748 - DNA, 20 bp, Artificial Sequence
  Description of Artificial Sequence: Synthetic oligonucleotide
  Target: SCNA; (+) strand; PAM type: YTN; PAM sequence: TTT
ctcaaagtgtgttgaatagt

SEQ ID NO: 66749 - DNA, 20 bp, Artificial Sequence
  Description of Artificial Sequence: Synthetic oligonucleotide
  Target: SCNA; (+) strand; PAM type: YTN; PAM sequence: TTC
tcaaagtgtgttgaatagtc

SEQ ID NO: 66750 - DNA, 20 bp, Artificial Sequence
  Description of Artificial Sequence: Synthetic oligonucleotide
  Target: SCNA; (+) strand; PAM type: YTN; PAM sequence: CTC
aaagtgtgttgaatagtcca

SEQ ID NO: 66751 - DNA, 20 bp, Artificial Sequence
  Description of Artificial Sequence: Synthetic oligonucleotide
  Target: SCNA; (+) strand; PAM type: YTN; PAM sequence: TTG
aatagtccagaaaaagatgg

SEQ ID NO: 66752 - DNA, 20 bp, Artificial Sequence
  Description of Artificial Sequence: Synthetic oligonucleotide
  Target: SCNA; (+) strand; PAM type: YTN; PAM sequence: CTT
caggagataaaggaaccaga

SEQ ID NO: 66753 - DNA, 20 bp, Artificial Sequence
  Description of Artificial Sequence: Synthetic oligonucleotide
  Target: SCNA; (+) strand; PAM type: YTN; PAM sequence: TTC
aggagataaaggaaccagaa

SEQ ID NO: 66754 - DNA, 20 bp, Artificial Sequence
  Description of Artificial Sequence: Synthetic oligonucleotide
  Target: SCNA; (+) strand; PAM type: YTN; PAM sequence: TTG
aaggctgtgatggtagaaaa

SEQ ID NO: 66755 - DNA, 20 bp, Artificial Sequence
  Description of Artificial Sequence: Synthetic oligonucleotide
  Target: SCNA; (+) strand; PAM type: YTN; PAM sequence: CTG
tgatggtagaaaacattttg

SEQ ID NO: 66756 - DNA, 20 bp, Artificial Sequence
  Description of Artificial Sequence: Synthetic oligonucleotide
  Target: SCNA; (+) strand; PAM type: YTN; PAM sequence: TTT
tgacaaagagttgtgcaatg

SEQ ID NO: 66757 - DNA, 20 bp, Artificial Sequence
  Description of Artificial Sequence: Synthetic oligonucleotide
  Target: SCNA; (+) strand; PAM type: YTN; PAM sequence: TTT
gacaaagagttgtgcaatga

SEQ ID NO: 66758 - DNA, 20 bp, Artificial Sequence
  Description of Artificial Sequence: Synthetic oligonucleotide
  Target: SCNA; (+) strand; PAM type: YTN; PAM sequence: TTG
acaaagagttgtgcaatgag

SEQ ID NO: 66759 - DNA, 20 bp, Artificial Sequence
  Description of Artificial Sequence: Synthetic oligonucleotide
  Target: SCNA; (+) strand; PAM type: YTN; PAM sequence: TTG
tgcaatgagaaagctagggg

SEQ ID NO: 66760 - DNA, 20 bp, Artificial Sequence
  Description of Artificial Sequence: Synthetic oligonucleotide
  Target: SCNA; (+) strand; PAM type: YTN; PAM sequence: CTA
ggggtgggacaattaatttt

SEQ ID NO: 66761 - DNA, 20 bp, Artificial Sequence
  Description of Artificial Sequence: Synthetic oligonucleotide
  Target: SCNA; (+) strand; PAM type: YTN; PAM sequence: TTA
attttgagggtaacaattgg

SEQ ID NO: 66762 - DNA, 20 bp, Artificial Sequence
  Description of Artificial Sequence: Synthetic oligonucleotide
  Target: SCNA; (+) strand; PAM type: YTN; PAM sequence: TTT
tgagggtaacaattggggat

SEQ ID NO: 66763 - DNA, 20 bp, Artificial Sequence
  Description of Artificial Sequence: Synthetic oligonucleotide
  Target: SCNA; (+) strand; PAM type: YTN; PAM sequence: TTT
gagggtaacaattggggatt

SEQ ID NO: 66764 - DNA, 20 bp, Artificial Sequence
  Description of Artificial Sequence: Synthetic oligonucleotide
  Target: SCNA; (+) strand; PAM type: YTN; PAM sequence: TTG
agggtaacaattggggattt

SEQ ID NO: 66765 - DNA, 20 bp, Artificial Sequence
  Description of Artificial Sequence: Synthetic oligonucleotide
  Target: SCNA; (+) strand; PAM type: YTN; PAM sequence: TTG
gggatttgagtagatttttt

SEQ ID NO: 66766 - DNA, 20 bp, Artificial Sequence
  Description of Artificial Sequence: Synthetic oligonucleotide
  Target: SCNA; (+) strand; PAM type: YTN; PAM sequence: TTT
gagtagattttttgcttctg

SEQ ID NO: 66767 - DNA, 20 bp, Artificial Sequence
  Description of Artificial Sequence: Synthetic oligonucleotide
  Target: SCNA; (+) strand; PAM type: YTN; PAM sequence: TTG
agtagattttttgcttctgt

SEQ ID NO: 66768 - DNA, 20 bp, Artificial Sequence
  Description of Artificial Sequence: Synthetic oligonucleotide
  Target: SCNA; (+) strand; PAM type: YTN; PAM sequence: TTT
tttgcttctgttctttaatt

SEQ ID NO: 66769 - DNA, 20 bp, Artificial Sequence
  Description of Artificial Sequence: Synthetic oligonucleotide
  Target: SCNA; (+) strand; PAM type: YTN; PAM sequence: TTT
ttgcttctgttctttaattg

SEQ ID NO: 66770 - DNA, 20 bp, Artificial Sequence
  Description of Artificial Sequence: Synthetic oligonucleotide
  Target: SCNA; (+) strand; PAM type: YTN; PAM sequence: TTT
tgcttctgttctttaattgt

SEQ ID NO: 66771 - DNA, 20 bp, Artificial Sequence
  Description of Artificial Sequence: Synthetic oligonucleotide
  Target: SCNA; (+) strand; PAM type: YTN; PAM sequence: TTT
gcttctgttctttaattgtt

SEQ ID NO: 66772 - DNA, 20 bp, Artificial Sequence
  Description of Artificial Sequence: Synthetic oligonucleotide
  Target: SCNA; (+) strand; PAM type: YTN; PAM sequence: TTG
cttctgttctttaattgttt

SEQ ID NO: 66773 - DNA, 20 bp, Artificial Sequence
  Description of Artificial Sequence: Synthetic oligonucleotide
  Target: SCNA; (+) strand; PAM type: YTN; PAM sequence: CTT
ctgttctttaattgttttgt

SEQ ID NO: 66774 - DNA, 20 bp, Artificial Sequence
  Description of Artificial Sequence: Synthetic oligonucleotide
  Target: SCNA; (+) strand; PAM type: YTN; PAM sequence: TTC
tgttctttaattgttttgtc

SEQ ID NO: 66775 - DNA, 20 bp, Artificial Sequence
  Description of Artificial Sequence: Synthetic oligonucleotide
  Target: SCNA; (+) strand; PAM type: YTN; PAM sequence: CTG
ttctttaattgttttgtctt

SEQ ID NO: 66776 - DNA, 20 bp, Artificial Sequence
  Description of Artificial Sequence: Synthetic oligonucleotide
  Target: SCNA; (+) strand; PAM type: YTN; PAM sequence: TTC
tttaattgttttgtcttctt

SEQ ID NO: 66777 - DNA, 20 bp, Artificial Sequence
  Description of Artificial Sequence: Synthetic oligonucleotide
  Target: SCNA; (+) strand; PAM type: YTN; PAM sequence: CTT
taattgttttgtcttctttt

SEQ ID NO: 66778 - DNA, 20 bp, Artificial Sequence
  Description of Artificial Sequence: Synthetic oligonucleotide
  Target: SCNA; (+) strand; PAM type: YTN; PAM sequence: TTT
aattgttttgtcttcttttt

SEQ ID NO: 66779 - DNA, 20 bp, Artificial Sequence
  Description of Artificial Sequence: Synthetic oligonucleotide
  Target: SCNA; (+) strand; PAM type: YTN; PAM sequence: TTA
attgttttgtcttcttttta

SEQ ID NO: 66780 - DNA, 20 bp, Artificial Sequence
  Description of Artificial Sequence: Synthetic oligonucleotide
  Target: SCNA; (+) strand; PAM type: YTN; PAM sequence: TTG
ttttgtcttctttttaaaga

SEQ ID NO: 66781 - DNA, 20 bp, Artificial Sequence
  Description of Artificial Sequence: Synthetic oligonucleotide
  Target: SCNA; (+) strand; PAM type: YTN; PAM sequence: TTT
tgtcttctttttaaagaaac

SEQ ID NO: 66782 - DNA, 20 bp, Artificial Sequence
  Description of Artificial Sequence: Synthetic oligonucleotide
  Target: SCNA; (+) strand; PAM type: YTN; PAM sequence: TTT
gtcttctttttaaagaaacc

SEQ ID NO: 66783 - DNA, 20 bp, Artificial Sequence
  Description of Artificial Sequence: Synthetic oligonucleotide
  Target: SCNA; (+) strand; PAM type: YTN; PAM sequence: TTG
tcttctttttaaagaaacca

SEQ ID NO: 66784 - DNA, 20 bp, Artificial Sequence
  Description of Artificial Sequence: Synthetic oligonucleotide
  Target: SCNA; (+) strand; PAM type: YTN; PAM sequence: CTT
ctttttaaagaaaccaagag

SEQ ID NO: 66785 - DNA, 20 bp, Artificial Sequence
  Description of Artificial Sequence: Synthetic oligonucleotide
  Target: SCNA; (+) strand; PAM type: YTN; PAM sequence: TTC
tttttaaagaaaccaagaga

SEQ ID NO: 66786 - DNA, 20 bp, Artificial Sequence
  Description of Artificial Sequence: Synthetic oligonucleotide
  Target: SCNA; (+) strand; PAM type: YTN; PAM sequence: CTT
tttaaagaaaccaagagact

SEQ ID NO: 66787 - DNA, 20 bp, Artificial Sequence
  Description of Artificial Sequence: Synthetic oligonucleotide
  Target: SCNA; (+) strand; PAM type: YTN; PAM sequence: TTT
ttaaagaaaccaagagactg

SEQ ID NO: 66788 - DNA, 20 bp, Artificial Sequence
  Description of Artificial Sequence: Synthetic oligonucleotide
  Target: SCNA; (+) strand; PAM type: YTN; PAM sequence: TTT
taaagaaaccaagagactgt

SEQ ID NO: 66789 - DNA, 20 bp, Artificial Sequence
  Description of Artificial Sequence: Synthetic oligonucleotide
  Target: SCNA; (+) strand; PAM type: YTN; PAM sequence: TTT
aaagaaaccaagagactgtt

SEQ ID NO: 66790 - DNA, 20 bp, Artificial Sequence
  Description of Artificial Sequence: Synthetic oligonucleotide
  Target: SCNA; (+) strand; PAM type: YTN; PAM sequence: TTA
aagaaaccaagagactgtta

SEQ ID NO: 66791 - DNA, 20 bp, Artificial Sequence
  Description of Artificial Sequence: Synthetic oligonucleotide
  Target: SCNA; (+) strand; PAM type: YTN; PAM sequence: CTG
ttaatgtagtaggagcagag

SEQ ID NO: 66792 - DNA, 20 bp, Artificial Sequence
  Description of Artificial Sequence: Synthetic oligonucleotide
  Target: SCNA; (+) strand; PAM type: YTN; PAM sequence: TTA
atgtagtaggagcagagttt

SEQ ID NO: 66793 - DNA, 20 bp, Artificial Sequence
  Description of Artificial Sequence: Synthetic oligonucleotide
  Target: SCNA; (+) strand; PAM type: YTN; PAM sequence: TTT
cacaatacagagcagagagg

SEQ ID NO: 66794 - DNA, 20 bp, Artificial Sequence
  Description of Artificial Sequence: Synthetic oligonucleotide
  Target: SCNA; (+) strand; PAM type: YTN; PAM sequence: TTC
acaatacagagcagagaggg

SEQ ID NO: 66795 - DNA, 20 bp, Artificial Sequence
  Description of Artificial Sequence: Synthetic oligonucleotide
  Target: SCNA; (+) strand; PAM type: YTN; PAM sequence: TTG
gttgataaagaattgtctca

SEQ ID NO: 66796 - DNA, 20 bp, Artificial Sequence
  Description of Artificial Sequence: Synthetic oligonucleotide
  Target: SCNA; (+) strand; PAM type: YTN; PAM sequence: TTG
ataaagaattgtctcaaatg

SEQ ID NO: 66797 - DNA, 20 bp, Artificial Sequence
  Description of Artificial Sequence: Synthetic oligonucleotide
  Target: SCNA; (+) strand; PAM type: YTN; PAM sequence: TTG
tctcaaatgagaggaaaaga

SEQ ID NO: 66798 - DNA, 20 bp, Artificial Sequence
  Description of Artificial Sequence: Synthetic oligonucleotide
  Target: SCNA; (+) strand; PAM type: YTN; PAM sequence: CTC
aaatgagaggaaaagaatgg

SEQ ID NO: 66799 - DNA, 20 bp, Artificial Sequence
  Description of Artificial Sequence: Synthetic oligonucleotide
  Target: SCNA; (+) strand; PAM type: YTN; PAM sequence: TTT
aatttgggaaaggtgggaca

SEQ ID NO: 66800 - DNA, 20 bp, Artificial Sequence
  Description of Artificial Sequence: Synthetic oligonucleotide
  Target: SCNA; (+) strand; PAM type: YTN; PAM sequence: TTA
atttgggaaaggtgggacat

SEQ ID NO: 66801 - DNA, 20 bp, Artificial Sequence
  Description of Artificial Sequence: Synthetic oligonucleotide
  Target: SCNA; (+) strand; PAM type: YTN; PAM sequence: TTT
gggaaaggtgggacatgtta

SEQ ID NO: 66802 - DNA, 20 bp, Artificial Sequence
  Description of Artificial Sequence: Synthetic oligonucleotide
  Target: SCNA; (+) strand; PAM type: YTN; PAM sequence: TTG
ggaaaggtgggacatgttaa

SEQ ID NO: 66803 - DNA, 20 bp, Artificial Sequence
  Description of Artificial Sequence: Synthetic oligonucleotide
  Target: SCNA; (+) strand; PAM type: YTN; PAM sequence: TTA
acatgagtccagagaactaa

SEQ ID NO: 66804 - DNA, 20 bp, Artificial Sequence
  Description of Artificial Sequence: Synthetic oligonucleotide
  Target: SCNA; (+) strand; PAM type: YTN; PAM sequence: CTA
aaatgagcttatggcatgca

SEQ ID NO: 66805 - DNA, 20 bp, Artificial Sequence
  Description of Artificial Sequence: Synthetic oligonucleotide
  Target: SCNA; (+) strand; PAM type: YTN; PAM sequence: CTT
atggcatgcagatgctgaag

SEQ ID NO: 66806 - DNA, 20 bp, Artificial Sequence
  Description of Artificial Sequence: Synthetic oligonucleotide
  Target: SCNA; (+) strand; PAM type: YTN; PAM sequence: TTA
tggcatgcagatgctgaaga

SEQ ID NO: 66807 - DNA, 20 bp, Artificial Sequence
  Description of Artificial Sequence: Synthetic oligonucleotide
  Target: SCNA; (+) strand; PAM type: YTN; PAM sequence: CTG
aagatgaagaaaggaaagga

SEQ ID NO: 66808 - DNA, 20 bp, Artificial Sequence
  Description of Artificial Sequence: Synthetic oligonucleotide
  Target: SCNA; (+) strand; PAM type: YTN; PAM sequence: TTT
atatttatttattgaataat

SEQ ID NO: 66809 - DNA, 20 bp, Artificial Sequence
  Description of Artificial Sequence: Synthetic oligonucleotide
  Target: SCNA; (+) strand; PAM type: YTN; PAM sequence: TTA
tatttatttattgaataatc

SEQ ID NO: 66810 - DNA, 20 bp, Artificial Sequence
  Description of Artificial Sequence: Synthetic oligonucleotide
  Target: SCNA; (+) strand; PAM type: YTN; PAM sequence: TTT
atttattgaataatcttgta

SEQ ID NO: 66811 - DNA, 20 bp, Artificial Sequence
  Description of Artificial Sequence: Synthetic oligonucleotide
  Target: SCNA; (+) strand; PAM type: YTN; PAM sequence: TTA
tttattgaataatcttgtaa

SEQ ID NO: 66812 - DNA, 20 bp, Artificial Sequence
  Description of Artificial Sequence: Synthetic oligonucleotide
  Target: SCNA; (+) strand; PAM type: YTN; PAM sequence: TTT
attgaataatcttgtaaaac

SEQ ID NO: 66813 - DNA, 20 bp, Artificial Sequence
  Description of Artificial Sequence: Synthetic oligonucleotide
  Target: SCNA; (+) strand; PAM type: YTN; PAM sequence: TTA
ttgaataatcttgtaaaact

SEQ ID NO: 66814 - DNA, 20 bp, Artificial Sequence
  Description of Artificial Sequence: Synthetic oligonucleotide
  Target: SCNA; (+) strand; PAM type: YTN; PAM sequence: TTG
aataatcttgtaaaactgtt

SEQ ID NO: 66815 - DNA, 20 bp, Artificial Sequence
  Description of Artificial Sequence: Synthetic oligonucleotide
  Target: SCNA; (+) strand; PAM type: YTN; PAM sequence: CTT
gtaaaactgttaatcacccc

SEQ ID NO: 66816 - DNA, 20 bp, Artificial Sequence
  Description of Artificial Sequence: Synthetic oligonucleotide
  Target: SCNA; (+) strand; PAM type: YTN; PAM sequence: TTG
taaaactgttaatcacccct

SEQ ID NO: 66817 - DNA, 20 bp, Artificial Sequence
  Description of Artificial Sequence: Synthetic oligonucleotide
  Target: SCNA; (+) strand; PAM type: YTN; PAM sequence: CTG
ttaatcacccctttttactg

SEQ ID NO: 66818 - DNA, 20 bp, Artificial Sequence
  Description of Artificial Sequence: Synthetic oligonucleotide
  Target: SCNA; (+) strand; PAM type: YTN; PAM sequence: TTA
atcacccctttttactgacg

SEQ ID NO: 66819 - DNA, 20 bp, Artificial Sequence
  Description of Artificial Sequence: Synthetic oligonucleotide
  Target: SCNA; (+) strand; PAM type: YTN; PAM sequence: CTT
tttactgacgataagacata

SEQ ID NO: 66820 - DNA, 20 bp, Artificial Sequence
  Description of Artificial Sequence: Synthetic oligonucleotide
  Target: SCNA; (+) strand; PAM type: YTN; PAM sequence: TTT
ttactgacgataagacataa

SEQ ID NO: 66821 - DNA, 20 bp, Artificial Sequence
  Description of Artificial Sequence: Synthetic oligonucleotide
  Target: SCNA; (+) strand; PAM type: YTN; PAM sequence: TTT
tactgacgataagacataaa

SEQ ID NO: 66822 - DNA, 20 bp, Artificial Sequence
  Description of Artificial Sequence: Synthetic oligonucleotide
  Target: SCNA; (+) strand; PAM type: YTN; PAM sequence: TTT
actgacgataagacataaat

SEQ ID NO: 66823 - DNA, 20 bp, Artificial Sequence
  Description of Artificial Sequence: Synthetic oligonucleotide
  Target: SCNA; (+) strand; PAM type: YTN; PAM sequence: TTA
ctgacgataagacataaatg

SEQ ID NO: 66824 - DNA, 20 bp, Artificial Sequence
  Description of Artificial Sequence: Synthetic oligonucleotide
  Target: SCNA; (+) strand; PAM type: YTN; PAM sequence: CTG
acgataagacataaatgtca

SEQ ID NO: 66825 - DNA, 20 bp, Artificial Sequence
  Description of Artificial Sequence: Synthetic oligonucleotide
  Target: SCNA; (+) strand; PAM type: YTN; PAM sequence: TTT
tgcctaaagtaaaaaattcg

SEQ ID NO: 66826 - DNA, 20 bp, Artificial Sequence
  Description of Artificial Sequence: Synthetic oligonucleotide
  Target: SCNA; (+) strand; PAM type: YTN; PAM sequence: TTT
gcctaaagtaaaaaattcga

SEQ ID NO: 66827 - DNA, 20 bp, Artificial Sequence
  Description of Artificial Sequence: Synthetic oligonucleotide
  Target: SCNA; (+) strand; PAM type: YTN; PAM sequence: TTG
cctaaagtaaaaaattcgat

SEQ ID NO: 66828 - DNA, 20 bp, Artificial Sequence
  Description of Artificial Sequence: Synthetic oligonucleotide
  Target: SCNA; (+) strand; PAM type: YTN; PAM sequence: CTA
aagtaaaaaattcgatagtc

SEQ ID NO: 66829 - DNA, 20 bp, Artificial Sequence
  Description of Artificial Sequence: Synthetic oligonucleotide
  Target: SCNA; (+) strand; PAM type: YTN; PAM sequence: TTC
gatagtcaagctgggtttaa

SEQ ID NO: 66830 - DNA, 20 bp, Artificial Sequence
  Description of Artificial Sequence: Synthetic oligonucleotide
  Target: SCNA; (+) strand; PAM type: YTN; PAM sequence: CTG
ggtttaaaaccatatcagtc

SEQ ID NO: 66831 - DNA, 20 bp, Artificial Sequence
  Description of Artificial Sequence: Synthetic oligonucleotide
  Target: SCNA; (+) strand; PAM type: YTN; PAM sequence: TTT
aaaaccatatcagtcttacg

SEQ ID NO: 66832 - DNA, 20 bp, Artificial Sequence
  Description of Artificial Sequence: Synthetic oligonucleotide
  Target: SCNA; (+) strand; PAM type: YTN; PAM sequence: TTA
aaaccatatcagtcttacgt

SEQ ID NO: 66833 - DNA, 20 bp, Artificial Sequence
  Description of Artificial Sequence: Synthetic oligonucleotide
  Target: SCNA; (+) strand; PAM type: YTN; PAM sequence: CTT
acgtcaaagcatgttttaat

SEQ ID NO: 66834 - DNA, 20 bp, Artificial Sequence
  Description of Artificial Sequence: Synthetic oligonucleotide
  Target: SCNA; (+) strand; PAM type: YTN; PAM sequence: TTA
cgtcaaagcatgttttaatt

SEQ ID NO: 66835 - DNA, 20 bp, Artificial Sequence
  Description of Artificial Sequence: Synthetic oligonucleotide
  Target: SCNA; (+) strand; PAM type: YTN; PAM sequence: TTT
taattgctgttgtgtggttg

SEQ ID NO: 66836 - DNA, 20 bp, Artificial Sequence
  Description of Artificial Sequence: Synthetic oligonucleotide
  Target: SCNA; (+) strand; PAM type: YTN; PAM sequence: TTT
aattgctgttgtgtggttgt

SEQ ID NO: 66837 - DNA, 20 bp, Artificial Sequence
  Description of Artificial Sequence: Synthetic oligonucleotide
  Target: SCNA; (+) strand; PAM type: YTN; PAM sequence: TTA
attgctgttgtgtggttgtg

SEQ ID NO: 66838 - DNA, 20 bp, Artificial Sequence
  Description of Artificial Sequence: Synthetic oligonucleotide
  Target: SCNA; (+) strand; PAM type: YTN; PAM sequence: TTG
ctgttgtgtggttgtgattt

SEQ ID NO: 66839 - DNA, 20 bp, Artificial Sequence
  Description of Artificial Sequence: Synthetic oligonucleotide
  Target: SCNA; (+) strand; PAM type: YTN; PAM sequence: CTG
ttgtgtggttgtgattttaa

SEQ ID NO: 66840 - DNA, 20 bp, Artificial Sequence
  Description of Artificial Sequence: Synthetic oligonucleotide
  Target: SCNA; (+) strand; PAM type: YTN; PAM sequence: TTG
tgtggttgtgattttaaggg

SEQ ID NO: 66841 - DNA, 20 bp, Artificial Sequence
  Description of Artificial Sequence: Synthetic oligonucleotide
  Target: SCNA; (+) strand; PAM type: YTN; PAM sequence: TTG
tgattttaagggaagaagaa

SEQ ID NO: 66842 - DNA, 20 bp, Artificial Sequence
  Description of Artificial Sequence: Synthetic oligonucleotide
  Target: SCNA; (+) strand; PAM type: YTN; PAM sequence: TTT
taagggaagaagaagagttt

SEQ ID NO: 66843 - DNA, 20 bp, Artificial Sequence
  Description of Artificial Sequence: Synthetic oligonucleotide
  Target: SCNA; (+) strand; PAM type: YTN; PAM sequence: TTT
aagggaagaagaagagtttt

SEQ ID NO: 66844 - DNA, 20 bp, Artificial Sequence
  Description of Artificial Sequence: Synthetic oligonucleotide
  Target: SCNA; (+) strand; PAM type: YTN; PAM sequence: TTA
agggaagaagaagagtttta

SEQ ID NO: 66845 - DNA, 20 bp, Artificial Sequence
  Description of Artificial Sequence: Synthetic oligonucleotide
  Target: SCNA; (+) strand; PAM type: YTN; PAM sequence: TTT
tataatgggttctctgaaaa

SEQ ID NO: 66846 - DNA, 20 bp, Artificial Sequence
  Description of Artificial Sequence: Synthetic oligonucleotide
  Target: SCNA; (+) strand; PAM type: YTN; PAM sequence: TTT
ataatgggttctctgaaaaa

SEQ ID NO: 66847 - DNA, 20 bp, Artificial Sequence
  Description of Artificial Sequence: Synthetic oligonucleotide
  Target: SCNA; (+) strand; PAM type: YTN; PAM sequence: TTA
taatgggttctctgaaaaat

SEQ ID NO: 66848 - DNA, 20 bp, Artificial Sequence
  Description of Artificial Sequence: Synthetic oligonucleotide
  Target: SCNA; (+) strand; PAM type: YTN; PAM sequence: TTC
tctgaaaaataaaatatcaa

SEQ ID NO: 66849 - DNA, 20 bp, Artificial Sequence
  Description of Artificial Sequence: Synthetic oligonucleotide
  Target: SCNA; (+) strand; PAM type: YTN; PAM sequence: CTC
tgaaaaataaaatatcaatt

SEQ ID NO: 66850 - DNA, 20 bp, Artificial Sequence
  Description of Artificial Sequence: Synthetic oligonucleotide
  Target: SCNA; (+) strand; PAM type: YTN; PAM sequence: CTG
aaaaataaaatatcaattag

SEQ ID NO: 66851 - DNA, 20 bp, Artificial Sequence
  Description of Artificial Sequence: Synthetic oligonucleotide
  Target: SCNA; (+) strand; PAM type: YTN; PAM sequence: TTA
gaaagaaacaaaacaactgc

SEQ ID NO: 66852 - DNA, 20 bp, Artificial Sequence
  Description of Artificial Sequence: Synthetic oligonucleotide
  Target: SCNA; (+) strand; PAM type: YTN; PAM sequence: CTG
ctgagaagcagtgaatccaa

SEQ ID NO: 66853 - DNA, 20 bp, Artificial Sequence
  Description of Artificial Sequence: Synthetic oligonucleotide
  Target: SCNA; (+) strand; PAM type: YTN; PAM sequence: CTG
agaagcagtgaatccaagca

SEQ ID NO: 66854 - DNA, 20 bp, Artificial Sequence
  Description of Artificial Sequence: Synthetic oligonucleotide
  Target: SCNA; (+) strand; PAM type: YTN; PAM sequence: CTG
agtatcatcactttttagtt

SEQ ID NO: 66855 - DNA, 20 bp, Artificial Sequence
  Description of Artificial Sequence: Synthetic oligonucleotide
  Target: SCNA; (+) strand; PAM type: YTN; PAM sequence: CTT
tttagttaaactaaccagtc

SEQ ID NO: 66856 - DNA, 20 bp, Artificial Sequence
  Description of Artificial Sequence: Synthetic oligonucleotide
  Target: SCNA; (+) strand; PAM type: YTN; PAM sequence: TTT
ttagttaaactaaccagtcc

SEQ ID NO: 66857 - DNA, 20 bp, Artificial Sequence
  Description of Artificial Sequence: Synthetic oligonucleotide
  Target: SCNA; (+) strand; PAM type: YTN; PAM sequence: TTT
tagttaaactaaccagtcca

SEQ ID NO: 66858 - DNA, 20 bp, Artificial Sequence
  Description of Artificial Sequence: Synthetic oligonucleotide
  Target: SCNA; (+) strand; PAM type: YTN; PAM sequence: TTT
agttaaactaaccagtccaa

SEQ ID NO: 66859 - DNA, 20 bp, Artificial Sequence
  Description of Artificial Sequence: Synthetic oligonucleotide
  Target: SCNA; (+) strand; PAM type: YTN; PAM sequence: TTA
gttaaactaaccagtccaat

SEQ ID NO: 66860 - DNA, 20 bp, Artificial Sequence
  Description of Artificial Sequence: Synthetic oligonucleotide
  Target: SCNA; (+) strand; PAM type: YTN; PAM sequence: TTA
aactaaccagtccaatatcc

SEQ ID NO: 66861 - DNA, 20 bp, Artificial Sequence
  Description of Artificial Sequence: Synthetic oligonucleotide
  Target: SCNA; (+) strand; PAM type: YTN; PAM sequence: CTA
accagtccaatatcctgatt

SEQ ID NO: 66862 - DNA, 20 bp, Artificial Sequence
  Description of Artificial Sequence: Synthetic oligonucleotide
  Target: SCNA; (+) strand; PAM type: YTN; PAM sequence: CTG
atttttctttaacaggcaaa

SEQ ID NO: 66863 - DNA, 20 bp, Artificial Sequence
  Description of Artificial Sequence: Synthetic oligonucleotide
  Target: SCNA; (+) strand; PAM type: YTN; PAM sequence: TTT
ttctttaacaggcaaagaat

SEQ ID NO: 66864 - DNA, 20 bp, Artificial Sequence
  Description of Artificial Sequence: Synthetic oligonucleotide
  Target: SCNA; (+) strand; PAM type: YTN; PAM sequence: TTT
tctttaacaggcaaagaatt

SEQ ID NO: 66865 - DNA, 20 bp, Artificial Sequence
  Description of Artificial Sequence: Synthetic oligonucleotide
  Target: SCNA; (+) strand; PAM type: YTN; PAM sequence: TTT
ctttaacaggcaaagaattt

SEQ ID NO: 66866 - DNA, 20 bp, Artificial Sequence
  Description of Artificial Sequence: Synthetic oligonucleotide
  Target: SCNA; (+) strand; PAM type: YTN; PAM sequence: TTC
tttaacaggcaaagaatttt

SEQ ID NO: 66867 - DNA, 20 bp, Artificial Sequence
  Description of Artificial Sequence: Synthetic oligonucleotide
  Target: SCNA; (+) strand; PAM type: YTN; PAM sequence: CTT
taacaggcaaagaatttttg

SEQ ID NO: 66868 - DNA, 20 bp, Artificial Sequence
  Description of Artificial Sequence: Synthetic oligonucleotide
  Target: SCNA; (+) strand; PAM type: YTN; PAM sequence: TTT
aacaggcaaagaatttttga

SEQ ID NO: 66869 - DNA, 20 bp, Artificial Sequence
  Description of Artificial Sequence: Synthetic oligonucleotide
  Target: SCNA; (+) strand; PAM type: YTN; PAM sequence: TTA
acaggcaaagaatttttgag

SEQ ID NO: 66870 - DNA, 20 bp, Artificial Sequence
  Description of Artificial Sequence: Synthetic oligonucleotide
  Target: SCNA; (+) strand; PAM type: YTN; PAM sequence: TTT
ttgagtctttcccatagact

SEQ ID NO: 66871 - DNA, 20 bp, Artificial Sequence
  Description of Artificial Sequence: Synthetic oligonucleotide
  Target: SCNA; (+) strand; PAM type: YTN; PAM sequence: TTT
tgagtctttcccatagactg

SEQ ID NO: 66872 - DNA, 20 bp, Artificial Sequence
  Description of Artificial Sequence: Synthetic oligonucleotide
  Target: SCNA; (+) strand; PAM type: YTN; PAM sequence: TTT
gagtctttcccatagactga

SEQ ID NO: 66873 - DNA, 20 bp, Artificial Sequence
  Description of Artificial Sequence: Synthetic oligonucleotide
  Target: SCNA; (+) strand; PAM type: YTN; PAM sequence: TTG
agtctttcccatagactgag

SEQ ID NO: 66874 - DNA, 20 bp, Artificial Sequence
  Description of Artificial Sequence: Synthetic oligonucleotide
  Target: SCNA; (+) strand; PAM type: YTN; PAM sequence: CTT
tcccatagactgagttcttg

SEQ ID NO: 66875 - DNA, 20 bp, Artificial Sequence
  Description of Artificial Sequence: Synthetic oligonucleotide
  Target: SCNA; (+) strand; PAM type: YTN; PAM sequence: TTT
cccatagactgagttcttgt

SEQ ID NO: 66876 - DNA, 20 bp, Artificial Sequence
  Description of Artificial Sequence: Synthetic oligonucleotide
  Target: SCNA; (+) strand; PAM type: YTN; PAM sequence: TTC
ccatagactgagttcttgtg

SEQ ID NO: 66877 - DNA, 20 bp, Artificial Sequence
  Description of Artificial Sequence: Synthetic oligonucleotide
  Target: SCNA; (+) strand; PAM type: YTN; PAM sequence: CTG
agttcttgtgaactatttta

SEQ ID NO: 66878 - DNA, 20 bp, Artificial Sequence
  Description of Artificial Sequence: Synthetic oligonucleotide
  Target: SCNA; (+) strand; PAM type: YTN; PAM sequence: TTC
ttgtgaactattttacagca

SEQ ID NO: 66879 - DNA, 20 bp, Artificial Sequence
  Description of Artificial Sequence: Synthetic oligonucleotide
  Target: SCNA; (+) strand; PAM type: YTN; PAM sequence: CTT
gtgaactattttacagcaat

SEQ ID NO: 66880 - DNA, 20 bp, Artificial Sequence
  Description of Artificial Sequence: Synthetic oligonucleotide
  Target: SCNA; (+) strand; PAM type: YTN; PAM sequence: TTG
tgaactattttacagcaata

SEQ ID NO: 66881 - DNA, 20 bp, Artificial Sequence
  Description of Artificial Sequence: Synthetic oligonucleotide
  Target: SCNA; (+) strand; PAM type: YTN; PAM sequence: CTA
ttttacagcaataatggcat

SEQ ID NO: 66882 - DNA, 20 bp, Artificial Sequence
  Description of Artificial Sequence: Synthetic oligonucleotide
  Target: SCNA; (+) strand; PAM type: YTN; PAM sequence: TTT
tacagcaataatggcatcca

SEQ ID NO: 66883 - DNA, 20 bp, Artificial Sequence
  Description of Artificial Sequence: Synthetic oligonucleotide
  Target: SCNA; (+) strand; PAM type: YTN; PAM sequence: TTT
acagcaataatggcatccaa

SEQ ID NO: 66884 - DNA, 20 bp, Artificial Sequence
  Description of Artificial Sequence: Synthetic oligonucleotide
  Target: SCNA; (+) strand; PAM type: YTN; PAM sequence: TTA
cagcaataatggcatccaat

SEQ ID NO: 66885 - DNA, 20 bp, Artificial Sequence
  Description of Artificial Sequence: Synthetic oligonucleotide
  Target: SCNA; (+) strand; PAM type: YTN; PAM sequence: CTA
tagataacaataacaaagct

SEQ ID NO: 66886 - DNA, 20 bp, Artificial Sequence
  Description of Artificial Sequence: Synthetic oligonucleotide
  Target: SCNA; (+) strand; PAM type: YTN; PAM sequence: CTG
cagaccattttgttgccagg

SEQ ID NO: 66887 - DNA, 20 bp, Artificial Sequence
  Description of Artificial Sequence: Synthetic oligonucleotide
  Target: SCNA; (+) strand; PAM type: YTN; PAM sequence: TTT
tgttgccaggtttctcctcc

SEQ ID NO: 66888 - DNA, 20 bp, Artificial Sequence
  Description of Artificial Sequence: Synthetic oligonucleotide
  Target: SCNA; (+) strand; PAM type: YTN; PAM sequence: TTT
gttgccaggtttctcctcca

SEQ ID NO: 66889 - DNA, 20 bp, Artificial Sequence
  Description of Artificial Sequence: Synthetic oligonucleotide
  Target: SCNA; (+) strand; PAM type: YTN; PAM sequence: TTG
ttgccaggtttctcctccag

SEQ ID NO: 66890 - DNA, 20 bp, Artificial Sequence
  Description of Artificial Sequence: Synthetic oligonucleotide
  Target: SCNA; (+) strand; PAM type: YTN; PAM sequence: TTG
ccaggtttctcctccagggt

SEQ ID NO: 66891 - DNA, 20 bp, Artificial Sequence
  Description of Artificial Sequence: Synthetic oligonucleotide
  Target: SCNA; (+) strand; PAM type: YTN; PAM sequence: TTT
ctcctccagggtggctttcc

SEQ ID NO: 66892 - DNA, 20 bp, Artificial Sequence
  Description of Artificial Sequence: Synthetic oligonucleotide
  Target: SCNA; (+) strand; PAM type: YTN; PAM sequence: TTC
tcctccagggtggctttcca

SEQ ID NO: 66893 - DNA, 20 bp, Artificial Sequence
  Description of Artificial Sequence: Synthetic oligonucleotide
  Target: SCNA; (+) strand; PAM type: YTN; PAM sequence: CTC
ctccagggtggctttccagc

SEQ ID NO: 66894 - DNA, 20 bp, Artificial Sequence
  Description of Artificial Sequence: Synthetic oligonucleotide
  Target: SCNA; (+) strand; PAM type: YTN; PAM sequence: CTC
cagggtggctttccagctag

SEQ ID NO: 66895 - DNA, 20 bp, Artificial Sequence
  Description of Artificial Sequence: Synthetic oligonucleotide
  Target: SCNA; (+) strand; PAM type: YTN; PAM sequence: CTT
tccagctagtttgtaaacaa

SEQ ID NO: 66896 - DNA, 20 bp, Artificial Sequence
  Description of Artificial Sequence: Synthetic oligonucleotide
  Target: SCNA; (+) strand; PAM type: YTN; PAM sequence: TTT
ccagctagtttgtaaacaaa

SEQ ID NO: 66897 - DNA, 20 bp, Artificial Sequence
  Description of Artificial Sequence: Synthetic oligonucleotide
  Target: SCNA; (+) strand; PAM type: YTN; PAM sequence: TTC
cagctagtttgtaaacaaat

SEQ ID NO: 66898 - DNA, 20 bp, Artificial Sequence
  Description of Artificial Sequence: Synthetic oligonucleotide
  Target: SCNA; (+) strand; PAM type: YTN; PAM sequence: CTA
gtttgtaaacaaataactca

SEQ ID NO: 66899 - DNA, 20 bp, Artificial Sequence
  Description of Artificial Sequence: Synthetic oligonucleotide
  Target: SCNA; (+) strand; PAM type: YTN; PAM sequence: TTT
gtaaacaaataactcaggtg

SEQ ID NO: 66900 - DNA, 20 bp, Artificial Sequence
  Description of Artificial Sequence: Synthetic oligonucleotide
  Target: SCNA; (+) strand; PAM type: YTN; PAM sequence: TTG
taaacaaataactcaggtgg

SEQ ID NO: 66901 - DNA, 20 bp, Artificial Sequence
  Description of Artificial Sequence: Synthetic oligonucleotide
  Target: SCNA; (+) strand; PAM type: YTN; PAM sequence: CTC
aggtggccctgtcatgttac

SEQ ID NO: 66902 - DNA, 20 bp, Artificial Sequence
  Description of Artificial Sequence: Synthetic oligonucleotide
  Target: SCNA; (+) strand; PAM type: YTN; PAM sequence: CTG
tcatgttacattaactaaaa

SEQ ID NO: 66903 - DNA, 20 bp, Artificial Sequence
  Description of Artificial Sequence: Synthetic oligonucleotide
  Target: SCNA; (+) strand; PAM type: YTN; PAM sequence: TTA
cattaactaaaaaccaagtc

SEQ ID NO: 66904 - DNA, 20 bp, Artificial Sequence
  Description of Artificial Sequence: Synthetic oligonucleotide
  Target: SCNA; (+) strand; PAM type: YTN; PAM sequence: TTA
actaaaaaccaagtctaaag

SEQ ID NO: 66905 - DNA, 20 bp, Artificial Sequence
  Description of Artificial Sequence: Synthetic oligonucleotide
  Target: SCNA; (+) strand; PAM type: YTN; PAM sequence: CTA
aaaaccaagtctaaagcaca

SEQ ID NO: 66906 - DNA, 20 bp, Artificial Sequence
  Description of Artificial Sequence: Synthetic oligonucleotide
  Target: SCNA; (+) strand; PAM type: YTN; PAM sequence: CTA
aagcacacatataataacat

SEQ ID NO: 66907 - DNA, 20 bp, Artificial Sequence
  Description of Artificial Sequence: Synthetic oligonucleotide
  Target: SCNA; (+) strand; PAM type: YTN; PAM sequence: CTG
gcttgctttcaaattcctaa

SEQ ID NO: 66908 - DNA, 20 bp, Artificial Sequence
  Description of Artificial Sequence: Synthetic oligonucleotide
  Target: SCNA; (+) strand; PAM type: YTN; PAM sequence: CTT
gctttcaaattcctaaatca

SEQ ID NO: 66909 - DNA, 20 bp, Artificial Sequence
  Description of Artificial Sequence: Synthetic oligonucleotide
  Target: SCNA; (+) strand; PAM type: YTN; PAM sequence: TTG
ctttcaaattcctaaatcat

SEQ ID NO: 66910 - DNA, 20 bp, Artificial Sequence
  Description of Artificial Sequence: Synthetic oligonucleotide
  Target: SCNA; (+) strand; PAM type: YTN; PAM sequence: CTT
tcaaattcctaaatcataca

SEQ ID NO: 66911 - DNA, 20 bp, Artificial Sequence
  Description of Artificial Sequence: Synthetic oligonucleotide
  Target: SCNA; (+) strand; PAM type: YTN; PAM sequence: TTT
caaattcctaaatcatacaa

SEQ ID NO: 66912 - DNA, 20 bp, Artificial Sequence
  Description of Artificial Sequence: Synthetic oligonucleotide
  Target: SCNA; (+) strand; PAM type: YTN; PAM sequence: TTC
aaattcctaaatcatacaat

SEQ ID NO: 66913 - DNA, 20 bp, Artificial Sequence
  Description of Artificial Sequence: Synthetic oligonucleotide
  Target: SCNA; (+) strand; PAM type: YTN; PAM sequence: TTC
ctaaatcatacaattaaatt

SEQ ID NO: 66914 - DNA, 20 bp, Artificial Sequence
  Description of Artificial Sequence: Synthetic oligonucleotide
  Target: SCNA; (+) strand; PAM type: YTN; PAM sequence: CTA
aatcatacaattaaatttta

SEQ ID NO: 66915 - DNA, 20 bp, Artificial Sequence
  Description of Artificial Sequence: Synthetic oligonucleotide
  Target: SCNA; (+) strand; PAM type: YTN; PAM sequence: TTA
aattttaaaaataactgtat

SEQ ID NO: 66916 - DNA, 20 bp, Artificial Sequence
  Description of Artificial Sequence: Synthetic oligonucleotide
  Target: SCNA; (+) strand; PAM type: YTN; PAM sequence: TTT
taaaaataactgtatttgga

SEQ ID NO: 66917 - DNA, 20 bp, Artificial Sequence
  Description of Artificial Sequence: Synthetic oligonucleotide
  Target: SCNA; (+) strand; PAM type: YTN; PAM sequence: TTT
aaaaataactgtatttggaa

SEQ ID NO: 66918 - DNA, 20 bp, Artificial Sequence
  Description of Artificial Sequence: Synthetic oligonucleotide
  Target: SCNA; (+) strand; PAM type: YTN; PAM sequence: TTA
aaaataactgtatttggaaa

SEQ ID NO: 66919 - DNA, 20 bp, Artificial Sequence
  Description of Artificial Sequence: Synthetic oligonucleotide
  Target: SCNA; (+) strand; PAM type: YTN; PAM sequence: CTG
tatttggaaacaagaaaaaa

SEQ ID NO: 66920 - DNA, 20 bp, Artificial Sequence
  Description of Artificial Sequence: Synthetic oligonucleotide
  Target: SCNA; (+) strand; PAM type: YTN; PAM sequence: TTT
ggaaacaagaaaaaagtcac

SEQ ID NO: 66921 - DNA, 20 bp, Artificial Sequence
  Description of Artificial Sequence: Synthetic oligonucleotide
  Target: SCNA; (+) strand; PAM type: YTN; PAM sequence: TTG
gaaacaagaaaaaagtcact

SEQ ID NO: 66922 - DNA, 20 bp, Artificial Sequence
  Description of Artificial Sequence: Synthetic oligonucleotide
  Target: SCNA; (+) strand; PAM type: YTN; PAM sequence: CTT
tgacacccaactgatgtata

SEQ ID NO: 66923 - DNA, 20 bp, Artificial Sequence
  Description of Artificial Sequence: Synthetic oligonucleotide
  Target: SCNA; (+) strand; PAM type: YTN; PAM sequence: TTT
gacacccaactgatgtatat

SEQ ID NO: 66924 - DNA, 20 bp, Artificial Sequence
  Description of Artificial Sequence: Synthetic oligonucleotide
  Target: SCNA; (+) strand; PAM type: YTN; PAM sequence: TTG
acacccaactgatgtatata

SEQ ID NO: 66925 - DNA, 20 bp, Artificial Sequence
  Description of Artificial Sequence: Synthetic oligonucleotide
  Target: SCNA; (+) strand; PAM type: YTN; PAM sequence: CTG
atgtatataaaggagactgt

SEQ ID NO: 66926 - DNA, 20 bp, Artificial Sequence
  Description of Artificial Sequence: Synthetic oligonucleotide
  Target: SCNA; (+) strand; PAM type: YTN; PAM sequence: CTG
tgcatatgggttttaaaatg

SEQ ID NO: 66927 - DNA, 20 bp, Artificial Sequence
  Description of Artificial Sequence: Synthetic oligonucleotide
  Target: SCNA; (+) strand; PAM type: YTN; PAM sequence: TTT
taaaatgagatgaaaattga

SEQ ID NO: 66928 - DNA, 20 bp, Artificial Sequence
  Description of Artificial Sequence: Synthetic oligonucleotide
  Target: SCNA; (+) strand; PAM type: YTN; PAM sequence: TTT
aaaatgagatgaaaattgaa

SEQ ID NO: 66929 - DNA, 20 bp, Artificial Sequence
  Description of Artificial Sequence: Synthetic oligonucleotide
  Target: SCNA; (+) strand; PAM type: YTN; PAM sequence: TTA
aaatgagatgaaaattgaaa

SEQ ID NO: 66930 - DNA, 20 bp, Artificial Sequence
  Description of Artificial Sequence: Synthetic oligonucleotide
  Target: SCNA; (+) strand; PAM type: YTN; PAM sequence: TTG
aaatttgatctttgagatta

SEQ ID NO: 66931 - DNA, 20 bp, Artificial Sequence
  Description of Artificial Sequence: Synthetic oligonucleotide
  Target: SCNA; (+) strand; PAM type: YTN; PAM sequence: TTT
gatctttgagattaaaaaca

SEQ ID NO: 66932 - DNA, 20 bp, Artificial Sequence
  Description of Artificial Sequence: Synthetic oligonucleotide
  Target: SCNA; (+) strand; PAM type: YTN; PAM sequence: TTG
atctttgagattaaaaacaa

SEQ ID NO: 66933 - DNA, 20 bp, Artificial Sequence
  Description of Artificial Sequence: Synthetic oligonucleotide
  Target: SCNA; (+) strand; PAM type: YTN; PAM sequence: CTT
tgagattaaaaacaatgtta

SEQ ID NO: 66934 - DNA, 20 bp, Artificial Sequence
  Description of Artificial Sequence: Synthetic oligonucleotide
  Target: SCNA; (+) strand; PAM type: YTN; PAM sequence: TTT
gagattaaaaacaatgttat

SEQ ID NO: 66935 - DNA, 20 bp, Artificial Sequence
  Description of Artificial Sequence: Synthetic oligonucleotide
  Target: SCNA; (+) strand; PAM type: YTN; PAM sequence: TTG
agattaaaaacaatgttatg

SEQ ID NO: 66936 - DNA, 20 bp, Artificial Sequence
  Description of Artificial Sequence: Synthetic oligonucleotide
  Target: SCNA; (+) strand; PAM type: YTN; PAM sequence: TTA
aaaacaatgttatgtaaatc

SEQ ID NO: 66937 - DNA, 20 bp, Artificial Sequence
  Description of Artificial Sequence: Synthetic oligonucleotide
  Target: SCNA; (+) strand; PAM type: YTN; PAM sequence: TTA
tgtaaatctatttttattta

SEQ ID NO: 66938 - DNA, 20 bp, Artificial Sequence
  Description of Artificial Sequence: Synthetic oligonucleotide
  Target: SCNA; (+) strand; PAM type: YTN; PAM sequence: CTA
tttttatttaatttttctga

SEQ ID NO: 66939 - DNA, 20 bp, Artificial Sequence
  Description of Artificial Sequence: Synthetic oligonucleotide
  Target: SCNA; (+) strand; PAM type: YTN; PAM sequence: TTT
ttatttaatttttctgaaaa

SEQ ID NO: 66940 - DNA, 20 bp, Artificial Sequence
  Description of Artificial Sequence: Synthetic oligonucleotide
  Target: SCNA; (+) strand; PAM type: YTN; PAM sequence: TTT
tatttaatttttctgaaaaa

SEQ ID NO: 66941 - DNA, 20 bp, Artificial Sequence
  Description of Artificial Sequence: Synthetic oligonucleotide
  Target: SCNA; (+) strand; PAM type: YTN; PAM sequence: TTT
atttaatttttctgaaaaat

SEQ ID NO: 66942 - DNA, 20 bp, Artificial Sequence
  Description of Artificial Sequence: Synthetic oligonucleotide
  Target: SCNA; (+) strand; PAM type: YTN; PAM sequence: TTA
tttaatttttctgaaaaata

SEQ ID NO: 66943 - DNA, 20 bp, Artificial Sequence
  Description of Artificial Sequence: Synthetic oligonucleotide
  Target: SCNA; (+) strand; PAM type: YTN; PAM sequence: TTT
aatttttctgaaaaatattg

SEQ ID NO: 66944 - DNA, 20 bp, Artificial Sequence
  Description of Artificial Sequence: Synthetic oligonucleotide
  Target: SCNA; (+) strand; PAM type: YTN; PAM sequence: TTA
atttttctgaaaaatattgt

SEQ ID NO: 66945 - DNA, 20 bp, Artificial Sequence
  Description of Artificial Sequence: Synthetic oligonucleotide
  Target: SCNA; (+) strand; PAM type: YTN; PAM sequence: TTT
ttctgaaaaatattgtattt

SEQ ID NO: 66946 - DNA, 20 bp, Artificial Sequence
  Description of Artificial Sequence: Synthetic oligonucleotide
  Target: SCNA; (+) strand; PAM type: YTN; PAM sequence: TTT
tctgaaaaatattgtatttg

SEQ ID NO: 66947 - DNA, 20 bp, Artificial Sequence
  Description of Artificial Sequence: Synthetic oligonucleotide
  Target: SCNA; (+) strand; PAM type: YTN; PAM sequence: TTT
ctgaaaaatattgtatttgc

SEQ ID NO: 66948 - DNA, 20 bp, Artificial Sequence
  Description of Artificial Sequence: Synthetic oligonucleotide
  Target: SCNA; (+) strand; PAM type: YTN; PAM sequence: TTC
tgaaaaatattgtatttgct

SEQ ID NO: 66949 - DNA, 20 bp, Artificial Sequence
  Description of Artificial Sequence: Synthetic oligonucleotide
  Target: SCNA; (+) strand; PAM type: YTN; PAM sequence: CTG
aaaaatattgtatttgcttt

SEQ ID NO: 66950 - DNA, 20 bp, Artificial Sequence
  Description of Artificial Sequence: Synthetic oligonucleotide
  Target: SCNA; (+) strand; PAM type: YTN; PAM sequence: TTG
tatttgctttataccctctt

SEQ ID NO: 66951 - DNA, 20 bp, Artificial Sequence
  Description of Artificial Sequence: Synthetic oligonucleotide
  Target: SCNA; (+) strand; PAM type: YTN; PAM sequence: TTT
gctttataccctcttgctat

SEQ ID NO: 66952 - DNA, 20 bp, Artificial Sequence
  Description of Artificial Sequence: Synthetic oligonucleotide
  Target: SCNA; (+) strand; PAM type: YTN; PAM sequence: TTG
ctttataccctcttgctata

SEQ ID NO: 66953 - DNA, 20 bp, Artificial Sequence
  Description of Artificial Sequence: Synthetic oligonucleotide
  Target: SCNA; (+) strand; PAM type: YTN; PAM sequence: CTT
tataccctcttgctatacaa

SEQ ID NO: 66954 - DNA, 20 bp, Artificial Sequence
  Description of Artificial Sequence: Synthetic oligonucleotide
  Target: SCNA; (+) strand; PAM type: YTN; PAM sequence: TTT
ataccctcttgctatacaaa

SEQ ID NO: 66955 - DNA, 20 bp, Artificial Sequence
  Description of Artificial Sequence: Synthetic oligonucleotide
  Target: SCNA; (+) strand; PAM type: YTN; PAM sequence: TTA
taccctcttgctatacaaac

SEQ ID NO: 66956 - DNA, 20 bp, Artificial Sequence
  Description of Artificial Sequence: Synthetic oligonucleotide
  Target: SCNA; (+) strand; PAM type: YTN; PAM sequence: CTC
ttgctatacaaacttatatt

SEQ ID NO: 66957 - DNA, 20 bp, Artificial Sequence
  Description of Artificial Sequence: Synthetic oligonucleotide
  Target: SCNA; (+) strand; PAM type: YTN; PAM sequence: CTT
gctatacaaacttatattgt

SEQ ID NO: 66958 - DNA, 20 bp, Artificial Sequence
  Description of Artificial Sequence: Synthetic oligonucleotide
  Target: SCNA; (+) strand; PAM type: YTN; PAM sequence: TTG
ctatacaaacttatattgtt

SEQ ID NO: 66959 - DNA, 20 bp, Artificial Sequence
  Description of Artificial Sequence: Synthetic oligonucleotide
  Target: SCNA; (+) strand; PAM type: YTN; PAM sequence: CTA
tacaaacttatattgttttg

SEQ ID NO: 66960 - DNA, 20 bp, Artificial Sequence
  Description of Artificial Sequence: Synthetic oligonucleotide
  Target: SCNA; (+) strand; PAM type: YTN; PAM sequence: CTT
atattgttttgcttaccctc

SEQ ID NO: 66961 - DNA, 20 bp, Artificial Sequence
  Description of Artificial Sequence: Synthetic oligonucleotide
  Target: SCNA; (+) strand; PAM type: YTN; PAM sequence: TTA
tattgttttgcttaccctct

SEQ ID NO: 66962 - DNA, 20 bp, Artificial Sequence
  Description of Artificial Sequence: Synthetic oligonucleotide
  Target: SCNA; (+) strand; PAM type: YTN; PAM sequence: TTG
ttttgcttaccctctttttt

SEQ ID NO: 66963 - DNA, 20 bp, Artificial Sequence
  Description of Artificial Sequence: Synthetic oligonucleotide
  Target: SCNA; (+) strand; PAM type: YTN; PAM sequence: TTT
tgcttaccctctttttttat

SEQ ID NO: 66964 - DNA, 20 bp, Artificial Sequence
  Description of Artificial Sequence: Synthetic oligonucleotide
  Target: SCNA; (+) strand; PAM type: YTN; PAM sequence: TTT
gcttaccctctttttttatt

SEQ ID NO: 66965 - DNA, 20 bp, Artificial Sequence
  Description of Artificial Sequence: Synthetic oligonucleotide
  Target: SCNA; (+) strand; PAM type: YTN; PAM sequence: TTG
cttaccctctttttttattc

SEQ ID NO: 66966 - DNA, 20 bp, Artificial Sequence
  Description of Artificial Sequence: Synthetic oligonucleotide
  Target: SCNA; (+) strand; PAM type: YTN; PAM sequence: CTT
accctctttttttattcctc

SEQ ID NO: 66967 - DNA, 20 bp, Artificial Sequence
  Description of Artificial Sequence: Synthetic oligonucleotide
  Target: SCNA; (+) strand; PAM type: YTN; PAM sequence: TTA
ccctctttttttattcctcc

SEQ ID NO: 66968 - DNA, 20 bp, Artificial Sequence
  Description of Artificial Sequence: Synthetic oligonucleotide
  Target: SCNA; (+) strand; PAM type: YTN; PAM sequence: CTC
tttttttattcctcctactt

SEQ ID NO: 66969 - DNA, 20 bp, Artificial Sequence
  Description of Artificial Sequence: Synthetic oligonucleotide
  Target: SCNA; (+) strand; PAM type: YTN; PAM sequence: CTT
tttttattcctcctactttt

SEQ ID NO: 66970 - DNA, 20 bp, Artificial Sequence
  Description of Artificial Sequence: Synthetic oligonucleotide
  Target: SCNA; (+) strand; PAM type: YTN; PAM sequence: TTT
ttttattcctcctacttttt

SEQ ID NO: 66971 - DNA, 20 bp, Artificial Sequence
  Description of Artificial Sequence: Synthetic oligonucleotide
  Target: SCNA; (+) strand; PAM type: YTN; PAM sequence: TTT
tttattcctcctactttttc

SEQ ID NO: 66972 - DNA, 20 bp, Artificial Sequence
  Description of Artificial Sequence: Synthetic oligonucleotide
  Target: SCNA; (+) strand; PAM type: YTN; PAM sequence: TTT
ttattcctcctactttttct

SEQ ID NO: 66973 - DNA, 20 bp, Artificial Sequence
  Description of Artificial Sequence: Synthetic oligonucleotide
  Target: SCNA; (+) strand; PAM type: YTN; PAM sequence: TTT
tattcctcctactttttctt

SEQ ID NO: 66974 - DNA, 20 bp, Artificial Sequence
  Description of Artificial Sequence: Synthetic oligonucleotide
  Target: SCNA; (+) strand; PAM type: YTN; PAM sequence: TTT
attcctcctactttttctta

SEQ ID NO: 66975 - DNA, 20 bp, Artificial Sequence
  Description of Artificial Sequence: Synthetic oligonucleotide
  Target: SCNA; (+) strand; PAM type: YTN; PAM sequence: TTA
ttcctcctactttttcttaa

SEQ ID NO: 66976 - DNA, 20 bp, Artificial Sequence
  Description of Artificial Sequence: Synthetic oligonucleotide
  Target: SCNA; (+) strand; PAM type: YTN; PAM sequence: TTC
ctcctactttttcttaattt

SEQ ID NO: 66977 - DNA, 20 bp, Artificial Sequence
  Description of Artificial Sequence: Synthetic oligonucleotide
  Target: SCNA; (+) strand; PAM type: YTN; PAM sequence: CTC
ctactttttcttaattttga

SEQ ID NO: 66978 - DNA, 20 bp, Artificial Sequence
  Description of Artificial Sequence: Synthetic oligonucleotide
  Target: SCNA; (+) strand; PAM type: YTN; PAM sequence: CTA
ctttttcttaattttgatat

SEQ ID NO: 66979 - DNA, 20 bp, Artificial Sequence
  Description of Artificial Sequence: Synthetic oligonucleotide
  Target: SCNA; (+) strand; PAM type: YTN; PAM sequence: CTT
tttcttaattttgatatctc

SEQ ID NO: 66980 - DNA, 20 bp, Artificial Sequence
  Description of Artificial Sequence: Synthetic oligonucleotide
  Target: SCNA; (+) strand; PAM type: YTN; PAM sequence: TTT
ttcttaattttgatatctct

SEQ ID NO: 66981 - DNA, 20 bp, Artificial Sequence
  Description of Artificial Sequence: Synthetic oligonucleotide
  Target: SCNA; (+) strand; PAM type: YTN; PAM sequence: TTT
tcttaattttgatatctctg

SEQ ID NO: 66982 - DNA, 20 bp, Artificial Sequence
  Description of Artificial Sequence: Synthetic oligonucleotide
  Target: SCNA; (+) strand; PAM type: YTN; PAM sequence: TTT
cttaattttgatatctctga

SEQ ID NO: 66983 - DNA, 20 bp, Artificial Sequence
  Description of Artificial Sequence: Synthetic oligonucleotide
  Target: SCNA; (+) strand; PAM type: YTN; PAM sequence: TTC
ttaattttgatatctctgaa

SEQ ID NO: 66984 - DNA, 20 bp, Artificial Sequence
  Description of Artificial Sequence: Synthetic oligonucleotide
  Target: SCNA; (+) strand; PAM type: YTN; PAM sequence: CTT
aattttgatatctctgaatt

SEQ ID NO: 66985 - DNA, 20 bp, Artificial Sequence
  Description of Artificial Sequence: Synthetic oligonucleotide
  Target: SCNA; (+) strand; PAM type: YTN; PAM sequence: TTA
attttgatatctctgaattt

SEQ ID NO: 66986 - DNA, 20 bp, Artificial Sequence
  Description of Artificial Sequence: Synthetic oligonucleotide
  Target: SCNA; (+) strand; PAM type: YTN; PAM sequence: TTT
tgatatctctgaatttaaag

SEQ ID NO: 66987 - DNA, 20 bp, Artificial Sequence
  Description of Artificial Sequence: Synthetic oligonucleotide
  Target: SCNA; (+) strand; PAM type: YTN; PAM sequence: TTT
gatatctctgaatttaaagt

SEQ ID NO: 66988 - DNA, 20 bp, Artificial Sequence
  Description of Artificial Sequence: Synthetic oligonucleotide
  Target: SCNA; (+) strand; PAM type: YTN; PAM sequence: TTG
atatctctgaatttaaagtc

SEQ ID NO: 66989 - DNA, 20 bp, Artificial Sequence
  Description of Artificial Sequence: Synthetic oligonucleotide
  Target: SCNA; (+) strand; PAM type: YTN; PAM sequence: CTC
tgaatttaaagtctagagaa

SEQ ID NO: 66990 - DNA, 20 bp, Artificial Sequence
  Description of Artificial Sequence: Synthetic oligonucleotide
  Target: SCNA; (+) strand; PAM type: YTN; PAM sequence: CTG
aatttaaagtctagagaatg

SEQ ID NO: 66991 - DNA, 20 bp, Artificial Sequence
  Description of Artificial Sequence: Synthetic oligonucleotide
  Target: SCNA; (+) strand; PAM type: YTN; PAM sequence: TTT
aaagtctagagaatgattca

SEQ ID NO: 66992 - DNA, 20 bp, Artificial Sequence
  Description of Artificial Sequence: Synthetic oligonucleotide
  Target: SCNA; (+) strand; PAM type: YTN; PAM sequence: TTA
aagtctagagaatgattcat

SEQ ID NO: 66993 - DNA, 20 bp, Artificial Sequence
  Description of Artificial Sequence: Synthetic oligonucleotide
  Target: SCNA; (+) strand; PAM type: YTN; PAM sequence: CTA
gagaatgattcatcttcact

SEQ ID NO: 66994 - DNA, 20 bp, Artificial Sequence
  Description of Artificial Sequence: Synthetic oligonucleotide
  Target: SCNA; (+) strand; PAM type: YTN; PAM sequence: TTC
atcttcactagttctatctt

SEQ ID NO: 66995 - DNA, 20 bp, Artificial Sequence
  Description of Artificial Sequence: Synthetic oligonucleotide
  Target: SCNA; (+) strand; PAM type: YTN; PAM sequence: CTT
cactagttctatcttttcca

SEQ ID NO: 66996 - DNA, 20 bp, Artificial Sequence
  Description of Artificial Sequence: Synthetic oligonucleotide
  Target: SCNA; (+) strand; PAM type: YTN; PAM sequence: TTC
actagttctatcttttccag

SEQ ID NO: 66997 - DNA, 20 bp, Artificial Sequence
  Description of Artificial Sequence: Synthetic oligonucleotide
  Target: SCNA; (+) strand; PAM type: YTN; PAM sequence: CTA
gttctatcttttccagtgct

SEQ ID NO: 66998 - DNA, 20 bp, Artificial Sequence
  Description of Artificial Sequence: Synthetic oligonucleotide
  Target: SCNA; (+) strand; PAM type: YTN; PAM sequence: TTC
tatcttttccagtgctagta

SEQ ID NO: 66999 - DNA, 20 bp, Artificial Sequence
  Description of Artificial Sequence: Synthetic oligonucleotide
  Target: SCNA; (+) strand; PAM type: YTN; PAM sequence: CTA
tcttttccagtgctagtatt

SEQ ID NO: 67000 - DNA, 20 bp, Artificial Sequence
  Description of Artificial Sequence: Synthetic oligonucleotide
  Target: SCNA; (+) strand; PAM type: YTN; PAM sequence: CTT
ttccagtgctagtatttttg

SEQ ID NO: 67001 - DNA, 20 bp, Artificial Sequence
  Description of Artificial Sequence: Synthetic oligonucleotide
  Target: SCNA; (+) strand; PAM type: YTN; PAM sequence: TTT
tccagtgctagtatttttgt

SEQ ID NO: 67002 - DNA, 20 bp, Artificial Sequence
  Description of Artificial Sequence: Synthetic oligonucleotide
  Target: SCNA; (+) strand; PAM type: YTN; PAM sequence: TTT
ccagtgctagtatttttgtt

SEQ ID NO: 67003 - DNA, 20 bp, Artificial Sequence
  Description of Artificial Sequence: Synthetic oligonucleotide
  Target: SCNA; (+) strand; PAM type: YTN; PAM sequence: TTC
cagtgctagtatttttgttt

SEQ ID NO: 67004 - DNA, 20 bp, Artificial Sequence
  Description of Artificial Sequence: Synthetic oligonucleotide
  Target: SCNA; (+) strand; PAM type: YTN; PAM sequence: CTA
gtatttttgtttttgagctg

SEQ ID NO: 67005 - DNA, 20 bp, Artificial Sequence
  Description of Artificial Sequence: Synthetic oligonucleotide
  Target: SCNA; (+) strand; PAM type: YTN; PAM sequence: TTT
ttgtttttgagctgtggttt

SEQ ID NO: 67006 - DNA, 20 bp, Artificial Sequence
  Description of Artificial Sequence: Synthetic oligonucleotide
  Target: SCNA; (+) strand; PAM type: YTN; PAM sequence: TTT
tgtttttgagctgtggtttc

SEQ ID NO: 67007 - DNA, 20 bp, Artificial Sequence
  Description of Artificial Sequence: Synthetic oligonucleotide
  Target: SCNA; (+) strand; PAM type: YTN; PAM sequence: TTT
gtttttgagctgtggtttcc

SEQ ID NO: 67008 - DNA, 20 bp, Artificial Sequence
  Description of Artificial Sequence: Synthetic oligonucleotide
  Target: SCNA; (+) strand; PAM type: YTN; PAM sequence: TTG
tttttgagctgtggtttccc

SEQ ID NO: 67009 - DNA, 20 bp, Artificial Sequence
  Description of Artificial Sequence: Synthetic oligonucleotide
  Target: SCNA; (+) strand; PAM type: YTN; PAM sequence: TTT
ttgagctgtggtttccctat

SEQ ID NO: 67010 - DNA, 20 bp, Artificial Sequence
  Description of Artificial Sequence: Synthetic oligonucleotide
  Target: SCNA; (+) strand; PAM type: YTN; PAM sequence: TTT
tgagctgtggtttccctatc

SEQ ID NO: 67011 - DNA, 20 bp, Artificial Sequence
  Description of Artificial Sequence: Synthetic oligonucleotide
  Target: SCNA; (+) strand; PAM type: YTN; PAM sequence: TTT
gagctgtggtttccctatcc

SEQ ID NO: 67012 - DNA, 20 bp, Artificial Sequence
  Description of Artificial Sequence: Synthetic oligonucleotide
  Target: SCNA; (+) strand; PAM type: YTN; PAM sequence: TTG
agctgtggtttccctatccc

SEQ ID NO: 67013 - DNA, 20 bp, Artificial Sequence
  Description of Artificial Sequence: Synthetic oligonucleotide
  Target: SCNA; (+) strand; PAM type: YTN; PAM sequence: CTG
tggtttccctatcccatttt

SEQ ID NO: 67014 - DNA, 20 bp, Artificial Sequence
  Description of Artificial Sequence: Synthetic oligonucleotide
  Target: SCNA; (+) strand; PAM type: YTN; PAM sequence: TTT
ccctatcccatttttgagat

SEQ ID NO: 67015 - DNA, 20 bp, Artificial Sequence
  Description of Artificial Sequence: Synthetic oligonucleotide
  Target: SCNA; (+) strand; PAM type: YTN; PAM sequence: TTC
cctatcccatttttgagatc

SEQ ID NO: 67016 - DNA, 20 bp, Artificial Sequence
  Description of Artificial Sequence: Synthetic oligonucleotide
  Target: SCNA; (+) strand; PAM type: YTN; PAM sequence: CTA
tcccatttttgagatctcaa

SEQ ID NO: 67017 - DNA, 20 bp, Artificial Sequence
  Description of Artificial Sequence: Synthetic oligonucleotide
  Target: SCNA; (+) strand; PAM type: YTN; PAM sequence: TTT
ttgagatctcaaactataat

SEQ ID NO: 67018 - DNA, 20 bp, Artificial Sequence
  Description of Artificial Sequence: Synthetic oligonucleotide
  Target: SCNA; (+) strand; PAM type: YTN; PAM sequence: TTT
tgagatctcaaactataatt

SEQ ID NO: 67019 - DNA, 20 bp, Artificial Sequence
  Description of Artificial Sequence: Synthetic oligonucleotide
  Target: SCNA; (+) strand; PAM type: YTN; PAM sequence: TTT
gagatctcaaactataattt

SEQ ID NO: 67020 - DNA, 20 bp, Artificial Sequence
  Description of Artificial Sequence: Synthetic oligonucleotide
  Target: SCNA; (+) strand; PAM type: YTN; PAM sequence: TTG
agatctcaaactataatttg

SEQ ID NO: 67021 - DNA, 20 bp, Artificial Sequence
  Description of Artificial Sequence: Synthetic oligonucleotide
  Target: SCNA; (+) strand; PAM type: YTN; PAM sequence: CTC
aaactataatttggtgtcga

SEQ ID NO: 67022 - DNA, 20 bp, Artificial Sequence
  Description of Artificial Sequence: Synthetic oligonucleotide
  Target: SCNA; (+) strand; PAM type: YTN; PAM sequence: CTA
taatttggtgtcgagtaccc

SEQ ID NO: 67023 - DNA, 20 bp, Artificial Sequence
  Description of Artificial Sequence: Synthetic oligonucleotide
  Target: SCNA; (+) strand; PAM type: YTN; PAM sequence: TTT
ggtgtcgagtacccaggtat

SEQ ID NO: 67024 - DNA, 20 bp, Artificial Sequence
  Description of Artificial Sequence: Synthetic oligonucleotide
  Target: SCNA; (+) strand; PAM type: YTN; PAM sequence: TTG
gtgtcgagtacccaggtatc

SEQ ID NO: 67025 - DNA, 20 bp, Artificial Sequence
  Description of Artificial Sequence: Synthetic oligonucleotide
  Target: SCNA; (+) strand; PAM type: YTN; PAM sequence: CTT
atctttaaagtgaagacgta

SEQ ID NO: 67026 - DNA, 20 bp, Artificial Sequence
  Description of Artificial Sequence: Synthetic oligonucleotide
  Target: SCNA; (+) strand; PAM type: YTN; PAM sequence: TTA
tctttaaagtgaagacgtag

SEQ ID NO: 67027 - DNA, 20 bp, Artificial Sequence
  Description of Artificial Sequence: Synthetic oligonucleotide
  Target: SCNA; (+) strand; PAM type: YTN; PAM sequence: CTT
taaagtgaagacgtaggcag

SEQ ID NO: 67028 - DNA, 20 bp, Artificial Sequence
  Description of Artificial Sequence: Synthetic oligonucleotide
  Target: SCNA; (+) strand; PAM type: YTN; PAM sequence: TTT
aaagtgaagacgtaggcagc

SEQ ID NO: 67029 - DNA, 20 bp, Artificial Sequence
  Description of Artificial Sequence: Synthetic oligonucleotide
  Target: SCNA; (+) strand; PAM type: YTN; PAM sequence: TTA
aagtgaagacgtaggcagca

SEQ ID NO: 67030 - DNA, 20 bp, Artificial Sequence
  Description of Artificial Sequence: Synthetic oligonucleotide
  Target: SCNA; (+) strand; PAM type: YTN; PAM sequence: CTT
ttattagaacgtccactaga

SEQ ID NO: 67031 - DNA, 20 bp, Artificial Sequence
  Description of Artificial Sequence: Synthetic oligonucleotide
  Target: SCNA; (+) strand; PAM type: YTN; PAM sequence: TTT
tattagaacgtccactagat

SEQ ID NO: 67032 - DNA, 20 bp, Artificial Sequence
  Description of Artificial Sequence: Synthetic oligonucleotide
  Target: SCNA; (+) strand; PAM type: YTN; PAM sequence: TTT
attagaacgtccactagatc

SEQ ID NO: 67033 - DNA, 20 bp, Artificial Sequence
  Description of Artificial Sequence: Synthetic oligonucleotide
  Target: SCNA; (+) strand; PAM type: YTN; PAM sequence: TTA
ttagaacgtccactagatca

SEQ ID NO: 67034 - DNA, 20 bp, Artificial Sequence
  Description of Artificial Sequence: Synthetic oligonucleotide
  Target: SCNA; (+) strand; PAM type: YTN; PAM sequence: TTA
gaacgtccactagatcagaa

SEQ ID NO: 67035 - DNA, 20 bp, Artificial Sequence
  Description of Artificial Sequence: Synthetic oligonucleotide
  Target: SCNA; (+) strand; PAM type: YTN; PAM sequence: CTA
gatcagaatgaccagtgcac

SEQ ID NO: 67036 - DNA, 20 bp, Artificial Sequence
  Description of Artificial Sequence: Synthetic oligonucleotide
  Target: SCNA; (+) strand; PAM type: YTN; PAM sequence: TTT
attttcctagcagactcacc

SEQ ID NO: 67037 - DNA, 20 bp, Artificial Sequence
  Description of Artificial Sequence: Synthetic oligonucleotide
  Target: SCNA; (+) strand; PAM type: YTN; PAM sequence: TTA
ttttcctagcagactcacca

SEQ ID NO: 67038 - DNA, 20 bp, Artificial Sequence
  Description of Artificial Sequence: Synthetic oligonucleotide
  Target: SCNA; (+) strand; PAM type: YTN; PAM sequence: TTT
tcctagcagactcaccaaat

SEQ ID NO: 67039 - DNA, 20 bp, Artificial Sequence
  Description of Artificial Sequence: Synthetic oligonucleotide
  Target: SCNA; (+) strand; PAM type: YTN; PAM sequence: TTT
cctagcagactcaccaaatt

SEQ ID NO: 67040 - DNA, 20 bp, Artificial Sequence
  Description of Artificial Sequence: Synthetic oligonucleotide
  Target: SCNA; (+) strand; PAM type: YTN; PAM sequence: TTC
ctagcagactcaccaaattt

SEQ ID NO: 67041 - DNA, 20 bp, Artificial Sequence
  Description of Artificial Sequence: Synthetic oligonucleotide
  Target: SCNA; (+) strand; PAM type: YTN; PAM sequence: CTA
gcagactcaccaaatttaac

SEQ ID NO: 67042 - DNA, 20 bp, Artificial Sequence
  Description of Artificial Sequence: Synthetic oligonucleotide
  Target: SCNA; (+) strand; PAM type: YTN; PAM sequence: CTC
accaaatttaacctggaaga

SEQ ID NO: 67043 - DNA, 20 bp, Artificial Sequence
  Description of Artificial Sequence: Synthetic oligonucleotide
  Target: SCNA; (+) strand; PAM type: YTN; PAM sequence: TTT
aacctggaagagaatgtctg

SEQ ID NO: 67044 - DNA, 20 bp, Artificial Sequence
  Description of Artificial Sequence: Synthetic oligonucleotide
  Target: SCNA; (+) strand; PAM type: YTN; PAM sequence: TTA
acctggaagagaatgtctga

SEQ ID NO: 67045 - DNA, 20 bp, Artificial Sequence
  Description of Artificial Sequence: Synthetic oligonucleotide
  Target: SCNA; (+) strand; PAM type: YTN; PAM sequence: CTG
gaagagaatgtctgactctg

SEQ ID NO: 67046 - DNA, 20 bp, Artificial Sequence
  Description of Artificial Sequence: Synthetic oligonucleotide
  Target: SCNA; (+) strand; PAM type: YTN; PAM sequence: CTG
actctgttgaattttcttag

SEQ ID NO: 67047 - DNA, 20 bp, Artificial Sequence
  Description of Artificial Sequence: Synthetic oligonucleotide
  Target: SCNA; (+) strand; PAM type: YTN; PAM sequence: CTC
tgttgaattttcttaggcaa

SEQ ID NO: 67048 - DNA, 20 bp, Artificial Sequence
  Description of Artificial Sequence: Synthetic oligonucleotide
  Target: SCNA; (+) strand; PAM type: YTN; PAM sequence: CTG
ttgaattttcttaggcaaat

SEQ ID NO: 67049 - DNA, 20 bp, Artificial Sequence
  Description of Artificial Sequence: Synthetic oligonucleotide
  Target: SCNA; (+) strand; PAM type: YTN; PAM sequence: TTG
aattttcttaggcaaataca

SEQ ID NO: 67050 - DNA, 20 bp, Artificial Sequence
  Description of Artificial Sequence: Synthetic oligonucleotide
  Target: SCNA; (+) strand; PAM type: YTN; PAM sequence: TTT
tcttaggcaaatacaatatt

SEQ ID NO: 67051 - DNA, 20 bp, Artificial Sequence
  Description of Artificial Sequence: Synthetic oligonucleotide
  Target: SCNA; (+) strand; PAM type: YTN; PAM sequence: TTT
cttaggcaaatacaatattt

SEQ ID NO: 67052 - DNA, 20 bp, Artificial Sequence
  Description of Artificial Sequence: Synthetic oligonucleotide
  Target: SCNA; (+) strand; PAM type: YTN; PAM sequence: TTC
ttaggcaaatacaatatttg

SEQ ID NO: 67053 - DNA, 20 bp, Artificial Sequence
  Description of Artificial Sequence: Synthetic oligonucleotide
  Target: SCNA; (+) strand; PAM type: YTN; PAM sequence: CTT
aggcaaatacaatatttgaa

SEQ ID NO: 67054 - DNA, 20 bp, Artificial Sequence
  Description of Artificial Sequence: Synthetic oligonucleotide
  Target: SCNA; (+) strand; PAM type: YTN; PAM sequence: TTA
ggcaaatacaatatttgaaa

SEQ ID NO: 67055 - DNA, 20 bp, Artificial Sequence
  Description of Artificial Sequence: Synthetic oligonucleotide
  Target: SCNA; (+) strand; PAM type: YTN; PAM sequence: TTT
gaaagtcactgaatgtttca

SEQ ID NO: 67056 - DNA, 20 bp, Artificial Sequence
  Description of Artificial Sequence: Synthetic oligonucleotide
  Target: SCNA; (+) strand; PAM type: YTN; PAM sequence: TTG
aaagtcactgaatgtttcaa

SEQ ID NO: 67057 - DNA, 20 bp, Artificial Sequence
  Description of Artificial Sequence: Synthetic oligonucleotide
  Target: SCNA; (+) strand; PAM type: YTN; PAM sequence: CTG
aatgtttcaaacaaaatata

SEQ ID NO: 67058 - DNA, 20 bp, Artificial Sequence
  Description of Artificial Sequence: Synthetic oligonucleotide
  Target: SCNA; (+) strand; PAM type: YTN; PAM sequence: TTT
caaacaaaatataacaacat

SEQ ID NO: 67059 - DNA, 20 bp, Artificial Sequence
  Description of Artificial Sequence: Synthetic oligonucleotide
  Target: SCNA; (+) strand; PAM type: YTN; PAM sequence: TTC
aaacaaaatataacaacatt

SEQ ID NO: 67060 - DNA, 20 bp, Artificial Sequence
  Description of Artificial Sequence: Synthetic oligonucleotide
  Target: SCNA; (+) strand; PAM type: YTN; PAM sequence: TTC
agataacagaactgtgttat

SEQ ID NO: 67061 - DNA, 20 bp, Artificial Sequence
  Description of Artificial Sequence: Synthetic oligonucleotide
  Target: SCNA; (+) strand; PAM type: YTN; PAM sequence: CTG
tgttattgttctcatgtgtt

SEQ ID NO: 67062 - DNA, 20 bp, Artificial Sequence
  Description of Artificial Sequence: Synthetic oligonucleotide
  Target: SCNA; (+) strand; PAM type: YTN; PAM sequence: TTA
ttgttctcatgtgtttatgc

SEQ ID NO: 67063 - DNA, 20 bp, Artificial Sequence
  Description of Artificial Sequence: Synthetic oligonucleotide
  Target: SCNA; (+) strand; PAM type: YTN; PAM sequence: TTG
ttctcatgtgtttatgccca

SEQ ID NO: 67064 - DNA, 20 bp, Artificial Sequence
  Description of Artificial Sequence: Synthetic oligonucleotide
  Target: SCNA; (+) strand; PAM type: YTN; PAM sequence: TTC
tcatgtgtttatgcccagaa

SEQ ID NO: 67065 - DNA, 20 bp, Artificial Sequence
  Description of Artificial Sequence: Synthetic oligonucleotide
  Target: SCNA; (+) strand; PAM type: YTN; PAM sequence: CTC
atgtgtttatgcccagaaaa

SEQ ID NO: 67066 - DNA, 20 bp, Artificial Sequence
  Description of Artificial Sequence: Synthetic oligonucleotide
  Target: SCNA; (+) strand; PAM type: YTN; PAM sequence: TTT
atgcccagaaaataagcaga

SEQ ID NO: 67067 - DNA, 20 bp, Artificial Sequence
  Description of Artificial Sequence: Synthetic oligonucleotide
  Target: SCNA; (+) strand; PAM type: YTN; PAM sequence: TTA
tgcccagaaaataagcagac

SEQ ID NO: 67068 - DNA, 20 bp, Artificial Sequence
  Description of Artificial Sequence: Synthetic oligonucleotide
  Target: SCNA; (+) strand; PAM type: YTN; PAM sequence: CTG
gagcttctctaagattaaaa

SEQ ID NO: 67069 - DNA, 20 bp, Artificial Sequence
  Description of Artificial Sequence: Synthetic oligonucleotide
  Target: SCNA; (+) strand; PAM type: YTN; PAM sequence: CTT
ctctaagattaaaagtcaaa

SEQ ID NO: 67070 - DNA, 20 bp, Artificial Sequence
  Description of Artificial Sequence: Synthetic oligonucleotide
  Target: SCNA; (+) strand; PAM type: YTN; PAM sequence: TTC
tctaagattaaaagtcaaaa

SEQ ID NO: 67071 - DNA, 20 bp, Artificial Sequence
  Description of Artificial Sequence: Synthetic oligonucleotide
  Target: SCNA; (+) strand; PAM type: YTN; PAM sequence: CTC
taagattaaaagtcaaaaca

SEQ ID NO: 67072 - DNA, 20 bp, Artificial Sequence
  Description of Artificial Sequence: Synthetic oligonucleotide
  Target: SCNA; (+) strand; PAM type: YTN; PAM sequence: CTA
agattaaaagtcaaaacagt

SEQ ID NO: 67073 - DNA, 20 bp, Artificial Sequence
  Description of Artificial Sequence: Synthetic oligonucleotide
  Target: SCNA; (+) strand; PAM type: YTN; PAM sequence: TTA
aaagtcaaaacagtattaca

SEQ ID NO: 67074 - DNA, 20 bp, Artificial Sequence
  Description of Artificial Sequence: Synthetic oligonucleotide
  Target: SCNA; (+) strand; PAM type: YTN; PAM sequence: TTA
caattccagcccagatttga

SEQ ID NO: 67075 - DNA, 20 bp, Artificial Sequence
  Description of Artificial Sequence: Synthetic oligonucleotide
  Target: SCNA; (+) strand; PAM type: YTN; PAM sequence: TTC
cagcccagatttgactatct

SEQ ID NO: 67076 - DNA, 20 bp, Artificial Sequence
  Description of Artificial Sequence: Synthetic oligonucleotide
  Target: SCNA; (+) strand; PAM type: YTN; PAM sequence: TTT
gactatctaatcatttaaac

SEQ ID NO: 67077 - DNA, 20 bp, Artificial Sequence
  Description of Artificial Sequence: Synthetic oligonucleotide
  Target: SCNA; (+) strand; PAM type: YTN; PAM sequence: TTG
actatctaatcatttaaacc

SEQ ID NO: 67078 - DNA, 20 bp, Artificial Sequence
  Description of Artificial Sequence: Synthetic oligonucleotide
  Target: SCNA; (+) strand; PAM type: YTN; PAM sequence: CTA
tctaatcatttaaaccttag

SEQ ID NO: 67079 - DNA, 20 bp, Artificial Sequence
  Description of Artificial Sequence: Synthetic oligonucleotide
  Target: SCNA; (+) strand; PAM type: YTN; PAM sequence: CTA
atcatttaaaccttagtatc

SEQ ID NO: 67080 - DNA, 20 bp, Artificial Sequence
  Description of Artificial Sequence: Synthetic oligonucleotide
  Target: SCNA; (+) strand; PAM type: YTN; PAM sequence: TTT
aaaccttagtatcatcatca

SEQ ID NO: 67081 - DNA, 20 bp, Artificial Sequence
  Description of Artificial Sequence: Synthetic oligonucleotide
  Target: SCNA; (+) strand; PAM type: YTN; PAM sequence: TTA
aaccttagtatcatcatcat

SEQ ID NO: 67082 - DNA, 20 bp, Artificial Sequence
  Description of Artificial Sequence: Synthetic oligonucleotide
  Target: SCNA; (+) strand; PAM type: YTN; PAM sequence: CTT
agtatcatcatcatcaccac

SEQ ID NO: 67083 - DNA, 20 bp, Artificial Sequence
  Description of Artificial Sequence: Synthetic oligonucleotide
  Target: SCNA; (+) strand; PAM type: YTN; PAM sequence: TTA
gtatcatcatcatcaccacc

SEQ ID NO: 67084 - DNA, 20 bp, Artificial Sequence
  Description of Artificial Sequence: Synthetic oligonucleotide
  Target: SCNA; (+) strand; PAM type: YTN; PAM sequence: CTG
catactcattaagttaaaaa

SEQ ID NO: 67085 - DNA, 20 bp, Artificial Sequence
  Description of Artificial Sequence: Synthetic oligonucleotide
  Target: SCNA; (+) strand; PAM type: YTN; PAM sequence: CTC
attaagttaaaaaaaattcc

SEQ ID NO: 67086 - DNA, 20 bp, Artificial Sequence
  Description of Artificial Sequence: Synthetic oligonucleotide
  Target: SCNA; (+) strand; PAM type: YTN; PAM sequence: TTA
agttaaaaaaaattccttta

SEQ ID NO: 67087 - DNA, 20 bp, Artificial Sequence
  Description of Artificial Sequence: Synthetic oligonucleotide
  Target: SCNA; (+) strand; PAM type: YTN; PAM sequence: TTA
aaaaaaattcctttaaaata

SEQ ID NO: 67088 - DNA, 20 bp, Artificial Sequence
  Description of Artificial Sequence: Synthetic oligonucleotide
  Target: SCNA; (+) strand; PAM type: YTN; PAM sequence: TTC
ctttaaaataaatggaaaag

SEQ ID NO: 67089 - DNA, 20 bp, Artificial Sequence
  Description of Artificial Sequence: Synthetic oligonucleotide
  Target: SCNA; (+) strand; PAM type: YTN; PAM sequence: CTT
taaaataaatggaaaagaaa

SEQ ID NO: 67090 - DNA, 20 bp, Artificial Sequence
  Description of Artificial Sequence: Synthetic oligonucleotide
  Target: SCNA; (+) strand; PAM type: YTN; PAM sequence: TTT
aaaataaatggaaaagaaaa

SEQ ID NO: 67091 - DNA, 20 bp, Artificial Sequence
  Description of Artificial Sequence: Synthetic oligonucleotide
  Target: SCNA; (+) strand; PAM type: YTN; PAM sequence: TTA
aaataaatggaaaagaaaat

SEQ ID NO: 67092 - DNA, 20 bp, Artificial Sequence
  Description of Artificial Sequence: Synthetic oligonucleotide
  Target: SCNA; (+) strand; PAM type: YTN; PAM sequence: CTG
tgtaaatagattaaagcgat

SEQ ID NO: 67093 - DNA, 20 bp, Artificial Sequence
  Description of Artificial Sequence: Synthetic oligonucleotide
  Target: SCNA; (+) strand; PAM type: YTN; PAM sequence: TTA
aagcgattcctgctcaccac

SEQ ID NO: 67094 - DNA, 20 bp, Artificial Sequence
  Description of Artificial Sequence: Synthetic oligonucleotide
  Target: SCNA; (+) strand; PAM type: YTN; PAM sequence: TTC
ctgctcaccactccctttct

SEQ ID NO: 67095 - DNA, 20 bp, Artificial Sequence
  Description of Artificial Sequence: Synthetic oligonucleotide
  Target: SCNA; (+) strand; PAM type: YTN; PAM sequence: CTG
ctcaccactccctttctccc

SEQ ID NO: 67096 - DNA, 20 bp, Artificial Sequence
  Description of Artificial Sequence: Synthetic oligonucleotide
  Target: SCNA; (+) strand; PAM type: YTN; PAM sequence: CTC
accactccctttctccctgg

SEQ ID NO: 67097 - DNA, 20 bp, Artificial Sequence
  Description of Artificial Sequence: Synthetic oligonucleotide
  Target: SCNA; (+) strand; PAM type: YTN; PAM sequence: CTC
cctttctccctggggcagga

SEQ ID NO: 67098 - DNA, 20 bp, Artificial Sequence
  Description of Artificial Sequence: Synthetic oligonucleotide
  Target: SCNA; (+) strand; PAM type: YTN; PAM sequence: CTT
tctccctggggcaggagact

SEQ ID NO: 67099 - DNA, 20 bp, Artificial Sequence
  Description of Artificial Sequence: Synthetic oligonucleotide
  Target: SCNA; (+) strand; PAM type: YTN; PAM sequence: TTT
ctccctggggcaggagactt

SEQ ID NO: 67100 - DNA, 20 bp, Artificial Sequence
  Description of Artificial Sequence: Synthetic oligonucleotide
  Target: SCNA; (+) strand; PAM type: YTN; PAM sequence: TTC
tccctggggcaggagacttg

SEQ ID NO: 67101 - DNA, 20 bp, Artificial Sequence
  Description of Artificial Sequence: Synthetic oligonucleotide
  Target: SCNA; (+) strand; PAM type: YTN; PAM sequence: CTC
cctggggcaggagacttgag

SEQ ID NO: 67102 - DNA, 20 bp, Artificial Sequence
  Description of Artificial Sequence: Synthetic oligonucleotide
  Target: SCNA; (+) strand; PAM type: YTN; PAM sequence: CTG
gggcaggagacttgagcaca

SEQ ID NO: 67103 - DNA, 20 bp, Artificial Sequence
  Description of Artificial Sequence: Synthetic oligonucleotide
  Target: SCNA; (+) strand; PAM type: YTN; PAM sequence: CTT
gagcacatcaaaggaactca

SEQ ID NO: 67104 - DNA, 20 bp, Artificial Sequence
  Description of Artificial Sequence: Synthetic oligonucleotide
  Target: SCNA; (+) strand; PAM type: YTN; PAM sequence: TTG
agcacatcaaaggaactcat

SEQ ID NO: 67105 - DNA, 20 bp, Artificial Sequence
  Description of Artificial Sequence: Synthetic oligonucleotide
  Target: SCNA; (+) strand; PAM type: YTN; PAM sequence: CTC
atagcgttcttggagtaagt

SEQ ID NO: 67106 - DNA, 20 bp, Artificial Sequence
  Description of Artificial Sequence: Synthetic oligonucleotide
  Target: SCNA; (+) strand; PAM type: YTN; PAM sequence: TTC
ttggagtaagtgtgaaagcc

SEQ ID NO: 67107 - DNA, 20 bp, Artificial Sequence
  Description of Artificial Sequence: Synthetic oligonucleotide
  Target: SCNA; (+) strand; PAM type: YTN; PAM sequence: CTT
ggagtaagtgtgaaagccac

SEQ ID NO: 67108 - DNA, 20 bp, Artificial Sequence
  Description of Artificial Sequence: Synthetic oligonucleotide
  Target: SCNA; (+) strand; PAM type: YTN; PAM sequence: TTG
gagtaagtgtgaaagccacc

SEQ ID NO: 67109 - DNA, 20 bp, Artificial Sequence
  Description of Artificial Sequence: Synthetic oligonucleotide
  Target: SCNA; (+) strand; PAM type: YTN; PAM sequence: CTA
aatgaatgcttacatctaaa

SEQ ID NO: 67110 - DNA, 20 bp, Artificial Sequence
  Description of Artificial Sequence: Synthetic oligonucleotide
  Target: SCNA; (+) strand; PAM type: YTN; PAM sequence: CTT
acatctaaagaaagatgtaa

SEQ ID NO: 67111 - DNA, 20 bp, Artificial Sequence
  Description of Artificial Sequence: Synthetic oligonucleotide
  Target: SCNA; (+) strand; PAM type: YTN; PAM sequence: TTA
catctaaagaaagatgtaaa

SEQ ID NO: 67112 - DNA, 20 bp, Artificial Sequence
  Description of Artificial Sequence: Synthetic oligonucleotide
  Target: SCNA; (+) strand; PAM type: YTN; PAM sequence: CTA
aagaaagatgtaaacatatt

SEQ ID NO: 67113 - DNA, 20 bp, Artificial Sequence
  Description of Artificial Sequence: Synthetic oligonucleotide
  Target: SCNA; (+) strand; PAM type: YTN; PAM sequence: TTA
cattaaaaggtggcatgaca

SEQ ID NO: 67114 - DNA, 20 bp, Artificial Sequence
  Description of Artificial Sequence: Synthetic oligonucleotide
  Target: SCNA; (+) strand; PAM type: YTN; PAM sequence: TTA
aaaggtggcatgacataatg

SEQ ID NO: 67115 - DNA, 20 bp, Artificial Sequence
  Description of Artificial Sequence: Synthetic oligonucleotide
  Target: SCNA; (+) strand; PAM type: YTN; PAM sequence: CTG
attaagaaatgtgaggcgac

SEQ ID NO: 67116 - DNA, 20 bp, Artificial Sequence
  Description of Artificial Sequence: Synthetic oligonucleotide
  Target: SCNA; (+) strand; PAM type: YTN; PAM sequence: TTA
agaaatgtgaggcgactttc

SEQ ID NO: 67117 - DNA, 20 bp, Artificial Sequence
  Description of Artificial Sequence: Synthetic oligonucleotide
  Target: SCNA; (+) strand; PAM type: YTN; PAM sequence: CTT
tcatgtgccactgataaatc

SEQ ID NO: 67118 - DNA, 20 bp, Artificial Sequence
  Description of Artificial Sequence: Synthetic oligonucleotide
  Target: SCNA; (+) strand; PAM type: YTN; PAM sequence: TTT
catgtgccactgataaatca

SEQ ID NO: 67119 - DNA, 20 bp, Artificial Sequence
  Description of Artificial Sequence: Synthetic oligonucleotide
  Target: SCNA; (+) strand; PAM type: YTN; PAM sequence: TTC
atgtgccactgataaatcat

SEQ ID NO: 67120 - DNA, 20 bp, Artificial Sequence
  Description of Artificial Sequence: Synthetic oligonucleotide
  Target: SCNA; (+) strand; PAM type: YTN; PAM sequence: CTG
ataaatcattataatttgac

SEQ ID NO: 67121 - DNA, 20 bp, Artificial Sequence
  Description of Artificial Sequence: Synthetic oligonucleotide
  Target: SCNA; (+) strand; PAM type: YTN; PAM sequence: TTA
taatttgacatagtagataa

SEQ ID NO: 67122 - DNA, 20 bp, Artificial Sequence
  Description of Artificial Sequence: Synthetic oligonucleotide
  Target: SCNA; (+) strand; PAM type: YTN; PAM sequence: TTT
gacatagtagataatgcccc

SEQ ID NO: 67123 - DNA, 20 bp, Artificial Sequence
  Description of Artificial Sequence: Synthetic oligonucleotide
  Target: SCNA; (+) strand; PAM type: YTN; PAM sequence: TTG
acatagtagataatgcccct

SEQ ID NO: 67124 - DNA, 20 bp, Artificial Sequence
  Description of Artificial Sequence: Synthetic oligonucleotide
  Target: SCNA; (+) strand; PAM type: YTN; PAM sequence: CTA
tatttcatctgcatacctgg

SEQ ID NO: 67125 - DNA, 20 bp, Artificial Sequence
  Description of Artificial Sequence: Synthetic oligonucleotide
  Target: SCNA; (+) strand; PAM type: YTN; PAM sequence: TTT
catctgcatacctggaaaat

SEQ ID NO: 67126 - DNA, 20 bp, Artificial Sequence
  Description of Artificial Sequence: Synthetic oligonucleotide
  Target: SCNA; (+) strand; PAM type: YTN; PAM sequence: TTC
atctgcatacctggaaaatg

SEQ ID NO: 67127 - DNA, 20 bp, Artificial Sequence
  Description of Artificial Sequence: Synthetic oligonucleotide
  Target: SCNA; (+) strand; PAM type: YTN; PAM sequence: CTG
catacctggaaaatgaggac

SEQ ID NO: 67128 - DNA, 20 bp, Artificial Sequence
  Description of Artificial Sequence: Synthetic oligonucleotide
  Target: SCNA; (+) strand; PAM type: YTN; PAM sequence: CTG
gaaaatgaggactttcaaaa

SEQ ID NO: 67129 - DNA, 20 bp, Artificial Sequence
  Description of Artificial Sequence: Synthetic oligonucleotide
  Target: SCNA; (+) strand; PAM type: YTN; PAM sequence: CTT
tcaaaacatattcctgccag

SEQ ID NO: 67130 - DNA, 20 bp, Artificial Sequence
  Description of Artificial Sequence: Synthetic oligonucleotide
  Target: SCNA; (+) strand; PAM type: YTN; PAM sequence: TTT
caaaacatattcctgccagt

SEQ ID NO: 67131 - DNA, 20 bp, Artificial Sequence
  Description of Artificial Sequence: Synthetic oligonucleotide
  Target: SCNA; (+) strand; PAM type: YTN; PAM sequence: TTC
aaaacatattcctgccagtt

SEQ ID NO: 67132 - DNA, 20 bp, Artificial Sequence
  Description of Artificial Sequence: Synthetic oligonucleotide
  Target: SCNA; (+) strand; PAM type: YTN; PAM sequence: TTC
ctgccagttacagtcaggta

SEQ ID NO: 67133 - DNA, 20 bp, Artificial Sequence
  Description of Artificial Sequence: Synthetic oligonucleotide
  Target: SCNA; (+) strand; PAM type: YTN; PAM sequence: CTG
ccagttacagtcaggtattg

SEQ ID NO: 67134 - DNA, 20 bp, Artificial Sequence
  Description of Artificial Sequence: Synthetic oligonucleotide
  Target: SCNA; (+) strand; PAM type: YTN; PAM sequence: TTA
cagtcaggtattgcaaaaca

SEQ ID NO: 67135 - DNA, 20 bp, Artificial Sequence
  Description of Artificial Sequence: Synthetic oligonucleotide
  Target: SCNA; (+) strand; PAM type: YTN; PAM sequence: TTG
caaaacaagcatttagtgag

SEQ ID NO: 67136 - DNA, 20 bp, Artificial Sequence
  Description of Artificial Sequence: Synthetic oligonucleotide
  Target: SCNA; (+) strand; PAM type: YTN; PAM sequence: TTT
agtgagcatctaaactgaag

SEQ ID NO: 67137 - DNA, 20 bp, Artificial Sequence
  Description of Artificial Sequence: Synthetic oligonucleotide
  Target: SCNA; (+) strand; PAM type: YTN; PAM sequence: TTA
gtgagcatctaaactgaagc

SEQ ID NO: 67138 - DNA, 20 bp, Artificial Sequence
  Description of Artificial Sequence: Synthetic oligonucleotide
  Target: SCNA; (+) strand; PAM type: YTN; PAM sequence: CTA
aactgaagcttagaacttca

SEQ ID NO: 67139 - DNA, 20 bp, Artificial Sequence
  Description of Artificial Sequence: Synthetic oligonucleotide
  Target: SCNA; (+) strand; PAM type: YTN; PAM sequence: CTG
aagcttagaacttcagtttt

SEQ ID NO: 67140 - DNA, 20 bp, Artificial Sequence
  Description of Artificial Sequence: Synthetic oligonucleotide
  Target: SCNA; (+) strand; PAM type: YTN; PAM sequence: CTT
agaacttcagttttgtggcg

SEQ ID NO: 67141 - DNA, 20 bp, Artificial Sequence
  Description of Artificial Sequence: Synthetic oligonucleotide
  Target: SCNA; (+) strand; PAM type: YTN; PAM sequence: TTA
gaacttcagttttgtggcgg

SEQ ID NO: 67142 - DNA, 20 bp, Artificial Sequence
  Description of Artificial Sequence: Synthetic oligonucleotide
  Target: SCNA; (+) strand; PAM type: YTN; PAM sequence: CTT
cagttttgtggcggggcgcg

SEQ ID NO: 67143 - DNA, 20 bp, Artificial Sequence
  Description of Artificial Sequence: Synthetic oligonucleotide
  Target: SCNA; (+) strand; PAM type: YTN; PAM sequence: TTC
agttttgtggcggggcgcgg

SEQ ID NO: 67144 - DNA, 20 bp, Artificial Sequence
  Description of Artificial Sequence: Synthetic oligonucleotide
  Target: SCNA; (+) strand; PAM type: YTN; PAM sequence: TTT
tgtggcggggcgcggtggct

SEQ ID NO: 67145 - DNA, 20 bp, Artificial Sequence
  Description of Artificial Sequence: Synthetic oligonucleotide
  Target: SCNA; (+) strand; PAM type: YTN; PAM sequence: TTT
gtggcggggcgcggtggctc

SEQ ID NO: 67146 - DNA, 20 bp, Artificial Sequence
  Description of Artificial Sequence: Synthetic oligonucleotide
  Target: SCNA; (+) strand; PAM type: YTN; PAM sequence: TTG
tggcggggcgcggtggctca

SEQ ID NO: 67147 - DNA, 20 bp, Artificial Sequence
  Description of Artificial Sequence: Synthetic oligonucleotide
  Target: SCNA; (+) strand; PAM type: YTN; PAM sequence: CTC
acgcctgtaatcccagcacc

SEQ ID NO: 67148 - DNA, 20 bp, Artificial Sequence
  Description of Artificial Sequence: Synthetic oligonucleotide
  Target: SCNA; (+) strand; PAM type: YTN; PAM sequence: CTG
taatcccagcaccttgggag

SEQ ID NO: 67149 - DNA, 20 bp, Artificial Sequence
  Description of Artificial Sequence: Synthetic oligonucleotide
  Target: SCNA; (+) strand; PAM type: YTN; PAM sequence: CTT
gggaggccaagacaggcgga

SEQ ID NO: 67150 - DNA, 20 bp, Artificial Sequence
  Description of Artificial Sequence: Synthetic oligonucleotide
  Target: SCNA; (+) strand; PAM type: YTN; PAM sequence: TTG
ggaggccaagacaggcggat

SEQ ID NO: 67151 - DNA, 20 bp, Artificial Sequence
  Description of Artificial Sequence: Synthetic oligonucleotide
  Target: SCNA; (+) strand; PAM type: YTN; PAM sequence: CTT
gaggtcaggagtttgggacc

SEQ ID NO: 67152 - DNA, 20 bp, Artificial Sequence
  Description of Artificial Sequence: Synthetic oligonucleotide
  Target: SCNA; (+) strand; PAM type: YTN; PAM sequence: TTG
aggtcaggagtttgggacca

SEQ ID NO: 67153 - DNA, 20 bp, Artificial Sequence
  Description of Artificial Sequence: Synthetic oligonucleotide
  Target: SCNA; (+) strand; PAM type: YTN; PAM sequence: TTT
gggaccagcctggcccacat

SEQ ID NO: 67154 - DNA, 20 bp, Artificial Sequence
  Description of Artificial Sequence: Synthetic oligonucleotide
  Target: SCNA; (+) strand; PAM type: YTN; PAM sequence: TTG
ggaccagcctggcccacatg

SEQ ID NO: 67155 - DNA, 20 bp, Artificial Sequence
  Description of Artificial Sequence: Synthetic oligonucleotide
  Target: SCNA; (+) strand; PAM type: YTN; PAM sequence: CTG
gcccacatggtgaaacccca

SEQ ID NO: 67156 - DNA, 20 bp, Artificial Sequence
  Description of Artificial Sequence: Synthetic oligonucleotide
  Target: SCNA; (+) strand; PAM type: YTN; PAM sequence: CTC
tactaaaaatacaaaaatta

SEQ ID NO: 67157 - DNA, 20 bp, Artificial Sequence
  Description of Artificial Sequence: Synthetic oligonucleotide
  Target: SCNA; (+) strand; PAM type: YTN; PAM sequence: CTA
ctaaaaatacaaaaattagc

SEQ ID NO: 67158 - DNA, 20 bp, Artificial Sequence
  Description of Artificial Sequence: Synthetic oligonucleotide
  Target: SCNA; (+) strand; PAM type: YTN; PAM sequence: CTA
aaaatacaaaaattagccag

SEQ ID NO: 67159 - DNA, 20 bp, Artificial Sequence
  Description of Artificial Sequence: Synthetic oligonucleotide
  Target: SCNA; (+) strand; PAM type: YTN; PAM sequence: TTA
gccaggcatggttgcacgca

SEQ ID NO: 67160 - DNA, 20 bp, Artificial Sequence
  Description of Artificial Sequence: Synthetic oligonucleotide
  Target: SCNA; (+) strand; PAM type: YTN; PAM sequence: TTG
cacgcacctgtagtcccagt

SEQ ID NO: 67161 - DNA, 20 bp, Artificial Sequence
  Description of Artificial Sequence: Synthetic oligonucleotide
  Target: SCNA; (+) strand; PAM type: YTN; PAM sequence: CTG
tagtcccagttactcaggtg

SEQ ID NO: 67162 - DNA, 20 bp, Artificial Sequence
  Description of Artificial Sequence: Synthetic oligonucleotide
  Target: SCNA; (+) strand; PAM type: YTN; PAM sequence: TTA
ctcaggtggctgaggcagaa

SEQ ID NO: 67163 - DNA, 20 bp, Artificial Sequence
  Description of Artificial Sequence: Synthetic oligonucleotide
  Target: SCNA; (+) strand; PAM type: YTN; PAM sequence: CTC
aggtggctgaggcagaagaa

SEQ ID NO: 67164 - DNA, 20 bp, Artificial Sequence
  Description of Artificial Sequence: Synthetic oligonucleotide
  Target: SCNA; (+) strand; PAM type: YTN; PAM sequence: CTG
aggcagaagaatcgcttgaa

SEQ ID NO: 67165 - DNA, 20 bp, Artificial Sequence
  Description of Artificial Sequence: Synthetic oligonucleotide
  Target: SCNA; (+) strand; PAM type: YTN; PAM sequence: CTT
gaacctgggtggtggagatt

SEQ ID NO: 67166 - DNA, 20 bp, Artificial Sequence
  Description of Artificial Sequence: Synthetic oligonucleotide
  Target: SCNA; (+) strand; PAM type: YTN; PAM sequence: TTG
aacctgggtggtggagattg

SEQ ID NO: 67167 - DNA, 20 bp, Artificial Sequence
  Description of Artificial Sequence: Synthetic oligonucleotide
  Target: SCNA; (+) strand; PAM type: YTN; PAM sequence: CTG
ggtggtggagattgcagtga

SEQ ID NO: 67168 - DNA, 20 bp, Artificial Sequence
  Description of Artificial Sequence: Synthetic oligonucleotide
  Target: SCNA; (+) strand; PAM type: YTN; PAM sequence: TTG
cagtgagctgagatcctgcc

SEQ ID NO: 67169 - DNA, 20 bp, Artificial Sequence
  Description of Artificial Sequence: Synthetic oligonucleotide
  Target: SCNA; (+) strand; PAM type: YTN; PAM sequence: CTG
agatcctgccactgcactcc

SEQ ID NO: 67170 - DNA, 20 bp, Artificial Sequence
  Description of Artificial Sequence: Synthetic oligonucleotide
  Target: SCNA; (+) strand; PAM type: YTN; PAM sequence: CTG
ccactgcactccagcctggg

SEQ ID NO: 67171 - DNA, 20 bp, Artificial Sequence
  Description of Artificial Sequence: Synthetic oligonucleotide
  Target: SCNA; (+) strand; PAM type: YTN; PAM sequence: CTG
cactccagcctgggcaagag

SEQ ID NO: 67172 - DNA, 20 bp, Artificial Sequence
  Description of Artificial Sequence: Synthetic oligonucleotide
  Target: SCNA; (+) strand; PAM type: YTN; PAM sequence: CTC
cagcctgggcaagagagtga

SEQ ID NO: 67173 - DNA, 20 bp, Artificial Sequence
  Description of Artificial Sequence: Synthetic oligonucleotide
  Target: SCNA; (+) strand; PAM type: YTN; PAM sequence: CTG
ggcaagagagtgagactcca

SEQ ID NO: 67174 - DNA, 20 bp, Artificial Sequence
  Description of Artificial Sequence: Synthetic oligonucleotide
  Target: SCNA; (+) strand; PAM type: YTN; PAM sequence: CTC
catctcaaaaaaataaagaa

SEQ ID NO: 67175 - DNA, 20 bp, Artificial Sequence
  Description of Artificial Sequence: Synthetic oligonucleotide
  Target: SCNA; (+) strand; PAM type: YTN; PAM sequence: CTC
aaaaaaataaagaactccaa

SEQ ID NO: 67176 - DNA, 20 bp, Artificial Sequence
  Description of Artificial Sequence: Synthetic oligonucleotide
  Target: SCNA; (+) strand; PAM type: YTN; PAM sequence: CTC
caattttattttcttcatgg

SEQ ID NO: 67177 - DNA, 20 bp, Artificial Sequence
  Description of Artificial Sequence: Synthetic oligonucleotide
  Target: SCNA; (+) strand; PAM type: YTN; PAM sequence: TTT
tattttcttcatggcatagc

SEQ ID NO: 67178 - DNA, 20 bp, Artificial Sequence
  Description of Artificial Sequence: Synthetic oligonucleotide
  Target: SCNA; (+) strand; PAM type: YTN; PAM sequence: TTT
attttcttcatggcatagca

SEQ ID NO: 67179 - DNA, 20 bp, Artificial Sequence
  Description of Artificial Sequence: Synthetic oligonucleotide
  Target: SCNA; (+) strand; PAM type: YTN; PAM sequence: TTA
ttttcttcatggcatagcat

SEQ ID NO: 67180 - DNA, 20 bp, Artificial Sequence
  Description of Artificial Sequence: Synthetic oligonucleotide
  Target: SCNA; (+) strand; PAM type: YTN; PAM sequence: TTT
tcttcatggcatagcataat

SEQ ID NO: 67181 - DNA, 20 bp, Artificial Sequence
  Description of Artificial Sequence: Synthetic oligonucleotide
  Target: SCNA; (+) strand; PAM type: YTN; PAM sequence: TTT
cttcatggcatagcataata

SEQ ID NO: 67182 - DNA, 20 bp, Artificial Sequence
  Description of Artificial Sequence: Synthetic oligonucleotide
  Target: SCNA; (+) strand; PAM type: YTN; PAM sequence: TTC
ttcatggcatagcataatag

SEQ ID NO: 67183 - DNA, 20 bp, Artificial Sequence
  Description of Artificial Sequence: Synthetic oligonucleotide
  Target: SCNA; (+) strand; PAM type: YTN; PAM sequence: CTT
catggcatagcataatagat

SEQ ID NO: 67184 - DNA, 20 bp, Artificial Sequence
  Description of Artificial Sequence: Synthetic oligonucleotide
  Target: SCNA; (+) strand; PAM type: YTN; PAM sequence: TTC
atggcatagcataatagatg

SEQ ID NO: 67185 - DNA, 20 bp, Artificial Sequence
  Description of Artificial Sequence: Synthetic oligonucleotide
  Target: SCNA; (+) strand; PAM type: YTN; PAM sequence: TTA
acaaattaatgaaacagatt

SEQ ID NO: 67186 - DNA, 20 bp, Artificial Sequence
  Description of Artificial Sequence: Synthetic oligonucleotide
  Target: SCNA; (+) strand; PAM type: YTN; PAM sequence: TTA
atgaaacagattgacatgtg

SEQ ID NO: 67187 - DNA, 20 bp, Artificial Sequence
  Description of Artificial Sequence: Synthetic oligonucleotide
  Target: SCNA; (+) strand; PAM type: YTN; PAM sequence: TTG
acatgtgttaattgcaatca

SEQ ID NO: 67188 - DNA, 20 bp, Artificial Sequence
  Description of Artificial Sequence: Synthetic oligonucleotide
  Target: SCNA; (+) strand; PAM type: YTN; PAM sequence: TTA
attgcaatcatatacagaac

SEQ ID NO: 67189 - DNA, 20 bp, Artificial Sequence
  Description of Artificial Sequence: Synthetic oligonucleotide
  Target: SCNA; (+) strand; PAM type: YTN; PAM sequence: TTG
caatcatatacagaacagaa

SEQ ID NO: 67190 - DNA, 20 bp, Artificial Sequence
  Description of Artificial Sequence: Synthetic oligonucleotide
  Target: SCNA; (+) strand; PAM type: YTN; PAM sequence: TTT
ccataaaatatttaacctgc

SEQ ID NO: 67191 - DNA, 20 bp, Artificial Sequence
  Description of Artificial Sequence: Synthetic oligonucleotide
  Target: SCNA; (+) strand; PAM type: YTN; PAM sequence: TTC
cataaaatatttaacctgcc

SEQ ID NO: 67192 - DNA, 20 bp, Artificial Sequence
  Description of Artificial Sequence: Synthetic oligonucleotide
  Target: SCNA; (+) strand; PAM type: YTN; PAM sequence: TTT
aacctgcctgttacttcccc

SEQ ID NO: 67193 - DNA, 20 bp, Artificial Sequence
  Description of Artificial Sequence: Synthetic oligonucleotide
  Target: SCNA; (+) strand; PAM type: YTN; PAM sequence: TTA
acctgcctgttacttcccct

SEQ ID NO: 67194 - DNA, 20 bp, Artificial Sequence
  Description of Artificial Sequence: Synthetic oligonucleotide
  Target: SCNA; (+) strand; PAM type: YTN; PAM sequence: CTG
cctgttacttcccctaaatc

SEQ ID NO: 67195 - DNA, 20 bp, Artificial Sequence
  Description of Artificial Sequence: Synthetic oligonucleotide
  Target: SCNA; (+) strand; PAM type: YTN; PAM sequence: CTG
ttacttcccctaaatctctc

SEQ ID NO: 67196 - DNA, 20 bp, Artificial Sequence
  Description of Artificial Sequence: Synthetic oligonucleotide
  Target: SCNA; (+) strand; PAM type: YTN; PAM sequence: TTA
cttcccctaaatctctctgt

SEQ ID NO: 67197 - DNA, 20 bp, Artificial Sequence
  Description of Artificial Sequence: Synthetic oligonucleotide
  Target: SCNA; (+) strand; PAM type: YTN; PAM sequence: CTT
cccctaaatctctctgtagc

SEQ ID NO: 67198 - DNA, 20 bp, Artificial Sequence
  Description of Artificial Sequence: Synthetic oligonucleotide
  Target: SCNA; (+) strand; PAM type: YTN; PAM sequence: TTC
ccctaaatctctctgtagct

SEQ ID NO: 67199 - DNA, 20 bp, Artificial Sequence
  Description of Artificial Sequence: Synthetic oligonucleotide
  Target: SCNA; (+) strand; PAM type: YTN; PAM sequence: CTA
aatctctctgtagctgatgc

SEQ ID NO: 67200 - DNA, 20 bp, Artificial Sequence
  Description of Artificial Sequence: Synthetic oligonucleotide
  Target: SCNA; (+) strand; PAM type: YTN; PAM sequence: CTC
tctgtagctgatgccccaat

SEQ ID NO: 67201 - DNA, 20 bp, Artificial Sequence
  Description of Artificial Sequence: Synthetic oligonucleotide
  Target: SCNA; (+) strand; PAM type: YTN; PAM sequence: CTC
tgtagctgatgccccaattt

SEQ ID NO: 67202 - DNA, 20 bp, Artificial Sequence
  Description of Artificial Sequence: Synthetic oligonucleotide
  Target: SCNA; (+) strand; PAM type: YTN; PAM sequence: CTG
tagctgatgccccaatttca

SEQ ID NO: 67203 - DNA, 20 bp, Artificial Sequence
  Description of Artificial Sequence: Synthetic oligonucleotide
  Target: SCNA; (+) strand; PAM type: YTN; PAM sequence: CTG
atgccccaatttcactatta

SEQ ID NO: 67204 - DNA, 20 bp, Artificial Sequence
  Description of Artificial Sequence: Synthetic oligonucleotide
  Target: SCNA; (+) strand; PAM type: YTN; PAM sequence: TTT
cactattagctcttcagact

SEQ ID NO: 67205 - DNA, 20 bp, Artificial Sequence
  Description of Artificial Sequence: Synthetic oligonucleotide
  Target: SCNA; (+) strand; PAM type: YTN; PAM sequence: TTC
actattagctcttcagactt

SEQ ID NO: 67206 - DNA, 20 bp, Artificial Sequence
  Description of Artificial Sequence: Synthetic oligonucleotide
  Target: SCNA; (+) strand; PAM type: YTN; PAM sequence: CTA
ttagctcttcagacttggat

SEQ ID NO: 67207 - DNA, 20 bp, Artificial Sequence
  Description of Artificial Sequence: Synthetic oligonucleotide
  Target: SCNA; (+) strand; PAM type: YTN; PAM sequence: TTA
gctcttcagacttggatgtt

SEQ ID NO: 67208 - DNA, 20 bp, Artificial Sequence
  Description of Artificial Sequence: Synthetic oligonucleotide
  Target: SCNA; (+) strand; PAM type: YTN; PAM sequence: CTC
ttcagacttggatgttaagc

SEQ ID NO: 67209 - DNA, 20 bp, Artificial Sequence
  Description of Artificial Sequence: Synthetic oligonucleotide
  Target: SCNA; (+) strand; PAM type: YTN; PAM sequence: CTT
cagacttggatgttaagcac

SEQ ID NO: 67210 - DNA, 20 bp, Artificial Sequence
  Description of Artificial Sequence: Synthetic oligonucleotide
  Target: SCNA; (+) strand; PAM type: YTN; PAM sequence: TTC
agacttggatgttaagcact

SEQ ID NO: 67211 - DNA, 20 bp, Artificial Sequence
  Description of Artificial Sequence: Synthetic oligonucleotide
  Target: SCNA; (+) strand; PAM type: YTN; PAM sequence: CTT
ggatgttaagcactgtgcct

SEQ ID NO: 67212 - DNA, 20 bp, Artificial Sequence
  Description of Artificial Sequence: Synthetic oligonucleotide
  Target: SCNA; (+) strand; PAM type: YTN; PAM sequence: TTG
gatgttaagcactgtgcctt

SEQ ID NO: 67213 - DNA, 20 bp, Artificial Sequence
  Description of Artificial Sequence: Synthetic oligonucleotide
  Target: SCNA; (+) strand; PAM type: YTN; PAM sequence: TTA
agcactgtgccttcccctgg

SEQ ID NO: 67214 - DNA, 20 bp, Artificial Sequence
  Description of Artificial Sequence: Synthetic oligonucleotide
  Target: SCNA; (+) strand; PAM type: YTN; PAM sequence: CTG
tgccttcccctggacctctc

SEQ ID NO: 67215 - DNA, 20 bp, Artificial Sequence
  Description of Artificial Sequence: Synthetic oligonucleotide
  Target: SCNA; (+) strand; PAM type: YTN; PAM sequence: CTT
cccctggacctctctttaaa

SEQ ID NO: 67216 - DNA, 20 bp, Artificial Sequence
  Description of Artificial Sequence: Synthetic oligonucleotide
  Target: SCNA; (+) strand; PAM type: YTN; PAM sequence: TTC
ccctggacctctctttaaat

SEQ ID NO: 67217 - DNA, 20 bp, Artificial Sequence
  Description of Artificial Sequence: Synthetic oligonucleotide
  Target: SCNA; (+) strand; PAM type: YTN; PAM sequence: CTG
gacctctctttaaatgtcac

SEQ ID NO: 67218 - DNA, 20 bp, Artificial Sequence
  Description of Artificial Sequence: Synthetic oligonucleotide
  Target: SCNA; (+) strand; PAM type: YTN; PAM sequence: CTC
tctttaaatgtcacagctat

SEQ ID NO: 67219 - DNA, 20 bp, Artificial Sequence
  Description of Artificial Sequence: Synthetic oligonucleotide
  Target: SCNA; (+) strand; PAM type: YTN; PAM sequence: CTC
tttaaatgtcacagctattt

SEQ ID NO: 67220 - DNA, 20 bp, Artificial Sequence
  Description of Artificial Sequence: Synthetic oligonucleotide
  Target: SCNA; (+) strand; PAM type: YTN; PAM sequence: CTT
taaatgtcacagctatttct

SEQ ID NO: 67221 - DNA, 20 bp, Artificial Sequence
  Description of Artificial Sequence: Synthetic oligonucleotide
  Target: SCNA; (+) strand; PAM type: YTN; PAM sequence: TTT
aaatgtcacagctatttctg

SEQ ID NO: 67222 - DNA, 20 bp, Artificial Sequence
  Description of Artificial Sequence: Synthetic oligonucleotide
  Target: SCNA; (+) strand; PAM type: YTN; PAM sequence: TTA
aatgtcacagctatttctgg

SEQ ID NO: 67223 - DNA, 20 bp, Artificial Sequence
  Description of Artificial Sequence: Synthetic oligonucleotide
  Target: SCNA; (+) strand; PAM type: YTN; PAM sequence: CTA
tttctggcaggtaagactat

SEQ ID NO: 67224 - DNA, 20 bp, Artificial Sequence
  Description of Artificial Sequence: Synthetic oligonucleotide
  Target: SCNA; (+) strand; PAM type: YTN; PAM sequence: TTT
ctggcaggtaagactattgc

SEQ ID NO: 67225 - DNA, 20 bp, Artificial Sequence
  Description of Artificial Sequence: Synthetic oligonucleotide
  Target: SCNA; (+) strand; PAM type: YTN; PAM sequence: TTC
tggcaggtaagactattgct

SEQ ID NO: 67226 - DNA, 20 bp, Artificial Sequence
  Description of Artificial Sequence: Synthetic oligonucleotide
  Target: SCNA; (+) strand; PAM type: YTN; PAM sequence: CTG
gcaggtaagactattgcttt

SEQ ID NO: 67227 - DNA, 20 bp, Artificial Sequence
  Description of Artificial Sequence: Synthetic oligonucleotide
  Target: SCNA; (+) strand; PAM type: YTN; PAM sequence: CTA
ttgctttggttagtgtgaac

SEQ ID NO: 67228 - DNA, 20 bp, Artificial Sequence
  Description of Artificial Sequence: Synthetic oligonucleotide
  Target: SCNA; (+) strand; PAM type: YTN; PAM sequence: TTG
ctttggttagtgtgaacaca

SEQ ID NO: 67229 - DNA, 20 bp, Artificial Sequence
  Description of Artificial Sequence: Synthetic oligonucleotide
  Target: SCNA; (+) strand; PAM type: YTN; PAM sequence: CTT
tggttagtgtgaacacacac

SEQ ID NO: 67230 - DNA, 20 bp, Artificial Sequence
  Description of Artificial Sequence: Synthetic oligonucleotide
  Target: SCNA; (+) strand; PAM type: YTN; PAM sequence: TTT
ggttagtgtgaacacacacc

SEQ ID NO: 67231 - DNA, 20 bp, Artificial Sequence
  Description of Artificial Sequence: Synthetic oligonucleotide
  Target: SCNA; (+) strand; PAM type: YTN; PAM sequence: TTG
gttagtgtgaacacacacca

SEQ ID NO: 67232 - DNA, 20 bp, Artificial Sequence
  Description of Artificial Sequence: Synthetic oligonucleotide
  Target: SCNA; (+) strand; PAM type: YTN; PAM sequence: TTA
gtgtgaacacacaccactgt

SEQ ID NO: 67233 - DNA, 20 bp, Artificial Sequence
  Description of Artificial Sequence: Synthetic oligonucleotide
  Target: SCNA; (+) strand; PAM type: YTN; PAM sequence: CTG
tggatcacaaggcacctgag

SEQ ID NO: 67234 - DNA, 20 bp, Artificial Sequence
  Description of Artificial Sequence: Synthetic oligonucleotide
  Target: SCNA; (+) strand; PAM type: YTN; PAM sequence: CTG
agagaaaaggctgccgaaag

SEQ ID NO: 67235 - DNA, 20 bp, Artificial Sequence
  Description of Artificial Sequence: Synthetic oligonucleotide
  Target: SCNA; (+) strand; PAM type: YTN; PAM sequence: CTG
ccgaaagcaggaaaataact

SEQ ID NO: 67236 - DNA, 20 bp, Artificial Sequence
  Description of Artificial Sequence: Synthetic oligonucleotide
  Target: SCNA; (+) strand; PAM type: YTN; PAM sequence: CTC
agaaaaaagaaaaaaaaaca

SEQ ID NO: 67237 - DNA, 20 bp, Artificial Sequence
  Description of Artificial Sequence: Synthetic oligonucleotide
  Target: SCNA; (+) strand; PAM type: YTN; PAM sequence: CTG
aaaaatacaacagatatgca

SEQ ID NO: 67238 - DNA, 20 bp, Artificial Sequence
  Description of Artificial Sequence: Synthetic oligonucleotide
  Target: SCNA; (+) strand; PAM type: YTN; PAM sequence: TTT
gtatacttatgatctaattt

SEQ ID NO: 67239 - DNA, 20 bp, Artificial Sequence
  Description of Artificial Sequence: Synthetic oligonucleotide
  Target: SCNA; (+) strand; PAM type: YTN; PAM sequence: TTG
tatacttatgatctaattta

SEQ ID NO: 67240 - DNA, 20 bp, Artificial Sequence
  Description of Artificial Sequence: Synthetic oligonucleotide
  Target: SCNA; (+) strand; PAM type: YTN; PAM sequence: CTT
atgatctaatttatgtcagt

SEQ ID NO: 67241 - DNA, 20 bp, Artificial Sequence
  Description of Artificial Sequence: Synthetic oligonucleotide
  Target: SCNA; (+) strand; PAM type: YTN; PAM sequence: TTA
tgatctaatttatgtcagtc

SEQ ID NO: 67242 - DNA, 20 bp, Artificial Sequence
  Description of Artificial Sequence: Synthetic oligonucleotide
  Target: SCNA; (+) strand; PAM type: YTN; PAM sequence: CTA
atttatgtcagtcattaaaa

SEQ ID NO: 67243 - DNA, 20 bp, Artificial Sequence
  Description of Artificial Sequence: Synthetic oligonucleotide
  Target: SCNA; (+) strand; PAM type: YTN; PAM sequence: TTT
atgtcagtcattaaaagaaa

SEQ ID NO: 67244 - DNA, 20 bp, Artificial Sequence
  Description of Artificial Sequence: Synthetic oligonucleotide
  Target: SCNA; (+) strand; PAM type: YTN; PAM sequence: TTA
tgtcagtcattaaaagaaaa

SEQ ID NO: 67245 - DNA, 20 bp, Artificial Sequence
  Description of Artificial Sequence: Synthetic oligonucleotide
  Target: SCNA; (+) strand; PAM type: YTN; PAM sequence: TTA
aaagaaaataaggtgtttag

SEQ ID NO: 67246 - DNA, 20 bp, Artificial Sequence
  Description of Artificial Sequence: Synthetic oligonucleotide
  Target: SCNA; (+) strand; PAM type: YTN; PAM sequence: TTT
agaaaatacagtgctgtcta

SEQ ID NO: 67247 - DNA, 20 bp, Artificial Sequence
  Description of Artificial Sequence: Synthetic oligonucleotide
  Target: SCNA; (+) strand; PAM type: YTN; PAM sequence: TTA
gaaaatacagtgctgtctat

SEQ ID NO: 67248 - DNA, 20 bp, Artificial Sequence
  Description of Artificial Sequence: Synthetic oligonucleotide
  Target: SCNA; (+) strand; PAM type: YTN; PAM sequence: CTG
tctatggttatatttaatat

SEQ ID NO: 67249 - DNA, 20 bp, Artificial Sequence
  Description of Artificial Sequence: Synthetic oligonucleotide
  Target: SCNA; (+) strand; PAM type: YTN; PAM sequence: CTA
tggttatatttaatattgtg

SEQ ID NO: 67250 - DNA, 20 bp, Artificial Sequence
  Description of Artificial Sequence: Synthetic oligonucleotide
  Target: SCNA; (+) strand; PAM type: YTN; PAM sequence: TTA
tatttaatattgtgaccact

SEQ ID NO: 67251 - DNA, 20 bp, Artificial Sequence
  Description of Artificial Sequence: Synthetic oligonucleotide
  Target: SCNA; (+) strand; PAM type: YTN; PAM sequence: TTT
aatattgtgaccacttaata

SEQ ID NO: 67252 - DNA, 20 bp, Artificial Sequence
  Description of Artificial Sequence: Synthetic oligonucleotide
  Target: SCNA; (+) strand; PAM type: YTN; PAM sequence: TTA
atattgtgaccacttaatac

SEQ ID NO: 67253 - DNA, 20 bp, Artificial Sequence
  Description of Artificial Sequence: Synthetic oligonucleotide
  Target: SCNA; (+) strand; PAM type: YTN; PAM sequence: TTG
tgaccacttaatacaaagca

SEQ ID NO: 67254 - DNA, 20 bp, Artificial Sequence
  Description of Artificial Sequence: Synthetic oligonucleotide
  Target: SCNA; (+) strand; PAM type: YTN; PAM sequence: CTT
aatacaaagcaaagcattct

SEQ ID NO: 67255 - DNA, 20 bp, Artificial Sequence
  Description of Artificial Sequence: Synthetic oligonucleotide
  Target: SCNA; (+) strand; PAM type: YTN; PAM sequence: TTA
atacaaagcaaagcattctt

SEQ ID NO: 67256 - DNA, 20 bp, Artificial Sequence
  Description of Artificial Sequence: Synthetic oligonucleotide
  Target: SCNA; (+) strand; PAM type: YTN; PAM sequence: TTC
ttgcttgctctcatggagag

SEQ ID NO: 67257 - DNA, 20 bp, Artificial Sequence
  Description of Artificial Sequence: Synthetic oligonucleotide
  Target: SCNA; (+) strand; PAM type: YTN; PAM sequence: CTT
gcttgctctcatggagagtg

SEQ ID NO: 67258 - DNA, 20 bp, Artificial Sequence
  Description of Artificial Sequence: Synthetic oligonucleotide
  Target: SCNA; (+) strand; PAM type: YTN; PAM sequence: TTG
cttgctctcatggagagtgc

SEQ ID NO: 67259 - DNA, 20 bp, Artificial Sequence
  Description of Artificial Sequence: Synthetic oligonucleotide
  Target: SCNA; (+) strand; PAM type: YTN; PAM sequence: CTT
gctctcatggagagtgcaat

SEQ ID NO: 67260 - DNA, 20 bp, Artificial Sequence
  Description of Artificial Sequence: Synthetic oligonucleotide
  Target: SCNA; (+) strand; PAM type: YTN; PAM sequence: TTG
ctctcatggagagtgcaatt

SEQ ID NO: 67261 - DNA, 20 bp, Artificial Sequence
  Description of Artificial Sequence: Synthetic oligonucleotide
  Target: SCNA; (+) strand; PAM type: YTN; PAM sequence: CTC
tcatggagagtgcaatttag

SEQ ID NO: 67262 - DNA, 20 bp, Artificial Sequence
  Description of Artificial Sequence: Synthetic oligonucleotide
  Target: SCNA; (+) strand; PAM type: YTN; PAM sequence: CTC
atggagagtgcaatttagaa

SEQ ID NO: 67263 - DNA, 20 bp, Artificial Sequence
  Description of Artificial Sequence: Synthetic oligonucleotide
  Target: SCNA; (+) strand; PAM type: YTN; PAM sequence: TTT
agaattgagagctcaatttc

SEQ ID NO: 67264 - DNA, 20 bp, Artificial Sequence
  Description of Artificial Sequence: Synthetic oligonucleotide
  Target: SCNA; (+) strand; PAM type: YTN; PAM sequence: TTA
gaattgagagctcaatttct

SEQ ID NO: 67265 - DNA, 20 bp, Artificial Sequence
  Description of Artificial Sequence: Synthetic oligonucleotide
  Target: SCNA; (+) strand; PAM type: YTN; PAM sequence: TTG
agagctcaatttctaaggag

SEQ ID NO: 67266 - DNA, 20 bp, Artificial Sequence
  Description of Artificial Sequence: Synthetic oligonucleotide
  Target: SCNA; (+) strand; PAM type: YTN; PAM sequence: CTC
aatttctaaggagggtttat

SEQ ID NO: 67267 - DNA, 20 bp, Artificial Sequence
  Description of Artificial Sequence: Synthetic oligonucleotide
  Target: SCNA; (+) strand; PAM type: YTN; PAM sequence: TTT
ctaaggagggtttatgtact

SEQ ID NO: 67268 - DNA, 20 bp, Artificial Sequence
  Description of Artificial Sequence: Synthetic oligonucleotide
  Target: SCNA; (+) strand; PAM type: YTN; PAM sequence: TTC
taaggagggtttatgtactc

SEQ ID NO: 67269 - DNA, 20 bp, Artificial Sequence
  Description of Artificial Sequence: Synthetic oligonucleotide
  Target: SCNA; (+) strand; PAM type: YTN; PAM sequence: CTA
aggagggtttatgtactcta

SEQ ID NO: 67270 - DNA, 20 bp, Artificial Sequence
  Description of Artificial Sequence: Synthetic oligonucleotide
  Target: SCNA; (+) strand; PAM type: YTN; PAM sequence: TTT
atgtactctatcttgaggca

SEQ ID NO: 67271 - DNA, 20 bp, Artificial Sequence
  Description of Artificial Sequence: Synthetic oligonucleotide
  Target: SCNA; (+) strand; PAM type: YTN; PAM sequence: TTA
tgtactctatcttgaggcac

SEQ ID NO: 67272 - DNA, 20 bp, Artificial Sequence
  Description of Artificial Sequence: Synthetic oligonucleotide
  Target: SCNA; (+) strand; PAM type: YTN; PAM sequence: CTC
tatcttgaggcacaccaagg

SEQ ID NO: 67273 - DNA, 20 bp, Artificial Sequence
  Description of Artificial Sequence: Synthetic oligonucleotide
  Target: SCNA; (+) strand; PAM type: YTN; PAM sequence: CTA
tcttgaggcacaccaaggag

SEQ ID NO: 67274 - DNA, 20 bp, Artificial Sequence
  Description of Artificial Sequence: Synthetic oligonucleotide
  Target: SCNA; (+) strand; PAM type: YTN; PAM sequence: CTT
gaggcacaccaaggagattg

SEQ ID NO: 67275 - DNA, 20 bp, Artificial Sequence
  Description of Artificial Sequence: Synthetic oligonucleotide
  Target: SCNA; (+) strand; PAM type: YTN; PAM sequence: TTG
aggcacaccaaggagattga

SEQ ID NO: 67276 - DNA, 20 bp, Artificial Sequence
  Description of Artificial Sequence: Synthetic oligonucleotide
  Target: SCNA; (+) strand; PAM type: YTN; PAM sequence: TTG
agtttaccagtttagaaagc

SEQ ID NO: 67277 - DNA, 20 bp, Artificial Sequence
  Description of Artificial Sequence: Synthetic oligonucleotide
  Target: SCNA; (+) strand; PAM type: YTN; PAM sequence: TTT
accagtttagaaagcactgc

SEQ ID NO: 67278 - DNA, 20 bp, Artificial Sequence
  Description of Artificial Sequence: Synthetic oligonucleotide
  Target: SCNA; (+) strand; PAM type: YTN; PAM sequence: TTA
ccagtttagaaagcactgcc

SEQ ID NO: 67279 - DNA, 20 bp, Artificial Sequence
  Description of Artificial Sequence: Synthetic oligonucleotide
  Target: SCNA; (+) strand; PAM type: YTN; PAM sequence: TTT
agaaagcactgccataattc

SEQ ID NO: 67280 - DNA, 20 bp, Artificial Sequence
  Description of Artificial Sequence: Synthetic oligonucleotide
  Target: SCNA; (+) strand; PAM type: YTN; PAM sequence: TTA
gaaagcactgccataattca

SEQ ID NO: 67281 - DNA, 20 bp, Artificial Sequence
  Description of Artificial Sequence: Synthetic oligonucleotide
  Target: SCNA; (+) strand; PAM type: YTN; PAM sequence: CTG
ccataattcaagtcagggag

SEQ ID NO: 67282 - DNA, 20 bp, Artificial Sequence
  Description of Artificial Sequence: Synthetic oligonucleotide
  Target: SCNA; (+) strand; PAM type: YTN; PAM sequence: TTC
aagtcagggagagggctgat

SEQ ID NO: 67283 - DNA, 20 bp, Artificial Sequence
  Description of Artificial Sequence: Synthetic oligonucleotide
  Target: SCNA; (+) strand; PAM type: YTN; PAM sequence: CTG
atggaagatttttaaaagat

SEQ ID NO: 67284 - DNA, 20 bp, Artificial Sequence
  Description of Artificial Sequence: Synthetic oligonucleotide
  Target: SCNA; (+) strand; PAM type: YTN; PAM sequence: TTT
ttaaaagattttaaaagatc

SEQ ID NO: 67285 - DNA, 20 bp, Artificial Sequence
  Description of Artificial Sequence: Synthetic oligonucleotide
  Target: SCNA; (+) strand; PAM type: YTN; PAM sequence: TTT
taaaagattttaaaagatca

SEQ ID NO: 67286 - DNA, 20 bp, Artificial Sequence
  Description of Artificial Sequence: Synthetic oligonucleotide
  Target: SCNA; (+) strand; PAM type: YTN; PAM sequence: TTT
aaaagattttaaaagatcat

SEQ ID NO: 67287 - DNA, 20 bp, Artificial Sequence
  Description of Artificial Sequence: Synthetic oligonucleotide
  Target: SCNA; (+) strand; PAM type: YTN; PAM sequence: TTA
aaagattttaaaagatcatg

SEQ ID NO: 67288 - DNA, 20 bp, Artificial Sequence
  Description of Artificial Sequence: Synthetic oligonucleotide
  Target: SCNA; (+) strand; PAM type: YTN; PAM sequence: TTT
taaaagatcatgagggcaag

SEQ ID NO: 67289 - DNA, 20 bp, Artificial Sequence
  Description of Artificial Sequence: Synthetic oligonucleotide
  Target: SCNA; (+) strand; PAM type: YTN; PAM sequence: TTT
aaaagatcatgagggcaagc

SEQ ID NO: 67290 - DNA, 20 bp, Artificial Sequence
  Description of Artificial Sequence: Synthetic oligonucleotide
  Target: SCNA; (+) strand; PAM type: YTN; PAM sequence: TTA
aaagatcatgagggcaagct

SEQ ID NO: 67291 - DNA, 20 bp, Artificial Sequence
  Description of Artificial Sequence: Synthetic oligonucleotide
  Target: SCNA; (+) strand; PAM type: YTN; PAM sequence: CTG
gcttttaacaaaacaaaata

SEQ ID NO: 67292 - DNA, 20 bp, Artificial Sequence
  Description of Artificial Sequence: Synthetic oligonucleotide
  Target: SCNA; (+) strand; PAM type: YTN; PAM sequence: CTT
ttaacaaaacaaaatatttc

SEQ ID NO: 67293 - DNA, 20 bp, Artificial Sequence
  Description of Artificial Sequence: Synthetic oligonucleotide
  Target: SCNA; (+) strand; PAM type: YTN; PAM sequence: TTT
taacaaaacaaaatatttcc

SEQ ID NO: 67294 - DNA, 20 bp, Artificial Sequence
  Description of Artificial Sequence: Synthetic oligonucleotide
  Target: SCNA; (+) strand; PAM type: YTN; PAM sequence: TTT
aacaaaacaaaatatttcca

SEQ ID NO: 67295 - DNA, 20 bp, Artificial Sequence
  Description of Artificial Sequence: Synthetic oligonucleotide
  Target: SCNA; (+) strand; PAM type: YTN; PAM sequence: TTA
acaaaacaaaatatttccat

SEQ ID NO: 67296 - DNA, 20 bp, Artificial Sequence
  Description of Artificial Sequence: Synthetic oligonucleotide
  Target: SCNA; (+) strand; PAM type: YTN; PAM sequence: TTT
ccatgtggcttctggctgac

SEQ ID NO: 67297 - DNA, 20 bp, Artificial Sequence
  Description of Artificial Sequence: Synthetic oligonucleotide
  Target: SCNA; (+) strand; PAM type: YTN; PAM sequence: TTC
catgtggcttctggctgact

SEQ ID NO: 67298 - DNA, 20 bp, Artificial Sequence
  Description of Artificial Sequence: Synthetic oligonucleotide
  Target: SCNA; (+) strand; PAM type: YTN; PAM sequence: CTT
ctggctgactgaattaataa

SEQ ID NO: 67299 - DNA, 20 bp, Artificial Sequence
  Description of Artificial Sequence: Synthetic oligonucleotide
  Target: SCNA; (+) strand; PAM type: YTN; PAM sequence: TTC
tggctgactgaattaataag

SEQ ID NO: 67300 - DNA, 20 bp, Artificial Sequence
  Description of Artificial Sequence: Synthetic oligonucleotide
  Target: SCNA; (+) strand; PAM type: YTN; PAM sequence: CTG
gctgactgaattaataaggc

SEQ ID NO: 67301 - DNA, 20 bp, Artificial Sequence
  Description of Artificial Sequence: Synthetic oligonucleotide
  Target: SCNA; (+) strand; PAM type: YTN; PAM sequence: CTG
actgaattaataaggcccag

SEQ ID NO: 67302 - DNA, 20 bp, Artificial Sequence
  Description of Artificial Sequence: Synthetic oligonucleotide
  Target: SCNA; (+) strand; PAM type: YTN; PAM sequence: CTG
aattaataaggcccagagac

SEQ ID NO: 67303 - DNA, 20 bp, Artificial Sequence
  Description of Artificial Sequence: Synthetic oligonucleotide
  Target: SCNA; (+) strand; PAM type: YTN; PAM sequence: TTA
ataaggcccagagactgatc

SEQ ID NO: 67304 - DNA, 20 bp, Artificial Sequence
  Description of Artificial Sequence: Synthetic oligonucleotide
  Target: SCNA; (+) strand; PAM type: YTN; PAM sequence: CTG
atctgaaggcaaaagccttt

SEQ ID NO: 67305 - DNA, 20 bp, Artificial Sequence
  Description of Artificial Sequence: Synthetic oligonucleotide
  Target: SCNA; (+) strand; PAM type: YTN; PAM sequence: CTG
aaggcaaaagcctttatttt

SEQ ID NO: 67306 - DNA, 20 bp, Artificial Sequence
  Description of Artificial Sequence: Synthetic oligonucleotide
  Target: SCNA; (+) strand; PAM type: YTN; PAM sequence: CTT
tattttttattgcaatggag

SEQ ID NO: 67307 - DNA, 20 bp, Artificial Sequence
  Description of Artificial Sequence: Synthetic oligonucleotide
  Target: SCNA; (+) strand; PAM type: YTN; PAM sequence: TTT
attttttattgcaatggaga

SEQ ID NO: 67308 - DNA, 20 bp, Artificial Sequence
  Description of Artificial Sequence: Synthetic oligonucleotide
  Target: SCNA; (+) strand; PAM type: YTN; PAM sequence: TTA
ttttttattgcaatggagaa

SEQ ID NO: 67309 - DNA, 20 bp, Artificial Sequence
  Description of Artificial Sequence: Synthetic oligonucleotide
  Target: SCNA; (+) strand; PAM type: YTN; PAM sequence: TTT
tttattgcaatggagaaaaa

SEQ ID NO: 67310 - DNA, 20 bp, Artificial Sequence
  Description of Artificial Sequence: Synthetic oligonucleotide
  Target: SCNA; (+) strand; PAM type: YTN; PAM sequence: TTT
ttattgcaatggagaaaaac

SEQ ID NO: 67311 - DNA, 20 bp, Artificial Sequence
  Description of Artificial Sequence: Synthetic oligonucleotide
  Target: SCNA; (+) strand; PAM type: YTN; PAM sequence: TTT
tattgcaatggagaaaaact

SEQ ID NO: 67312 - DNA, 20 bp, Artificial Sequence
  Description of Artificial Sequence: Synthetic oligonucleotide
  Target: SCNA; (+) strand; PAM type: YTN; PAM sequence: TTT
attgcaatggagaaaaactg

SEQ ID NO: 67313 - DNA, 20 bp, Artificial Sequence
  Description of Artificial Sequence: Synthetic oligonucleotide
  Target: SCNA; (+) strand; PAM type: YTN; PAM sequence: TTA
ttgcaatggagaaaaactga

SEQ ID NO: 67314 - DNA, 20 bp, Artificial Sequence
  Description of Artificial Sequence: Synthetic oligonucleotide
  Target: SCNA; (+) strand; PAM type: YTN; PAM sequence: TTG
caatggagaaaaactgaaca

SEQ ID NO: 67315 - DNA, 20 bp, Artificial Sequence
  Description of Artificial Sequence: Synthetic oligonucleotide
  Target: SCNA; (+) strand; PAM type: YTN; PAM sequence: CTG
aacattatttgactatcagt

SEQ ID NO: 67316 - DNA, 20 bp, Artificial Sequence
  Description of Artificial Sequence: Synthetic oligonucleotide
  Target: SCNA; (+) strand; PAM type: YTN; PAM sequence: TTA
tttgactatcagttgtgaag

SEQ ID NO: 67317 - DNA, 20 bp, Artificial Sequence
  Description of Artificial Sequence: Synthetic oligonucleotide
  Target: SCNA; (+) strand; PAM type: YTN; PAM sequence: TTT
gactatcagttgtgaagttt

SEQ ID NO: 67318 - DNA, 20 bp, Artificial Sequence
  Description of Artificial Sequence: Synthetic oligonucleotide
  Target: SCNA; (+) strand; PAM type: YTN; PAM sequence: TTG
actatcagttgtgaagttta

SEQ ID NO: 67319 - DNA, 20 bp, Artificial Sequence
  Description of Artificial Sequence: Synthetic oligonucleotide
  Target: SCNA; (+) strand; PAM type: YTN; PAM sequence: CTA
tcagttgtgaagtttagtaa

SEQ ID NO: 67320 - DNA, 20 bp, Artificial Sequence
  Description of Artificial Sequence: Synthetic oligonucleotide
  Target: SCNA; (+) strand; PAM type: YTN; PAM sequence: TTG
tgaagtttagtaaaaagatt

SEQ ID NO: 67321 - DNA, 20 bp, Artificial Sequence
  Description of Artificial Sequence: Synthetic oligonucleotide
  Target: SCNA; (+) strand; PAM type: YTN; PAM sequence: TTT
agtaaaaagattttcactaa

SEQ ID NO: 67322 - DNA, 20 bp, Artificial Sequence
  Description of Artificial Sequence: Synthetic oligonucleotide
  Target: SCNA; (+) strand; PAM type: YTN; PAM sequence: TTA
gtaaaaagattttcactaat

SEQ ID NO: 67323 - DNA, 20 bp, Artificial Sequence
  Description of Artificial Sequence: Synthetic oligonucleotide
  Target: SCNA; (+) strand; PAM type: YTN; PAM sequence: TTT
tcactaatgggtggttttaa

SEQ ID NO: 67324 - DNA, 20 bp, Artificial Sequence
  Description of Artificial Sequence: Synthetic oligonucleotide
  Target: SCNA; (+) strand; PAM type: YTN; PAM sequence: TTT
cactaatgggtggttttaat

SEQ ID NO: 67325 - DNA, 20 bp, Artificial Sequence
  Description of Artificial Sequence: Synthetic oligonucleotide
  Target: SCNA; (+) strand; PAM type: YTN; PAM sequence: TTC
actaatgggtggttttaata

SEQ ID NO: 67326 - DNA, 20 bp, Artificial Sequence
  Description of Artificial Sequence: Synthetic oligonucleotide
  Target: SCNA; (+) strand; PAM type: YTN; PAM sequence: CTA
atgggtggttttaatattta

SEQ ID NO: 67327 - DNA, 20 bp, Artificial Sequence
  Description of Artificial Sequence: Synthetic oligonucleotide
  Target: SCNA; (+) strand; PAM type: YTN; PAM sequence: TTT
taatatttatgaatgtgatg

SEQ ID NO: 67328 - DNA, 20 bp, Artificial Sequence
  Description of Artificial Sequence: Synthetic oligonucleotide
  Target: SCNA; (+) strand; PAM type: YTN; PAM sequence: TTT
aatatttatgaatgtgatgg

SEQ ID NO: 67329 - DNA, 20 bp, Artificial Sequence
  Description of Artificial Sequence: Synthetic oligonucleotide
  Target: SCNA; (+) strand; PAM type: YTN; PAM sequence: TTA
atatttatgaatgtgatggt

SEQ ID NO: 67330 - DNA, 20 bp, Artificial Sequence
  Description of Artificial Sequence: Synthetic oligonucleotide
  Target: SCNA; (+) strand; PAM type: YTN; PAM sequence: TTT
atgaatgtgatggttcagca

SEQ ID NO: 67331 - DNA, 20 bp, Artificial Sequence
  Description of Artificial Sequence: Synthetic oligonucleotide
  Target: SCNA; (+) strand; PAM type: YTN; PAM sequence: TTA
tgaatgtgatggttcagcaa

SEQ ID NO: 67332 - DNA, 20 bp, Artificial Sequence
  Description of Artificial Sequence: Synthetic oligonucleotide
  Target: SCNA; (+) strand; PAM type: YTN; PAM sequence: TTC
agcaaattttctccaatgtt

SEQ ID NO: 67333 - DNA, 20 bp, Artificial Sequence
  Description of Artificial Sequence: Synthetic oligonucleotide
  Target: SCNA; (+) strand; PAM type: YTN; PAM sequence: TTT
tctccaatgttttgcaagac

SEQ ID NO: 67334 - DNA, 20 bp, Artificial Sequence
  Description of Artificial Sequence: Synthetic oligonucleotide
  Target: SCNA; (+) strand; PAM type: YTN; PAM sequence: TTT
ctccaatgttttgcaagacc

SEQ ID NO: 67335 - DNA, 20 bp, Artificial Sequence
  Description of Artificial Sequence: Synthetic oligonucleotide
  Target: SCNA; (+) strand; PAM type: YTN; PAM sequence: TTC
tccaatgttttgcaagacca

SEQ ID NO: 67336 - DNA, 20 bp, Artificial Sequence
  Description of Artificial Sequence: Synthetic oligonucleotide
  Target: SCNA; (+) strand; PAM type: YTN; PAM sequence: CTC
caatgttttgcaagaccact

SEQ ID NO: 67337 - DNA, 20 bp, Artificial Sequence
  Description of Artificial Sequence: Synthetic oligonucleotide
  Target: SCNA; (+) strand; PAM type: YTN; PAM sequence: TTT
tgcaagaccactaattaata

SEQ ID NO: 67338 - DNA, 20 bp, Artificial Sequence
  Description of Artificial Sequence: Synthetic oligonucleotide
  Target: SCNA; (+) strand; PAM type: YTN; PAM sequence: TTT
gcaagaccactaattaataa

SEQ ID NO: 67339 - DNA, 20 bp, Artificial Sequence
  Description of Artificial Sequence: Synthetic oligonucleotide
  Target: SCNA; (+) strand; PAM type: YTN; PAM sequence: TTG
caagaccactaattaataat

SEQ ID NO: 67340 - DNA, 20 bp, Artificial Sequence
  Description of Artificial Sequence: Synthetic oligonucleotide
  Target: SCNA; (+) strand; PAM type: YTN; PAM sequence: CTA
attaataatcatctttacaa

SEQ ID NO: 67341 - DNA, 20 bp, Artificial Sequence
  Description of Artificial Sequence: Synthetic oligonucleotide
  Target: SCNA; (+) strand; PAM type: YTN; PAM sequence: TTA
ataatcatctttacaaatgg

SEQ ID NO: 67342 - DNA, 20 bp, Artificial Sequence
  Description of Artificial Sequence: Synthetic oligonucleotide
  Target: SCNA; (+) strand; PAM type: YTN; PAM sequence: CTT
tacaaatggaacatgtaatt

SEQ ID NO: 67343 - DNA, 20 bp, Artificial Sequence
  Description of Artificial Sequence: Synthetic oligonucleotide
  Target: SCNA; (+) strand; PAM type: YTN; PAM sequence: TTT
acaaatggaacatgtaattg

SEQ ID NO: 67344 - DNA, 20 bp, Artificial Sequence
  Description of Artificial Sequence: Synthetic oligonucleotide
  Target: SCNA; (+) strand; PAM type: YTN; PAM sequence: TTA
caaatggaacatgtaattgt

SEQ ID NO: 67345 - DNA, 20 bp, Artificial Sequence
  Description of Artificial Sequence: Synthetic oligonucleotide
  Target: SCNA; (+) strand; PAM type: YTN; PAM sequence: TTG
tctgctactattttttcttt

SEQ ID NO: 67346 - DNA, 20 bp, Artificial Sequence
  Description of Artificial Sequence: Synthetic oligonucleotide
  Target: SCNA; (+) strand; PAM type: YTN; PAM sequence: CTG
ctactattttttctttgcca

SEQ ID NO: 67347 - DNA, 20 bp, Artificial Sequence
  Description of Artificial Sequence: Synthetic oligonucleotide
  Target: SCNA; (+) strand; PAM type: YTN; PAM sequence: CTA
ctattttttctttgccaatg

SEQ ID NO: 67348 - DNA, 20 bp, Artificial Sequence
  Description of Artificial Sequence: Synthetic oligonucleotide
  Target: SCNA; (+) strand; PAM type: YTN; PAM sequence: CTA
ttttttctttgccaatgctt

SEQ ID NO: 67349 - DNA, 20 bp, Artificial Sequence
  Description of Artificial Sequence: Synthetic oligonucleotide
  Target: SCNA; (+) strand; PAM type: YTN; PAM sequence: TTT
tttctttgccaatgcttaat

SEQ ID NO: 67350 - DNA, 20 bp, Artificial Sequence
  Description of Artificial Sequence: Synthetic oligonucleotide
  Target: SCNA; (+) strand; PAM type: YTN; PAM sequence: TTT
ttctttgccaatgcttaata

SEQ ID NO: 67351 - DNA, 20 bp, Artificial Sequence
  Description of Artificial Sequence: Synthetic oligonucleotide
  Target: SCNA; (+) strand; PAM type: YTN; PAM sequence: TTT
tctttgccaatgcttaatac

SEQ ID NO: 67352 - DNA, 20 bp, Artificial Sequence
  Description of Artificial Sequence: Synthetic oligonucleotide
  Target: SCNA; (+) strand; PAM type: YTN; PAM sequence: TTT
ctttgccaatgcttaatact

SEQ ID NO: 67353 - DNA, 20 bp, Artificial Sequence
  Description of Artificial Sequence: Synthetic oligonucleotide
  Target: SCNA; (+) strand; PAM type: YTN; PAM sequence: TTC
tttgccaatgcttaatactt

SEQ ID NO: 67354 - DNA, 20 bp, Artificial Sequence
  Description of Artificial Sequence: Synthetic oligonucleotide
  Target: SCNA; (+) strand; PAM type: YTN; PAM sequence: CTT
tgccaatgcttaatacttat

SEQ ID NO: 67355 - DNA, 20 bp, Artificial Sequence
  Description of Artificial Sequence: Synthetic oligonucleotide
  Target: SCNA; (+) strand; PAM type: YTN; PAM sequence: TTT
gccaatgcttaatacttatt

SEQ ID NO: 67356 - DNA, 20 bp, Artificial Sequence
  Description of Artificial Sequence: Synthetic oligonucleotide
  Target: SCNA; (+) strand; PAM type: YTN; PAM sequence: TTG
ccaatgcttaatacttattt

SEQ ID NO: 67357 - DNA, 20 bp, Artificial Sequence
  Description of Artificial Sequence: Synthetic oligonucleotide
  Target: SCNA; (+) strand; PAM type: YTN; PAM sequence: CTT
aatacttattttgaatacgt

SEQ ID NO: 67358 - DNA, 20 bp, Artificial Sequence
  Description of Artificial Sequence: Synthetic oligonucleotide
  Target: SCNA; (+) strand; PAM type: YTN; PAM sequence: TTA
atacttattttgaatacgtt

SEQ ID NO: 67359 - DNA, 20 bp, Artificial Sequence
  Description of Artificial Sequence: Synthetic oligonucleotide
  Target: SCNA; (+) strand; PAM type: YTN; PAM sequence: CTT
attttgaatacgttttattt

SEQ ID NO: 67360 - DNA, 20 bp, Artificial Sequence
  Description of Artificial Sequence: Synthetic oligonucleotide
  Target: SCNA; (+) strand; PAM type: YTN; PAM sequence: TTA
ttttgaatacgttttatttt

SEQ ID NO: 67361 - DNA, 20 bp, Artificial Sequence
  Description of Artificial Sequence: Synthetic oligonucleotide
  Target: SCNA; (+) strand; PAM type: YTN; PAM sequence: TTT
tgaatacgttttattttttt

SEQ ID NO: 67362 - DNA, 20 bp, Artificial Sequence
  Description of Artificial Sequence: Synthetic oligonucleotide
  Target: SCNA; (+) strand; PAM type: YTN; PAM sequence: TTT
gaatacgttttatttttttt

SEQ ID NO: 67363 - DNA, 20 bp, Artificial Sequence
  Description of Artificial Sequence: Synthetic oligonucleotide
  Target: SCNA; (+) strand; PAM type: YTN; PAM sequence: TTG
aatacgttttattttttttc

SEQ ID NO: 67364 - DNA, 20 bp, Artificial Sequence
  Description of Artificial Sequence: Synthetic oligonucleotide
  Target: SCNA; (+) strand; PAM type: YTN; PAM sequence: TTT
tattttttttctaaatttct

SEQ ID NO: 67365 - DNA, 20 bp, Artificial Sequence
  Description of Artificial Sequence: Synthetic oligonucleotide
  Target: SCNA; (+) strand; PAM type: YTN; PAM sequence: TTT
attttttttctaaatttctc

SEQ ID NO: 67366 - DNA, 20 bp, Artificial Sequence
  Description of Artificial Sequence: Synthetic oligonucleotide
  Target: SCNA; (+) strand; PAM type: YTN; PAM sequence: TTA
ttttttttctaaatttctct

SEQ ID NO: 67367 - DNA, 20 bp, Artificial Sequence
  Description of Artificial Sequence: Synthetic oligonucleotide
  Target: SCNA; (+) strand; PAM type: YTN; PAM sequence: TTT
tttttctaaatttctctatt

SEQ ID NO: 67368 - DNA, 20 bp, Artificial Sequence
  Description of Artificial Sequence: Synthetic oligonucleotide
  Target: SCNA; (+) strand; PAM type: YTN; PAM sequence: TTT
ttttctaaatttctctattt

SEQ ID NO: 67369 - DNA, 20 bp, Artificial Sequence
  Description of Artificial Sequence: Synthetic oligonucleotide
  Target: SCNA; (+) strand; PAM type: YTN; PAM sequence: TTT
tttctaaatttctctattta

SEQ ID NO: 67370 - DNA, 20 bp, Artificial Sequence
  Description of Artificial Sequence: Synthetic oligonucleotide
  Target: SCNA; (+) strand; PAM type: YTN; PAM sequence: TTT
ttctaaatttctctatttat

SEQ ID NO: 67371 - DNA, 20 bp, Artificial Sequence
  Description of Artificial Sequence: Synthetic oligonucleotide
  Target: SCNA; (+) strand; PAM type: YTN; PAM sequence: TTT
tctaaatttctctatttatt

SEQ ID NO: 67372 - DNA, 20 bp, Artificial Sequence
  Description of Artificial Sequence: Synthetic oligonucleotide
  Target: SCNA; (+) strand; PAM type: YTN; PAM sequence: TTT
ctaaatttctctatttattt

SEQ ID NO: 67373 - DNA, 20 bp, Artificial Sequence
  Description of Artificial Sequence: Synthetic oligonucleotide
  Target: SCNA; (+) strand; PAM type: YTN; PAM sequence: TTC
taaatttctctatttatttc

SEQ ID NO: 67374 - DNA, 20 bp, Artificial Sequence
  Description of Artificial Sequence: Synthetic oligonucleotide
  Target: SCNA; (+) strand; PAM type: YTN; PAM sequence: CTA
aatttctctatttatttcta

SEQ ID NO: 67375 - DNA, 20 bp, Artificial Sequence
  Description of Artificial Sequence: Synthetic oligonucleotide
  Target: SCNA; (+) strand; PAM type: YTN; PAM sequence: TTT
ctctatttatttctacctga

SEQ ID NO: 67376 - DNA, 20 bp, Artificial Sequence
  Description of Artificial Sequence: Synthetic oligonucleotide
  Target: SCNA; (+) strand; PAM type: YTN; PAM sequence: TTC
tctatttatttctacctgag

SEQ ID NO: 67377 - DNA, 20 bp, Artificial Sequence
  Description of Artificial Sequence: Synthetic oligonucleotide
  Target: SCNA; (+) strand; PAM type: YTN; PAM sequence: CTC
tatttatttctacctgagca

SEQ ID NO: 67378 - DNA, 20 bp, Artificial Sequence
  Description of Artificial Sequence: Synthetic oligonucleotide
  Target: SCNA; (+) strand; PAM type: YTN; PAM sequence: CTA
tttatttctacctgagcatt

SEQ ID NO: 67379 - DNA, 20 bp, Artificial Sequence
  Description of Artificial Sequence: Synthetic oligonucleotide
  Target: SCNA; (+) strand; PAM type: YTN; PAM sequence: TTT
atttctacctgagcatttct

SEQ ID NO: 67380 - DNA, 20 bp, Artificial Sequence
  Description of Artificial Sequence: Synthetic oligonucleotide
  Target: SCNA; (+) strand; PAM type: YTN; PAM sequence: TTA
tttctacctgagcatttctt

SEQ ID NO: 67381 - DNA, 20 bp, Artificial Sequence
  Description of Artificial Sequence: Synthetic oligonucleotide
  Target: SCNA; (+) strand; PAM type: YTN; PAM sequence: TTT
ctacctgagcatttcttaat

SEQ ID NO: 67382 - DNA, 20 bp, Artificial Sequence
  Description of Artificial Sequence: Synthetic oligonucleotide
  Target: SCNA; (+) strand; PAM type: YTN; PAM sequence: TTC
tacctgagcatttcttaatt

SEQ ID NO: 67383 - DNA, 20 bp, Artificial Sequence
  Description of Artificial Sequence: Synthetic oligonucleotide
  Target: SCNA; (+) strand; PAM type: YTN; PAM sequence: CTA
cctgagcatttcttaatttt

SEQ ID NO: 67384 - DNA, 20 bp, Artificial Sequence
  Description of Artificial Sequence: Synthetic oligonucleotide
  Target: SCNA; (+) strand; PAM type: YTN; PAM sequence: CTG
agcatttcttaattttttta

SEQ ID NO: 67385 - DNA, 20 bp, Artificial Sequence
  Description of Artificial Sequence: Synthetic oligonucleotide
  Target: SCNA; (+) strand; PAM type: YTN; PAM sequence: TTT
cttaatttttttattcagtc

SEQ ID NO: 67386 - DNA, 20 bp, Artificial Sequence
  Description of Artificial Sequence: Synthetic oligonucleotide
  Target: SCNA; (+) strand; PAM type: YTN; PAM sequence: TTC
ttaatttttttattcagtcc

SEQ ID NO: 67387 - DNA, 20 bp, Artificial Sequence
  Description of Artificial Sequence: Synthetic oligonucleotide
  Target: SCNA; (+) strand; PAM type: YTN; PAM sequence: CTT
aatttttttattcagtcctg

SEQ ID NO: 67388 - DNA, 20 bp, Artificial Sequence
  Description of Artificial Sequence: Synthetic oligonucleotide
  Target: SCNA; (+) strand; PAM type: YTN; PAM sequence: TTA
atttttttattcagtcctgt

SEQ ID NO: 67389 - DNA, 20 bp, Artificial Sequence
  Description of Artificial Sequence: Synthetic oligonucleotide
  Target: SCNA; (+) strand; PAM type: YTN; PAM sequence: TTT
ttttattcagtcctgttatt

SEQ ID NO: 67390 - DNA, 20 bp, Artificial Sequence
  Description of Artificial Sequence: Synthetic oligonucleotide
  Target: SCNA; (+) strand; PAM type: YTN; PAM sequence: TTT
tttattcagtcctgttattc

SEQ ID NO: 67391 - DNA, 20 bp, Artificial Sequence
  Description of Artificial Sequence: Synthetic oligonucleotide
  Target: SCNA; (+) strand; PAM type: YTN; PAM sequence: TTT
ttattcagtcctgttattct

SEQ ID NO: 67392 - DNA, 20 bp, Artificial Sequence
  Description of Artificial Sequence: Synthetic oligonucleotide
  Target: SCNA; (+) strand; PAM type: YTN; PAM sequence: TTT
tattcagtcctgttattctc

SEQ ID NO: 67393 - DNA, 20 bp, Artificial Sequence
  Description of Artificial Sequence: Synthetic oligonucleotide
  Target: SCNA; (+) strand; PAM type: YTN; PAM sequence: TTT
attcagtcctgttattctca

SEQ ID NO: 67394 - DNA, 20 bp, Artificial Sequence
  Description of Artificial Sequence: Synthetic oligonucleotide
  Target: SCNA; (+) strand; PAM type: YTN; PAM sequence: TTA
ttcagtcctgttattctcac

SEQ ID NO: 67395 - DNA, 20 bp, Artificial Sequence
  Description of Artificial Sequence: Synthetic oligonucleotide
  Target: SCNA; (+) strand; PAM type: YTN; PAM sequence: TTC
agtcctgttattctcactgt

SEQ ID NO: 67396 - DNA, 20 bp, Artificial Sequence
  Description of Artificial Sequence: Synthetic oligonucleotide
  Target: SCNA; (+) strand; PAM type: YTN; PAM sequence: CTG
ttattctcactgtaggattt

SEQ ID NO: 67397 - DNA, 20 bp, Artificial Sequence
  Description of Artificial Sequence: Synthetic oligonucleotide
  Target: SCNA; (+) strand; PAM type: YTN; PAM sequence: TTA
ttctcactgtaggattttta

SEQ ID NO: 67398 - DNA, 20 bp, Artificial Sequence
  Description of Artificial Sequence: Synthetic oligonucleotide
  Target: SCNA; (+) strand; PAM type: YTN; PAM sequence: TTC
tcactgtaggatttttaaaa

SEQ ID NO: 67399 - DNA, 20 bp, Artificial Sequence
  Description of Artificial Sequence: Synthetic oligonucleotide
  Target: SCNA; (+) strand; PAM type: YTN; PAM sequence: CTC
actgtaggatttttaaaagc

SEQ ID NO: 67400 - DNA, 20 bp, Artificial Sequence
  Description of Artificial Sequence: Synthetic oligonucleotide
  Target: SCNA; (+) strand; PAM type: YTN; PAM sequence: CTG
taggatttttaaaagctggt

SEQ ID NO: 67401 - DNA, 20 bp, Artificial Sequence
  Description of Artificial Sequence: Synthetic oligonucleotide
  Target: SCNA; (+) strand; PAM type: YTN; PAM sequence: TTT
ttaaaagctggtatattata

SEQ ID NO: 67402 - DNA, 20 bp, Artificial Sequence
  Description of Artificial Sequence: Synthetic oligonucleotide
  Target: SCNA; (+) strand; PAM type: YTN; PAM sequence: TTT
taaaagctggtatattatat

SEQ ID NO: 67403 - DNA, 20 bp, Artificial Sequence
  Description of Artificial Sequence: Synthetic oligonucleotide
  Target: SCNA; (+) strand; PAM type: YTN; PAM sequence: TTT
aaaagctggtatattatatt

SEQ ID NO: 67404 - DNA, 20 bp, Artificial Sequence
  Description of Artificial Sequence: Synthetic oligonucleotide
  Target: SCNA; (+) strand; PAM type: YTN; PAM sequence: TTA
aaagctggtatattatatta

SEQ ID NO: 67405 - DNA, 20 bp, Artificial Sequence
  Description of Artificial Sequence: Synthetic oligonucleotide
  Target: SCNA; (+) strand; PAM type: YTN; PAM sequence: CTG
gtatattatattaaaatcct

SEQ ID NO: 67406 - DNA, 20 bp, Artificial Sequence
  Description of Artificial Sequence: Synthetic oligonucleotide
  Target: SCNA; (+) strand; PAM type: YTN; PAM sequence: TTA
tattaaaatccttcaactgt

SEQ ID NO: 67407 - DNA, 20 bp, Artificial Sequence
  Description of Artificial Sequence: Synthetic oligonucleotide
  Target: SCNA; (+) strand; PAM type: YTN; PAM sequence: TTA
aaatccttcaactgtgaatt

SEQ ID NO: 67408 - DNA, 20 bp, Artificial Sequence
  Description of Artificial Sequence: Synthetic oligonucleotide
  Target: SCNA; (+) strand; PAM type: YTN; PAM sequence: CTT
caactgtgaattcagcaatg

SEQ ID NO: 67409 - DNA, 20 bp, Artificial Sequence
  Description of Artificial Sequence: Synthetic oligonucleotide
  Target: SCNA; (+) strand; PAM type: YTN; PAM sequence: TTC
aactgtgaattcagcaatgt

SEQ ID NO: 67410 - DNA, 20 bp, Artificial Sequence
  Description of Artificial Sequence: Synthetic oligonucleotide
  Target: SCNA; (+) strand; PAM type: YTN; PAM sequence: CTG
tgaattcagcaatgttttga

SEQ ID NO: 67411 - DNA, 20 bp, Artificial Sequence
  Description of Artificial Sequence: Synthetic oligonucleotide
  Target: SCNA; (+) strand; PAM type: YTN; PAM sequence: TTC
agcaatgttttgagttccag

SEQ ID NO: 67412 - DNA, 20 bp, Artificial Sequence
  Description of Artificial Sequence: Synthetic oligonucleotide
  Target: SCNA; (+) strand; PAM type: YTN; PAM sequence: TTT
tgagttccagggattcatct

SEQ ID NO: 67413 - DNA, 20 bp, Artificial Sequence
  Description of Artificial Sequence: Synthetic oligonucleotide
  Target: SCNA; (+) strand; PAM type: YTN; PAM sequence: TTT
gagttccagggattcatctg

SEQ ID NO: 67414 - DNA, 20 bp, Artificial Sequence
  Description of Artificial Sequence: Synthetic oligonucleotide
  Target: SCNA; (+) strand; PAM type: YTN; PAM sequence: TTG
agttccagggattcatctgg

SEQ ID NO: 67415 - DNA, 20 bp, Artificial Sequence
  Description of Artificial Sequence: Synthetic oligonucleotide
  Target: SCNA; (+) strand; PAM type: YTN; PAM sequence: TTC
cagggattcatctggcatta

SEQ ID NO: 67416 - DNA, 20 bp, Artificial Sequence
  Description of Artificial Sequence: Synthetic oligonucleotide
  Target: SCNA; (+) strand; PAM type: YTN; PAM sequence: TTC
atctggcattaggctgacct

SEQ ID NO: 67417 - DNA, 20 bp, Artificial Sequence
  Description of Artificial Sequence: Synthetic oligonucleotide
  Target: SCNA; (+) strand; PAM type: YTN; PAM sequence: CTG
gcattaggctgaccttgtca

SEQ ID NO: 67418 - DNA, 20 bp, Artificial Sequence
  Description of Artificial Sequence: Synthetic oligonucleotide
  Target: SCNA; (+) strand; PAM type: YTN; PAM sequence: TTA
ggctgaccttgtcaagcata

SEQ ID NO: 67419 - DNA, 20 bp, Artificial Sequence
  Description of Artificial Sequence: Synthetic oligonucleotide
  Target: SCNA; (+) strand; PAM type: YTN; PAM sequence: CTG
accttgtcaagcataaacat

SEQ ID NO: 67420 - DNA, 20 bp, Artificial Sequence
  Description of Artificial Sequence: Synthetic oligonucleotide
  Target: SCNA; (+) strand; PAM type: YTN; PAM sequence: CTT
gtcaagcataaacatcaaca

SEQ ID NO: 67421 - DNA, 20 bp, Artificial Sequence
  Description of Artificial Sequence: Synthetic oligonucleotide
  Target: SCNA; (+) strand; PAM type: YTN; PAM sequence: TTG
tcaagcataaacatcaacat

SEQ ID NO: 67422 - DNA, 20 bp, Artificial Sequence
  Description of Artificial Sequence: Synthetic oligonucleotide
  Target: SCNA; (+) strand; PAM type: YTN; PAM sequence: TTA
aagaaaatatttaagaaatg

SEQ ID NO: 67423 - DNA, 20 bp, Artificial Sequence
  Description of Artificial Sequence: Synthetic oligonucleotide
  Target: SCNA; (+) strand; PAM type: YTN; PAM sequence: TTT
aagaaatgaaaggcctgaat

SEQ ID NO: 67424 - DNA, 20 bp, Artificial Sequence
  Description of Artificial Sequence: Synthetic oligonucleotide
  Target: SCNA; (+) strand; PAM type: YTN; PAM sequence: TTA
agaaatgaaaggcctgaatc

SEQ ID NO: 67425 - DNA, 20 bp, Artificial Sequence
  Description of Artificial Sequence: Synthetic oligonucleotide
  Target: SCNA; (+) strand; PAM type: YTN; PAM sequence: CTG
aatcaaaataagaggtcaaa

SEQ ID NO: 67426 - DNA, 20 bp, Artificial Sequence
  Description of Artificial Sequence: Synthetic oligonucleotide
  Target: SCNA; (+) strand; PAM type: YTN; PAM sequence: TTT
tccagggtgttttgtgtctt

SEQ ID NO: 67427 - DNA, 20 bp, Artificial Sequence
  Description of Artificial Sequence: Synthetic oligonucleotide
  Target: SCNA; (+) strand; PAM type: YTN; PAM sequence: TTT
ccagggtgttttgtgtcttg

SEQ ID NO: 67428 - DNA, 20 bp, Artificial Sequence
  Description of Artificial Sequence: Synthetic oligonucleotide
  Target: SCNA; (+) strand; PAM type: YTN; PAM sequence: TTC
cagggtgttttgtgtcttga

SEQ ID NO: 67429 - DNA, 20 bp, Artificial Sequence
  Description of Artificial Sequence: Synthetic oligonucleotide
  Target: SCNA; (+) strand; PAM type: YTN; PAM sequence: TTT
tgtgtcttgaaaatctttct

SEQ ID NO: 67430 - DNA, 20 bp, Artificial Sequence
  Description of Artificial Sequence: Synthetic oligonucleotide
  Target: SCNA; (+) strand; PAM type: YTN; PAM sequence: TTT
gtgtcttgaaaatctttctg

SEQ ID NO: 67431 - DNA, 20 bp, Artificial Sequence
  Description of Artificial Sequence: Synthetic oligonucleotide
  Target: SCNA; (+) strand; PAM type: YTN; PAM sequence: TTG
tgtcttgaaaatctttctgc

SEQ ID NO: 67432 - DNA, 20 bp, Artificial Sequence
  Description of Artificial Sequence: Synthetic oligonucleotide
  Target: SCNA; (+) strand; PAM type: YTN; PAM sequence: CTT
gaaaatctttctgctgtaat

SEQ ID NO: 67433 - DNA, 20 bp, Artificial Sequence
  Description of Artificial Sequence: Synthetic oligonucleotide
  Target: SCNA; (+) strand; PAM type: YTN; PAM sequence: TTG
aaaatctttctgctgtaatt

SEQ ID NO: 67434 - DNA, 20 bp, Artificial Sequence
  Description of Artificial Sequence: Synthetic oligonucleotide
  Target: SCNA; (+) strand; PAM type: YTN; PAM sequence: CTT
tctgctgtaattacctaaag

SEQ ID NO: 67435 - DNA, 20 bp, Artificial Sequence
  Description of Artificial Sequence: Synthetic oligonucleotide
  Target: SCNA; (+) strand; PAM type: YTN; PAM sequence: TTT
ctgctgtaattacctaaaga

SEQ ID NO: 67436 - DNA, 20 bp, Artificial Sequence
  Description of Artificial Sequence: Synthetic oligonucleotide
  Target: SCNA; (+) strand; PAM type: YTN; PAM sequence: TTC
tgctgtaattacctaaagac

SEQ ID NO: 67437 - DNA, 20 bp, Artificial Sequence
  Description of Artificial Sequence: Synthetic oligonucleotide
  Target: SCNA; (+) strand; PAM type: YTN; PAM sequence: CTG
ctgtaattacctaaagactg

SEQ ID NO: 67438 - DNA, 20 bp, Artificial Sequence
  Description of Artificial Sequence: Synthetic oligonucleotide
  Target: SCNA; (+) strand; PAM type: YTN; PAM sequence: CTG
taattacctaaagactgtgg

SEQ ID NO: 67439 - DNA, 20 bp, Artificial Sequence
  Description of Artificial Sequence: Synthetic oligonucleotide
  Target: SCNA; (+) strand; PAM type: YTN; PAM sequence: TTA
cctaaagactgtggttagat

SEQ ID NO: 67440 - DNA, 20 bp, Artificial Sequence
  Description of Artificial Sequence: Synthetic oligonucleotide
  Target: SCNA; (+) strand; PAM type: YTN; PAM sequence: CTA
aagactgtggttagataatt

SEQ ID NO: 67441 - DNA, 20 bp, Artificial Sequence
  Description of Artificial Sequence: Synthetic oligonucleotide
  Target: SCNA; (+) strand; PAM type: YTN; PAM sequence: CTG
tggttagataattattgagg

SEQ ID NO: 67442 - DNA, 20 bp, Artificial Sequence
  Description of Artificial Sequence: Synthetic oligonucleotide
  Target: SCNA; (+) strand; PAM type: YTN; PAM sequence: TTA
gataattattgagggacttt

SEQ ID NO: 67443 - DNA, 20 bp, Artificial Sequence
  Description of Artificial Sequence: Synthetic oligonucleotide
  Target: SCNA; (+) strand; PAM type: YTN; PAM sequence: TTA
ttgagggacttttgcaattg

SEQ ID NO: 67444 - DNA, 20 bp, Artificial Sequence
  Description of Artificial Sequence: Synthetic oligonucleotide
  Target: SCNA; (+) strand; PAM type: YTN; PAM sequence: TTG
agggacttttgcaattgtcc

SEQ ID NO: 67445 - DNA, 20 bp, Artificial Sequence
  Description of Artificial Sequence: Synthetic oligonucleotide
  Target: SCNA; (+) strand; PAM type: YTN; PAM sequence: CTT
ttgcaattgtcccttttctc

SEQ ID NO: 67446 - DNA, 20 bp, Artificial Sequence
  Description of Artificial Sequence: Synthetic oligonucleotide
  Target: SCNA; (+) strand; PAM type: YTN; PAM sequence: TTT
tgcaattgtcccttttctct

SEQ ID NO: 67447 - DNA, 20 bp, Artificial Sequence
  Description of Artificial Sequence: Synthetic oligonucleotide
  Target: SCNA; (+) strand; PAM type: YTN; PAM sequence: TTT
gcaattgtcccttttctcta

SEQ ID NO: 67448 - DNA, 20 bp, Artificial Sequence
  Description of Artificial Sequence: Synthetic oligonucleotide
  Target: SCNA; (+) strand; PAM type: YTN; PAM sequence: TTG
caattgtcccttttctctat

SEQ ID NO: 67449 - DNA, 20 bp, Artificial Sequence
  Description of Artificial Sequence: Synthetic oligonucleotide
  Target: SCNA; (+) strand; PAM type: YTN; PAM sequence: TTG
tcccttttctctatatagat

SEQ ID NO: 67450 - DNA, 20 bp, Artificial Sequence
  Description of Artificial Sequence: Synthetic oligonucleotide
  Target: SCNA; (+) strand; PAM type: YTN; PAM sequence: CTT
ttctctatatagatcaccac

SEQ ID NO: 67451 - DNA, 20 bp, Artificial Sequence
  Description of Artificial Sequence: Synthetic oligonucleotide
  Target: SCNA; (+) strand; PAM type: YTN; PAM sequence: TTT
tctctatatagatcaccaca

SEQ ID NO: 67452 - DNA, 20 bp, Artificial Sequence
  Description of Artificial Sequence: Synthetic oligonucleotide
  Target: SCNA; (+) strand; PAM type: YTN; PAM sequence: TTT
ctctatatagatcaccacat

SEQ ID NO: 67453 - DNA, 20 bp, Artificial Sequence
  Description of Artificial Sequence: Synthetic oligonucleotide
  Target: SCNA; (+) strand; PAM type: YTN; PAM sequence: TTC
tctatatagatcaccacatt

SEQ ID NO: 67454 - DNA, 20 bp, Artificial Sequence
  Description of Artificial Sequence: Synthetic oligonucleotide
  Target: SCNA; (+) strand; PAM type: YTN; PAM sequence: CTC
tatatagatcaccacattaa

SEQ ID NO: 67455 - DNA, 20 bp, Artificial Sequence
  Description of Artificial Sequence: Synthetic oligonucleotide
  Target: SCNA; (+) strand; PAM type: YTN; PAM sequence: CTA
tatagatcaccacattaatt

SEQ ID NO: 67456 - DNA, 20 bp, Artificial Sequence
  Description of Artificial Sequence: Synthetic oligonucleotide
  Target: SCNA; (+) strand; PAM type: YTN; PAM sequence: TTA
attaaacgagagtctcactg

SEQ ID NO: 67457 - DNA, 20 bp, Artificial Sequence
  Description of Artificial Sequence: Synthetic oligonucleotide
  Target: SCNA; (+) strand; PAM type: YTN; PAM sequence: TTA
aacgagagtctcactgggaa

SEQ ID NO: 67458 - DNA, 20 bp, Artificial Sequence
  Description of Artificial Sequence: Synthetic oligonucleotide
  Target: SCNA; (+) strand; PAM type: YTN; PAM sequence: CTC
actgggaacaggttgctgtt

SEQ ID NO: 67459 - DNA, 20 bp, Artificial Sequence
  Description of Artificial Sequence: Synthetic oligonucleotide
  Target: SCNA; (+) strand; PAM type: YTN; PAM sequence: CTG
ggaacaggttgctgttctgc

SEQ ID NO: 67460 - DNA, 20 bp, Artificial Sequence
  Description of Artificial Sequence: Synthetic oligonucleotide
  Target: SCNA; (+) strand; PAM type: YTN; PAM sequence: TTG
ctgttctgcatctttaagta

SEQ ID NO: 67461 - DNA, 20 bp, Artificial Sequence
  Description of Artificial Sequence: Synthetic oligonucleotide
  Target: SCNA; (+) strand; PAM type: YTN; PAM sequence: CTG
ttctgcatctttaagtattt

SEQ ID NO: 67462 - DNA, 20 bp, Artificial Sequence
  Description of Artificial Sequence: Synthetic oligonucleotide
  Target: SCNA; (+) strand; PAM type: YTN; PAM sequence: TTC
tgcatctttaagtattttta

SEQ ID NO: 67463 - DNA, 20 bp, Artificial Sequence
  Description of Artificial Sequence: Synthetic oligonucleotide
  Target: SCNA; (+) strand; PAM type: YTN; PAM sequence: CTG
catctttaagtatttttagt

SEQ ID NO: 67464 - DNA, 20 bp, Artificial Sequence
  Description of Artificial Sequence: Synthetic oligonucleotide
  Target: SCNA; (+) strand; PAM type: YTN; PAM sequence: CTT
taagtatttttagtacttta

SEQ ID NO: 67465 - DNA, 20 bp, Artificial Sequence
  Description of Artificial Sequence: Synthetic oligonucleotide
  Target: SCNA; (+) strand; PAM type: YTN; PAM sequence: TTT
aagtatttttagtactttat

SEQ ID NO: 67466 - DNA, 20 bp, Artificial Sequence
  Description of Artificial Sequence: Synthetic oligonucleotide
  Target: SCNA; (+) strand; PAM type: YTN; PAM sequence: TTA
agtatttttagtactttatt

SEQ ID NO: 67467 - DNA, 20 bp, Artificial Sequence
  Description of Artificial Sequence: Synthetic oligonucleotide
  Target: SCNA; (+) strand; PAM type: YTN; PAM sequence: TTT
ttagtactttattttcaaaa

SEQ ID NO: 67468 - DNA, 20 bp, Artificial Sequence
  Description of Artificial Sequence: Synthetic oligonucleotide
  Target: SCNA; (+) strand; PAM type: YTN; PAM sequence: TTT
tagtactttattttcaaaag

SEQ ID NO: 67469 - DNA, 20 bp, Artificial Sequence
  Description of Artificial Sequence: Synthetic oligonucleotide
  Target: SCNA; (+) strand; PAM type: YTN; PAM sequence: TTT
agtactttattttcaaaaga

SEQ ID NO: 67470 - DNA, 20 bp, Artificial Sequence
  Description of Artificial Sequence: Synthetic oligonucleotide
  Target: SCNA; (+) strand; PAM type: YTN; PAM sequence: TTA
gtactttattttcaaaagag

SEQ ID NO: 67471 - DNA, 20 bp, Artificial Sequence
  Description of Artificial Sequence: Synthetic oligonucleotide
  Target: SCNA; (+) strand; PAM type: YTN; PAM sequence: CTT
tattttcaaaagagaaaaag

SEQ ID NO: 67472 - DNA, 20 bp, Artificial Sequence
  Description of Artificial Sequence: Synthetic oligonucleotide
  Target: SCNA; (+) strand; PAM type: YTN; PAM sequence: TTT
attttcaaaagagaaaaaga

SEQ ID NO: 67473 - DNA, 20 bp, Artificial Sequence
  Description of Artificial Sequence: Synthetic oligonucleotide
  Target: SCNA; (+) strand; PAM type: YTN; PAM sequence: TTA
ttttcaaaagagaaaaagaa

SEQ ID NO: 67474 - DNA, 20 bp, Artificial Sequence
  Description of Artificial Sequence: Synthetic oligonucleotide
  Target: SCNA; (+) strand; PAM type: YTN; PAM sequence: TTT
tcaaaagagaaaaagaacca

SEQ ID NO: 67475 - DNA, 20 bp, Artificial Sequence
  Description of Artificial Sequence: Synthetic oligonucleotide
  Target: SCNA; (+) strand; PAM type: YTN; PAM sequence: TTT
caaaagagaaaaagaaccac

SEQ ID NO: 67476 - DNA, 20 bp, Artificial Sequence
  Description of Artificial Sequence: Synthetic oligonucleotide
  Target: SCNA; (+) strand; PAM type: YTN; PAM sequence: TTC
aaaagagaaaaagaaccact

SEQ ID NO: 67477 - DNA, 20 bp, Artificial Sequence
  Description of Artificial Sequence: Synthetic oligonucleotide
  Target: SCNA; (+) strand; PAM type: YTN; PAM sequence: CTA
agaagaagattgcttctcag

SEQ ID NO: 67478 - DNA, 20 bp, Artificial Sequence
  Description of Artificial Sequence: Synthetic oligonucleotide
  Target: SCNA; (+) strand; PAM type: YTN; PAM sequence: TTG
cttctcagccaaattttctg

SEQ ID NO: 67479 - DNA, 20 bp, Artificial Sequence
  Description of Artificial Sequence: Synthetic oligonucleotide
  Target: SCNA; (+) strand; PAM type: YTN; PAM sequence: CTT
ctcagccaaattttctgata

SEQ ID NO: 67480 - DNA, 20 bp, Artificial Sequence
  Description of Artificial Sequence: Synthetic oligonucleotide
  Target: SCNA; (+) strand; PAM type: YTN; PAM sequence: TTC
tcagccaaattttctgatat

SEQ ID NO: 67481 - DNA, 20 bp, Artificial Sequence
  Description of Artificial Sequence: Synthetic oligonucleotide
  Target: SCNA; (+) strand; PAM type: YTN; PAM sequence: CTC
agccaaattttctgatatac

SEQ ID NO: 67482 - DNA, 20 bp, Artificial Sequence
  Description of Artificial Sequence: Synthetic oligonucleotide
  Target: SCNA; (+) strand; PAM type: YTN; PAM sequence: TTT
tctgatatacagatattctc

SEQ ID NO: 67483 - DNA, 20 bp, Artificial Sequence
  Description of Artificial Sequence: Synthetic oligonucleotide
  Target: SCNA; (+) strand; PAM type: YTN; PAM sequence: TTT
ctgatatacagatattctca

SEQ ID NO: 67484 - DNA, 20 bp, Artificial Sequence
  Description of Artificial Sequence: Synthetic oligonucleotide
  Target: SCNA; (+) strand; PAM type: YTN; PAM sequence: TTC
tgatatacagatattctcaa

SEQ ID NO: 67485 - DNA, 20 bp, Artificial Sequence
  Description of Artificial Sequence: Synthetic oligonucleotide
  Target: SCNA; (+) strand; PAM type: YTN; PAM sequence: CTG
atatacagatattctcaaaa

SEQ ID NO: 67486 - DNA, 20 bp, Artificial Sequence
  Description of Artificial Sequence: Synthetic oligonucleotide
  Target: SCNA; (+) strand; PAM type: YTN; PAM sequence: TTC
tcaaaagacaagcacacaca

SEQ ID NO: 67487 - DNA, 20 bp, Artificial Sequence
  Description of Artificial Sequence: Synthetic oligonucleotide
  Target: SCNA; (+) strand; PAM type: YTN; PAM sequence: CTC
aaaagacaagcacacacaca

SEQ ID NO: 67488 - DNA, 20 bp, Artificial Sequence
  Description of Artificial Sequence: Synthetic oligonucleotide
  Target: SCNA; (+) strand; PAM type: YTN; PAM sequence: CTC
tggaatgtgccttaacaatc

SEQ ID NO: 67489 - DNA, 20 bp, Artificial Sequence
  Description of Artificial Sequence: Synthetic oligonucleotide
  Target: SCNA; (+) strand; PAM type: YTN; PAM sequence: CTG
gaatgtgccttaacaatctt

SEQ ID NO: 67490 - DNA, 20 bp, Artificial Sequence
  Description of Artificial Sequence: Synthetic oligonucleotide
  Target: SCNA; (+) strand; PAM type: YTN; PAM sequence: CTT
aacaatcttatttttgcaca

SEQ ID NO: 67491 - DNA, 20 bp, Artificial Sequence
  Description of Artificial Sequence: Synthetic oligonucleotide
  Target: SCNA; (+) strand; PAM type: YTN; PAM sequence: TTA
acaatcttatttttgcacat

SEQ ID NO: 67492 - DNA, 20 bp, Artificial Sequence
  Description of Artificial Sequence: Synthetic oligonucleotide
  Target: SCNA; (+) strand; PAM type: YTN; PAM sequence: CTT
atttttgcacattttaaaag

SEQ ID NO: 67493 - DNA, 20 bp, Artificial Sequence
  Description of Artificial Sequence: Synthetic oligonucleotide
  Target: SCNA; (+) strand; PAM type: YTN; PAM sequence: TTA
tttttgcacattttaaaagg

SEQ ID NO: 67494 - DNA, 20 bp, Artificial Sequence
  Description of Artificial Sequence: Synthetic oligonucleotide
  Target: SCNA; (+) strand; PAM type: YTN; PAM sequence: TTT
ttgcacattttaaaaggagg

SEQ ID NO: 67495 - DNA, 20 bp, Artificial Sequence
  Description of Artificial Sequence: Synthetic oligonucleotide
  Target: SCNA; (+) strand; PAM type: YTN; PAM sequence: TTT
tgcacattttaaaaggaggt

SEQ ID NO: 67496 - DNA, 20 bp, Artificial Sequence
  Description of Artificial Sequence: Synthetic oligonucleotide
  Target: SCNA; (+) strand; PAM type: YTN; PAM sequence: TTT
gcacattttaaaaggaggtc

SEQ ID NO: 67497 - DNA, 20 bp, Artificial Sequence
  Description of Artificial Sequence: Synthetic oligonucleotide
  Target: SCNA; (+) strand; PAM type: YTN; PAM sequence: TTG
cacattttaaaaggaggtca

SEQ ID NO: 67498 - DNA, 20 bp, Artificial Sequence
  Description of Artificial Sequence: Synthetic oligonucleotide
  Target: SCNA; (+) strand; PAM type: YTN; PAM sequence: TTT
taaaaggaggtcattatgaa

SEQ ID NO: 67499 - DNA, 20 bp, Artificial Sequence
  Description of Artificial Sequence: Synthetic oligonucleotide
  Target: SCNA; (+) strand; PAM type: YTN; PAM sequence: TTT
aaaaggaggtcattatgaaa

SEQ ID NO: 67500 - DNA, 20 bp, Artificial Sequence
  Description of Artificial Sequence: Synthetic oligonucleotide
  Target: SCNA; (+) strand; PAM type: YTN; PAM sequence: TTA
aaaggaggtcattatgaaat

SEQ ID NO: 67501 - DNA, 20 bp, Artificial Sequence
  Description of Artificial Sequence: Synthetic oligonucleotide
  Target: SCNA; (+) strand; PAM type: YTN; PAM sequence: TTA
tgaaatttgcacatatttta

SEQ ID NO: 67502 - DNA, 20 bp, Artificial Sequence
  Description of Artificial Sequence: Synthetic oligonucleotide
  Target: SCNA; (+) strand; PAM type: YTN; PAM sequence: TTT
gcacatattttatgacctgt

SEQ ID NO: 67503 - DNA, 20 bp, Artificial Sequence
  Description of Artificial Sequence: Synthetic oligonucleotide
  Target: SCNA; (+) strand; PAM type: YTN; PAM sequence: TTG
cacatattttatgacctgta

SEQ ID NO: 67504 - DNA, 20 bp, Artificial Sequence
  Description of Artificial Sequence: Synthetic oligonucleotide
  Target: SCNA; (+) strand; PAM type: YTN; PAM sequence: TTT
tatgacctgtaatgtacttc

SEQ ID NO: 67505 - DNA, 20 bp, Artificial Sequence
  Description of Artificial Sequence: Synthetic oligonucleotide
  Target: SCNA; (+) strand; PAM type: YTN; PAM sequence: TTT
atgacctgtaatgtacttct

SEQ ID NO: 67506 - DNA, 20 bp, Artificial Sequence
  Description of Artificial Sequence: Synthetic oligonucleotide
  Target: SCNA; (+) strand; PAM type: YTN; PAM sequence: TTA
tgacctgtaatgtacttctc

SEQ ID NO: 67507 - DNA, 20 bp, Artificial Sequence
  Description of Artificial Sequence: Synthetic oligonucleotide
  Target: SCNA; (+) strand; PAM type: YTN; PAM sequence: CTG
taatgtacttctctgatctg

SEQ ID NO: 67508 - DNA, 20 bp, Artificial Sequence
  Description of Artificial Sequence: Synthetic oligonucleotide
  Target: SCNA; (+) strand; PAM type: YTN; PAM sequence: CTT
ctctgatctgatttcacttg

SEQ ID NO: 67509 - DNA, 20 bp, Artificial Sequence
  Description of Artificial Sequence: Synthetic oligonucleotide
  Target: SCNA; (+) strand; PAM type: YTN; PAM sequence: TTC
tctgatctgatttcacttga

SEQ ID NO: 67510 - DNA, 20 bp, Artificial Sequence
  Description of Artificial Sequence: Synthetic oligonucleotide
  Target: SCNA; (+) strand; PAM type: YTN; PAM sequence: CTC
tgatctgatttcacttgagc

SEQ ID NO: 67511 - DNA, 20 bp, Artificial Sequence
  Description of Artificial Sequence: Synthetic oligonucleotide
  Target: SCNA; (+) strand; PAM type: YTN; PAM sequence: CTG
atctgatttcacttgagcta

SEQ ID NO: 67512 - DNA, 20 bp, Artificial Sequence
  Description of Artificial Sequence: Synthetic oligonucleotide
  Target: SCNA; (+) strand; PAM type: YTN; PAM sequence: CTG
atttcacttgagctaataaa

SEQ ID NO: 67513 - DNA, 20 bp, Artificial Sequence
  Description of Artificial Sequence: Synthetic oligonucleotide
  Target: SCNA; (+) strand; PAM type: YTN; PAM sequence: TTT
cacttgagctaataaaaaaa

SEQ ID NO: 67514 - DNA, 20 bp, Artificial Sequence
  Description of Artificial Sequence: Synthetic oligonucleotide
  Target: SCNA; (+) strand; PAM type: YTN; PAM sequence: TTC
acttgagctaataaaaaaat

SEQ ID NO: 67515 - DNA, 20 bp, Artificial Sequence
  Description of Artificial Sequence: Synthetic oligonucleotide
  Target: SCNA; (+) strand; PAM type: YTN; PAM sequence: CTT
gagctaataaaaaaatacaa

SEQ ID NO: 67516 - DNA, 20 bp, Artificial Sequence
  Description of Artificial Sequence: Synthetic oligonucleotide
  Target: SCNA; (+) strand; PAM type: YTN; PAM sequence: TTG
agctaataaaaaaatacaaa

SEQ ID NO: 67517 - DNA, 20 bp, Artificial Sequence
  Description of Artificial Sequence: Synthetic oligonucleotide
  Target: SCNA; (+) strand; PAM type: YTN; PAM sequence: CTA
ataaaaaaatacaaatcagg

SEQ ID NO: 67518 - DNA, 20 bp, Artificial Sequence
  Description of Artificial Sequence: Synthetic oligonucleotide
  Target: SCNA; (+) strand; PAM type: YTN; PAM sequence: CTT
gctgtgatcaagatgctaaa

SEQ ID NO: 67519 - DNA, 20 bp, Artificial Sequence
  Description of Artificial Sequence: Synthetic oligonucleotide
  Target: SCNA; (+) strand; PAM type: YTN; PAM sequence: TTG
ctgtgatcaagatgctaaag

SEQ ID NO: 67520 - DNA, 20 bp, Artificial Sequence
  Description of Artificial Sequence: Synthetic oligonucleotide
  Target: SCNA; (+) strand; PAM type: YTN; PAM sequence: CTG
tgatcaagatgctaaagtta

SEQ ID NO: 67521 - DNA, 20 bp, Artificial Sequence
  Description of Artificial Sequence: Synthetic oligonucleotide
  Target: SCNA; (+) strand; PAM type: YTN; PAM sequence: CTA
aagttatatttacactgctt

SEQ ID NO: 67522 - DNA, 20 bp, Artificial Sequence
  Description of Artificial Sequence: Synthetic oligonucleotide
  Target: SCNA; (+) strand; PAM type: YTN; PAM sequence: TTA
tatttacactgcttcataaa

SEQ ID NO: 67523 - DNA, 20 bp, Artificial Sequence
  Description of Artificial Sequence: Synthetic oligonucleotide
  Target: SCNA; (+) strand; PAM type: YTN; PAM sequence: TTT
acactgcttcataaatgtaa

SEQ ID NO: 67524 - DNA, 20 bp, Artificial Sequence
  Description of Artificial Sequence: Synthetic oligonucleotide
  Target: SCNA; (+) strand; PAM type: YTN; PAM sequence: TTA
cactgcttcataaatgtaag

SEQ ID NO: 67525 - DNA, 20 bp, Artificial Sequence
  Description of Artificial Sequence: Synthetic oligonucleotide
  Target: SCNA; (+) strand; PAM type: YTN; PAM sequence: CTG
cttcataaatgtaaggtgtt

SEQ ID NO: 67526 - DNA, 20 bp, Artificial Sequence
  Description of Artificial Sequence: Synthetic oligonucleotide
  Target: SCNA; (+) strand; PAM type: YTN; PAM sequence: CTT
cataaatgtaaggtgttaaa

SEQ ID NO: 67527 - DNA, 20 bp, Artificial Sequence
  Description of Artificial Sequence: Synthetic oligonucleotide
  Target: SCNA; (+) strand; PAM type: YTN; PAM sequence: TTC
ataaatgtaaggtgttaaag

SEQ ID NO: 67528 - DNA, 20 bp, Artificial Sequence
  Description of Artificial Sequence: Synthetic oligonucleotide
  Target: SCNA; (+) strand; PAM type: YTN; PAM sequence: TTA
aagcttagtgagacaagaag

SEQ ID NO: 67529 - DNA, 20 bp, Artificial Sequence
  Description of Artificial Sequence: Synthetic oligonucleotide
  Target: SCNA; (+) strand; PAM type: YTN; PAM sequence: CTT
agtgagacaagaagtaaact

SEQ ID NO: 67530 - DNA, 20 bp, Artificial Sequence
  Description of Artificial Sequence: Synthetic oligonucleotide
  Target: SCNA; (+) strand; PAM type: YTN; PAM sequence: TTA
gtgagacaagaagtaaactg

SEQ ID NO: 67531 - DNA, 20 bp, Artificial Sequence
  Description of Artificial Sequence: Synthetic oligonucleotide
  Target: SCNA; (+) strand; PAM type: YTN; PAM sequence: CTG
ataattgattaaccagggtg

SEQ ID NO: 67532 - DNA, 20 bp, Artificial Sequence
  Description of Artificial Sequence: Synthetic oligonucleotide
  Target: SCNA; (+) strand; PAM type: YTN; PAM sequence: TTG
attaaccagggtgctataca

SEQ ID NO: 67533 - DNA, 20 bp, Artificial Sequence
  Description of Artificial Sequence: Synthetic oligonucleotide
  Target: SCNA; (+) strand; PAM type: YTN; PAM sequence: TTA
accagggtgctatacaaatc

SEQ ID NO: 67534 - DNA, 20 bp, Artificial Sequence
  Description of Artificial Sequence: Synthetic oligonucleotide
  Target: SCNA; (+) strand; PAM type: YTN; PAM sequence: CTA
tacaaatctacctagagggt

SEQ ID NO: 67535 - DNA, 20 bp, Artificial Sequence
  Description of Artificial Sequence: Synthetic oligonucleotide
  Target: SCNA; (+) strand; PAM type: YTN; PAM sequence: CTA
cctagagggtgccttcccag

SEQ ID NO: 67536 - DNA, 20 bp, Artificial Sequence
  Description of Artificial Sequence: Synthetic oligonucleotide
  Target: SCNA; (+) strand; PAM type: YTN; PAM sequence: CTA
gagggtgccttcccaggtta

SEQ ID NO: 67537 - DNA, 20 bp, Artificial Sequence
  Description of Artificial Sequence: Synthetic oligonucleotide
  Target: SCNA; (+) strand; PAM type: YTN; PAM sequence: CTT
cccaggttaatgcaattatg

SEQ ID NO: 67538 - DNA, 20 bp, Artificial Sequence
  Description of Artificial Sequence: Synthetic oligonucleotide
  Target: SCNA; (+) strand; PAM type: YTN; PAM sequence: TTC
ccaggttaatgcaattatgg

SEQ ID NO: 67539 - DNA, 20 bp, Artificial Sequence
  Description of Artificial Sequence: Synthetic oligonucleotide
  Target: SCNA; (+) strand; PAM type: YTN; PAM sequence: TTA
atgcaattatgggagaaaga

SEQ ID NO: 67540 - DNA, 20 bp, Artificial Sequence
  Description of Artificial Sequence: Synthetic oligonucleotide
  Target: SCNA; (+) strand; PAM type: YTN; PAM sequence: TTA
tgggagaaagatcctggctc

SEQ ID NO: 67541 - DNA, 20 bp, Artificial Sequence
  Description of Artificial Sequence: Synthetic oligonucleotide
  Target: SCNA; (+) strand; PAM type: YTN; PAM sequence: CTG
gctcctggctacagaaatgc

SEQ ID NO: 67542 - DNA, 20 bp, Artificial Sequence
  Description of Artificial Sequence: Synthetic oligonucleotide
  Target: SCNA; (+) strand; PAM type: YTN; PAM sequence: CTC
ctggctacagaaatgccaac

SEQ ID NO: 67543 - DNA, 20 bp, Artificial Sequence
  Description of Artificial Sequence: Synthetic oligonucleotide
  Target: SCNA; (+) strand; PAM type: YTN; PAM sequence: CTG
gctacagaaatgccaactaa

SEQ ID NO: 67544 - DNA, 20 bp, Artificial Sequence
  Description of Artificial Sequence: Synthetic oligonucleotide
  Target: SCNA; (+) strand; PAM type: YTN; PAM sequence: CTA
cagaaatgccaactaaagtg

SEQ ID NO: 67545 - DNA, 20 bp, Artificial Sequence
  Description of Artificial Sequence: Synthetic oligonucleotide
  Target: SCNA; (+) strand; PAM type: YTN; PAM sequence: CTA
aagtgttatccaccccatcc

SEQ ID NO: 67546 - DNA, 20 bp, Artificial Sequence
  Description of Artificial Sequence: Synthetic oligonucleotide
  Target: SCNA; (+) strand; PAM type: YTN; PAM sequence: TTA
tccaccccatccttcacttt

SEQ ID NO: 67547 - DNA, 20 bp, Artificial Sequence
  Description of Artificial Sequence: Synthetic oligonucleotide
  Target: SCNA; (+) strand; PAM type: YTN; PAM sequence: CTT
cactttggaggatgcgttaa

SEQ ID NO: 67548 - DNA, 20 bp, Artificial Sequence
  Description of Artificial Sequence: Synthetic oligonucleotide
  Target: SCNA; (+) strand; PAM type: YTN; PAM sequence: TTC
actttggaggatgcgttaag

SEQ ID NO: 67549 - DNA, 20 bp, Artificial Sequence
  Description of Artificial Sequence: Synthetic oligonucleotide
  Target: SCNA; (+) strand; PAM type: YTN; PAM sequence: CTT
tggaggatgcgttaagatga

SEQ ID NO: 67550 - DNA, 20 bp, Artificial Sequence
  Description of Artificial Sequence: Synthetic oligonucleotide
  Target: SCNA; (+) strand; PAM type: YTN; PAM sequence: TTT
ggaggatgcgttaagatgac

SEQ ID NO: 67551 - DNA, 20 bp, Artificial Sequence
  Description of Artificial Sequence: Synthetic oligonucleotide
  Target: SCNA; (+) strand; PAM type: YTN; PAM sequence: TTG
gaggatgcgttaagatgaca

SEQ ID NO: 67552 - DNA, 20 bp, Artificial Sequence
  Description of Artificial Sequence: Synthetic oligonucleotide
  Target: SCNA; (+) strand; PAM type: YTN; PAM sequence: TTA
agatgacactgtgctgtgtc

SEQ ID NO: 67553 - DNA, 20 bp, Artificial Sequence
  Description of Artificial Sequence: Synthetic oligonucleotide
  Target: SCNA; (+) strand; PAM type: YTN; PAM sequence: CTG
tgctgtgtcaaaatgaaaat

SEQ ID NO: 67554 - DNA, 20 bp, Artificial Sequence
  Description of Artificial Sequence: Synthetic oligonucleotide
  Target: SCNA; (+) strand; PAM type: YTN; PAM sequence: CTG
tgtcaaaatgaaaatacaaa

SEQ ID NO: 67555 - DNA, 20 bp, Artificial Sequence
  Description of Artificial Sequence: Synthetic oligonucleotide
  Target: SCNA; (+) strand; PAM type: YTN; PAM sequence: CTC
agtttccttatccattttcc

SEQ ID NO: 67556 - DNA, 20 bp, Artificial Sequence
  Description of Artificial Sequence: Synthetic oligonucleotide
  Target: SCNA; (+) strand; PAM type: YTN; PAM sequence: TTT
ccttatccattttccagtta

SEQ ID NO: 67557 - DNA, 20 bp, Artificial Sequence
  Description of Artificial Sequence: Synthetic oligonucleotide
  Target: SCNA; (+) strand; PAM type: YTN; PAM sequence: TTC
cttatccattttccagttac

SEQ ID NO: 67558 - DNA, 20 bp, Artificial Sequence
  Description of Artificial Sequence: Synthetic oligonucleotide
  Target: SCNA; (+) strand; PAM type: YTN; PAM sequence: CTT
atccattttccagttacctt

SEQ ID NO: 67559 - DNA, 20 bp, Artificial Sequence
  Description of Artificial Sequence: Synthetic oligonucleotide
  Target: SCNA; (+) strand; PAM type: YTN; PAM sequence: TTA
tccattttccagttaccttt

SEQ ID NO: 67560 - DNA, 20 bp, Artificial Sequence
  Description of Artificial Sequence: Synthetic oligonucleotide
  Target: SCNA; (+) strand; PAM type: YTN; PAM sequence: TTT
tccagttacctttttttttt

SEQ ID NO: 67561 - DNA, 20 bp, Artificial Sequence
  Description of Artificial Sequence: Synthetic oligonucleotide
  Target: SCNA; (+) strand; PAM type: YTN; PAM sequence: TTT
ccagttaccttttttttttt

SEQ ID NO: 67562 - DNA, 20 bp, Artificial Sequence
  Description of Artificial Sequence: Synthetic oligonucleotide
  Target: SCNA; (+) strand; PAM type: YTN; PAM sequence: TTC
cagttaccttttttttttta

SEQ ID NO: 67563 - DNA, 20 bp, Artificial Sequence
  Description of Artificial Sequence: Synthetic oligonucleotide
  Target: SCNA; (+) strand; PAM type: YTN; PAM sequence: TTA
cctttttttttttaggccag

SEQ ID NO: 67564 - DNA, 20 bp, Artificial Sequence
  Description of Artificial Sequence: Synthetic oligonucleotide
  Target: SCNA; (+) strand; PAM type: YTN; PAM sequence: CTT
tttttttttaggccagtctg

SEQ ID NO: 67565 - DNA, 20 bp, Artificial Sequence
  Description of Artificial Sequence: Synthetic oligonucleotide
  Target: SCNA; (+) strand; PAM type: YTN; PAM sequence: TTT
ttttttttaggccagtctgc

SEQ ID NO: 67566 - DNA, 20 bp, Artificial Sequence
  Description of Artificial Sequence: Synthetic oligonucleotide
  Target: SCNA; (+) strand; PAM type: YTN; PAM sequence: TTT
tttttttaggccagtctgca

SEQ ID NO: 67567 - DNA, 20 bp, Artificial Sequence
  Description of Artificial Sequence: Synthetic oligonucleotide
  Target: SCNA; (+) strand; PAM type: YTN; PAM sequence: TTT
ttttttaggccagtctgcat

SEQ ID NO: 67568 - DNA, 20 bp, Artificial Sequence
  Description of Artificial Sequence: Synthetic oligonucleotide
  Target: SCNA; (+) strand; PAM type: YTN; PAM sequence: TTT
tttttaggccagtctgcatg

SEQ ID NO: 67569 - DNA, 20 bp, Artificial Sequence
  Description of Artificial Sequence: Synthetic oligonucleotide
  Target: SCNA; (+) strand; PAM type: YTN; PAM sequence: TTT
ttttaggccagtctgcatgt

SEQ ID NO: 67570 - DNA, 20 bp, Artificial Sequence
  Description of Artificial Sequence: Synthetic oligonucleotide
  Target: SCNA; (+) strand; PAM type: YTN; PAM sequence: TTT
tttaggccagtctgcatgtc

SEQ ID NO: 67571 - DNA, 20 bp, Artificial Sequence
  Description of Artificial Sequence: Synthetic oligonucleotide
  Target: SCNA; (+) strand; PAM type: YTN; PAM sequence: TTT
ttaggccagtctgcatgtcc

SEQ ID NO: 67572 - DNA, 20 bp, Artificial Sequence
  Description of Artificial Sequence: Synthetic oligonucleotide
  Target: SCNA; (+) strand; PAM type: YTN; PAM sequence: TTT
taggccagtctgcatgtcca

SEQ ID NO: 67573 - DNA, 20 bp, Artificial Sequence
  Description of Artificial Sequence: Synthetic oligonucleotide
  Target: SCNA; (+) strand; PAM type: YTN; PAM sequence: TTT
aggccagtctgcatgtccac

SEQ ID NO: 67574 - DNA, 20 bp, Artificial Sequence
  Description of Artificial Sequence: Synthetic oligonucleotide
  Target: SCNA; (+) strand; PAM type: YTN; PAM sequence: TTA
ggccagtctgcatgtccact

SEQ ID NO: 67575 - DNA, 20 bp, Artificial Sequence
  Description of Artificial Sequence: Synthetic oligonucleotide
  Target: SCNA; (+) strand; PAM type: YTN; PAM sequence: CTG
catgtccactagaagaaaag

SEQ ID NO: 67576 - DNA, 20 bp, Artificial Sequence
  Description of Artificial Sequence: Synthetic oligonucleotide
  Target: SCNA; (+) strand; PAM type: YTN; PAM sequence: CTA
gaagaaaagggacctgggtt

SEQ ID NO: 67577 - DNA, 20 bp, Artificial Sequence
  Description of Artificial Sequence: Synthetic oligonucleotide
  Target: SCNA; (+) strand; PAM type: YTN; PAM sequence: CTG
ggttcttcatcagcccatcc

SEQ ID NO: 67578 - DNA, 20 bp, Artificial Sequence
  Description of Artificial Sequence: Synthetic oligonucleotide
  Target: SCNA; (+) strand; PAM type: YTN; PAM sequence: TTC
ttcatcagcccatccttaga

SEQ ID NO: 67579 - DNA, 20 bp, Artificial Sequence
  Description of Artificial Sequence: Synthetic oligonucleotide
  Target: SCNA; (+) strand; PAM type: YTN; PAM sequence: CTT
catcagcccatccttagatc

SEQ ID NO: 67580 - DNA, 20 bp, Artificial Sequence
  Description of Artificial Sequence: Synthetic oligonucleotide
  Target: SCNA; (+) strand; PAM type: YTN; PAM sequence: TTC
atcagcccatccttagatct

SEQ ID NO: 67581 - DNA, 20 bp, Artificial Sequence
  Description of Artificial Sequence: Synthetic oligonucleotide
  Target: SCNA; (+) strand; PAM type: YTN; PAM sequence: CTT
agatcttagtgcacatatgc

SEQ ID NO: 67582 - DNA, 20 bp, Artificial Sequence
  Description of Artificial Sequence: Synthetic oligonucleotide
  Target: SCNA; (+) strand; PAM type: YTN; PAM sequence: TTA
gatcttagtgcacatatgca

SEQ ID NO: 67583 - DNA, 20 bp, Artificial Sequence
  Description of Artificial Sequence: Synthetic oligonucleotide
  Target: SCNA; (+) strand; PAM type: YTN; PAM sequence: CTT
agtgcacatatgcacctagt

SEQ ID NO: 67584 - DNA, 20 bp, Artificial Sequence
  Description of Artificial Sequence: Synthetic oligonucleotide
  Target: SCNA; (+) strand; PAM type: YTN; PAM sequence: TTA
gtgcacatatgcacctagta

SEQ ID NO: 67585 - DNA, 20 bp, Artificial Sequence
  Description of Artificial Sequence: Synthetic oligonucleotide
  Target: SCNA; (+) strand; PAM type: YTN; PAM sequence: CTA
gtaagtgccgagcaaatatt

SEQ ID NO: 67586 - DNA, 20 bp, Artificial Sequence
  Description of Artificial Sequence: Synthetic oligonucleotide
  Target: SCNA; (+) strand; PAM type: YTN; PAM sequence: TTC
aatgaatgactgtacctttc

SEQ ID NO: 67587 - DNA, 20 bp, Artificial Sequence
  Description of Artificial Sequence: Synthetic oligonucleotide
  Target: SCNA; (+) strand; PAM type: YTN; PAM sequence: CTG
tacctttcctaagaattctt

SEQ ID NO: 67588 - DNA, 20 bp, Artificial Sequence
  Description of Artificial Sequence: Synthetic oligonucleotide
  Target: SCNA; (+) strand; PAM type: YTN; PAM sequence: CTT
tcctaagaattcttcgttga

SEQ ID NO: 67589 - DNA, 20 bp, Artificial Sequence
  Description of Artificial Sequence: Synthetic oligonucleotide
  Target: SCNA; (+) strand; PAM type: YTN; PAM sequence: TTT
cctaagaattcttcgttgat

SEQ ID NO: 67590 - DNA, 20 bp, Artificial Sequence
  Description of Artificial Sequence: Synthetic oligonucleotide
  Target: SCNA; (+) strand; PAM type: YTN; PAM sequence: TTC
ctaagaattcttcgttgatt

SEQ ID NO: 67591 - DNA, 20 bp, Artificial Sequence
  Description of Artificial Sequence: Synthetic oligonucleotide
  Target: SCNA; (+) strand; PAM type: YTN; PAM sequence: CTA
agaattcttcgttgattatc

SEQ ID NO: 67592 - DNA, 20 bp, Artificial Sequence
  Description of Artificial Sequence: Synthetic oligonucleotide
  Target: SCNA; (+) strand; PAM type: YTN; PAM sequence: TTC
ttcgttgattatccttcaac

SEQ ID NO: 67593 - DNA, 20 bp, Artificial Sequence
  Description of Artificial Sequence: Synthetic oligonucleotide
  Target: SCNA; (+) strand; PAM type: YTN; PAM sequence: CTT
cgttgattatccttcaacag

SEQ ID NO: 67594 - DNA, 20 bp, Artificial Sequence
  Description of Artificial Sequence: Synthetic oligonucleotide
  Target: SCNA; (+) strand; PAM type: YTN; PAM sequence: TTC
gttgattatccttcaacaga

SEQ ID NO: 67595 - DNA, 20 bp, Artificial Sequence
  Description of Artificial Sequence: Synthetic oligonucleotide
  Target: SCNA; (+) strand; PAM type: YTN; PAM sequence: TTG
attatccttcaacagagcta

SEQ ID NO: 67596 - DNA, 20 bp, Artificial Sequence
  Description of Artificial Sequence: Synthetic oligonucleotide
  Target: SCNA; (+) strand; PAM type: YTN; PAM sequence: TTA
tccttcaacagagctaactt

SEQ ID NO: 67597 - DNA, 20 bp, Artificial Sequence
  Description of Artificial Sequence: Synthetic oligonucleotide
  Target: SCNA; (+) strand; PAM type: YTN; PAM sequence: CTT
caacagagctaacttctctc

SEQ ID NO: 67598 - DNA, 20 bp, Artificial Sequence
  Description of Artificial Sequence: Synthetic oligonucleotide
  Target: SCNA; (+) strand; PAM type: YTN; PAM sequence: TTC
aacagagctaacttctctcc

SEQ ID NO: 67599 - DNA, 20 bp, Artificial Sequence
  Description of Artificial Sequence: Synthetic oligonucleotide
  Target: SCNA; (+) strand; PAM type: YTN; PAM sequence: CTA
acttctctccctatgtgctc

SEQ ID NO: 67600 - DNA, 20 bp, Artificial Sequence
  Description of Artificial Sequence: Synthetic oligonucleotide
  Target: SCNA; (+) strand; PAM type: YTN; PAM sequence: CTT
ctctccctatgtgctcagtc

SEQ ID NO: 67601 - DNA, 20 bp, Artificial Sequence
  Description of Artificial Sequence: Synthetic oligonucleotide
  Target: SCNA; (+) strand; PAM type: YTN; PAM sequence: TTC
tctccctatgtgctcagtca

SEQ ID NO: 67602 - DNA, 20 bp, Artificial Sequence
  Description of Artificial Sequence: Synthetic oligonucleotide
  Target: SCNA; (+) strand; PAM type: YTN; PAM sequence: CTC
tccctatgtgctcagtcaaa

SEQ ID NO: 67603 - DNA, 20 bp, Artificial Sequence
  Description of Artificial Sequence: Synthetic oligonucleotide
  Target: SCNA; (+) strand; PAM type: YTN; PAM sequence: CTC
cctatgtgctcagtcaaatg

SEQ ID NO: 67604 - DNA, 20 bp, Artificial Sequence
  Description of Artificial Sequence: Synthetic oligonucleotide
  Target: SCNA; (+) strand; PAM type: YTN; PAM sequence: CTA
tgtgctcagtcaaatgctct

SEQ ID NO: 67605 - DNA, 20 bp, Artificial Sequence
  Description of Artificial Sequence: Synthetic oligonucleotide
  Target: SCNA; (+) strand; PAM type: YTN; PAM sequence: CTC
agtcaaatgctctcccattg

SEQ ID NO: 67606 - DNA, 20 bp, Artificial Sequence
  Description of Artificial Sequence: Synthetic oligonucleotide
  Target: SCNA; (+) strand; PAM type: YTN; PAM sequence: CTC
tcccattggactgagttcag

SEQ ID NO: 67607 - DNA, 20 bp, Artificial Sequence
  Description of Artificial Sequence: Synthetic oligonucleotide
  Target: SCNA; (+) strand; PAM type: YTN; PAM sequence: CTC
ccattggactgagttcagca

SEQ ID NO: 67608 - DNA, 20 bp, Artificial Sequence
  Description of Artificial Sequence: Synthetic oligonucleotide
  Target: SCNA; (+) strand; PAM type: YTN; PAM sequence: TTG
gactgagttcagcataaact

SEQ ID NO: 67609 - DNA, 20 bp, Artificial Sequence
  Description of Artificial Sequence: Synthetic oligonucleotide
  Target: SCNA; (+) strand; PAM type: YTN; PAM sequence: CTG
agttcagcataaactgccat

SEQ ID NO: 67610 - DNA, 20 bp, Artificial Sequence
  Description of Artificial Sequence: Synthetic oligonucleotide
  Target: SCNA; (+) strand; PAM type: YTN; PAM sequence: TTC
agcataaactgccatgtttt

SEQ ID NO: 67611 - DNA, 20 bp, Artificial Sequence
  Description of Artificial Sequence: Synthetic oligonucleotide
  Target: SCNA; (+) strand; PAM type: YTN; PAM sequence: CTG
ccatgttttgagatgattgg

SEQ ID NO: 67612 - DNA, 20 bp, Artificial Sequence
  Description of Artificial Sequence: Synthetic oligonucleotide
  Target: SCNA; (+) strand; PAM type: YTN; PAM sequence: TTT
tgagatgattggtgtaagcg

SEQ ID NO: 67613 - DNA, 20 bp, Artificial Sequence
  Description of Artificial Sequence: Synthetic oligonucleotide
  Target: SCNA; (+) strand; PAM type: YTN; PAM sequence: TTT
gagatgattggtgtaagcga

SEQ ID NO: 67614 - DNA, 20 bp, Artificial Sequence
  Description of Artificial Sequence: Synthetic oligonucleotide
  Target: SCNA; (+) strand; PAM type: YTN; PAM sequence: TTG
agatgattggtgtaagcgaa

SEQ ID NO: 67615 - DNA, 20 bp, Artificial Sequence
  Description of Artificial Sequence: Synthetic oligonucleotide
  Target: SCNA; (+) strand; PAM type: YTN; PAM sequence: TTG
gtgtaagcgaatgtcctctc

SEQ ID NO: 67616 - DNA, 20 bp, Artificial Sequence
  Description of Artificial Sequence: Synthetic oligonucleotide
  Target: SCNA; (+) strand; PAM type: YTN; PAM sequence: CTC
tcctgagttgcgagaatcta

SEQ ID NO: 67617 - DNA, 20 bp, Artificial Sequence
  Description of Artificial Sequence: Synthetic oligonucleotide
  Target: SCNA; (+) strand; PAM type: YTN; PAM sequence: CTC
ctgagttgcgagaatctaag

SEQ ID NO: 67618 - DNA, 20 bp, Artificial Sequence
  Description of Artificial Sequence: Synthetic oligonucleotide
  Target: SCNA; (+) strand; PAM type: YTN; PAM sequence: CTG
agttgcgagaatctaagagc

SEQ ID NO: 67619 - DNA, 20 bp, Artificial Sequence
  Description of Artificial Sequence: Synthetic oligonucleotide
  Target: SCNA; (+) strand; PAM type: YTN; PAM sequence: TTG
cgagaatctaagagcaggac

SEQ ID NO: 67620 - DNA, 20 bp, Artificial Sequence
  Description of Artificial Sequence: Synthetic oligonucleotide
  Target: SCNA; (+) strand; PAM type: YTN; PAM sequence: CTA
agagcaggacaacatcacat

SEQ ID NO: 67621 - DNA, 20 bp, Artificial Sequence
  Description of Artificial Sequence: Synthetic oligonucleotide
  Target: SCNA; (+) strand; PAM type: YTN; PAM sequence: CTT
ctctactttctatagttctt

SEQ ID NO: 67622 - DNA, 20 bp, Artificial Sequence
  Description of Artificial Sequence: Synthetic oligonucleotide
  Target: SCNA; (+) strand; PAM type: YTN; PAM sequence: TTC
tctactttctatagttcttt

SEQ ID NO: 67623 - DNA, 20 bp, Artificial Sequence
  Description of Artificial Sequence: Synthetic oligonucleotide
  Target: SCNA; (+) strand; PAM type: YTN; PAM sequence: CTC
tactttctatagttcttttg

SEQ ID NO: 67624 - DNA, 20 bp, Artificial Sequence
  Description of Artificial Sequence: Synthetic oligonucleotide
  Target: SCNA; (+) strand; PAM type: YTN; PAM sequence: CTA
ctttctatagttcttttgtc

SEQ ID NO: 67625 - DNA, 20 bp, Artificial Sequence
  Description of Artificial Sequence: Synthetic oligonucleotide
  Target: SCNA; (+) strand; PAM type: YTN; PAM sequence: CTT
tctatagttcttttgtccac

SEQ ID NO: 67626 - DNA, 20 bp, Artificial Sequence
  Description of Artificial Sequence: Synthetic oligonucleotide
  Target: SCNA; (+) strand; PAM type: YTN; PAM sequence: TTT
ctatagttcttttgtccact

SEQ ID NO: 67627 - DNA, 20 bp, Artificial Sequence
  Description of Artificial Sequence: Synthetic oligonucleotide
  Target: SCNA; (+) strand; PAM type: YTN; PAM sequence: TTC
tatagttcttttgtccactg

SEQ ID NO: 67628 - DNA, 20 bp, Artificial Sequence
  Description of Artificial Sequence: Synthetic oligonucleotide
  Target: SCNA; (+) strand; PAM type: YTN; PAM sequence: CTA
tagttcttttgtccactgtc

SEQ ID NO: 67629 - DNA, 20 bp, Artificial Sequence
  Description of Artificial Sequence: Synthetic oligonucleotide
  Target: SCNA; (+) strand; PAM type: YTN; PAM sequence: TTC
ttttgtccactgtctaacaa

SEQ ID NO: 67630 - DNA, 20 bp, Artificial Sequence
  Description of Artificial Sequence: Synthetic oligonucleotide
  Target: SCNA; (+) strand; PAM type: YTN; PAM sequence: CTT
ttgtccactgtctaacaaat

SEQ ID NO: 67631 - DNA, 20 bp, Artificial Sequence
  Description of Artificial Sequence: Synthetic oligonucleotide
  Target: SCNA; (+) strand; PAM type: YTN; PAM sequence: TTT
tgtccactgtctaacaaata

SEQ ID NO: 67632 - DNA, 20 bp, Artificial Sequence
  Description of Artificial Sequence: Synthetic oligonucleotide
  Target: SCNA; (+) strand; PAM type: YTN; PAM sequence: TTT
gtccactgtctaacaaataa

SEQ ID NO: 67633 - DNA, 20 bp, Artificial Sequence
  Description of Artificial Sequence: Synthetic oligonucleotide
  Target: SCNA; (+) strand; PAM type: YTN; PAM sequence: TTG
tccactgtctaacaaataat

SEQ ID NO: 67634 - DNA, 20 bp, Artificial Sequence
  Description of Artificial Sequence: Synthetic oligonucleotide
  Target: SCNA; (+) strand; PAM type: YTN; PAM sequence: CTG
tctaacaaataatgccaagt

SEQ ID NO: 67635 - DNA, 20 bp, Artificial Sequence
  Description of Artificial Sequence: Synthetic oligonucleotide
  Target: SCNA; (+) strand; PAM type: YTN; PAM sequence: CTA
acaaataatgccaagtgaaa

SEQ ID NO: 67636 - DNA, 20 bp, Artificial Sequence
  Description of Artificial Sequence: Synthetic oligonucleotide
  Target: SCNA; (+) strand; PAM type: YTN; PAM sequence: TTT
tgtaagatgccaatggaaaa

SEQ ID NO: 67637 - DNA, 20 bp, Artificial Sequence
  Description of Artificial Sequence: Synthetic oligonucleotide
  Target: SCNA; (+) strand; PAM type: YTN; PAM sequence: TTT
gtaagatgccaatggaaaaa

SEQ ID NO: 67638 - DNA, 20 bp, Artificial Sequence
  Description of Artificial Sequence: Synthetic oligonucleotide
  Target: SCNA; (+) strand; PAM type: YTN; PAM sequence: TTG
taagatgccaatggaaaaaa

SEQ ID NO: 67639 - DNA, 20 bp, Artificial Sequence
  Description of Artificial Sequence: Synthetic oligonucleotide
  Target: SCNA; (+) strand; PAM type: YTN; PAM sequence: TTA
ctaaaaaaaaccactaactc

SEQ ID NO: 67640 - DNA, 20 bp, Artificial Sequence
  Description of Artificial Sequence: Synthetic oligonucleotide
  Target: SCNA; (+) strand; PAM type: YTN; PAM sequence: CTA
aaaaaaaccactaactccat

SEQ ID NO: 67641 - DNA, 20 bp, Artificial Sequence
  Description of Artificial Sequence: Synthetic oligonucleotide
  Target: SCNA; (+) strand; PAM type: YTN; PAM sequence: CTA
actccatttaattgttttag

SEQ ID NO: 67642 - DNA, 20 bp, Artificial Sequence
  Description of Artificial Sequence: Synthetic oligonucleotide
  Target: SCNA; (+) strand; PAM type: YTN; PAM sequence: CTC
catttaattgttttagacta

SEQ ID NO: 67643 - DNA, 20 bp, Artificial Sequence
  Description of Artificial Sequence: Synthetic oligonucleotide
  Target: SCNA; (+) strand; PAM type: YTN; PAM sequence: TTT
aattgttttagactaagaat

SEQ ID NO: 67644 - DNA, 20 bp, Artificial Sequence
  Description of Artificial Sequence: Synthetic oligonucleotide
  Target: SCNA; (+) strand; PAM type: YTN; PAM sequence: TTA
attgttttagactaagaatc

SEQ ID NO: 67645 - DNA, 20 bp, Artificial Sequence
  Description of Artificial Sequence: Synthetic oligonucleotide
  Target: SCNA; (+) strand; PAM type: YTN; PAM sequence: TTG
ttttagactaagaatccctc

SEQ ID NO: 67646 - DNA, 20 bp, Artificial Sequence
  Description of Artificial Sequence: Synthetic oligonucleotide
  Target: SCNA; (+) strand; PAM type: YTN; PAM sequence: TTT
tagactaagaatccctcagt

SEQ ID NO: 67647 - DNA, 20 bp, Artificial Sequence
  Description of Artificial Sequence: Synthetic oligonucleotide
  Target: SCNA; (+) strand; PAM type: YTN; PAM sequence: TTT
agactaagaatccctcagtg

SEQ ID NO: 67648 - DNA, 20 bp, Artificial Sequence
  Description of Artificial Sequence: Synthetic oligonucleotide
  Target: SCNA; (+) strand; PAM type: YTN; PAM sequence: TTA
gactaagaatccctcagtga

SEQ ID NO: 67649 - DNA, 20 bp, Artificial Sequence
  Description of Artificial Sequence: Synthetic oligonucleotide
  Target: SCNA; (+) strand; PAM type: YTN; PAM sequence: CTA
agaatccctcagtgatacct

SEQ ID NO: 67650 - DNA, 20 bp, Artificial Sequence
  Description of Artificial Sequence: Synthetic oligonucleotide
  Target: SCNA; (+) strand; PAM type: YTN; PAM sequence: CTC
agtgatacctagccaaaatt

SEQ ID NO: 67651 - DNA, 20 bp, Artificial Sequence
  Description of Artificial Sequence: Synthetic oligonucleotide
  Target: SCNA; (+) strand; PAM type: YTN; PAM sequence: CTA
gccaaaattaggattcagat

SEQ ID NO: 67652 - DNA, 20 bp, Artificial Sequence
  Description of Artificial Sequence: Synthetic oligonucleotide
  Target: SCNA; (+) strand; PAM type: YTN; PAM sequence: TTA
ggattcagatccaaaataaa

SEQ ID NO: 67653 - DNA, 20 bp, Artificial Sequence
  Description of Artificial Sequence: Synthetic oligonucleotide
  Target: SCNA; (+) strand; PAM type: YTN; PAM sequence: TTC
agatccaaaataaaagatac

SEQ ID NO: 67654 - DNA, 20 bp, Artificial Sequence
  Description of Artificial Sequence: Synthetic oligonucleotide
  Target: SCNA; (+) strand; PAM type: YTN; PAM sequence: CTG
ttgccccaagtagatatcat

SEQ ID NO: 67655 - DNA, 20 bp, Artificial Sequence
  Description of Artificial Sequence: Synthetic oligonucleotide
  Target: SCNA; (+) strand; PAM type: YTN; PAM sequence: TTG
ccccaagtagatatcataat

SEQ ID NO: 67656 - DNA, 20 bp, Artificial Sequence
  Description of Artificial Sequence: Synthetic oligonucleotide
  Target: SCNA; (+) strand; PAM type: YTN; PAM sequence: TTT
gttacaataagtaaaaatgt

SEQ ID NO: 67657 - DNA, 20 bp, Artificial Sequence
  Description of Artificial Sequence: Synthetic oligonucleotide
  Target: SCNA; (+) strand; PAM type: YTN; PAM sequence: TTG
ttacaataagtaaaaatgta

SEQ ID NO: 67658 - DNA, 20 bp, Artificial Sequence
  Description of Artificial Sequence: Synthetic oligonucleotide
  Target: SCNA; (+) strand; PAM type: YTN; PAM sequence: TTA
caataagtaaaaatgtatat

SEQ ID NO: 67659 - DNA, 20 bp, Artificial Sequence
  Description of Artificial Sequence: Synthetic oligonucleotide
  Target: SCNA; (+) strand; PAM type: YTN; PAM sequence: TTA
ttcaatactaaactgttata

SEQ ID NO: 67660 - DNA, 20 bp, Artificial Sequence
  Description of Artificial Sequence: Synthetic oligonucleotide
  Target: SCNA; (+) strand; PAM type: YTN; PAM sequence: TTC
aatactaaactgttatacca

SEQ ID NO: 67661 - DNA, 20 bp, Artificial Sequence
  Description of Artificial Sequence: Synthetic oligonucleotide
  Target: SCNA; (+) strand; PAM type: YTN; PAM sequence: CTA
aactgttataccacatttca

SEQ ID NO: 67662 - DNA, 20 bp, Artificial Sequence
  Description of Artificial Sequence: Synthetic oligonucleotide
  Target: SCNA; (+) strand; PAM type: YTN; PAM sequence: CTG
ttataccacatttcaagttt

SEQ ID NO: 67663 - DNA, 20 bp, Artificial Sequence
  Description of Artificial Sequence: Synthetic oligonucleotide
  Target: SCNA; (+) strand; PAM type: YTN; PAM sequence: TTA
taccacatttcaagttttta

SEQ ID NO: 67664 - DNA, 20 bp, Artificial Sequence
  Description of Artificial Sequence: Synthetic oligonucleotide
  Target: SCNA; (+) strand; PAM type: YTN; PAM sequence: TTT
caagtttttaaaactttatc

SEQ ID NO: 67665 - DNA, 20 bp, Artificial Sequence
  Description of Artificial Sequence: Synthetic oligonucleotide
  Target: SCNA; (+) strand; PAM type: YTN; PAM sequence: TTC
aagtttttaaaactttatct

SEQ ID NO: 67666 - DNA, 20 bp, Artificial Sequence
  Description of Artificial Sequence: Synthetic oligonucleotide
  Target: SCNA; (+) strand; PAM type: YTN; PAM sequence: TTT
ttaaaactttatcttccttt

SEQ ID NO: 67667 - DNA, 20 bp, Artificial Sequence
  Description of Artificial Sequence: Synthetic oligonucleotide
  Target: SCNA; (+) strand; PAM type: YTN; PAM sequence: TTT
taaaactttatcttcctttt

SEQ ID NO: 67668 - DNA, 20 bp, Artificial Sequence
  Description of Artificial Sequence: Synthetic oligonucleotide
  Target: SCNA; (+) strand; PAM type: YTN; PAM sequence: TTT
aaaactttatcttcctttta

SEQ ID NO: 67669 - DNA, 20 bp, Artificial Sequence
  Description of Artificial Sequence: Synthetic oligonucleotide
  Target: SCNA; (+) strand; PAM type: YTN; PAM sequence: TTA
aaactttatcttccttttat

SEQ ID NO: 67670 - DNA, 20 bp, Artificial Sequence
  Description of Artificial Sequence: Synthetic oligonucleotide
  Target: SCNA; (+) strand; PAM type: YTN; PAM sequence: CTT
tatcttccttttatgcatag

SEQ ID NO: 67671 - DNA, 20 bp, Artificial Sequence
  Description of Artificial Sequence: Synthetic oligonucleotide
  Target: SCNA; (+) strand; PAM type: YTN; PAM sequence: TTT
atcttccttttatgcataga

SEQ ID NO: 67672 - DNA, 20 bp, Artificial Sequence
  Description of Artificial Sequence: Synthetic oligonucleotide
  Target: SCNA; (+) strand; PAM type: YTN; PAM sequence: TTA
tcttccttttatgcatagat

SEQ ID NO: 67673 - DNA, 20 bp, Artificial Sequence
  Description of Artificial Sequence: Synthetic oligonucleotide
  Target: SCNA; (+) strand; PAM type: YTN; PAM sequence: CTT
ccttttatgcatagatagta

SEQ ID NO: 67674 - DNA, 20 bp, Artificial Sequence
  Description of Artificial Sequence: Synthetic oligonucleotide
  Target: SCNA; (+) strand; PAM type: YTN; PAM sequence: TTC
cttttatgcatagatagtag

SEQ ID NO: 67675 - DNA, 20 bp, Artificial Sequence
  Description of Artificial Sequence: Synthetic oligonucleotide
  Target: SCNA; (+) strand; PAM type: YTN; PAM sequence: CTT
ttatgcatagatagtagtag

SEQ ID NO: 67676 - DNA, 20 bp, Artificial Sequence
  Description of Artificial Sequence: Synthetic oligonucleotide
  Target: SCNA; (+) strand; PAM type: YTN; PAM sequence: TTT
tatgcatagatagtagtaga

SEQ ID NO: 67677 - DNA, 20 bp, Artificial Sequence
  Description of Artificial Sequence: Synthetic oligonucleotide
  Target: SCNA; (+) strand; PAM type: YTN; PAM sequence: TTT
atgcatagatagtagtagag

SEQ ID NO: 67678 - DNA, 20 bp, Artificial Sequence
  Description of Artificial Sequence: Synthetic oligonucleotide
  Target: SCNA; (+) strand; PAM type: YTN; PAM sequence: TTA
tgcatagatagtagtagagc

SEQ ID NO: 67679 - DNA, 20 bp, Artificial Sequence
  Description of Artificial Sequence: Synthetic oligonucleotide
  Target: SCNA; (+) strand; PAM type: YTN; PAM sequence: TTA
agaacatgcatggctatcac

SEQ ID NO: 67680 - DNA, 20 bp, Artificial Sequence
  Description of Artificial Sequence: Synthetic oligonucleotide
  Target: SCNA; (+) strand; PAM type: YTN; PAM sequence: CTA
tcacctgaggtgttgattgt

SEQ ID NO: 67681 - DNA, 20 bp, Artificial Sequence
  Description of Artificial Sequence: Synthetic oligonucleotide
  Target: SCNA; (+) strand; PAM type: YTN; PAM sequence: CTG
aggtgttgattgtaaattca

SEQ ID NO: 67682 - DNA, 20 bp, Artificial Sequence
  Description of Artificial Sequence: Synthetic oligonucleotide
  Target: SCNA; (+) strand; PAM type: YTN; PAM sequence: TTG
attgtaaattcacattccta

SEQ ID NO: 67683 - DNA, 20 bp, Artificial Sequence
  Description of Artificial Sequence: Synthetic oligonucleotide
  Target: SCNA; (+) strand; PAM type: YTN; PAM sequence: TTG
taaattcacattcctaggct

SEQ ID NO: 67684 - DNA, 20 bp, Artificial Sequence
  Description of Artificial Sequence: Synthetic oligonucleotide
  Target: SCNA; (+) strand; PAM type: YTN; PAM sequence: TTC
acattcctaggctttgtctc

SEQ ID NO: 67685 - DNA, 20 bp, Artificial Sequence
  Description of Artificial Sequence: Synthetic oligonucleotide
  Target: SCNA; (+) strand; PAM type: YTN; PAM sequence: TTC
ctaggctttgtctcttaact

SEQ ID NO: 67686 - DNA, 20 bp, Artificial Sequence
  Description of Artificial Sequence: Synthetic oligonucleotide
  Target: SCNA; (+) strand; PAM type: YTN; PAM sequence: CTA
ggctttgtctcttaactact

SEQ ID NO: 67687 - DNA, 20 bp, Artificial Sequence
  Description of Artificial Sequence: Synthetic oligonucleotide
  Target: SCNA; (+) strand; PAM type: YTN; PAM sequence: CTT
tgtctcttaactactgaatc

SEQ ID NO: 67688 - DNA, 20 bp, Artificial Sequence
  Description of Artificial Sequence: Synthetic oligonucleotide
  Target: SCNA; (+) strand; PAM type: YTN; PAM sequence: TTT
gtctcttaactactgaatcg

SEQ ID NO: 67689 - DNA, 20 bp, Artificial Sequence
  Description of Artificial Sequence: Synthetic oligonucleotide
  Target: SCNA; (+) strand; PAM type: YTN; PAM sequence: TTG
tctcttaactactgaatcgg

SEQ ID NO: 67690 - DNA, 20 bp, Artificial Sequence
  Description of Artificial Sequence: Synthetic oligonucleotide
  Target: SCNA; (+) strand; PAM type: YTN; PAM sequence: CTC
ttaactactgaatcggaatc

SEQ ID NO: 67691 - DNA, 20 bp, Artificial Sequence
  Description of Artificial Sequence: Synthetic oligonucleotide
  Target: SCNA; (+) strand; PAM type: YTN; PAM sequence: CTT
aactactgaatcggaatctt

SEQ ID NO: 67692 - DNA, 20 bp, Artificial Sequence
  Description of Artificial Sequence: Synthetic oligonucleotide
  Target: SCNA; (+) strand; PAM type: YTN; PAM sequence: TTA
actactgaatcggaatcttt

SEQ ID NO: 67693 - DNA, 20 bp, Artificial Sequence
  Description of Artificial Sequence: Synthetic oligonucleotide
  Target: SCNA; (+) strand; PAM type: YTN; PAM sequence: CTA
ctgaatcggaatctttggga

SEQ ID NO: 67694 - DNA, 20 bp, Artificial Sequence
  Description of Artificial Sequence: Synthetic oligonucleotide
  Target: SCNA; (+) strand; PAM type: YTN; PAM sequence: CTG
aatcggaatctttgggagtg

SEQ ID NO: 67695 - DNA, 20 bp, Artificial Sequence
  Description of Artificial Sequence: Synthetic oligonucleotide
  Target: SCNA; (+) strand; PAM type: YTN; PAM sequence: CTT
tgggagtgaactgacaggaa

SEQ ID NO: 67696 - DNA, 20 bp, Artificial Sequence
  Description of Artificial Sequence: Synthetic oligonucleotide
  Target: SCNA; (+) strand; PAM type: YTN; PAM sequence: TTT
gggagtgaactgacaggaat

SEQ ID NO: 67697 - DNA, 20 bp, Artificial Sequence
  Description of Artificial Sequence: Synthetic oligonucleotide
  Target: SCNA; (+) strand; PAM type: YTN; PAM sequence: TTG
ggagtgaactgacaggaatc

SEQ ID NO: 67698 - DNA, 20 bp, Artificial Sequence
  Description of Artificial Sequence: Synthetic oligonucleotide
  Target: SCNA; (+) strand; PAM type: YTN; PAM sequence: CTG
acaggaatctgaattttaaa

SEQ ID NO: 67699 - DNA, 20 bp, Artificial Sequence
  Description of Artificial Sequence: Synthetic oligonucleotide
  Target: SCNA; (+) strand; PAM type: YTN; PAM sequence: CTG
aattttaaaaataaggtctt

SEQ ID NO: 67700 - DNA, 20 bp, Artificial Sequence
  Description of Artificial Sequence: Synthetic oligonucleotide
  Target: SCNA; (+) strand; PAM type: YTN; PAM sequence: TTT
taaaaataaggtcttcaggt

SEQ ID NO: 67701 - DNA, 20 bp, Artificial Sequence
  Description of Artificial Sequence: Synthetic oligonucleotide
  Target: SCNA; (+) strand; PAM type: YTN; PAM sequence: TTT
aaaaataaggtcttcaggtg

SEQ ID NO: 67702 - DNA, 20 bp, Artificial Sequence
  Description of Artificial Sequence: Synthetic oligonucleotide
  Target: SCNA; (+) strand; PAM type: YTN; PAM sequence: TTA
aaaataaggtcttcaggtga

SEQ ID NO: 67703 - DNA, 20 bp, Artificial Sequence
  Description of Artificial Sequence: Synthetic oligonucleotide
  Target: SCNA; (+) strand; PAM type: YTN; PAM sequence: CTT
caggtgattctcatgcatct

SEQ ID NO: 67704 - DNA, 20 bp, Artificial Sequence
  Description of Artificial Sequence: Synthetic oligonucleotide
  Target: SCNA; (+) strand; PAM type: YTN; PAM sequence: TTC
aggtgattctcatgcatcta

SEQ ID NO: 67705 - DNA, 20 bp, Artificial Sequence
  Description of Artificial Sequence: Synthetic oligonucleotide
  Target: SCNA; (+) strand; PAM type: YTN; PAM sequence: TTC
tcatgcatctaaagataact

SEQ ID NO: 67706 - DNA, 20 bp, Artificial Sequence
  Description of Artificial Sequence: Synthetic oligonucleotide
  Target: SCNA; (+) strand; PAM type: YTN; PAM sequence: CTC
atgcatctaaagataactgc

SEQ ID NO: 67707 - DNA, 20 bp, Artificial Sequence
  Description of Artificial Sequence: Synthetic oligonucleotide
  Target: SCNA; (+) strand; PAM type: YTN; PAM sequence: CTA
aagataactgctttaatata

SEQ ID NO: 67708 - DNA, 20 bp, Artificial Sequence
  Description of Artificial Sequence: Synthetic oligonucleotide
  Target: SCNA; (+) strand; PAM type: YTN; PAM sequence: CTG
ctttaatatataacaaagaa

SEQ ID NO: 67709 - DNA, 20 bp, Artificial Sequence
  Description of Artificial Sequence: Synthetic oligonucleotide
  Target: SCNA; (+) strand; PAM type: YTN; PAM sequence: CTT
taatatataacaaagaaacc

SEQ ID NO: 67710 - DNA, 20 bp, Artificial Sequence
  Description of Artificial Sequence: Synthetic oligonucleotide
  Target: SCNA; (+) strand; PAM type: YTN; PAM sequence: TTT
aatatataacaaagaaaccc

SEQ ID NO: 67711 - DNA, 20 bp, Artificial Sequence
  Description of Artificial Sequence: Synthetic oligonucleotide
  Target: SCNA; (+) strand; PAM type: YTN; PAM sequence: TTA
atatataacaaagaaaccca

SEQ ID NO: 67712 - DNA, 20 bp, Artificial Sequence
  Description of Artificial Sequence: Synthetic oligonucleotide
  Target: SCNA; (+) strand; PAM type: YTN; PAM sequence: CTT
gaggattttttcaatatatc

SEQ ID NO: 67713 - DNA, 20 bp, Artificial Sequence
  Description of Artificial Sequence: Synthetic oligonucleotide
  Target: SCNA; (+) strand; PAM type: YTN; PAM sequence: TTG
aggattttttcaatatatct

SEQ ID NO: 67714 - DNA, 20 bp, Artificial Sequence
  Description of Artificial Sequence: Synthetic oligonucleotide
  Target: SCNA; (+) strand; PAM type: YTN; PAM sequence: TTT
tttcaatatatcttcttttg

SEQ ID NO: 67715 - DNA, 20 bp, Artificial Sequence
  Description of Artificial Sequence: Synthetic oligonucleotide
  Target: SCNA; (+) strand; PAM type: YTN; PAM sequence: TTT
ttcaatatatcttcttttgc

SEQ ID NO: 67716 - DNA, 20 bp, Artificial Sequence
  Description of Artificial Sequence: Synthetic oligonucleotide
  Target: SCNA; (+) strand; PAM type: YTN; PAM sequence: TTT
tcaatatatcttcttttgca

SEQ ID NO: 67717 - DNA, 20 bp, Artificial Sequence
  Description of Artificial Sequence: Synthetic oligonucleotide
  Target: SCNA; (+) strand; PAM type: YTN; PAM sequence: TTT
caatatatcttcttttgcag

SEQ ID NO: 67718 - DNA, 20 bp, Artificial Sequence
  Description of Artificial Sequence: Synthetic oligonucleotide
  Target: SCNA; (+) strand; PAM type: YTN; PAM sequence: TTC
aatatatcttcttttgcaga

SEQ ID NO: 67719 - DNA, 20 bp, Artificial Sequence
  Description of Artificial Sequence: Synthetic oligonucleotide
  Target: SCNA; (+) strand; PAM type: YTN; PAM sequence: CTT
cttttgcagagattaatagt

SEQ ID NO: 67720 - DNA, 20 bp, Artificial Sequence
  Description of Artificial Sequence: Synthetic oligonucleotide
  Target: SCNA; (+) strand; PAM type: YTN; PAM sequence: TTC
ttttgcagagattaatagtg

SEQ ID NO: 67721 - DNA, 20 bp, Artificial Sequence
  Description of Artificial Sequence: Synthetic oligonucleotide
  Target: SCNA; (+) strand; PAM type: YTN; PAM sequence: CTT
ttgcagagattaatagtgaa

SEQ ID NO: 67722 - DNA, 20 bp, Artificial Sequence
  Description of Artificial Sequence: Synthetic oligonucleotide
  Target: SCNA; (+) strand; PAM type: YTN; PAM sequence: TTT
tgcagagattaatagtgaat

SEQ ID NO: 67723 - DNA, 20 bp, Artificial Sequence
  Description of Artificial Sequence: Synthetic oligonucleotide
  Target: SCNA; (+) strand; PAM type: YTN; PAM sequence: TTT
gcagagattaatagtgaatg

SEQ ID NO: 67724 - DNA, 20 bp, Artificial Sequence
  Description of Artificial Sequence: Synthetic oligonucleotide
  Target: SCNA; (+) strand; PAM type: YTN; PAM sequence: TTG
cagagattaatagtgaatgt

SEQ ID NO: 67725 - DNA, 20 bp, Artificial Sequence
  Description of Artificial Sequence: Synthetic oligonucleotide
  Target: SCNA; (+) strand; PAM type: YTN; PAM sequence: TTA
atagtgaatgttgttttatc

SEQ ID NO: 67726 - DNA, 20 bp, Artificial Sequence
  Description of Artificial Sequence: Synthetic oligonucleotide
  Target: SCNA; (+) strand; PAM type: YTN; PAM sequence: TTG
ttttatctgctgtttagaat

SEQ ID NO: 67727 - DNA, 20 bp, Artificial Sequence
  Description of Artificial Sequence: Synthetic oligonucleotide
  Target: SCNA; (+) strand; PAM type: YTN; PAM sequence: TTT
tatctgctgtttagaatttt

SEQ ID NO: 67728 - DNA, 20 bp, Artificial Sequence
  Description of Artificial Sequence: Synthetic oligonucleotide
  Target: SCNA; (+) strand; PAM type: YTN; PAM sequence: TTT
atctgctgtttagaatttta

SEQ ID NO: 67729 - DNA, 20 bp, Artificial Sequence
  Description of Artificial Sequence: Synthetic oligonucleotide
  Target: SCNA; (+) strand; PAM type: YTN; PAM sequence: TTA
tctgctgtttagaattttac

SEQ ID NO: 67730 - DNA, 20 bp, Artificial Sequence
  Description of Artificial Sequence: Synthetic oligonucleotide
  Target: SCNA; (+) strand; PAM type: YTN; PAM sequence: CTG
ctgtttagaattttacatat

SEQ ID NO: 67731 - DNA, 20 bp, Artificial Sequence
  Description of Artificial Sequence: Synthetic oligonucleotide
  Target: SCNA; (+) strand; PAM type: YTN; PAM sequence: CTG
tttagaattttacatatgca

SEQ ID NO: 67732 - DNA, 20 bp, Artificial Sequence
  Description of Artificial Sequence: Synthetic oligonucleotide
  Target: SCNA; (+) strand; PAM type: YTN; PAM sequence: TTT
agaattttacatatgcattg

SEQ ID NO: 67733 - DNA, 20 bp, Artificial Sequence
  Description of Artificial Sequence: Synthetic oligonucleotide
  Target: SCNA; (+) strand; PAM type: YTN; PAM sequence: TTA
gaattttacatatgcattgg

SEQ ID NO: 67734 - DNA, 20 bp, Artificial Sequence
  Description of Artificial Sequence: Synthetic oligonucleotide
  Target: SCNA; (+) strand; PAM type: YTN; PAM sequence: TTT
tacatatgcattggatgata

SEQ ID NO: 67735 - DNA, 20 bp, Artificial Sequence
  Description of Artificial Sequence: Synthetic oligonucleotide
  Target: SCNA; (+) strand; PAM type: YTN; PAM sequence: TTT
acatatgcattggatgatac

SEQ ID NO: 67736 - DNA, 20 bp, Artificial Sequence
  Description of Artificial Sequence: Synthetic oligonucleotide
  Target: SCNA; (+) strand; PAM type: YTN; PAM sequence: TTA
catatgcattggatgataca

SEQ ID NO: 67737 - DNA, 20 bp, Artificial Sequence
  Description of Artificial Sequence: Synthetic oligonucleotide
  Target: SCNA; (+) strand; PAM type: YTN; PAM sequence: TTG
gatgatacatcttcttttac

SEQ ID NO: 67738 - DNA, 20 bp, Artificial Sequence
  Description of Artificial Sequence: Synthetic oligonucleotide
  Target: SCNA; (+) strand; PAM type: YTN; PAM sequence: CTT
cttttactgacaaaaaggct

SEQ ID NO: 67739 - DNA, 20 bp, Artificial Sequence
  Description of Artificial Sequence: Synthetic oligonucleotide
  Target: SCNA; (+) strand; PAM type: YTN; PAM sequence: TTC
ttttactgacaaaaaggctt

SEQ ID NO: 67740 - DNA, 20 bp, Artificial Sequence
  Description of Artificial Sequence: Synthetic oligonucleotide
  Target: SCNA; (+) strand; PAM type: YTN; PAM sequence: CTT
ttactgacaaaaaggctttt

SEQ ID NO: 67741 - DNA, 20 bp, Artificial Sequence
  Description of Artificial Sequence: Synthetic oligonucleotide
  Target: SCNA; (+) strand; PAM type: YTN; PAM sequence: TTT
tactgacaaaaaggcttttc

SEQ ID NO: 67742 - DNA, 20 bp, Artificial Sequence
  Description of Artificial Sequence: Synthetic oligonucleotide
  Target: SCNA; (+) strand; PAM type: YTN; PAM sequence: TTT
actgacaaaaaggcttttct

SEQ ID NO: 67743 - DNA, 20 bp, Artificial Sequence
  Description of Artificial Sequence: Synthetic oligonucleotide
  Target: SCNA; (+) strand; PAM type: YTN; PAM sequence: TTA
ctgacaaaaaggcttttctc

SEQ ID NO: 67744 - DNA, 20 bp, Artificial Sequence
  Description of Artificial Sequence: Synthetic oligonucleotide
  Target: SCNA; (+) strand; PAM type: YTN; PAM sequence: CTG
acaaaaaggcttttctctgg

SEQ ID NO: 67745 - DNA, 20 bp, Artificial Sequence
  Description of Artificial Sequence: Synthetic oligonucleotide
  Target: SCNA; (+) strand; PAM type: YTN; PAM sequence: CTT
ttctctggagaaaataaaaa

SEQ ID NO: 67746 - DNA, 20 bp, Artificial Sequence
  Description of Artificial Sequence: Synthetic oligonucleotide
  Target: SCNA; (+) strand; PAM type: YTN; PAM sequence: TTT
tctctggagaaaataaaaag

SEQ ID NO: 67747 - DNA, 20 bp, Artificial Sequence
  Description of Artificial Sequence: Synthetic oligonucleotide
  Target: SCNA; (+) strand; PAM type: YTN; PAM sequence: TTT
ctctggagaaaataaaaagg

SEQ ID NO: 67748 - DNA, 20 bp, Artificial Sequence
  Description of Artificial Sequence: Synthetic oligonucleotide
  Target: SCNA; (+) strand; PAM type: YTN; PAM sequence: TTC
tctggagaaaataaaaaggc

SEQ ID NO: 67749 - DNA, 20 bp, Artificial Sequence
  Description of Artificial Sequence: Synthetic oligonucleotide
  Target: SCNA; (+) strand; PAM type: YTN; PAM sequence: CTC
tggagaaaataaaaaggcag

SEQ ID NO: 67750 - DNA, 20 bp, Artificial Sequence
  Description of Artificial Sequence: Synthetic oligonucleotide
  Target: SCNA; (+) strand; PAM type: YTN; PAM sequence: CTG
gagaaaataaaaaggcagct

SEQ ID NO: 67751 - DNA, 20 bp, Artificial Sequence
  Description of Artificial Sequence: Synthetic oligonucleotide
  Target: SCNA; (+) strand; PAM type: YTN; PAM sequence: CTT
tccctgagagcacacacttc

SEQ ID NO: 67752 - DNA, 20 bp, Artificial Sequence
  Description of Artificial Sequence: Synthetic oligonucleotide
  Target: SCNA; (+) strand; PAM type: YTN; PAM sequence: TTT
ccctgagagcacacacttct

SEQ ID NO: 67753 - DNA, 20 bp, Artificial Sequence
  Description of Artificial Sequence: Synthetic oligonucleotide
  Target: SCNA; (+) strand; PAM type: YTN; PAM sequence: TTC
cctgagagcacacacttcta

SEQ ID NO: 67754 - DNA, 20 bp, Artificial Sequence
  Description of Artificial Sequence: Synthetic oligonucleotide
  Target: SCNA; (+) strand; PAM type: YTN; PAM sequence: CTG
agagcacacacttctagcaa

SEQ ID NO: 67755 - DNA, 20 bp, Artificial Sequence
  Description of Artificial Sequence: Synthetic oligonucleotide
  Target: SCNA; (+) strand; PAM type: YTN; PAM sequence: CTT
ctagcaaagccccaatccat

SEQ ID NO: 67756 - DNA, 20 bp, Artificial Sequence
  Description of Artificial Sequence: Synthetic oligonucleotide
  Target: SCNA; (+) strand; PAM type: YTN; PAM sequence: TTC
tagcaaagccccaatccata

SEQ ID NO: 67757 - DNA, 20 bp, Artificial Sequence
  Description of Artificial Sequence: Synthetic oligonucleotide
  Target: SCNA; (+) strand; PAM type: YTN; PAM sequence: CTA
gcaaagccccaatccatatg

SEQ ID NO: 67758 - DNA, 20 bp, Artificial Sequence
  Description of Artificial Sequence: Synthetic oligonucleotide
  Target: SCNA; (+) strand; PAM type: YTN; PAM sequence: CTC
taagacagagtgatttccac

SEQ ID NO: 67759 - DNA, 20 bp, Artificial Sequence
  Description of Artificial Sequence: Synthetic oligonucleotide
  Target: SCNA; (+) strand; PAM type: YTN; PAM sequence: CTA
agacagagtgatttccacct

SEQ ID NO: 67760 - DNA, 20 bp, Artificial Sequence
  Description of Artificial Sequence: Synthetic oligonucleotide
  Target: SCNA; (+) strand; PAM type: YTN; PAM sequence: TTT
ccaccttctagtccttactt

SEQ ID NO: 67761 - DNA, 20 bp, Artificial Sequence
  Description of Artificial Sequence: Synthetic oligonucleotide
  Target: SCNA; (+) strand; PAM type: YTN; PAM sequence: TTC
caccttctagtccttacttt

SEQ ID NO: 67762 - DNA, 20 bp, Artificial Sequence
  Description of Artificial Sequence: Synthetic oligonucleotide
  Target: SCNA; (+) strand; PAM type: YTN; PAM sequence: CTT
ctagtccttactttcttgca

SEQ ID NO: 67763 - DNA, 20 bp, Artificial Sequence
  Description of Artificial Sequence: Synthetic oligonucleotide
  Target: SCNA; (+) strand; PAM type: YTN; PAM sequence: TTC
tagtccttactttcttgcaa

SEQ ID NO: 67764 - DNA, 20 bp, Artificial Sequence
  Description of Artificial Sequence: Synthetic oligonucleotide
  Target: SCNA; (+) strand; PAM type: YTN; PAM sequence: CTA
gtccttactttcttgcaaaa

SEQ ID NO: 67765 - DNA, 20 bp, Artificial Sequence
  Description of Artificial Sequence: Synthetic oligonucleotide
  Target: SCNA; (+) strand; PAM type: YTN; PAM sequence: CTT
actttcttgcaaaaggggct

SEQ ID NO: 67766 - DNA, 20 bp, Artificial Sequence
  Description of Artificial Sequence: Synthetic oligonucleotide
  Target: SCNA; (+) strand; PAM type: YTN; PAM sequence: TTA
ctttcttgcaaaaggggctt

SEQ ID NO: 67767 - DNA, 20 bp, Artificial Sequence
  Description of Artificial Sequence: Synthetic oligonucleotide
  Target: SCNA; (+) strand; PAM type: YTN; PAM sequence: CTT
tcttgcaaaaggggctttca

SEQ ID NO: 67768 - DNA, 20 bp, Artificial Sequence
  Description of Artificial Sequence: Synthetic oligonucleotide
  Target: SCNA; (+) strand; PAM type: YTN; PAM sequence: TTT
cttgcaaaaggggctttcaa

SEQ ID NO: 67769 - DNA, 20 bp, Artificial Sequence
  Description of Artificial Sequence: Synthetic oligonucleotide
  Target: SCNA; (+) strand; PAM type: YTN; PAM sequence: TTC
ttgcaaaaggggctttcaaa

SEQ ID NO: 67770 - DNA, 20 bp, Artificial Sequence
  Description of Artificial Sequence: Synthetic oligonucleotide
  Target: SCNA; (+) strand; PAM type: YTN; PAM sequence: CTT
gcaaaaggggctttcaaatc

SEQ ID NO: 67771 - DNA, 20 bp, Artificial Sequence
  Description of Artificial Sequence: Synthetic oligonucleotide
  Target: SCNA; (+) strand; PAM type: YTN; PAM sequence: TTG
caaaaggggctttcaaatct

SEQ ID NO: 67772 - DNA, 20 bp, Artificial Sequence
  Description of Artificial Sequence: Synthetic oligonucleotide
  Target: SCNA; (+) strand; PAM type: YTN; PAM sequence: CTT
tcaaatctcattactgatgg

SEQ ID NO: 67773 - DNA, 20 bp, Artificial Sequence
  Description of Artificial Sequence: Synthetic oligonucleotide
  Target: SCNA; (+) strand; PAM type: YTN; PAM sequence: TTT
caaatctcattactgatggt

SEQ ID NO: 67774 - DNA, 20 bp, Artificial Sequence
  Description of Artificial Sequence: Synthetic oligonucleotide
  Target: SCNA; (+) strand; PAM type: YTN; PAM sequence: TTC
aaatctcattactgatggtc

SEQ ID NO: 67775 - DNA, 20 bp, Artificial Sequence
  Description of Artificial Sequence: Synthetic oligonucleotide
  Target: SCNA; (+) strand; PAM type: YTN; PAM sequence: CTC
attactgatggtcccatctt

SEQ ID NO: 67776 - DNA, 20 bp, Artificial Sequence
  Description of Artificial Sequence: Synthetic oligonucleotide
  Target: SCNA; (+) strand; PAM type: YTN; PAM sequence: TTA
ctgatggtcccatcttttat

SEQ ID NO: 67777 - DNA, 20 bp, Artificial Sequence
  Description of Artificial Sequence: Synthetic oligonucleotide
  Target: SCNA; (+) strand; PAM type: YTN; PAM sequence: CTG
atggtcccatcttttattac

SEQ ID NO: 67778 - DNA, 20 bp, Artificial Sequence
  Description of Artificial Sequence: Synthetic oligonucleotide
  Target: SCNA; (+) strand; PAM type: YTN; PAM sequence: CTT
ttattactggtgttatcaat

SEQ ID NO: 67779 - DNA, 20 bp, Artificial Sequence
  Description of Artificial Sequence: Synthetic oligonucleotide
  Target: SCNA; (+) strand; PAM type: YTN; PAM sequence: TTT
tattactggtgttatcaatg

SEQ ID NO: 67780 - DNA, 20 bp, Artificial Sequence
  Description of Artificial Sequence: Synthetic oligonucleotide
  Target: SCNA; (+) strand; PAM type: YTN; PAM sequence: TTT
attactggtgttatcaatgg

SEQ ID NO: 67781 - DNA, 20 bp, Artificial Sequence
  Description of Artificial Sequence: Synthetic oligonucleotide
  Target: SCNA; (+) strand; PAM type: YTN; PAM sequence: TTA
ttactggtgttatcaatggg

SEQ ID NO: 67782 - DNA, 20 bp, Artificial Sequence
  Description of Artificial Sequence: Synthetic oligonucleotide
  Target: SCNA; (+) strand; PAM type: YTN; PAM sequence: TTA
ctggtgttatcaatgggatg

SEQ ID NO: 67783 - DNA, 20 bp, Artificial Sequence
  Description of Artificial Sequence: Synthetic oligonucleotide
  Target: SCNA; (+) strand; PAM type: YTN; PAM sequence: CTG
gtgttatcaatgggatgctt

SEQ ID NO: 67784 - DNA, 20 bp, Artificial Sequence
  Description of Artificial Sequence: Synthetic oligonucleotide
  Target: SCNA; (+) strand; PAM type: YTN; PAM sequence: TTA
tcaatgggatgcttgcagca

SEQ ID NO: 67785 - DNA, 20 bp, Artificial Sequence
  Description of Artificial Sequence: Synthetic oligonucleotide
  Target: SCNA; (+) strand; PAM type: YTN; PAM sequence: CTT
gcagcagcttaagtatgtgg

SEQ ID NO: 67786 - DNA, 20 bp, Artificial Sequence
  Description of Artificial Sequence: Synthetic oligonucleotide
  Target: SCNA; (+) strand; PAM type: YTN; PAM sequence: TTG
cagcagcttaagtatgtgga

SEQ ID NO: 67787 - DNA, 20 bp, Artificial Sequence
  Description of Artificial Sequence: Synthetic oligonucleotide
  Target: SCNA; (+) strand; PAM type: YTN; PAM sequence: CTT
aagtatgtggataaagaagg

SEQ ID NO: 67788 - DNA, 20 bp, Artificial Sequence
  Description of Artificial Sequence: Synthetic oligonucleotide
  Target: SCNA; (+) strand; PAM type: YTN; PAM sequence: TTA
agtatgtggataaagaagga

SEQ ID NO: 67789 - DNA, 20 bp, Artificial Sequence
  Description of Artificial Sequence: Synthetic oligonucleotide
  Target: SCNA; (+) strand; PAM type: YTN; PAM sequence: CTG
aatatttttaaaaagtggtc

SEQ ID NO: 67790 - DNA, 20 bp, Artificial Sequence
  Description of Artificial Sequence: Synthetic oligonucleotide
  Target: SCNA; (+) strand; PAM type: YTN; PAM sequence: TTT
ttaaaaagtggtctttcaga

SEQ ID NO: 67791 - DNA, 20 bp, Artificial Sequence
  Description of Artificial Sequence: Synthetic oligonucleotide
  Target: SCNA; (+) strand; PAM type: YTN; PAM sequence: TTT
taaaaagtggtctttcagaa

SEQ ID NO: 67792 - DNA, 20 bp, Artificial Sequence
  Description of Artificial Sequence: Synthetic oligonucleotide
  Target: SCNA; (+) strand; PAM type: YTN; PAM sequence: TTT
aaaaagtggtctttcagaat

SEQ ID NO: 67793 - DNA, 20 bp, Artificial Sequence
  Description of Artificial Sequence: Synthetic oligonucleotide
  Target: SCNA; (+) strand; PAM type: YTN; PAM sequence: TTA
aaaagtggtctttcagaatg

SEQ ID NO: 67794 - DNA, 20 bp, Artificial Sequence
  Description of Artificial Sequence: Synthetic oligonucleotide
  Target: SCNA; (+) strand; PAM type: YTN; PAM sequence: CTT
tcagaatgtctgtatgtgtg

SEQ ID NO: 67795 - DNA, 20 bp, Artificial Sequence
  Description of Artificial Sequence: Synthetic oligonucleotide
  Target: SCNA; (+) strand; PAM type: YTN; PAM sequence: TTT
cagaatgtctgtatgtgtgg

SEQ ID NO: 67796 - DNA, 20 bp, Artificial Sequence
  Description of Artificial Sequence: Synthetic oligonucleotide
  Target: SCNA; (+) strand; PAM type: YTN; PAM sequence: TTC
agaatgtctgtatgtgtggg

SEQ ID NO: 67797 - DNA, 20 bp, Artificial Sequence
  Description of Artificial Sequence: Synthetic oligonucleotide
  Target: SCNA; (+) strand; PAM type: YTN; PAM sequence: CTG
tatgtgtgggggcccatgct

SEQ ID NO: 67798 - DNA, 20 bp, Artificial Sequence
  Description of Artificial Sequence: Synthetic oligonucleotide
  Target: SCNA; (+) strand; PAM type: YTN; PAM sequence: CTT
aggcatatgtgcatgccagt

SEQ ID NO: 67799 - DNA, 20 bp, Artificial Sequence
  Description of Artificial Sequence: Synthetic oligonucleotide
  Target: SCNA; (+) strand; PAM type: YTN; PAM sequence: TTA
ggcatatgtgcatgccagtg

SEQ ID NO: 67800 - DNA, 20 bp, Artificial Sequence
  Description of Artificial Sequence: Synthetic oligonucleotide
  Target: SCNA; (+) strand; PAM type: YTN; PAM sequence: TTA
tttatgttgaaaccaatgtt

SEQ ID NO: 67801 - DNA, 20 bp, Artificial Sequence
  Description of Artificial Sequence: Synthetic oligonucleotide
  Target: SCNA; (+) strand; PAM type: YTN; PAM sequence: TTT
atgttgaaaccaatgtttta

SEQ ID NO: 67802 - DNA, 20 bp, Artificial Sequence
  Description of Artificial Sequence: Synthetic oligonucleotide
  Target: SCNA; (+) strand; PAM type: YTN; PAM sequence: TTA
tgttgaaaccaatgttttac

SEQ ID NO: 67803 - DNA, 20 bp, Artificial Sequence
  Description of Artificial Sequence: Synthetic oligonucleotide
  Target: SCNA; (+) strand; PAM type: YTN; PAM sequence: TTG
aaaccaatgttttacattaa

SEQ ID NO: 67804 - DNA, 20 bp, Artificial Sequence
  Description of Artificial Sequence: Synthetic oligonucleotide
  Target: SCNA; (+) strand; PAM type: YTN; PAM sequence: TTT
tacattaatggctggaattc

SEQ ID NO: 67805 - DNA, 20 bp, Artificial Sequence
  Description of Artificial Sequence: Synthetic oligonucleotide
  Target: SCNA; (+) strand; PAM type: YTN; PAM sequence: TTT
acattaatggctggaattcc

SEQ ID NO: 67806 - DNA, 20 bp, Artificial Sequence
  Description of Artificial Sequence: Synthetic oligonucleotide
  Target: SCNA; (+) strand; PAM type: YTN; PAM sequence: TTA
cattaatggctggaattcca

SEQ ID NO: 67807 - DNA, 20 bp, Artificial Sequence
  Description of Artificial Sequence: Synthetic oligonucleotide
  Target: SCNA; (+) strand; PAM type: YTN; PAM sequence: TTA
atggctggaattccagaaaa

SEQ ID NO: 67808 - DNA, 20 bp, Artificial Sequence
  Description of Artificial Sequence: Synthetic oligonucleotide
  Target: SCNA; (+) strand; PAM type: YTN; PAM sequence: CTG
gaattccagaaaaataagaa

SEQ ID NO: 67809 - DNA, 20 bp, Artificial Sequence
  Description of Artificial Sequence: Synthetic oligonucleotide
  Target: SCNA; (+) strand; PAM type: YTN; PAM sequence: TTC
cagaaaaataagaaaatatt

SEQ ID NO: 67810 - DNA, 20 bp, Artificial Sequence
  Description of Artificial Sequence: Synthetic oligonucleotide
  Target: SCNA; (+) strand; PAM type: YTN; PAM sequence: TTT
gtattttctaaaccattaaa

SEQ ID NO: 67811 - DNA, 20 bp, Artificial Sequence
  Description of Artificial Sequence: Synthetic oligonucleotide
  Target: SCNA; (+) strand; PAM type: YTN; PAM sequence: TTG
tattttctaaaccattaaaa

SEQ ID NO: 67812 - DNA, 20 bp, Artificial Sequence
  Description of Artificial Sequence: Synthetic oligonucleotide
  Target: SCNA; (+) strand; PAM type: YTN; PAM sequence: TTT
tctaaaccattaaaagttta

SEQ ID NO: 67813 - DNA, 20 bp, Artificial Sequence
  Description of Artificial Sequence: Synthetic oligonucleotide
  Target: SCNA; (+) strand; PAM type: YTN; PAM sequence: TTT
ctaaaccattaaaagtttag

SEQ ID NO: 67814 - DNA, 20 bp, Artificial Sequence
  Description of Artificial Sequence: Synthetic oligonucleotide
  Target: SCNA; (+) strand; PAM type: YTN; PAM sequence: TTC
taaaccattaaaagtttagt

SEQ ID NO: 67815 - DNA, 20 bp, Artificial Sequence
  Description of Artificial Sequence: Synthetic oligonucleotide
  Target: SCNA; (+) strand; PAM type: YTN; PAM sequence: CTA
aaccattaaaagtttagtgg

SEQ ID NO: 67816 - DNA, 20 bp, Artificial Sequence
  Description of Artificial Sequence: Synthetic oligonucleotide
  Target: SCNA; (+) strand; PAM type: YTN; PAM sequence: TTA
aaagtttagtggaactcatt

SEQ ID NO: 67817 - DNA, 20 bp, Artificial Sequence
  Description of Artificial Sequence: Synthetic oligonucleotide
  Target: SCNA; (+) strand; PAM type: YTN; PAM sequence: TTT
agtggaactcattaatagtc

SEQ ID NO: 67818 - DNA, 20 bp, Artificial Sequence
  Description of Artificial Sequence: Synthetic oligonucleotide
  Target: SCNA; (+) strand; PAM type: YTN; PAM sequence: TTA
gtggaactcattaatagtct

SEQ ID NO: 67819 - DNA, 20 bp, Artificial Sequence
  Description of Artificial Sequence: Synthetic oligonucleotide
  Target: SCNA; (+) strand; PAM type: YTN; PAM sequence: CTC
attaatagtctgtatcatct

SEQ ID NO: 67820 - DNA, 20 bp, Artificial Sequence
  Description of Artificial Sequence: Synthetic oligonucleotide
  Target: SCNA; (+) strand; PAM type: YTN; PAM sequence: TTA
atagtctgtatcatctctct

SEQ ID NO: 67821 - DNA, 20 bp, Artificial Sequence
  Description of Artificial Sequence: Synthetic oligonucleotide
  Target: SCNA; (+) strand; PAM type: YTN; PAM sequence: CTG
tatcatctctctgtatattt

SEQ ID NO: 67822 - DNA, 20 bp, Artificial Sequence
  Description of Artificial Sequence: Synthetic oligonucleotide
  Target: SCNA; (+) strand; PAM type: YTN; PAM sequence: CTC
tctgtatatttcagaagtac

SEQ ID NO: 67823 - DNA, 20 bp, Artificial Sequence
  Description of Artificial Sequence: Synthetic oligonucleotide
  Target: SCNA; (+) strand; PAM type: YTN; PAM sequence: CTC
tgtatatttcagaagtacat

SEQ ID NO: 67824 - DNA, 20 bp, Artificial Sequence
  Description of Artificial Sequence: Synthetic oligonucleotide
  Target: SCNA; (+) strand; PAM type: YTN; PAM sequence: CTG
tatatttcagaagtacattt

SEQ ID NO: 67825 - DNA, 20 bp, Artificial Sequence
  Description of Artificial Sequence: Synthetic oligonucleotide
  Target: SCNA; (+) strand; PAM type: YTN; PAM sequence: TTT
cagaagtacattttaagtgt

SEQ ID NO: 67826 - DNA, 20 bp, Artificial Sequence
  Description of Artificial Sequence: Synthetic oligonucleotide
  Target: SCNA; (+) strand; PAM type: YTN; PAM sequence: TTC
agaagtacattttaagtgta

SEQ ID NO: 67827 - DNA, 20 bp, Artificial Sequence
  Description of Artificial Sequence: Synthetic oligonucleotide
  Target: SCNA; (+) strand; PAM type: YTN; PAM sequence: TTT
taagtgtaacagctaggggt

SEQ ID NO: 67828 - DNA, 20 bp, Artificial Sequence
  Description of Artificial Sequence: Synthetic oligonucleotide
  Target: SCNA; (+) strand; PAM type: YTN; PAM sequence: TTT
aagtgtaacagctaggggta

SEQ ID NO: 67829 - DNA, 20 bp, Artificial Sequence
  Description of Artificial Sequence: Synthetic oligonucleotide
  Target: SCNA; (+) strand; PAM type: YTN; PAM sequence: TTA
agtgtaacagctaggggtaa

SEQ ID NO: 67830 - DNA, 20 bp, Artificial Sequence
  Description of Artificial Sequence: Synthetic oligonucleotide
  Target: SCNA; (+) strand; PAM type: YTN; PAM sequence: CTA
ggggtaaactttcataactg

SEQ ID NO: 67831 - DNA, 20 bp, Artificial Sequence
  Description of Artificial Sequence: Synthetic oligonucleotide
  Target: SCNA; (+) strand; PAM type: YTN; PAM sequence: CTT
tcataactgtatgatttgaa

SEQ ID NO: 67832 - DNA, 20 bp, Artificial Sequence
  Description of Artificial Sequence: Synthetic oligonucleotide
  Target: SCNA; (+) strand; PAM type: YTN; PAM sequence: TTT
cataactgtatgatttgaac

SEQ ID NO: 67833 - DNA, 20 bp, Artificial Sequence
  Description of Artificial Sequence: Synthetic oligonucleotide
  Target: SCNA; (+) strand; PAM type: YTN; PAM sequence: TTC
ataactgtatgatttgaaca

SEQ ID NO: 67834 - DNA, 20 bp, Artificial Sequence
  Description of Artificial Sequence: Synthetic oligonucleotide
  Target: SCNA; (+) strand; PAM type: YTN; PAM sequence: CTG
tatgatttgaacacaagtac

SEQ ID NO: 67835 - DNA, 20 bp, Artificial Sequence
  Description of Artificial Sequence: Synthetic oligonucleotide
  Target: SCNA; (+) strand; PAM type: YTN; PAM sequence: TTT
gaacacaagtacaagaaata

SEQ ID NO: 67836 - DNA, 20 bp, Artificial Sequence
  Description of Artificial Sequence: Synthetic oligonucleotide
  Target: SCNA; (+) strand; PAM type: YTN; PAM sequence: TTG
aacacaagtacaagaaatat

SEQ ID NO: 67837 - DNA, 20 bp, Artificial Sequence
  Description of Artificial Sequence: Synthetic oligonucleotide
  Target: SCNA; (+) strand; PAM type: YTN; PAM sequence: TTC
aaggttttcttttctttttt

SEQ ID NO: 67838 - DNA, 20 bp, Artificial Sequence
  Description of Artificial Sequence: Synthetic oligonucleotide
  Target: SCNA; (+) strand; PAM type: YTN; PAM sequence: TTT
tcttttctttttttttttta

SEQ ID NO: 67839 - DNA, 20 bp, Artificial Sequence
  Description of Artificial Sequence: Synthetic oligonucleotide
  Target: SCNA; (+) strand; PAM type: YTN; PAM sequence: TTT
cttttcttttttttttttag

SEQ ID NO: 67840 - DNA, 20 bp, Artificial Sequence
  Description of Artificial Sequence: Synthetic oligonucleotide
  Target: SCNA; (+) strand; PAM type: YTN; PAM sequence: TTC
ttttcttttttttttttaga

SEQ ID NO: 67841 - DNA, 20 bp, Artificial Sequence
  Description of Artificial Sequence: Synthetic oligonucleotide
  Target: SCNA; (+) strand; PAM type: YTN; PAM sequence: CTT
ttcttttttttttttagatg

SEQ ID NO: 67842 - DNA, 20 bp, Artificial Sequence
  Description of Artificial Sequence: Synthetic oligonucleotide
  Target: SCNA; (+) strand; PAM type: YTN; PAM sequence: TTT
tcttttttttttttagatga

SEQ ID NO: 67843 - DNA, 20 bp, Artificial Sequence
  Description of Artificial Sequence: Synthetic oligonucleotide
  Target: SCNA; (+) strand; PAM type: YTN; PAM sequence: TTT
cttttttttttttagatgaa

SEQ ID NO: 67844 - DNA, 20 bp, Artificial Sequence
  Description of Artificial Sequence: Synthetic oligonucleotide
  Target: SCNA; (+) strand; PAM type: YTN; PAM sequence: TTC
ttttttttttttagatgaag

SEQ ID NO: 67845 - DNA, 20 bp, Artificial Sequence
  Description of Artificial Sequence: Synthetic oligonucleotide
  Target: SCNA; (+) strand; PAM type: YTN; PAM sequence: CTT
ttttttttttagatgaagtc

SEQ ID NO: 67846 - DNA, 20 bp, Artificial Sequence
  Description of Artificial Sequence: Synthetic oligonucleotide
  Target: SCNA; (+) strand; PAM type: YTN; PAM sequence: TTT
tttttttttagatgaagtct

SEQ ID NO: 67847 - DNA, 20 bp, Artificial Sequence
  Description of Artificial Sequence: Synthetic oligonucleotide
  Target: SCNA; (+) strand; PAM type: YTN; PAM sequence: TTT
ttttttttagatgaagtctc

SEQ ID NO: 67848 - DNA, 20 bp, Artificial Sequence
  Description of Artificial Sequence: Synthetic oligonucleotide
  Target: SCNA; (+) strand; PAM type: YTN; PAM sequence: TTT
tttttttagatgaagtctca

SEQ ID NO: 67849 - DNA, 20 bp, Artificial Sequence
  Description of Artificial Sequence: Synthetic oligonucleotide
  Target: SCNA; (+) strand; PAM type: YTN; PAM sequence: TTT
ttttttagatgaagtctcac

SEQ ID NO: 67850 - DNA, 20 bp, Artificial Sequence
  Description of Artificial Sequence: Synthetic oligonucleotide
  Target: SCNA; (+) strand; PAM type: YTN; PAM sequence: TTT
tttttagatgaagtctcact

SEQ ID NO: 67851 - DNA, 20 bp, Artificial Sequence
  Description of Artificial Sequence: Synthetic oligonucleotide
  Target: SCNA; (+) strand; PAM type: YTN; PAM sequence: TTT
ttttagatgaagtctcactc

SEQ ID NO: 67852 - DNA, 20 bp, Artificial Sequence
  Description of Artificial Sequence: Synthetic oligonucleotide
  Target: SCNA; (+) strand; PAM type: YTN; PAM sequence: TTT
tttagatgaagtctcactct

SEQ ID NO: 67853 - DNA, 20 bp, Artificial Sequence
  Description of Artificial Sequence: Synthetic oligonucleotide
  Target: SCNA; (+) strand; PAM type: YTN; PAM sequence: TTT
ttagatgaagtctcactctt

SEQ ID NO: 67854 - DNA, 20 bp, Artificial Sequence
  Description of Artificial Sequence: Synthetic oligonucleotide
  Target: SCNA; (+) strand; PAM type: YTN; PAM sequence: TTT
tagatgaagtctcactctta

SEQ ID NO: 67855 - DNA, 20 bp, Artificial Sequence
  Description of Artificial Sequence: Synthetic oligonucleotide
  Target: SCNA; (+) strand; PAM type: YTN; PAM sequence: TTT
agatgaagtctcactcttat

SEQ ID NO: 67856 - DNA, 20 bp, Artificial Sequence
  Description of Artificial Sequence: Synthetic oligonucleotide
  Target: SCNA; (+) strand; PAM type: YTN; PAM sequence: TTA
gatgaagtctcactcttatc

SEQ ID NO: 67857 - DNA, 20 bp, Artificial Sequence
  Description of Artificial Sequence: Synthetic oligonucleotide
  Target: SCNA; (+) strand; PAM type: YTN; PAM sequence: CTC
actcttatcgccgtagctat

SEQ ID NO: 67858 - DNA, 20 bp, Artificial Sequence
  Description of Artificial Sequence: Synthetic oligonucleotide
  Target: SCNA; (+) strand; PAM type: YTN; PAM sequence: CTC
ttatcgccgtagctatagtg

SEQ ID NO: 67859 - DNA, 20 bp, Artificial Sequence
  Description of Artificial Sequence: Synthetic oligonucleotide
  Target: SCNA; (+) strand; PAM type: YTN; PAM sequence: CTT
atcgccgtagctatagtgca

SEQ ID NO: 67860 - DNA, 20 bp, Artificial Sequence
  Description of Artificial Sequence: Synthetic oligonucleotide
  Target: SCNA; (+) strand; PAM type: YTN; PAM sequence: TTA
tcgccgtagctatagtgcaa

SEQ ID NO: 67861 - DNA, 20 bp, Artificial Sequence
  Description of Artificial Sequence: Synthetic oligonucleotide
  Target: SCNA; (+) strand; PAM type: YTN; PAM sequence: CTA
tagtgcaatggcgctgtctc

SEQ ID NO: 67862 - DNA, 20 bp, Artificial Sequence
  Description of Artificial Sequence: Synthetic oligonucleotide
  Target: SCNA; (+) strand; PAM type: YTN; PAM sequence: CTG
tctcagctcactgcaacctc

SEQ ID NO: 67863 - DNA, 20 bp, Artificial Sequence
  Description of Artificial Sequence: Synthetic oligonucleotide
  Target: SCNA; (+) strand; PAM type: YTN; PAM sequence: CTC
agctcactgcaacctccgcc

SEQ ID NO: 67864 - DNA, 20 bp, Artificial Sequence
  Description of Artificial Sequence: Synthetic oligonucleotide
  Target: SCNA; (+) strand; PAM type: YTN; PAM sequence: CTC
actgcaacctccgcctccta

SEQ ID NO: 67865 - DNA, 20 bp, Artificial Sequence
  Description of Artificial Sequence: Synthetic oligonucleotide
  Target: SCNA; (+) strand; PAM type: YTN; PAM sequence: CTG
caacctccgcctcctaggtt

SEQ ID NO: 67866 - DNA, 20 bp, Artificial Sequence
  Description of Artificial Sequence: Synthetic oligonucleotide
  Target: SCNA; (+) strand; PAM type: YTN; PAM sequence: CTC
cgcctcctaggttaaagcaa

SEQ ID NO: 67867 - DNA, 20 bp, Artificial Sequence
  Description of Artificial Sequence: Synthetic oligonucleotide
  Target: SCNA; (+) strand; PAM type: YTN; PAM sequence: CTC
ctaggttaaagcaattctcc

SEQ ID NO: 67868 - DNA, 20 bp, Artificial Sequence
  Description of Artificial Sequence: Synthetic oligonucleotide
  Target: SCNA; (+) strand; PAM type: YTN; PAM sequence: CTA
ggttaaagcaattctcctgc

SEQ ID NO: 67869 - DNA, 20 bp, Artificial Sequence
  Description of Artificial Sequence: Synthetic oligonucleotide
  Target: SCNA; (+) strand; PAM type: YTN; PAM sequence: TTA
aagcaattctcctgcctcag

SEQ ID NO: 67870 - DNA, 20 bp, Artificial Sequence
  Description of Artificial Sequence: Synthetic oligonucleotide
  Target: SCNA; (+) strand; PAM type: YTN; PAM sequence: TTC
tcctgcctcagcctccgtag

SEQ ID NO: 67871 - DNA, 20 bp, Artificial Sequence
  Description of Artificial Sequence: Synthetic oligonucleotide
  Target: SCNA; (+) strand; PAM type: YTN; PAM sequence: CTC
ctgcctcagcctccgtagta

SEQ ID NO: 67872 - DNA, 20 bp, Artificial Sequence
  Description of Artificial Sequence: Synthetic oligonucleotide
  Target: SCNA; (+) strand; PAM type: YTN; PAM sequence: CTG
cctcagcctccgtagtagct

SEQ ID NO: 67873 - DNA, 20 bp, Artificial Sequence
  Description of Artificial Sequence: Synthetic oligonucleotide
  Target: SCNA; (+) strand; PAM type: YTN; PAM sequence: CTC
agcctccgtagtagctggga

SEQ ID NO: 67874 - DNA, 20 bp, Artificial Sequence
  Description of Artificial Sequence: Synthetic oligonucleotide
  Target: SCNA; (+) strand; PAM type: YTN; PAM sequence: CTC
cgtagtagctgggattacag

SEQ ID NO: 67875 - DNA, 20 bp, Artificial Sequence
  Description of Artificial Sequence: Synthetic oligonucleotide
  Target: SCNA; (+) strand; PAM type: YTN; PAM sequence: CTG
ggattacaggatcctgccac

SEQ ID NO: 67876 - DNA, 20 bp, Artificial Sequence
  Description of Artificial Sequence: Synthetic oligonucleotide
  Target: SCNA; (+) strand; PAM type: YTN; PAM sequence: TTA
caggatcctgccaccacacc

SEQ ID NO: 67877 - DNA, 20 bp, Artificial Sequence
  Description of Artificial Sequence: Synthetic oligonucleotide
  Target: SCNA; (+) strand; PAM type: YTN; PAM sequence: CTG
ccaccacacccactaatttt

SEQ ID NO: 67878 - DNA, 20 bp, Artificial Sequence
  Description of Artificial Sequence: Synthetic oligonucleotide
  Target: SCNA; (+) strand; PAM type: YTN; PAM sequence: CTA
atttttgtatttttggtaga

SEQ ID NO: 67879 - DNA, 20 bp, Artificial Sequence
  Description of Artificial Sequence: Synthetic oligonucleotide
  Target: SCNA; (+) strand; PAM type: YTN; PAM sequence: TTT
ttgtatttttggtagagaat

SEQ ID NO: 67880 - DNA, 20 bp, Artificial Sequence
  Description of Artificial Sequence: Synthetic oligonucleotide
  Target: SCNA; (+) strand; PAM type: YTN; PAM sequence: TTT
tgtatttttggtagagaatg

SEQ ID NO: 67881 - DNA, 20 bp, Artificial Sequence
  Description of Artificial Sequence: Synthetic oligonucleotide
  Target: SCNA; (+) strand; PAM type: YTN; PAM sequence: TTT
gtatttttggtagagaatgg

SEQ ID NO: 67882 - DNA, 20 bp, Artificial Sequence
  Description of Artificial Sequence: Synthetic oligonucleotide
  Target: SCNA; (+) strand; PAM type: YTN; PAM sequence: TTG
tatttttggtagagaatggg

SEQ ID NO: 67883 - DNA, 20 bp, Artificial Sequence
  Description of Artificial Sequence: Synthetic oligonucleotide
  Target: SCNA; (+) strand; PAM type: YTN; PAM sequence: TTT
ttggtagagaatgggtttca

SEQ ID NO: 67884 - DNA, 20 bp, Artificial Sequence
  Description of Artificial Sequence: Synthetic oligonucleotide
  Target: SCNA; (+) strand; PAM type: YTN; PAM sequence: TTT
tggtagagaatgggtttcac

SEQ ID NO: 67885 - DNA, 20 bp, Artificial Sequence
  Description of Artificial Sequence: Synthetic oligonucleotide
  Target: SCNA; (+) strand; PAM type: YTN; PAM sequence: TTT
ggtagagaatgggtttcacc

SEQ ID NO: 67886 - DNA, 20 bp, Artificial Sequence
  Description of Artificial Sequence: Synthetic oligonucleotide
  Target: SCNA; (+) strand; PAM type: YTN; PAM sequence: TTG
gtagagaatgggtttcacca

SEQ ID NO: 67887 - DNA, 20 bp, Artificial Sequence
  Description of Artificial Sequence: Synthetic oligonucleotide
  Target: SCNA; (+) strand; PAM type: YTN; PAM sequence: TTT
caccatgttggacaggctgg

SEQ ID NO: 67888 - DNA, 20 bp, Artificial Sequence
  Description of Artificial Sequence: Synthetic oligonucleotide
  Target: SCNA; (+) strand; PAM type: YTN; PAM sequence: TTC
accatgttggacaggctggt

SEQ ID NO: 67889 - DNA, 20 bp, Artificial Sequence
  Description of Artificial Sequence: Synthetic oligonucleotide
  Target: SCNA; (+) strand; PAM type: YTN; PAM sequence: TTG
gacaggctggtcatgaactc

SEQ ID NO: 67890 - DNA, 20 bp, Artificial Sequence
  Description of Artificial Sequence: Synthetic oligonucleotide
  Target: SCNA; (+) strand; PAM type: YTN; PAM sequence: CTG
gtcatgaactcctgacctca

SEQ ID NO: 67891 - DNA, 20 bp, Artificial Sequence
  Description of Artificial Sequence: Synthetic oligonucleotide
  Target: SCNA; (+) strand; PAM type: YTN; PAM sequence: CTC
ctgacctcagtcgatccacc

SEQ ID NO: 67892 - DNA, 20 bp, Artificial Sequence
  Description of Artificial Sequence: Synthetic oligonucleotide
  Target: SCNA; (+) strand; PAM type: YTN; PAM sequence: CTG
acctcagtcgatccacccgc

SEQ ID NO: 67893 - DNA, 20 bp, Artificial Sequence
  Description of Artificial Sequence: Synthetic oligonucleotide
  Target: SCNA; (+) strand; PAM type: YTN; PAM sequence: CTC
agtcgatccacccgccttgg

SEQ ID NO: 67894 - DNA, 20 bp, Artificial Sequence
  Description of Artificial Sequence: Synthetic oligonucleotide
  Target: SCNA; (+) strand; PAM type: YTN; PAM sequence: CTT
ggcctcccaaagtgctggat

SEQ ID NO: 67895 - DNA, 20 bp, Artificial Sequence
  Description of Artificial Sequence: Synthetic oligonucleotide
  Target: SCNA; (+) strand; PAM type: YTN; PAM sequence: TTG
gcctcccaaagtgctggatt

SEQ ID NO: 67896 - DNA, 20 bp, Artificial Sequence
  Description of Artificial Sequence: Synthetic oligonucleotide
  Target: SCNA; (+) strand; PAM type: YTN; PAM sequence: CTC
ccaaagtgctggattacagg

SEQ ID NO: 67897 - DNA, 20 bp, Artificial Sequence
  Description of Artificial Sequence: Synthetic oligonucleotide
  Target: SCNA; (+) strand; PAM type: YTN; PAM sequence: CTG
gattacaggtgtccaccgcg

SEQ ID NO: 67898 - DNA, 20 bp, Artificial Sequence
  Description of Artificial Sequence: Synthetic oligonucleotide
  Target: SCNA; (+) strand; PAM type: YTN; PAM sequence: TTA
caggtgtccaccgcgcctgg

SEQ ID NO: 67899 - DNA, 20 bp, Artificial Sequence
  Description of Artificial Sequence: Synthetic oligonucleotide
  Target: SCNA; (+) strand; PAM type: YTN; PAM sequence: CTG
gccaatattcaagtttacac

SEQ ID NO: 67900 - DNA, 20 bp, Artificial Sequence
  Description of Artificial Sequence: Synthetic oligonucleotide
  Target: SCNA; (+) strand; PAM type: YTN; PAM sequence: TTC
aagtttacacaggaaaaaga

SEQ ID NO: 67901 - DNA, 20 bp, Artificial Sequence
  Description of Artificial Sequence: Synthetic oligonucleotide
  Target: SCNA; (+) strand; PAM type: YTN; PAM sequence: TTT
acacaggaaaaagaatactt

SEQ ID NO: 67902 - DNA, 20 bp, Artificial Sequence
  Description of Artificial Sequence: Synthetic oligonucleotide
  Target: SCNA; (+) strand; PAM type: YTN; PAM sequence: TTA
cacaggaaaaagaatacttt

SEQ ID NO: 67903 - DNA, 20 bp, Artificial Sequence
  Description of Artificial Sequence: Synthetic oligonucleotide
  Target: SCNA; (+) strand; PAM type: YTN; PAM sequence: CTT
tctctgcataacctttactt

SEQ ID NO: 67904 - DNA, 20 bp, Artificial Sequence
  Description of Artificial Sequence: Synthetic oligonucleotide
  Target: SCNA; (+) strand; PAM type: YTN; PAM sequence: TTT
ctctgcataacctttactta

SEQ ID NO: 67905 - DNA, 20 bp, Artificial Sequence
  Description of Artificial Sequence: Synthetic oligonucleotide
  Target: SCNA; (+) strand; PAM type: YTN; PAM sequence: TTC
tctgcataacctttacttat

SEQ ID NO: 67906 - DNA, 20 bp, Artificial Sequence
  Description of Artificial Sequence: Synthetic oligonucleotide
  Target: SCNA; (+) strand; PAM type: YTN; PAM sequence: CTC
tgcataacctttacttattt

SEQ ID NO: 67907 - DNA, 20 bp, Artificial Sequence
  Description of Artificial Sequence: Synthetic oligonucleotide
  Target: SCNA; (+) strand; PAM type: YTN; PAM sequence: CTG
cataacctttacttatttac

SEQ ID NO: 67908 - DNA, 20 bp, Artificial Sequence
  Description of Artificial Sequence: Synthetic oligonucleotide
  Target: SCNA; (+) strand; PAM type: YTN; PAM sequence: CTT
tacttatttactcataagcc

SEQ ID NO: 67909 - DNA, 20 bp, Artificial Sequence
  Description of Artificial Sequence: Synthetic oligonucleotide
  Target: SCNA; (+) strand; PAM type: YTN; PAM sequence: TTT
acttatttactcataagcct

SEQ ID NO: 67910 - DNA, 20 bp, Artificial Sequence
  Description of Artificial Sequence: Synthetic oligonucleotide
  Target: SCNA; (+) strand; PAM type: YTN; PAM sequence: TTA
cttatttactcataagcctc

SEQ ID NO: 67911 - DNA, 20 bp, Artificial Sequence
  Description of Artificial Sequence: Synthetic oligonucleotide
  Target: SCNA; (+) strand; PAM type: YTN; PAM sequence: CTT
atttactcataagcctctag

SEQ ID NO: 67912 - DNA, 20 bp, Artificial Sequence
  Description of Artificial Sequence: Synthetic oligonucleotide
  Target: SCNA; (+) strand; PAM type: YTN; PAM sequence: TTA
tttactcataagcctctagt

SEQ ID NO: 67913 - DNA, 20 bp, Artificial Sequence
  Description of Artificial Sequence: Synthetic oligonucleotide
  Target: SCNA; (+) strand; PAM type: YTN; PAM sequence: TTT
actcataagcctctagttct

SEQ ID NO: 67914 - DNA, 20 bp, Artificial Sequence
  Description of Artificial Sequence: Synthetic oligonucleotide
  Target: SCNA; (+) strand; PAM type: YTN; PAM sequence: TTA
ctcataagcctctagttctc

SEQ ID NO: 67915 - DNA, 20 bp, Artificial Sequence
  Description of Artificial Sequence: Synthetic oligonucleotide
  Target: SCNA; (+) strand; PAM type: YTN; PAM sequence: CTC
ataagcctctagttctctct

SEQ ID NO: 67916 - DNA, 20 bp, Artificial Sequence
  Description of Artificial Sequence: Synthetic oligonucleotide
  Target: SCNA; (+) strand; PAM type: YTN; PAM sequence: CTC
tagttctctctggatttgac

SEQ ID NO: 67917 - DNA, 20 bp, Artificial Sequence
  Description of Artificial Sequence: Synthetic oligonucleotide
  Target: SCNA; (+) strand; PAM type: YTN; PAM sequence: CTA
gttctctctggatttgactg

SEQ ID NO: 67918 - DNA, 20 bp, Artificial Sequence
  Description of Artificial Sequence: Synthetic oligonucleotide
  Target: SCNA; (+) strand; PAM type: YTN; PAM sequence: TTC
tctctggatttgactgtaaa

SEQ ID NO: 67919 - DNA, 20 bp, Artificial Sequence
  Description of Artificial Sequence: Synthetic oligonucleotide
  Target: SCNA; (+) strand; PAM type: YTN; PAM sequence: CTC
tctggatttgactgtaaatc

SEQ ID NO: 67920 - DNA, 20 bp, Artificial Sequence
  Description of Artificial Sequence: Synthetic oligonucleotide
  Target: SCNA; (+) strand; PAM type: YTN; PAM sequence: CTC
tggatttgactgtaaatctc

SEQ ID NO: 67921 - DNA, 20 bp, Artificial Sequence
  Description of Artificial Sequence: Synthetic oligonucleotide
  Target: SCNA; (+) strand; PAM type: YTN; PAM sequence: CTG
gatttgactgtaaatctcaa

SEQ ID NO: 67922 - DNA, 20 bp, Artificial Sequence
  Description of Artificial Sequence: Synthetic oligonucleotide
  Target: SCNA; (+) strand; PAM type: YTN; PAM sequence: TTT
gactgtaaatctcaacacat

SEQ ID NO: 67923 - DNA, 20 bp, Artificial Sequence
  Description of Artificial Sequence: Synthetic oligonucleotide
  Target: SCNA; (+) strand; PAM type: YTN; PAM sequence: TTG
actgtaaatctcaacacatt

SEQ ID NO: 67924 - DNA, 20 bp, Artificial Sequence
  Description of Artificial Sequence: Synthetic oligonucleotide
  Target: SCNA; (+) strand; PAM type: YTN; PAM sequence: CTG
taaatctcaacacatttccc

SEQ ID NO: 67925 - DNA, 20 bp, Artificial Sequence
  Description of Artificial Sequence: Synthetic oligonucleotide
  Target: SCNA; (+) strand; PAM type: YTN; PAM sequence: CTC
aacacatttcccagaaacta

SEQ ID NO: 67926 - DNA, 20 bp, Artificial Sequence
  Description of Artificial Sequence: Synthetic oligonucleotide
  Target: SCNA; (+) strand; PAM type: YTN; PAM sequence: TTT
cccagaaactaacatcttct

SEQ ID NO: 67927 - DNA, 20 bp, Artificial Sequence
  Description of Artificial Sequence: Synthetic oligonucleotide
  Target: SCNA; (+) strand; PAM type: YTN; PAM sequence: TTC
ccagaaactaacatcttctg

SEQ ID NO: 67928 - DNA, 20 bp, Artificial Sequence
  Description of Artificial Sequence: Synthetic oligonucleotide
  Target: SCNA; (+) strand; PAM type: YTN; PAM sequence: CTA
acatcttctggctgacttct

SEQ ID NO: 67929 - DNA, 20 bp, Artificial Sequence
  Description of Artificial Sequence: Synthetic oligonucleotide
  Target: SCNA; (+) strand; PAM type: YTN; PAM sequence: CTT
ctggctgacttctattaaaa

SEQ ID NO: 67930 - DNA, 20 bp, Artificial Sequence
  Description of Artificial Sequence: Synthetic oligonucleotide
  Target: SCNA; (+) strand; PAM type: YTN; PAM sequence: TTC
tggctgacttctattaaaaa

SEQ ID NO: 67931 - DNA, 20 bp, Artificial Sequence
  Description of Artificial Sequence: Synthetic oligonucleotide
  Target: SCNA; (+) strand; PAM type: YTN; PAM sequence: CTG
gctgacttctattaaaaatt

SEQ ID NO: 67932 - DNA, 20 bp, Artificial Sequence
  Description of Artificial Sequence: Synthetic oligonucleotide
  Target: SCNA; (+) strand; PAM type: YTN; PAM sequence: CTG
acttctattaaaaattcaga

SEQ ID NO: 67933 - DNA, 20 bp, Artificial Sequence
  Description of Artificial Sequence: Synthetic oligonucleotide
  Target: SCNA; (+) strand; PAM type: YTN; PAM sequence: CTT
ctattaaaaattcagacaaa

SEQ ID NO: 67934 - DNA, 20 bp, Artificial Sequence
  Description of Artificial Sequence: Synthetic oligonucleotide
  Target: SCNA; (+) strand; PAM type: YTN; PAM sequence: TTC
tattaaaaattcagacaaag

SEQ ID NO: 67935 - DNA, 20 bp, Artificial Sequence
  Description of Artificial Sequence: Synthetic oligonucleotide
  Target: SCNA; (+) strand; PAM type: YTN; PAM sequence: CTA
ttaaaaattcagacaaagaa

SEQ ID NO: 67936 - DNA, 20 bp, Artificial Sequence
  Description of Artificial Sequence: Synthetic oligonucleotide
  Target: SCNA; (+) strand; PAM type: YTN; PAM sequence: TTA
aaaattcagacaaagaaaaa

SEQ ID NO: 67937 - DNA, 20 bp, Artificial Sequence
  Description of Artificial Sequence: Synthetic oligonucleotide
  Target: SCNA; (+) strand; PAM type: YTN; PAM sequence: TTC
agacaaagaaaaaaactgaa

SEQ ID NO: 67938 - DNA, 20 bp, Artificial Sequence
  Description of Artificial Sequence: Synthetic oligonucleotide
  Target: SCNA; (+) strand; PAM type: YTN; PAM sequence: CTG
aatacaatggagagagatta

SEQ ID NO: 67939 - DNA, 20 bp, Artificial Sequence
  Description of Artificial Sequence: Synthetic oligonucleotide
  Target: SCNA; (+) strand; PAM type: YTN; PAM sequence: TTA
taatactgctattctcccat

SEQ ID NO: 67940 - DNA, 20 bp, Artificial Sequence
  Description of Artificial Sequence: Synthetic oligonucleotide
  Target: SCNA; (+) strand; PAM type: YTN; PAM sequence: CTG
ctattctcccattctctctc

SEQ ID NO: 67941 - DNA, 20 bp, Artificial Sequence
  Description of Artificial Sequence: Synthetic oligonucleotide
  Target: SCNA; (+) strand; PAM type: YTN; PAM sequence: CTA
ttctcccattctctctctct

SEQ ID NO: 67942 - DNA, 20 bp, Artificial Sequence
  Description of Artificial Sequence: Synthetic oligonucleotide
  Target: SCNA; (+) strand; PAM type: YTN; PAM sequence: TTC
tcccattctctctctctaca

SEQ ID NO: 67943 - DNA, 20 bp, Artificial Sequence
  Description of Artificial Sequence: Synthetic oligonucleotide
  Target: SCNA; (+) strand; PAM type: YTN; PAM sequence: CTC
ccattctctctctctacagc

SEQ ID NO: 67944 - DNA, 20 bp, Artificial Sequence
  Description of Artificial Sequence: Synthetic oligonucleotide
  Target: SCNA; (+) strand; PAM type: YTN; PAM sequence: TTC
tctctctctacagcatatca

SEQ ID NO: 67945 - DNA, 20 bp, Artificial Sequence
  Description of Artificial Sequence: Synthetic oligonucleotide
  Target: SCNA; (+) strand; PAM type: YTN; PAM sequence: CTC
tctctctacagcatatcacc

SEQ ID NO: 67946 - DNA, 20 bp, Artificial Sequence
  Description of Artificial Sequence: Synthetic oligonucleotide
  Target: SCNA; (+) strand; PAM type: YTN; PAM sequence: CTC
tctctacagcatatcacctc

SEQ ID NO: 67947 - DNA, 20 bp, Artificial Sequence
  Description of Artificial Sequence: Synthetic oligonucleotide
  Target: SCNA; (+) strand; PAM type: YTN; PAM sequence: CTC
tctacagcatatcacctcct

SEQ ID NO: 67948 - DNA, 20 bp, Artificial Sequence
  Description of Artificial Sequence: Synthetic oligonucleotide
  Target: SCNA; (+) strand; PAM type: YTN; PAM sequence: CTC
tacagcatatcacctcctcc

SEQ ID NO: 67949 - DNA, 20 bp, Artificial Sequence
  Description of Artificial Sequence: Synthetic oligonucleotide
  Target: SCNA; (+) strand; PAM type: YTN; PAM sequence: CTA
cagcatatcacctcctccaa

SEQ ID NO: 67950 - DNA, 20 bp, Artificial Sequence
  Description of Artificial Sequence: Synthetic oligonucleotide
  Target: SCNA; (+) strand; PAM type: YTN; PAM sequence: CTC
ctccaaaatcagttcatatc

SEQ ID NO: 67951 - DNA, 20 bp, Artificial Sequence
  Description of Artificial Sequence: Synthetic oligonucleotide
  Target: SCNA; (+) strand; PAM type: YTN; PAM sequence: CTC
caaaatcagttcatatctaa

SEQ ID NO: 67952 - DNA, 20 bp, Artificial Sequence
  Description of Artificial Sequence: Synthetic oligonucleotide
  Target: SCNA; (+) strand; PAM type: YTN; PAM sequence: TTC
atatctaactcctagcacat

SEQ ID NO: 67953 - DNA, 20 bp, Artificial Sequence
  Description of Artificial Sequence: Synthetic oligonucleotide
  Target: SCNA; (+) strand; PAM type: YTN; PAM sequence: CTA
actcctagcacatttttagt

SEQ ID NO: 67954 - DNA, 20 bp, Artificial Sequence
  Description of Artificial Sequence: Synthetic oligonucleotide
  Target: SCNA; (+) strand; PAM type: YTN; PAM sequence: CTC
ctagcacatttttagttaaa

SEQ ID NO: 67955 - DNA, 20 bp, Artificial Sequence
  Description of Artificial Sequence: Synthetic oligonucleotide
  Target: SCNA; (+) strand; PAM type: YTN; PAM sequence: CTA
gcacatttttagttaaaaat

SEQ ID NO: 67956 - DNA, 20 bp, Artificial Sequence
  Description of Artificial Sequence: Synthetic oligonucleotide
  Target: SCNA; (+) strand; PAM type: YTN; PAM sequence: TTT
ttagttaaaaatatacatgc

SEQ ID NO: 67957 - DNA, 20 bp, Artificial Sequence
  Description of Artificial Sequence: Synthetic oligonucleotide
  Target: SCNA; (+) strand; PAM type: YTN; PAM sequence: TTT
tagttaaaaatatacatgca

SEQ ID NO: 67958 - DNA, 20 bp, Artificial Sequence
  Description of Artificial Sequence: Synthetic oligonucleotide
  Target: SCNA; (+) strand; PAM type: YTN; PAM sequence: TTT
agttaaaaatatacatgcac

SEQ ID NO: 67959 - DNA, 20 bp, Artificial Sequence
  Description of Artificial Sequence: Synthetic oligonucleotide
  Target: SCNA; (+) strand; PAM type: YTN; PAM sequence: TTA
gttaaaaatatacatgcaca

SEQ ID NO: 67960 - DNA, 20 bp, Artificial Sequence
  Description of Artificial Sequence: Synthetic oligonucleotide
  Target: SCNA; (+) strand; PAM type: YTN; PAM sequence: TTA
aaaatatacatgcacaaaat

SEQ ID NO: 67961 - DNA, 20 bp, Artificial Sequence
  Description of Artificial Sequence: Synthetic oligonucleotide
  Target: SCNA; (+) strand; PAM type: YTN; PAM sequence: CTG
atatcacacatatgtgtgtg

SEQ ID NO: 67962 - DNA, 20 bp, Artificial Sequence
  Description of Artificial Sequence: Synthetic oligonucleotide
  Target: SCNA; (+) strand; PAM type: YTN; PAM sequence: CTT
tcttgcaggtgatagaatgc

SEQ ID NO: 67963 - DNA, 20 bp, Artificial Sequence
  Description of Artificial Sequence: Synthetic oligonucleotide
  Target: SCNA; (+) strand; PAM type: YTN; PAM sequence: TTT
cttgcaggtgatagaatgct

SEQ ID NO: 67964 - DNA, 20 bp, Artificial Sequence
  Description of Artificial Sequence: Synthetic oligonucleotide
  Target: SCNA; (+) strand; PAM type: YTN; PAM sequence: TTC
ttgcaggtgatagaatgctt

SEQ ID NO: 67965 - DNA, 20 bp, Artificial Sequence
  Description of Artificial Sequence: Synthetic oligonucleotide
  Target: SCNA; (+) strand; PAM type: YTN; PAM sequence: CTT
gcaggtgatagaatgctttt

SEQ ID NO: 67966 - DNA, 20 bp, Artificial Sequence
  Description of Artificial Sequence: Synthetic oligonucleotide
  Target: SCNA; (+) strand; PAM type: YTN; PAM sequence: TTG
caggtgatagaatgcttttt

SEQ ID NO: 67967 - DNA, 20 bp, Artificial Sequence
  Description of Artificial Sequence: Synthetic oligonucleotide
  Target: SCNA; (+) strand; PAM type: YTN; PAM sequence: CTT
ttttggaggtggttttgtgg

SEQ ID NO: 67968 - DNA, 20 bp, Artificial Sequence
  Description of Artificial Sequence: Synthetic oligonucleotide
  Target: SCNA; (+) strand; PAM type: YTN; PAM sequence: TTT
tttggaggtggttttgtggg

SEQ ID NO: 67969 - DNA, 20 bp, Artificial Sequence
  Description of Artificial Sequence: Synthetic oligonucleotide
  Target: SCNA; (+) strand; PAM type: YTN; PAM sequence: TTT
ttggaggtggttttgtgggc

SEQ ID NO: 67970 - DNA, 20 bp, Artificial Sequence
  Description of Artificial Sequence: Synthetic oligonucleotide
  Target: SCNA; (+) strand; PAM type: YTN; PAM sequence: TTT
tggaggtggttttgtgggcc

SEQ ID NO: 67971 - DNA, 20 bp, Artificial Sequence
  Description of Artificial Sequence: Synthetic oligonucleotide
  Target: SCNA; (+) strand; PAM type: YTN; PAM sequence: TTT
ggaggtggttttgtgggcct

SEQ ID NO: 67972 - DNA, 20 bp, Artificial Sequence
  Description of Artificial Sequence: Synthetic oligonucleotide
  Target: SCNA; (+) strand; PAM type: YTN; PAM sequence: TTG
gaggtggttttgtgggccta

SEQ ID NO: 67973 - DNA, 20 bp, Artificial Sequence
  Description of Artificial Sequence: Synthetic oligonucleotide
  Target: SCNA; (+) strand; PAM type: YTN; PAM sequence: TTT
tgtgggcctatgtaatgtct

SEQ ID NO: 67974 - DNA, 20 bp, Artificial Sequence
  Description of Artificial Sequence: Synthetic oligonucleotide
  Target: SCNA; (+) strand; PAM type: YTN; PAM sequence: TTT
gtgggcctatgtaatgtctc

SEQ ID NO: 67975 - DNA, 20 bp, Artificial Sequence
  Description of Artificial Sequence: Synthetic oligonucleotide
  Target: SCNA; (+) strand; PAM type: YTN; PAM sequence: TTG
tgggcctatgtaatgtctct

SEQ ID NO: 67976 - DNA, 20 bp, Artificial Sequence
  Description of Artificial Sequence: Synthetic oligonucleotide
  Target: SCNA; (+) strand; PAM type: YTN; PAM sequence: CTA
tgtaatgtctctattgttat

SEQ ID NO: 67977 - DNA, 20 bp, Artificial Sequence
  Description of Artificial Sequence: Synthetic oligonucleotide
  Target: SCNA; (+) strand; PAM type: YTN; PAM sequence: CTC
tattgttatattttaaaagt

SEQ ID NO: 67978 - DNA, 20 bp, Artificial Sequence
  Description of Artificial Sequence: Synthetic oligonucleotide
  Target: SCNA; (+) strand; PAM type: YTN; PAM sequence: CTA
ttgttatattttaaaagttt

SEQ ID NO: 67979 - DNA, 20 bp, Artificial Sequence
  Description of Artificial Sequence: Synthetic oligonucleotide
  Target: SCNA; (+) strand; PAM type: YTN; PAM sequence: TTG
ttatattttaaaagtttctt

SEQ ID NO: 67980 - DNA, 20 bp, Artificial Sequence
  Description of Artificial Sequence: Synthetic oligonucleotide
  Target: SCNA; (+) strand; PAM type: YTN; PAM sequence: TTA
tattttaaaagtttcttttt

SEQ ID NO: 67981 - DNA, 20 bp, Artificial Sequence
  Description of Artificial Sequence: Synthetic oligonucleotide
  Target: SCNA; (+) strand; PAM type: YTN; PAM sequence: TTT
taaaagtttcttttttgttt

SEQ ID NO: 67982 - DNA, 20 bp, Artificial Sequence
  Description of Artificial Sequence: Synthetic oligonucleotide
  Target: SCNA; (+) strand; PAM type: YTN; PAM sequence: TTT
aaaagtttcttttttgtttg

SEQ ID NO: 67983 - DNA, 20 bp, Artificial Sequence
  Description of Artificial Sequence: Synthetic oligonucleotide
  Target: SCNA; (+) strand; PAM type: YTN; PAM sequence: TTA
aaagtttcttttttgtttgt

SEQ ID NO: 67984 - DNA, 20 bp, Artificial Sequence
  Description of Artificial Sequence: Synthetic oligonucleotide
  Target: SCNA; (+) strand; PAM type: YTN; PAM sequence: TTT
cttttttgtttgtttgtttg

SEQ ID NO: 67985 - DNA, 20 bp, Artificial Sequence
  Description of Artificial Sequence: Synthetic oligonucleotide
  Target: SCNA; (+) strand; PAM type: YTN; PAM sequence: TTC
ttttttgtttgtttgtttgt

SEQ ID NO: 67986 - DNA, 20 bp, Artificial Sequence
  Description of Artificial Sequence: Synthetic oligonucleotide
  Target: SCNA; (+) strand; PAM type: YTN; PAM sequence: CTT
ttttgtttgtttgtttgttt

SEQ ID NO: 67987 - DNA, 20 bp, Artificial Sequence
  Description of Artificial Sequence: Synthetic oligonucleotide
  Target: SCNA; (+) strand; PAM type: YTN; PAM sequence: TTT
tttgtttgtttgtttgtttg

SEQ ID NO: 67988 - DNA, 20 bp, Artificial Sequence
  Description of Artificial Sequence: Synthetic oligonucleotide
  Target: SCNA; (+) strand; PAM type: YTN; PAM sequence: TTT
ttgtttgtttgtttgtttga

SEQ ID NO: 67989 - DNA, 20 bp, Artificial Sequence
  Description of Artificial Sequence: Synthetic oligonucleotide
  Target: SCNA; (+) strand; PAM type: YTN; PAM sequence: TTT
tgtttgtttgtttgtttgag

SEQ ID NO: 67990 - DNA, 20 bp, Artificial Sequence
  Description of Artificial Sequence: Synthetic oligonucleotide
  Target: SCNA; (+) strand; PAM type: YTN; PAM sequence: TTT
gtttgtttgtttgtttgaga

SEQ ID NO: 67991 - DNA, 20 bp, Artificial Sequence
  Description of Artificial Sequence: Synthetic oligonucleotide
  Target: SCNA; (+) strand; PAM type: YTN; PAM sequence: TTG
tttgtttgtttgtttgagat

SEQ ID NO: 67992 - DNA, 20 bp, Artificial Sequence
  Description of Artificial Sequence: Synthetic oligonucleotide
  Target: SCNA; (+) strand; PAM type: YTN; PAM sequence: TTT
gtttgtttgtttgagatgga

SEQ ID NO: 67993 - DNA, 20 bp, Artificial Sequence
  Description of Artificial Sequence: Synthetic oligonucleotide
  Target: SCNA; (+) strand; PAM type: YTN; PAM sequence: TTG
tttgtttgtttgagatggag

SEQ ID NO: 67994 - DNA, 20 bp, Artificial Sequence
  Description of Artificial Sequence: Synthetic oligonucleotide
  Target: SCNA; (+) strand; PAM type: YTN; PAM sequence: TTT
gtttgtttgagatggagtct

SEQ ID NO: 67995 - DNA, 20 bp, Artificial Sequence
  Description of Artificial Sequence: Synthetic oligonucleotide
  Target: SCNA; (+) strand; PAM type: YTN; PAM sequence: TTG
tttgtttgagatggagtctc

SEQ ID NO: 67996 - DNA, 20 bp, Artificial Sequence
  Description of Artificial Sequence: Synthetic oligonucleotide
  Target: SCNA; (+) strand; PAM type: YTN; PAM sequence: TTT
gtttgagatggagtctccct

SEQ ID NO: 67997 - DNA, 20 bp, Artificial Sequence
  Description of Artificial Sequence: Synthetic oligonucleotide
  Target: SCNA; (+) strand; PAM type: YTN; PAM sequence: TTG
tttgagatggagtctccctc

SEQ ID NO: 67998 - DNA, 20 bp, Artificial Sequence
  Description of Artificial Sequence: Synthetic oligonucleotide
  Target: SCNA; (+) strand; PAM type: YTN; PAM sequence: TTT
gagatggagtctccctctgt

SEQ ID NO: 67999 - DNA, 20 bp, Artificial Sequence
  Description of Artificial Sequence: Synthetic oligonucleotide
  Target: SCNA; (+) strand; PAM type: YTN; PAM sequence: TTG
agatggagtctccctctgta

SEQ ID NO: 68000 - DNA, 20 bp, Artificial Sequence
  Description of Artificial Sequence: Synthetic oligonucleotide
  Target: SCNA; (+) strand; PAM type: YTN; PAM sequence: CTC
cctctgtagcccaggctgga

SEQ ID NO: 68001 - DNA, 20 bp, Artificial Sequence
  Description of Artificial Sequence: Synthetic oligonucleotide
  Target: SCNA; (+) strand; PAM type: YTN; PAM sequence: CTC
tgtagcccaggctggagtgc

SEQ ID NO: 68002 - DNA, 20 bp, Artificial Sequence
  Description of Artificial Sequence: Synthetic oligonucleotide
  Target: SCNA; (+) strand; PAM type: YTN; PAM sequence: CTG
tagcccaggctggagtgcag

SEQ ID NO: 68003 - DNA, 20 bp, Artificial Sequence
  Description of Artificial Sequence: Synthetic oligonucleotide
  Target: SCNA; (+) strand; PAM type: YTN; PAM sequence: CTG
gagtgcagtggcaggatctc

SEQ ID NO: 68004 - DNA, 20 bp, Artificial Sequence
  Description of Artificial Sequence: Synthetic oligonucleotide
  Target: SCNA; (+) strand; PAM type: YTN; PAM sequence: CTC
ggctcactgcaacctctgcc

SEQ ID NO: 68005 - DNA, 20 bp, Artificial Sequence
  Description of Artificial Sequence: Synthetic oligonucleotide
  Target: SCNA; (+) strand; PAM type: YTN; PAM sequence: CTC
actgcaacctctgcctcccg

SEQ ID NO: 68006 - DNA, 20 bp, Artificial Sequence
  Description of Artificial Sequence: Synthetic oligonucleotide
  Target: SCNA; (+) strand; PAM type: YTN; PAM sequence: CTG
caacctctgcctcccgggtt

SEQ ID NO: 68007 - DNA, 20 bp, Artificial Sequence
  Description of Artificial Sequence: Synthetic oligonucleotide
  Target: SCNA; (+) strand; PAM type: YTN; PAM sequence: CTC
tgcctcccgggttcaagtga

SEQ ID NO: 68008 - DNA, 20 bp, Artificial Sequence
  Description of Artificial Sequence: Synthetic oligonucleotide
  Target: SCNA; (+) strand; PAM type: YTN; PAM sequence: CTG
cctcccgggttcaagtgact

SEQ ID NO: 68009 - DNA, 20 bp, Artificial Sequence
  Description of Artificial Sequence: Synthetic oligonucleotide
  Target: SCNA; (+) strand; PAM type: YTN; PAM sequence: CTC
ccgggttcaagtgactctcg

SEQ ID NO: 68010 - DNA, 20 bp, Artificial Sequence
  Description of Artificial Sequence: Synthetic oligonucleotide
  Target: SCNA; (+) strand; PAM type: YTN; PAM sequence: TTC
aagtgactctcgtgcctcag

SEQ ID NO: 68011 - DNA, 20 bp, Artificial Sequence
  Description of Artificial Sequence: Synthetic oligonucleotide
  Target: SCNA; (+) strand; PAM type: YTN; PAM sequence: CTC
tcgtgcctcagcctccagag

SEQ ID NO: 68012 - DNA, 20 bp, Artificial Sequence
  Description of Artificial Sequence: Synthetic oligonucleotide
  Target: SCNA; (+) strand; PAM type: YTN; PAM sequence: CTC
gtgcctcagcctccagagta

SEQ ID NO: 68013 - DNA, 20 bp, Artificial Sequence
  Description of Artificial Sequence: Synthetic oligonucleotide
  Target: SCNA; (+) strand; PAM type: YTN; PAM sequence: CTC
agcctccagagtagccagga

SEQ ID NO: 68014 - DNA, 20 bp, Artificial Sequence
  Description of Artificial Sequence: Synthetic oligonucleotide
  Target: SCNA; (+) strand; PAM type: YTN; PAM sequence: CTC
cagagtagccaggattacag

SEQ ID NO: 68015 - DNA, 20 bp, Artificial Sequence
  Description of Artificial Sequence: Synthetic oligonucleotide
  Target: SCNA; (+) strand; PAM type: YTN; PAM sequence: TTA
caggcgcatgccaccacatc

SEQ ID NO: 68016 - DNA, 20 bp, Artificial Sequence
  Description of Artificial Sequence: Synthetic oligonucleotide
  Target: SCNA; (+) strand; PAM type: YTN; PAM sequence: CTT
ttttttttttttgtattttt

SEQ ID NO: 68017 - DNA, 20 bp, Artificial Sequence
  Description of Artificial Sequence: Synthetic oligonucleotide
  Target: SCNA; (+) strand; PAM type: YTN; PAM sequence: TTT
tttttttttttgtattttta

SEQ ID NO: 68018 - DNA, 20 bp, Artificial Sequence
  Description of Artificial Sequence: Synthetic oligonucleotide
  Target: SCNA; (+) strand; PAM type: YTN; PAM sequence: TTT
ttttttttttgtatttttag

SEQ ID NO: 68019 - DNA, 20 bp, Artificial Sequence
  Description of Artificial Sequence: Synthetic oligonucleotide
  Target: SCNA; (+) strand; PAM type: YTN; PAM sequence: TTT
tttttttttgtatttttagt

SEQ ID NO: 68020 - DNA, 20 bp, Artificial Sequence
  Description of Artificial Sequence: Synthetic oligonucleotide
  Target: SCNA; (+) strand; PAM type: YTN; PAM sequence: TTT
ttttttttgtatttttagta

SEQ ID NO: 68021 - DNA, 20 bp, Artificial Sequence
  Description of Artificial Sequence: Synthetic oligonucleotide
  Target: SCNA; (+) strand; PAM type: YTN; PAM sequence: TTT
tttttttgtatttttagtag

SEQ ID NO: 68022 - DNA, 20 bp, Artificial Sequence
  Description of Artificial Sequence: Synthetic oligonucleotide
  Target: SCNA; (+) strand; PAM type: YTN; PAM sequence: TTT
ttttttgtatttttagtaga

SEQ ID NO: 68023 - DNA, 20 bp, Artificial Sequence
  Description of Artificial Sequence: Synthetic oligonucleotide
  Target: SCNA; (+) strand; PAM type: YTN; PAM sequence: TTT
tttttgtatttttagtagag

SEQ ID NO: 68024 - DNA, 20 bp, Artificial Sequence
  Description of Artificial Sequence: Synthetic oligonucleotide
  Target: SCNA; (+) strand; PAM type: YTN; PAM sequence: TTT
ttttgtatttttagtagaga

SEQ ID NO: 68025 - DNA, 20 bp, Artificial Sequence
  Description of Artificial Sequence: Synthetic oligonucleotide
  Target: SCNA; (+) strand; PAM type: YTN; PAM sequence: TTT
tttgtatttttagtagagac

SEQ ID NO: 68026 - DNA, 20 bp, Artificial Sequence
  Description of Artificial Sequence: Synthetic oligonucleotide
  Target: SCNA; (+) strand; PAM type: YTN; PAM sequence: TTT
ttgtatttttagtagagaca

SEQ ID NO: 68027 - DNA, 20 bp, Artificial Sequence
  Description of Artificial Sequence: Synthetic oligonucleotide
  Target: SCNA; (+) strand; PAM type: YTN; PAM sequence: TTT
tgtatttttagtagagacaa

SEQ ID NO: 68028 - DNA, 20 bp, Artificial Sequence
  Description of Artificial Sequence: Synthetic oligonucleotide
  Target: SCNA; (+) strand; PAM type: YTN; PAM sequence: TTT
gtatttttagtagagacaag

SEQ ID NO: 68029 - DNA, 20 bp, Artificial Sequence
  Description of Artificial Sequence: Synthetic oligonucleotide
  Target: SCNA; (+) strand; PAM type: YTN; PAM sequence: TTG
tatttttagtagagacaagg

SEQ ID NO: 68030 - DNA, 20 bp, Artificial Sequence
  Description of Artificial Sequence: Synthetic oligonucleotide
  Target: SCNA; (+) strand; PAM type: YTN; PAM sequence: TTT
ttagtagagacaaggtttca

SEQ ID NO: 68031 - DNA, 20 bp, Artificial Sequence
  Description of Artificial Sequence: Synthetic oligonucleotide
  Target: SCNA; (+) strand; PAM type: YTN; PAM sequence: TTT
tagtagagacaaggtttcac

SEQ ID NO: 68032 - DNA, 20 bp, Artificial Sequence
  Description of Artificial Sequence: Synthetic oligonucleotide
  Target: SCNA; (+) strand; PAM type: YTN; PAM sequence: TTT
agtagagacaaggtttcacc

SEQ ID NO: 68033 - DNA, 20 bp, Artificial Sequence
  Description of Artificial Sequence: Synthetic oligonucleotide
  Target: SCNA; (+) strand; PAM type: YTN; PAM sequence: TTA
gtagagacaaggtttcacca

SEQ ID NO: 68034 - DNA, 20 bp, Artificial Sequence
  Description of Artificial Sequence: Synthetic oligonucleotide
  Target: SCNA; (+) strand; PAM type: YTN; PAM sequence: TTT
caccatgttggccagggtgg

SEQ ID NO: 68035 - DNA, 20 bp, Artificial Sequence
  Description of Artificial Sequence: Synthetic oligonucleotide
  Target: SCNA; (+) strand; PAM type: YTN; PAM sequence: TTC
accatgttggccagggtggt

SEQ ID NO: 68036 - DNA, 20 bp, Artificial Sequence
  Description of Artificial Sequence: Synthetic oligonucleotide
  Target: SCNA; (+) strand; PAM type: YTN; PAM sequence: TTG
gccagggtggtctcaaacta

SEQ ID NO: 68037 - DNA, 20 bp, Artificial Sequence
  Description of Artificial Sequence: Synthetic oligonucleotide
  Target: SCNA; (+) strand; PAM type: YTN; PAM sequence: CTC
aaactactgatctcaagtaa

SEQ ID NO: 68038 - DNA, 20 bp, Artificial Sequence
  Description of Artificial Sequence: Synthetic oligonucleotide
  Target: SCNA; (+) strand; PAM type: YTN; PAM sequence: CTA
ctgatctcaagtaattggcc

SEQ ID NO: 68039 - DNA, 20 bp, Artificial Sequence
  Description of Artificial Sequence: Synthetic oligonucleotide
  Target: SCNA; (+) strand; PAM type: YTN; PAM sequence: CTG
atctcaagtaattggccagc

SEQ ID NO: 68040 - DNA, 20 bp, Artificial Sequence
  Description of Artificial Sequence: Synthetic oligonucleotide
  Target: SCNA; (+) strand; PAM type: YTN; PAM sequence: CTC
aagtaattggccagccttgg

SEQ ID NO: 68041 - DNA, 20 bp, Artificial Sequence
  Description of Artificial Sequence: Synthetic oligonucleotide
  Target: SCNA; (+) strand; PAM type: YTN; PAM sequence: TTG
gccagccttggcgtcccaaa

SEQ ID NO: 68042 - DNA, 20 bp, Artificial Sequence
  Description of Artificial Sequence: Synthetic oligonucleotide
  Target: SCNA; (+) strand; PAM type: YTN; PAM sequence: CTT
ggcgtcccaaagtgcaagac

SEQ ID NO: 68043 - DNA, 20 bp, Artificial Sequence
  Description of Artificial Sequence: Synthetic oligonucleotide
  Target: SCNA; (+) strand; PAM type: YTN; PAM sequence: TTG
gcgtcccaaagtgcaagact

SEQ ID NO: 68044 - DNA, 20 bp, Artificial Sequence
  Description of Artificial Sequence: Synthetic oligonucleotide
  Target: SCNA; (+) strand; PAM type: YTN; PAM sequence: CTG
caggcttgagccaccacgct

SEQ ID NO: 68045 - DNA, 20 bp, Artificial Sequence
  Description of Artificial Sequence: Synthetic oligonucleotide
  Target: SCNA; (+) strand; PAM type: YTN; PAM sequence: CTT
gagccaccacgctccaccaa

SEQ ID NO: 68046 - DNA, 20 bp, Artificial Sequence
  Description of Artificial Sequence: Synthetic oligonucleotide
  Target: SCNA; (+) strand; PAM type: YTN; PAM sequence: TTG
agccaccacgctccaccaaa

SEQ ID NO: 68047 - DNA, 20 bp, Artificial Sequence
  Description of Artificial Sequence: Synthetic oligonucleotide
  Target: SCNA; (+) strand; PAM type: YTN; PAM sequence: CTC
caccaaaagtttcttagcac

SEQ ID NO: 68048 - DNA, 20 bp, Artificial Sequence
  Description of Artificial Sequence: Synthetic oligonucleotide
  Target: SCNA; (+) strand; PAM type: YTN; PAM sequence: TTT
cttagcactcattctcatga

SEQ ID NO: 68049 - DNA, 20 bp, Artificial Sequence
  Description of Artificial Sequence: Synthetic oligonucleotide
  Target: SCNA; (+) strand; PAM type: YTN; PAM sequence: TTC
ttagcactcattctcatgag

SEQ ID NO: 68050 - DNA, 20 bp, Artificial Sequence
  Description of Artificial Sequence: Synthetic oligonucleotide
  Target: SCNA; (+) strand; PAM type: YTN; PAM sequence: CTT
agcactcattctcatgagaa

SEQ ID NO: 68051 - DNA, 20 bp, Artificial Sequence
  Description of Artificial Sequence: Synthetic oligonucleotide
  Target: SCNA; (+) strand; PAM type: YTN; PAM sequence: TTA
gcactcattctcatgagaaa

SEQ ID NO: 68052 - DNA, 20 bp, Artificial Sequence
  Description of Artificial Sequence: Synthetic oligonucleotide
  Target: SCNA; (+) strand; PAM type: YTN; PAM sequence: CTC
attctcatgagaaaaattgc

SEQ ID NO: 68053 - DNA, 20 bp, Artificial Sequence
  Description of Artificial Sequence: Synthetic oligonucleotide
  Target: SCNA; (+) strand; PAM type: YTN; PAM sequence: TTC
tcatgagaaaaattgctgaa

SEQ ID NO: 68054 - DNA, 20 bp, Artificial Sequence
  Description of Artificial Sequence: Synthetic oligonucleotide
  Target: SCNA; (+) strand; PAM type: YTN; PAM sequence: CTC
atgagaaaaattgctgaaaa

SEQ ID NO: 68055 - DNA, 20 bp, Artificial Sequence
  Description of Artificial Sequence: Synthetic oligonucleotide
  Target: SCNA; (+) strand; PAM type: YTN; PAM sequence: TTG
ctgaaaacttggcaataaag

SEQ ID NO: 68056 - DNA, 20 bp, Artificial Sequence
  Description of Artificial Sequence: Synthetic oligonucleotide
  Target: SCNA; (+) strand; PAM type: YTN; PAM sequence: CTG
aaaacttggcaataaagaaa

SEQ ID NO: 68057 - DNA, 20 bp, Artificial Sequence
  Description of Artificial Sequence: Synthetic oligonucleotide
  Target: SCNA; (+) strand; PAM type: YTN; PAM sequence: CTT
ggcaataaagaaacagaatg

SEQ ID NO: 68058 - DNA, 20 bp, Artificial Sequence
  Description of Artificial Sequence: Synthetic oligonucleotide
  Target: SCNA; (+) strand; PAM type: YTN; PAM sequence: TTG
gcaataaagaaacagaatga

SEQ ID NO: 68059 - DNA, 20 bp, Artificial Sequence
  Description of Artificial Sequence: Synthetic oligonucleotide
  Target: SCNA; (+) strand; PAM type: YTN; PAM sequence: CTA
catgtcctttaaatgttatt

SEQ ID NO: 68060 - DNA, 20 bp, Artificial Sequence
  Description of Artificial Sequence: Synthetic oligonucleotide
  Target: SCNA; (+) strand; PAM type: YTN; PAM sequence: CTT
taaatgttatttttaagggg

SEQ ID NO: 68061 - DNA, 20 bp, Artificial Sequence
  Description of Artificial Sequence: Synthetic oligonucleotide
  Target: SCNA; (+) strand; PAM type: YTN; PAM sequence: TTT
aaatgttatttttaaggggc

SEQ ID NO: 68062 - DNA, 20 bp, Artificial Sequence
  Description of Artificial Sequence: Synthetic oligonucleotide
  Target: SCNA; (+) strand; PAM type: YTN; PAM sequence: TTA
aatgttatttttaaggggct

SEQ ID NO: 68063 - DNA, 20 bp, Artificial Sequence
  Description of Artificial Sequence: Synthetic oligonucleotide
  Target: SCNA; (+) strand; PAM type: YTN; PAM sequence: TTA
tttttaaggggctcaatcaa

SEQ ID NO: 68064 - DNA, 20 bp, Artificial Sequence
  Description of Artificial Sequence: Synthetic oligonucleotide
  Target: SCNA; (+) strand; PAM type: YTN; PAM sequence: TTT
ttaaggggctcaatcaatga

SEQ ID NO: 68065 - DNA, 20 bp, Artificial Sequence
  Description of Artificial Sequence: Synthetic oligonucleotide
  Target: SCNA; (+) strand; PAM type: YTN; PAM sequence: TTT
taaggggctcaatcaatgac

SEQ ID NO: 68066 - DNA, 20 bp, Artificial Sequence
  Description of Artificial Sequence: Synthetic oligonucleotide
  Target: SCNA; (+) strand; PAM type: YTN; PAM sequence: TTT
aaggggctcaatcaatgact

SEQ ID NO: 68067 - DNA, 20 bp, Artificial Sequence
  Description of Artificial Sequence: Synthetic oligonucleotide
  Target: SCNA; (+) strand; PAM type: YTN; PAM sequence: TTA
aggggctcaatcaatgacta

SEQ ID NO: 68068 - DNA, 20 bp, Artificial Sequence
  Description of Artificial Sequence: Synthetic oligonucleotide
  Target: SCNA; (+) strand; PAM type: YTN; PAM sequence: CTC
aatcaatgactatgaagtta

SEQ ID NO: 68069 - DNA, 20 bp, Artificial Sequence
  Description of Artificial Sequence: Synthetic oligonucleotide
  Target: SCNA; (+) strand; PAM type: YTN; PAM sequence: CTA
tgaagttatctaagataaaa

SEQ ID NO: 68070 - DNA, 20 bp, Artificial Sequence
  Description of Artificial Sequence: Synthetic oligonucleotide
  Target: SCNA; (+) strand; PAM type: YTN; PAM sequence: TTA
tctaagataaaacaccagat

SEQ ID NO: 68071 - DNA, 20 bp, Artificial Sequence
  Description of Artificial Sequence: Synthetic oligonucleotide
  Target: SCNA; (+) strand; PAM type: YTN; PAM sequence: CTA
agataaaacaccagattttg

SEQ ID NO: 68072 - DNA, 20 bp, Artificial Sequence
  Description of Artificial Sequence: Synthetic oligonucleotide
  Target: SCNA; (+) strand; PAM type: YTN; PAM sequence: TTT
tgacattgccattaactttt

SEQ ID NO: 68073 - DNA, 20 bp, Artificial Sequence
  Description of Artificial Sequence: Synthetic oligonucleotide
  Target: SCNA; (+) strand; PAM type: YTN; PAM sequence: TTT
gacattgccattaacttttt

SEQ ID NO: 68074 - DNA, 20 bp, Artificial Sequence
  Description of Artificial Sequence: Synthetic oligonucleotide
  Target: SCNA; (+) strand; PAM type: YTN; PAM sequence: TTG
acattgccattaactttttt

SEQ ID NO: 68075 - DNA, 20 bp, Artificial Sequence
  Description of Artificial Sequence: Synthetic oligonucleotide
  Target: SCNA; (+) strand; PAM type: YTN; PAM sequence: TTG
ccattaacttttttattaga

SEQ ID NO: 68076 - DNA, 20 bp, Artificial Sequence
  Description of Artificial Sequence: Synthetic oligonucleotide
  Target: SCNA; (+) strand; PAM type: YTN; PAM sequence: TTA
acttttttattagagccccc

SEQ ID NO: 68077 - DNA, 20 bp, Artificial Sequence
  Description of Artificial Sequence: Synthetic oligonucleotide
  Target: SCNA; (+) strand; PAM type: YTN; PAM sequence: CTT
ttttattagagcccccagat

SEQ ID NO: 68078 - DNA, 20 bp, Artificial Sequence
  Description of Artificial Sequence: Synthetic oligonucleotide
  Target: SCNA; (+) strand; PAM type: YTN; PAM sequence: TTT
tttattagagcccccagatc

SEQ ID NO: 68079 - DNA, 20 bp, Artificial Sequence
  Description of Artificial Sequence: Synthetic oligonucleotide
  Target: SCNA; (+) strand; PAM type: YTN; PAM sequence: TTT
ttattagagcccccagatct

SEQ ID NO: 68080 - DNA, 20 bp, Artificial Sequence
  Description of Artificial Sequence: Synthetic oligonucleotide
  Target: SCNA; (+) strand; PAM type: YTN; PAM sequence: TTT
tattagagcccccagatcta

SEQ ID NO: 68081 - DNA, 20 bp, Artificial Sequence
  Description of Artificial Sequence: Synthetic oligonucleotide
  Target: SCNA; (+) strand; PAM type: YTN; PAM sequence: TTT
attagagcccccagatctac

SEQ ID NO: 68082 - DNA, 20 bp, Artificial Sequence
  Description of Artificial Sequence: Synthetic oligonucleotide
  Target: SCNA; (+) strand; PAM type: YTN; PAM sequence: TTA
ttagagcccccagatctaca

SEQ ID NO: 68083 - DNA, 20 bp, Artificial Sequence
  Description of Artificial Sequence: Synthetic oligonucleotide
  Target: SCNA; (+) strand; PAM type: YTN; PAM sequence: TTA
gagcccccagatctacaggt

SEQ ID NO: 68084 - DNA, 20 bp, Artificial Sequence
  Description of Artificial Sequence: Synthetic oligonucleotide
  Target: SCNA; (+) strand; PAM type: YTN; PAM sequence: CTA
caggttatatgtgcagatgt

SEQ ID NO: 68085 - DNA, 20 bp, Artificial Sequence
  Description of Artificial Sequence: Synthetic oligonucleotide
  Target: SCNA; (+) strand; PAM type: YTN; PAM sequence: TTA
tatgtgcagatgtgcagtgg

SEQ ID NO: 68086 - DNA, 20 bp, Artificial Sequence
  Description of Artificial Sequence: Synthetic oligonucleotide
  Target: SCNA; (+) strand; PAM type: YTN; PAM sequence: CTG
ctttatttcccttttcaaga

SEQ ID NO: 68087 - DNA, 20 bp, Artificial Sequence
  Description of Artificial Sequence: Synthetic oligonucleotide
  Target: SCNA; (+) strand; PAM type: YTN; PAM sequence: CTT
tatttcccttttcaagagct

SEQ ID NO: 68088 - DNA, 20 bp, Artificial Sequence
  Description of Artificial Sequence: Synthetic oligonucleotide
  Target: SCNA; (+) strand; PAM type: YTN; PAM sequence: TTT
atttcccttttcaagagctt

SEQ ID NO: 68089 - DNA, 20 bp, Artificial Sequence
  Description of Artificial Sequence: Synthetic oligonucleotide
  Target: SCNA; (+) strand; PAM type: YTN; PAM sequence: TTA
tttcccttttcaagagcttt

SEQ ID NO: 68090 - DNA, 20 bp, Artificial Sequence
  Description of Artificial Sequence: Synthetic oligonucleotide
  Target: SCNA; (+) strand; PAM type: YTN; PAM sequence: TTT
cccttttcaagagcttttct

SEQ ID NO: 68091 - DNA, 20 bp, Artificial Sequence
  Description of Artificial Sequence: Synthetic oligonucleotide
  Target: SCNA; (+) strand; PAM type: YTN; PAM sequence: TTC
ccttttcaagagcttttctt

SEQ ID NO: 68092 - DNA, 20 bp, Artificial Sequence
  Description of Artificial Sequence: Synthetic oligonucleotide
  Target: SCNA; (+) strand; PAM type: YTN; PAM sequence: CTT
ttcaagagcttttcttatac

SEQ ID NO: 68093 - DNA, 20 bp, Artificial Sequence
  Description of Artificial Sequence: Synthetic oligonucleotide
  Target: SCNA; (+) strand; PAM type: YTN; PAM sequence: TTT
tcaagagcttttcttataca

SEQ ID NO: 68094 - DNA, 20 bp, Artificial Sequence
  Description of Artificial Sequence: Synthetic oligonucleotide
  Target: SCNA; (+) strand; PAM type: YTN; PAM sequence: TTT
caagagcttttcttatacag

SEQ ID NO: 68095 - DNA, 20 bp, Artificial Sequence
  Description of Artificial Sequence: Synthetic oligonucleotide
  Target: SCNA; (+) strand; PAM type: YTN; PAM sequence: TTC
aagagcttttcttatacagc

SEQ ID NO: 68096 - DNA, 20 bp, Artificial Sequence
  Description of Artificial Sequence: Synthetic oligonucleotide
  Target: SCNA; (+) strand; PAM type: YTN; PAM sequence: CTT
ttcttatacagcatctatcc

SEQ ID NO: 68097 - DNA, 20 bp, Artificial Sequence
  Description of Artificial Sequence: Synthetic oligonucleotide
  Target: SCNA; (+) strand; PAM type: YTN; PAM sequence: TTT
tcttatacagcatctatcca

SEQ ID NO: 68098 - DNA, 20 bp, Artificial Sequence
  Description of Artificial Sequence: Synthetic oligonucleotide
  Target: SCNA; (+) strand; PAM type: YTN; PAM sequence: TTT
cttatacagcatctatccac

SEQ ID NO: 68099 - DNA, 20 bp, Artificial Sequence
  Description of Artificial Sequence: Synthetic oligonucleotide
  Target: SCNA; (+) strand; PAM type: YTN; PAM sequence: TTC
ttatacagcatctatccact

SEQ ID NO: 68100 - DNA, 20 bp, Artificial Sequence
  Description of Artificial Sequence: Synthetic oligonucleotide
  Target: SCNA; (+) strand; PAM type: YTN; PAM sequence: CTT
atacagcatctatccactct

SEQ ID NO: 68101 - DNA, 20 bp, Artificial Sequence
  Description of Artificial Sequence: Synthetic oligonucleotide
  Target: SCNA; (+) strand; PAM type: YTN; PAM sequence: TTA
tacagcatctatccactctc

SEQ ID NO: 68102 - DNA, 20 bp, Artificial Sequence
  Description of Artificial Sequence: Synthetic oligonucleotide
  Target: SCNA; (+) strand; PAM type: YTN; PAM sequence: CTA
tccactctcctatagagatg

SEQ ID NO: 68103 - DNA, 20 bp, Artificial Sequence
  Description of Artificial Sequence: Synthetic oligonucleotide
  Target: SCNA; (+) strand; PAM type: YTN; PAM sequence: CTC
tcctatagagatgaagttaa

SEQ ID NO: 68104 - DNA, 20 bp, Artificial Sequence
  Description of Artificial Sequence: Synthetic oligonucleotide
  Target: SCNA; (+) strand; PAM type: YTN; PAM sequence: CTC
ctatagagatgaagttaact

SEQ ID NO: 68105 - DNA, 20 bp, Artificial Sequence
  Description of Artificial Sequence: Synthetic oligonucleotide
  Target: SCNA; (+) strand; PAM type: YTN; PAM sequence: CTA
tagagatgaagttaactccc

SEQ ID NO: 68106 - DNA, 20 bp, Artificial Sequence
  Description of Artificial Sequence: Synthetic oligonucleotide
  Target: SCNA; (+) strand; PAM type: YTN; PAM sequence: TTA
actcccttgacaactatcac

SEQ ID NO: 68107 - DNA, 20 bp, Artificial Sequence
  Description of Artificial Sequence: Synthetic oligonucleotide
  Target: SCNA; (+) strand; PAM type: YTN; PAM sequence: CTC
ccttgacaactatcacttgt

SEQ ID NO: 68108 - DNA, 20 bp, Artificial Sequence
  Description of Artificial Sequence: Synthetic oligonucleotide
  Target: SCNA; (+) strand; PAM type: YTN; PAM sequence: CTT
gacaactatcacttgtcccc

SEQ ID NO: 68109 - DNA, 20 bp, Artificial Sequence
  Description of Artificial Sequence: Synthetic oligonucleotide
  Target: SCNA; (+) strand; PAM type: YTN; PAM sequence: TTG
acaactatcacttgtcccca

SEQ ID NO: 68110 - DNA, 20 bp, Artificial Sequence
  Description of Artificial Sequence: Synthetic oligonucleotide
  Target: SCNA; (+) strand; PAM type: YTN; PAM sequence: CTA
tcacttgtccccaatcccca

SEQ ID NO: 68111 - DNA, 20 bp, Artificial Sequence
  Description of Artificial Sequence: Synthetic oligonucleotide
  Target: SCNA; (+) strand; PAM type: YTN; PAM sequence: CTT
gtccccaatccccacccttc

SEQ ID NO: 68112 - DNA, 20 bp, Artificial Sequence
  Description of Artificial Sequence: Synthetic oligonucleotide
  Target: SCNA; (+) strand; PAM type: YTN; PAM sequence: TTG
tccccaatccccacccttcc

SEQ ID NO: 68113 - DNA, 20 bp, Artificial Sequence
  Description of Artificial Sequence: Synthetic oligonucleotide
  Target: SCNA; (+) strand; PAM type: YTN; PAM sequence: CTT
ccacttgacatacaaaccca

SEQ ID NO: 68114 - DNA, 20 bp, Artificial Sequence
  Description of Artificial Sequence: Synthetic oligonucleotide
  Target: SCNA; (+) strand; PAM type: YTN; PAM sequence: TTC
cacttgacatacaaacccaa

SEQ ID NO: 68115 - DNA, 20 bp, Artificial Sequence
  Description of Artificial Sequence: Synthetic oligonucleotide
  Target: SCNA; (+) strand; PAM type: YTN; PAM sequence: CTT
gacatacaaacccaaagaga

SEQ ID NO: 68116 - DNA, 20 bp, Artificial Sequence
  Description of Artificial Sequence: Synthetic oligonucleotide
  Target: SCNA; (+) strand; PAM type: YTN; PAM sequence: TTG
acatacaaacccaaagagat

SEQ ID NO: 68117 - DNA, 20 bp, Artificial Sequence
  Description of Artificial Sequence: Synthetic oligonucleotide
  Target: SCNA; (+) strand; PAM type: YTN; PAM sequence: TTC
atgctcatttatgctcagta

SEQ ID NO: 68118 - DNA, 20 bp, Artificial Sequence
  Description of Artificial Sequence: Synthetic oligonucleotide
  Target: SCNA; (+) strand; PAM type: YTN; PAM sequence: CTC
atttatgctcagtagaaaac

SEQ ID NO: 68119 - DNA, 20 bp, Artificial Sequence
  Description of Artificial Sequence: Synthetic oligonucleotide
  Target: SCNA; (+) strand; PAM type: YTN; PAM sequence: TTT
atgctcagtagaaaacataa

SEQ ID NO: 68120 - DNA, 20 bp, Artificial Sequence
  Description of Artificial Sequence: Synthetic oligonucleotide
  Target: SCNA; (+) strand; PAM type: YTN; PAM sequence: TTA
tgctcagtagaaaacataat

SEQ ID NO: 68121 - DNA, 20 bp, Artificial Sequence
  Description of Artificial Sequence: Synthetic oligonucleotide
  Target: SCNA; (+) strand; PAM type: YTN; PAM sequence: CTC
agtagaaaacataattccat

SEQ ID NO: 68122 - DNA, 20 bp, Artificial Sequence
  Description of Artificial Sequence: Synthetic oligonucleotide
  Target: SCNA; (+) strand; PAM type: YTN; PAM sequence: TTC
cataggttactgctattatt

SEQ ID NO: 68123 - DNA, 20 bp, Artificial Sequence
  Description of Artificial Sequence: Synthetic oligonucleotide
  Target: SCNA; (+) strand; PAM type: YTN; PAM sequence: TTA
ctgctattattaatcaaata

SEQ ID NO: 68124 - DNA, 20 bp, Artificial Sequence
  Description of Artificial Sequence: Synthetic oligonucleotide
  Target: SCNA; (+) strand; PAM type: YTN; PAM sequence: CTG
ctattattaatcaaatattt

SEQ ID NO: 68125 - DNA, 20 bp, Artificial Sequence
  Description of Artificial Sequence: Synthetic oligonucleotide
  Target: SCNA; (+) strand; PAM type: YTN; PAM sequence: CTA
ttattaatcaaatatttact

SEQ ID NO: 68126 - DNA, 20 bp, Artificial Sequence
  Description of Artificial Sequence: Synthetic oligonucleotide
  Target: SCNA; (+) strand; PAM type: YTN; PAM sequence: TTA
ttaatcaaatatttactaga

SEQ ID NO: 68127 - DNA, 20 bp, Artificial Sequence
  Description of Artificial Sequence: Synthetic oligonucleotide
  Target: SCNA; (+) strand; PAM type: YTN; PAM sequence: TTA
atcaaatatttactagattt

SEQ ID NO: 68128 - DNA, 20 bp, Artificial Sequence
  Description of Artificial Sequence: Synthetic oligonucleotide
  Target: SCNA; (+) strand; PAM type: YTN; PAM sequence: TTT
actagatttatatctattag

SEQ ID NO: 68129 - DNA, 20 bp, Artificial Sequence
  Description of Artificial Sequence: Synthetic oligonucleotide
  Target: SCNA; (+) strand; PAM type: YTN; PAM sequence: TTA
ctagatttatatctattagt

SEQ ID NO: 68130 - DNA, 20 bp, Artificial Sequence
  Description of Artificial Sequence: Synthetic oligonucleotide
  Target: SCNA; (+) strand; PAM type: YTN; PAM sequence: CTA
gatttatatctattagtcaa

SEQ ID NO: 68131 - DNA, 20 bp, Artificial Sequence
  Description of Artificial Sequence: Synthetic oligonucleotide
  Target: SCNA; (+) strand; PAM type: YTN; PAM sequence: TTT
atatctattagtcaattctc

SEQ ID NO: 68132 - DNA, 20 bp, Artificial Sequence
  Description of Artificial Sequence: Synthetic oligonucleotide
  Target: SCNA; (+) strand; PAM type: YTN; PAM sequence: TTA
tatctattagtcaattctct

SEQ ID NO: 68133 - DNA, 20 bp, Artificial Sequence
  Description of Artificial Sequence: Synthetic oligonucleotide
  Target: SCNA; (+) strand; PAM type: YTN; PAM sequence: CTA
ttagtcaattctctttagaa

SEQ ID NO: 68134 - DNA, 20 bp, Artificial Sequence
  Description of Artificial Sequence: Synthetic oligonucleotide
  Target: SCNA; (+) strand; PAM type: YTN; PAM sequence: TTA
gtcaattctctttagaattt

SEQ ID NO: 68135 - DNA, 20 bp, Artificial Sequence
  Description of Artificial Sequence: Synthetic oligonucleotide
  Target: SCNA; (+) strand; PAM type: YTN; PAM sequence: TTC
tctttagaatttctttgact

SEQ ID NO: 68136 - DNA, 20 bp, Artificial Sequence
  Description of Artificial Sequence: Synthetic oligonucleotide
  Target: SCNA; (+) strand; PAM type: YTN; PAM sequence: CTC
tttagaatttctttgactgt

SEQ ID NO: 68137 - DNA, 20 bp, Artificial Sequence
  Description of Artificial Sequence: Synthetic oligonucleotide
  Target: SCNA; (+) strand; PAM type: YTN; PAM sequence: CTT
tagaatttctttgactgttt

SEQ ID NO: 68138 - DNA, 20 bp, Artificial Sequence
  Description of Artificial Sequence: Synthetic oligonucleotide
  Target: SCNA; (+) strand; PAM type: YTN; PAM sequence: TTT
agaatttctttgactgtttc

SEQ ID NO: 68139 - DNA, 20 bp, Artificial Sequence
  Description of Artificial Sequence: Synthetic oligonucleotide
  Target: SCNA; (+) strand; PAM type: YTN; PAM sequence: TTA
gaatttctttgactgtttct

SEQ ID NO: 68140 - DNA, 20 bp, Artificial Sequence
  Description of Artificial Sequence: Synthetic oligonucleotide
  Target: SCNA; (+) strand; PAM type: YTN; PAM sequence: TTT
ctttgactgtttctataaat

SEQ ID NO: 68141 - DNA, 20 bp, Artificial Sequence
  Description of Artificial Sequence: Synthetic oligonucleotide
  Target: SCNA; (+) strand; PAM type: YTN; PAM sequence: TTC
tttgactgtttctataaatc

SEQ ID NO: 68142 - DNA, 20 bp, Artificial Sequence
  Description of Artificial Sequence: Synthetic oligonucleotide
  Target: SCNA; (+) strand; PAM type: YTN; PAM sequence: CTT
tgactgtttctataaatctt

SEQ ID NO: 68143 - DNA, 20 bp, Artificial Sequence
  Description of Artificial Sequence: Synthetic oligonucleotide
  Target: SCNA; (+) strand; PAM type: YTN; PAM sequence: TTT
gactgtttctataaatcttt

SEQ ID NO: 68144 - DNA, 20 bp, Artificial Sequence
  Description of Artificial Sequence: Synthetic oligonucleotide
  Target: SCNA; (+) strand; PAM type: YTN; PAM sequence: TTG
actgtttctataaatcttta

SEQ ID NO: 68145 - DNA, 20 bp, Artificial Sequence
  Description of Artificial Sequence: Synthetic oligonucleotide
  Target: SCNA; (+) strand; PAM type: YTN; PAM sequence: CTG
tttctataaatctttattcc

SEQ ID NO: 68146 - DNA, 20 bp, Artificial Sequence
  Description of Artificial Sequence: Synthetic oligonucleotide
  Target: SCNA; (+) strand; PAM type: YTN; PAM sequence: TTT
ctataaatctttattcctca

SEQ ID NO: 68147 - DNA, 20 bp, Artificial Sequence
  Description of Artificial Sequence: Synthetic oligonucleotide
  Target: SCNA; (+) strand; PAM type: YTN; PAM sequence: TTC
tataaatctttattcctcag

SEQ ID NO: 68148 - DNA, 20 bp, Artificial Sequence
  Description of Artificial Sequence: Synthetic oligonucleotide
  Target: SCNA; (+) strand; PAM type: YTN; PAM sequence: CTA
taaatctttattcctcagat

SEQ ID NO: 68149 - DNA, 20 bp, Artificial Sequence
  Description of Artificial Sequence: Synthetic oligonucleotide
  Target: SCNA; (+) strand; PAM type: YTN; PAM sequence: CTT
tattcctcagatattccttt

SEQ ID NO: 68150 - DNA, 20 bp, Artificial Sequence
  Description of Artificial Sequence: Synthetic oligonucleotide
  Target: SCNA; (+) strand; PAM type: YTN; PAM sequence: TTT
attcctcagatattccttta

SEQ ID NO: 68151 - DNA, 20 bp, Artificial Sequence
  Description of Artificial Sequence: Synthetic oligonucleotide
  Target: SCNA; (+) strand; PAM type: YTN; PAM sequence: TTA
ttcctcagatattcctttaa

SEQ ID NO: 68152 - DNA, 20 bp, Artificial Sequence
  Description of Artificial Sequence: Synthetic oligonucleotide
  Target: SCNA; (+) strand; PAM type: YTN; PAM sequence: TTC
ctcagatattcctttaaacc

SEQ ID NO: 68153 - DNA, 20 bp, Artificial Sequence
  Description of Artificial Sequence: Synthetic oligonucleotide
  Target: SCNA; (+) strand; PAM type: YTN; PAM sequence: CTC
agatattcctttaaaccagt

SEQ ID NO: 68154 - DNA, 20 bp, Artificial Sequence
  Description of Artificial Sequence: Synthetic oligonucleotide
  Target: SCNA; (+) strand; PAM type: YTN; PAM sequence: TTC
ctttaaaccagtcttaccag

SEQ ID NO: 68155 - DNA, 20 bp, Artificial Sequence
  Description of Artificial Sequence: Synthetic oligonucleotide
  Target: SCNA; (+) strand; PAM type: YTN; PAM sequence: CTT
taaaccagtcttaccagctt

SEQ ID NO: 68156 - DNA, 20 bp, Artificial Sequence
  Description of Artificial Sequence: Synthetic oligonucleotide
  Target: SCNA; (+) strand; PAM type: YTN; PAM sequence: TTT
aaaccagtcttaccagctta

SEQ ID NO: 68157 - DNA, 20 bp, Artificial Sequence
  Description of Artificial Sequence: Synthetic oligonucleotide
  Target: SCNA; (+) strand; PAM type: YTN; PAM sequence: TTA
aaccagtcttaccagcttat

SEQ ID NO: 68158 - DNA, 20 bp, Artificial Sequence
  Description of Artificial Sequence: Synthetic oligonucleotide
  Target: SCNA; (+) strand; PAM type: YTN; PAM sequence: CTT
accagcttattggctccact

SEQ ID NO: 68159 - DNA, 20 bp, Artificial Sequence
  Description of Artificial Sequence: Synthetic oligonucleotide
  Target: SCNA; (+) strand; PAM type: YTN; PAM sequence: TTA
ccagcttattggctccacta

SEQ ID NO: 68160 - DNA, 20 bp, Artificial Sequence
  Description of Artificial Sequence: Synthetic oligonucleotide
  Target: SCNA; (+) strand; PAM type: YTN; PAM sequence: CTT
attggctccactactaatta

SEQ ID NO: 68161 - DNA, 20 bp, Artificial Sequence
  Description of Artificial Sequence: Synthetic oligonucleotide
  Target: SCNA; (+) strand; PAM type: YTN; PAM sequence: TTA
ttggctccactactaattaa

SEQ ID NO: 68162 - DNA, 20 bp, Artificial Sequence
  Description of Artificial Sequence: Synthetic oligonucleotide
  Target: SCNA; (+) strand; PAM type: YTN; PAM sequence: TTG
gctccactactaattaatta

SEQ ID NO: 68163 - DNA, 20 bp, Artificial Sequence
  Description of Artificial Sequence: Synthetic oligonucleotide
  Target: SCNA; (+) strand; PAM type: YTN; PAM sequence: CTC
cactactaattaattagttg

SEQ ID NO: 68164 - DNA, 20 bp, Artificial Sequence
  Description of Artificial Sequence: Synthetic oligonucleotide
  Target: SCNA; (+) strand; PAM type: YTN; PAM sequence: CTA
ctaattaattagttgaataa

SEQ ID NO: 68165 - DNA, 20 bp, Artificial Sequence
  Description of Artificial Sequence: Synthetic oligonucleotide
  Target: SCNA; (+) strand; PAM type: YTN; PAM sequence: CTA
attaattagttgaataaaat

SEQ ID NO: 68166 - DNA, 20 bp, Artificial Sequence
  Description of Artificial Sequence: Synthetic oligonucleotide
  Target: SCNA; (+) strand; PAM type: YTN; PAM sequence: TTA
attagttgaataaaatcttt

SEQ ID NO: 68167 - DNA, 20 bp, Artificial Sequence
  Description of Artificial Sequence: Synthetic oligonucleotide
  Target: SCNA; (+) strand; PAM type: YTN; PAM sequence: TTA
gttgaataaaatctttgaaa

SEQ ID NO: 68168 - DNA, 20 bp, Artificial Sequence
  Description of Artificial Sequence: Synthetic oligonucleotide
  Target: SCNA; (+) strand; PAM type: YTN; PAM sequence: TTG
aataaaatctttgaaatgtg

SEQ ID NO: 68169 - DNA, 20 bp, Artificial Sequence
  Description of Artificial Sequence: Synthetic oligonucleotide
  Target: SCNA; (+) strand; PAM type: YTN; PAM sequence: CTT
tgaaatgtgtttatgtttgt

SEQ ID NO: 68170 - DNA, 20 bp, Artificial Sequence
  Description of Artificial Sequence: Synthetic oligonucleotide
  Target: SCNA; (+) strand; PAM type: YTN; PAM sequence: TTT
gaaatgtgtttatgtttgta

SEQ ID NO: 68171 - DNA, 20 bp, Artificial Sequence
  Description of Artificial Sequence: Synthetic oligonucleotide
  Target: SCNA; (+) strand; PAM type: YTN; PAM sequence: TTG
aaatgtgtttatgtttgtat

SEQ ID NO: 68172 - DNA, 20 bp, Artificial Sequence
  Description of Artificial Sequence: Synthetic oligonucleotide
  Target: SCNA; (+) strand; PAM type: YTN; PAM sequence: TTT
atgtttgtataaaaaccatc

SEQ ID NO: 68173 - DNA, 20 bp, Artificial Sequence
  Description of Artificial Sequence: Synthetic oligonucleotide
  Target: SCNA; (+) strand; PAM type: YTN; PAM sequence: TTA
tgtttgtataaaaaccatct

SEQ ID NO: 68174 - DNA, 20 bp, Artificial Sequence
  Description of Artificial Sequence: Synthetic oligonucleotide
  Target: SCNA; (+) strand; PAM type: YTN; PAM sequence: TTT
gtataaaaaccatcttcttt

SEQ ID NO: 68175 - DNA, 20 bp, Artificial Sequence
  Description of Artificial Sequence: Synthetic oligonucleotide
  Target: SCNA; (+) strand; PAM type: YTN; PAM sequence: TTG
tataaaaaccatcttcttta

SEQ ID NO: 68176 - DNA, 20 bp, Artificial Sequence
  Description of Artificial Sequence: Synthetic oligonucleotide
  Target: SCNA; (+) strand; PAM type: YTN; PAM sequence: CTT
ctttacttttcaaaaactat

SEQ ID NO: 68177 - DNA, 20 bp, Artificial Sequence
  Description of Artificial Sequence: Synthetic oligonucleotide
  Target: SCNA; (+) strand; PAM type: YTN; PAM sequence: TTC
tttacttttcaaaaactata

SEQ ID NO: 68178 - DNA, 20 bp, Artificial Sequence
  Description of Artificial Sequence: Synthetic oligonucleotide
  Target: SCNA; (+) strand; PAM type: YTN; PAM sequence: CTT
tacttttcaaaaactatact

SEQ ID NO: 68179 - DNA, 20 bp, Artificial Sequence
  Description of Artificial Sequence: Synthetic oligonucleotide
  Target: SCNA; (+) strand; PAM type: YTN; PAM sequence: TTT
acttttcaaaaactatactt

SEQ ID NO: 68180 - DNA, 20 bp, Artificial Sequence
  Description of Artificial Sequence: Synthetic oligonucleotide
  Target: SCNA; (+) strand; PAM type: YTN; PAM sequence: TTA
cttttcaaaaactatacttg

SEQ ID NO: 68181 - DNA, 20 bp, Artificial Sequence
  Description of Artificial Sequence: Synthetic oligonucleotide
  Target: SCNA; (+) strand; PAM type: YTN; PAM sequence: CTT
ttcaaaaactatacttgagc

SEQ ID NO: 68182 - DNA, 20 bp, Artificial Sequence
  Description of Artificial Sequence: Synthetic oligonucleotide
  Target: SCNA; (+) strand; PAM type: YTN; PAM sequence: TTT
tcaaaaactatacttgagca

SEQ ID NO: 68183 - DNA, 20 bp, Artificial Sequence
  Description of Artificial Sequence: Synthetic oligonucleotide
  Target: SCNA; (+) strand; PAM type: YTN; PAM sequence: TTT
caaaaactatacttgagcac

SEQ ID NO: 68184 - DNA, 20 bp, Artificial Sequence
  Description of Artificial Sequence: Synthetic oligonucleotide
  Target: SCNA; (+) strand; PAM type: YTN; PAM sequence: TTC
aaaaactatacttgagcaca

SEQ ID NO: 68185 - DNA, 20 bp, Artificial Sequence
  Description of Artificial Sequence: Synthetic oligonucleotide
  Target: SCNA; (+) strand; PAM type: YTN; PAM sequence: CTA
tacttgagcacactgtgaaa

SEQ ID NO: 68186 - DNA, 20 bp, Artificial Sequence
  Description of Artificial Sequence: Synthetic oligonucleotide
  Target: SCNA; (+) strand; PAM type: YTN; PAM sequence: CTT
gagcacactgtgaaaagata

SEQ ID NO: 68187 - DNA, 20 bp, Artificial Sequence
  Description of Artificial Sequence: Synthetic oligonucleotide
  Target: SCNA; (+) strand; PAM type: YTN; PAM sequence: TTG
agcacactgtgaaaagataa

SEQ ID NO: 68188 - DNA, 20 bp, Artificial Sequence
  Description of Artificial Sequence: Synthetic oligonucleotide
  Target: SCNA; (+) strand; PAM type: YTN; PAM sequence: CTG
tgaaaagataaattgctagg

SEQ ID NO: 68189 - DNA, 20 bp, Artificial Sequence
  Description of Artificial Sequence: Synthetic oligonucleotide
  Target: SCNA; (+) strand; PAM type: YTN; PAM sequence: TTG
ctaggttcaactgaggaact

SEQ ID NO: 68190 - DNA, 20 bp, Artificial Sequence
  Description of Artificial Sequence: Synthetic oligonucleotide
  Target: SCNA; (+) strand; PAM type: YTN; PAM sequence: CTA
ggttcaactgaggaactgaa

SEQ ID NO: 68191 - DNA, 20 bp, Artificial Sequence
  Description of Artificial Sequence: Synthetic oligonucleotide
  Target: SCNA; (+) strand; PAM type: YTN; PAM sequence: TTC
aactgaggaactgaataatt

SEQ ID NO: 68192 - DNA, 20 bp, Artificial Sequence
  Description of Artificial Sequence: Synthetic oligonucleotide
  Target: SCNA; (+) strand; PAM type: YTN; PAM sequence: CTG
aggaactgaataattttttc

SEQ ID NO: 68193 - DNA, 20 bp, Artificial Sequence
  Description of Artificial Sequence: Synthetic oligonucleotide
  Target: SCNA; (+) strand; PAM type: YTN; PAM sequence: CTG
aataattttttcctctttta

SEQ ID NO: 68194 - DNA, 20 bp, Artificial Sequence
  Description of Artificial Sequence: Synthetic oligonucleotide
  Target: SCNA; (+) strand; PAM type: YTN; PAM sequence: TTT
tttcctcttttagttttaac

SEQ ID NO: 68195 - DNA, 20 bp, Artificial Sequence
  Description of Artificial Sequence: Synthetic oligonucleotide
  Target: SCNA; (+) strand; PAM type: YTN; PAM sequence: TTT
ttcctcttttagttttaaca

SEQ ID NO: 68196 - DNA, 20 bp, Artificial Sequence
  Description of Artificial Sequence: Synthetic oligonucleotide
  Target: SCNA; (+) strand; PAM type: YTN; PAM sequence: TTT
tcctcttttagttttaacat

SEQ ID NO: 68197 - DNA, 20 bp, Artificial Sequence
  Description of Artificial Sequence: Synthetic oligonucleotide
  Target: SCNA; (+) strand; PAM type: YTN; PAM sequence: TTT
cctcttttagttttaacatt

SEQ ID NO: 68198 - DNA, 20 bp, Artificial Sequence
  Description of Artificial Sequence: Synthetic oligonucleotide
  Target: SCNA; (+) strand; PAM type: YTN; PAM sequence: TTC
ctcttttagttttaacattc

SEQ ID NO: 68199 - DNA, 20 bp, Artificial Sequence
  Description of Artificial Sequence: Synthetic oligonucleotide
  Target: SCNA; (+) strand; PAM type: YTN; PAM sequence: CTC
ttttagttttaacattctac

SEQ ID NO: 68200 - DNA, 20 bp, Artificial Sequence
  Description of Artificial Sequence: Synthetic oligonucleotide
  Target: SCNA; (+) strand; PAM type: YTN; PAM sequence: CTT
ttagttttaacattctacac

SEQ ID NO: 68201 - DNA, 20 bp, Artificial Sequence
  Description of Artificial Sequence: Synthetic oligonucleotide
  Target: SCNA; (+) strand; PAM type: YTN; PAM sequence: TTT
tagttttaacattctacaca

SEQ ID NO: 68202 - DNA, 20 bp, Artificial Sequence
  Description of Artificial Sequence: Synthetic oligonucleotide
  Target: SCNA; (+) strand; PAM type: YTN; PAM sequence: TTT
agttttaacattctacacaa

SEQ ID NO: 68203 - DNA, 20 bp, Artificial Sequence
  Description of Artificial Sequence: Synthetic oligonucleotide
  Target: SCNA; (+) strand; PAM type: YTN; PAM sequence: TTA
gttttaacattctacacaat

SEQ ID NO: 68204 - DNA, 20 bp, Artificial Sequence
  Description of Artificial Sequence: Synthetic oligonucleotide
  Target: SCNA; (+) strand; PAM type: YTN; PAM sequence: TTT
taacattctacacaatctaa

SEQ ID NO: 68205 - DNA, 20 bp, Artificial Sequence
  Description of Artificial Sequence: Synthetic oligonucleotide
  Target: SCNA; (+) strand; PAM type: YTN; PAM sequence: TTT
aacattctacacaatctaaa

SEQ ID NO: 68206 - DNA, 20 bp, Artificial Sequence
  Description of Artificial Sequence: Synthetic oligonucleotide
  Target: SCNA; (+) strand; PAM type: YTN; PAM sequence: TTA
acattctacacaatctaaat

SEQ ID NO: 68207 - DNA, 20 bp, Artificial Sequence
  Description of Artificial Sequence: Synthetic oligonucleotide
  Target: SCNA; (+) strand; PAM type: YTN; PAM sequence: TTC
tacacaatctaaattatttt

SEQ ID NO: 68208 - DNA, 20 bp, Artificial Sequence
  Description of Artificial Sequence: Synthetic oligonucleotide
  Target: SCNA; (+) strand; PAM type: YTN; PAM sequence: CTA
cacaatctaaattattttaa

SEQ ID NO: 68209 - DNA, 20 bp, Artificial Sequence
  Description of Artificial Sequence: Synthetic oligonucleotide
  Target: SCNA; (+) strand; PAM type: YTN; PAM sequence: CTA
aattattttaaaactcagaa

SEQ ID NO: 68210 - DNA, 20 bp, Artificial Sequence
  Description of Artificial Sequence: Synthetic oligonucleotide
  Target: SCNA; (+) strand; PAM type: YTN; PAM sequence: TTA
ttttaaaactcagaaaatgc

SEQ ID NO: 68211 - DNA, 20 bp, Artificial Sequence
  Description of Artificial Sequence: Synthetic oligonucleotide
  Target: SCNA; (+) strand; PAM type: YTN; PAM sequence: TTT
taaaactcagaaaatgcttt

SEQ ID NO: 68212 - DNA, 20 bp, Artificial Sequence
  Description of Artificial Sequence: Synthetic oligonucleotide
  Target: SCNA; (+) strand; PAM type: YTN; PAM sequence: TTT
aaaactcagaaaatgcttta

SEQ ID NO: 68213 - DNA, 20 bp, Artificial Sequence
  Description of Artificial Sequence: Synthetic oligonucleotide
  Target: SCNA; (+) strand; PAM type: YTN; PAM sequence: TTA
aaactcagaaaatgctttaa

SEQ ID NO: 68214 - DNA, 20 bp, Artificial Sequence
  Description of Artificial Sequence: Synthetic oligonucleotide
  Target: SCNA; (+) strand; PAM type: YTN; PAM sequence: CTC
agaaaatgctttaagctcat

SEQ ID NO: 68215 - DNA, 20 bp, Artificial Sequence
  Description of Artificial Sequence: Synthetic oligonucleotide
  Target: SCNA; (+) strand; PAM type: YTN; PAM sequence: CTT
taagctcatatttatagact

SEQ ID NO: 68216 - DNA, 20 bp, Artificial Sequence
  Description of Artificial Sequence: Synthetic oligonucleotide
  Target: SCNA; (+) strand; PAM type: YTN; PAM sequence: TTT
aagctcatatttatagactt

SEQ ID NO: 68217 - DNA, 20 bp, Artificial Sequence
  Description of Artificial Sequence: Synthetic oligonucleotide
  Target: SCNA; (+) strand; PAM type: YTN; PAM sequence: TTA
agctcatatttatagacttc

SEQ ID NO: 68218 - DNA, 20 bp, Artificial Sequence
  Description of Artificial Sequence: Synthetic oligonucleotide
  Target: SCNA; (+) strand; PAM type: YTN; PAM sequence: CTC
atatttatagacttcccaag

SEQ ID NO: 68219 - DNA, 20 bp, Artificial Sequence
  Description of Artificial Sequence: Synthetic oligonucleotide
  Target: SCNA; (+) strand; PAM type: YTN; PAM sequence: TTT
atagacttcccaagtagtac

SEQ ID NO: 68220 - DNA, 20 bp, Artificial Sequence
  Description of Artificial Sequence: Synthetic oligonucleotide
  Target: SCNA; (+) strand; PAM type: YTN; PAM sequence: TTA
tagacttcccaagtagtaca

SEQ ID NO: 68221 - DNA, 20 bp, Artificial Sequence
  Description of Artificial Sequence: Synthetic oligonucleotide
  Target: SCNA; (+) strand; PAM type: YTN; PAM sequence: CTT
cccaagtagtacaatctgtt

SEQ ID NO: 68222 - DNA, 20 bp, Artificial Sequence
  Description of Artificial Sequence: Synthetic oligonucleotide
  Target: SCNA; (+) strand; PAM type: YTN; PAM sequence: TTC
ccaagtagtacaatctgtta

SEQ ID NO: 68223 - DNA, 20 bp, Artificial Sequence
  Description of Artificial Sequence: Synthetic oligonucleotide
  Target: SCNA; (+) strand; PAM type: YTN; PAM sequence: CTG
ttaactgaggtaggtaagta

SEQ ID NO: 68224 - DNA, 20 bp, Artificial Sequence
  Description of Artificial Sequence: Synthetic oligonucleotide
  Target: SCNA; (+) strand; PAM type: YTN; PAM sequence: TTA
actgaggtaggtaagtaaac

SEQ ID NO: 68225 - DNA, 20 bp, Artificial Sequence
  Description of Artificial Sequence: Synthetic oligonucleotide
  Target: SCNA; (+) strand; PAM type: YTN; PAM sequence: CTG
aggtaggtaagtaaacgtcc

SEQ ID NO: 68226 - DNA, 20 bp, Artificial Sequence
  Description of Artificial Sequence: Synthetic oligonucleotide
  Target: SCNA; (+) strand; PAM type: YTN; PAM sequence: CTT
gaaaacttccataaatgatg

SEQ ID NO: 68227 - DNA, 20 bp, Artificial Sequence
  Description of Artificial Sequence: Synthetic oligonucleotide
  Target: SCNA; (+) strand; PAM type: YTN; PAM sequence: TTG
aaaacttccataaatgatgg

SEQ ID NO: 68228 - DNA, 20 bp, Artificial Sequence
  Description of Artificial Sequence: Synthetic oligonucleotide
  Target: SCNA; (+) strand; PAM type: YTN; PAM sequence: CTT
ccataaatgatggtgaataa

SEQ ID NO: 68229 - DNA, 20 bp, Artificial Sequence
  Description of Artificial Sequence: Synthetic oligonucleotide
  Target: SCNA; (+) strand; PAM type: YTN; PAM sequence: TTC
cataaatgatggtgaataaa

SEQ ID NO: 68230 - DNA, 20 bp, Artificial Sequence
  Description of Artificial Sequence: Synthetic oligonucleotide
  Target: SCNA; (+) strand; PAM type: YTN; PAM sequence: TTA
aaaaggtggaaacaattttc

SEQ ID NO: 68231 - DNA, 20 bp, Artificial Sequence
  Description of Artificial Sequence: Synthetic oligonucleotide
  Target: SCNA; (+) strand; PAM type: YTN; PAM sequence: TTT
tccaggtctctgagccatat

SEQ ID NO: 68232 - DNA, 20 bp, Artificial Sequence
  Description of Artificial Sequence: Synthetic oligonucleotide
  Target: SCNA; (+) strand; PAM type: YTN; PAM sequence: TTT
ccaggtctctgagccatatt

SEQ ID NO: 68233 - DNA, 20 bp, Artificial Sequence
  Description of Artificial Sequence: Synthetic oligonucleotide
  Target: SCNA; (+) strand; PAM type: YTN; PAM sequence: TTC
caggtctctgagccatattc

SEQ ID NO: 68234 - DNA, 20 bp, Artificial Sequence
  Description of Artificial Sequence: Synthetic oligonucleotide
  Target: SCNA; (+) strand; PAM type: YTN; PAM sequence: CTC
tgagccatattcaatataat

SEQ ID NO: 68235 - DNA, 20 bp, Artificial Sequence
  Description of Artificial Sequence: Synthetic oligonucleotide
  Target: SCNA; (+) strand; PAM type: YTN; PAM sequence: CTG
agccatattcaatataatga

SEQ ID NO: 68236 - DNA, 20 bp, Artificial Sequence
  Description of Artificial Sequence: Synthetic oligonucleotide
  Target: SCNA; (+) strand; PAM type: YTN; PAM sequence: TTC
aatataatgaatcctgaata

SEQ ID NO: 68237 - DNA, 20 bp, Artificial Sequence
  Description of Artificial Sequence: Synthetic oligonucleotide
  Target: SCNA; (+) strand; PAM type: YTN; PAM sequence: CTG
aataggagttcaatgaaaag

SEQ ID NO: 68238 - DNA, 20 bp, Artificial Sequence
  Description of Artificial Sequence: Synthetic oligonucleotide
  Target: SCNA; (+) strand; PAM type: YTN; PAM sequence: TTC
aatgaaaagattaggtagat

SEQ ID NO: 68239 - DNA, 20 bp, Artificial Sequence
  Description of Artificial Sequence: Synthetic oligonucleotide
  Target: SCNA; (+) strand; PAM type: YTN; PAM sequence: TTA
ggtagattttttttaaaaaa

SEQ ID NO: 68240 - DNA, 20 bp, Artificial Sequence
  Description of Artificial Sequence: Synthetic oligonucleotide
  Target: SCNA; (+) strand; PAM type: YTN; PAM sequence: TTT
tttttaaaaaaaacccatat

SEQ ID NO: 68241 - DNA, 20 bp, Artificial Sequence
  Description of Artificial Sequence: Synthetic oligonucleotide
  Target: SCNA; (+) strand; PAM type: YTN; PAM sequence: TTT
ttttaaaaaaaacccatatc

SEQ ID NO: 68242 - DNA, 20 bp, Artificial Sequence
  Description of Artificial Sequence: Synthetic oligonucleotide
  Target: SCNA; (+) strand; PAM type: YTN; PAM sequence: TTT
tttaaaaaaaacccatatcc

SEQ ID NO: 68243 - DNA, 20 bp, Artificial Sequence
  Description of Artificial Sequence: Synthetic oligonucleotide
  Target: SCNA; (+) strand; PAM type: YTN; PAM sequence: TTT
ttaaaaaaaacccatatccc

SEQ ID NO: 68244 - DNA, 20 bp, Artificial Sequence
  Description of Artificial Sequence: Synthetic oligonucleotide
  Target: SCNA; (+) strand; PAM type: YTN; PAM sequence: TTT
taaaaaaaacccatatccca

SEQ ID NO: 68245 - DNA, 20 bp, Artificial Sequence
  Description of Artificial Sequence: Synthetic oligonucleotide
  Target: SCNA; (+) strand; PAM type: YTN; PAM sequence: TTT
aaaaaaaacccatatcccat

SEQ ID NO: 68246 - DNA, 20 bp, Artificial Sequence
  Description of Artificial Sequence: Synthetic oligonucleotide
  Target: SCNA; (+) strand; PAM type: YTN; PAM sequence: TTA
aaaaaaacccatatcccatg

SEQ ID NO: 68247 - DNA, 20 bp, Artificial Sequence
  Description of Artificial Sequence: Synthetic oligonucleotide
  Target: SCNA; (+) strand; PAM type: YTN; PAM sequence: CTG
ctgtaaggtacttttataaa

SEQ ID NO: 68248 - DNA, 20 bp, Artificial Sequence
  Description of Artificial Sequence: Synthetic oligonucleotide
  Target: SCNA; (+) strand; PAM type: YTN; PAM sequence: CTG
taaggtacttttataaatta

SEQ ID NO: 68249 - DNA, 20 bp, Artificial Sequence
  Description of Artificial Sequence: Synthetic oligonucleotide
  Target: SCNA; (+) strand; PAM type: YTN; PAM sequence: CTT
ttataaattatactgattat

SEQ ID NO: 68250 - DNA, 20 bp, Artificial Sequence
  Description of Artificial Sequence: Synthetic oligonucleotide
  Target: SCNA; (+) strand; PAM type: YTN; PAM sequence: TTT
tataaattatactgattata

SEQ ID NO: 68251 - DNA, 20 bp, Artificial Sequence
  Description of Artificial Sequence: Synthetic oligonucleotide
  Target: SCNA; (+) strand; PAM type: YTN; PAM sequence: TTT
ataaattatactgattatac

SEQ ID NO: 68252 - DNA, 20 bp, Artificial Sequence
  Description of Artificial Sequence: Synthetic oligonucleotide
  Target: SCNA; (+) strand; PAM type: YTN; PAM sequence: TTA
taaattatactgattatact

SEQ ID NO: 68253 - DNA, 20 bp, Artificial Sequence
  Description of Artificial Sequence: Synthetic oligonucleotide
  Target: SCNA; (+) strand; PAM type: YTN; PAM sequence: TTA
tactgattatactgtctcat

SEQ ID NO: 68254 - DNA, 20 bp, Artificial Sequence
  Description of Artificial Sequence: Synthetic oligonucleotide
  Target: SCNA; (+) strand; PAM type: YTN; PAM sequence: CTG
attatactgtctcatttctc

SEQ ID NO: 68255 - DNA, 20 bp, Artificial Sequence
  Description of Artificial Sequence: Synthetic oligonucleotide
  Target: SCNA; (+) strand; PAM type: YTN; PAM sequence: TTA
tactgtctcatttctctgtc

SEQ ID NO: 68256 - DNA, 20 bp, Artificial Sequence
  Description of Artificial Sequence: Synthetic oligonucleotide
  Target: SCNA; (+) strand; PAM type: YTN; PAM sequence: CTG
tctcatttctctgtctattt

SEQ ID NO: 68257 - DNA, 20 bp, Artificial Sequence
  Description of Artificial Sequence: Synthetic oligonucleotide
  Target: SCNA; (+) strand; PAM type: YTN; PAM sequence: CTC
atttctctgtctatttgcca

SEQ ID NO: 68258 - DNA, 20 bp, Artificial Sequence
  Description of Artificial Sequence: Synthetic oligonucleotide
  Target: SCNA; (+) strand; PAM type: YTN; PAM sequence: TTT
ctctgtctatttgccatgtg

SEQ ID NO: 68259 - DNA, 20 bp, Artificial Sequence
  Description of Artificial Sequence: Synthetic oligonucleotide
  Target: SCNA; (+) strand; PAM type: YTN; PAM sequence: TTC
tctgtctatttgccatgtgt

SEQ ID NO: 68260 - DNA, 20 bp, Artificial Sequence
  Description of Artificial Sequence: Synthetic oligonucleotide
  Target: SCNA; (+) strand; PAM type: YTN; PAM sequence: CTC
tgtctatttgccatgtgtta

SEQ ID NO: 68261 - DNA, 20 bp, Artificial Sequence
  Description of Artificial Sequence: Synthetic oligonucleotide
  Target: SCNA; (+) strand; PAM type: YTN; PAM sequence: CTG
tctatttgccatgtgttata

SEQ ID NO: 68262 - DNA, 20 bp, Artificial Sequence
  Description of Artificial Sequence: Synthetic oligonucleotide
  Target: SCNA; (+) strand; PAM type: YTN; PAM sequence: CTA
tttgccatgtgttatatact

SEQ ID NO: 68263 - DNA, 20 bp, Artificial Sequence
  Description of Artificial Sequence: Synthetic oligonucleotide
  Target: SCNA; (+) strand; PAM type: YTN; PAM sequence: TTT
gccatgtgttatatactttg

SEQ ID NO: 68264 - DNA, 20 bp, Artificial Sequence
  Description of Artificial Sequence: Synthetic oligonucleotide
  Target: SCNA; (+) strand; PAM type: YTN; PAM sequence: TTG
ccatgtgttatatactttgg

SEQ ID NO: 68265 - DNA, 20 bp, Artificial Sequence
  Description of Artificial Sequence: Synthetic oligonucleotide
  Target: SCNA; (+) strand; PAM type: YTN; PAM sequence: TTA
tatactttggtgatctttga

SEQ ID NO: 68266 - DNA, 20 bp, Artificial Sequence
  Description of Artificial Sequence: Synthetic oligonucleotide
  Target: SCNA; (+) strand; PAM type: YTN; PAM sequence: CTT
tggtgatctttgagaaagca

SEQ ID NO: 68267 - DNA, 20 bp, Artificial Sequence
  Description of Artificial Sequence: Synthetic oligonucleotide
  Target: SCNA; (+) strand; PAM type: YTN; PAM sequence: TTT
ggtgatctttgagaaagcat

SEQ ID NO: 68268 - DNA, 20 bp, Artificial Sequence
  Description of Artificial Sequence: Synthetic oligonucleotide
  Target: SCNA; (+) strand; PAM type: YTN; PAM sequence: TTG
gtgatctttgagaaagcatt

SEQ ID NO: 68269 - DNA, 20 bp, Artificial Sequence
  Description of Artificial Sequence: Synthetic oligonucleotide
  Target: SCNA; (+) strand; PAM type: YTN; PAM sequence: CTT
tgagaaagcatttaacctat

SEQ ID NO: 68270 - DNA, 20 bp, Artificial Sequence
  Description of Artificial Sequence: Synthetic oligonucleotide
  Target: SCNA; (+) strand; PAM type: YTN; PAM sequence: TTT
gagaaagcatttaacctatt

SEQ ID NO: 68271 - DNA, 20 bp, Artificial Sequence
  Description of Artificial Sequence: Synthetic oligonucleotide
  Target: SCNA; (+) strand; PAM type: YTN; PAM sequence: TTG
agaaagcatttaacctatta

SEQ ID NO: 68272 - DNA, 20 bp, Artificial Sequence
  Description of Artificial Sequence: Synthetic oligonucleotide
  Target: SCNA; (+) strand; PAM type: YTN; PAM sequence: TTT
aacctattacaggcattttt

SEQ ID NO: 68273 - DNA, 20 bp, Artificial Sequence
  Description of Artificial Sequence: Synthetic oligonucleotide
  Target: SCNA; (+) strand; PAM type: YTN; PAM sequence: TTA
acctattacaggcatttttt

SEQ ID NO: 68274 - DNA, 20 bp, Artificial Sequence
  Description of Artificial Sequence: Synthetic oligonucleotide
  Target: SCNA; (+) strand; PAM type: YTN; PAM sequence: CTA
ttacaggcatttttttcccc

SEQ ID NO: 68275 - DNA, 20 bp, Artificial Sequence
  Description of Artificial Sequence: Synthetic oligonucleotide
  Target: SCNA; (+) strand; PAM type: YTN; PAM sequence: TTA
caggcatttttttcccctaa

SEQ ID NO: 68276 - DNA, 20 bp, Artificial Sequence
  Description of Artificial Sequence: Synthetic oligonucleotide
  Target: SCNA; (+) strand; PAM type: YTN; PAM sequence: TTT
ttttcccctaaagtacaagt

SEQ ID NO: 68277 - DNA, 20 bp, Artificial Sequence
  Description of Artificial Sequence: Synthetic oligonucleotide
  Target: SCNA; (+) strand; PAM type: YTN; PAM sequence: TTT
tttcccctaaagtacaagta

SEQ ID NO: 68278 - DNA, 20 bp, Artificial Sequence
  Description of Artificial Sequence: Synthetic oligonucleotide
  Target: SCNA; (+) strand; PAM type: YTN; PAM sequence: TTT
ttcccctaaagtacaagtag

SEQ ID NO: 68279 - DNA, 20 bp, Artificial Sequence
  Description of Artificial Sequence: Synthetic oligonucleotide
  Target: SCNA; (+) strand; PAM type: YTN; PAM sequence: TTT
tcccctaaagtacaagtagg

SEQ ID NO: 68280 - DNA, 20 bp, Artificial Sequence
  Description of Artificial Sequence: Synthetic oligonucleotide
  Target: SCNA; (+) strand; PAM type: YTN; PAM sequence: TTT
cccctaaagtacaagtaggt

SEQ ID NO: 68281 - DNA, 20 bp, Artificial Sequence
  Description of Artificial Sequence: Synthetic oligonucleotide
  Target: SCNA; (+) strand; PAM type: YTN; PAM sequence: TTC
ccctaaagtacaagtaggta

SEQ ID NO: 68282 - DNA, 20 bp, Artificial Sequence
  Description of Artificial Sequence: Synthetic oligonucleotide
  Target: SCNA; (+) strand; PAM type: YTN; PAM sequence: CTA
aagtacaagtaggtaggtca

SEQ ID NO: 68283 - DNA, 20 bp, Artificial Sequence
  Description of Artificial Sequence: Synthetic oligonucleotide
  Target: SCNA; (+) strand; PAM type: YTN; PAM sequence: CTA
tccacccaatctggtggcct

SEQ ID NO: 68284 - DNA, 20 bp, Artificial Sequence
  Description of Artificial Sequence: Synthetic oligonucleotide
  Target: SCNA; (+) strand; PAM type: YTN; PAM sequence: CTG
gtggcctccgaaggacaaaa

SEQ ID NO: 68285 - DNA, 20 bp, Artificial Sequence
  Description of Artificial Sequence: Synthetic oligonucleotide
  Target: SCNA; (+) strand; PAM type: YTN; PAM sequence: CTC
cgaaggacaaaagccagagt

SEQ ID NO: 68286 - DNA, 20 bp, Artificial Sequence
  Description of Artificial Sequence: Synthetic oligonucleotide
  Target: SCNA; (+) strand; PAM type: YTN; PAM sequence: TTA
atctaaagcaatcaaggagt

SEQ ID NO: 68287 - DNA, 20 bp, Artificial Sequence
  Description of Artificial Sequence: Synthetic oligonucleotide
  Target: SCNA; (+) strand; PAM type: YTN; PAM sequence: CTA
aagcaatcaaggagtctgac

SEQ ID NO: 68288 - DNA, 20 bp, Artificial Sequence
  Description of Artificial Sequence: Synthetic oligonucleotide
  Target: SCNA; (+) strand; PAM type: YTN; PAM sequence: CTG
accaccatggaagccctgag

SEQ ID NO: 68289 - DNA, 20 bp, Artificial Sequence
  Description of Artificial Sequence: Synthetic oligonucleotide
  Target: SCNA; (+) strand; PAM type: YTN; PAM sequence: CTG
aggaagtggctgctgtattt

SEQ ID NO: 68290 - DNA, 20 bp, Artificial Sequence
  Description of Artificial Sequence: Synthetic oligonucleotide
  Target: SCNA; (+) strand; PAM type: YTN; PAM sequence: CTG
ctgtatttcccttttcaaga

SEQ ID NO: 68291 - DNA, 20 bp, Artificial Sequence
  Description of Artificial Sequence: Synthetic oligonucleotide
  Target: SCNA; (+) strand; PAM type: YTN; PAM sequence: CTG
tatttcccttttcaagagct

SEQ ID NO: 68292 - DNA, 20 bp, Artificial Sequence
  Description of Artificial Sequence: Synthetic oligonucleotide
  Target: SCNA; (+) strand; PAM type: YTN; PAM sequence: TTT
cccttttcaagagcttttcg

SEQ ID NO: 68293 - DNA, 20 bp, Artificial Sequence
  Description of Artificial Sequence: Synthetic oligonucleotide
  Target: SCNA; (+) strand; PAM type: YTN; PAM sequence: TTC
ccttttcaagagcttttcgt

SEQ ID NO: 68294 - DNA, 20 bp, Artificial Sequence
  Description of Artificial Sequence: Synthetic oligonucleotide
  Target: SCNA; (+) strand; PAM type: YTN; PAM sequence: CTT
ttcaagagcttttcgtatac

SEQ ID NO: 68295 - DNA, 20 bp, Artificial Sequence
  Description of Artificial Sequence: Synthetic oligonucleotide
  Target: SCNA; (+) strand; PAM type: YTN; PAM sequence: TTT
tcaagagcttttcgtataca

SEQ ID NO: 68296 - DNA, 20 bp, Artificial Sequence
  Description of Artificial Sequence: Synthetic oligonucleotide
  Target: SCNA; (+) strand; PAM type: YTN; PAM sequence: TTT
caagagcttttcgtatacag

SEQ ID NO: 68297 - DNA, 20 bp, Artificial Sequence
  Description of Artificial Sequence: Synthetic oligonucleotide
  Target: SCNA; (+) strand; PAM type: YTN; PAM sequence: TTC
aagagcttttcgtatacagc

SEQ ID NO: 68298 - DNA, 20 bp, Artificial Sequence
  Description of Artificial Sequence: Synthetic oligonucleotide
  Target: SCNA; (+) strand; PAM type: YTN; PAM sequence: CTT
ttcgtatacagcgtctatcc

SEQ ID NO: 68299 - DNA, 20 bp, Artificial Sequence
  Description of Artificial Sequence: Synthetic oligonucleotide
  Target: SCNA; (+) strand; PAM type: YTN; PAM sequence: TTT
tcgtatacagcgtctatcca

SEQ ID NO: 68300 - DNA, 20 bp, Artificial Sequence
  Description of Artificial Sequence: Synthetic oligonucleotide
  Target: SCNA; (+) strand; PAM type: YTN; PAM sequence: TTT
cgtatacagcgtctatccac

SEQ ID NO: 68301 - DNA, 20 bp, Artificial Sequence
  Description of Artificial Sequence: Synthetic oligonucleotide
  Target: SCNA; (+) strand; PAM type: YTN; PAM sequence: TTC
gtatacagcgtctatccact

SEQ ID NO: 68302 - DNA, 20 bp, Artificial Sequence
  Description of Artificial Sequence: Synthetic oligonucleotide
  Target: SCNA; (+) strand; PAM type: YTN; PAM sequence: CTA
tccactctcctatagagatg

SEQ ID NO: 68303 - DNA, 20 bp, Artificial Sequence
  Description of Artificial Sequence: Synthetic oligonucleotide
  Target: SCNA; (+) strand; PAM type: YTN; PAM sequence: CTC
tcctatagagatgaagttaa

SEQ ID NO: 68304 - DNA, 20 bp, Artificial Sequence
  Description of Artificial Sequence: Synthetic oligonucleotide
  Target: SCNA; (+) strand; PAM type: YTN; PAM sequence: CTC
ctatagagatgaagttaact

SEQ ID NO: 68305 - DNA, 20 bp, Artificial Sequence
  Description of Artificial Sequence: Synthetic oligonucleotide
  Target: SCNA; (+) strand; PAM type: YTN; PAM sequence: CTA
tagagatgaagttaactccc

SEQ ID NO: 68306 - DNA, 20 bp, Artificial Sequence
  Description of Artificial Sequence: Synthetic oligonucleotide
  Target: SCNA; (+) strand; PAM type: YTN; PAM sequence: TTA
actccctagacaactatcac

SEQ ID NO: 68307 - DNA, 20 bp, Artificial Sequence
  Description of Artificial Sequence: Synthetic oligonucleotide
  Target: SCNA; (+) strand; PAM type: YTN; PAM sequence: CTC
cctagacaactatcacctgt

SEQ ID NO: 68308 - DNA, 20 bp, Artificial Sequence
  Description of Artificial Sequence: Synthetic oligonucleotide
  Target: SCNA; (+) strand; PAM type: YTN; PAM sequence: CTA
gacaactatcacctgtcccc

SEQ ID NO: 68309 - DNA, 20 bp, Artificial Sequence
  Description of Artificial Sequence: Synthetic oligonucleotide
  Target: SCNA; (+) strand; PAM type: YTN; PAM sequence: CTA
tcacctgtccccaatcccca

SEQ ID NO: 68310 - DNA, 20 bp, Artificial Sequence
  Description of Artificial Sequence: Synthetic oligonucleotide
  Target: SCNA; (+) strand; PAM type: YTN; PAM sequence: CTG
tccccaatccccacccctcc

SEQ ID NO: 68311 - DNA, 20 bp, Artificial Sequence
  Description of Artificial Sequence: Synthetic oligonucleotide
  Target: SCNA; (+) strand; PAM type: YTN; PAM sequence: CTC
cacttgacatacaaacccaa

SEQ ID NO: 68312 - DNA, 20 bp, Artificial Sequence
  Description of Artificial Sequence: Synthetic oligonucleotide
  Target: SCNA; (+) strand; PAM type: YTN; PAM sequence: CTT
gacatacaaacccaaagaga

SEQ ID NO: 68313 - DNA, 20 bp, Artificial Sequence
  Description of Artificial Sequence: Synthetic oligonucleotide
  Target: SCNA; (+) strand; PAM type: YTN; PAM sequence: TTG
acatacaaacccaaagagat

SEQ ID NO: 68314 - DNA, 20 bp, Artificial Sequence
  Description of Artificial Sequence: Synthetic oligonucleotide
  Target: SCNA; (+) strand; PAM type: YTN; PAM sequence: TTA
attaacatttgttccaggaa

SEQ ID NO: 68315 - DNA, 20 bp, Artificial Sequence
  Description of Artificial Sequence: Synthetic oligonucleotide
  Target: SCNA; (+) strand; PAM type: YTN; PAM sequence: TTA
acatttgttccaggaagaga

SEQ ID NO: 68316 - DNA, 20 bp, Artificial Sequence
  Description of Artificial Sequence: Synthetic oligonucleotide
  Target: SCNA; (+) strand; PAM type: YTN; PAM sequence: TTT
gttccaggaagagacacaga

SEQ ID NO: 68317 - DNA, 20 bp, Artificial Sequence
  Description of Artificial Sequence: Synthetic oligonucleotide
  Target: SCNA; (+) strand; PAM type: YTN; PAM sequence: TTG
ttccaggaagagacacagac

SEQ ID NO: 68318 - DNA, 20 bp, Artificial Sequence
  Description of Artificial Sequence: Synthetic oligonucleotide
  Target: SCNA; (+) strand; PAM type: YTN; PAM sequence: TTC
caggaagagacacagacaaa

SEQ ID NO: 68319 - DNA, 20 bp, Artificial Sequence
  Description of Artificial Sequence: Synthetic oligonucleotide
  Target: SCNA; (+) strand; PAM type: YTN; PAM sequence: TTG
gaatattccttcgtgaataa

SEQ ID NO: 68320 - DNA, 20 bp, Artificial Sequence
  Description of Artificial Sequence: Synthetic oligonucleotide
  Target: SCNA; (+) strand; PAM type: YTN; PAM sequence: TTC
cttcgtgaataaatataaaa

SEQ ID NO: 68321 - DNA, 20 bp, Artificial Sequence
  Description of Artificial Sequence: Synthetic oligonucleotide
  Target: SCNA; (+) strand; PAM type: YTN; PAM sequence: CTT
cgtgaataaatataaaactt

SEQ ID NO: 68322 - DNA, 20 bp, Artificial Sequence
  Description of Artificial Sequence: Synthetic oligonucleotide
  Target: SCNA; (+) strand; PAM type: YTN; PAM sequence: TTC
gtgaataaatataaaactta

SEQ ID NO: 68323 - DNA, 20 bp, Artificial Sequence
  Description of Artificial Sequence: Synthetic oligonucleotide
  Target: SCNA; (+) strand; PAM type: YTN; PAM sequence: CTT
atggagagggaggaagatat

SEQ ID NO: 68324 - DNA, 20 bp, Artificial Sequence
  Description of Artificial Sequence: Synthetic oligonucleotide
  Target: SCNA; (+) strand; PAM type: YTN; PAM sequence: TTA
tggagagggaggaagatatt

SEQ ID NO: 68325 - DNA, 20 bp, Artificial Sequence
  Description of Artificial Sequence: Synthetic oligonucleotide
  Target: SCNA; (+) strand; PAM type: YTN; PAM sequence: TTT
tgaaaggaaaaaaatcattg

SEQ ID NO: 68326 - DNA, 20 bp, Artificial Sequence
  Description of Artificial Sequence: Synthetic oligonucleotide
  Target: SCNA; (+) strand; PAM type: YTN; PAM sequence: TTT
gaaaggaaaaaaatcattgg

SEQ ID NO: 68327 - DNA, 20 bp, Artificial Sequence
  Description of Artificial Sequence: Synthetic oligonucleotide
  Target: SCNA; (+) strand; PAM type: YTN; PAM sequence: TTG
aaaggaaaaaaatcattgga

SEQ ID NO: 68328 - DNA, 20 bp, Artificial Sequence
  Description of Artificial Sequence: Synthetic oligonucleotide
  Target: SCNA; (+) strand; PAM type: YTN; PAM sequence: TTG
gactttattgctcaaagcca

SEQ ID NO: 68329 - DNA, 20 bp, Artificial Sequence
  Description of Artificial Sequence: Synthetic oligonucleotide
  Target: SCNA; (+) strand; PAM type: YTN; PAM sequence: CTT
tattgctcaaagccaaaaga

SEQ ID NO: 68330 - DNA, 20 bp, Artificial Sequence
  Description of Artificial Sequence: Synthetic oligonucleotide
  Target: SCNA; (+) strand; PAM type: YTN; PAM sequence: TTT
attgctcaaagccaaaagaa

SEQ ID NO: 68331 - DNA, 20 bp, Artificial Sequence
  Description of Artificial Sequence: Synthetic oligonucleotide
  Target: SCNA; (+) strand; PAM type: YTN; PAM sequence: TTA
ttgctcaaagccaaaagaaa

SEQ ID NO: 68332 - DNA, 20 bp, Artificial Sequence
  Description of Artificial Sequence: Synthetic oligonucleotide
  Target: SCNA; (+) strand; PAM type: YTN; PAM sequence: TTG
ctcaaagccaaaagaaattg

SEQ ID NO: 68333 - DNA, 20 bp, Artificial Sequence
  Description of Artificial Sequence: Synthetic oligonucleotide
  Target: SCNA; (+) strand; PAM type: YTN; PAM sequence: CTC
aaagccaaaagaaattgttt

SEQ ID NO: 68334 - DNA, 20 bp, Artificial Sequence
  Description of Artificial Sequence: Synthetic oligonucleotide
  Target: SCNA; (+) strand; PAM type: YTN; PAM sequence: TTG
ttttttgtggcaaaagtaaa

SEQ ID NO: 68335 - DNA, 20 bp, Artificial Sequence
  Description of Artificial Sequence: Synthetic oligonucleotide
  Target: SCNA; (+) strand; PAM type: YTN; PAM sequence: TTT
tttgtggcaaaagtaaaaca

SEQ ID NO: 68336 - DNA, 20 bp, Artificial Sequence
  Description of Artificial Sequence: Synthetic oligonucleotide
  Target: SCNA; (+) strand; PAM type: YTN; PAM sequence: TTT
ttgtggcaaaagtaaaacaa

SEQ ID NO: 68337 - DNA, 20 bp, Artificial Sequence
  Description of Artificial Sequence: Synthetic oligonucleotide
  Target: SCNA; (+) strand; PAM type: YTN; PAM sequence: TTT
tgtggcaaaagtaaaacaag

SEQ ID NO: 68338 - DNA, 20 bp, Artificial Sequence
  Description of Artificial Sequence: Synthetic oligonucleotide
  Target: SCNA; (+) strand; PAM type: YTN; PAM sequence: TTT
gtggcaaaagtaaaacaagg

SEQ ID NO: 68339 - DNA, 20 bp, Artificial Sequence
  Description of Artificial Sequence: Synthetic oligonucleotide
  Target: SCNA; (+) strand; PAM type: YTN; PAM sequence: TTG
tggcaaaagtaaaacaaggt

SEQ ID NO: 68340 - DNA, 20 bp, Artificial Sequence
  Description of Artificial Sequence: Synthetic oligonucleotide
  Target: SCNA; (+) strand; PAM type: YTN; PAM sequence: TTT
tgtactgtgtgctgtatttc

SEQ ID NO: 68341 - DNA, 20 bp, Artificial Sequence
  Description of Artificial Sequence: Synthetic oligonucleotide
  Target: SCNA; (+) strand; PAM type: YTN; PAM sequence: TTT
gtactgtgtgctgtatttct

SEQ ID NO: 68342 - DNA, 20 bp, Artificial Sequence
  Description of Artificial Sequence: Synthetic oligonucleotide
  Target: SCNA; (+) strand; PAM type: YTN; PAM sequence: TTG
tactgtgtgctgtatttctg

SEQ ID NO: 68343 - DNA, 20 bp, Artificial Sequence
  Description of Artificial Sequence: Synthetic oligonucleotide
  Target: SCNA; (+) strand; PAM type: YTN; PAM sequence: CTG
tgtgctgtatttctggcaat

SEQ ID NO: 68344 - DNA, 20 bp, Artificial Sequence
  Description of Artificial Sequence: Synthetic oligonucleotide
  Target: SCNA; (+) strand; PAM type: YTN; PAM sequence: CTG
tatttctggcaattatctgt

SEQ ID NO: 68345 - DNA, 20 bp, Artificial Sequence
  Description of Artificial Sequence: Synthetic oligonucleotide
  Target: SCNA; (+) strand; PAM type: YTN; PAM sequence: TTT
ctggcaattatctgttatct

SEQ ID NO: 68346 - DNA, 20 bp, Artificial Sequence
  Description of Artificial Sequence: Synthetic oligonucleotide
  Target: SCNA; (+) strand; PAM type: YTN; PAM sequence: TTC
tggcaattatctgttatctt

SEQ ID NO: 68347 - DNA, 20 bp, Artificial Sequence
  Description of Artificial Sequence: Synthetic oligonucleotide
  Target: SCNA; (+) strand; PAM type: YTN; PAM sequence: CTG
gcaattatctgttatcttaa

SEQ ID NO: 68348 - DNA, 20 bp, Artificial Sequence
  Description of Artificial Sequence: Synthetic oligonucleotide
  Target: SCNA; (+) strand; PAM type: YTN; PAM sequence: TTA
tctgttatcttaagaggctt

SEQ ID NO: 68349 - DNA, 20 bp, Artificial Sequence
  Description of Artificial Sequence: Synthetic oligonucleotide
  Target: SCNA; (+) strand; PAM type: YTN; PAM sequence: CTG
ttatcttaagaggcttatat

SEQ ID NO: 68350 - DNA, 20 bp, Artificial Sequence
  Description of Artificial Sequence: Synthetic oligonucleotide
  Target: SCNA; (+) strand; PAM type: YTN; PAM sequence: TTA
tcttaagaggcttatataga

SEQ ID NO: 68351 - DNA, 20 bp, Artificial Sequence
  Description of Artificial Sequence: Synthetic oligonucleotide
  Target: SCNA; (+) strand; PAM type: YTN; PAM sequence: CTT
aagaggcttatatagaaaga

SEQ ID NO: 68352 - DNA, 20 bp, Artificial Sequence
  Description of Artificial Sequence: Synthetic oligonucleotide
  Target: SCNA; (+) strand; PAM type: YTN; PAM sequence: TTA
agaggcttatatagaaagaa

SEQ ID NO: 68353 - DNA, 20 bp, Artificial Sequence
  Description of Artificial Sequence: Synthetic oligonucleotide
  Target: SCNA; (+) strand; PAM type: YTN; PAM sequence: CTT
atatagaaagaacaattgta

SEQ ID NO: 68354 - DNA, 20 bp, Artificial Sequence
  Description of Artificial Sequence: Synthetic oligonucleotide
  Target: SCNA; (+) strand; PAM type: YTN; PAM sequence: TTA
tatagaaagaacaattgtac

SEQ ID NO: 68355 - DNA, 20 bp, Artificial Sequence
  Description of Artificial Sequence: Synthetic oligonucleotide
  Target: SCNA; (+) strand; PAM type: YTN; PAM sequence: TTG
tacctactttcacagcatgc

SEQ ID NO: 68356 - DNA, 20 bp, Artificial Sequence
  Description of Artificial Sequence: Synthetic oligonucleotide
  Target: SCNA; (+) strand; PAM type: YTN; PAM sequence: CTA
ctttcacagcatgctctgag

SEQ ID NO: 68357 - DNA, 20 bp, Artificial Sequence
  Description of Artificial Sequence: Synthetic oligonucleotide
  Target: SCNA; (+) strand; PAM type: YTN; PAM sequence: CTT
tcacagcatgctctgaggat

SEQ ID NO: 68358 - DNA, 20 bp, Artificial Sequence
  Description of Artificial Sequence: Synthetic oligonucleotide
  Target: SCNA; (+) strand; PAM type: YTN; PAM sequence: TTT
cacagcatgctctgaggatc

SEQ ID NO: 68359 - DNA, 20 bp, Artificial Sequence
  Description of Artificial Sequence: Synthetic oligonucleotide
  Target: SCNA; (+) strand; PAM type: YTN; PAM sequence: TTC
acagcatgctctgaggatct

SEQ ID NO: 68360 - DNA, 20 bp, Artificial Sequence
  Description of Artificial Sequence: Synthetic oligonucleotide
  Target: SCNA; (+) strand; PAM type: YTN; PAM sequence: CTC
tgaggatctaaggaccctca

SEQ ID NO: 68361 - DNA, 20 bp, Artificial Sequence
  Description of Artificial Sequence: Synthetic oligonucleotide
  Target: SCNA; (+) strand; PAM type: YTN; PAM sequence: CTG
aggatctaaggaccctcaac

SEQ ID NO: 68362 - DNA, 20 bp, Artificial Sequence
  Description of Artificial Sequence: Synthetic oligonucleotide
  Target: SCNA; (+) strand; PAM type: YTN; PAM sequence: CTA
aggaccctcaacaaatagtt

SEQ ID NO: 68363 - DNA, 20 bp, Artificial Sequence
  Description of Artificial Sequence: Synthetic oligonucleotide
  Target: SCNA; (+) strand; PAM type: YTN; PAM sequence: CTC
aacaaatagttttcatgcta

SEQ ID NO: 68364 - DNA, 20 bp, Artificial Sequence
  Description of Artificial Sequence: Synthetic oligonucleotide
  Target: SCNA; (+) strand; PAM type: YTN; PAM sequence: TTT
tcatgctacaagcaggcact

SEQ ID NO: 68365 - DNA, 20 bp, Artificial Sequence
  Description of Artificial Sequence: Synthetic oligonucleotide
  Target: SCNA; (+) strand; PAM type: YTN; PAM sequence: TTT
catgctacaagcaggcactt

SEQ ID NO: 68366 - DNA, 20 bp, Artificial Sequence
  Description of Artificial Sequence: Synthetic oligonucleotide
  Target: SCNA; (+) strand; PAM type: YTN; PAM sequence: TTC
atgctacaagcaggcactta

SEQ ID NO: 68367 - DNA, 20 bp, Artificial Sequence
  Description of Artificial Sequence: Synthetic oligonucleotide
  Target: SCNA; (+) strand; PAM type: YTN; PAM sequence: CTA
caagcaggcacttatttagg

SEQ ID NO: 68368 - DNA, 20 bp, Artificial Sequence
  Description of Artificial Sequence: Synthetic oligonucleotide
  Target: SCNA; (+) strand; PAM type: YTN; PAM sequence: CTT
atttaggcacaaataggatg

SEQ ID NO: 68369 - DNA, 20 bp, Artificial Sequence
  Description of Artificial Sequence: Synthetic oligonucleotide
  Target: SCNA; (+) strand; PAM type: YTN; PAM sequence: TTA
tttaggcacaaataggatgg

SEQ ID NO: 68370 - DNA, 20 bp, Artificial Sequence
  Description of Artificial Sequence: Synthetic oligonucleotide
  Target: SCNA; (+) strand; PAM type: YTN; PAM sequence: TTT
aggcacaaataggatgggat

SEQ ID NO: 68371 - DNA, 20 bp, Artificial Sequence
  Description of Artificial Sequence: Synthetic oligonucleotide
  Target: SCNA; (+) strand; PAM type: YTN; PAM sequence: TTA
ggcacaaataggatgggatt

SEQ ID NO: 68372 - DNA, 20 bp, Artificial Sequence
  Description of Artificial Sequence: Synthetic oligonucleotide
  Target: SCNA; (+) strand; PAM type: YTN; PAM sequence: TTC
tttttttaactgtagtataa

SEQ ID NO: 68373 - DNA, 20 bp, Artificial Sequence
  Description of Artificial Sequence: Synthetic oligonucleotide
  Target: SCNA; (+) strand; PAM type: YTN; PAM sequence: CTT
tttttaactgtagtataaat

SEQ ID NO: 68374 - DNA, 20 bp, Artificial Sequence
  Description of Artificial Sequence: Synthetic oligonucleotide
  Target: SCNA; (+) strand; PAM type: YTN; PAM sequence: TTT
ttttaactgtagtataaata

SEQ ID NO: 68375 - DNA, 20 bp, Artificial Sequence
  Description of Artificial Sequence: Synthetic oligonucleotide
  Target: SCNA; (+) strand; PAM type: YTN; PAM sequence: TTT
tttaactgtagtataaataa

SEQ ID NO: 68376 - DNA, 20 bp, Artificial Sequence
  Description of Artificial Sequence: Synthetic oligonucleotide
  Target: SCNA; (+) strand; PAM type: YTN; PAM sequence: TTT
ttaactgtagtataaataat

SEQ ID NO: 68377 - DNA, 20 bp, Artificial Sequence
  Description of Artificial Sequence: Synthetic oligonucleotide
  Target: SCNA; (+) strand; PAM type: YTN; PAM sequence: TTT
taactgtagtataaataatt

SEQ ID NO: 68378 - DNA, 20 bp, Artificial Sequence
  Description of Artificial Sequence: Synthetic oligonucleotide
  Target: SCNA; (+) strand; PAM type: YTN; PAM sequence: TTT
aactgtagtataaataattt

SEQ ID NO: 68379 - DNA, 20 bp, Artificial Sequence
  Description of Artificial Sequence: Synthetic oligonucleotide
  Target: SCNA; (+) strand; PAM type: YTN; PAM sequence: TTA
actgtagtataaataatttt

SEQ ID NO: 68380 - DNA, 20 bp, Artificial Sequence
  Description of Artificial Sequence: Synthetic oligonucleotide
  Target: SCNA; (+) strand; PAM type: YTN; PAM sequence: CTG
tagtataaataattttatat

SEQ ID NO: 68381 - DNA, 20 bp, Artificial Sequence
  Description of Artificial Sequence: Synthetic oligonucleotide
  Target: SCNA; (+) strand; PAM type: YTN; PAM sequence: TTT
tatataatacagttatatag

SEQ ID NO: 68382 - DNA, 20 bp, Artificial Sequence
  Description of Artificial Sequence: Synthetic oligonucleotide
  Target: SCNA; (+) strand; PAM type: YTN; PAM sequence: TTT
atataatacagttatatagg

SEQ ID NO: 68383 - DNA, 20 bp, Artificial Sequence
  Description of Artificial Sequence: Synthetic oligonucleotide
  Target: SCNA; (+) strand; PAM type: YTN; PAM sequence: TTA
tataatacagttatataggc

SEQ ID NO: 68384 - DNA, 20 bp, Artificial Sequence
  Description of Artificial Sequence: Synthetic oligonucleotide
  Target: SCNA; (+) strand; PAM type: YTN; PAM sequence: TTA
tataggcttttttaaacaaa

SEQ ID NO: 68385 - DNA, 20 bp, Artificial Sequence
  Description of Artificial Sequence: Synthetic oligonucleotide
  Target: SCNA; (+) strand; PAM type: YTN; PAM sequence: CTT
ttttaaacaaaatacagtca

SEQ ID NO: 68386 - DNA, 20 bp, Artificial Sequence
  Description of Artificial Sequence: Synthetic oligonucleotide
  Target: SCNA; (+) strand; PAM type: YTN; PAM sequence: TTT
tttaaacaaaatacagtcag

SEQ ID NO: 68387 - DNA, 20 bp, Artificial Sequence
  Description of Artificial Sequence: Synthetic oligonucleotide
  Target: SCNA; (+) strand; PAM type: YTN; PAM sequence: TTT
ttaaacaaaatacagtcaga

SEQ ID NO: 68388 - DNA, 20 bp, Artificial Sequence
  Description of Artificial Sequence: Synthetic oligonucleotide
  Target: SCNA; (+) strand; PAM type: YTN; PAM sequence: TTT
taaacaaaatacagtcagat

SEQ ID NO: 68389 - DNA, 20 bp, Artificial Sequence
  Description of Artificial Sequence: Synthetic oligonucleotide
  Target: SCNA; (+) strand; PAM type: YTN; PAM sequence: TTT
aaacaaaatacagtcagatt

SEQ ID NO: 68390 - DNA, 20 bp, Artificial Sequence
  Description of Artificial Sequence: Synthetic oligonucleotide
  Target: SCNA; (+) strand; PAM type: YTN; PAM sequence: TTA
aacaaaatacagtcagattt

SEQ ID NO: 68391 - DNA, 20 bp, Artificial Sequence
  Description of Artificial Sequence: Synthetic oligonucleotide
  Target: SCNA; (+) strand; PAM type: YTN; PAM sequence: TTT
taaatctctctattctaaga

SEQ ID NO: 68392 - DNA, 20 bp, Artificial Sequence
  Description of Artificial Sequence: Synthetic oligonucleotide
  Target: SCNA; (+) strand; PAM type: YTN; PAM sequence: TTT
aaatctctctattctaagat

SEQ ID NO: 68393 - DNA, 20 bp, Artificial Sequence
  Description of Artificial Sequence: Synthetic oligonucleotide
  Target: SCNA; (+) strand; PAM type: YTN; PAM sequence: TTA
aatctctctattctaagata

SEQ ID NO: 68394 - DNA, 20 bp, Artificial Sequence
  Description of Artificial Sequence: Synthetic oligonucleotide
  Target: SCNA; (+) strand; PAM type: YTN; PAM sequence: CTC
tctattctaagatagacact

SEQ ID NO: 68395 - DNA, 20 bp, Artificial Sequence
  Description of Artificial Sequence: Synthetic oligonucleotide
  Target: SCNA; (+) strand; PAM type: YTN; PAM sequence: CTC
tattctaagatagacacttc

SEQ ID NO: 68396 - DNA, 20 bp, Artificial Sequence
  Description of Artificial Sequence: Synthetic oligonucleotide
  Target: SCNA; (+) strand; PAM type: YTN; PAM sequence: CTA
ttctaagatagacacttcac

SEQ ID NO: 68397 - DNA, 20 bp, Artificial Sequence
  Description of Artificial Sequence: Synthetic oligonucleotide
  Target: SCNA; (+) strand; PAM type: YTN; PAM sequence: TTC
taagatagacacttcacaat

SEQ ID NO: 68398 - DNA, 20 bp, Artificial Sequence
  Description of Artificial Sequence: Synthetic oligonucleotide
  Target: SCNA; (+) strand; PAM type: YTN; PAM sequence: CTA
agatagacacttcacaattt

SEQ ID NO: 68399 - DNA, 20 bp, Artificial Sequence
  Description of Artificial Sequence: Synthetic oligonucleotide
  Target: SCNA; (+) strand; PAM type: YTN; PAM sequence: CTT
cacaatttaaattcaagact

SEQ ID NO: 68400 - DNA, 20 bp, Artificial Sequence
  Description of Artificial Sequence: Synthetic oligonucleotide
  Target: SCNA; (+) strand; PAM type: YTN; PAM sequence: TTC
acaatttaaattcaagactc

SEQ ID NO: 68401 - DNA, 20 bp, Artificial Sequence
  Description of Artificial Sequence: Synthetic oligonucleotide
  Target: SCNA; (+) strand; PAM type: YTN; PAM sequence: TTT
aaattcaagactccttgttt

SEQ ID NO: 68402 - DNA, 20 bp, Artificial Sequence
  Description of Artificial Sequence: Synthetic oligonucleotide
  Target: SCNA; (+) strand; PAM type: YTN; PAM sequence: TTA
aattcaagactccttgtttc

SEQ ID NO: 68403 - DNA, 20 bp, Artificial Sequence
  Description of Artificial Sequence: Synthetic oligonucleotide
  Target: SCNA; (+) strand; PAM type: YTN; PAM sequence: TTC
aagactccttgtttcttgaa

SEQ ID NO: 68404 - DNA, 20 bp, Artificial Sequence
  Description of Artificial Sequence: Synthetic oligonucleotide
  Target: SCNA; (+) strand; PAM type: YTN; PAM sequence: CTC
cttgtttcttgaagacatct

SEQ ID NO: 68405 - DNA, 20 bp, Artificial Sequence
  Description of Artificial Sequence: Synthetic oligonucleotide
  Target: SCNA; (+) strand; PAM type: YTN; PAM sequence: CTT
gtttcttgaagacatctatg

SEQ ID NO: 68406 - DNA, 20 bp, Artificial Sequence
  Description of Artificial Sequence: Synthetic oligonucleotide
  Target: SCNA; (+) strand; PAM type: YTN; PAM sequence: TTG
tttcttgaagacatctatga

SEQ ID NO: 68407 - DNA, 20 bp, Artificial Sequence
  Description of Artificial Sequence: Synthetic oligonucleotide
  Target: SCNA; (+) strand; PAM type: YTN; PAM sequence: TTT
cttgaagacatctatgaaag

SEQ ID NO: 68408 - DNA, 20 bp, Artificial Sequence
  Description of Artificial Sequence: Synthetic oligonucleotide
  Target: SCNA; (+) strand; PAM type: YTN; PAM sequence: TTC
ttgaagacatctatgaaagc

SEQ ID NO: 68409 - DNA, 20 bp, Artificial Sequence
  Description of Artificial Sequence: Synthetic oligonucleotide
  Target: SCNA; (+) strand; PAM type: YTN; PAM sequence: CTT
gaagacatctatgaaagcaa

SEQ ID NO: 68410 - DNA, 20 bp, Artificial Sequence
  Description of Artificial Sequence: Synthetic oligonucleotide
  Target: SCNA; (+) strand; PAM type: YTN; PAM sequence: TTG
aagacatctatgaaagcaaa

SEQ ID NO: 68411 - DNA, 20 bp, Artificial Sequence
  Description of Artificial Sequence: Synthetic oligonucleotide
  Target: SCNA; (+) strand; PAM type: YTN; PAM sequence: CTA
tgaaagcaaatgtttttgag

SEQ ID NO: 68412 - DNA, 20 bp, Artificial Sequence
  Description of Artificial Sequence: Synthetic oligonucleotide
  Target: SCNA; (+) strand; PAM type: YTN; PAM sequence: TTT
ttgagaacttggctgaatct

SEQ ID NO: 68413 - DNA, 20 bp, Artificial Sequence
  Description of Artificial Sequence: Synthetic oligonucleotide
  Target: SCNA; (+) strand; PAM type: YTN; PAM sequence: TTT
tgagaacttggctgaatctg

SEQ ID NO: 68414 - DNA, 20 bp, Artificial Sequence
  Description of Artificial Sequence: Synthetic oligonucleotide
  Target: SCNA; (+) strand; PAM type: YTN; PAM sequence: TTT
gagaacttggctgaatctga

SEQ ID NO: 68415 - DNA, 20 bp, Artificial Sequence
  Description of Artificial Sequence: Synthetic oligonucleotide
  Target: SCNA; (+) strand; PAM type: YTN; PAM sequence: TTG
agaacttggctgaatctgag

SEQ ID NO: 68416 - DNA, 20 bp, Artificial Sequence
  Description of Artificial Sequence: Synthetic oligonucleotide
  Target: SCNA; (+) strand; PAM type: YTN; PAM sequence: CTT
ggctgaatctgagtccattc

SEQ ID NO: 68417 - DNA, 20 bp, Artificial Sequence
  Description of Artificial Sequence: Synthetic oligonucleotide
  Target: SCNA; (+) strand; PAM type: YTN; PAM sequence: TTG
gctgaatctgagtccattcc

SEQ ID NO: 68418 - DNA, 20 bp, Artificial Sequence
  Description of Artificial Sequence: Synthetic oligonucleotide
  Target: SCNA; (+) strand; PAM type: YTN; PAM sequence: CTG
aatctgagtccattccgatt

SEQ ID NO: 68419 - DNA, 20 bp, Artificial Sequence
  Description of Artificial Sequence: Synthetic oligonucleotide
  Target: SCNA; (+) strand; PAM type: YTN; PAM sequence: CTG
agtccattccgattagcaga

SEQ ID NO: 68420 - DNA, 20 bp, Artificial Sequence
  Description of Artificial Sequence: Synthetic oligonucleotide
  Target: SCNA; (+) strand; PAM type: YTN; PAM sequence: TTC
cgattagcagattccacatt

SEQ ID NO: 68421 - DNA, 20 bp, Artificial Sequence
  Description of Artificial Sequence: Synthetic oligonucleotide
  Target: SCNA; (+) strand; PAM type: YTN; PAM sequence: TTA
gcagattccacattcacttt

SEQ ID NO: 68422 - DNA, 20 bp, Artificial Sequence
  Description of Artificial Sequence: Synthetic oligonucleotide
  Target: SCNA; (+) strand; PAM type: YTN; PAM sequence: TTC
cacattcacttttgagccat

SEQ ID NO: 68423 - DNA, 20 bp, Artificial Sequence
  Description of Artificial Sequence: Synthetic oligonucleotide
  Target: SCNA; (+) strand; PAM type: YTN; PAM sequence: TTC
acttttgagccatgacttag

SEQ ID NO: 68424 - DNA, 20 bp, Artificial Sequence
  Description of Artificial Sequence: Synthetic oligonucleotide
  Target: SCNA; (+) strand; PAM type: YTN; PAM sequence: CTT
ttgagccatgacttagaagc

SEQ ID NO: 68425 - DNA, 20 bp, Artificial Sequence
  Description of Artificial Sequence: Synthetic oligonucleotide
  Target: SCNA; (+) strand; PAM type: YTN; PAM sequence: TTT
tgagccatgacttagaagct

SEQ ID NO: 68426 - DNA, 20 bp, Artificial Sequence
  Description of Artificial Sequence: Synthetic oligonucleotide
  Target: SCNA; (+) strand; PAM type: YTN; PAM sequence: TTT
gagccatgacttagaagcta

SEQ ID NO: 68427 - DNA, 20 bp, Artificial Sequence
  Description of Artificial Sequence: Synthetic oligonucleotide
  Target: SCNA; (+) strand; PAM type: YTN; PAM sequence: TTG
agccatgacttagaagctat

SEQ ID NO: 68428 - DNA, 20 bp, Artificial Sequence
  Description of Artificial Sequence: Synthetic oligonucleotide
  Target: SCNA; (+) strand; PAM type: YTN; PAM sequence: CTT
agaagctatcaagacattat

SEQ ID NO: 68429 - DNA, 20 bp, Artificial Sequence
  Description of Artificial Sequence: Synthetic oligonucleotide
  Target: SCNA; (+) strand; PAM type: YTN; PAM sequence: TTA
gaagctatcaagacattatg

SEQ ID NO: 68430 - DNA, 20 bp, Artificial Sequence
  Description of Artificial Sequence: Synthetic oligonucleotide
  Target: SCNA; (+) strand; PAM type: YTN; PAM sequence: CTA
tcaagacattatgtagcaac

SEQ ID NO: 68431 - DNA, 20 bp, Artificial Sequence
  Description of Artificial Sequence: Synthetic oligonucleotide
  Target: SCNA; (+) strand; PAM type: YTN; PAM sequence: TTA
tgtagcaacctttttctcag

SEQ ID NO: 68432 - DNA, 20 bp, Artificial Sequence
  Description of Artificial Sequence: Synthetic oligonucleotide
  Target: SCNA; (+) strand; PAM type: YTN; PAM sequence: CTT
tttctcagtattccaggaaa

SEQ ID NO: 68433 - DNA, 20 bp, Artificial Sequence
  Description of Artificial Sequence: Synthetic oligonucleotide
  Target: SCNA; (+) strand; PAM type: YTN; PAM sequence: TTT
ttctcagtattccaggaaaa

SEQ ID NO: 68434 - DNA, 20 bp, Artificial Sequence
  Description of Artificial Sequence: Synthetic oligonucleotide
  Target: SCNA; (+) strand; PAM type: YTN; PAM sequence: TTT
tctcagtattccaggaaaat

SEQ ID NO: 68435 - DNA, 20 bp, Artificial Sequence
  Description of Artificial Sequence: Synthetic oligonucleotide
  Target: SCNA; (+) strand; PAM type: YTN; PAM sequence: TTT
ctcagtattccaggaaaata

SEQ ID NO: 68436 - DNA, 20 bp, Artificial Sequence
  Description of Artificial Sequence: Synthetic oligonucleotide
  Target: SCNA; (+) strand; PAM type: YTN; PAM sequence: TTC
tcagtattccaggaaaataa

SEQ ID NO: 68437 - DNA, 20 bp, Artificial Sequence
  Description of Artificial Sequence: Synthetic oligonucleotide
  Target: SCNA; (+) strand; PAM type: YTN; PAM sequence: CTC
agtattccaggaaaataaaa

SEQ ID NO: 68438 - DNA, 20 bp, Artificial Sequence
  Description of Artificial Sequence: Synthetic oligonucleotide
  Target: SCNA; (+) strand; PAM type: YTN; PAM sequence: TTC
caggaaaataaaaatgtgca

SEQ ID NO: 68439 - DNA, 20 bp, Artificial Sequence
  Description of Artificial Sequence: Synthetic oligonucleotide
  Target: SCNA; (+) strand; PAM type: YTN; PAM sequence: TTA
actcaataggtattcagatg

SEQ ID NO: 68440 - DNA, 20 bp, Artificial Sequence
  Description of Artificial Sequence: Synthetic oligonucleotide
  Target: SCNA; (+) strand; PAM type: YTN; PAM sequence: CTC
aataggtattcagatgtttc

SEQ ID NO: 68441 - DNA, 20 bp, Artificial Sequence
  Description of Artificial Sequence: Synthetic oligonucleotide
  Target: SCNA; (+) strand; PAM type: YTN; PAM sequence: TTC
agatgtttcccattagtaag

SEQ ID NO: 68442 - DNA, 20 bp, Artificial Sequence
  Description of Artificial Sequence: Synthetic oligonucleotide
  Target: SCNA; (+) strand; PAM type: YTN; PAM sequence: TTT
cccattagtaagttgtgacc

SEQ ID NO: 68443 - DNA, 20 bp, Artificial Sequence
  Description of Artificial Sequence: Synthetic oligonucleotide
  Target: SCNA; (+) strand; PAM type: YTN; PAM sequence: TTC
ccattagtaagttgtgacca

SEQ ID NO: 68444 - DNA, 20 bp, Artificial Sequence
  Description of Artificial Sequence: Synthetic oligonucleotide
  Target: SCNA; (+) strand; PAM type: YTN; PAM sequence: TTA
gtaagttgtgaccatgcaat

SEQ ID NO: 68445 - DNA, 20 bp, Artificial Sequence
  Description of Artificial Sequence: Synthetic oligonucleotide
  Target: SCNA; (+) strand; PAM type: YTN; PAM sequence: TTG
tgaccatgcaataaaaacca

SEQ ID NO: 68446 - DNA, 20 bp, Artificial Sequence
  Description of Artificial Sequence: Synthetic oligonucleotide
  Target: SCNA; (+) strand; PAM type: YTN; PAM sequence: CTC
accaatattccccaataaac

SEQ ID NO: 68447 - DNA, 20 bp, Artificial Sequence
  Description of Artificial Sequence: Synthetic oligonucleotide
  Target: SCNA; (+) strand; PAM type: YTN; PAM sequence: TTC
cccaataaacttcaagattt

SEQ ID NO: 68448 - DNA, 20 bp, Artificial Sequence
  Description of Artificial Sequence: Synthetic oligonucleotide
  Target: SCNA; (+) strand; PAM type: YTN; PAM sequence: CTT
caagatttgtaagctcatgc

SEQ ID NO: 68449 - DNA, 20 bp, Artificial Sequence
  Description of Artificial Sequence: Synthetic oligonucleotide
  Target: SCNA; (+) strand; PAM type: YTN; PAM sequence: TTC
aagatttgtaagctcatgca

SEQ ID NO: 68450 - DNA, 20 bp, Artificial Sequence
  Description of Artificial Sequence: Synthetic oligonucleotide
  Target: SCNA; (+) strand; PAM type: YTN; PAM sequence: TTT
gtaagctcatgcatacccac

SEQ ID NO: 68451 - DNA, 20 bp, Artificial Sequence
  Description of Artificial Sequence: Synthetic oligonucleotide
  Target: SCNA; (+) strand; PAM type: YTN; PAM sequence: TTG
taagctcatgcatacccaca

SEQ ID NO: 68452 - DNA, 20 bp, Artificial Sequence
  Description of Artificial Sequence: Synthetic oligonucleotide
  Target: SCNA; (+) strand; PAM type: YTN; PAM sequence: CTC
atgcatacccacatttatgt

SEQ ID NO: 68453 - DNA, 20 bp, Artificial Sequence
  Description of Artificial Sequence: Synthetic oligonucleotide
  Target: SCNA; (+) strand; PAM type: YTN; PAM sequence: TTT
atgttaaaatttgaaataat

SEQ ID NO: 68454 - DNA, 20 bp, Artificial Sequence
  Description of Artificial Sequence: Synthetic oligonucleotide
  Target: SCNA; (+) strand; PAM type: YTN; PAM sequence: TTA
tgttaaaatttgaaataatg

SEQ ID NO: 68455 - DNA, 20 bp, Artificial Sequence
  Description of Artificial Sequence: Synthetic oligonucleotide
  Target: SCNA; (+) strand; PAM type: YTN; PAM sequence: TTA
aaatttgaaataatgaaata

SEQ ID NO: 68456 - DNA, 20 bp, Artificial Sequence
  Description of Artificial Sequence: Synthetic oligonucleotide
  Target: SCNA; (+) strand; PAM type: YTN; PAM sequence: TTT
gaaataatgaaatatttttg

SEQ ID NO: 68457 - DNA, 20 bp, Artificial Sequence
  Description of Artificial Sequence: Synthetic oligonucleotide
  Target: SCNA; (+) strand; PAM type: YTN; PAM sequence: TTG
aaataatgaaatatttttgc

SEQ ID NO: 68458 - DNA, 20 bp, Artificial Sequence
  Description of Artificial Sequence: Synthetic oligonucleotide
  Target: SCNA; (+) strand; PAM type: YTN; PAM sequence: TTT
ttgcattgtgaaaaatagat

SEQ ID NO: 68459 - DNA, 20 bp, Artificial Sequence
  Description of Artificial Sequence: Synthetic oligonucleotide
  Target: SCNA; (+) strand; PAM type: YTN; PAM sequence: TTT
tgcattgtgaaaaatagata

SEQ ID NO: 68460 - DNA, 20 bp, Artificial Sequence
  Description of Artificial Sequence: Synthetic oligonucleotide
  Target: SCNA; (+) strand; PAM type: YTN; PAM sequence: TTT
gcattgtgaaaaatagatat

SEQ ID NO: 68461 - DNA, 20 bp, Artificial Sequence
  Description of Artificial Sequence: Synthetic oligonucleotide
  Target: SCNA; (+) strand; PAM type: YTN; PAM sequence: TTG
cattgtgaaaaatagatata

SEQ ID NO: 68462 - DNA, 20 bp, Artificial Sequence
  Description of Artificial Sequence: Synthetic oligonucleotide
  Target: SCNA; (+) strand; PAM type: YTN; PAM sequence: TTG
tgaaaaatagatatatatgc

SEQ ID NO: 68463 - DNA, 20 bp, Artificial Sequence
  Description of Artificial Sequence: Synthetic oligonucleotide
  Target: SCNA; (+) strand; PAM type: YTN; PAM sequence: TTT
tgtgaccaaaaccatcacca

SEQ ID NO: 68464 - DNA, 20 bp, Artificial Sequence
  Description of Artificial Sequence: Synthetic oligonucleotide
  Target: SCNA; (+) strand; PAM type: YTN; PAM sequence: TTT
gtgaccaaaaccatcaccac

SEQ ID NO: 68465 - DNA, 20 bp, Artificial Sequence
  Description of Artificial Sequence: Synthetic oligonucleotide
  Target: SCNA; (+) strand; PAM type: YTN; PAM sequence: TTG
tgaccaaaaccatcaccaca

SEQ ID NO: 68466 - DNA, 20 bp, Artificial Sequence
  Description of Artificial Sequence: Synthetic oligonucleotide
  Target: SCNA; (+) strand; PAM type: YTN; PAM sequence: TTC
cattgctgttgttgttcttc

SEQ ID NO: 68467 - DNA, 20 bp, Artificial Sequence
  Description of Artificial Sequence: Synthetic oligonucleotide
  Target: SCNA; (+) strand; PAM type: YTN; PAM sequence: TTG
ctgttgttgttcttcttctt

SEQ ID NO: 68468 - DNA, 20 bp, Artificial Sequence
  Description of Artificial Sequence: Synthetic oligonucleotide
  Target: SCNA; (+) strand; PAM type: YTN; PAM sequence: CTG
ttgttgttcttcttcttatt

SEQ ID NO: 68469 - DNA, 20 bp, Artificial Sequence
  Description of Artificial Sequence: Synthetic oligonucleotide
  Target: SCNA; (+) strand; PAM type: YTN; PAM sequence: TTG
ttgttcttcttcttattatt

SEQ ID NO: 68470 - DNA, 20 bp, Artificial Sequence
  Description of Artificial Sequence: Synthetic oligonucleotide
  Target: SCNA; (+) strand; PAM type: YTN; PAM sequence: TTG
ttcttcttcttattattatt

SEQ ID NO: 68471 - DNA, 20 bp, Artificial Sequence
  Description of Artificial Sequence: Synthetic oligonucleotide
  Target: SCNA; (+) strand; PAM type: YTN; PAM sequence: TTC
ttcttcttattattattatt

SEQ ID NO: 68472 - DNA, 20 bp, Artificial Sequence
  Description of Artificial Sequence: Synthetic oligonucleotide
  Target: SCNA; (+) strand; PAM type: YTN; PAM sequence: CTT
cttcttattattattattat

SEQ ID NO: 68473 - DNA, 20 bp, Artificial Sequence
  Description of Artificial Sequence: Synthetic oligonucleotide
  Target: SCNA; (+) strand; PAM type: YTN; PAM sequence: TTC
ttcttattattattattatt

SEQ ID NO: 68474 - DNA, 20 bp, Artificial Sequence
  Description of Artificial Sequence: Synthetic oligonucleotide
  Target: SCNA; (+) strand; PAM type: YTN; PAM sequence: CTT
cttattattattattattat

SEQ ID NO: 68475 - DNA, 20 bp, Artificial Sequence
  Description of Artificial Sequence: Synthetic oligonucleotide
  Target: SCNA; (+) strand; PAM type: YTN; PAM sequence: TTC
ttattattattattattatt

SEQ ID NO: 68476 - DNA, 20 bp, Artificial Sequence
  Description of Artificial Sequence: Synthetic oligonucleotide
  Target: SCNA; (+) strand; PAM type: YTN; PAM sequence: CTT
attattattattattatttt

SEQ ID NO: 68477 - DNA, 20 bp, Artificial Sequence
  Description of Artificial Sequence: Synthetic oligonucleotide
  Target: SCNA; (+) strand; PAM type: YTN; PAM sequence: TTA
ttattattattattattttt

SEQ ID NO: 68478 - DNA, 20 bp, Artificial Sequence
  Description of Artificial Sequence: Synthetic oligonucleotide
  Target: SCNA; (+) strand; PAM type: YTN; PAM sequence: TTA
ttattattattatttttggt

SEQ ID NO: 68479 - DNA, 20 bp, Artificial Sequence
  Description of Artificial Sequence: Synthetic oligonucleotide
  Target: SCNA; (+) strand; PAM type: YTN; PAM sequence: TTA
ttattattatttttggtttg

SEQ ID NO: 68480 - DNA, 20 bp, Artificial Sequence
  Description of Artificial Sequence: Synthetic oligonucleotide
  Target: SCNA; (+) strand; PAM type: YTN; PAM sequence: TTA
ttattatttttggtttgttt

SEQ ID NO: 68481 - DNA, 20 bp, Artificial Sequence
  Description of Artificial Sequence: Synthetic oligonucleotide
  Target: SCNA; (+) strand; PAM type: YTN; PAM sequence: TTA
ttatttttggtttgtttgta

SEQ ID NO: 68482 - DNA, 20 bp, Artificial Sequence
  Description of Artificial Sequence: Synthetic oligonucleotide
  Target: SCNA; (+) strand; PAM type: YTN; PAM sequence: TTA
tttttggtttgtttgtatct

SEQ ID NO: 68483 - DNA, 20 bp, Artificial Sequence
  Description of Artificial Sequence: Synthetic oligonucleotide
  Target: SCNA; (+) strand; PAM type: YTN; PAM sequence: TTT
ttggtttgtttgtatctggc

SEQ ID NO: 68484 - DNA, 20 bp, Artificial Sequence
  Description of Artificial Sequence: Synthetic oligonucleotide
  Target: SCNA; (+) strand; PAM type: YTN; PAM sequence: TTT
tggtttgtttgtatctggca

SEQ ID NO: 68485 - DNA, 20 bp, Artificial Sequence
  Description of Artificial Sequence: Synthetic oligonucleotide
  Target: SCNA; (+) strand; PAM type: YTN; PAM sequence: TTT
ggtttgtttgtatctggcac

SEQ ID NO: 68486 - DNA, 20 bp, Artificial Sequence
  Description of Artificial Sequence: Synthetic oligonucleotide
  Target: SCNA; (+) strand; PAM type: YTN; PAM sequence: TTG
gtttgtttgtatctggcaca

SEQ ID NO: 68487 - DNA, 20 bp, Artificial Sequence
  Description of Artificial Sequence: Synthetic oligonucleotide
  Target: SCNA; (+) strand; PAM type: YTN; PAM sequence: TTT
gtttgtatctggcacatttg

SEQ ID NO: 68488 - DNA, 20 bp, Artificial Sequence
  Description of Artificial Sequence: Synthetic oligonucleotide
  Target: SCNA; (+) strand; PAM type: YTN; PAM sequence: TTG
tttgtatctggcacatttgg

SEQ ID NO: 68489 - DNA, 20 bp, Artificial Sequence
  Description of Artificial Sequence: Synthetic oligonucleotide
  Target: SCNA; (+) strand; PAM type: YTN; PAM sequence: TTT
gtatctggcacatttggggt

SEQ ID NO: 68490 - DNA, 20 bp, Artificial Sequence
  Description of Artificial Sequence: Synthetic oligonucleotide
  Target: SCNA; (+) strand; PAM type: YTN; PAM sequence: TTG
tatctggcacatttggggtt

SEQ ID NO: 68491 - DNA, 20 bp, Artificial Sequence
  Description of Artificial Sequence: Synthetic oligonucleotide
  Target: SCNA; (+) strand; PAM type: YTN; PAM sequence: CTG
gcacatttggggttataaat

SEQ ID NO: 68492 - DNA, 20 bp, Artificial Sequence
  Description of Artificial Sequence: Synthetic oligonucleotide
  Target: SCNA; (+) strand; PAM type: YTN; PAM sequence: TTT
ggggttataaatcacaaata

SEQ ID NO: 68493 - DNA, 20 bp, Artificial Sequence
  Description of Artificial Sequence: Synthetic oligonucleotide
  Target: SCNA; (+) strand; PAM type: YTN; PAM sequence: TTG
gggttataaatcacaaataa

SEQ ID NO: 68494 - DNA, 20 bp, Artificial Sequence
  Description of Artificial Sequence: Synthetic oligonucleotide
  Target: SCNA; (+) strand; PAM type: YTN; PAM sequence: TTA
taaatcacaaataacataaa

SEQ ID NO: 68495 - DNA, 20 bp, Artificial Sequence
  Description of Artificial Sequence: Synthetic oligonucleotide
  Target: SCNA; (+) strand; PAM type: YTN; PAM sequence: TTA
atctccttcttacaaaatcc

SEQ ID NO: 68496 - DNA, 20 bp, Artificial Sequence
  Description of Artificial Sequence: Synthetic oligonucleotide
  Target: SCNA; (+) strand; PAM type: YTN; PAM sequence: CTC
cttcttacaaaatccaatgg

SEQ ID NO: 68497 - DNA, 20 bp, Artificial Sequence
  Description of Artificial Sequence: Synthetic oligonucleotide
  Target: SCNA; (+) strand; PAM type: YTN; PAM sequence: CTT
cttacaaaatccaatggctt

SEQ ID NO: 68498 - DNA, 20 bp, Artificial Sequence
  Description of Artificial Sequence: Synthetic oligonucleotide
  Target: SCNA; (+) strand; PAM type: YTN; PAM sequence: TTC
ttacaaaatccaatggcttc

SEQ ID NO: 68499 - DNA, 20 bp, Artificial Sequence
  Description of Artificial Sequence: Synthetic oligonucleotide
  Target: SCNA; (+) strand; PAM type: YTN; PAM sequence: CTT
acaaaatccaatggcttccc

SEQ ID NO: 68500 - DNA, 20 bp, Artificial Sequence
  Description of Artificial Sequence: Synthetic oligonucleotide
  Target: SCNA; (+) strand; PAM type: YTN; PAM sequence: TTA
caaaatccaatggcttccca

SEQ ID NO: 68501 - DNA, 20 bp, Artificial Sequence
  Description of Artificial Sequence: Synthetic oligonucleotide
  Target: SCNA; (+) strand; PAM type: YTN; PAM sequence: CTT
cccacaagtctatatataat

SEQ ID NO: 68502 - DNA, 20 bp, Artificial Sequence
  Description of Artificial Sequence: Synthetic oligonucleotide
  Target: SCNA; (+) strand; PAM type: YTN; PAM sequence: TTC
ccacaagtctatatataata

SEQ ID NO: 68503 - DNA, 20 bp, Artificial Sequence
  Description of Artificial Sequence: Synthetic oligonucleotide
  Target: SCNA; (+) strand; PAM type: YTN; PAM sequence: CTA
tatataatatgcaaatttct

SEQ ID NO: 68504 - DNA, 20 bp, Artificial Sequence
  Description of Artificial Sequence: Synthetic oligonucleotide
  Target: SCNA; (+) strand; PAM type: YTN; PAM sequence: TTT
cttactatagcttataagat

SEQ ID NO: 68505 - DNA, 20 bp, Artificial Sequence
  Description of Artificial Sequence: Synthetic oligonucleotide
  Target: SCNA; (+) strand; PAM type: YTN; PAM sequence: TTC
ttactatagcttataagatc

SEQ ID NO: 68506 - DNA, 20 bp, Artificial Sequence
  Description of Artificial Sequence: Synthetic oligonucleotide
  Target: SCNA; (+) strand; PAM type: YTN; PAM sequence: CTT
actatagcttataagatctg

SEQ ID NO: 68507 - DNA, 20 bp, Artificial Sequence
  Description of Artificial Sequence: Synthetic oligonucleotide
  Target: SCNA; (+) strand; PAM type: YTN; PAM sequence: TTA
ctatagcttataagatctgg

SEQ ID NO: 68508 - DNA, 20 bp, Artificial Sequence
  Description of Artificial Sequence: Synthetic oligonucleotide
  Target: SCNA; (+) strand; PAM type: YTN; PAM sequence: CTA
tagcttataagatctggaat

SEQ ID NO: 68509 - DNA, 20 bp, Artificial Sequence
  Description of Artificial Sequence: Synthetic oligonucleotide
  Target: SCNA; (+) strand; PAM type: YTN; PAM sequence: CTT
ataagatctggaataatttt

SEQ ID NO: 68510 - DNA, 20 bp, Artificial Sequence
  Description of Artificial Sequence: Synthetic oligonucleotide
  Target: SCNA; (+) strand; PAM type: YTN; PAM sequence: TTA
taagatctggaataattttt

SEQ ID NO: 68511 - DNA, 20 bp, Artificial Sequence
  Description of Artificial Sequence: Synthetic oligonucleotide
  Target: SCNA; (+) strand; PAM type: YTN; PAM sequence: CTG
gaataatttttcctatctcc

SEQ ID NO: 68512 - DNA, 20 bp, Artificial Sequence
  Description of Artificial Sequence: Synthetic oligonucleotide
  Target: SCNA; (+) strand; PAM type: YTN; PAM sequence: TTT
ttcctatctccagccttcac

SEQ ID NO: 68513 - DNA, 20 bp, Artificial Sequence
  Description of Artificial Sequence: Synthetic oligonucleotide
  Target: SCNA; (+) strand; PAM type: YTN; PAM sequence: TTT
tcctatctccagccttcacc

SEQ ID NO: 68514 - DNA, 20 bp, Artificial Sequence
  Description of Artificial Sequence: Synthetic oligonucleotide
  Target: SCNA; (+) strand; PAM type: YTN; PAM sequence: TTT
cctatctccagccttcacct

SEQ ID NO: 68515 - DNA, 20 bp, Artificial Sequence
  Description of Artificial Sequence: Synthetic oligonucleotide
  Target: SCNA; (+) strand; PAM type: YTN; PAM sequence: TTC
ctatctccagccttcacctc

SEQ ID NO: 68516 - DNA, 20 bp, Artificial Sequence
  Description of Artificial Sequence: Synthetic oligonucleotide
  Target: SCNA; (+) strand; PAM type: YTN; PAM sequence: CTA
tctccagccttcacctcttc

SEQ ID NO: 68517 - DNA, 20 bp, Artificial Sequence
  Description of Artificial Sequence: Synthetic oligonucleotide
  Target: SCNA; (+) strand; PAM type: YTN; PAM sequence: CTC
cagccttcacctcttctcac

SEQ ID NO: 68518 - DNA, 20 bp, Artificial Sequence
  Description of Artificial Sequence: Synthetic oligonucleotide
  Target: SCNA; (+) strand; PAM type: YTN; PAM sequence: CTT
cacctcttctcacattcatc

SEQ ID NO: 68519 - DNA, 20 bp, Artificial Sequence
  Description of Artificial Sequence: Synthetic oligonucleotide
  Target: SCNA; (+) strand; PAM type: YTN; PAM sequence: TTC
acctcttctcacattcatca

SEQ ID NO: 68520 - DNA, 20 bp, Artificial Sequence
  Description of Artificial Sequence: Synthetic oligonucleotide
  Target: SCNA; (+) strand; PAM type: YTN; PAM sequence: CTC
ttctcacattcatcatattc

SEQ ID NO: 68521 - DNA, 20 bp, Artificial Sequence
  Description of Artificial Sequence: Synthetic oligonucleotide
  Target: SCNA; (+) strand; PAM type: YTN; PAM sequence: CTT
ctcacattcatcatattcta

SEQ ID NO: 68522 - DNA, 20 bp, Artificial Sequence
  Description of Artificial Sequence: Synthetic oligonucleotide
  Target: SCNA; (+) strand; PAM type: YTN; PAM sequence: TTC
tcacattcatcatattctag

SEQ ID NO: 68523 - DNA, 20 bp, Artificial Sequence
  Description of Artificial Sequence: Synthetic oligonucleotide
  Target: SCNA; (+) strand; PAM type: YTN; PAM sequence: CTC
acattcatcatattctagct

SEQ ID NO: 68524 - DNA, 20 bp, Artificial Sequence
  Description of Artificial Sequence: Synthetic oligonucleotide
  Target: SCNA; (+) strand; PAM type: YTN; PAM sequence: TTC
atcatattctagctaatcag

SEQ ID NO: 68525 - DNA, 20 bp, Artificial Sequence
  Description of Artificial Sequence: Synthetic oligonucleotide
  Target: SCNA; (+) strand; PAM type: YTN; PAM sequence: TTC
tagctaatcaggactctttt

SEQ ID NO: 68526 - DNA, 20 bp, Artificial Sequence
  Description of Artificial Sequence: Synthetic oligonucleotide
  Target: SCNA; (+) strand; PAM type: YTN; PAM sequence: CTA
gctaatcaggactcttttat

SEQ ID NO: 68527 - DNA, 20 bp, Artificial Sequence
  Description of Artificial Sequence: Synthetic oligonucleotide
  Target: SCNA; (+) strand; PAM type: YTN; PAM sequence: CTA
atcaggactcttttatgtca

SEQ ID NO: 68528 - DNA, 20 bp, Artificial Sequence
  Description of Artificial Sequence: Synthetic oligonucleotide
  Target: SCNA; (+) strand; PAM type: YTN; PAM sequence: CTC
ttttatgtcataaaatatgc

SEQ ID NO: 68529 - DNA, 20 bp, Artificial Sequence
  Description of Artificial Sequence: Synthetic oligonucleotide
  Target: SCNA; (+) strand; PAM type: YTN; PAM sequence: CTT
ttatgtcataaaatatgcta

SEQ ID NO: 68530 - DNA, 20 bp, Artificial Sequence
  Description of Artificial Sequence: Synthetic oligonucleotide
  Target: SCNA; (+) strand; PAM type: YTN; PAM sequence: TTT
tatgtcataaaatatgctag

SEQ ID NO: 68531 - DNA, 20 bp, Artificial Sequence
  Description of Artificial Sequence: Synthetic oligonucleotide
  Target: SCNA; (+) strand; PAM type: YTN; PAM sequence: TTT
atgtcataaaatatgctaga

SEQ ID NO: 68532 - DNA, 20 bp, Artificial Sequence
  Description of Artificial Sequence: Synthetic oligonucleotide
  Target: SCNA; (+) strand; PAM type: YTN; PAM sequence: TTA
tgtcataaaatatgctagat

SEQ ID NO: 68533 - DNA, 20 bp, Artificial Sequence
  Description of Artificial Sequence: Synthetic oligonucleotide
  Target: SCNA; (+) strand; PAM type: YTN; PAM sequence: CTA
gatttgcacacccttaaagc

SEQ ID NO: 68534 - DNA, 20 bp, Artificial Sequence
  Description of Artificial Sequence: Synthetic oligonucleotide
  Target: SCNA; (+) strand; PAM type: YTN; PAM sequence: TTT
gcacacccttaaagccttca

SEQ ID NO: 68535 - DNA, 20 bp, Artificial Sequence
  Description of Artificial Sequence: Synthetic oligonucleotide
  Target: SCNA; (+) strand; PAM type: YTN; PAM sequence: TTG
cacacccttaaagccttcat

SEQ ID NO: 68536 - DNA, 20 bp, Artificial Sequence
  Description of Artificial Sequence: Synthetic oligonucleotide
  Target: SCNA; (+) strand; PAM type: YTN; PAM sequence: CTT
aaagccttcatatacgagtt

SEQ ID NO: 68537 - DNA, 20 bp, Artificial Sequence
  Description of Artificial Sequence: Synthetic oligonucleotide
  Target: SCNA; (+) strand; PAM type: YTN; PAM sequence: TTA
aagccttcatatacgagttt

SEQ ID NO: 68538 - DNA, 20 bp, Artificial Sequence
  Description of Artificial Sequence: Synthetic oligonucleotide
  Target: SCNA; (+) strand; PAM type: YTN; PAM sequence: CTT
catatacgagtttgttctgc

SEQ ID NO: 68539 - DNA, 20 bp, Artificial Sequence
  Description of Artificial Sequence: Synthetic oligonucleotide
  Target: SCNA; (+) strand; PAM type: YTN; PAM sequence: TTC
atatacgagtttgttctgcc

SEQ ID NO: 68540 - DNA, 20 bp, Artificial Sequence
  Description of Artificial Sequence: Synthetic oligonucleotide
  Target: SCNA; (+) strand; PAM type: YTN; PAM sequence: TTT
gttctgccttggatacctct

SEQ ID NO: 68541 - DNA, 20 bp, Artificial Sequence
  Description of Artificial Sequence: Synthetic oligonucleotide
  Target: SCNA; (+) strand; PAM type: YTN; PAM sequence: TTG
ttctgccttggatacctctg

SEQ ID NO: 68542 - DNA, 20 bp, Artificial Sequence
  Description of Artificial Sequence: Synthetic oligonucleotide
  Target: SCNA; (+) strand; PAM type: YTN; PAM sequence: TTC
tgccttggatacctctgttc

SEQ ID NO: 68543 - DNA, 20 bp, Artificial Sequence
  Description of Artificial Sequence: Synthetic oligonucleotide
  Target: SCNA; (+) strand; PAM type: YTN; PAM sequence: CTG
ccttggatacctctgttcca

SEQ ID NO: 68544 - DNA, 20 bp, Artificial Sequence
  Description of Artificial Sequence: Synthetic oligonucleotide
  Target: SCNA; (+) strand; PAM type: YTN; PAM sequence: CTT
ggatacctctgttccacatt

SEQ ID NO: 68545 - DNA, 20 bp, Artificial Sequence
  Description of Artificial Sequence: Synthetic oligonucleotide
  Target: SCNA; (+) strand; PAM type: YTN; PAM sequence: TTG
gatacctctgttccacattc

SEQ ID NO: 68546 - DNA, 20 bp, Artificial Sequence
  Description of Artificial Sequence: Synthetic oligonucleotide
  Target: SCNA; (+) strand; PAM type: YTN; PAM sequence: CTC
tgttccacattcccgaacat

SEQ ID NO: 68547 - DNA, 20 bp, Artificial Sequence
  Description of Artificial Sequence: Synthetic oligonucleotide
  Target: SCNA; (+) strand; PAM type: YTN; PAM sequence: CTG
ttccacattcccgaacattc

SEQ ID NO: 68548 - DNA, 20 bp, Artificial Sequence
  Description of Artificial Sequence: Synthetic oligonucleotide
  Target: SCNA; (+) strand; PAM type: YTN; PAM sequence: TTC
cacattcccgaacattctct

SEQ ID NO: 68549 - DNA, 20 bp, Artificial Sequence
  Description of Artificial Sequence: Synthetic oligonucleotide
  Target: SCNA; (+) strand; PAM type: YTN; PAM sequence: TTC
ccgaacattctctctctcat

SEQ ID NO: 68550 - DNA, 20 bp, Artificial Sequence
  Description of Artificial Sequence: Synthetic oligonucleotide
  Target: SCNA; (+) strand; PAM type: YTN; PAM sequence: TTC
tctctctcatcacacagctg

SEQ ID NO: 68551 - DNA, 20 bp, Artificial Sequence
  Description of Artificial Sequence: Synthetic oligonucleotide
  Target: SCNA; (+) strand; PAM type: YTN; PAM sequence: CTC
tctctcatcacacagctgga

SEQ ID NO: 68552 - DNA, 20 bp, Artificial Sequence
  Description of Artificial Sequence: Synthetic oligonucleotide
  Target: SCNA; (+) strand; PAM type: YTN; PAM sequence: CTC
tctcatcacacagctggacc

SEQ ID NO: 68553 - DNA, 20 bp, Artificial Sequence
  Description of Artificial Sequence: Synthetic oligonucleotide
  Target: SCNA; (+) strand; PAM type: YTN; PAM sequence: CTC
tcatcacacagctggaccct

SEQ ID NO: 68554 - DNA, 20 bp, Artificial Sequence
  Description of Artificial Sequence: Synthetic oligonucleotide
  Target: SCNA; (+) strand; PAM type: YTN; PAM sequence: CTC
atcacacagctggacccttt

SEQ ID NO: 68555 - DNA, 20 bp, Artificial Sequence
  Description of Artificial Sequence: Synthetic oligonucleotide
  Target: SCNA; (+) strand; PAM type: YTN; PAM sequence: CTG
gaccctttcaccctcctgat

SEQ ID NO: 68556 - DNA, 20 bp, Artificial Sequence
  Description of Artificial Sequence: Synthetic oligonucleotide
  Target: SCNA; (+) strand; PAM type: YTN; PAM sequence: CTT
tcaccctcctgatctcaatt

SEQ ID NO: 68557 - DNA, 20 bp, Artificial Sequence
  Description of Artificial Sequence: Synthetic oligonucleotide
  Target: SCNA; (+) strand; PAM type: YTN; PAM sequence: TTT
caccctcctgatctcaattg

SEQ ID NO: 68558 - DNA, 20 bp, Artificial Sequence
  Description of Artificial Sequence: Synthetic oligonucleotide
  Target: SCNA; (+) strand; PAM type: YTN; PAM sequence: TTC
accctcctgatctcaattga

SEQ ID NO: 68559 - DNA, 20 bp, Artificial Sequence
  Description of Artificial Sequence: Synthetic oligonucleotide
  Target: SCNA; (+) strand; PAM type: YTN; PAM sequence: CTC
ctgatctcaattgaaatgtg

SEQ ID NO: 68560 - DNA, 20 bp, Artificial Sequence
  Description of Artificial Sequence: Synthetic oligonucleotide
  Target: SCNA; (+) strand; PAM type: YTN; PAM sequence: CTG
atctcaattgaaatgtgacc

SEQ ID NO: 68561 - DNA, 20 bp, Artificial Sequence
  Description of Artificial Sequence: Synthetic oligonucleotide
  Target: SCNA; (+) strand; PAM type: YTN; PAM sequence: CTC
aattgaaatgtgaccttcct

SEQ ID NO: 68562 - DNA, 20 bp, Artificial Sequence
  Description of Artificial Sequence: Synthetic oligonucleotide
  Target: SCNA; (+) strand; PAM type: YTN; PAM sequence: TTG
aaatgtgaccttcctgtata

SEQ ID NO: 68563 - DNA, 20 bp, Artificial Sequence
  Description of Artificial Sequence: Synthetic oligonucleotide
  Target: SCNA; (+) strand; PAM type: YTN; PAM sequence: CTT
cctgtataaactttccatga

SEQ ID NO: 68564 - DNA, 20 bp, Artificial Sequence
  Description of Artificial Sequence: Synthetic oligonucleotide
  Target: SCNA; (+) strand; PAM type: YTN; PAM sequence: TTC
ctgtataaactttccatgag

SEQ ID NO: 68565 - DNA, 20 bp, Artificial Sequence
  Description of Artificial Sequence: Synthetic oligonucleotide
  Target: SCNA; (+) strand; PAM type: YTN; PAM sequence: CTG
tataaactttccatgagctg

SEQ ID NO: 68566 - DNA, 20 bp, Artificial Sequence
  Description of Artificial Sequence: Synthetic oligonucleotide
  Target: SCNA; (+) strand; PAM type: YTN; PAM sequence: CTT
tccatgagctggcttgtctg

SEQ ID NO: 68567 - DNA, 20 bp, Artificial Sequence
  Description of Artificial Sequence: Synthetic oligonucleotide
  Target: SCNA; (+) strand; PAM type: YTN; PAM sequence: TTT
ccatgagctggcttgtctga

SEQ ID NO: 68568 - DNA, 20 bp, Artificial Sequence
  Description of Artificial Sequence: Synthetic oligonucleotide
  Target: SCNA; (+) strand; PAM type: YTN; PAM sequence: TTC
catgagctggcttgtctgac

SEQ ID NO: 68569 - DNA, 20 bp, Artificial Sequence
  Description of Artificial Sequence: Synthetic oligonucleotide
  Target: SCNA; (+) strand; PAM type: YTN; PAM sequence: CTG
gcttgtctgactgaacccaa

SEQ ID NO: 68570 - DNA, 20 bp, Artificial Sequence
  Description of Artificial Sequence: Synthetic oligonucleotide
  Target: SCNA; (+) strand; PAM type: YTN; PAM sequence: CTT
gtctgactgaacccaaatgg

SEQ ID NO: 68571 - DNA, 20 bp, Artificial Sequence
  Description of Artificial Sequence: Synthetic oligonucleotide
  Target: SCNA; (+) strand; PAM type: YTN; PAM sequence: TTG
tctgactgaacccaaatggc

SEQ ID NO: 68572 - DNA, 20 bp, Artificial Sequence
  Description of Artificial Sequence: Synthetic oligonucleotide
  Target: SCNA; (+) strand; PAM type: YTN; PAM sequence: CTG
actgaacccaaatggctaat

SEQ ID NO: 68573 - DNA, 20 bp, Artificial Sequence
  Description of Artificial Sequence: Synthetic oligonucleotide
  Target: SCNA; (+) strand; PAM type: YTN; PAM sequence: CTG
aacccaaatggctaatggat

SEQ ID NO: 68574 - DNA, 20 bp, Artificial Sequence
  Description of Artificial Sequence: Synthetic oligonucleotide
  Target: SCNA; (+) strand; PAM type: YTN; PAM sequence: CTA
atggattttctttcccgtta

SEQ ID NO: 68575 - DNA, 20 bp, Artificial Sequence
  Description of Artificial Sequence: Synthetic oligonucleotide
  Target: SCNA; (+) strand; PAM type: YTN; PAM sequence: TTT
tctttcccgttacatgctct

SEQ ID NO: 68576 - DNA, 20 bp, Artificial Sequence
  Description of Artificial Sequence: Synthetic oligonucleotide
  Target: SCNA; (+) strand; PAM type: YTN; PAM sequence: TTT
ctttcccgttacatgctctc

SEQ ID NO: 68577 - DNA, 20 bp, Artificial Sequence
  Description of Artificial Sequence: Synthetic oligonucleotide
  Target: SCNA; (+) strand; PAM type: YTN; PAM sequence: TTC
tttcccgttacatgctctct

SEQ ID NO: 68578 - DNA, 20 bp, Artificial Sequence
  Description of Artificial Sequence: Synthetic oligonucleotide
  Target: SCNA; (+) strand; PAM type: YTN; PAM sequence: CTT
tcccgttacatgctctctaa

SEQ ID NO: 68579 - DNA, 20 bp, Artificial Sequence
  Description of Artificial Sequence: Synthetic oligonucleotide
  Target: SCNA; (+) strand; PAM type: YTN; PAM sequence: TTT
cccgttacatgctctctaat

SEQ ID NO: 68580 - DNA, 20 bp, Artificial Sequence
  Description of Artificial Sequence: Synthetic oligonucleotide
  Target: SCNA; (+) strand; PAM type: YTN; PAM sequence: TTC
ccgttacatgctctctaatt

SEQ ID NO: 68581 - DNA, 20 bp, Artificial Sequence
  Description of Artificial Sequence: Synthetic oligonucleotide
  Target: SCNA; (+) strand; PAM type: YTN; PAM sequence: TTA
catgctctctaatttatgat

SEQ ID NO: 68582 - DNA, 20 bp, Artificial Sequence
  Description of Artificial Sequence: Synthetic oligonucleotide
  Target: SCNA; (+) strand; PAM type: YTN; PAM sequence: CTC
tctaatttatgatgctttgc

SEQ ID NO: 68583 - DNA, 20 bp, Artificial Sequence
  Description of Artificial Sequence: Synthetic oligonucleotide
  Target: SCNA; (+) strand; PAM type: YTN; PAM sequence: CTC
taatttatgatgctttgctt

SEQ ID NO: 68584 - DNA, 20 bp, Artificial Sequence
  Description of Artificial Sequence: Synthetic oligonucleotide
  Target: SCNA; (+) strand; PAM type: YTN; PAM sequence: CTA
atttatgatgctttgcttgg

SEQ ID NO: 68585 - DNA, 20 bp, Artificial Sequence
  Description of Artificial Sequence: Synthetic oligonucleotide
  Target: SCNA; (+) strand; PAM type: YTN; PAM sequence: TTT
atgatgctttgcttgggggg

SEQ ID NO: 68586 - DNA, 20 bp, Artificial Sequence
  Description of Artificial Sequence: Synthetic oligonucleotide
  Target: SCNA; (+) strand; PAM type: YTN; PAM sequence: TTA
tgatgctttgcttgggggga

SEQ ID NO: 68587 - DNA, 20 bp, Artificial Sequence
  Description of Artificial Sequence: Synthetic oligonucleotide
  Target: SCNA; (+) strand; PAM type: YTN; PAM sequence: CTT
tgcttggggggaaaatgaga

SEQ ID NO: 68588 - DNA, 20 bp, Artificial Sequence
  Description of Artificial Sequence: Synthetic oligonucleotide
  Target: SCNA; (+) strand; PAM type: YTN; PAM sequence: TTT
gcttggggggaaaatgagag

SEQ ID NO: 68589 - DNA, 20 bp, Artificial Sequence
  Description of Artificial Sequence: Synthetic oligonucleotide
  Target: SCNA; (+) strand; PAM type: YTN; PAM sequence: TTG
cttggggggaaaatgagagg

SEQ ID NO: 68590 - DNA, 20 bp, Artificial Sequence
  Description of Artificial Sequence: Synthetic oligonucleotide
  Target: SCNA; (+) strand; PAM type: YTN; PAM sequence: CTT
ggggggaaaatgagaggtgg

SEQ ID NO: 68591 - DNA, 20 bp, Artificial Sequence
  Description of Artificial Sequence: Synthetic oligonucleotide
  Target: SCNA; (+) strand; PAM type: YTN; PAM sequence: TTG
gggggaaaatgagaggtggg

SEQ ID NO: 68592 - DNA, 20 bp, Artificial Sequence
  Description of Artificial Sequence: Synthetic oligonucleotide
  Target: SCNA; (+) strand; PAM type: YTN; PAM sequence: CTG
tttacggaacatggaagtcc

SEQ ID NO: 68593 - DNA, 20 bp, Artificial Sequence
  Description of Artificial Sequence: Synthetic oligonucleotide
  Target: SCNA; (+) strand; PAM type: YTN; PAM sequence: TTT
acggaacatggaagtccttt

SEQ ID NO: 68594 - DNA, 20 bp, Artificial Sequence
  Description of Artificial Sequence: Synthetic oligonucleotide
  Target: SCNA; (+) strand; PAM type: YTN; PAM sequence: TTA
cggaacatggaagtcctttt

SEQ ID NO: 68595 - DNA, 20 bp, Artificial Sequence
  Description of Artificial Sequence: Synthetic oligonucleotide
  Target: SCNA; (+) strand; PAM type: YTN; PAM sequence: CTT
ttgcagaggtacaagagtgg

SEQ ID NO: 68596 - DNA, 20 bp, Artificial Sequence
  Description of Artificial Sequence: Synthetic oligonucleotide
  Target: SCNA; (+) strand; PAM type: YTN; PAM sequence: TTT
tgcagaggtacaagagtgga

SEQ ID NO: 68597 - DNA, 20 bp, Artificial Sequence
  Description of Artificial Sequence: Synthetic oligonucleotide
  Target: SCNA; (+) strand; PAM type: YTN; PAM sequence: TTT
gcagaggtacaagagtggaa

SEQ ID NO: 68598 - DNA, 20 bp, Artificial Sequence
  Description of Artificial Sequence: Synthetic oligonucleotide
  Target: SCNA; (+) strand; PAM type: YTN; PAM sequence: TTG
cagaggtacaagagtggaaa

SEQ ID NO: 68599 - DNA, 20 bp, Artificial Sequence
  Description of Artificial Sequence: Synthetic oligonucleotide
  Target: SCNA; (+) strand; PAM type: YTN; PAM sequence: CTG
ttccccagcctggctctctg

SEQ ID NO: 68600 - DNA, 20 bp, Artificial Sequence
  Description of Artificial Sequence: Synthetic oligonucleotide
  Target: SCNA; (+) strand; PAM type: YTN; PAM sequence: TTC
cccagcctggctctctgagt

SEQ ID NO: 68601 - DNA, 20 bp, Artificial Sequence
  Description of Artificial Sequence: Synthetic oligonucleotide
  Target: SCNA; (+) strand; PAM type: YTN; PAM sequence: CTG
gctctctgagtcagacctga

SEQ ID NO: 68602 - DNA, 20 bp, Artificial Sequence
  Description of Artificial Sequence: Synthetic oligonucleotide
  Target: SCNA; (+) strand; PAM type: YTN; PAM sequence: CTC
tctgagtcagacctgacatc

SEQ ID NO: 68603 - DNA, 20 bp, Artificial Sequence
  Description of Artificial Sequence: Synthetic oligonucleotide
  Target: SCNA; (+) strand; PAM type: YTN; PAM sequence: CTC
tgagtcagacctgacatcca

SEQ ID NO: 68604 - DNA, 20 bp, Artificial Sequence
  Description of Artificial Sequence: Synthetic oligonucleotide
  Target: SCNA; (+) strand; PAM type: YTN; PAM sequence: CTG
agtcagacctgacatccaca

SEQ ID NO: 68605 - DNA, 20 bp, Artificial Sequence
  Description of Artificial Sequence: Synthetic oligonucleotide
  Target: SCNA; (+) strand; PAM type: YTN; PAM sequence: CTG
acatccacagagagagcact

SEQ ID NO: 68606 - DNA, 20 bp, Artificial Sequence
  Description of Artificial Sequence: Synthetic oligonucleotide
  Target: SCNA; (+) strand; PAM type: YTN; PAM sequence: CTG
cagtaactgcaaacgcttct

SEQ ID NO: 68607 - DNA, 20 bp, Artificial Sequence
  Description of Artificial Sequence: Synthetic oligonucleotide
  Target: SCNA; (+) strand; PAM type: YTN; PAM sequence: CTG
caaacgcttctgttttgatt

SEQ ID NO: 68608 - DNA, 20 bp, Artificial Sequence
  Description of Artificial Sequence: Synthetic oligonucleotide
  Target: SCNA; (+) strand; PAM type: YTN; PAM sequence: CTT
ctgttttgattgtggtaatt

SEQ ID NO: 68609 - DNA, 20 bp, Artificial Sequence
  Description of Artificial Sequence: Synthetic oligonucleotide
  Target: SCNA; (+) strand; PAM type: YTN; PAM sequence: TTC
tgttttgattgtggtaattg

SEQ ID NO: 68610 - DNA, 20 bp, Artificial Sequence
  Description of Artificial Sequence: Synthetic oligonucleotide
  Target: SCNA; (+) strand; PAM type: YTN; PAM sequence: CTG
ttttgattgtggtaattgga

SEQ ID NO: 68611 - DNA, 20 bp, Artificial Sequence
  Description of Artificial Sequence: Synthetic oligonucleotide
  Target: SCNA; (+) strand; PAM type: YTN; PAM sequence: TTT
tgattgtggtaattggaaca

SEQ ID NO: 68612 - DNA, 20 bp, Artificial Sequence
  Description of Artificial Sequence: Synthetic oligonucleotide
  Target: SCNA; (+) strand; PAM type: YTN; PAM sequence: TTT
gattgtggtaattggaacaa

SEQ ID NO: 68613 - DNA, 20 bp, Artificial Sequence
  Description of Artificial Sequence: Synthetic oligonucleotide
  Target: SCNA; (+) strand; PAM type: YTN; PAM sequence: TTG
attgtggtaattggaacaat

SEQ ID NO: 68614 - DNA, 20 bp, Artificial Sequence
  Description of Artificial Sequence: Synthetic oligonucleotide
  Target: SCNA; (+) strand; PAM type: YTN; PAM sequence: TTG
tggtaattggaacaatcagg

SEQ ID NO: 68615 - DNA, 20 bp, Artificial Sequence
  Description of Artificial Sequence: Synthetic oligonucleotide
  Target: SCNA; (+) strand; PAM type: YTN; PAM sequence: TTG
gaacaatcagggcacaaact

SEQ ID NO: 68616 - DNA, 20 bp, Artificial Sequence
  Description of Artificial Sequence: Synthetic oligonucleotide
  Target: SCNA; (+) strand; PAM type: YTN; PAM sequence: CTG
caaggtcactggcaagggta

SEQ ID NO: 68617 - DNA, 20 bp, Artificial Sequence
  Description of Artificial Sequence: Synthetic oligonucleotide
  Target: SCNA; (+) strand; PAM type: YTN; PAM sequence: CTG
gcaagggtagcagcaggcat

SEQ ID NO: 68618 - DNA, 20 bp, Artificial Sequence
  Description of Artificial Sequence: Synthetic oligonucleotide
  Target: SCNA; (+) strand; PAM type: YTN; PAM sequence: TTC
ctcccttagtaattttaaag

SEQ ID NO: 68619 - DNA, 20 bp, Artificial Sequence
  Description of Artificial Sequence: Synthetic oligonucleotide
  Target: SCNA; (+) strand; PAM type: YTN; PAM sequence: CTC
ccttagtaattttaaagcag

SEQ ID NO: 68620 - DNA, 20 bp, Artificial Sequence
  Description of Artificial Sequence: Synthetic oligonucleotide
  Target: SCNA; (+) strand; PAM type: YTN; PAM sequence: CTT
agtaattttaaagcagcaga

SEQ ID NO: 68621 - DNA, 20 bp, Artificial Sequence
  Description of Artificial Sequence: Synthetic oligonucleotide
  Target: SCNA; (+) strand; PAM type: YTN; PAM sequence: TTA
gtaattttaaagcagcagat

SEQ ID NO: 68622 - DNA, 20 bp, Artificial Sequence
  Description of Artificial Sequence: Synthetic oligonucleotide
  Target: SCNA; (+) strand; PAM type: YTN; PAM sequence: TTT
taaagcagcagatttcaaaa

SEQ ID NO: 68623 - DNA, 20 bp, Artificial Sequence
  Description of Artificial Sequence: Synthetic oligonucleotide
  Target: SCNA; (+) strand; PAM type: YTN; PAM sequence: TTT
aaagcagcagatttcaaaag

SEQ ID NO: 68624 - DNA, 20 bp, Artificial Sequence
  Description of Artificial Sequence: Synthetic oligonucleotide
  Target: SCNA; (+) strand; PAM type: YTN; PAM sequence: TTA
aagcagcagatttcaaaagg

SEQ ID NO: 68625 - DNA, 20 bp, Artificial Sequence
  Description of Artificial Sequence: Synthetic oligonucleotide
  Target: SCNA; (+) strand; PAM type: YTN; PAM sequence: TTT
caaaagggaaaaccaagcag

SEQ ID NO: 68626 - DNA, 20 bp, Artificial Sequence
  Description of Artificial Sequence: Synthetic oligonucleotide
  Target: SCNA; (+) strand; PAM type: YTN; PAM sequence: TTC
aaaagggaaaaccaagcaga

SEQ ID NO: 68627 - DNA, 20 bp, Artificial Sequence
  Description of Artificial Sequence: Synthetic oligonucleotide
  Target: SCNA; (+) strand; PAM type: YTN; PAM sequence: TTT
gttcttcagcacatgtgaga

SEQ ID NO: 68628 - DNA, 20 bp, Artificial Sequence
  Description of Artificial Sequence: Synthetic oligonucleotide
  Target: SCNA; (+) strand; PAM type: YTN; PAM sequence: TTG
ttcttcagcacatgtgagat

SEQ ID NO: 68629 - DNA, 20 bp, Artificial Sequence
  Description of Artificial Sequence: Synthetic oligonucleotide
  Target: SCNA; (+) strand; PAM type: YTN; PAM sequence: TTC
ttcagcacatgtgagatacc

SEQ ID NO: 68630 - DNA, 20 bp, Artificial Sequence
  Description of Artificial Sequence: Synthetic oligonucleotide
  Target: SCNA; (+) strand; PAM type: YTN; PAM sequence: CTT
cagcacatgtgagataccct

SEQ ID NO: 68631 - DNA, 20 bp, Artificial Sequence
  Description of Artificial Sequence: Synthetic oligonucleotide
  Target: SCNA; (+) strand; PAM type: YTN; PAM sequence: TTC
agcacatgtgagataccctt

SEQ ID NO: 68632 - DNA, 20 bp, Artificial Sequence
  Description of Artificial Sequence: Synthetic oligonucleotide
  Target: SCNA; (+) strand; PAM type: YTN; PAM sequence: CTT
ggagatgccaataaatcact

SEQ ID NO: 68633 - DNA, 20 bp, Artificial Sequence
  Description of Artificial Sequence: Synthetic oligonucleotide
  Target: SCNA; (+) strand; PAM type: YTN; PAM sequence: TTG
gagatgccaataaatcactg

SEQ ID NO: 68634 - DNA, 20 bp, Artificial Sequence
  Description of Artificial Sequence: Synthetic oligonucleotide
  Target: SCNA; (+) strand; PAM type: YTN; PAM sequence: CTG
gagagactgtgaaggaggct

SEQ ID NO: 68635 - DNA, 20 bp, Artificial Sequence
  Description of Artificial Sequence: Synthetic oligonucleotide
  Target: SCNA; (+) strand; PAM type: YTN; PAM sequence: CTG
tgaaggaggcttaggccctg

SEQ ID NO: 68636 - DNA, 20 bp, Artificial Sequence
  Description of Artificial Sequence: Synthetic oligonucleotide
  Target: SCNA; (+) strand; PAM type: YTN; PAM sequence: CTT
aggccctgcagatgaagtta

SEQ ID NO: 68637 - DNA, 20 bp, Artificial Sequence
  Description of Artificial Sequence: Synthetic oligonucleotide
  Target: SCNA; (+) strand; PAM type: YTN; PAM sequence: TTA
ggccctgcagatgaagttag

SEQ ID NO: 68638 - DNA, 20 bp, Artificial Sequence
  Description of Artificial Sequence: Synthetic oligonucleotide
  Target: SCNA; (+) strand; PAM type: YTN; PAM sequence: CTG
cagatgaagttagtgatgga

SEQ ID NO: 68639 - DNA, 20 bp, Artificial Sequence
  Description of Artificial Sequence: Synthetic oligonucleotide
  Target: SCNA; (+) strand; PAM type: YTN; PAM sequence: TTA
gtgatggagggaaatcgtgt

SEQ ID NO: 68640 - DNA, 20 bp, Artificial Sequence
  Description of Artificial Sequence: Synthetic oligonucleotide
  Target: SCNA; (+) strand; PAM type: YTN; PAM sequence: TTT
atcctcgggctgtcaggtct

SEQ ID NO: 68641 - DNA, 20 bp, Artificial Sequence
  Description of Artificial Sequence: Synthetic oligonucleotide
  Target: SCNA; (+) strand; PAM type: YTN; PAM sequence: TTA
tcctcgggctgtcaggtctg

SEQ ID NO: 68642 - DNA, 20 bp, Artificial Sequence
  Description of Artificial Sequence: Synthetic oligonucleotide
  Target: SCNA; (+) strand; PAM type: YTN; PAM sequence: CTC
gggctgtcaggtctgaaata

SEQ ID NO: 68643 - DNA, 20 bp, Artificial Sequence
  Description of Artificial Sequence: Synthetic oligonucleotide
  Target: SCNA; (+) strand; PAM type: YTN; PAM sequence: CTG
tcaggtctgaaatacctggg

SEQ ID NO: 68644 - DNA, 20 bp, Artificial Sequence
  Description of Artificial Sequence: Synthetic oligonucleotide
  Target: SCNA; (+) strand; PAM type: YTN; PAM sequence: CTG
aaatacctgggttaagtaaa

SEQ ID NO: 68645 - DNA, 20 bp, Artificial Sequence
  Description of Artificial Sequence: Synthetic oligonucleotide
  Target: SCNA; (+) strand; PAM type: YTN; PAM sequence: CTG
ggttaagtaaatggcctctg

SEQ ID NO: 68646 - DNA, 20 bp, Artificial Sequence
  Description of Artificial Sequence: Synthetic oligonucleotide
  Target: SCNA; (+) strand; PAM type: YTN; PAM sequence: TTA
agtaaatggcctctgggatg

SEQ ID NO: 68647 - DNA, 20 bp, Artificial Sequence
  Description of Artificial Sequence: Synthetic oligonucleotide
  Target: SCNA; (+) strand; PAM type: YTN; PAM sequence: CTC
tgggatggtcacagtcggca

SEQ ID NO: 68648 - DNA, 20 bp, Artificial Sequence
  Description of Artificial Sequence: Synthetic oligonucleotide
  Target: SCNA; (+) strand; PAM type: YTN; PAM sequence: CTG
ggatggtcacagtcggcaat

SEQ ID NO: 68649 - DNA, 20 bp, Artificial Sequence
  Description of Artificial Sequence: Synthetic oligonucleotide
  Target: SCNA; (+) strand; PAM type: YTN; PAM sequence: TTA
ttagcagttacagatccatc

SEQ ID NO: 68650 - DNA, 20 bp, Artificial Sequence
  Description of Artificial Sequence: Synthetic oligonucleotide
  Target: SCNA; (+) strand; PAM type: YTN; PAM sequence: TTA
gcagttacagatccatctct

SEQ ID NO: 68651 - DNA, 20 bp, Artificial Sequence
  Description of Artificial Sequence: Synthetic oligonucleotide
  Target: SCNA; (+) strand; PAM type: YTN; PAM sequence: TTA
cagatccatctctatgccaa

SEQ ID NO: 68652 - DNA, 20 bp, Artificial Sequence
  Description of Artificial Sequence: Synthetic oligonucleotide
  Target: SCNA; (+) strand; PAM type: YTN; PAM sequence: CTC
tatgccaaaacagataacag

SEQ ID NO: 68653 - DNA, 20 bp, Artificial Sequence
  Description of Artificial Sequence: Synthetic oligonucleotide
  Target: SCNA; (+) strand; PAM type: YTN; PAM sequence: CTA
tgccaaaacagataacagca

SEQ ID NO: 68654 - DNA, 20 bp, Artificial Sequence
  Description of Artificial Sequence: Synthetic oligonucleotide
  Target: SCNA; (+) strand; PAM type: YTN; PAM sequence: TTA
tccaaagtcacaaatcagtg

SEQ ID NO: 68655 - DNA, 20 bp, Artificial Sequence
  Description of Artificial Sequence: Synthetic oligonucleotide
  Target: SCNA; (+) strand; PAM type: YTN; PAM sequence: CTT
gtcactcacccacgtagtgc

SEQ ID NO: 68656 - DNA, 20 bp, Artificial Sequence
  Description of Artificial Sequence: Synthetic oligonucleotide
  Target: SCNA; (+) strand; PAM type: YTN; PAM sequence: TTG
tcactcacccacgtagtgct

SEQ ID NO: 68657 - DNA, 20 bp, Artificial Sequence
  Description of Artificial Sequence: Synthetic oligonucleotide
  Target: SCNA; (+) strand; PAM type: YTN; PAM sequence: CTC
acccacgtagtgcttttccc

SEQ ID NO: 68658 - DNA, 20 bp, Artificial Sequence
  Description of Artificial Sequence: Synthetic oligonucleotide
  Target: SCNA; (+) strand; PAM type: YTN; PAM sequence: CTT
ttcccttcctcctagttact

SEQ ID NO: 68659 - DNA, 20 bp, Artificial Sequence
  Description of Artificial Sequence: Synthetic oligonucleotide
  Target: SCNA; (+) strand; PAM type: YTN; PAM sequence: TTT
tcccttcctcctagttactt

SEQ ID NO: 68660 - DNA, 20 bp, Artificial Sequence
  Description of Artificial Sequence: Synthetic oligonucleotide
  Target: SCNA; (+) strand; PAM type: YTN; PAM sequence: TTT
cccttcctcctagttactta

SEQ ID NO: 68661 - DNA, 20 bp, Artificial Sequence
  Description of Artificial Sequence: Synthetic oligonucleotide
  Target: SCNA; (+) strand; PAM type: YTN; PAM sequence: TTC
ccttcctcctagttacttaa

SEQ ID NO: 68662 - DNA, 20 bp, Artificial Sequence
  Description of Artificial Sequence: Synthetic oligonucleotide
  Target: SCNA; (+) strand; PAM type: YTN; PAM sequence: CTT
cctcctagttacttaatgga

SEQ ID NO: 68663 - DNA, 20 bp, Artificial Sequence
  Description of Artificial Sequence: Synthetic oligonucleotide
  Target: SCNA; (+) strand; PAM type: YTN; PAM sequence: TTC
ctcctagttacttaatggat

SEQ ID NO: 68664 - DNA, 20 bp, Artificial Sequence
  Description of Artificial Sequence: Synthetic oligonucleotide
  Target: SCNA; (+) strand; PAM type: YTN; PAM sequence: CTC
ctagttacttaatggataag

SEQ ID NO: 68665 - DNA, 20 bp, Artificial Sequence
  Description of Artificial Sequence: Synthetic oligonucleotide
  Target: SCNA; (+) strand; PAM type: YTN; PAM sequence: CTA
gttacttaatggataagggc

SEQ ID NO: 68666 - DNA, 20 bp, Artificial Sequence
  Description of Artificial Sequence: Synthetic oligonucleotide
  Target: SCNA; (+) strand; PAM type: YTN; PAM sequence: TTA
cttaatggataagggcacat

SEQ ID NO: 68667 - DNA, 20 bp, Artificial Sequence
  Description of Artificial Sequence: Synthetic oligonucleotide
  Target: SCNA; (+) strand; PAM type: YTN; PAM sequence: CTT
aatggataagggcacattgt

SEQ ID NO: 68668 - DNA, 20 bp, Artificial Sequence
  Description of Artificial Sequence: Synthetic oligonucleotide
  Target: SCNA; (+) strand; PAM type: YTN; PAM sequence: TTA
atggataagggcacattgtc

SEQ ID NO: 68669 - DNA, 20 bp, Artificial Sequence
  Description of Artificial Sequence: Synthetic oligonucleotide
  Target: SCNA; (+) strand; PAM type: YTN; PAM sequence: TTG
tcaaataaacaaacaagtga

SEQ ID NO: 68670 - DNA, 20 bp, Artificial Sequence
  Description of Artificial Sequence: Synthetic oligonucleotide
  Target: SCNA; (+) strand; PAM type: YTN; PAM sequence: TTG
ctccgaaatttaaggtgaat

SEQ ID NO: 68671 - DNA, 20 bp, Artificial Sequence
  Description of Artificial Sequence: Synthetic oligonucleotide
  Target: SCNA; (+) strand; PAM type: YTN; PAM sequence: CTC
cgaaatttaaggtgaatcat

SEQ ID NO: 68672 - DNA, 20 bp, Artificial Sequence
  Description of Artificial Sequence: Synthetic oligonucleotide
  Target: SCNA; (+) strand; PAM type: YTN; PAM sequence: TTT
aaggtgaatcattagtcaga

SEQ ID NO: 68673 - DNA, 20 bp, Artificial Sequence
  Description of Artificial Sequence: Synthetic oligonucleotide
  Target: SCNA; (+) strand; PAM type: YTN; PAM sequence: TTA
aggtgaatcattagtcagac

SEQ ID NO: 68674 - DNA, 20 bp, Artificial Sequence
  Description of Artificial Sequence: Synthetic oligonucleotide
  Target: SCNA; (+) strand; PAM type: YTN; PAM sequence: TTA
gtcagacttggtatcgtcat

SEQ ID NO: 68675 - DNA, 20 bp, Artificial Sequence
  Description of Artificial Sequence: Synthetic oligonucleotide
  Target: SCNA; (+) strand; PAM type: YTN; PAM sequence: CTT
ggtatcgtcatggaatttgg

SEQ ID NO: 68676 - DNA, 20 bp, Artificial Sequence
  Description of Artificial Sequence: Synthetic oligonucleotide
  Target: SCNA; (+) strand; PAM type: YTN; PAM sequence: TTG
gtatcgtcatggaatttggt

SEQ ID NO: 68677 - DNA, 20 bp, Artificial Sequence
  Description of Artificial Sequence: Synthetic oligonucleotide
  Target: SCNA; (+) strand; PAM type: YTN; PAM sequence: TTT
ggtctgttttctaactagct

SEQ ID NO: 68678 - DNA, 20 bp, Artificial Sequence
  Description of Artificial Sequence: Synthetic oligonucleotide
  Target: SCNA; (+) strand; PAM type: YTN; PAM sequence: TTG
gtctgttttctaactagctt

SEQ ID NO: 68679 - DNA, 20 bp, Artificial Sequence
  Description of Artificial Sequence: Synthetic oligonucleotide
  Target: SCNA; (+) strand; PAM type: YTN; PAM sequence: CTG
ttttctaactagctttattt

SEQ ID NO: 68680 - DNA, 20 bp, Artificial Sequence
  Description of Artificial Sequence: Synthetic oligonucleotide
  Target: SCNA; (+) strand; PAM type: YTN; PAM sequence: TTT
tctaactagctttattttag

SEQ ID NO: 68681 - DNA, 20 bp, Artificial Sequence
  Description of Artificial Sequence: Synthetic oligonucleotide
  Target: SCNA; (+) strand; PAM type: YTN; PAM sequence: TTT
ctaactagctttattttagc

SEQ ID NO: 68682 - DNA, 20 bp, Artificial Sequence
  Description of Artificial Sequence: Synthetic oligonucleotide
  Target: SCNA; (+) strand; PAM type: YTN; PAM sequence: TTC
taactagctttattttagca

SEQ ID NO: 68683 - DNA, 20 bp, Artificial Sequence
  Description of Artificial Sequence: Synthetic oligonucleotide
  Target: SCNA; (+) strand; PAM type: YTN; PAM sequence: CTA
actagctttattttagcaca

SEQ ID NO: 68684 - DNA, 20 bp, Artificial Sequence
  Description of Artificial Sequence: Synthetic oligonucleotide
  Target: SCNA; (+) strand; PAM type: YTN; PAM sequence: CTA
gctttattttagcacagcca

SEQ ID NO: 68685 - DNA, 20 bp, Artificial Sequence
  Description of Artificial Sequence: Synthetic oligonucleotide
  Target: SCNA; (+) strand; PAM type: YTN; PAM sequence: CTT
tattttagcacagccataaa

SEQ ID NO: 68686 - DNA, 20 bp, Artificial Sequence
  Description of Artificial Sequence: Synthetic oligonucleotide
  Target: SCNA; (+) strand; PAM type: YTN; PAM sequence: TTT
attttagcacagccataaat

SEQ ID NO: 68687 - DNA, 20 bp, Artificial Sequence
  Description of Artificial Sequence: Synthetic oligonucleotide
  Target: SCNA; (+) strand; PAM type: YTN; PAM sequence: TTA
ttttagcacagccataaatc

SEQ ID NO: 68688 - DNA, 20 bp, Artificial Sequence
  Description of Artificial Sequence: Synthetic oligonucleotide
  Target: SCNA; (+) strand; PAM type: YTN; PAM sequence: TTT
tagcacagccataaatctgg

SEQ ID NO: 68689 - DNA, 20 bp, Artificial Sequence
  Description of Artificial Sequence: Synthetic oligonucleotide
  Target: SCNA; (+) strand; PAM type: YTN; PAM sequence: TTT
agcacagccataaatctggc

SEQ ID NO: 68690 - DNA, 20 bp, Artificial Sequence
  Description of Artificial Sequence: Synthetic oligonucleotide
  Target: SCNA; (+) strand; PAM type: YTN; PAM sequence: TTA
gcacagccataaatctggct

SEQ ID NO: 68691 - DNA, 20 bp, Artificial Sequence
  Description of Artificial Sequence: Synthetic oligonucleotide
  Target: SCNA; (+) strand; PAM type: YTN; PAM sequence: CTG
gctgtaattgtctttaactc

SEQ ID NO: 68692 - DNA, 20 bp, Artificial Sequence
  Description of Artificial Sequence: Synthetic oligonucleotide
  Target: SCNA; (+) strand; PAM type: YTN; PAM sequence: CTG
taattgtctttaactccgat

SEQ ID NO: 68693 - DNA, 20 bp, Artificial Sequence
  Description of Artificial Sequence: Synthetic oligonucleotide
  Target: SCNA; (+) strand; PAM type: YTN; PAM sequence: TTG
tctttaactccgatgactca

SEQ ID NO: 68694 - DNA, 20 bp, Artificial Sequence
  Description of Artificial Sequence: Synthetic oligonucleotide
  Target: SCNA; (+) strand; PAM type: YTN; PAM sequence: CTT
taactccgatgactcataca

SEQ ID NO: 68695 - DNA, 20 bp, Artificial Sequence
  Description of Artificial Sequence: Synthetic oligonucleotide
  Target: SCNA; (+) strand; PAM type: YTN; PAM sequence: TTT
aactccgatgactcatacat

SEQ ID NO: 68696 - DNA, 20 bp, Artificial Sequence
  Description of Artificial Sequence: Synthetic oligonucleotide
  Target: SCNA; (+) strand; PAM type: YTN; PAM sequence: TTA
actccgatgactcatacatc

SEQ ID NO: 68697 - DNA, 20 bp, Artificial Sequence
  Description of Artificial Sequence: Synthetic oligonucleotide
  Target: SCNA; (+) strand; PAM type: YTN; PAM sequence: CTC
cgatgactcatacatctaag

SEQ ID NO: 68698 - DNA, 20 bp, Artificial Sequence
  Description of Artificial Sequence: Synthetic oligonucleotide
  Target: SCNA; (+) strand; PAM type: YTN; PAM sequence: CTC
atacatctaagcatttcatt

SEQ ID NO: 68699 - DNA, 20 bp, Artificial Sequence
  Description of Artificial Sequence: Synthetic oligonucleotide
  Target: SCNA; (+) strand; PAM type: YTN; PAM sequence: CTA
agcatttcatttaactttca

SEQ ID NO: 68700 - DNA, 20 bp, Artificial Sequence
  Description of Artificial Sequence: Synthetic oligonucleotide
  Target: SCNA; (+) strand; PAM type: YTN; PAM sequence: TTT
catttaactttcaaccgtga

SEQ ID NO: 68701 - DNA, 20 bp, Artificial Sequence
  Description of Artificial Sequence: Synthetic oligonucleotide
  Target: SCNA; (+) strand; PAM type: YTN; PAM sequence: TTC
atttaactttcaaccgtgaa

SEQ ID NO: 68702 - DNA, 20 bp, Artificial Sequence
  Description of Artificial Sequence: Synthetic oligonucleotide
  Target: SCNA; (+) strand; PAM type: YTN; PAM sequence: TTT
aactttcaaccgtgaaaaat

SEQ ID NO: 68703 - DNA, 20 bp, Artificial Sequence
  Description of Artificial Sequence: Synthetic oligonucleotide
  Target: SCNA; (+) strand; PAM type: YTN; PAM sequence: TTA
actttcaaccgtgaaaaatt

SEQ ID NO: 68704 - DNA, 20 bp, Artificial Sequence
  Description of Artificial Sequence: Synthetic oligonucleotide
  Target: SCNA; (+) strand; PAM type: YTN; PAM sequence: CTT
tcaaccgtgaaaaattccaa

SEQ ID NO: 68705 - DNA, 20 bp, Artificial Sequence
  Description of Artificial Sequence: Synthetic oligonucleotide
  Target: SCNA; (+) strand; PAM type: YTN; PAM sequence: TTT
caaccgtgaaaaattccaac

SEQ ID NO: 68706 - DNA, 20 bp, Artificial Sequence
  Description of Artificial Sequence: Synthetic oligonucleotide
  Target: SCNA; (+) strand; PAM type: YTN; PAM sequence: TTC
aaccgtgaaaaattccaact

SEQ ID NO: 68707 - DNA, 20 bp, Artificial Sequence
  Description of Artificial Sequence: Synthetic oligonucleotide
  Target: SCNA; (+) strand; PAM type: YTN; PAM sequence: TTC
caactgatttggcaatatga

SEQ ID NO: 68708 - DNA, 20 bp, Artificial Sequence
  Description of Artificial Sequence: Synthetic oligonucleotide
  Target: SCNA; (+) strand; PAM type: YTN; PAM sequence: CTG
atttggcaatatgaatgtgc

SEQ ID NO: 68709 - DNA, 20 bp, Artificial Sequence
  Description of Artificial Sequence: Synthetic oligonucleotide
  Target: SCNA; (+) strand; PAM type: YTN; PAM sequence: TTT
ggcaatatgaatgtgctctt

SEQ ID NO: 68710 - DNA, 20 bp, Artificial Sequence
  Description of Artificial Sequence: Synthetic oligonucleotide
  Target: SCNA; (+) strand; PAM type: YTN; PAM sequence: TTG
gcaatatgaatgtgctctta

SEQ ID NO: 68711 - DNA, 20 bp, Artificial Sequence
  Description of Artificial Sequence: Synthetic oligonucleotide
  Target: SCNA; (+) strand; PAM type: YTN; PAM sequence: CTC
ttacatgcatatgatcatat

SEQ ID NO: 68712 - DNA, 20 bp, Artificial Sequence
  Description of Artificial Sequence: Synthetic oligonucleotide
  Target: SCNA; (+) strand; PAM type: YTN; PAM sequence: CTT
acatgcatatgatcatatga

SEQ ID NO: 68713 - DNA, 20 bp, Artificial Sequence
  Description of Artificial Sequence: Synthetic oligonucleotide
  Target: SCNA; (+) strand; PAM type: YTN; PAM sequence: TTA
catgcatatgatcatatgat

SEQ ID NO: 68714 - DNA, 20 bp, Artificial Sequence
  Description of Artificial Sequence: Synthetic oligonucleotide
  Target: SCNA; (+) strand; PAM type: YTN; PAM sequence: CTG
tcagtacaacatctgttttt

SEQ ID NO: 68715 - DNA, 20 bp, Artificial Sequence
  Description of Artificial Sequence: Synthetic oligonucleotide
  Target: SCNA; (+) strand; PAM type: YTN; PAM sequence: CTG
tttttgttcttgggatgttg

SEQ ID NO: 68716 - DNA, 20 bp, Artificial Sequence
  Description of Artificial Sequence: Synthetic oligonucleotide
  Target: SCNA; (+) strand; PAM type: YTN; PAM sequence: TTT
ttgttcttgggatgttgatg

SEQ ID NO: 68717 - DNA, 20 bp, Artificial Sequence
  Description of Artificial Sequence: Synthetic oligonucleotide
  Target: SCNA; (+) strand; PAM type: YTN; PAM sequence: TTT
tgttcttgggatgttgatgg

SEQ ID NO: 68718 - DNA, 20 bp, Artificial Sequence
  Description of Artificial Sequence: Synthetic oligonucleotide
  Target: SCNA; (+) strand; PAM type: YTN; PAM sequence: TTT
gttcttgggatgttgatgga

SEQ ID NO: 68719 - DNA, 20 bp, Artificial Sequence
  Description of Artificial Sequence: Synthetic oligonucleotide
  Target: SCNA; (+) strand; PAM type: YTN; PAM sequence: TTG
ttcttgggatgttgatggac

SEQ ID NO: 68720 - DNA, 20 bp, Artificial Sequence
  Description of Artificial Sequence: Synthetic oligonucleotide
  Target: SCNA; (+) strand; PAM type: YTN; PAM sequence: TTC
ttgggatgttgatggactat

SEQ ID NO: 68721 - DNA, 20 bp, Artificial Sequence
  Description of Artificial Sequence: Synthetic oligonucleotide
  Target: SCNA; (+) strand; PAM type: YTN; PAM sequence: CTT
gggatgttgatggactatca

SEQ ID NO: 68722 - DNA, 20 bp, Artificial Sequence
  Description of Artificial Sequence: Synthetic oligonucleotide
  Target: SCNA; (+) strand; PAM type: YTN; PAM sequence: TTG
ggatgttgatggactatcat

SEQ ID NO: 68723 - DNA, 20 bp, Artificial Sequence
  Description of Artificial Sequence: Synthetic oligonucleotide
  Target: SCNA; (+) strand; PAM type: YTN; PAM sequence: TTG
atggactatcatgaaccatc

SEQ ID NO: 68724 - DNA, 20 bp, Artificial Sequence
  Description of Artificial Sequence: Synthetic oligonucleotide
  Target: SCNA; (+) strand; PAM type: YTN; PAM sequence: CTA
tcatgaaccatcttataact

SEQ ID NO: 68725 - DNA, 20 bp, Artificial Sequence
  Description of Artificial Sequence: Synthetic oligonucleotide
  Target: SCNA; (+) strand; PAM type: YTN; PAM sequence: CTT
ataactttcccagtcccctt

SEQ ID NO: 68726 - DNA, 20 bp, Artificial Sequence
  Description of Artificial Sequence: Synthetic oligonucleotide
  Target: SCNA; (+) strand; PAM type: YTN; PAM sequence: TTA
taactttcccagtccccttt

SEQ ID NO: 68727 - DNA, 20 bp, Artificial Sequence
  Description of Artificial Sequence: Synthetic oligonucleotide
  Target: SCNA; (+) strand; PAM type: YTN; PAM sequence: CTT
tcccagtcccctttaagtcc

SEQ ID NO: 68728 - DNA, 20 bp, Artificial Sequence
  Description of Artificial Sequence: Synthetic oligonucleotide
  Target: SCNA; (+) strand; PAM type: YTN; PAM sequence: TTT
cccagtcccctttaagtcca

SEQ ID NO: 68729 - DNA, 20 bp, Artificial Sequence
  Description of Artificial Sequence: Synthetic oligonucleotide
  Target: SCNA; (+) strand; PAM type: YTN; PAM sequence: TTC
ccagtcccctttaagtccaa

SEQ ID NO: 68730 - DNA, 20 bp, Artificial Sequence
  Description of Artificial Sequence: Synthetic oligonucleotide
  Target: SCNA; (+) strand; PAM type: YTN; PAM sequence: CTT
taagtccaagaggatacaac

SEQ ID NO: 68731 - DNA, 20 bp, Artificial Sequence
  Description of Artificial Sequence: Synthetic oligonucleotide
  Target: SCNA; (+) strand; PAM type: YTN; PAM sequence: TTT
aagtccaagaggatacaact

SEQ ID NO: 68732 - DNA, 20 bp, Artificial Sequence
  Description of Artificial Sequence: Synthetic oligonucleotide
  Target: SCNA; (+) strand; PAM type: YTN; PAM sequence: TTA
agtccaagaggatacaactg

SEQ ID NO: 68733 - DNA, 20 bp, Artificial Sequence
  Description of Artificial Sequence: Synthetic oligonucleotide
  Target: SCNA; (+) strand; PAM type: YTN; PAM sequence: CTG
agaaggcaggtagagttttt

SEQ ID NO: 68734 - DNA, 20 bp, Artificial Sequence
  Description of Artificial Sequence: Synthetic oligonucleotide
  Target: SCNA; (+) strand; PAM type: YTN; PAM sequence: TTT
ttggtcagtggctaggtttt

SEQ ID NO: 68735 - DNA, 20 bp, Artificial Sequence
  Description of Artificial Sequence: Synthetic oligonucleotide
  Target: SCNA; (+) strand; PAM type: YTN; PAM sequence: TTT
tggtcagtggctaggttttt

SEQ ID NO: 68736 - DNA, 20 bp, Artificial Sequence
  Description of Artificial Sequence: Synthetic oligonucleotide
  Target: SCNA; (+) strand; PAM type: YTN; PAM sequence: TTT
ggtcagtggctaggtttttc

SEQ ID NO: 68737 - DNA, 20 bp, Artificial Sequence
  Description of Artificial Sequence: Synthetic oligonucleotide
  Target: SCNA; (+) strand; PAM type: YTN; PAM sequence: TTG
gtcagtggctaggtttttcc

SEQ ID NO: 68738 - DNA, 20 bp, Artificial Sequence
  Description of Artificial Sequence: Synthetic oligonucleotide
  Target: SCNA; (+) strand; PAM type: YTN; PAM sequence: CTA
ggtttttcctgaatatcaaa

SEQ ID NO: 68739 - DNA, 20 bp, Artificial Sequence
  Description of Artificial Sequence: Synthetic oligonucleotide
  Target: SCNA; (+) strand; PAM type: YTN; PAM sequence: TTT
ttcctgaatatcaaacaaat

SEQ ID NO: 68740 - DNA, 20 bp, Artificial Sequence
  Description of Artificial Sequence: Synthetic oligonucleotide
  Target: SCNA; (+) strand; PAM type: YTN; PAM sequence: TTT
tcctgaatatcaaacaaatt

SEQ ID NO: 68741 - DNA, 20 bp, Artificial Sequence
  Description of Artificial Sequence: Synthetic oligonucleotide
  Target: SCNA; (+) strand; PAM type: YTN; PAM sequence: TTT
cctgaatatcaaacaaattg

SEQ ID NO: 68742 - DNA, 20 bp, Artificial Sequence
  Description of Artificial Sequence: Synthetic oligonucleotide
  Target: SCNA; (+) strand; PAM type: YTN; PAM sequence: TTC
ctgaatatcaaacaaattgc

SEQ ID NO: 68743 - DNA, 20 bp, Artificial Sequence
  Description of Artificial Sequence: Synthetic oligonucleotide
  Target: SCNA; (+) strand; PAM type: YTN; PAM sequence: CTG
aatatcaaacaaattgcctg

SEQ ID NO: 68744 - DNA, 20 bp, Artificial Sequence
  Description of Artificial Sequence: Synthetic oligonucleotide
  Target: SCNA; (+) strand; PAM type: YTN; PAM sequence: TTG
cctggtatgagaatttaaca

SEQ ID NO: 68745 - DNA, 20 bp, Artificial Sequence
  Description of Artificial Sequence: Synthetic oligonucleotide
  Target: SCNA; (+) strand; PAM type: YTN; PAM sequence: CTG
gtatgagaatttaacagaat

SEQ ID NO: 68746 - DNA, 20 bp, Artificial Sequence
  Description of Artificial Sequence: Synthetic oligonucleotide
  Target: SCNA; (+) strand; PAM type: YTN; PAM sequence: TTT
aacagaatatgaccacaatt

SEQ ID NO: 68747 - DNA, 20 bp, Artificial Sequence
  Description of Artificial Sequence: Synthetic oligonucleotide
  Target: SCNA; (+) strand; PAM type: YTN; PAM sequence: TTA
acagaatatgaccacaattt

SEQ ID NO: 68748 - DNA, 20 bp, Artificial Sequence
  Description of Artificial Sequence: Synthetic oligonucleotide
  Target: SCNA; (+) strand; PAM type: YTN; PAM sequence: TTT
ttttaacagatttatctact

SEQ ID NO: 68749 - DNA, 20 bp, Artificial Sequence
  Description of Artificial Sequence: Synthetic oligonucleotide
  Target: SCNA; (+) strand; PAM type: YTN; PAM sequence: TTT
tttaacagatttatctactt

SEQ ID NO: 68750 - DNA, 20 bp, Artificial Sequence
  Description of Artificial Sequence: Synthetic oligonucleotide
  Target: SCNA; (+) strand; PAM type: YTN; PAM sequence: TTT
ttaacagatttatctacttg

SEQ ID NO: 68751 - DNA, 20 bp, Artificial Sequence
  Description of Artificial Sequence: Synthetic oligonucleotide
  Target: SCNA; (+) strand; PAM type: YTN; PAM sequence: TTT
taacagatttatctacttga

SEQ ID NO: 68752 - DNA, 20 bp, Artificial Sequence
  Description of Artificial Sequence: Synthetic oligonucleotide
  Target: SCNA; (+) strand; PAM type: YTN; PAM sequence: TTT
aacagatttatctacttgaa

SEQ ID NO: 68753 - DNA, 20 bp, Artificial Sequence
  Description of Artificial Sequence: Synthetic oligonucleotide
  Target: SCNA; (+) strand; PAM type: YTN; PAM sequence: TTA
acagatttatctacttgaaa

SEQ ID NO: 68754 - DNA, 20 bp, Artificial Sequence
  Description of Artificial Sequence: Synthetic oligonucleotide
  Target: SCNA; (+) strand; PAM type: YTN; PAM sequence: TTT
atctacttgaaacatcgcct

SEQ ID NO: 68755 - DNA, 20 bp, Artificial Sequence
  Description of Artificial Sequence: Synthetic oligonucleotide
  Target: SCNA; (+) strand; PAM type: YTN; PAM sequence: TTA
tctacttgaaacatcgcctc

SEQ ID NO: 68756 - DNA, 20 bp, Artificial Sequence
  Description of Artificial Sequence: Synthetic oligonucleotide
  Target: SCNA; (+) strand; PAM type: YTN; PAM sequence: CTA
cttgaaacatcgcctcagtc

SEQ ID NO: 68757 - DNA, 20 bp, Artificial Sequence
  Description of Artificial Sequence: Synthetic oligonucleotide
  Target: SCNA; (+) strand; PAM type: YTN; PAM sequence: CTT
gaaacatcgcctcagtcaat

SEQ ID NO: 68758 - DNA, 20 bp, Artificial Sequence
  Description of Artificial Sequence: Synthetic oligonucleotide
  Target: SCNA; (+) strand; PAM type: YTN; PAM sequence: TTG
aaacatcgcctcagtcaatg

SEQ ID NO: 68759 - DNA, 20 bp, Artificial Sequence
  Description of Artificial Sequence: Synthetic oligonucleotide
  Target: SCNA; (+) strand; PAM type: YTN; PAM sequence: CTC
agtcaatgaagaaacttatg

SEQ ID NO: 68760 - DNA, 20 bp, Artificial Sequence
  Description of Artificial Sequence: Synthetic oligonucleotide
  Target: SCNA; (+) strand; PAM type: YTN; PAM sequence: CTT
atgttctataactaataata

SEQ ID NO: 68761 - DNA, 20 bp, Artificial Sequence
  Description of Artificial Sequence: Synthetic oligonucleotide
  Target: SCNA; (+) strand; PAM type: YTN; PAM sequence: TTA
tgttctataactaataataa

SEQ ID NO: 68762 - DNA, 20 bp, Artificial Sequence
  Description of Artificial Sequence: Synthetic oligonucleotide
  Target: SCNA; (+) strand; PAM type: YTN; PAM sequence: TTC
tataactaataataaaagat

SEQ ID NO: 68763 - DNA, 20 bp, Artificial Sequence
  Description of Artificial Sequence: Synthetic oligonucleotide
  Target: SCNA; (+) strand; PAM type: YTN; PAM sequence: CTA
taactaataataaaagatca

SEQ ID NO: 68764 - DNA, 20 bp, Artificial Sequence
  Description of Artificial Sequence: Synthetic oligonucleotide
  Target: SCNA; (+) strand; PAM type: YTN; PAM sequence: CTA
ataataaaagatcatttgta

SEQ ID NO: 68765 - DNA, 20 bp, Artificial Sequence
  Description of Artificial Sequence: Synthetic oligonucleotide
  Target: SCNA; (+) strand; PAM type: YTN; PAM sequence: TTT
gtaactgaaatatgacaaat

SEQ ID NO: 68766 - DNA, 20 bp, Artificial Sequence
  Description of Artificial Sequence: Synthetic oligonucleotide
  Target: SCNA; (+) strand; PAM type: YTN; PAM sequence: TTG
taactgaaatatgacaaatt

SEQ ID NO: 68767 - DNA, 20 bp, Artificial Sequence
  Description of Artificial Sequence: Synthetic oligonucleotide
  Target: SCNA; (+) strand; PAM type: YTN; PAM sequence: CTG
aaatatgacaaattgctgtt

SEQ ID NO: 68768 - DNA, 20 bp, Artificial Sequence
  Description of Artificial Sequence: Synthetic oligonucleotide
  Target: SCNA; (+) strand; PAM type: YTN; PAM sequence: TTG
ctgttttaatcatgaggatt

SEQ ID NO: 68769 - DNA, 20 bp, Artificial Sequence
  Description of Artificial Sequence: Synthetic oligonucleotide
  Target: SCNA; (+) strand; PAM type: YTN; PAM sequence: CTG
ttttaatcatgaggattacc

SEQ ID NO: 68770 - DNA, 20 bp, Artificial Sequence
  Description of Artificial Sequence: Synthetic oligonucleotide
  Target: SCNA; (+) strand; PAM type: YTN; PAM sequence: TTT
taatcatgaggattaccatt

SEQ ID NO: 68771 - DNA, 20 bp, Artificial Sequence
  Description of Artificial Sequence: Synthetic oligonucleotide
  Target: SCNA; (+) strand; PAM type: YTN; PAM sequence: TTT
aatcatgaggattaccattt

SEQ ID NO: 68772 - DNA, 20 bp, Artificial Sequence
  Description of Artificial Sequence: Synthetic oligonucleotide
  Target: SCNA; (+) strand; PAM type: YTN; PAM sequence: TTA
atcatgaggattaccattta

SEQ ID NO: 68773 - DNA, 20 bp, Artificial Sequence
  Description of Artificial Sequence: Synthetic oligonucleotide
  Target: SCNA; (+) strand; PAM type: YTN; PAM sequence: TTA
ccatttagaacagctaggta

SEQ ID NO: 68774 - DNA, 20 bp, Artificial Sequence
  Description of Artificial Sequence: Synthetic oligonucleotide
  Target: SCNA; (+) strand; PAM type: YTN; PAM sequence: TTT
agaacagctaggtaaacatt

SEQ ID NO: 68775 - DNA, 20 bp, Artificial Sequence
  Description of Artificial Sequence: Synthetic oligonucleotide
  Target: SCNA; (+) strand; PAM type: YTN; PAM sequence: TTA
gaacagctaggtaaacattt

SEQ ID NO: 68776 - DNA, 20 bp, Artificial Sequence
  Description of Artificial Sequence: Synthetic oligonucleotide
  Target: SCNA; (+) strand; PAM type: YTN; PAM sequence: CTA
ggtaaacatttactttttaa

SEQ ID NO: 68777 - DNA, 20 bp, Artificial Sequence
  Description of Artificial Sequence: Synthetic oligonucleotide
  Target: SCNA; (+) strand; PAM type: YTN; PAM sequence: TTT
actttttaatccggaaataa

SEQ ID NO: 68778 - DNA, 20 bp, Artificial Sequence
  Description of Artificial Sequence: Synthetic oligonucleotide
  Target: SCNA; (+) strand; PAM type: YTN; PAM sequence: TTA
ctttttaatccggaaataag

SEQ ID NO: 68779 - DNA, 20 bp, Artificial Sequence
  Description of Artificial Sequence: Synthetic oligonucleotide
  Target: SCNA; (+) strand; PAM type: YTN; PAM sequence: CTT
tttaatccggaaataagtta

SEQ ID NO: 68780 - DNA, 20 bp, Artificial Sequence
  Description of Artificial Sequence: Synthetic oligonucleotide
  Target: SCNA; (+) strand; PAM type: YTN; PAM sequence: TTT
ttaatccggaaataagttaa

SEQ ID NO: 68781 - DNA, 20 bp, Artificial Sequence
  Description of Artificial Sequence: Synthetic oligonucleotide
  Target: SCNA; (+) strand; PAM type: YTN; PAM sequence: TTT
taatccggaaataagttaaa

SEQ ID NO: 68782 - DNA, 20 bp, Artificial Sequence
  Description of Artificial Sequence: Synthetic oligonucleotide
  Target: SCNA; (+) strand; PAM type: YTN; PAM sequence: TTT
aatccggaaataagttaaag

SEQ ID NO: 68783 - DNA, 20 bp, Artificial Sequence
  Description of Artificial Sequence: Synthetic oligonucleotide
  Target: SCNA; (+) strand; PAM type: YTN; PAM sequence: TTA
atccggaaataagttaaagc

SEQ ID NO: 68784 - DNA, 20 bp, Artificial Sequence
  Description of Artificial Sequence: Synthetic oligonucleotide
  Target: SCNA; (+) strand; PAM type: YTN; PAM sequence: TTA
aagcaaataataaaaattta

SEQ ID NO: 68785 - DNA, 20 bp, Artificial Sequence
  Description of Artificial Sequence: Synthetic oligonucleotide
  Target: SCNA; (+) strand; PAM type: YTN; PAM sequence: TTT
atatttaaatcacacaacat

SEQ ID NO: 68786 - DNA, 20 bp, Artificial Sequence
  Description of Artificial Sequence: Synthetic oligonucleotide
  Target: SCNA; (+) strand; PAM type: YTN; PAM sequence: TTA
tatttaaatcacacaacatg

SEQ ID NO: 68787 - DNA, 20 bp, Artificial Sequence
  Description of Artificial Sequence: Synthetic oligonucleotide
  Target: SCNA; (+) strand; PAM type: YTN; PAM sequence: TTT
aaatcacacaacatgtttta

SEQ ID NO: 68788 - DNA, 20 bp, Artificial Sequence
  Description of Artificial Sequence: Synthetic oligonucleotide
  Target: SCNA; (+) strand; PAM type: YTN; PAM sequence: TTA
aatcacacaacatgttttat

SEQ ID NO: 68789 - DNA, 20 bp, Artificial Sequence
  Description of Artificial Sequence: Synthetic oligonucleotide
  Target: SCNA; (+) strand; PAM type: YTN; PAM sequence: TTT
tatcatgaataataaatgtt

SEQ ID NO: 68790 - DNA, 20 bp, Artificial Sequence
  Description of Artificial Sequence: Synthetic oligonucleotide
  Target: SCNA; (+) strand; PAM type: YTN; PAM sequence: TTT
atcatgaataataaatgttt

SEQ ID NO: 68791 - DNA, 20 bp, Artificial Sequence
  Description of Artificial Sequence: Synthetic oligonucleotide
  Target: SCNA; (+) strand; PAM type: YTN; PAM sequence: TTA
tcatgaataataaatgtttt

SEQ ID NO: 68792 - DNA, 20 bp, Artificial Sequence
  Description of Artificial Sequence: Synthetic oligonucleotide
  Target: SCNA; (+) strand; PAM type: YTN; PAM sequence: TTT
ttaaagtttaaaaatgtact

SEQ ID NO: 68793 - DNA, 20 bp, Artificial Sequence
  Description of Artificial Sequence: Synthetic oligonucleotide
  Target: SCNA; (+) strand; PAM type: YTN; PAM sequence: TTT
taaagtttaaaaatgtactt

SEQ ID NO: 68794 - DNA, 20 bp, Artificial Sequence
  Description of Artificial Sequence: Synthetic oligonucleotide
  Target: SCNA; (+) strand; PAM type: YTN; PAM sequence: TTT
aaagtttaaaaatgtacttg

SEQ ID NO: 68795 - DNA, 20 bp, Artificial Sequence
  Description of Artificial Sequence: Synthetic oligonucleotide
  Target: SCNA; (+) strand; PAM type: YTN; PAM sequence: TTA
aagtttaaaaatgtacttgt

SEQ ID NO: 68796 - DNA, 20 bp, Artificial Sequence
  Description of Artificial Sequence: Synthetic oligonucleotide
  Target: SCNA; (+) strand; PAM type: YTN; PAM sequence: TTT
aaaaatgtacttgttacctt

SEQ ID NO: 68797 - DNA, 20 bp, Artificial Sequence
  Description of Artificial Sequence: Synthetic oligonucleotide
  Target: SCNA; (+) strand; PAM type: YTN; PAM sequence: TTA
aaaatgtacttgttaccttg

SEQ ID NO: 68798 - DNA, 20 bp, Artificial Sequence
  Description of Artificial Sequence: Synthetic oligonucleotide
  Target: SCNA; (+) strand; PAM type: YTN; PAM sequence: CTT
gttaccttgtgggtattcct

SEQ ID NO: 68799 - DNA, 20 bp, Artificial Sequence
  Description of Artificial Sequence: Synthetic oligonucleotide
  Target: SCNA; (+) strand; PAM type: YTN; PAM sequence: TTG
ttaccttgtgggtattcctg

SEQ ID NO: 68800 - DNA, 20 bp, Artificial Sequence
  Description of Artificial Sequence: Synthetic oligonucleotide
  Target: SCNA; (+) strand; PAM type: YTN; PAM sequence: TTA
ccttgtgggtattcctgaac

SEQ ID NO: 68801 - DNA, 20 bp, Artificial Sequence
  Description of Artificial Sequence: Synthetic oligonucleotide
  Target: SCNA; (+) strand; PAM type: YTN; PAM sequence: CTT
gtgggtattcctgaacatga

SEQ ID NO: 68802 - DNA, 20 bp, Artificial Sequence
  Description of Artificial Sequence: Synthetic oligonucleotide
  Target: SCNA; (+) strand; PAM type: YTN; PAM sequence: TTG
tgggtattcctgaacatgat

SEQ ID NO: 68803 - DNA, 20 bp, Artificial Sequence
  Description of Artificial Sequence: Synthetic oligonucleotide
  Target: SCNA; (+) strand; PAM type: YTN; PAM sequence: TTC
ctgaacatgattaggatttt

SEQ ID NO: 68804 - DNA, 20 bp, Artificial Sequence
  Description of Artificial Sequence: Synthetic oligonucleotide
  Target: SCNA; (+) strand; PAM type: YTN; PAM sequence: CTG
aacatgattaggatttttat

SEQ ID NO: 68805 - DNA, 20 bp, Artificial Sequence
  Description of Artificial Sequence: Synthetic oligonucleotide
  Target: SCNA; (+) strand; PAM type: YTN; PAM sequence: TTA
ggatttttatttctccaagt

SEQ ID NO: 68806 - DNA, 20 bp, Artificial Sequence
  Description of Artificial Sequence: Synthetic oligonucleotide
  Target: SCNA; (+) strand; PAM type: YTN; PAM sequence: TTT
ttatttctccaagtattttt

SEQ ID NO: 68807 - DNA, 20 bp, Artificial Sequence
  Description of Artificial Sequence: Synthetic oligonucleotide
  Target: SCNA; (+) strand; PAM type: YTN; PAM sequence: TTT
tatttctccaagtattttta

SEQ ID NO: 68808 - DNA, 20 bp, Artificial Sequence
  Description of Artificial Sequence: Synthetic oligonucleotide
  Target: SCNA; (+) strand; PAM type: YTN; PAM sequence: TTT
atttctccaagtatttttat

SEQ ID NO: 68809 - DNA, 20 bp, Artificial Sequence
  Description of Artificial Sequence: Synthetic oligonucleotide
  Target: SCNA; (+) strand; PAM type: YTN; PAM sequence: TTA
tttctccaagtatttttatt

SEQ ID NO: 68810 - DNA, 20 bp, Artificial Sequence
  Description of Artificial Sequence: Synthetic oligonucleotide
  Target: SCNA; (+) strand; PAM type: YTN; PAM sequence: TTT
ctccaagtatttttattcac

SEQ ID NO: 68811 - DNA, 20 bp, Artificial Sequence
  Description of Artificial Sequence: Synthetic oligonucleotide
  Target: SCNA; (+) strand; PAM type: YTN; PAM sequence: TTC
tccaagtatttttattcact

SEQ ID NO: 68812 - DNA, 20 bp, Artificial Sequence
  Description of Artificial Sequence: Synthetic oligonucleotide
  Target: SCNA; (+) strand; PAM type: YTN; PAM sequence: CTC
caagtatttttattcactca

SEQ ID NO: 68813 - DNA, 20 bp, Artificial Sequence
  Description of Artificial Sequence: Synthetic oligonucleotide
  Target: SCNA; (+) strand; PAM type: YTN; PAM sequence: TTT
ttattcactcacagaatcaa

SEQ ID NO: 68814 - DNA, 20 bp, Artificial Sequence
  Description of Artificial Sequence: Synthetic oligonucleotide
  Target: SCNA; (+) strand; PAM type: YTN; PAM sequence: TTT
tattcactcacagaatcaaa

SEQ ID NO: 68815 - DNA, 20 bp, Artificial Sequence
  Description of Artificial Sequence: Synthetic oligonucleotide
  Target: SCNA; (+) strand; PAM type: YTN; PAM sequence: TTT
attcactcacagaatcaaaa

SEQ ID NO: 68816 - DNA, 20 bp, Artificial Sequence
  Description of Artificial Sequence: Synthetic oligonucleotide
  Target: SCNA; (+) strand; PAM type: YTN; PAM sequence: TTA
ttcactcacagaatcaaaat

SEQ ID NO: 68817 - DNA, 20 bp, Artificial Sequence
  Description of Artificial Sequence: Synthetic oligonucleotide
  Target: SCNA; (+) strand; PAM type: YTN; PAM sequence: TTC
actcacagaatcaaaatgtc

SEQ ID NO: 68818 - DNA, 20 bp, Artificial Sequence
  Description of Artificial Sequence: Synthetic oligonucleotide
  Target: SCNA; (+) strand; PAM type: YTN; PAM sequence: CTC
acagaatcaaaatgtcaagg

SEQ ID NO: 68819 - DNA, 20 bp, Artificial Sequence
  Description of Artificial Sequence: Synthetic oligonucleotide
  Target: SCNA; (+) strand; PAM type: YTN; PAM sequence: CTA
tataagttttcatcaagtgc

SEQ ID NO: 68820 - DNA, 20 bp, Artificial Sequence
  Description of Artificial Sequence: Synthetic oligonucleotide
  Target: SCNA; (+) strand; PAM type: YTN; PAM sequence: TTT
tcatcaagtgctaatttagc

SEQ ID NO: 68821 - DNA, 20 bp, Artificial Sequence
  Description of Artificial Sequence: Synthetic oligonucleotide
  Target: SCNA; (+) strand; PAM type: YTN; PAM sequence: TTT
catcaagtgctaatttagca

SEQ ID NO: 68822 - DNA, 20 bp, Artificial Sequence
  Description of Artificial Sequence: Synthetic oligonucleotide
  Target: SCNA; (+) strand; PAM type: YTN; PAM sequence: TTC
atcaagtgctaatttagcat

SEQ ID NO: 68823 - DNA, 20 bp, Artificial Sequence
  Description of Artificial Sequence: Synthetic oligonucleotide
  Target: SCNA; (+) strand; PAM type: YTN; PAM sequence: CTA
atttagcatctaagttttta

SEQ ID NO: 68824 - DNA, 20 bp, Artificial Sequence
  Description of Artificial Sequence: Synthetic oligonucleotide
  Target: SCNA; (+) strand; PAM type: YTN; PAM sequence: TTT
agcatctaagtttttattaa

SEQ ID NO: 68825 - DNA, 20 bp, Artificial Sequence
  Description of Artificial Sequence: Synthetic oligonucleotide
  Target: SCNA; (+) strand; PAM type: YTN; PAM sequence: TTA
gcatctaagtttttattaat

SEQ ID NO: 68826 - DNA, 20 bp, Artificial Sequence
  Description of Artificial Sequence: Synthetic oligonucleotide
  Target: SCNA; (+) strand; PAM type: YTN; PAM sequence: CTA
agtttttattaattaatttg

SEQ ID NO: 68827 - DNA, 20 bp, Artificial Sequence
  Description of Artificial Sequence: Synthetic oligonucleotide
  Target: SCNA; (+) strand; PAM type: YTN; PAM sequence: TTT
ttattaattaatttgtaaag

SEQ ID NO: 68828 - DNA, 20 bp, Artificial Sequence
  Description of Artificial Sequence: Synthetic oligonucleotide
  Target: SCNA; (+) strand; PAM type: YTN; PAM sequence: TTT
tattaattaatttgtaaagg

SEQ ID NO: 68829 - DNA, 20 bp, Artificial Sequence
  Description of Artificial Sequence: Synthetic oligonucleotide
  Target: SCNA; (+) strand; PAM type: YTN; PAM sequence: TTT
attaattaatttgtaaagga

SEQ ID NO: 68830 - DNA, 20 bp, Artificial Sequence
  Description of Artificial Sequence: Synthetic oligonucleotide
  Target: SCNA; (+) strand; PAM type: YTN; PAM sequence: TTA
ttaattaatttgtaaaggaa

SEQ ID NO: 68831 - DNA, 20 bp, Artificial Sequence
  Description of Artificial Sequence: Synthetic oligonucleotide
  Target: SCNA; (+) strand; PAM type: YTN; PAM sequence: TTA
attaatttgtaaaggaaata

SEQ ID NO: 68832 - DNA, 20 bp, Artificial Sequence
  Description of Artificial Sequence: Synthetic oligonucleotide
  Target: SCNA; (+) strand; PAM type: YTN; PAM sequence: TTA
atttgtaaaggaaataataa

SEQ ID NO: 68833 - DNA, 20 bp, Artificial Sequence
  Description of Artificial Sequence: Synthetic oligonucleotide
  Target: SCNA; (+) strand; PAM type: YTN; PAM sequence: TTT
gtaaaggaaataataatgag

SEQ ID NO: 68834 - DNA, 20 bp, Artificial Sequence
  Description of Artificial Sequence: Synthetic oligonucleotide
  Target: SCNA; (+) strand; PAM type: YTN; PAM sequence: TTG
taaaggaaataataatgaga

SEQ ID NO: 68835 - DNA, 20 bp, Artificial Sequence
  Description of Artificial Sequence: Synthetic oligonucleotide
  Target: SCNA; (+) strand; PAM type: YTN; PAM sequence: CTC
ctgtggtgagctccatttcc

SEQ ID NO: 68836 - DNA, 20 bp, Artificial Sequence
  Description of Artificial Sequence: Synthetic oligonucleotide
  Target: SCNA; (+) strand; PAM type: YTN; PAM sequence: CTG
tggtgagctccatttccaga

SEQ ID NO: 68837 - DNA, 20 bp, Artificial Sequence
  Description of Artificial Sequence: Synthetic oligonucleotide
  Target: SCNA; (+) strand; PAM type: YTN; PAM sequence: CTC
catttccagattccaacgaa

SEQ ID NO: 68838 - DNA, 20 bp, Artificial Sequence
  Description of Artificial Sequence: Synthetic oligonucleotide
  Target: SCNA; (+) strand; PAM type: YTN; PAM sequence: TTT
ccagattccaacgaaaccat

SEQ ID NO: 68839 - DNA, 20 bp, Artificial Sequence
  Description of Artificial Sequence: Synthetic oligonucleotide
  Target: SCNA; (+) strand; PAM type: YTN; PAM sequence: TTC
cagattccaacgaaaccatt

SEQ ID NO: 68840 - DNA, 20 bp, Artificial Sequence
  Description of Artificial Sequence: Synthetic oligonucleotide
  Target: SCNA; (+) strand; PAM type: YTN; PAM sequence: TTC
caacgaaaccattaaaatat

SEQ ID NO: 68841 - DNA, 20 bp, Artificial Sequence
  Description of Artificial Sequence: Synthetic oligonucleotide
  Target: SCNA; (+) strand; PAM type: YTN; PAM sequence: TTA
aaatatttatggcactgagg

SEQ ID NO: 68842 - DNA, 20 bp, Artificial Sequence
  Description of Artificial Sequence: Synthetic oligonucleotide
  Target: SCNA; (+) strand; PAM type: YTN; PAM sequence: TTT
atggcactgaggctgaatca

SEQ ID NO: 68843 - DNA, 20 bp, Artificial Sequence
  Description of Artificial Sequence: Synthetic oligonucleotide
  Target: SCNA; (+) strand; PAM type: YTN; PAM sequence: TTA
tggcactgaggctgaatcag

SEQ ID NO: 68844 - DNA, 20 bp, Artificial Sequence
  Description of Artificial Sequence: Synthetic oligonucleotide
  Target: SCNA; (+) strand; PAM type: YTN; PAM sequence: CTG
aggctgaatcagacgggtct

SEQ ID NO: 68845 - DNA, 20 bp, Artificial Sequence
  Description of Artificial Sequence: Synthetic oligonucleotide
  Target: SCNA; (+) strand; PAM type: YTN; PAM sequence: CTG
aatcagacgggtcttgtgta

SEQ ID NO: 68846 - DNA, 20 bp, Artificial Sequence
  Description of Artificial Sequence: Synthetic oligonucleotide
  Target: SCNA; (+) strand; PAM type: YTN; PAM sequence: CTT
gtgtactctcttgtgtggcc

SEQ ID NO: 68847 - DNA, 20 bp, Artificial Sequence
  Description of Artificial Sequence: Synthetic oligonucleotide
  Target: SCNA; (+) strand; PAM type: YTN; PAM sequence: TTG
tgtactctcttgtgtggcca

SEQ ID NO: 68848 - DNA, 20 bp, Artificial Sequence
  Description of Artificial Sequence: Synthetic oligonucleotide
  Target: SCNA; (+) strand; PAM type: YTN; PAM sequence: CTC
tcttgtgtggccatattgtg

SEQ ID NO: 68849 - DNA, 20 bp, Artificial Sequence
  Description of Artificial Sequence: Synthetic oligonucleotide
  Target: SCNA; (+) strand; PAM type: YTN; PAM sequence: CTC
ttgtgtggccatattgtgta

SEQ ID NO: 68850 - DNA, 20 bp, Artificial Sequence
  Description of Artificial Sequence: Synthetic oligonucleotide
  Target: SCNA; (+) strand; PAM type: YTN; PAM sequence: CTT
gtgtggccatattgtgtagc

SEQ ID NO: 68851 - DNA, 20 bp, Artificial Sequence
  Description of Artificial Sequence: Synthetic oligonucleotide
  Target: SCNA; (+) strand; PAM type: YTN; PAM sequence: TTG
tgtggccatattgtgtagca

SEQ ID NO: 68852 - DNA, 20 bp, Artificial Sequence
  Description of Artificial Sequence: Synthetic oligonucleotide
  Target: SCNA; (+) strand; PAM type: YTN; PAM sequence: TTG
tgtagcaacagtgggtttcg

SEQ ID NO: 68853 - DNA, 20 bp, Artificial Sequence
  Description of Artificial Sequence: Synthetic oligonucleotide
  Target: SCNA; (+) strand; PAM type: YTN; PAM sequence: TTT
cgaataataagattcagtca

SEQ ID NO: 68854 - DNA, 20 bp, Artificial Sequence
  Description of Artificial Sequence: Synthetic oligonucleotide
  Target: SCNA; (+) strand; PAM type: YTN; PAM sequence: TTC
gaataataagattcagtcat

SEQ ID NO: 68855 - DNA, 20 bp, Artificial Sequence
  Description of Artificial Sequence: Synthetic oligonucleotide
  Target: SCNA; (+) strand; PAM type: YTN; PAM sequence: TTC
agtcatccatttagactcca

SEQ ID NO: 68856 - DNA, 20 bp, Artificial Sequence
  Description of Artificial Sequence: Synthetic oligonucleotide
  Target: SCNA; (+) strand; PAM type: YTN; PAM sequence: TTT
agactccaattggagctcag

SEQ ID NO: 68857 - DNA, 20 bp, Artificial Sequence
  Description of Artificial Sequence: Synthetic oligonucleotide
  Target: SCNA; (+) strand; PAM type: YTN; PAM sequence: TTA
gactccaattggagctcagg

SEQ ID NO: 68858 - DNA, 20 bp, Artificial Sequence
  Description of Artificial Sequence: Synthetic oligonucleotide
  Target: SCNA; (+) strand; PAM type: YTN; PAM sequence: CTC
caattggagctcaggcaact

SEQ ID NO: 68859 - DNA, 20 bp, Artificial Sequence
  Description of Artificial Sequence: Synthetic oligonucleotide
  Target: SCNA; (+) strand; PAM type: YTN; PAM sequence: TTG
gagctcaggcaacttcaatt

SEQ ID NO: 68860 - DNA, 20 bp, Artificial Sequence
  Description of Artificial Sequence: Synthetic oligonucleotide
  Target: SCNA; (+) strand; PAM type: YTN; PAM sequence: CTC
aggcaacttcaatttgtgat

SEQ ID NO: 68861 - DNA, 20 bp, Artificial Sequence
  Description of Artificial Sequence: Synthetic oligonucleotide
  Target: SCNA; (+) strand; PAM type: YTN; PAM sequence: CTT
caatttgtgattataatgat

SEQ ID NO: 68862 - DNA, 20 bp, Artificial Sequence
  Description of Artificial Sequence: Synthetic oligonucleotide
  Target: SCNA; (+) strand; PAM type: YTN; PAM sequence: TTC
aatttgtgattataatgatt

SEQ ID NO: 68863 - DNA, 20 bp, Artificial Sequence
  Description of Artificial Sequence: Synthetic oligonucleotide
  Target: SCNA; (+) strand; PAM type: YTN; PAM sequence: TTT
gtgattataatgattaactt

SEQ ID NO: 68864 - DNA, 20 bp, Artificial Sequence
  Description of Artificial Sequence: Synthetic oligonucleotide
  Target: SCNA; (+) strand; PAM type: YTN; PAM sequence: TTG
tgattataatgattaacttc

SEQ ID NO: 68865 - DNA, 20 bp, Artificial Sequence
  Description of Artificial Sequence: Synthetic oligonucleotide
  Target: SCNA; (+) strand; PAM type: YTN; PAM sequence: TTA
taatgattaacttcaaaaag

SEQ ID NO: 68866 - DNA, 20 bp, Artificial Sequence
  Description of Artificial Sequence: Synthetic oligonucleotide
  Target: SCNA; (+) strand; PAM type: YTN; PAM sequence: TTA
acttcaaaaagatgcactat

SEQ ID NO: 68867 - DNA, 20 bp, Artificial Sequence
  Description of Artificial Sequence: Synthetic oligonucleotide
  Target: SCNA; (+) strand; PAM type: YTN; PAM sequence: CTT
caaaaagatgcactatttgt

SEQ ID NO: 68868 - DNA, 20 bp, Artificial Sequence
  Description of Artificial Sequence: Synthetic oligonucleotide
  Target: SCNA; (+) strand; PAM type: YTN; PAM sequence: TTC
aaaaagatgcactatttgta

SEQ ID NO: 68869 - DNA, 20 bp, Artificial Sequence
  Description of Artificial Sequence: Synthetic oligonucleotide
  Target: SCNA; (+) strand; PAM type: YTN; PAM sequence: CTA
tttgtagacctatgttgaaa

SEQ ID NO: 68870 - DNA, 20 bp, Artificial Sequence
  Description of Artificial Sequence: Synthetic oligonucleotide
  Target: SCNA; (+) strand; PAM type: YTN; PAM sequence: TTT
gtagacctatgttgaaactt

SEQ ID NO: 68871 - DNA, 20 bp, Artificial Sequence
  Description of Artificial Sequence: Synthetic oligonucleotide
  Target: SCNA; (+) strand; PAM type: YTN; PAM sequence: TTG
tagacctatgttgaaactta

SEQ ID NO: 68872 - DNA, 20 bp, Artificial Sequence
  Description of Artificial Sequence: Synthetic oligonucleotide
  Target: SCNA; (+) strand; PAM type: YTN; PAM sequence: CTA
tgttgaaacttatgcagtgg

SEQ ID NO: 68873 - DNA, 20 bp, Artificial Sequence
  Description of Artificial Sequence: Synthetic oligonucleotide
  Target: SCNA; (+) strand; PAM type: YTN; PAM sequence: TTG
aaacttatgcagtggaacta

SEQ ID NO: 68874 - DNA, 20 bp, Artificial Sequence
  Description of Artificial Sequence: Synthetic oligonucleotide
  Target: SCNA; (+) strand; PAM type: YTN; PAM sequence: CTT
atgcagtggaactaaaaagc

SEQ ID NO: 68875 - DNA, 20 bp, Artificial Sequence
  Description of Artificial Sequence: Synthetic oligonucleotide
  Target: SCNA; (+) strand; PAM type: YTN; PAM sequence: TTA
tgcagtggaactaaaaagcc

SEQ ID NO: 68876 - DNA, 20 bp, Artificial Sequence
  Description of Artificial Sequence: Synthetic oligonucleotide
  Target: SCNA; (+) strand; PAM type: YTN; PAM sequence: CTA
aaaagccacctatttttata

SEQ ID NO: 68877 - DNA, 20 bp, Artificial Sequence
  Description of Artificial Sequence: Synthetic oligonucleotide
  Target: SCNA; (+) strand; PAM type: YTN; PAM sequence: CTA
tttttataataaaaaggcac

SEQ ID NO: 68878 - DNA, 20 bp, Artificial Sequence
  Description of Artificial Sequence: Synthetic oligonucleotide
  Target: SCNA; (+) strand; PAM type: YTN; PAM sequence: TTT
ttataataaaaaggcacaaa

SEQ ID NO: 68879 - DNA, 20 bp, Artificial Sequence
  Description of Artificial Sequence: Synthetic oligonucleotide
  Target: SCNA; (+) strand; PAM type: YTN; PAM sequence: TTT
tataataaaaaggcacaaat

SEQ ID NO: 68880 - DNA, 20 bp, Artificial Sequence
  Description of Artificial Sequence: Synthetic oligonucleotide
  Target: SCNA; (+) strand; PAM type: YTN; PAM sequence: TTT
ataataaaaaggcacaaata

SEQ ID NO: 68881 - DNA, 20 bp, Artificial Sequence
  Description of Artificial Sequence: Synthetic oligonucleotide
  Target: SCNA; (+) strand; PAM type: YTN; PAM sequence: TTA
taataaaaaggcacaaatac

SEQ ID NO: 68882 - DNA, 20 bp, Artificial Sequence
  Description of Artificial Sequence: Synthetic oligonucleotide
  Target: SCNA; (+) strand; PAM type: YTN; PAM sequence: TTC
attggaaaatcttgaacgtt

SEQ ID NO: 68883 - DNA, 20 bp, Artificial Sequence
  Description of Artificial Sequence: Synthetic oligonucleotide
  Target: SCNA; (+) strand; PAM type: YTN; PAM sequence: TTG
gaaaatcttgaacgtttcaa

SEQ ID NO: 68884 - DNA, 20 bp, Artificial Sequence
  Description of Artificial Sequence: Synthetic oligonucleotide
  Target: SCNA; (+) strand; PAM type: YTN; PAM sequence: CTT
gaacgtttcaaatataatta

SEQ ID NO: 68885 - DNA, 20 bp, Artificial Sequence
  Description of Artificial Sequence: Synthetic oligonucleotide
  Target: SCNA; (+) strand; PAM type: YTN; PAM sequence: TTG
aacgtttcaaatataattat

SEQ ID NO: 68886 - DNA, 20 bp, Artificial Sequence
  Description of Artificial Sequence: Synthetic oligonucleotide
  Target: SCNA; (+) strand; PAM type: YTN; PAM sequence: TTT
caaatataattatcacaaat

SEQ ID NO: 68887 - DNA, 20 bp, Artificial Sequence
  Description of Artificial Sequence: Synthetic oligonucleotide
  Target: SCNA; (+) strand; PAM type: YTN; PAM sequence: TTC
aaatataattatcacaaatg

SEQ ID NO: 68888 - DNA, 20 bp, Artificial Sequence
  Description of Artificial Sequence: Synthetic oligonucleotide
  Target: SCNA; (+) strand; PAM type: YTN; PAM sequence: TTA
tcacaaatgcaaatataaaa

SEQ ID NO: 68889 - DNA, 20 bp, Artificial Sequence
  Description of Artificial Sequence: Synthetic oligonucleotide
  Target: SCNA; (+) strand; PAM type: YTN; PAM sequence: TTT
gttaatattatactttcatt

SEQ ID NO: 68890 - DNA, 20 bp, Artificial Sequence
  Description of Artificial Sequence: Synthetic oligonucleotide
  Target: SCNA; (+) strand; PAM type: YTN; PAM sequence: TTG
ttaatattatactttcattt

SEQ ID NO: 68891 - DNA, 20 bp, Artificial Sequence
  Description of Artificial Sequence: Synthetic oligonucleotide
  Target: SCNA; (+) strand; PAM type: YTN; PAM sequence: TTA
atattatactttcatttaat

SEQ ID NO: 68892 - DNA, 20 bp, Artificial Sequence
  Description of Artificial Sequence: Synthetic oligonucleotide
  Target: SCNA; (+) strand; PAM type: YTN; PAM sequence: TTA
tactttcatttaatcagttc

SEQ ID NO: 68893 - DNA, 20 bp, Artificial Sequence
  Description of Artificial Sequence: Synthetic oligonucleotide
  Target: SCNA; (+) strand; PAM type: YTN; PAM sequence: CTT
tcatttaatcagttcttcta

SEQ ID NO: 68894 - DNA, 20 bp, Artificial Sequence
  Description of Artificial Sequence: Synthetic oligonucleotide
  Target: SCNA; (+) strand; PAM type: YTN; PAM sequence: TTT
catttaatcagttcttctaa

SEQ ID NO: 68895 - DNA, 20 bp, Artificial Sequence
  Description of Artificial Sequence: Synthetic oligonucleotide
  Target: SCNA; (+) strand; PAM type: YTN; PAM sequence: TTC
atttaatcagttcttctaag

SEQ ID NO: 68896 - DNA, 20 bp, Artificial Sequence
  Description of Artificial Sequence: Synthetic oligonucleotide
  Target: SCNA; (+) strand; PAM type: YTN; PAM sequence: TTT
aatcagttcttctaagtaag

SEQ ID NO: 68897 - DNA, 20 bp, Artificial Sequence
  Description of Artificial Sequence: Synthetic oligonucleotide
  Target: SCNA; (+) strand; PAM type: YTN; PAM sequence: TTA
atcagttcttctaagtaagg

SEQ ID NO: 68898 - DNA, 20 bp, Artificial Sequence
  Description of Artificial Sequence: Synthetic oligonucleotide
  Target: SCNA; (+) strand; PAM type: YTN; PAM sequence: TTC
ttctaagtaaggcaaatata

SEQ ID NO: 68899 - DNA, 20 bp, Artificial Sequence
  Description of Artificial Sequence: Synthetic oligonucleotide
  Target: SCNA; (+) strand; PAM type: YTN; PAM sequence: CTT
ctaagtaaggcaaatatatg

SEQ ID NO: 68900 - DNA, 20 bp, Artificial Sequence
  Description of Artificial Sequence: Synthetic oligonucleotide
  Target: SCNA; (+) strand; PAM type: YTN; PAM sequence: TTC
taagtaaggcaaatatatga

SEQ ID NO: 68901 - DNA, 20 bp, Artificial Sequence
  Description of Artificial Sequence: Synthetic oligonucleotide
  Target: SCNA; (+) strand; PAM type: YTN; PAM sequence: CTA
agtaaggcaaatatatgaat

SEQ ID NO: 68902 - DNA, 20 bp, Artificial Sequence
  Description of Artificial Sequence: Synthetic oligonucleotide
  Target: SCNA; (+) strand; PAM type: YTN; PAM sequence: TTT
tttaatatacaaaaataccc

SEQ ID NO: 68903 - DNA, 20 bp, Artificial Sequence
  Description of Artificial Sequence: Synthetic oligonucleotide
  Target: SCNA; (+) strand; PAM type: YTN; PAM sequence: TTT
ttaatatacaaaaatacccc

SEQ ID NO: 68904 - DNA, 20 bp, Artificial Sequence
  Description of Artificial Sequence: Synthetic oligonucleotide
  Target: SCNA; (+) strand; PAM type: YTN; PAM sequence: TTT
taatatacaaaaataccccc

SEQ ID NO: 68905 - DNA, 20 bp, Artificial Sequence
  Description of Artificial Sequence: Synthetic oligonucleotide
  Target: SCNA; (+) strand; PAM type: YTN; PAM sequence: TTT
aatatacaaaaatacccccc

SEQ ID NO: 68906 - DNA, 20 bp, Artificial Sequence
  Description of Artificial Sequence: Synthetic oligonucleotide
  Target: SCNA; (+) strand; PAM type: YTN; PAM sequence: TTA
atatacaaaaataccccccc

SEQ ID NO: 68907 - DNA, 20 bp, Artificial Sequence
  Description of Artificial Sequence: Synthetic oligonucleotide
  Target: SCNA; (+) strand; PAM type: YTN; PAM sequence: CTC
cattaagtatatctatatga

SEQ ID NO: 68908 - DNA, 20 bp, Artificial Sequence
  Description of Artificial Sequence: Synthetic oligonucleotide
  Target: SCNA; (+) strand; PAM type: YTN; PAM sequence: TTA
agtatatctatatgaccatt

SEQ ID NO: 68909 - DNA, 20 bp, Artificial Sequence
  Description of Artificial Sequence: Synthetic oligonucleotide
  Target: SCNA; (+) strand; PAM type: YTN; PAM sequence: CTA
tatgaccattgggtaagatt

SEQ ID NO: 68910 - DNA, 20 bp, Artificial Sequence
  Description of Artificial Sequence: Synthetic oligonucleotide
  Target: SCNA; (+) strand; PAM type: YTN; PAM sequence: TTG
ggtaagattttttatgatta

SEQ ID NO: 68911 - DNA, 20 bp, Artificial Sequence
  Description of Artificial Sequence: Synthetic oligonucleotide
  Target: SCNA; (+) strand; PAM type: YTN; PAM sequence: TTT
tttatgattattagtatggg

SEQ ID NO: 68912 - DNA, 20 bp, Artificial Sequence
  Description of Artificial Sequence: Synthetic oligonucleotide
  Target: SCNA; (+) strand; PAM type: YTN; PAM sequence: TTT
ttatgattattagtatggga

SEQ ID NO: 68913 - DNA, 20 bp, Artificial Sequence
  Description of Artificial Sequence: Synthetic oligonucleotide
  Target: SCNA; (+) strand; PAM type: YTN; PAM sequence: TTT
tatgattattagtatgggaa

SEQ ID NO: 68914 - DNA, 20 bp, Artificial Sequence
  Description of Artificial Sequence: Synthetic oligonucleotide
  Target: SCNA; (+) strand; PAM type: YTN; PAM sequence: TTT
atgattattagtatgggaaa

SEQ ID NO: 68915 - DNA, 20 bp, Artificial Sequence
  Description of Artificial Sequence: Synthetic oligonucleotide
  Target: SCNA; (+) strand; PAM type: YTN; PAM sequence: TTA
tgattattagtatgggaaaa

SEQ ID NO: 68916 - DNA, 20 bp, Artificial Sequence
  Description of Artificial Sequence: Synthetic oligonucleotide
  Target: SCNA; (+) strand; PAM type: YTN; PAM sequence: TTA
ttagtatgggaaaattgtga

SEQ ID NO: 68917 - DNA, 20 bp, Artificial Sequence
  Description of Artificial Sequence: Synthetic oligonucleotide
  Target: SCNA; (+) strand; PAM type: YTN; PAM sequence: TTA
gtatgggaaaattgtgactg

SEQ ID NO: 68918 - DNA, 20 bp, Artificial Sequence
  Description of Artificial Sequence: Synthetic oligonucleotide
  Target: SCNA; (+) strand; PAM type: YTN; PAM sequence: TTG
tgactgtttagatatattaa

SEQ ID NO: 68919 - DNA, 20 bp, Artificial Sequence
  Description of Artificial Sequence: Synthetic oligonucleotide
  Target: SCNA; (+) strand; PAM type: YTN; PAM sequence: CTG
tttagatatattaaatatat

SEQ ID NO: 68920 - DNA, 20 bp, Artificial Sequence
  Description of Artificial Sequence: Synthetic oligonucleotide
  Target: SCNA; (+) strand; PAM type: YTN; PAM sequence: TTT
agatatattaaatatattaa

SEQ ID NO: 68921 - DNA, 20 bp, Artificial Sequence
  Description of Artificial Sequence: Synthetic oligonucleotide
  Target: SCNA; (+) strand; PAM type: YTN; PAM sequence: TTA
gatatattaaatatattaag

SEQ ID NO: 68922 - DNA, 20 bp, Artificial Sequence
  Description of Artificial Sequence: Synthetic oligonucleotide
  Target: SCNA; (+) strand; PAM type: YTN; PAM sequence: TTA
aatatattaagtaatatatt

SEQ ID NO: 68923 - DNA, 20 bp, Artificial Sequence
  Description of Artificial Sequence: Synthetic oligonucleotide
  Target: SCNA; (+) strand; PAM type: YTN; PAM sequence: TTA
agtaatatatttaatgattt

SEQ ID NO: 68924 - DNA, 20 bp, Artificial Sequence
  Description of Artificial Sequence: Synthetic oligonucleotide
  Target: SCNA; (+) strand; PAM type: YTN; PAM sequence: TTT
aatgatttaagattgttaaa

SEQ ID NO: 68925 - DNA, 20 bp, Artificial Sequence
  Description of Artificial Sequence: Synthetic oligonucleotide
  Target: SCNA; (+) strand; PAM type: YTN; PAM sequence: TTA
atgatttaagattgttaaat

SEQ ID NO: 68926 - DNA, 20 bp, Artificial Sequence
  Description of Artificial Sequence: Synthetic oligonucleotide
  Target: SCNA; (+) strand; PAM type: YTN; PAM sequence: TTT
aagattgttaaataatttat

SEQ ID NO: 68927 - DNA, 20 bp, Artificial Sequence
  Description of Artificial Sequence: Synthetic oligonucleotide
  Target: SCNA; (+) strand; PAM type: YTN; PAM sequence: TTA
agattgttaaataatttata

SEQ ID NO: 68928 - DNA, 20 bp, Artificial Sequence
  Description of Artificial Sequence: Synthetic oligonucleotide
  Target: SCNA; (+) strand; PAM type: YTN; PAM sequence: TTG
ttaaataatttatattaaaa

SEQ ID NO: 68929 - DNA, 20 bp, Artificial Sequence
  Description of Artificial Sequence: Synthetic oligonucleotide
  Target: SCNA; (+) strand; PAM type: YTN; PAM sequence: TTA
aataatttatattaaaattg

SEQ ID NO: 68930 - DNA, 20 bp, Artificial Sequence
  Description of Artificial Sequence: Synthetic oligonucleotide
  Target: SCNA; (+) strand; PAM type: YTN; PAM sequence: TTT
atattaaaattgaaacctca

SEQ ID NO: 68931 - DNA, 20 bp, Artificial Sequence
  Description of Artificial Sequence: Synthetic oligonucleotide
  Target: SCNA; (+) strand; PAM type: YTN; PAM sequence: TTA
tattaaaattgaaacctcat

SEQ ID NO: 68932 - DNA, 20 bp, Artificial Sequence
  Description of Artificial Sequence: Synthetic oligonucleotide
  Target: SCNA; (+) strand; PAM type: YTN; PAM sequence: TTA
aaattgaaacctcattttgc

SEQ ID NO: 68933 - DNA, 20 bp, Artificial Sequence
  Description of Artificial Sequence: Synthetic oligonucleotide
  Target: SCNA; (+) strand; PAM type: YTN; PAM sequence: TTG
aaacctcattttgccagtat

SEQ ID NO: 68934 - DNA, 20 bp, Artificial Sequence
  Description of Artificial Sequence: Synthetic oligonucleotide
  Target: SCNA; (+) strand; PAM type: YTN; PAM sequence: CTC
attttgccagtattaaaaat

SEQ ID NO: 68935 - DNA, 20 bp, Artificial Sequence
  Description of Artificial Sequence: Synthetic oligonucleotide
  Target: SCNA; (+) strand; PAM type: YTN; PAM sequence: TTT
tgccagtattaaaaatttca

SEQ ID NO: 68936 - DNA, 20 bp, Artificial Sequence
  Description of Artificial Sequence: Synthetic oligonucleotide
  Target: SCNA; (+) strand; PAM type: YTN; PAM sequence: TTT
gccagtattaaaaatttcaa

SEQ ID NO: 68937 - DNA, 20 bp, Artificial Sequence
  Description of Artificial Sequence: Synthetic oligonucleotide
  Target: SCNA; (+) strand; PAM type: YTN; PAM sequence: TTG
ccagtattaaaaatttcaaa

SEQ ID NO: 68938 - DNA, 20 bp, Artificial Sequence
  Description of Artificial Sequence: Synthetic oligonucleotide
  Target: SCNA; (+) strand; PAM type: YTN; PAM sequence: TTA
aaaatttcaaaatttaaata

SEQ ID NO: 68939 - DNA, 20 bp, Artificial Sequence
  Description of Artificial Sequence: Synthetic oligonucleotide
  Target: SCNA; (+) strand; PAM type: YTN; PAM sequence: TTT
caaaatttaaatacatatga

SEQ ID NO: 68940 - DNA, 20 bp, Artificial Sequence
  Description of Artificial Sequence: Synthetic oligonucleotide
  Target: SCNA; (+) strand; PAM type: YTN; PAM sequence: TTC
aaaatttaaatacatatgac

SEQ ID NO: 68941 - DNA, 20 bp, Artificial Sequence
  Description of Artificial Sequence: Synthetic oligonucleotide
  Target: SCNA; (+) strand; PAM type: YTN; PAM sequence: TTT
aaatacatatgacaccaatg

SEQ ID NO: 68942 - DNA, 20 bp, Artificial Sequence
  Description of Artificial Sequence: Synthetic oligonucleotide
  Target: SCNA; (+) strand; PAM type: YTN; PAM sequence: TTA
aatacatatgacaccaatgc

SEQ ID NO: 68943 - DNA, 20 bp, Artificial Sequence
  Description of Artificial Sequence: Synthetic oligonucleotide
  Target: SCNA; (+) strand; PAM type: YTN; PAM sequence: TTA
ctttgtcctgaacataagtt

SEQ ID NO: 68944 - DNA, 20 bp, Artificial Sequence
  Description of Artificial Sequence: Synthetic oligonucleotide
  Target: SCNA; (+) strand; PAM type: YTN; PAM sequence: CTT
tgtcctgaacataagtttta

SEQ ID NO: 68945 - DNA, 20 bp, Artificial Sequence
  Description of Artificial Sequence: Synthetic oligonucleotide
  Target: SCNA; (+) strand; PAM type: YTN; PAM sequence: TTT
gtcctgaacataagttttaa

SEQ ID NO: 68946 - DNA, 20 bp, Artificial Sequence
  Description of Artificial Sequence: Synthetic oligonucleotide
  Target: SCNA; (+) strand; PAM type: YTN; PAM sequence: TTG
tcctgaacataagttttaaa

SEQ ID NO: 68947 - DNA, 20 bp, Artificial Sequence
  Description of Artificial Sequence: Synthetic oligonucleotide
  Target: SCNA; (+) strand; PAM type: YTN; PAM sequence: CTG
aacataagttttaaaagaat

SEQ ID NO: 68948 - DNA, 20 bp, Artificial Sequence
  Description of Artificial Sequence: Synthetic oligonucleotide
  Target: SCNA; (+) strand; PAM type: YTN; PAM sequence: TTT
taaaagaatttaagtttaaa

SEQ ID NO: 68949 - DNA, 20 bp, Artificial Sequence
  Description of Artificial Sequence: Synthetic oligonucleotide
  Target: SCNA; (+) strand; PAM type: YTN; PAM sequence: TTT
aaaagaatttaagtttaaat

SEQ ID NO: 68950 - DNA, 20 bp, Artificial Sequence
  Description of Artificial Sequence: Synthetic oligonucleotide
  Target: SCNA; (+) strand; PAM type: YTN; PAM sequence: TTA
aaagaatttaagtttaaata

SEQ ID NO: 68951 - DNA, 20 bp, Artificial Sequence
  Description of Artificial Sequence: Synthetic oligonucleotide
  Target: SCNA; (+) strand; PAM type: YTN; PAM sequence: TTT
aagtttaaatattctcctaa

SEQ ID NO: 68952 - DNA, 20 bp, Artificial Sequence
  Description of Artificial Sequence: Synthetic oligonucleotide
  Target: SCNA; (+) strand; PAM type: YTN; PAM sequence: TTA
agtttaaatattctcctaaa

SEQ ID NO: 68953 - DNA, 20 bp, Artificial Sequence
  Description of Artificial Sequence: Synthetic oligonucleotide
  Target: SCNA; (+) strand; PAM type: YTN; PAM sequence: TTT
aaatattctcctaaatgctt

SEQ ID NO: 68954 - DNA, 20 bp, Artificial Sequence
  Description of Artificial Sequence: Synthetic oligonucleotide
  Target: SCNA; (+) strand; PAM type: YTN; PAM sequence: TTA
aatattctcctaaatgcttt

SEQ ID NO: 68955 - DNA, 20 bp, Artificial Sequence
  Description of Artificial Sequence: Synthetic oligonucleotide
  Target: SCNA; (+) strand; PAM type: YTN; PAM sequence: TTC
tcctaaatgctttgtgagac

SEQ ID NO: 68956 - DNA, 20 bp, Artificial Sequence
  Description of Artificial Sequence: Synthetic oligonucleotide
  Target: SCNA; (+) strand; PAM type: YTN; PAM sequence: CTC
ctaaatgctttgtgagactt

SEQ ID NO: 68957 - DNA, 20 bp, Artificial Sequence
  Description of Artificial Sequence: Synthetic oligonucleotide
  Target: SCNA; (+) strand; PAM type: YTN; PAM sequence: CTA
aatgctttgtgagacttaag

SEQ ID NO: 68958 - DNA, 20 bp, Artificial Sequence
  Description of Artificial Sequence: Synthetic oligonucleotide
  Target: SCNA; (+) strand; PAM type: YTN; PAM sequence: CTT
tgtgagacttaagataaaaa

SEQ ID NO: 68959 - DNA, 20 bp, Artificial Sequence
  Description of Artificial Sequence: Synthetic oligonucleotide
  Target: SCNA; (+) strand; PAM type: YTN; PAM sequence: TTT
gtgagacttaagataaaaaa

SEQ ID NO: 68960 - DNA, 20 bp, Artificial Sequence
  Description of Artificial Sequence: Synthetic oligonucleotide
  Target: SCNA; (+) strand; PAM type: YTN; PAM sequence: TTG
tgagacttaagataaaaaac

SEQ ID NO: 68961 - DNA, 20 bp, Artificial Sequence
  Description of Artificial Sequence: Synthetic oligonucleotide
  Target: SCNA; (+) strand; PAM type: YTN; PAM sequence: CTT
aagataaaaaacagttcctc

SEQ ID NO: 68962 - DNA, 20 bp, Artificial Sequence
  Description of Artificial Sequence: Synthetic oligonucleotide
  Target: SCNA; (+) strand; PAM type: YTN; PAM sequence: TTA
agataaaaaacagttcctca

SEQ ID NO: 68963 - DNA, 20 bp, Artificial Sequence
  Description of Artificial Sequence: Synthetic oligonucleotide
  Target: SCNA; (+) strand; PAM type: YTN; PAM sequence: TTC
ctcagaactcctgacaaagg

SEQ ID NO: 68964 - DNA, 20 bp, Artificial Sequence
  Description of Artificial Sequence: Synthetic oligonucleotide
  Target: SCNA; (+) strand; PAM type: YTN; PAM sequence: CTC
agaactcctgacaaaggggg

SEQ ID NO: 68965 - DNA, 20 bp, Artificial Sequence
  Description of Artificial Sequence: Synthetic oligonucleotide
  Target: SCNA; (+) strand; PAM type: YTN; PAM sequence: CTC
ctgacaaaggggggcagtaa

SEQ ID NO: 68966 - DNA, 20 bp, Artificial Sequence
  Description of Artificial Sequence: Synthetic oligonucleotide
  Target: SCNA; (+) strand; PAM type: YTN; PAM sequence: CTG
acaaaggggggcagtaaaga

SEQ ID NO: 68967 - DNA, 20 bp, Artificial Sequence
  Description of Artificial Sequence: Synthetic oligonucleotide
  Target: SCNA; (+) strand; PAM type: YTN; PAM sequence: TTT
ttatggagttcagggaaagc

SEQ ID NO: 68968 - DNA, 20 bp, Artificial Sequence
  Description of Artificial Sequence: Synthetic oligonucleotide
  Target: SCNA; (+) strand; PAM type: YTN; PAM sequence: TTT
tatggagttcagggaaagct

SEQ ID NO: 68969 - DNA, 20 bp, Artificial Sequence
  Description of Artificial Sequence: Synthetic oligonucleotide
  Target: SCNA; (+) strand; PAM type: YTN; PAM sequence: TTT
atggagttcagggaaagctg

SEQ ID NO: 68970 - DNA, 20 bp, Artificial Sequence
  Description of Artificial Sequence: Synthetic oligonucleotide
  Target: SCNA; (+) strand; PAM type: YTN; PAM sequence: TTA
tggagttcagggaaagctga

SEQ ID NO: 68971 - DNA, 20 bp, Artificial Sequence
  Description of Artificial Sequence: Synthetic oligonucleotide
  Target: SCNA; (+) strand; PAM type: YTN; PAM sequence: TTC
agggaaagctgaaaggcctt

SEQ ID NO: 68972 - DNA, 20 bp, Artificial Sequence
  Description of Artificial Sequence: Synthetic oligonucleotide
  Target: SCNA; (+) strand; PAM type: YTN; PAM sequence: CTG
aaaggcctttgtgtacattc

SEQ ID NO: 68973 - DNA, 20 bp, Artificial Sequence
  Description of Artificial Sequence: Synthetic oligonucleotide
  Target: SCNA; (+) strand; PAM type: YTN; PAM sequence: CTT
tgtgtacattccctattttc

SEQ ID NO: 68974 - DNA, 20 bp, Artificial Sequence
  Description of Artificial Sequence: Synthetic oligonucleotide
  Target: SCNA; (+) strand; PAM type: YTN; PAM sequence: TTT
gtgtacattccctattttct

SEQ ID NO: 68975 - DNA, 20 bp, Artificial Sequence
  Description of Artificial Sequence: Synthetic oligonucleotide
  Target: SCNA; (+) strand; PAM type: YTN; PAM sequence: TTG
tgtacattccctattttcta

SEQ ID NO: 68976 - DNA, 20 bp, Artificial Sequence
  Description of Artificial Sequence: Synthetic oligonucleotide
  Target: SCNA; (+) strand; PAM type: YTN; PAM sequence: TTC
cctattttctaaacagtaaa

SEQ ID NO: 68977 - DNA, 20 bp, Artificial Sequence
  Description of Artificial Sequence: Synthetic oligonucleotide
  Target: SCNA; (+) strand; PAM type: YTN; PAM sequence: CTA
ttttctaaacagtaaatgat

SEQ ID NO: 68978 - DNA, 20 bp, Artificial Sequence
  Description of Artificial Sequence: Synthetic oligonucleotide
  Target: SCNA; (+) strand; PAM type: YTN; PAM sequence: TTT
tctaaacagtaaatgatgga

SEQ ID NO: 68979 - DNA, 20 bp, Artificial Sequence
  Description of Artificial Sequence: Synthetic oligonucleotide
  Target: SCNA; (+) strand; PAM type: YTN; PAM sequence: TTT
ctaaacagtaaatgatggat

SEQ ID NO: 68980 - DNA, 20 bp, Artificial Sequence
  Description of Artificial Sequence: Synthetic oligonucleotide
  Target: SCNA; (+) strand; PAM type: YTN; PAM sequence: TTC
taaacagtaaatgatggatt

SEQ ID NO: 68981 - DNA, 20 bp, Artificial Sequence
  Description of Artificial Sequence: Synthetic oligonucleotide
  Target: SCNA; (+) strand; PAM type: YTN; PAM sequence: CTA
aacagtaaatgatggattgc

SEQ ID NO: 68982 - DNA, 20 bp, Artificial Sequence
  Description of Artificial Sequence: Synthetic oligonucleotide
  Target: SCNA; (+) strand; PAM type: YTN; PAM sequence: TTG
cattttaggcagactacaaa

SEQ ID NO: 68983 - DNA, 20 bp, Artificial Sequence
  Description of Artificial Sequence: Synthetic oligonucleotide
  Target: SCNA; (+) strand; PAM type: YTN; PAM sequence: TTT
taggcagactacaaaattgc

SEQ ID NO: 68984 - DNA, 20 bp, Artificial Sequence
  Description of Artificial Sequence: Synthetic oligonucleotide
  Target: SCNA; (+) strand; PAM type: YTN; PAM sequence: TTT
aggcagactacaaaattgct

SEQ ID NO: 68985 - DNA, 20 bp, Artificial Sequence
  Description of Artificial Sequence: Synthetic oligonucleotide
  Target: SCNA; (+) strand; PAM type: YTN; PAM sequence: TTA
ggcagactacaaaattgcta

SEQ ID NO: 68986 - DNA, 20 bp, Artificial Sequence
  Description of Artificial Sequence: Synthetic oligonucleotide
  Target: SCNA; (+) strand; PAM type: YTN; PAM sequence: CTA
caaaattgctaaaattaaat

SEQ ID NO: 68987 - DNA, 20 bp, Artificial Sequence
  Description of Artificial Sequence: Synthetic oligonucleotide
  Target: SCNA; (+) strand; PAM type: YTN; PAM sequence: TTG
ctaaaattaaatgttgggat

SEQ ID NO: 68988 - DNA, 20 bp, Artificial Sequence
  Description of Artificial Sequence: Synthetic oligonucleotide
  Target: SCNA; (+) strand; PAM type: YTN; PAM sequence: CTA
aaattaaatgttgggatgga

SEQ ID NO: 68989 - DNA, 20 bp, Artificial Sequence
  Description of Artificial Sequence: Synthetic oligonucleotide
  Target: SCNA; (+) strand; PAM type: YTN; PAM sequence: TTA
aatgttgggatggaaatgtg

SEQ ID NO: 68990 - DNA, 20 bp, Artificial Sequence
  Description of Artificial Sequence: Synthetic oligonucleotide
  Target: SCNA; (+) strand; PAM type: YTN; PAM sequence: TTG
ggatggaaatgtggaatgca

SEQ ID NO: 68991 - DNA, 20 bp, Artificial Sequence
  Description of Artificial Sequence: Synthetic oligonucleotide
  Target: SCNA; (+) strand; PAM type: YTN; PAM sequence: TTT
gcaacccccttttaatttaa

SEQ ID NO: 68992 - DNA, 20 bp, Artificial Sequence
  Description of Artificial Sequence: Synthetic oligonucleotide
  Target: SCNA; (+) strand; PAM type: YTN; PAM sequence: TTG
caacccccttttaatttaat

SEQ ID NO: 68993 - DNA, 20 bp, Artificial Sequence
  Description of Artificial Sequence: Synthetic oligonucleotide
  Target: SCNA; (+) strand; PAM type: YTN; PAM sequence: CTT
ttaatttaatattttcaaag

SEQ ID NO: 68994 - DNA, 20 bp, Artificial Sequence
  Description of Artificial Sequence: Synthetic oligonucleotide
  Target: SCNA; (+) strand; PAM type: YTN; PAM sequence: TTT
taatttaatattttcaaaga

SEQ ID NO: 68995 - DNA, 20 bp, Artificial Sequence
  Description of Artificial Sequence: Synthetic oligonucleotide
  Target: SCNA; (+) strand; PAM type: YTN; PAM sequence: TTT
aatttaatattttcaaagaa

SEQ ID NO: 68996 - DNA, 20 bp, Artificial Sequence
  Description of Artificial Sequence: Synthetic oligonucleotide
  Target: SCNA; (+) strand; PAM type: YTN; PAM sequence: TTA
atttaatattttcaaagaat

SEQ ID NO: 68997 - DNA, 20 bp, Artificial Sequence
  Description of Artificial Sequence: Synthetic oligonucleotide
  Target: SCNA; (+) strand; PAM type: YTN; PAM sequence: TTT
aatattttcaaagaattaag

SEQ ID NO: 68998 - DNA, 20 bp, Artificial Sequence
  Description of Artificial Sequence: Synthetic oligonucleotide
  Target: SCNA; (+) strand; PAM type: YTN; PAM sequence: TTA
atattttcaaagaattaaga

SEQ ID NO: 68999 - DNA, 20 bp, Artificial Sequence
  Description of Artificial Sequence: Synthetic oligonucleotide
  Target: SCNA; (+) strand; PAM type: YTN; PAM sequence: TTT
tcaaagaattaagagaaatt

SEQ ID NO: 69000 - DNA, 20 bp, Artificial Sequence
  Description of Artificial Sequence: Synthetic oligonucleotide
  Target: SCNA; (+) strand; PAM type: YTN; PAM sequence: TTT
caaagaattaagagaaatta

SEQ ID NO: 69001 - DNA, 20 bp, Artificial Sequence
  Description of Artificial Sequence: Synthetic oligonucleotide
  Target: SCNA; (+) strand; PAM type: YTN; PAM sequence: TTC
aaagaattaagagaaattat

SEQ ID NO: 69002 - DNA, 20 bp, Artificial Sequence
  Description of Artificial Sequence: Synthetic oligonucleotide
  Target: SCNA; (+) strand; PAM type: YTN; PAM sequence: TTA
agagaaattattatatttta

SEQ ID NO: 69003 - DNA, 20 bp, Artificial Sequence
  Description of Artificial Sequence: Synthetic oligonucleotide
  Target: SCNA; (+) strand; PAM type: YTN; PAM sequence: TTA
ttatattttattttataaaa

SEQ ID NO: 69004 - DNA, 20 bp, Artificial Sequence
  Description of Artificial Sequence: Synthetic oligonucleotide
  Target: SCNA; (+) strand; PAM type: YTN; PAM sequence: TTA
tattttattttataaaatat

SEQ ID NO: 69005 - DNA, 20 bp, Artificial Sequence
  Description of Artificial Sequence: Synthetic oligonucleotide
  Target: SCNA; (+) strand; PAM type: YTN; PAM sequence: TTT
tattttataaaatattatat

SEQ ID NO: 69006 - DNA, 20 bp, Artificial Sequence
  Description of Artificial Sequence: Synthetic oligonucleotide
  Target: SCNA; (+) strand; PAM type: YTN; PAM sequence: TTT
attttataaaatattatatt

SEQ ID NO: 69007 - DNA, 20 bp, Artificial Sequence
  Description of Artificial Sequence: Synthetic oligonucleotide
  Target: SCNA; (+) strand; PAM type: YTN; PAM sequence: TTA
ttttataaaatattatattt

SEQ ID NO: 69008 - DNA, 20 bp, Artificial Sequence
  Description of Artificial Sequence: Synthetic oligonucleotide
  Target: SCNA; (+) strand; PAM type: YTN; PAM sequence: TTT
tataaaatattatatttaaa

SEQ ID NO: 69009 - DNA, 20 bp, Artificial Sequence
  Description of Artificial Sequence: Synthetic oligonucleotide
  Target: SCNA; (+) strand; PAM type: YTN; PAM sequence: TTT
ataaaatattatatttaaaa

SEQ ID NO: 69010 - DNA, 20 bp, Artificial Sequence
  Description of Artificial Sequence: Synthetic oligonucleotide
  Target: SCNA; (+) strand; PAM type: YTN; PAM sequence: TTA
taaaatattatatttaaaat

SEQ ID NO: 69011 - DNA, 20 bp, Artificial Sequence
  Description of Artificial Sequence: Synthetic oligonucleotide
  Target: SCNA; (+) strand; PAM type: YTN; PAM sequence: TTA
tatttaaaattactcaattc

SEQ ID NO: 69012 - DNA, 20 bp, Artificial Sequence
  Description of Artificial Sequence: Synthetic oligonucleotide
  Target: SCNA; (+) strand; PAM type: YTN; PAM sequence: TTT
aaaattactcaattctaaat

SEQ ID NO: 69013 - DNA, 20 bp, Artificial Sequence
  Description of Artificial Sequence: Synthetic oligonucleotide
  Target: SCNA; (+) strand; PAM type: YTN; PAM sequence: TTA
aaattactcaattctaaatg

SEQ ID NO: 69014 - DNA, 20 bp, Artificial Sequence
  Description of Artificial Sequence: Synthetic oligonucleotide
  Target: SCNA; (+) strand; PAM type: YTN; PAM sequence: TTA
ctcaattctaaatgaatgtt

SEQ ID NO: 69015 - DNA, 20 bp, Artificial Sequence
  Description of Artificial Sequence: Synthetic oligonucleotide
  Target: SCNA; (+) strand; PAM type: YTN; PAM sequence: CTC
aattctaaatgaatgttatt

SEQ ID NO: 69016 - DNA, 20 bp, Artificial Sequence
  Description of Artificial Sequence: Synthetic oligonucleotide
  Target: SCNA; (+) strand; PAM type: YTN; PAM sequence: TTC
taaatgaatgttattgcaaa

SEQ ID NO: 69017 - DNA, 20 bp, Artificial Sequence
  Description of Artificial Sequence: Synthetic oligonucleotide
  Target: SCNA; (+) strand; PAM type: YTN; PAM sequence: CTA
aatgaatgttattgcaaacc

SEQ ID NO: 69018 - DNA, 20 bp, Artificial Sequence
  Description of Artificial Sequence: Synthetic oligonucleotide
  Target: SCNA; (+) strand; PAM type: YTN; PAM sequence: TTA
ttgcaaacctaggcttataa

SEQ ID NO: 69019 - DNA, 20 bp, Artificial Sequence
  Description of Artificial Sequence: Synthetic oligonucleotide
  Target: SCNA; (+) strand; PAM type: YTN; PAM sequence: TTG
caaacctaggcttataagaa

SEQ ID NO: 69020 - DNA, 20 bp, Artificial Sequence
  Description of Artificial Sequence: Synthetic oligonucleotide
  Target: SCNA; (+) strand; PAM type: YTN; PAM sequence: CTA
ggcttataagaagaatgcat

SEQ ID NO: 69021 - DNA, 20 bp, Artificial Sequence
  Description of Artificial Sequence: Synthetic oligonucleotide
  Target: SCNA; (+) strand; PAM type: YTN; PAM sequence: CTT
ataagaagaatgcatttaga

SEQ ID NO: 69022 - DNA, 20 bp, Artificial Sequence
  Description of Artificial Sequence: Synthetic oligonucleotide
  Target: SCNA; (+) strand; PAM type: YTN; PAM sequence: TTA
taagaagaatgcatttagaa

SEQ ID NO: 69023 - DNA, 20 bp, Artificial Sequence
  Description of Artificial Sequence: Synthetic oligonucleotide
  Target: SCNA; (+) strand; PAM type: YTN; PAM sequence: TTT
agaagccctagataacatac

SEQ ID NO: 69024 - DNA, 20 bp, Artificial Sequence
  Description of Artificial Sequence: Synthetic oligonucleotide
  Target: SCNA; (+) strand; PAM type: YTN; PAM sequence: TTA
gaagccctagataacataca

SEQ ID NO: 69025 - DNA, 20 bp, Artificial Sequence
  Description of Artificial Sequence: Synthetic oligonucleotide
  Target: SCNA; (+) strand; PAM type: YTN; PAM sequence: CTA
gataacatacaatataaaaa

SEQ ID NO: 69026 - DNA, 20 bp, Artificial Sequence
  Description of Artificial Sequence: Synthetic oligonucleotide
  Target: SCNA; (+) strand; PAM type: YTN; PAM sequence: TTT
gcaaattatgcatttgtttt

SEQ ID NO: 69027 - DNA, 20 bp, Artificial Sequence
  Description of Artificial Sequence: Synthetic oligonucleotide
  Target: SCNA; (+) strand; PAM type: YTN; PAM sequence: TTG
caaattatgcatttgttttc

SEQ ID NO: 69028 - DNA, 20 bp, Artificial Sequence
  Description of Artificial Sequence: Synthetic oligonucleotide
  Target: SCNA; (+) strand; PAM type: YTN; PAM sequence: TTA
tgcatttgttttcttttctt

SEQ ID NO: 69029 - DNA, 20 bp, Artificial Sequence
  Description of Artificial Sequence: Synthetic oligonucleotide
  Target: SCNA; (+) strand; PAM type: YTN; PAM sequence: TTT
gttttcttttctttcttttt

SEQ ID NO: 69030 - DNA, 20 bp, Artificial Sequence
  Description of Artificial Sequence: Synthetic oligonucleotide
  Target: SCNA; (+) strand; PAM type: YTN; PAM sequence: TTG
ttttcttttctttctttttt

SEQ ID NO: 69031 - DNA, 20 bp, Artificial Sequence
  Description of Artificial Sequence: Synthetic oligonucleotide
  Target: SCNA; (+) strand; PAM type: YTN; PAM sequence: TTT
tcttttctttcttttttttt

SEQ ID NO: 69032 - DNA, 20 bp, Artificial Sequence
  Description of Artificial Sequence: Synthetic oligonucleotide
  Target: SCNA; (+) strand; PAM type: YTN; PAM sequence: TTT
cttttctttctttttttttt

SEQ ID NO: 69033 - DNA, 20 bp, Artificial Sequence
  Description of Artificial Sequence: Synthetic oligonucleotide
  Target: SCNA; (+) strand; PAM type: YTN; PAM sequence: TTC
ttttctttcttttttttttt

SEQ ID NO: 69034 - DNA, 20 bp, Artificial Sequence
  Description of Artificial Sequence: Synthetic oligonucleotide
  Target: SCNA; (+) strand; PAM type: YTN; PAM sequence: CTT
ttctttcttttttttttttt

SEQ ID NO: 69035 - DNA, 20 bp, Artificial Sequence
  Description of Artificial Sequence: Synthetic oligonucleotide
  Target: SCNA; (+) strand; PAM type: YTN; PAM sequence: TTT
tctttctttttttttttttt

SEQ ID NO: 69036 - DNA, 20 bp, Artificial Sequence
  Description of Artificial Sequence: Synthetic oligonucleotide
  Target: SCNA; (+) strand; PAM type: YTN; PAM sequence: TTT
ctttcttttttttttttttt

SEQ ID NO: 69037 - DNA, 20 bp, Artificial Sequence
  Description of Artificial Sequence: Synthetic oligonucleotide
  Target: SCNA; (+) strand; PAM type: YTN; PAM sequence: TTC
tttctttttttttttttttt

SEQ ID NO: 69038 - DNA, 20 bp, Artificial Sequence
  Description of Artificial Sequence: Synthetic oligonucleotide
  Target: SCNA; (+) strand; PAM type: YTN; PAM sequence: CTT
tctttttttttttttttttg

SEQ ID NO: 69039 - DNA, 20 bp, Artificial Sequence
  Description of Artificial Sequence: Synthetic oligonucleotide
  Target: SCNA; (+) strand; PAM type: YTN; PAM sequence: TTT
ctttttttttttttttttga

SEQ ID NO: 69040 - DNA, 20 bp, Artificial Sequence
  Description of Artificial Sequence: Synthetic oligonucleotide
  Target: SCNA; (+) strand; PAM type: YTN; PAM sequence: TTC
tttttttttttttttttgag

SEQ ID NO: 69041 - DNA, 20 bp, Artificial Sequence
  Description of Artificial Sequence: Synthetic oligonucleotide
  Target: SCNA; (+) strand; PAM type: YTN; PAM sequence: CTT
tttttttttttttttgagat

SEQ ID NO: 69042 - DNA, 20 bp, Artificial Sequence
  Description of Artificial Sequence: Synthetic oligonucleotide
  Target: SCNA; (+) strand; PAM type: YTN; PAM sequence: TTT
ttttttttttttttgagatg

SEQ ID NO: 69043 - DNA, 20 bp, Artificial Sequence
  Description of Artificial Sequence: Synthetic oligonucleotide
  Target: SCNA; (+) strand; PAM type: YTN; PAM sequence: TTT
tttttttttttttgagatgg

SEQ ID NO: 69044 - DNA, 20 bp, Artificial Sequence
  Description of Artificial Sequence: Synthetic oligonucleotide
  Target: SCNA; (+) strand; PAM type: YTN; PAM sequence: TTT
ttttttttttttgagatgga

SEQ ID NO: 69045 - DNA, 20 bp, Artificial Sequence
  Description of Artificial Sequence: Synthetic oligonucleotide
  Target: SCNA; (+) strand; PAM type: YTN; PAM sequence: TTT
tttttttttttgagatggag

SEQ ID NO: 69046 - DNA, 20 bp, Artificial Sequence
  Description of Artificial Sequence: Synthetic oligonucleotide
  Target: SCNA; (+) strand; PAM type: YTN; PAM sequence: TTT
ttttttttttgagatggagt

SEQ ID NO: 69047 - DNA, 20 bp, Artificial Sequence
  Description of Artificial Sequence: Synthetic oligonucleotide
  Target: SCNA; (+) strand; PAM type: YTN; PAM sequence: TTT
tttttttttgagatggagtt

SEQ ID NO: 69048 - DNA, 20 bp, Artificial Sequence
  Description of Artificial Sequence: Synthetic oligonucleotide
  Target: SCNA; (+) strand; PAM type: YTN; PAM sequence: TTT
ttttttttgagatggagttt

SEQ ID NO: 69049 - DNA, 20 bp, Artificial Sequence
  Description of Artificial Sequence: Synthetic oligonucleotide
  Target: SCNA; (+) strand; PAM type: YTN; PAM sequence: TTT
tttttttgagatggagtttc

SEQ ID NO: 69050 - DNA, 20 bp, Artificial Sequence
  Description of Artificial Sequence: Synthetic oligonucleotide
  Target: SCNA; (+) strand; PAM type: YTN; PAM sequence: TTT
ttttttgagatggagtttcg

SEQ ID NO: 69051 - DNA, 20 bp, Artificial Sequence
  Description of Artificial Sequence: Synthetic oligonucleotide
  Target: SCNA; (+) strand; PAM type: YTN; PAM sequence: TTT
tttttgagatggagtttcgc

SEQ ID NO: 69052 - DNA, 20 bp, Artificial Sequence
  Description of Artificial Sequence: Synthetic oligonucleotide
  Target: SCNA; (+) strand; PAM type: YTN; PAM sequence: TTT
ttttgagatggagtttcgct

SEQ ID NO: 69053 - DNA, 20 bp, Artificial Sequence
  Description of Artificial Sequence: Synthetic oligonucleotide
  Target: SCNA; (+) strand; PAM type: YTN; PAM sequence: TTT
tttgagatggagtttcgctc

SEQ ID NO: 69054 - DNA, 20 bp, Artificial Sequence
  Description of Artificial Sequence: Synthetic oligonucleotide
  Target: SCNA; (+) strand; PAM type: YTN; PAM sequence: TTT
ttgagatggagtttcgctca

SEQ ID NO: 69055 - DNA, 20 bp, Artificial Sequence
  Description of Artificial Sequence: Synthetic oligonucleotide
  Target: SCNA; (+) strand; PAM type: YTN; PAM sequence: TTT
tgagatggagtttcgctcat

SEQ ID NO: 69056 - DNA, 20 bp, Artificial Sequence
  Description of Artificial Sequence: Synthetic oligonucleotide
  Target: SCNA; (+) strand; PAM type: YTN; PAM sequence: TTT
gagatggagtttcgctcatg

SEQ ID NO: 69057 - DNA, 20 bp, Artificial Sequence
  Description of Artificial Sequence: Synthetic oligonucleotide
  Target: SCNA; (+) strand; PAM type: YTN; PAM sequence: TTG
agatggagtttcgctcatgt

SEQ ID NO: 69058 - DNA, 20 bp, Artificial Sequence
  Description of Artificial Sequence: Synthetic oligonucleotide
  Target: SCNA; (+) strand; PAM type: YTN; PAM sequence: TTT
cgctcatgttgcctaggcta

SEQ ID NO: 69059 - DNA, 20 bp, Artificial Sequence
  Description of Artificial Sequence: Synthetic oligonucleotide
  Target: SCNA; (+) strand; PAM type: YTN; PAM sequence: TTC
gctcatgttgcctaggctag

SEQ ID NO: 69060 - DNA, 20 bp, Artificial Sequence
  Description of Artificial Sequence: Synthetic oligonucleotide
  Target: SCNA; (+) strand; PAM type: YTN; PAM sequence: CTC
atgttgcctaggctagaata

SEQ ID NO: 69061 - DNA, 20 bp, Artificial Sequence
  Description of Artificial Sequence: Synthetic oligonucleotide
  Target: SCNA; (+) strand; PAM type: YTN; PAM sequence: TTG
cctaggctagaatacagtgg

SEQ ID NO: 69062 - DNA, 20 bp, Artificial Sequence
  Description of Artificial Sequence: Synthetic oligonucleotide
  Target: SCNA; (+) strand; PAM type: YTN; PAM sequence: CTA
ggctagaatacagtggcaca

SEQ ID NO: 69063 - DNA, 20 bp, Artificial Sequence
  Description of Artificial Sequence: Synthetic oligonucleotide
  Target: SCNA; (+) strand; PAM type: YTN; PAM sequence: CTA
gaatacagtggcacaatctc

SEQ ID NO: 69064 - DNA, 20 bp, Artificial Sequence
  Description of Artificial Sequence: Synthetic oligonucleotide
  Target: SCNA; (+) strand; PAM type: YTN; PAM sequence: CTC
ggctcactgcaaccaccgcc

SEQ ID NO: 69065 - DNA, 20 bp, Artificial Sequence
  Description of Artificial Sequence: Synthetic oligonucleotide
  Target: SCNA; (+) strand; PAM type: YTN; PAM sequence: CTC
actgcaaccaccgcctcctg

SEQ ID NO: 69066 - DNA, 20 bp, Artificial Sequence
  Description of Artificial Sequence: Synthetic oligonucleotide
  Target: SCNA; (+) strand; PAM type: YTN; PAM sequence: CTG
caaccaccgcctcctgggtt

SEQ ID NO: 69067 - DNA, 20 bp, Artificial Sequence
  Description of Artificial Sequence: Synthetic oligonucleotide
  Target: SCNA; (+) strand; PAM type: YTN; PAM sequence: CTC
ctgggttcaaacgattcttc

SEQ ID NO: 69068 - DNA, 20 bp, Artificial Sequence
  Description of Artificial Sequence: Synthetic oligonucleotide
  Target: SCNA; (+) strand; PAM type: YTN; PAM sequence: CTG
ggttcaaacgattcttctgc

SEQ ID NO: 69069 - DNA, 20 bp, Artificial Sequence
  Description of Artificial Sequence: Synthetic oligonucleotide
  Target: SCNA; (+) strand; PAM type: YTN; PAM sequence: TTC
aaacgattcttctgcctcag

SEQ ID NO: 69070 - DNA, 20 bp, Artificial Sequence
  Description of Artificial Sequence: Synthetic oligonucleotide
  Target: SCNA; (+) strand; PAM type: YTN; PAM sequence: TTC
ttctgcctcagcctccccag

SEQ ID NO: 69071 - DNA, 20 bp, Artificial Sequence
  Description of Artificial Sequence: Synthetic oligonucleotide
  Target: SCNA; (+) strand; PAM type: YTN; PAM sequence: CTT
ctgcctcagcctccccagta

SEQ ID NO: 69072 - DNA, 20 bp, Artificial Sequence
  Description of Artificial Sequence: Synthetic oligonucleotide
  Target: SCNA; (+) strand; PAM type: YTN; PAM sequence: TTC
tgcctcagcctccccagtag

SEQ ID NO: 69073 - DNA, 20 bp, Artificial Sequence
  Description of Artificial Sequence: Synthetic oligonucleotide
  Target: SCNA; (+) strand; PAM type: YTN; PAM sequence: CTG
cctcagcctccccagtagtt

SEQ ID NO: 69074 - DNA, 20 bp, Artificial Sequence
  Description of Artificial Sequence: Synthetic oligonucleotide
  Target: SCNA; (+) strand; PAM type: YTN; PAM sequence: CTC
agcctccccagtagttggga

SEQ ID NO: 69075 - DNA, 20 bp, Artificial Sequence
  Description of Artificial Sequence: Synthetic oligonucleotide
  Target: SCNA; (+) strand; PAM type: YTN; PAM sequence: CTC
cccagtagttgggattacag

SEQ ID NO: 69076 - DNA, 20 bp, Artificial Sequence
  Description of Artificial Sequence: Synthetic oligonucleotide
  Target: SCNA; (+) strand; PAM type: YTN; PAM sequence: TTG
ggattacaggtatgtgccac

SEQ ID NO: 69077 - DNA, 20 bp, Artificial Sequence
  Description of Artificial Sequence: Synthetic oligonucleotide
  Target: SCNA; (+) strand; PAM type: YTN; PAM sequence: TTA
caggtatgtgccaccatgcc

SEQ ID NO: 69078 - DNA, 20 bp, Artificial Sequence
  Description of Artificial Sequence: Synthetic oligonucleotide
  Target: SCNA; (+) strand; PAM type: YTN; PAM sequence: CTA
attttgtatttttagtagag

SEQ ID NO: 69079 - DNA, 20 bp, Artificial Sequence
  Description of Artificial Sequence: Synthetic oligonucleotide
  Target: SCNA; (+) strand; PAM type: YTN; PAM sequence: TTT
tgtatttttagtagagatgg

SEQ ID NO: 69080 - DNA, 20 bp, Artificial Sequence
  Description of Artificial Sequence: Synthetic oligonucleotide
  Target: SCNA; (+) strand; PAM type: YTN; PAM sequence: TTT
gtatttttagtagagatgga

SEQ ID NO: 69081 - DNA, 20 bp, Artificial Sequence
  Description of Artificial Sequence: Synthetic oligonucleotide
  Target: SCNA; (+) strand; PAM type: YTN; PAM sequence: TTG
tatttttagtagagatggag

SEQ ID NO: 69082 - DNA, 20 bp, Artificial Sequence
  Description of Artificial Sequence: Synthetic oligonucleotide
  Target: SCNA; (+) strand; PAM type: YTN; PAM sequence: TTT
ttagtagagatggagtttct

SEQ ID NO: 69083 - DNA, 20 bp, Artificial Sequence
  Description of Artificial Sequence: Synthetic oligonucleotide
  Target: SCNA; (+) strand; PAM type: YTN; PAM sequence: TTT
tagtagagatggagtttctc

SEQ ID NO: 69084 - DNA, 20 bp, Artificial Sequence
  Description of Artificial Sequence: Synthetic oligonucleotide
  Target: SCNA; (+) strand; PAM type: YTN; PAM sequence: TTT
agtagagatggagtttctcc

SEQ ID NO: 69085 - DNA, 20 bp, Artificial Sequence
  Description of Artificial Sequence: Synthetic oligonucleotide
  Target: SCNA; (+) strand; PAM type: YTN; PAM sequence: TTA
gtagagatggagtttctcca

SEQ ID NO: 69086 - DNA, 20 bp, Artificial Sequence
  Description of Artificial Sequence: Synthetic oligonucleotide
  Target: SCNA; (+) strand; PAM type: YTN; PAM sequence: TTT
ctccatgttggtcaagctgg

SEQ ID NO: 69087 - DNA, 20 bp, Artificial Sequence
  Description of Artificial Sequence: Synthetic oligonucleotide
  Target: SCNA; (+) strand; PAM type: YTN; PAM sequence: TTC
tccatgttggtcaagctggt

SEQ ID NO: 69088 - DNA, 20 bp, Artificial Sequence
  Description of Artificial Sequence: Synthetic oligonucleotide
  Target: SCNA; (+) strand; PAM type: YTN; PAM sequence: CTC
catgttggtcaagctggtct

SEQ ID NO: 69089 - DNA, 20 bp, Artificial Sequence
  Description of Artificial Sequence: Synthetic oligonucleotide
  Target: SCNA; (+) strand; PAM type: YTN; PAM sequence: TTG
gtcaagctggtcttgaactc

SEQ ID NO: 69090 - DNA, 20 bp, Artificial Sequence
  Description of Artificial Sequence: Synthetic oligonucleotide
  Target: SCNA; (+) strand; PAM type: YTN; PAM sequence: CTG
gtcttgaactcccgacctca

SEQ ID NO: 69091 - DNA, 20 bp, Artificial Sequence
  Description of Artificial Sequence: Synthetic oligonucleotide
  Target: SCNA; (+) strand; PAM type: YTN; PAM sequence: CTT
gaactcccgacctcaggtga

SEQ ID NO: 69092 - DNA, 20 bp, Artificial Sequence
  Description of Artificial Sequence: Synthetic oligonucleotide
  Target: SCNA; (+) strand; PAM type: YTN; PAM sequence: TTG
aactcccgacctcaggtgat

SEQ ID NO: 69093 - DNA, 20 bp, Artificial Sequence
  Description of Artificial Sequence: Synthetic oligonucleotide
  Target: SCNA; (+) strand; PAM type: YTN; PAM sequence: CTC
ccgacctcaggtgatccacc

SEQ ID NO: 69094 - DNA, 20 bp, Artificial Sequence
  Description of Artificial Sequence: Synthetic oligonucleotide
  Target: SCNA; (+) strand; PAM type: YTN; PAM sequence: CTC
aggtgatccacccgccttgg

SEQ ID NO: 69095 - DNA, 20 bp, Artificial Sequence
  Description of Artificial Sequence: Synthetic oligonucleotide
  Target: SCNA; (+) strand; PAM type: YTN; PAM sequence: CTT
ggcctcccaaagtgctggga

SEQ ID NO: 69096 - DNA, 20 bp, Artificial Sequence
  Description of Artificial Sequence: Synthetic oligonucleotide
  Target: SCNA; (+) strand; PAM type: YTN; PAM sequence: TTG
gcctcccaaagtgctgggat

SEQ ID NO: 69097 - DNA, 20 bp, Artificial Sequence
  Description of Artificial Sequence: Synthetic oligonucleotide
  Target: SCNA; (+) strand; PAM type: YTN; PAM sequence: CTC
ccaaagtgctgggattacag

SEQ ID NO: 69098 - DNA, 20 bp, Artificial Sequence
  Description of Artificial Sequence: Synthetic oligonucleotide
  Target: SCNA; (+) strand; PAM type: YTN; PAM sequence: CTG
ggattacaggcctgagccac

SEQ ID NO: 69099 - DNA, 20 bp, Artificial Sequence
  Description of Artificial Sequence: Synthetic oligonucleotide
  Target: SCNA; (+) strand; PAM type: YTN; PAM sequence: TTA
caggcctgagccaccgcgcc

SEQ ID NO: 69100 - DNA, 20 bp, Artificial Sequence
  Description of Artificial Sequence: Synthetic oligonucleotide
  Target: SCNA; (+) strand; PAM type: YTN; PAM sequence: CTG
agccaccgcgcctggcctgt

SEQ ID NO: 69101 - DNA, 20 bp, Artificial Sequence
  Description of Artificial Sequence: Synthetic oligonucleotide
  Target: SCNA; (+) strand; PAM type: YTN; PAM sequence: CTG
gcctgttttcattttaagtg

SEQ ID NO: 69102 - DNA, 20 bp, Artificial Sequence
  Description of Artificial Sequence: Synthetic oligonucleotide
  Target: SCNA; (+) strand; PAM type: YTN; PAM sequence: CTG
ttttcattttaagtgtagtt

SEQ ID NO: 69103 - DNA, 20 bp, Artificial Sequence
  Description of Artificial Sequence: Synthetic oligonucleotide
  Target: SCNA; (+) strand; PAM type: YTN; PAM sequence: TTT
tcattttaagtgtagttgtc

SEQ ID NO: 69104 - DNA, 20 bp, Artificial Sequence
  Description of Artificial Sequence: Synthetic oligonucleotide
  Target: SCNA; (+) strand; PAM type: YTN; PAM sequence: TTT
cattttaagtgtagttgtct

SEQ ID NO: 69105 - DNA, 20 bp, Artificial Sequence
  Description of Artificial Sequence: Synthetic oligonucleotide
  Target: SCNA; (+) strand; PAM type: YTN; PAM sequence: TTC
attttaagtgtagttgtcta

SEQ ID NO: 69106 - DNA, 20 bp, Artificial Sequence
  Description of Artificial Sequence: Synthetic oligonucleotide
  Target: SCNA; (+) strand; PAM type: YTN; PAM sequence: TTT
taagtgtagttgtctagcat

SEQ ID NO: 69107 - DNA, 20 bp, Artificial Sequence
  Description of Artificial Sequence: Synthetic oligonucleotide
  Target: SCNA; (+) strand; PAM type: YTN; PAM sequence: TTT
aagtgtagttgtctagcatt

SEQ ID NO: 69108 - DNA, 20 bp, Artificial Sequence
  Description of Artificial Sequence: Synthetic oligonucleotide
  Target: SCNA; (+) strand; PAM type: YTN; PAM sequence: TTA
agtgtagttgtctagcattt

SEQ ID NO: 69109 - DNA, 20 bp, Artificial Sequence
  Description of Artificial Sequence: Synthetic oligonucleotide
  Target: SCNA; (+) strand; PAM type: YTN; PAM sequence: TTG
tctagcattttcaatacatt

SEQ ID NO: 69110 - DNA, 20 bp, Artificial Sequence
  Description of Artificial Sequence: Synthetic oligonucleotide
  Target: SCNA; (+) strand; PAM type: YTN; PAM sequence: CTA
gcattttcaatacattcccc

SEQ ID NO: 69111 - DNA, 20 bp, Artificial Sequence
  Description of Artificial Sequence: Synthetic oligonucleotide
  Target: SCNA; (+) strand; PAM type: YTN; PAM sequence: TTT
tcaatacattcccccccgtt

SEQ ID NO: 69112 - DNA, 20 bp, Artificial Sequence
  Description of Artificial Sequence: Synthetic oligonucleotide
  Target: SCNA; (+) strand; PAM type: YTN; PAM sequence: TTT
caatacattcccccccgttt

SEQ ID NO: 69113 - DNA, 20 bp, Artificial Sequence
  Description of Artificial Sequence: Synthetic oligonucleotide
  Target: SCNA; (+) strand; PAM type: YTN; PAM sequence: TTC
aatacattcccccccgtttg

SEQ ID NO: 69114 - DNA, 20 bp, Artificial Sequence
  Description of Artificial Sequence: Synthetic oligonucleotide
  Target: SCNA; (+) strand; PAM type: YTN; PAM sequence: TTC
ccccccgtttgacaaatttt

SEQ ID NO: 69115 - DNA, 20 bp, Artificial Sequence
  Description of Artificial Sequence: Synthetic oligonucleotide
  Target: SCNA; (+) strand; PAM type: YTN; PAM sequence: TTT
gacaaattttatcttgccat

SEQ ID NO: 69116 - DNA, 20 bp, Artificial Sequence
  Description of Artificial Sequence: Synthetic oligonucleotide
  Target: SCNA; (+) strand; PAM type: YTN; PAM sequence: TTG
acaaattttatcttgccatt

SEQ ID NO: 69117 - DNA, 20 bp, Artificial Sequence
  Description of Artificial Sequence: Synthetic oligonucleotide
  Target: SCNA; (+) strand; PAM type: YTN; PAM sequence: TTT
tatcttgccatttagctaat

SEQ ID NO: 69118 - DNA, 20 bp, Artificial Sequence
  Description of Artificial Sequence: Synthetic oligonucleotide
  Target: SCNA; (+) strand; PAM type: YTN; PAM sequence: TTT
atcttgccatttagctaatg

SEQ ID NO: 69119 - DNA, 20 bp, Artificial Sequence
  Description of Artificial Sequence: Synthetic oligonucleotide
  Target: SCNA; (+) strand; PAM type: YTN; PAM sequence: TTA
tcttgccatttagctaatgg

SEQ ID NO: 69120 - DNA, 20 bp, Artificial Sequence
  Description of Artificial Sequence: Synthetic oligonucleotide
  Target: SCNA; (+) strand; PAM type: YTN; PAM sequence: CTT
gccatttagctaatgggcaa

SEQ ID NO: 69121 - DNA, 20 bp, Artificial Sequence
  Description of Artificial Sequence: Synthetic oligonucleotide
  Target: SCNA; (+) strand; PAM type: YTN; PAM sequence: TTG
ccatttagctaatgggcaag

SEQ ID NO: 69122 - DNA, 20 bp, Artificial Sequence
  Description of Artificial Sequence: Synthetic oligonucleotide
  Target: SCNA; (+) strand; PAM type: YTN; PAM sequence: TTT
agctaatgggcaagcaaaaa

SEQ ID NO: 69123 - DNA, 20 bp, Artificial Sequence
  Description of Artificial Sequence: Synthetic oligonucleotide
  Target: SCNA; (+) strand; PAM type: YTN; PAM sequence: TTA
gctaatgggcaagcaaaaaa

SEQ ID NO: 69124 - DNA, 20 bp, Artificial Sequence
  Description of Artificial Sequence: Synthetic oligonucleotide
  Target: SCNA; (+) strand; PAM type: YTN; PAM sequence: CTA
atgggcaagcaaaaaattaa

SEQ ID NO: 69125 - DNA, 20 bp, Artificial Sequence
  Description of Artificial Sequence: Synthetic oligonucleotide
  Target: SCNA; (+) strand; PAM type: YTN; PAM sequence: TTA
agtggaataattggacagaa

SEQ ID NO: 69126 - DNA, 20 bp, Artificial Sequence
  Description of Artificial Sequence: Synthetic oligonucleotide
  Target: SCNA; (+) strand; PAM type: YTN; PAM sequence: TTG
gacagaacaattatctggta

SEQ ID NO: 69127 - DNA, 20 bp, Artificial Sequence
  Description of Artificial Sequence: Synthetic oligonucleotide
  Target: SCNA; (+) strand; PAM type: YTN; PAM sequence: TTA
tctggtaacctaaacaatgg

SEQ ID NO: 69128 - DNA, 20 bp, Artificial Sequence
  Description of Artificial Sequence: Synthetic oligonucleotide
  Target: SCNA; (+) strand; PAM type: YTN; PAM sequence: CTG
gtaacctaaacaatggtaac

SEQ ID NO: 69129 - DNA, 20 bp, Artificial Sequence
  Description of Artificial Sequence: Synthetic oligonucleotide
  Target: SCNA; (+) strand; PAM type: YTN; PAM sequence: CTA
aacaatggtaacatgagata

SEQ ID NO: 69130 - DNA, 20 bp, Artificial Sequence
  Description of Artificial Sequence: Synthetic oligonucleotide
  Target: SCNA; (+) strand; PAM type: YTN; PAM sequence: TTT
tatgcattgtttggacttat

SEQ ID NO: 69131 - DNA, 20 bp, Artificial Sequence
  Description of Artificial Sequence: Synthetic oligonucleotide
  Target: SCNA; (+) strand; PAM type: YTN; PAM sequence: TTT
atgcattgtttggacttata

SEQ ID NO: 69132 - DNA, 20 bp, Artificial Sequence
  Description of Artificial Sequence: Synthetic oligonucleotide
  Target: SCNA; (+) strand; PAM type: YTN; PAM sequence: TTA
tgcattgtttggacttataa

SEQ ID NO: 69133 - DNA, 20 bp, Artificial Sequence
  Description of Artificial Sequence: Synthetic oligonucleotide
  Target: SCNA; (+) strand; PAM type: YTN; PAM sequence: TTG
tttggacttataaactatct

SEQ ID NO: 69134 - DNA, 20 bp, Artificial Sequence
  Description of Artificial Sequence: Synthetic oligonucleotide
  Target: SCNA; (+) strand; PAM type: YTN; PAM sequence: TTT
ggacttataaactatctagt

SEQ ID NO: 69135 - DNA, 20 bp, Artificial Sequence
  Description of Artificial Sequence: Synthetic oligonucleotide
  Target: SCNA; (+) strand; PAM type: YTN; PAM sequence: TTG
gacttataaactatctagtg

SEQ ID NO: 69136 - DNA, 20 bp, Artificial Sequence
  Description of Artificial Sequence: Synthetic oligonucleotide
  Target: SCNA; (+) strand; PAM type: YTN; PAM sequence: CTT
ataaactatctagtgttcta

SEQ ID NO: 69137 - DNA, 20 bp, Artificial Sequence
  Description of Artificial Sequence: Synthetic oligonucleotide
  Target: SCNA; (+) strand; PAM type: YTN; PAM sequence: TTA
taaactatctagtgttctaa

SEQ ID NO: 69138 - DNA, 20 bp, Artificial Sequence
  Description of Artificial Sequence: Synthetic oligonucleotide
  Target: SCNA; (+) strand; PAM type: YTN; PAM sequence: CTA
tctagtgttctaataataga

SEQ ID NO: 69139 - DNA, 20 bp, Artificial Sequence
  Description of Artificial Sequence: Synthetic oligonucleotide
  Target: SCNA; (+) strand; PAM type: YTN; PAM sequence: CTA
gtgttctaataatagacata

SEQ ID NO: 69140 - DNA, 20 bp, Artificial Sequence
  Description of Artificial Sequence: Synthetic oligonucleotide
  Target: SCNA; (+) strand; PAM type: YTN; PAM sequence: TTC
taataatagacataatggtt

SEQ ID NO: 69141 - DNA, 20 bp, Artificial Sequence
  Description of Artificial Sequence: Synthetic oligonucleotide
  Target: SCNA; (+) strand; PAM type: YTN; PAM sequence: CTA
ataatagacataatggttta

SEQ ID NO: 69142 - DNA, 20 bp, Artificial Sequence
  Description of Artificial Sequence: Synthetic oligonucleotide
  Target: SCNA; (+) strand; PAM type: YTN; PAM sequence: TTT
attcaactaatagctactgt

SEQ ID NO: 69143 - DNA, 20 bp, Artificial Sequence
  Description of Artificial Sequence: Synthetic oligonucleotide
  Target: SCNA; (+) strand; PAM type: YTN; PAM sequence: TTA
ttcaactaatagctactgtc

SEQ ID NO: 69144 - DNA, 20 bp, Artificial Sequence
  Description of Artificial Sequence: Synthetic oligonucleotide
  Target: SCNA; (+) strand; PAM type: YTN; PAM sequence: TTC
aactaatagctactgtcatc

SEQ ID NO: 69145 - DNA, 20 bp, Artificial Sequence
  Description of Artificial Sequence: Synthetic oligonucleotide
  Target: SCNA; (+) strand; PAM type: YTN; PAM sequence: CTA
atagctactgtcatccttag

SEQ ID NO: 69146 - DNA, 20 bp, Artificial Sequence
  Description of Artificial Sequence: Synthetic oligonucleotide
  Target: SCNA; (+) strand; PAM type: YTN; PAM sequence: CTA
ctgtcatccttagaggttat

SEQ ID NO: 69147 - DNA, 20 bp, Artificial Sequence
  Description of Artificial Sequence: Synthetic oligonucleotide
  Target: SCNA; (+) strand; PAM type: YTN; PAM sequence: CTG
tcatccttagaggttattaa

SEQ ID NO: 69148 - DNA, 20 bp, Artificial Sequence
  Description of Artificial Sequence: Synthetic oligonucleotide
  Target: SCNA; (+) strand; PAM type: YTN; PAM sequence: CTT
agaggttattaacaactcaa

SEQ ID NO: 69149 - DNA, 20 bp, Artificial Sequence
  Description of Artificial Sequence: Synthetic oligonucleotide
  Target: SCNA; (+) strand; PAM type: YTN; PAM sequence: TTA
gaggttattaacaactcaaa

SEQ ID NO: 69150 - DNA, 20 bp, Artificial Sequence
  Description of Artificial Sequence: Synthetic oligonucleotide
  Target: SCNA; (+) strand; PAM type: YTN; PAM sequence: TTA
ttaacaactcaaagtagtga

SEQ ID NO: 69151 - DNA, 20 bp, Artificial Sequence
  Description of Artificial Sequence: Synthetic oligonucleotide
  Target: SCNA; (+) strand; PAM type: YTN; PAM sequence: TTA
acaactcaaagtagtgaatt

SEQ ID NO: 69152 - DNA, 20 bp, Artificial Sequence
  Description of Artificial Sequence: Synthetic oligonucleotide
  Target: SCNA; (+) strand; PAM type: YTN; PAM sequence: CTC
aaagtagtgaattacatcca

SEQ ID NO: 69153 - DNA, 20 bp, Artificial Sequence
  Description of Artificial Sequence: Synthetic oligonucleotide
  Target: SCNA; (+) strand; PAM type: YTN; PAM sequence: TTA
catccaactaaagggtgctt

SEQ ID NO: 69154 - DNA, 20 bp, Artificial Sequence
  Description of Artificial Sequence: Synthetic oligonucleotide
  Target: SCNA; (+) strand; PAM type: YTN; PAM sequence: CTA
aagggtgcttttgtatagac

SEQ ID NO: 69155 - DNA, 20 bp, Artificial Sequence
  Description of Artificial Sequence: Synthetic oligonucleotide
  Target: SCNA; (+) strand; PAM type: YTN; PAM sequence: CTT
ttgtatagacatttgttctt

SEQ ID NO: 69156 - DNA, 20 bp, Artificial Sequence
  Description of Artificial Sequence: Synthetic oligonucleotide
  Target: SCNA; (+) strand; PAM type: YTN; PAM sequence: TTT
tgtatagacatttgttctta

SEQ ID NO: 69157 - DNA, 20 bp, Artificial Sequence
  Description of Artificial Sequence: Synthetic oligonucleotide
  Target: SCNA; (+) strand; PAM type: YTN; PAM sequence: TTT
gtatagacatttgttcttat

SEQ ID NO: 69158 - DNA, 20 bp, Artificial Sequence
  Description of Artificial Sequence: Synthetic oligonucleotide
  Target: SCNA; (+) strand; PAM type: YTN; PAM sequence: TTG
tatagacatttgttcttatt

SEQ ID NO: 69159 - DNA, 20 bp, Artificial Sequence
  Description of Artificial Sequence: Synthetic oligonucleotide
  Target: SCNA; (+) strand; PAM type: YTN; PAM sequence: TTT
gttcttattgctggtcactt

SEQ ID NO: 69160 - DNA, 20 bp, Artificial Sequence
  Description of Artificial Sequence: Synthetic oligonucleotide
  Target: SCNA; (+) strand; PAM type: YTN; PAM sequence: TTG
ttcttattgctggtcactta

SEQ ID NO: 69161 - DNA, 20 bp, Artificial Sequence
  Description of Artificial Sequence: Synthetic oligonucleotide
  Target: SCNA; (+) strand; PAM type: YTN; PAM sequence: TTC
ttattgctggtcacttattc

SEQ ID NO: 69162 - DNA, 20 bp, Artificial Sequence
  Description of Artificial Sequence: Synthetic oligonucleotide
  Target: SCNA; (+) strand; PAM type: YTN; PAM sequence: CTT
attgctggtcacttattctt

SEQ ID NO: 69163 - DNA, 20 bp, Artificial Sequence
  Description of Artificial Sequence: Synthetic oligonucleotide
  Target: SCNA; (+) strand; PAM type: YTN; PAM sequence: TTA
ttgctggtcacttattcttc

SEQ ID NO: 69164 - DNA, 20 bp, Artificial Sequence
  Description of Artificial Sequence: Synthetic oligonucleotide
  Target: SCNA; (+) strand; PAM type: YTN; PAM sequence: TTG
ctggtcacttattcttcaaa

SEQ ID NO: 69165 - DNA, 20 bp, Artificial Sequence
  Description of Artificial Sequence: Synthetic oligonucleotide
  Target: SCNA; (+) strand; PAM type: YTN; PAM sequence: CTG
gtcacttattcttcaaatat

SEQ ID NO: 69166 - DNA, 20 bp, Artificial Sequence
  Description of Artificial Sequence: Synthetic oligonucleotide
  Target: SCNA; (+) strand; PAM type: YTN; PAM sequence: CTT
attcttcaaatatcttttag

SEQ ID NO: 69167 - DNA, 20 bp, Artificial Sequence
  Description of Artificial Sequence: Synthetic oligonucleotide
  Target: SCNA; (+) strand; PAM type: YTN; PAM sequence: TTA
ttcttcaaatatcttttagg

SEQ ID NO: 69168 - DNA, 20 bp, Artificial Sequence
  Description of Artificial Sequence: Synthetic oligonucleotide
  Target: SCNA; (+) strand; PAM type: YTN; PAM sequence: TTC
ttcaaatatcttttaggcac

SEQ ID NO: 69169 - DNA, 20 bp, Artificial Sequence
  Description of Artificial Sequence: Synthetic oligonucleotide
  Target: SCNA; (+) strand; PAM type: YTN; PAM sequence: CTT
caaatatcttttaggcacca

SEQ ID NO: 69170 - DNA, 20 bp, Artificial Sequence
  Description of Artificial Sequence: Synthetic oligonucleotide
  Target: SCNA; (+) strand; PAM type: YTN; PAM sequence: TTC
aaatatcttttaggcaccat

SEQ ID NO: 69171 - DNA, 20 bp, Artificial Sequence
  Description of Artificial Sequence: Synthetic oligonucleotide
  Target: SCNA; (+) strand; PAM type: YTN; PAM sequence: CTT
ttaggcaccatttacaaaga

SEQ ID NO: 69172 - DNA, 20 bp, Artificial Sequence
  Description of Artificial Sequence: Synthetic oligonucleotide
  Target: SCNA; (+) strand; PAM type: YTN; PAM sequence: TTT
taggcaccatttacaaagat

SEQ ID NO: 69173 - DNA, 20 bp, Artificial Sequence
  Description of Artificial Sequence: Synthetic oligonucleotide
  Target: SCNA; (+) strand; PAM type: YTN; PAM sequence: TTT
aggcaccatttacaaagatg

SEQ ID NO: 69174 - DNA, 20 bp, Artificial Sequence
  Description of Artificial Sequence: Synthetic oligonucleotide
  Target: SCNA; (+) strand; PAM type: YTN; PAM sequence: TTA
ggcaccatttacaaagatga

SEQ ID NO: 69175 - DNA, 20 bp, Artificial Sequence
  Description of Artificial Sequence: Synthetic oligonucleotide
  Target: SCNA; (+) strand; PAM type: YTN; PAM sequence: TTT
acaaagatgaccagaggtac

SEQ ID NO: 69176 - DNA, 20 bp, Artificial Sequence
  Description of Artificial Sequence: Synthetic oligonucleotide
  Target: SCNA; (+) strand; PAM type: YTN; PAM sequence: TTA
caaagatgaccagaggtaca

SEQ ID NO: 69177 - DNA, 20 bp, Artificial Sequence
  Description of Artificial Sequence: Synthetic oligonucleotide
  Target: SCNA; (+) strand; PAM type: YTN; PAM sequence: CTG
catatataatagaaagagcc

SEQ ID NO: 69178 - DNA, 20 bp, Artificial Sequence
  Description of Artificial Sequence: Synthetic oligonucleotide
  Target: SCNA; (+) strand; PAM type: YTN; PAM sequence: TTC
aataaaagaaggtatatagt

SEQ ID NO: 69179 - DNA, 20 bp, Artificial Sequence
  Description of Artificial Sequence: Synthetic oligonucleotide
  Target: SCNA; (+) strand; PAM type: YTN; PAM sequence: TTT
ttatcttagcctaaggcagt

SEQ ID NO: 69180 - DNA, 20 bp, Artificial Sequence
  Description of Artificial Sequence: Synthetic oligonucleotide
  Target: SCNA; (+) strand; PAM type: YTN; PAM sequence: TTT
tatcttagcctaaggcagtc

SEQ ID NO: 69181 - DNA, 20 bp, Artificial Sequence
  Description of Artificial Sequence: Synthetic oligonucleotide
  Target: SCNA; (+) strand; PAM type: YTN; PAM sequence: TTT
atcttagcctaaggcagtct

SEQ ID NO: 69182 - DNA, 20 bp, Artificial Sequence
  Description of Artificial Sequence: Synthetic oligonucleotide
  Target: SCNA; (+) strand; PAM type: YTN; PAM sequence: TTA
tcttagcctaaggcagtctg

SEQ ID NO: 69183 - DNA, 20 bp, Artificial Sequence
  Description of Artificial Sequence: Synthetic oligonucleotide
  Target: SCNA; (+) strand; PAM type: YTN; PAM sequence: CTT
agcctaaggcagtctgaatt

SEQ ID NO: 69184 - DNA, 20 bp, Artificial Sequence
  Description of Artificial Sequence: Synthetic oligonucleotide
  Target: SCNA; (+) strand; PAM type: YTN; PAM sequence: TTA
gcctaaggcagtctgaattc

SEQ ID NO: 69185 - DNA, 20 bp, Artificial Sequence
  Description of Artificial Sequence: Synthetic oligonucleotide
  Target: SCNA; (+) strand; PAM type: YTN; PAM sequence: CTA
aggcagtctgaattctcaag

SEQ ID NO: 69186 - DNA, 20 bp, Artificial Sequence
  Description of Artificial Sequence: Synthetic oligonucleotide
  Target: SCNA; (+) strand; PAM type: YTN; PAM sequence: CTG
aattctcaagcccaaagcac

SEQ ID NO: 69187 - DNA, 20 bp, Artificial Sequence
  Description of Artificial Sequence: Synthetic oligonucleotide
  Target: SCNA; (+) strand; PAM type: YTN; PAM sequence: TTC
tcaagcccaaagcacataaa

SEQ ID NO: 69188 - DNA, 20 bp, Artificial Sequence
  Description of Artificial Sequence: Synthetic oligonucleotide
  Target: SCNA; (+) strand; PAM type: YTN; PAM sequence: CTC
aagcccaaagcacataaatt

SEQ ID NO: 69189 - DNA, 20 bp, Artificial Sequence
  Description of Artificial Sequence: Synthetic oligonucleotide
  Target: SCNA; (+) strand; PAM type: YTN; PAM sequence: TTT
gttggaattatttcaatttc

SEQ ID NO: 69190 - DNA, 20 bp, Artificial Sequence
  Description of Artificial Sequence: Synthetic oligonucleotide
  Target: SCNA; (+) strand; PAM type: YTN; PAM sequence: TTG
ttggaattatttcaatttct

SEQ ID NO: 69191 - DNA, 20 bp, Artificial Sequence
  Description of Artificial Sequence: Synthetic oligonucleotide
  Target: SCNA; (+) strand; PAM type: YTN; PAM sequence: TTG
gaattatttcaatttctagt

SEQ ID NO: 69192 - DNA, 20 bp, Artificial Sequence
  Description of Artificial Sequence: Synthetic oligonucleotide
  Target: SCNA; (+) strand; PAM type: YTN; PAM sequence: TTA
tttcaatttctagtcactaa

SEQ ID NO: 69193 - DNA, 20 bp, Artificial Sequence
  Description of Artificial Sequence: Synthetic oligonucleotide
  Target: SCNA; (+) strand; PAM type: YTN; PAM sequence: TTT
caatttctagtcactaaaaa

SEQ ID NO: 69194 - DNA, 20 bp, Artificial Sequence
  Description of Artificial Sequence: Synthetic oligonucleotide
  Target: SCNA; (+) strand; PAM type: YTN; PAM sequence: TTC
aatttctagtcactaaaaat

SEQ ID NO: 69195 - DNA, 20 bp, Artificial Sequence
  Description of Artificial Sequence: Synthetic oligonucleotide
  Target: SCNA; (+) strand; PAM type: YTN; PAM sequence: TTT
ctagtcactaaaaatgtgac

SEQ ID NO: 69196 - DNA, 20 bp, Artificial Sequence
  Description of Artificial Sequence: Synthetic oligonucleotide
  Target: SCNA; (+) strand; PAM type: YTN; PAM sequence: TTC
tagtcactaaaaatgtgacg

SEQ ID NO: 69197 - DNA, 20 bp, Artificial Sequence
  Description of Artificial Sequence: Synthetic oligonucleotide
  Target: SCNA; (+) strand; PAM type: YTN; PAM sequence: CTA
gtcactaaaaatgtgacgca

SEQ ID NO: 69198 - DNA, 20 bp, Artificial Sequence
  Description of Artificial Sequence: Synthetic oligonucleotide
  Target: SCNA; (+) strand; PAM type: YTN; PAM sequence: CTA
aaaatgtgacgcacatttac

SEQ ID NO: 69199 - DNA, 20 bp, Artificial Sequence
  Description of Artificial Sequence: Synthetic oligonucleotide
  Target: SCNA; (+) strand; PAM type: YTN; PAM sequence: TTT
acaccagtggttcggttgat

SEQ ID NO: 69200 - DNA, 20 bp, Artificial Sequence
  Description of Artificial Sequence: Synthetic oligonucleotide
  Target: SCNA; (+) strand; PAM type: YTN; PAM sequence: TTA
caccagtggttcggttgatt

SEQ ID NO: 69201 - DNA, 20 bp, Artificial Sequence
  Description of Artificial Sequence: Synthetic oligonucleotide
  Target: SCNA; (+) strand; PAM type: YTN; PAM sequence: TTC
ggttgattacttctcttcag

SEQ ID NO: 69202 - DNA, 20 bp, Artificial Sequence
  Description of Artificial Sequence: Synthetic oligonucleotide
  Target: SCNA; (+) strand; PAM type: YTN; PAM sequence: TTG
attacttctcttcagcccta

SEQ ID NO: 69203 - DNA, 20 bp, Artificial Sequence
  Description of Artificial Sequence: Synthetic oligonucleotide
  Target: SCNA; (+) strand; PAM type: YTN; PAM sequence: TTA
cttctcttcagccctagtct

SEQ ID NO: 69204 - DNA, 20 bp, Artificial Sequence
  Description of Artificial Sequence: Synthetic oligonucleotide
  Target: SCNA; (+) strand; PAM type: YTN; PAM sequence: CTT
ctcttcagccctagtctctt

SEQ ID NO: 69205 - DNA, 20 bp, Artificial Sequence
  Description of Artificial Sequence: Synthetic oligonucleotide
  Target: SCNA; (+) strand; PAM type: YTN; PAM sequence: TTC
tcttcagccctagtctctta

SEQ ID NO: 69206 - DNA, 20 bp, Artificial Sequence
  Description of Artificial Sequence: Synthetic oligonucleotide
  Target: SCNA; (+) strand; PAM type: YTN; PAM sequence: CTC
ttcagccctagtctcttaag

SEQ ID NO: 69207 - DNA, 20 bp, Artificial Sequence
  Description of Artificial Sequence: Synthetic oligonucleotide
  Target: SCNA; (+) strand; PAM type: YTN; PAM sequence: CTT
cagccctagtctcttaagca

SEQ ID NO: 69208 - DNA, 20 bp, Artificial Sequence
  Description of Artificial Sequence: Synthetic oligonucleotide
  Target: SCNA; (+) strand; PAM type: YTN; PAM sequence: TTC
agccctagtctcttaagcac

SEQ ID NO: 69209 - DNA, 20 bp, Artificial Sequence
  Description of Artificial Sequence: Synthetic oligonucleotide
  Target: SCNA; (+) strand; PAM type: YTN; PAM sequence: CTA
gtctcttaagcacaggtata

SEQ ID NO: 69210 - DNA, 20 bp, Artificial Sequence
  Description of Artificial Sequence: Synthetic oligonucleotide
  Target: SCNA; (+) strand; PAM type: YTN; PAM sequence: CTC
ttaagcacaggtatacacac

SEQ ID NO: 69211 - DNA, 20 bp, Artificial Sequence
  Description of Artificial Sequence: Synthetic oligonucleotide
  Target: SCNA; (+) strand; PAM type: YTN; PAM sequence: CTT
aagcacaggtatacacactt

SEQ ID NO: 69212 - DNA, 20 bp, Artificial Sequence
  Description of Artificial Sequence: Synthetic oligonucleotide
  Target: SCNA; (+) strand; PAM type: YTN; PAM sequence: TTA
agcacaggtatacacactta

SEQ ID NO: 69213 - DNA, 20 bp, Artificial Sequence
  Description of Artificial Sequence: Synthetic oligonucleotide
  Target: SCNA; (+) strand; PAM type: YTN; PAM sequence: CTT
acagcaatatctctgcatac

SEQ ID NO: 69214 - DNA, 20 bp, Artificial Sequence
  Description of Artificial Sequence: Synthetic oligonucleotide
  Target: SCNA; (+) strand; PAM type: YTN; PAM sequence: TTA
cagcaatatctctgcataca

SEQ ID NO: 69215 - DNA, 20 bp, Artificial Sequence
  Description of Artificial Sequence: Synthetic oligonucleotide
  Target: SCNA; (+) strand; PAM type: YTN; PAM sequence: CTC
tgcatacaatatttttgaca

SEQ ID NO: 69216 - DNA, 20 bp, Artificial Sequence
  Description of Artificial Sequence: Synthetic oligonucleotide
  Target: SCNA; (+) strand; PAM type: YTN; PAM sequence: CTG
catacaatatttttgacaga

SEQ ID NO: 69217 - DNA, 20 bp, Artificial Sequence
  Description of Artificial Sequence: Synthetic oligonucleotide
  Target: SCNA; (+) strand; PAM type: YTN; PAM sequence: TTT
ttgacagaatgaaaaagtta

SEQ ID NO: 69218 - DNA, 20 bp, Artificial Sequence
  Description of Artificial Sequence: Synthetic oligonucleotide
  Target: SCNA; (+) strand; PAM type: YTN; PAM sequence: TTT
tgacagaatgaaaaagttaa

SEQ ID NO: 69219 - DNA, 20 bp, Artificial Sequence
  Description of Artificial Sequence: Synthetic oligonucleotide
  Target: SCNA; (+) strand; PAM type: YTN; PAM sequence: TTT
gacagaatgaaaaagttaaa

SEQ ID NO: 69220 - DNA, 20 bp, Artificial Sequence
  Description of Artificial Sequence: Synthetic oligonucleotide
  Target: SCNA; (+) strand; PAM type: YTN; PAM sequence: TTG
acagaatgaaaaagttaaaa

SEQ ID NO: 69221 - DNA, 20 bp, Artificial Sequence
  Description of Artificial Sequence: Synthetic oligonucleotide
  Target: SCNA; (+) strand; PAM type: YTN; PAM sequence: TTA
aaaatattgatgtttatttc

SEQ ID NO: 69222 - DNA, 20 bp, Artificial Sequence
  Description of Artificial Sequence: Synthetic oligonucleotide
  Target: SCNA; (+) strand; PAM type: YTN; PAM sequence: TTG
atgtttatttcagcgattct

SEQ ID NO: 69223 - DNA, 20 bp, Artificial Sequence
  Description of Artificial Sequence: Synthetic oligonucleotide
  Target: SCNA; (+) strand; PAM type: YTN; PAM sequence: TTT
atttcagcgattctgaaatg

SEQ ID NO: 69224 - DNA, 20 bp, Artificial Sequence
  Description of Artificial Sequence: Synthetic oligonucleotide
  Target: SCNA; (+) strand; PAM type: YTN; PAM sequence: TTA
tttcagcgattctgaaatgg

SEQ ID NO: 69225 - DNA, 20 bp, Artificial Sequence
  Description of Artificial Sequence: Synthetic oligonucleotide
  Target: SCNA; (+) strand; PAM type: YTN; PAM sequence: TTT
cagcgattctgaaatggttt

SEQ ID NO: 69226 - DNA, 20 bp, Artificial Sequence
  Description of Artificial Sequence: Synthetic oligonucleotide
  Target: SCNA; (+) strand; PAM type: YTN; PAM sequence: TTC
agcgattctgaaatggttta

SEQ ID NO: 69227 - DNA, 20 bp, Artificial Sequence
  Description of Artificial Sequence: Synthetic oligonucleotide
  Target: SCNA; (+) strand; PAM type: YTN; PAM sequence: TTC
tgaaatggtttataaaaatt

SEQ ID NO: 69228 - DNA, 20 bp, Artificial Sequence
  Description of Artificial Sequence: Synthetic oligonucleotide
  Target: SCNA; (+) strand; PAM type: YTN; PAM sequence: CTG
aaatggtttataaaaattct

SEQ ID NO: 69229 - DNA, 20 bp, Artificial Sequence
  Description of Artificial Sequence: Synthetic oligonucleotide
  Target: SCNA; (+) strand; PAM type: YTN; PAM sequence: TTT
ataaaaattctatgactata

SEQ ID NO: 69230 - DNA, 20 bp, Artificial Sequence
  Description of Artificial Sequence: Synthetic oligonucleotide
  Target: SCNA; (+) strand; PAM type: YTN; PAM sequence: TTA
taaaaattctatgactataa

SEQ ID NO: 69231 - DNA, 20 bp, Artificial Sequence
  Description of Artificial Sequence: Synthetic oligonucleotide
  Target: SCNA; (+) strand; PAM type: YTN; PAM sequence: TTC
tatgactataagaaattcat

SEQ ID NO: 69232 - DNA, 20 bp, Artificial Sequence
  Description of Artificial Sequence: Synthetic oligonucleotide
  Target: SCNA; (+) strand; PAM type: YTN; PAM sequence: CTA
tgactataagaaattcatga

SEQ ID NO: 69233 - DNA, 20 bp, Artificial Sequence
  Description of Artificial Sequence: Synthetic oligonucleotide
  Target: SCNA; (+) strand; PAM type: YTN; PAM sequence: CTA
taagaaattcatgaggaatg

SEQ ID NO: 69234 - DNA, 20 bp, Artificial Sequence
  Description of Artificial Sequence: Synthetic oligonucleotide
  Target: SCNA; (+) strand; PAM type: YTN; PAM sequence: TTC
atgaggaatgcaatatatca

SEQ ID NO: 69235 - DNA, 20 bp, Artificial Sequence
  Description of Artificial Sequence: Synthetic oligonucleotide
  Target: SCNA; (+) strand; PAM type: YTN; PAM sequence: CTT
tacataaaaaggatgcgtgt

SEQ ID NO: 69236 - DNA, 20 bp, Artificial Sequence
  Description of Artificial Sequence: Synthetic oligonucleotide
  Target: SCNA; (+) strand; PAM type: YTN; PAM sequence: TTT
acataaaaaggatgcgtgtc

SEQ ID NO: 69237 - DNA, 20 bp, Artificial Sequence
  Description of Artificial Sequence: Synthetic oligonucleotide
  Target: SCNA; (+) strand; PAM type: YTN; PAM sequence: TTA
cataaaaaggatgcgtgtca

SEQ ID NO: 69238 - DNA, 20 bp, Artificial Sequence
  Description of Artificial Sequence: Synthetic oligonucleotide
  Target: SCNA; (+) strand; PAM type: YTN; PAM sequence: TTT
gagaggctggaatctagtga

SEQ ID NO: 69239 - DNA, 20 bp, Artificial Sequence
  Description of Artificial Sequence: Synthetic oligonucleotide
  Target: SCNA; (+) strand; PAM type: YTN; PAM sequence: TTG
agaggctggaatctagtgac

SEQ ID NO: 69240 - DNA, 20 bp, Artificial Sequence
  Description of Artificial Sequence: Synthetic oligonucleotide
  Target: SCNA; (+) strand; PAM type: YTN; PAM sequence: CTG
gaatctagtgacaaatgtgt

SEQ ID NO: 69241 - DNA, 20 bp, Artificial Sequence
  Description of Artificial Sequence: Synthetic oligonucleotide
  Target: SCNA; (+) strand; PAM type: YTN; PAM sequence: CTA
gtgacaaatgtgtcactttt

SEQ ID NO: 69242 - DNA, 20 bp, Artificial Sequence
  Description of Artificial Sequence: Synthetic oligonucleotide
  Target: SCNA; (+) strand; PAM type: YTN; PAM sequence: CTT
tttaaggtgtgcttgattca

SEQ ID NO: 69243 - DNA, 20 bp, Artificial Sequence
  Description of Artificial Sequence: Synthetic oligonucleotide
  Target: SCNA; (+) strand; PAM type: YTN; PAM sequence: TTT
ttaaggtgtgcttgattcac

SEQ ID NO: 69244 - DNA, 20 bp, Artificial Sequence
  Description of Artificial Sequence: Synthetic oligonucleotide
  Target: SCNA; (+) strand; PAM type: YTN; PAM sequence: TTT
taaggtgtgcttgattcaca

SEQ ID NO: 69245 - DNA, 20 bp, Artificial Sequence
  Description of Artificial Sequence: Synthetic oligonucleotide
  Target: SCNA; (+) strand; PAM type: YTN; PAM sequence: TTT
aaggtgtgcttgattcacag

SEQ ID NO: 69246 - DNA, 20 bp, Artificial Sequence
  Description of Artificial Sequence: Synthetic oligonucleotide
  Target: SCNA; (+) strand; PAM type: YTN; PAM sequence: TTA
aggtgtgcttgattcacagc

SEQ ID NO: 69247 - DNA, 20 bp, Artificial Sequence
  Description of Artificial Sequence: Synthetic oligonucleotide
  Target: SCNA; (+) strand; PAM type: YTN; PAM sequence: CTT
gattcacagctgacagcttt

SEQ ID NO: 69248 - DNA, 20 bp, Artificial Sequence
  Description of Artificial Sequence: Synthetic oligonucleotide
  Target: SCNA; (+) strand; PAM type: YTN; PAM sequence: TTG
attcacagctgacagctttg

SEQ ID NO: 69249 - DNA, 20 bp, Artificial Sequence
  Description of Artificial Sequence: Synthetic oligonucleotide
  Target: SCNA; (+) strand; PAM type: YTN; PAM sequence: TTC
acagctgacagctttgattt

SEQ ID NO: 69250 - DNA, 20 bp, Artificial Sequence
  Description of Artificial Sequence: Synthetic oligonucleotide
  Target: SCNA; (+) strand; PAM type: YTN; PAM sequence: CTG
acagctttgatttgaaattg

SEQ ID NO: 69251 - DNA, 20 bp, Artificial Sequence
  Description of Artificial Sequence: Synthetic oligonucleotide
  Target: SCNA; (+) strand; PAM type: YTN; PAM sequence: CTT
tgatttgaaattgcctttaa

SEQ ID NO: 69252 - DNA, 20 bp, Artificial Sequence
  Description of Artificial Sequence: Synthetic oligonucleotide
  Target: SCNA; (+) strand; PAM type: YTN; PAM sequence: TTT
gatttgaaattgcctttaaa

SEQ ID NO: 69253 - DNA, 20 bp, Artificial Sequence
  Description of Artificial Sequence: Synthetic oligonucleotide
  Target: SCNA; (+) strand; PAM type: YTN; PAM sequence: TTG
atttgaaattgcctttaaaa

SEQ ID NO: 69254 - DNA, 20 bp, Artificial Sequence
  Description of Artificial Sequence: Synthetic oligonucleotide
  Target: SCNA; (+) strand; PAM type: YTN; PAM sequence: TTT
gaaattgcctttaaaacaat

SEQ ID NO: 69255 - DNA, 20 bp, Artificial Sequence
  Description of Artificial Sequence: Synthetic oligonucleotide
  Target: SCNA; (+) strand; PAM type: YTN; PAM sequence: TTG
aaattgcctttaaaacaatg

SEQ ID NO: 69256 - DNA, 20 bp, Artificial Sequence
  Description of Artificial Sequence: Synthetic oligonucleotide
  Target: SCNA; (+) strand; PAM type: YTN; PAM sequence: TTG
cctttaaaacaatgtctatg

SEQ ID NO: 69257 - DNA, 20 bp, Artificial Sequence
  Description of Artificial Sequence: Synthetic oligonucleotide
  Target: SCNA; (+) strand; PAM type: YTN; PAM sequence: CTT
taaaacaatgtctatgtatc

SEQ ID NO: 69258 - DNA, 20 bp, Artificial Sequence
  Description of Artificial Sequence: Synthetic oligonucleotide
  Target: SCNA; (+) strand; PAM type: YTN; PAM sequence: TTT
aaaacaatgtctatgtatca

SEQ ID NO: 69259 - DNA, 20 bp, Artificial Sequence
  Description of Artificial Sequence: Synthetic oligonucleotide
  Target: SCNA; (+) strand; PAM type: YTN; PAM sequence: TTA
aaacaatgtctatgtatcag

SEQ ID NO: 69260 - DNA, 20 bp, Artificial Sequence
  Description of Artificial Sequence: Synthetic oligonucleotide
  Target: SCNA; (+) strand; PAM type: YTN; PAM sequence: CTA
tgtatcagtgcaatgaattc

SEQ ID NO: 69261 - DNA, 20 bp, Artificial Sequence
  Description of Artificial Sequence: Synthetic oligonucleotide
  Target: SCNA; (+) strand; PAM type: YTN; PAM sequence: TTC
taaccaaaagcttgttggag

SEQ ID NO: 69262 - DNA, 20 bp, Artificial Sequence
  Description of Artificial Sequence: Synthetic oligonucleotide
  Target: SCNA; (+) strand; PAM type: YTN; PAM sequence: CTA
accaaaagcttgttggagct

SEQ ID NO: 69263 - DNA, 20 bp, Artificial Sequence
  Description of Artificial Sequence: Synthetic oligonucleotide
  Target: SCNA; (+) strand; PAM type: YTN; PAM sequence: CTT
gttggagctaaccacagtac

SEQ ID NO: 69264 - DNA, 20 bp, Artificial Sequence
  Description of Artificial Sequence: Synthetic oligonucleotide
  Target: SCNA; (+) strand; PAM type: YTN; PAM sequence: TTG
ttggagctaaccacagtacc

SEQ ID NO: 69265 - DNA, 20 bp, Artificial Sequence
  Description of Artificial Sequence: Synthetic oligonucleotide
  Target: SCNA; (+) strand; PAM type: YTN; PAM sequence: TTG
gagctaaccacagtacctat

SEQ ID NO: 69266 - DNA, 20 bp, Artificial Sequence
  Description of Artificial Sequence: Synthetic oligonucleotide
  Target: SCNA; (+) strand; PAM type: YTN; PAM sequence: CTA
accacagtacctatatattc

SEQ ID NO: 69267 - DNA, 20 bp, Artificial Sequence
  Description of Artificial Sequence: Synthetic oligonucleotide
  Target: SCNA; (+) strand; PAM type: YTN; PAM sequence: CTA
tatattcaagatgttcatgg

SEQ ID NO: 69268 - DNA, 20 bp, Artificial Sequence
  Description of Artificial Sequence: Synthetic oligonucleotide
  Target: SCNA; (+) strand; PAM type: YTN; PAM sequence: TTC
aagatgttcatgggaggaat

SEQ ID NO: 69269 - DNA, 20 bp, Artificial Sequence
  Description of Artificial Sequence: Synthetic oligonucleotide
  Target: SCNA; (+) strand; PAM type: YTN; PAM sequence: TTC
atgggaggaatggaagattt

SEQ ID NO: 69270 - DNA, 20 bp, Artificial Sequence
  Description of Artificial Sequence: Synthetic oligonucleotide
  Target: SCNA; (+) strand; PAM type: YTN; PAM sequence: TTT
gatatttaggcactgaaggg

SEQ ID NO: 69271 - DNA, 20 bp, Artificial Sequence
  Description of Artificial Sequence: Synthetic oligonucleotide
  Target: SCNA; (+) strand; PAM type: YTN; PAM sequence: TTG
atatttaggcactgaagggt

SEQ ID NO: 69272 - DNA, 20 bp, Artificial Sequence
  Description of Artificial Sequence: Synthetic oligonucleotide
  Target: SCNA; (+) strand; PAM type: YTN; PAM sequence: TTT
aggcactgaagggttgctat

SEQ ID NO: 69273 - DNA, 20 bp, Artificial Sequence
  Description of Artificial Sequence: Synthetic oligonucleotide
  Target: SCNA; (+) strand; PAM type: YTN; PAM sequence: TTA
ggcactgaagggttgctatg

SEQ ID NO: 69274 - DNA, 20 bp, Artificial Sequence
  Description of Artificial Sequence: Synthetic oligonucleotide
  Target: SCNA; (+) strand; PAM type: YTN; PAM sequence: CTG
aagggttgctatgatagtta

SEQ ID NO: 69275 - DNA, 20 bp, Artificial Sequence
  Description of Artificial Sequence: Synthetic oligonucleotide
  Target: SCNA; (+) strand; PAM type: YTN; PAM sequence: TTG
ctatgatagttattatacac

SEQ ID NO: 69276 - DNA, 20 bp, Artificial Sequence
  Description of Artificial Sequence: Synthetic oligonucleotide
  Target: SCNA; (+) strand; PAM type: YTN; PAM sequence: CTA
tgatagttattatacacaat

SEQ ID NO: 69277 - DNA, 20 bp, Artificial Sequence
  Description of Artificial Sequence: Synthetic oligonucleotide
  Target: SCNA; (+) strand; PAM type: YTN; PAM sequence: TTA
ttatacacaattgagtttaa

SEQ ID NO: 69278 - DNA, 20 bp, Artificial Sequence
  Description of Artificial Sequence: Synthetic oligonucleotide
  Target: SCNA; (+) strand; PAM type: YTN; PAM sequence: TTA
tacacaattgagtttaaaat

SEQ ID NO: 69279 - DNA, 20 bp, Artificial Sequence
  Description of Artificial Sequence: Synthetic oligonucleotide
  Target: SCNA; (+) strand; PAM type: YTN; PAM sequence: TTG
agtttaaaatgaatatatgt

SEQ ID NO: 69280 - DNA, 20 bp, Artificial Sequence
  Description of Artificial Sequence: Synthetic oligonucleotide
  Target: SCNA; (+) strand; PAM type: YTN; PAM sequence: TTT
aaaatgaatatatgtgtcag

SEQ ID NO: 69281 - DNA, 20 bp, Artificial Sequence
  Description of Artificial Sequence: Synthetic oligonucleotide
  Target: SCNA; (+) strand; PAM type: YTN; PAM sequence: TTA
aaatgaatatatgtgtcagt

SEQ ID NO: 69282 - DNA, 20 bp, Artificial Sequence
  Description of Artificial Sequence: Synthetic oligonucleotide
  Target: SCNA; (+) strand; PAM type: YTN; PAM sequence: TTC
tattattaaatgttataaaa

SEQ ID NO: 69283 - DNA, 20 bp, Artificial Sequence
  Description of Artificial Sequence: Synthetic oligonucleotide
  Target: SCNA; (+) strand; PAM type: YTN; PAM sequence: CTA
ttattaaatgttataaaata

SEQ ID NO: 69284 - DNA, 20 bp, Artificial Sequence
  Description of Artificial Sequence: Synthetic oligonucleotide
  Target: SCNA; (+) strand; PAM type: YTN; PAM sequence: TTA
ttaaatgttataaaatatga

SEQ ID NO: 69285 - DNA, 20 bp, Artificial Sequence
  Description of Artificial Sequence: Synthetic oligonucleotide
  Target: SCNA; (+) strand; PAM type: YTN; PAM sequence: TTA
aatgttataaaatatgaggg

SEQ ID NO: 69286 - DNA, 20 bp, Artificial Sequence
  Description of Artificial Sequence: Synthetic oligonucleotide
  Target: SCNA; (+) strand; PAM type: YTN; PAM sequence: TTA
taaaatatgagggaataata

SEQ ID NO: 69287 - DNA, 20 bp, Artificial Sequence
  Description of Artificial Sequence: Synthetic oligonucleotide
  Target: SCNA; (+) strand; PAM type: YTN; PAM sequence: CTA
tgtaatttataaactacaag

SEQ ID NO: 69288 - DNA, 20 bp, Artificial Sequence
  Description of Artificial Sequence: Synthetic oligonucleotide
  Target: SCNA; (+) strand; PAM type: YTN; PAM sequence: TTT
ataaactacaagaaaattta

SEQ ID NO: 69289 - DNA, 20 bp, Artificial Sequence
  Description of Artificial Sequence: Synthetic oligonucleotide
  Target: SCNA; (+) strand; PAM type: YTN; PAM sequence: TTA
taaactacaagaaaatttat

SEQ ID NO: 69290 - DNA, 20 bp, Artificial Sequence
  Description of Artificial Sequence: Synthetic oligonucleotide
  Target: SCNA; (+) strand; PAM type: YTN; PAM sequence: CTA
caagaaaatttatatcagga

SEQ ID NO: 69291 - DNA, 20 bp, Artificial Sequence
  Description of Artificial Sequence: Synthetic oligonucleotide
  Target: SCNA; (+) strand; PAM type: YTN; PAM sequence: TTT
atatcaggaaactgcttatt

SEQ ID NO: 69292 - DNA, 20 bp, Artificial Sequence
  Description of Artificial Sequence: Synthetic oligonucleotide
  Target: SCNA; (+) strand; PAM type: YTN; PAM sequence: TTA
tatcaggaaactgcttattt

SEQ ID NO: 69293 - DNA, 20 bp, Artificial Sequence
  Description of Artificial Sequence: Synthetic oligonucleotide
  Target: SCNA; (+) strand; PAM type: YTN; PAM sequence: CTG
cttatttcctaatatatgca

SEQ ID NO: 69294 - DNA, 20 bp, Artificial Sequence
  Description of Artificial Sequence: Synthetic oligonucleotide
  Target: SCNA; (+) strand; PAM type: YTN; PAM sequence: CTT
atttcctaatatatgcactg

SEQ ID NO: 69295 - DNA, 20 bp, Artificial Sequence
  Description of Artificial Sequence: Synthetic oligonucleotide
  Target: SCNA; (+) strand; PAM type: YTN; PAM sequence: TTA
tttcctaatatatgcactgt

SEQ ID NO: 69296 - DNA, 20 bp, Artificial Sequence
  Description of Artificial Sequence: Synthetic oligonucleotide
  Target: SCNA; (+) strand; PAM type: YTN; PAM sequence: TTT
cctaatatatgcactgtctt

SEQ ID NO: 69297 - DNA, 20 bp, Artificial Sequence
  Description of Artificial Sequence: Synthetic oligonucleotide
  Target: SCNA; (+) strand; PAM type: YTN; PAM sequence: TTC
ctaatatatgcactgtcttc

SEQ ID NO: 69298 - DNA, 20 bp, Artificial Sequence
  Description of Artificial Sequence: Synthetic oligonucleotide
  Target: SCNA; (+) strand; PAM type: YTN; PAM sequence: CTA
atatatgcactgtcttcagt

SEQ ID NO: 69299 - DNA, 20 bp, Artificial Sequence
  Description of Artificial Sequence: Synthetic oligonucleotide
  Target: SCNA; (+) strand; PAM type: YTN; PAM sequence: CTG
tcttcagtgtctccaaaact

SEQ ID NO: 69300 - DNA, 20 bp, Artificial Sequence
  Description of Artificial Sequence: Synthetic oligonucleotide
  Target: SCNA; (+) strand; PAM type: YTN; PAM sequence: CTT
cagtgtctccaaaactgtca

SEQ ID NO: 69301 - DNA, 20 bp, Artificial Sequence
  Description of Artificial Sequence: Synthetic oligonucleotide
  Target: SCNA; (+) strand; PAM type: YTN; PAM sequence: TTC
agtgtctccaaaactgtcaa

SEQ ID NO: 69302 - DNA, 20 bp, Artificial Sequence
  Description of Artificial Sequence: Synthetic oligonucleotide
  Target: SCNA; (+) strand; PAM type: YTN; PAM sequence: CTC
caaaactgtcaactctgcca

SEQ ID NO: 69303 - DNA, 20 bp, Artificial Sequence
  Description of Artificial Sequence: Synthetic oligonucleotide
  Target: SCNA; (+) strand; PAM type: YTN; PAM sequence: CTG
tcaactctgccaatgtgact

SEQ ID NO: 69304 - DNA, 20 bp, Artificial Sequence
  Description of Artificial Sequence: Synthetic oligonucleotide
  Target: SCNA; (+) strand; PAM type: YTN; PAM sequence: CTC
tgccaatgtgactagcagat

SEQ ID NO: 69305 - DNA, 20 bp, Artificial Sequence
  Description of Artificial Sequence: Synthetic oligonucleotide
  Target: SCNA; (+) strand; PAM type: YTN; PAM sequence: CTG
ccaatgtgactagcagatga

SEQ ID NO: 69306 - DNA, 20 bp, Artificial Sequence
  Description of Artificial Sequence: Synthetic oligonucleotide
  Target: SCNA; (+) strand; PAM type: YTN; PAM sequence: CTA
gcagatgatgagcaggcagt

SEQ ID NO: 69307 - DNA, 20 bp, Artificial Sequence
  Description of Artificial Sequence: Synthetic oligonucleotide
  Target: SCNA; (+) strand; PAM type: YTN; PAM sequence: TTA
tcaattacatagtcagaaat

SEQ ID NO: 69308 - DNA, 20 bp, Artificial Sequence
  Description of Artificial Sequence: Synthetic oligonucleotide
  Target: SCNA; (+) strand; PAM type: YTN; PAM sequence: TTA
catagtcagaaatctgagtc

SEQ ID NO: 69309 - DNA, 20 bp, Artificial Sequence
  Description of Artificial Sequence: Synthetic oligonucleotide
  Target: SCNA; (+) strand; PAM type: YTN; PAM sequence: CTG
agtctttctttcaccttatg

SEQ ID NO: 69310 - DNA, 20 bp, Artificial Sequence
  Description of Artificial Sequence: Synthetic oligonucleotide
  Target: SCNA; (+) strand; PAM type: YTN; PAM sequence: CTT
tctttcaccttatgagctgt

SEQ ID NO: 69311 - DNA, 20 bp, Artificial Sequence
  Description of Artificial Sequence: Synthetic oligonucleotide
  Target: SCNA; (+) strand; PAM type: YTN; PAM sequence: TTT
ctttcaccttatgagctgtt

SEQ ID NO: 69312 - DNA, 20 bp, Artificial Sequence
  Description of Artificial Sequence: Synthetic oligonucleotide
  Target: SCNA; (+) strand; PAM type: YTN; PAM sequence: TTC
tttcaccttatgagctgttt

SEQ ID NO: 69313 - DNA, 20 bp, Artificial Sequence
  Description of Artificial Sequence: Synthetic oligonucleotide
  Target: SCNA; (+) strand; PAM type: YTN; PAM sequence: CTT
tcaccttatgagctgtttag

SEQ ID NO: 69314 - DNA, 20 bp, Artificial Sequence
  Description of Artificial Sequence: Synthetic oligonucleotide
  Target: SCNA; (+) strand; PAM type: YTN; PAM sequence: TTT
caccttatgagctgtttagg

SEQ ID NO: 69315 - DNA, 20 bp, Artificial Sequence
  Description of Artificial Sequence: Synthetic oligonucleotide
  Target: SCNA; (+) strand; PAM type: YTN; PAM sequence: TTC
accttatgagctgtttagga

SEQ ID NO: 69316 - DNA, 20 bp, Artificial Sequence
  Description of Artificial Sequence: Synthetic oligonucleotide
  Target: SCNA; (+) strand; PAM type: YTN; PAM sequence: CTT
atgagctgtttaggaagaag

SEQ ID NO: 69317 - DNA, 20 bp, Artificial Sequence
  Description of Artificial Sequence: Synthetic oligonucleotide
  Target: SCNA; (+) strand; PAM type: YTN; PAM sequence: TTA
tgagctgtttaggaagaagg

SEQ ID NO: 69318 - DNA, 20 bp, Artificial Sequence
  Description of Artificial Sequence: Synthetic oligonucleotide
  Target: SCNA; (+) strand; PAM type: YTN; PAM sequence: CTG
tttaggaagaaggtgtatat

SEQ ID NO: 69319 - DNA, 20 bp, Artificial Sequence
  Description of Artificial Sequence: Synthetic oligonucleotide
  Target: SCNA; (+) strand; PAM type: YTN; PAM sequence: TTT
aggaagaaggtgtatatgtg

SEQ ID NO: 69320 - DNA, 20 bp, Artificial Sequence
  Description of Artificial Sequence: Synthetic oligonucleotide
  Target: SCNA; (+) strand; PAM type: YTN; PAM sequence: TTA
ggaagaaggtgtatatgtgt

SEQ ID NO: 69321 - DNA, 20 bp, Artificial Sequence
  Description of Artificial Sequence: Synthetic oligonucleotide
  Target: SCNA; (+) strand; PAM type: YTN; PAM sequence: TTA
acttgtaagccattatctga

SEQ ID NO: 69322 - DNA, 20 bp, Artificial Sequence
  Description of Artificial Sequence: Synthetic oligonucleotide
  Target: SCNA; (+) strand; PAM type: YTN; PAM sequence: CTT
gtaagccattatctgatgca

SEQ ID NO: 69323 - DNA, 20 bp, Artificial Sequence
  Description of Artificial Sequence: Synthetic oligonucleotide
  Target: SCNA; (+) strand; PAM type: YTN; PAM sequence: TTG
taagccattatctgatgcaa

SEQ ID NO: 69324 - DNA, 20 bp, Artificial Sequence
  Description of Artificial Sequence: Synthetic oligonucleotide
  Target: SCNA; (+) strand; PAM type: YTN; PAM sequence: TTA
tctgatgcaaaggcagacat

SEQ ID NO: 69325 - DNA, 20 bp, Artificial Sequence
  Description of Artificial Sequence: Synthetic oligonucleotide
  Target: SCNA; (+) strand; PAM type: YTN; PAM sequence: CTG
atgcaaaggcagacatttac

SEQ ID NO: 69326 - DNA, 20 bp, Artificial Sequence
  Description of Artificial Sequence: Synthetic oligonucleotide
  Target: SCNA; (+) strand; PAM type: YTN; PAM sequence: TTT
actaagtcatctgtgaagag

SEQ ID NO: 69327 - DNA, 20 bp, Artificial Sequence
  Description of Artificial Sequence: Synthetic oligonucleotide
  Target: SCNA; (+) strand; PAM type: YTN; PAM sequence: TTA
ctaagtcatctgtgaagaga

SEQ ID NO: 69328 - DNA, 20 bp, Artificial Sequence
  Description of Artificial Sequence: Synthetic oligonucleotide
  Target: SCNA; (+) strand; PAM type: YTN; PAM sequence: CTA
agtcatctgtgaagagatgg

SEQ ID NO: 69329 - DNA, 20 bp, Artificial Sequence
  Description of Artificial Sequence: Synthetic oligonucleotide
  Target: SCNA; (+) strand; PAM type: YTN; PAM sequence: CTG
tgaagagatggttcgataat

SEQ ID NO: 69330 - DNA, 20 bp, Artificial Sequence
  Description of Artificial Sequence: Synthetic oligonucleotide
  Target: SCNA; (+) strand; PAM type: YTN; PAM sequence: TTC
gataatagctaagcattcat

SEQ ID NO: 69331 - DNA, 20 bp, Artificial Sequence
  Description of Artificial Sequence: Synthetic oligonucleotide
  Target: SCNA; (+) strand; PAM type: YTN; PAM sequence: CTA
agcattcatataaatcttca

SEQ ID NO: 69332 - DNA, 20 bp, Artificial Sequence
  Description of Artificial Sequence: Synthetic oligonucleotide
  Target: SCNA; (+) strand; PAM type: YTN; PAM sequence: TTC
atataaatcttcagggactc

SEQ ID NO: 69333 - DNA, 20 bp, Artificial Sequence
  Description of Artificial Sequence: Synthetic oligonucleotide
  Target: SCNA; (+) strand; PAM type: YTN; PAM sequence: CTT
cagggactcgaattctctca

SEQ ID NO: 69334 - DNA, 20 bp, Artificial Sequence
  Description of Artificial Sequence: Synthetic oligonucleotide
  Target: SCNA; (+) strand; PAM type: YTN; PAM sequence: TTC
agggactcgaattctctcaa

SEQ ID NO: 69335 - DNA, 20 bp, Artificial Sequence
  Description of Artificial Sequence: Synthetic oligonucleotide
  Target: SCNA; (+) strand; PAM type: YTN; PAM sequence: CTC
gaattctctcaagtgtgaca

SEQ ID NO: 69336 - DNA, 20 bp, Artificial Sequence
  Description of Artificial Sequence: Synthetic oligonucleotide
  Target: SCNA; (+) strand; PAM type: YTN; PAM sequence: TTC
tctcaagtgtgacagaatac

SEQ ID NO: 69337 - DNA, 20 bp, Artificial Sequence
  Description of Artificial Sequence: Synthetic oligonucleotide
  Target: SCNA; (+) strand; PAM type: YTN; PAM sequence: CTC
tcaagtgtgacagaatactc

SEQ ID NO: 69338 - DNA, 20 bp, Artificial Sequence
  Description of Artificial Sequence: Synthetic oligonucleotide
  Target: SCNA; (+) strand; PAM type: YTN; PAM sequence: CTC
aagtgtgacagaatactcct

SEQ ID NO: 69339 - DNA, 20 bp, Artificial Sequence
  Description of Artificial Sequence: Synthetic oligonucleotide
  Target: SCNA; (+) strand; PAM type: YTN; PAM sequence: CTC
ctctcaactgccagcgctcc

SEQ ID NO: 69340 - DNA, 20 bp, Artificial Sequence
  Description of Artificial Sequence: Synthetic oligonucleotide
  Target: SCNA; (+) strand; PAM type: YTN; PAM sequence: CTC
tcaactgccagcgctcctgt

SEQ ID NO: 69341 - DNA, 20 bp, Artificial Sequence
  Description of Artificial Sequence: Synthetic oligonucleotide
  Target: SCNA; (+) strand; PAM type: YTN; PAM sequence: CTC
aactgccagcgctcctgttg

SEQ ID NO: 69342 - DNA, 20 bp, Artificial Sequence
  Description of Artificial Sequence: Synthetic oligonucleotide
  Target: SCNA; (+) strand; PAM type: YTN; PAM sequence: CTG
ccagcgctcctgttgtaaaa

SEQ ID NO: 69343 - DNA, 20 bp, Artificial Sequence
  Description of Artificial Sequence: Synthetic oligonucleotide
  Target: SCNA; (+) strand; PAM type: YTN; PAM sequence: CTC
ctgttgtaaaaaatcacatt

SEQ ID NO: 69344 - DNA, 20 bp, Artificial Sequence
  Description of Artificial Sequence: Synthetic oligonucleotide
  Target: SCNA; (+) strand; PAM type: YTN; PAM sequence: CTG
ttgtaaaaaatcacatttgg

SEQ ID NO: 69345 - DNA, 20 bp, Artificial Sequence
  Description of Artificial Sequence: Synthetic oligonucleotide
  Target: SCNA; (+) strand; PAM type: YTN; PAM sequence: TTG
taaaaaatcacatttggcaa

SEQ ID NO: 69346 - DNA, 20 bp, Artificial Sequence
  Description of Artificial Sequence: Synthetic oligonucleotide
  Target: SCNA; (+) strand; PAM type: YTN; PAM sequence: TTT
ggcaaagggctctggtgttt

SEQ ID NO: 69347 - DNA, 20 bp, Artificial Sequence
  Description of Artificial Sequence: Synthetic oligonucleotide
  Target: SCNA; (+) strand; PAM type: YTN; PAM sequence: TTG
gcaaagggctctggtgtttt

SEQ ID NO: 69348 - DNA, 20 bp, Artificial Sequence
  Description of Artificial Sequence: Synthetic oligonucleotide
  Target: SCNA; (+) strand; PAM type: YTN; PAM sequence: CTC
tggtgttttgagttctgctc

SEQ ID NO: 69349 - DNA, 20 bp, Artificial Sequence
  Description of Artificial Sequence: Synthetic oligonucleotide
  Target: SCNA; (+) strand; PAM type: YTN; PAM sequence: CTG
gtgttttgagttctgctcag

SEQ ID NO: 69350 - DNA, 20 bp, Artificial Sequence
  Description of Artificial Sequence: Synthetic oligonucleotide
  Target: SCNA; (+) strand; PAM type: YTN; PAM sequence: TTT
tgagttctgctcagtgacag

SEQ ID NO: 69351 - DNA, 20 bp, Artificial Sequence
  Description of Artificial Sequence: Synthetic oligonucleotide
  Target: SCNA; (+) strand; PAM type: YTN; PAM sequence: TTT
gagttctgctcagtgacagg

SEQ ID NO: 69352 - DNA, 20 bp, Artificial Sequence
  Description of Artificial Sequence: Synthetic oligonucleotide
  Target: SCNA; (+) strand; PAM type: YTN; PAM sequence: TTG
agttctgctcagtgacaggt

SEQ ID NO: 69353 - DNA, 20 bp, Artificial Sequence
  Description of Artificial Sequence: Synthetic oligonucleotide
  Target: SCNA; (+) strand; PAM type: YTN; PAM sequence: TTC
tgctcagtgacaggtttgtt

SEQ ID NO: 69354 - DNA, 20 bp, Artificial Sequence
  Description of Artificial Sequence: Synthetic oligonucleotide
  Target: SCNA; (+) strand; PAM type: YTN; PAM sequence: CTG
ctcagtgacaggtttgtttt

SEQ ID NO: 69355 - DNA, 20 bp, Artificial Sequence
  Description of Artificial Sequence: Synthetic oligonucleotide
  Target: SCNA; (+) strand; PAM type: YTN; PAM sequence: CTC
agtgacaggtttgttttaag

SEQ ID NO: 69356 - DNA, 20 bp, Artificial Sequence
  Description of Artificial Sequence: Synthetic oligonucleotide
  Target: SCNA; (+) strand; PAM type: YTN; PAM sequence: TTT
gttttaagtaagattaatac

SEQ ID NO: 69357 - DNA, 20 bp, Artificial Sequence
  Description of Artificial Sequence: Synthetic oligonucleotide
  Target: SCNA; (+) strand; PAM type: YTN; PAM sequence: TTG
ttttaagtaagattaatact

SEQ ID NO: 69358 - DNA, 20 bp, Artificial Sequence
  Description of Artificial Sequence: Synthetic oligonucleotide
  Target: SCNA; (+) strand; PAM type: YTN; PAM sequence: TTT
taagtaagattaatactgag

SEQ ID NO: 69359 - DNA, 20 bp, Artificial Sequence
  Description of Artificial Sequence: Synthetic oligonucleotide
  Target: SCNA; (+) strand; PAM type: YTN; PAM sequence: TTT
aagtaagattaatactgagg

SEQ ID NO: 69360 - DNA, 20 bp, Artificial Sequence
  Description of Artificial Sequence: Synthetic oligonucleotide
  Target: SCNA; (+) strand; PAM type: YTN; PAM sequence: TTA
agtaagattaatactgagga

SEQ ID NO: 69361 - DNA, 20 bp, Artificial Sequence
  Description of Artificial Sequence: Synthetic oligonucleotide
  Target: SCNA; (+) strand; PAM type: YTN; PAM sequence: TTA
atactgaggacaataaaatg

SEQ ID NO: 69362 - DNA, 20 bp, Artificial Sequence
  Description of Artificial Sequence: Synthetic oligonucleotide
  Target: SCNA; (+) strand; PAM type: YTN; PAM sequence: CTG
aggacaataaaatgaccttc

SEQ ID NO: 69363 - DNA, 20 bp, Artificial Sequence
  Description of Artificial Sequence: Synthetic oligonucleotide
  Target: SCNA; (+) strand; PAM type: YTN; PAM sequence: CTT
caattaagactccttttaaa

SEQ ID NO: 69364 - DNA, 20 bp, Artificial Sequence
  Description of Artificial Sequence: Synthetic oligonucleotide
  Target: SCNA; (+) strand; PAM type: YTN; PAM sequence: TTC
aattaagactccttttaaat

SEQ ID NO: 69365 - DNA, 20 bp, Artificial Sequence
  Description of Artificial Sequence: Synthetic oligonucleotide
  Target: SCNA; (+) strand; PAM type: YTN; PAM sequence: TTA
agactccttttaaattttgt

SEQ ID NO: 69366 - DNA, 20 bp, Artificial Sequence
  Description of Artificial Sequence: Synthetic oligonucleotide
  Target: SCNA; (+) strand; PAM type: YTN; PAM sequence: CTC
cttttaaattttgtctacct

SEQ ID NO: 69367 - DNA, 20 bp, Artificial Sequence
  Description of Artificial Sequence: Synthetic oligonucleotide
  Target: SCNA; (+) strand; PAM type: YTN; PAM sequence: CTT
ttaaattttgtctacctgat

SEQ ID NO: 69368 - DNA, 20 bp, Artificial Sequence
  Description of Artificial Sequence: Synthetic oligonucleotide
  Target: SCNA; (+) strand; PAM type: YTN; PAM sequence: TTT
taaattttgtctacctgatt

SEQ ID NO: 69369 - DNA, 20 bp, Artificial Sequence
  Description of Artificial Sequence: Synthetic oligonucleotide
  Target: SCNA; (+) strand; PAM type: YTN; PAM sequence: TTT
aaattttgtctacctgattt

SEQ ID NO: 69370 - DNA, 20 bp, Artificial Sequence
  Description of Artificial Sequence: Synthetic oligonucleotide
  Target: SCNA; (+) strand; PAM type: YTN; PAM sequence: TTA
aattttgtctacctgatttc

SEQ ID NO: 69371 - DNA, 20 bp, Artificial Sequence
  Description of Artificial Sequence: Synthetic oligonucleotide
  Target: SCNA; (+) strand; PAM type: YTN; PAM sequence: TTT
tgtctacctgatttccacta

SEQ ID NO: 69372 - DNA, 20 bp, Artificial Sequence
  Description of Artificial Sequence: Synthetic oligonucleotide
  Target: SCNA; (+) strand; PAM type: YTN; PAM sequence: TTT
gtctacctgatttccactat

SEQ ID NO: 69373 - DNA, 20 bp, Artificial Sequence
  Description of Artificial Sequence: Synthetic oligonucleotide
  Target: SCNA; (+) strand; PAM type: YTN; PAM sequence: TTG
tctacctgatttccactatg

SEQ ID NO: 69374 - DNA, 20 bp, Artificial Sequence
  Description of Artificial Sequence: Synthetic oligonucleotide
  Target: SCNA; (+) strand; PAM type: YTN; PAM sequence: CTA
cctgatttccactatggttc

SEQ ID NO: 69375 - DNA, 20 bp, Artificial Sequence
  Description of Artificial Sequence: Synthetic oligonucleotide
  Target: SCNA; (+) strand; PAM type: YTN; PAM sequence: CTG
atttccactatggttcgtgt

SEQ ID NO: 69376 - DNA, 20 bp, Artificial Sequence
  Description of Artificial Sequence: Synthetic oligonucleotide
  Target: SCNA; (+) strand; PAM type: YTN; PAM sequence: TTT
ccactatggttcgtgtctag

SEQ ID NO: 69377 - DNA, 20 bp, Artificial Sequence
  Description of Artificial Sequence: Synthetic oligonucleotide
  Target: SCNA; (+) strand; PAM type: YTN; PAM sequence: TTC
cactatggttcgtgtctagc

SEQ ID NO: 69378 - DNA, 20 bp, Artificial Sequence
  Description of Artificial Sequence: Synthetic oligonucleotide
  Target: SCNA; (+) strand; PAM type: YTN; PAM sequence: CTA
tggttcgtgtctagctgtac

SEQ ID NO: 69379 - DNA, 20 bp, Artificial Sequence
  Description of Artificial Sequence: Synthetic oligonucleotide
  Target: SCNA; (+) strand; PAM type: YTN; PAM sequence: TTC
gtgtctagctgtactctatc

SEQ ID NO: 69380 - DNA, 20 bp, Artificial Sequence
  Description of Artificial Sequence: Synthetic oligonucleotide
  Target: SCNA; (+) strand; PAM type: YTN; PAM sequence: CTA
gctgtactctatctaagaat

SEQ ID NO: 69381 - DNA, 20 bp, Artificial Sequence
  Description of Artificial Sequence: Synthetic oligonucleotide
  Target: SCNA; (+) strand; PAM type: YTN; PAM sequence: CTG
tactctatctaagaatgatc

SEQ ID NO: 69382 - DNA, 20 bp, Artificial Sequence
  Description of Artificial Sequence: Synthetic oligonucleotide
  Target: SCNA; (+) strand; PAM type: YTN; PAM sequence: CTC
tatctaagaatgatctttaa

SEQ ID NO: 69383 - DNA, 20 bp, Artificial Sequence
  Description of Artificial Sequence: Synthetic oligonucleotide
  Target: SCNA; (+) strand; PAM type: YTN; PAM sequence: CTA
tctaagaatgatctttaaaa

SEQ ID NO: 69384 - DNA, 20 bp, Artificial Sequence
  Description of Artificial Sequence: Synthetic oligonucleotide
  Target: SCNA; (+) strand; PAM type: YTN; PAM sequence: CTA
agaatgatctttaaaacatt

SEQ ID NO: 69385 - DNA, 20 bp, Artificial Sequence
  Description of Artificial Sequence: Synthetic oligonucleotide
  Target: SCNA; (+) strand; PAM type: YTN; PAM sequence: CTT
taaaacattcaggattatga

SEQ ID NO: 69386 - DNA, 20 bp, Artificial Sequence
  Description of Artificial Sequence: Synthetic oligonucleotide
  Target: SCNA; (+) strand; PAM type: YTN; PAM sequence: TTT
aaaacattcaggattatgag

SEQ ID NO: 69387 - DNA, 20 bp, Artificial Sequence
  Description of Artificial Sequence: Synthetic oligonucleotide
  Target: SCNA; (+) strand; PAM type: YTN; PAM sequence: TTA
aaacattcaggattatgaga

SEQ ID NO: 69388 - DNA, 20 bp, Artificial Sequence
  Description of Artificial Sequence: Synthetic oligonucleotide
  Target: SCNA; (+) strand; PAM type: YTN; PAM sequence: TTC
aggattatgagagagatatc

SEQ ID NO: 69389 - DNA, 20 bp, Artificial Sequence
  Description of Artificial Sequence: Synthetic oligonucleotide
  Target: SCNA; (+) strand; PAM type: YTN; PAM sequence: TTA
tgagagagatatctaggaag

SEQ ID NO: 69390 - DNA, 20 bp, Artificial Sequence
  Description of Artificial Sequence: Synthetic oligonucleotide
  Target: SCNA; (+) strand; PAM type: YTN; PAM sequence: CTA
ggaagtcataggaaataacc

SEQ ID NO: 69391 - DNA, 20 bp, Artificial Sequence
  Description of Artificial Sequence: Synthetic oligonucleotide
  Target: SCNA; (+) strand; PAM type: YTN; PAM sequence: CTA
ttcaatgctgttctgtacac

SEQ ID NO: 69392 - DNA, 20 bp, Artificial Sequence
  Description of Artificial Sequence: Synthetic oligonucleotide
  Target: SCNA; (+) strand; PAM type: YTN; PAM sequence: TTC
aatgctgttctgtacaccat

SEQ ID NO: 69393 - DNA, 20 bp, Artificial Sequence
  Description of Artificial Sequence: Synthetic oligonucleotide
  Target: SCNA; (+) strand; PAM type: YTN; PAM sequence: CTG
ttctgtacaccattagtaaa

SEQ ID NO: 69394 - DNA, 20 bp, Artificial Sequence
  Description of Artificial Sequence: Synthetic oligonucleotide
  Target: SCNA; (+) strand; PAM type: YTN; PAM sequence: TTC
tgtacaccattagtaaacca

SEQ ID NO: 69395 - DNA, 20 bp, Artificial Sequence
  Description of Artificial Sequence: Synthetic oligonucleotide
  Target: SCNA; (+) strand; PAM type: YTN; PAM sequence: CTG
tacaccattagtaaaccata

SEQ ID NO: 69396 - DNA, 20 bp, Artificial Sequence
  Description of Artificial Sequence: Synthetic oligonucleotide
  Target: SCNA; (+) strand; PAM type: YTN; PAM sequence: TTA
gtaaaccataagagaggaca

SEQ ID NO: 69397 - DNA, 20 bp, Artificial Sequence
  Description of Artificial Sequence: Synthetic oligonucleotide
  Target: SCNA; (+) strand; PAM type: YTN; PAM sequence: TTT
atccaagaaagagactatta

SEQ ID NO: 69398 - DNA, 20 bp, Artificial Sequence
  Description of Artificial Sequence: Synthetic oligonucleotide
  Target: SCNA; (+) strand; PAM type: YTN; PAM sequence: TTA
tccaagaaagagactattac

SEQ ID NO: 69399 - DNA, 20 bp, Artificial Sequence
  Description of Artificial Sequence: Synthetic oligonucleotide
  Target: SCNA; (+) strand; PAM type: YTN; PAM sequence: CTA
ttacatagccaccaggaccc

SEQ ID NO: 69400 - DNA, 20 bp, Artificial Sequence
  Description of Artificial Sequence: Synthetic oligonucleotide
  Target: SCNA; (+) strand; PAM type: YTN; PAM sequence: TTA
catagccaccaggacccaat

SEQ ID NO: 69401 - DNA, 20 bp, Artificial Sequence
  Description of Artificial Sequence: Synthetic oligonucleotide
  Target: SCNA; (+) strand; PAM type: YTN; PAM sequence: TTC
agcacaattgagcaatacat

SEQ ID NO: 69402 - DNA, 20 bp, Artificial Sequence
  Description of Artificial Sequence: Synthetic oligonucleotide
  Target: SCNA; (+) strand; PAM type: YTN; PAM sequence: TTG
agcaatacatgtaacagatt

SEQ ID NO: 69403 - DNA, 20 bp, Artificial Sequence
  Description of Artificial Sequence: Synthetic oligonucleotide
  Target: SCNA; (+) strand; PAM type: YTN; PAM sequence: TTT
gtggtgaaaaacaggtgctg

SEQ ID NO: 69404 - DNA, 20 bp, Artificial Sequence
  Description of Artificial Sequence: Synthetic oligonucleotide
  Target: SCNA; (+) strand; PAM type: YTN; PAM sequence: TTG
tggtgaaaaacaggtgctgc

SEQ ID NO: 69405 - DNA, 20 bp, Artificial Sequence
  Description of Artificial Sequence: Synthetic oligonucleotide
  Target: SCNA; (+) strand; PAM type: YTN; PAM sequence: CTG
ctcaattgcttagtctaaaa

SEQ ID NO: 69406 - DNA, 20 bp, Artificial Sequence
  Description of Artificial Sequence: Synthetic oligonucleotide
  Target: SCNA; (+) strand; PAM type: YTN; PAM sequence: CTC
aattgcttagtctaaaattc

SEQ ID NO: 69407 - DNA, 20 bp, Artificial Sequence
  Description of Artificial Sequence: Synthetic oligonucleotide
  Target: SCNA; (+) strand; PAM type: YTN; PAM sequence: TTG
cttagtctaaaattctccct

SEQ ID NO: 69408 - DNA, 20 bp, Artificial Sequence
  Description of Artificial Sequence: Synthetic oligonucleotide
  Target: SCNA; (+) strand; PAM type: YTN; PAM sequence: CTT
agtctaaaattctccctcaa

SEQ ID NO: 69409 - DNA, 20 bp, Artificial Sequence
  Description of Artificial Sequence: Synthetic oligonucleotide
  Target: SCNA; (+) strand; PAM type: YTN; PAM sequence: TTA
gtctaaaattctccctcaat

SEQ ID NO: 69410 - DNA, 20 bp, Artificial Sequence
  Description of Artificial Sequence: Synthetic oligonucleotide
  Target: SCNA; (+) strand; PAM type: YTN; PAM sequence: CTA
aaattctccctcaattcctt

SEQ ID NO: 69411 - DNA, 20 bp, Artificial Sequence
  Description of Artificial Sequence: Synthetic oligonucleotide
  Target: SCNA; (+) strand; PAM type: YTN; PAM sequence: TTC
tccctcaattccttcccatc

SEQ ID NO: 69412 - DNA, 20 bp, Artificial Sequence
  Description of Artificial Sequence: Synthetic oligonucleotide
  Target: SCNA; (+) strand; PAM type: YTN; PAM sequence: CTC
cctcaattccttcccatcac

SEQ ID NO: 69413 - DNA, 20 bp, Artificial Sequence
  Description of Artificial Sequence: Synthetic oligonucleotide
  Target: SCNA; (+) strand; PAM type: YTN; PAM sequence: CTC
aattccttcccatcacctaa

SEQ ID NO: 69414 - DNA, 20 bp, Artificial Sequence
  Description of Artificial Sequence: Synthetic oligonucleotide
  Target: SCNA; (+) strand; PAM type: YTN; PAM sequence: TTC
cttcccatcacctaatttgt

SEQ ID NO: 69415 - DNA, 20 bp, Artificial Sequence
  Description of Artificial Sequence: Synthetic oligonucleotide
  Target: SCNA; (+) strand; PAM type: YTN; PAM sequence: CTT
cccatcacctaatttgtttg

SEQ ID NO: 69416 - DNA, 20 bp, Artificial Sequence
  Description of Artificial Sequence: Synthetic oligonucleotide
  Target: SCNA; (+) strand; PAM type: YTN; PAM sequence: TTC
ccatcacctaatttgtttga

SEQ ID NO: 69417 - DNA, 20 bp, Artificial Sequence
  Description of Artificial Sequence: Synthetic oligonucleotide
  Target: SCNA; (+) strand; PAM type: YTN; PAM sequence: CTA
atttgtttgacatctagtct

SEQ ID NO: 69418 - DNA, 20 bp, Artificial Sequence
  Description of Artificial Sequence: Synthetic oligonucleotide
  Target: SCNA; (+) strand; PAM type: YTN; PAM sequence: TTT
gtttgacatctagtcttttt

SEQ ID NO: 69419 - DNA, 20 bp, Artificial Sequence
  Description of Artificial Sequence: Synthetic oligonucleotide
  Target: SCNA; (+) strand; PAM type: YTN; PAM sequence: TTG
tttgacatctagtcttttta

SEQ ID NO: 69420 - DNA, 20 bp, Artificial Sequence
  Description of Artificial Sequence: Synthetic oligonucleotide
  Target: SCNA; (+) strand; PAM type: YTN; PAM sequence: TTT
gacatctagtctttttacat

SEQ ID NO: 69421 - DNA, 20 bp, Artificial Sequence
  Description of Artificial Sequence: Synthetic oligonucleotide
  Target: SCNA; (+) strand; PAM type: YTN; PAM sequence: TTG
acatctagtctttttacatt

SEQ ID NO: 69422 - DNA, 20 bp, Artificial Sequence
  Description of Artificial Sequence: Synthetic oligonucleotide
  Target: SCNA; (+) strand; PAM type: YTN; PAM sequence: CTA
gtctttttacattataatat

SEQ ID NO: 69423 - DNA, 20 bp, Artificial Sequence
  Description of Artificial Sequence: Synthetic oligonucleotide
  Target: SCNA; (+) strand; PAM type: YTN; PAM sequence: CTT
tttacattataatatagtat

SEQ ID NO: 69424 - DNA, 20 bp, Artificial Sequence
  Description of Artificial Sequence: Synthetic oligonucleotide
  Target: SCNA; (+) strand; PAM type: YTN; PAM sequence: TTT
ttacattataatatagtata

SEQ ID NO: 69425 - DNA, 20 bp, Artificial Sequence
  Description of Artificial Sequence: Synthetic oligonucleotide
  Target: SCNA; (+) strand; PAM type: YTN; PAM sequence: TTT
tacattataatatagtatat

SEQ ID NO: 69426 - DNA, 20 bp, Artificial Sequence
  Description of Artificial Sequence: Synthetic oligonucleotide
  Target: SCNA; (+) strand; PAM type: YTN; PAM sequence: TTT
acattataatatagtatatt

SEQ ID NO: 69427 - DNA, 20 bp, Artificial Sequence
  Description of Artificial Sequence: Synthetic oligonucleotide
  Target: SCNA; (+) strand; PAM type: YTN; PAM sequence: TTA
cattataatatagtatatta

SEQ ID NO: 69428 - DNA, 20 bp, Artificial Sequence
  Description of Artificial Sequence: Synthetic oligonucleotide
  Target: SCNA; (+) strand; PAM type: YTN; PAM sequence: TTA
taatatagtatattaaaaag

SEQ ID NO: 69429 - DNA, 20 bp, Artificial Sequence
  Description of Artificial Sequence: Synthetic oligonucleotide
  Target: SCNA; (+) strand; PAM type: YTN; PAM sequence: TTA
aaaagttcttattatggttt

SEQ ID NO: 69430 - DNA, 20 bp, Artificial Sequence
  Description of Artificial Sequence: Synthetic oligonucleotide
  Target: SCNA; (+) strand; PAM type: YTN; PAM sequence: TTC
ttattatggttttttttttt

SEQ ID NO: 69431 - DNA, 20 bp, Artificial Sequence
  Description of Artificial Sequence: Synthetic oligonucleotide
  Target: SCNA; (+) strand; PAM type: YTN; PAM sequence: CTT
attatggtttttttttttga

SEQ ID NO: 69432 - DNA, 20 bp, Artificial Sequence
  Description of Artificial Sequence: Synthetic oligonucleotide
  Target: SCNA; (+) strand; PAM type: YTN; PAM sequence: TTA
ttatggtttttttttttgag

SEQ ID NO: 69433 - DNA, 20 bp, Artificial Sequence
  Description of Artificial Sequence: Synthetic oligonucleotide
  Target: SCNA; (+) strand; PAM type: YTN; PAM sequence: TTA
tggtttttttttttgagatg

SEQ ID NO: 69434 - DNA, 20 bp, Artificial Sequence
  Description of Artificial Sequence: Synthetic oligonucleotide
  Target: SCNA; (+) strand; PAM type: YTN; PAM sequence: TTT
ttttttttgagatggggtct

SEQ ID NO: 69435 - DNA, 20 bp, Artificial Sequence
  Description of Artificial Sequence: Synthetic oligonucleotide
  Target: SCNA; (+) strand; PAM type: YTN; PAM sequence: TTT
tttttttgagatggggtctc

SEQ ID NO: 69436 - DNA, 20 bp, Artificial Sequence
  Description of Artificial Sequence: Synthetic oligonucleotide
  Target: SCNA; (+) strand; PAM type: YTN; PAM sequence: TTT
ttttttgagatggggtctcg

SEQ ID NO: 69437 - DNA, 20 bp, Artificial Sequence
  Description of Artificial Sequence: Synthetic oligonucleotide
  Target: SCNA; (+) strand; PAM type: YTN; PAM sequence: TTT
tttttgagatggggtctcgc

SEQ ID NO: 69438 - DNA, 20 bp, Artificial Sequence
  Description of Artificial Sequence: Synthetic oligonucleotide
  Target: SCNA; (+) strand; PAM type: YTN; PAM sequence: TTT
ttttgagatggggtctcgct

SEQ ID NO: 69439 - DNA, 20 bp, Artificial Sequence
  Description of Artificial Sequence: Synthetic oligonucleotide
  Target: SCNA; (+) strand; PAM type: YTN; PAM sequence: TTT
tttgagatggggtctcgctc

SEQ ID NO: 69440 - DNA, 20 bp, Artificial Sequence
  Description of Artificial Sequence: Synthetic oligonucleotide
  Target: SCNA; (+) strand; PAM type: YTN; PAM sequence: TTT
ttgagatggggtctcgctct

SEQ ID NO: 69441 - DNA, 20 bp, Artificial Sequence
  Description of Artificial Sequence: Synthetic oligonucleotide
  Target: SCNA; (+) strand; PAM type: YTN; PAM sequence: TTT
tgagatggggtctcgctctg

SEQ ID NO: 69442 - DNA, 20 bp, Artificial Sequence
  Description of Artificial Sequence: Synthetic oligonucleotide
  Target: SCNA; (+) strand; PAM type: YTN; PAM sequence: TTT
gagatggggtctcgctctgt

SEQ ID NO: 69443 - DNA, 20 bp, Artificial Sequence
  Description of Artificial Sequence: Synthetic oligonucleotide
  Target: SCNA; (+) strand; PAM type: YTN; PAM sequence: TTG
agatggggtctcgctctgtc

SEQ ID NO: 69444 - DNA, 20 bp, Artificial Sequence
  Description of Artificial Sequence: Synthetic oligonucleotide
  Target: SCNA; (+) strand; PAM type: YTN; PAM sequence: CTC
gctctgtcgttcaggctgga

SEQ ID NO: 69445 - DNA, 20 bp, Artificial Sequence
  Description of Artificial Sequence: Synthetic oligonucleotide
  Target: SCNA; (+) strand; PAM type: YTN; PAM sequence: CTC
tgtcgttcaggctggagagt

SEQ ID NO: 69446 - DNA, 20 bp, Artificial Sequence
  Description of Artificial Sequence: Synthetic oligonucleotide
  Target: SCNA; (+) strand; PAM type: YTN; PAM sequence: CTG
tcgttcaggctggagagtag

SEQ ID NO: 69447 - DNA, 20 bp, Artificial Sequence
  Description of Artificial Sequence: Synthetic oligonucleotide
  Target: SCNA; (+) strand; PAM type: YTN; PAM sequence: TTC
aggctggagagtaggctcag

SEQ ID NO: 69448 - DNA, 20 bp, Artificial Sequence
  Description of Artificial Sequence: Synthetic oligonucleotide
  Target: SCNA; (+) strand; PAM type: YTN; PAM sequence: CTG
gagagtaggctcagtgcaaa

SEQ ID NO: 69449 - DNA, 20 bp, Artificial Sequence
  Description of Artificial Sequence: Synthetic oligonucleotide
  Target: SCNA; (+) strand; PAM type: YTN; PAM sequence: CTC
agtgcaaactctgcctcctg

SEQ ID NO: 69450 - DNA, 20 bp, Artificial Sequence
  Description of Artificial Sequence: Synthetic oligonucleotide
  Target: SCNA; (+) strand; PAM type: YTN; PAM sequence: CTC
tgcctcctgggttcatgcca

SEQ ID NO: 69451 - DNA, 20 bp, Artificial Sequence
  Description of Artificial Sequence: Synthetic oligonucleotide
  Target: SCNA; (+) strand; PAM type: YTN; PAM sequence: CTG
cctcctgggttcatgccatt

SEQ ID NO: 69452 - DNA, 20 bp, Artificial Sequence
  Description of Artificial Sequence: Synthetic oligonucleotide
  Target: SCNA; (+) strand; PAM type: YTN; PAM sequence: CTC
ctgggttcatgccattctcc

SEQ ID NO: 69453 - DNA, 20 bp, Artificial Sequence
  Description of Artificial Sequence: Synthetic oligonucleotide
  Target: SCNA; (+) strand; PAM type: YTN; PAM sequence: CTG
ggttcatgccattctcctgc

SEQ ID NO: 69454 - DNA, 20 bp, Artificial Sequence
  Description of Artificial Sequence: Synthetic oligonucleotide
  Target: SCNA; (+) strand; PAM type: YTN; PAM sequence: TTC
atgccattctcctgcctcag

SEQ ID NO: 69455 - DNA, 20 bp, Artificial Sequence
  Description of Artificial Sequence: Synthetic oligonucleotide
  Target: SCNA; (+) strand; PAM type: YTN; PAM sequence: TTC
tcctgcctcagcctcccgag

SEQ ID NO: 69456 - DNA, 20 bp, Artificial Sequence
  Description of Artificial Sequence: Synthetic oligonucleotide
  Target: SCNA; (+) strand; PAM type: YTN; PAM sequence: CTC
ctgcctcagcctcccgagta

SEQ ID NO: 69457 - DNA, 20 bp, Artificial Sequence
  Description of Artificial Sequence: Synthetic oligonucleotide
  Target: SCNA; (+) strand; PAM type: YTN; PAM sequence: CTG
cctcagcctcccgagtagct

SEQ ID NO: 69458 - DNA, 20 bp, Artificial Sequence
  Description of Artificial Sequence: Synthetic oligonucleotide
  Target: SCNA; (+) strand; PAM type: YTN; PAM sequence: CTC
agcctcccgagtagctggga

SEQ ID NO: 69459 - DNA, 20 bp, Artificial Sequence
  Description of Artificial Sequence: Synthetic oligonucleotide
  Target: SCNA; (+) strand; PAM type: YTN; PAM sequence: CTC
ccgagtagctgggactacag

SEQ ID NO: 69460 - DNA, 20 bp, Artificial Sequence
  Description of Artificial Sequence: Synthetic oligonucleotide
  Target: SCNA; (+) strand; PAM type: YTN; PAM sequence: CTG
ggactacaggatcccgccac

SEQ ID NO: 69461 - DNA, 20 bp, Artificial Sequence
  Description of Artificial Sequence: Synthetic oligonucleotide
  Target: SCNA; (+) strand; PAM type: YTN; PAM sequence: CTA
caggatcccgccaccacgtc

SEQ ID NO: 69462 - DNA, 20 bp, Artificial Sequence
  Description of Artificial Sequence: Synthetic oligonucleotide
  Target: SCNA; (+) strand; PAM type: YTN; PAM sequence: CTG
ggccaattttttgtattttt

SEQ ID NO: 69463 - DNA, 20 bp, Artificial Sequence
  Description of Artificial Sequence: Synthetic oligonucleotide
  Target: SCNA; (+) strand; PAM type: YTN; PAM sequence: TTT
tttgtatttttagtaaagac

SEQ ID NO: 69464 - DNA, 20 bp, Artificial Sequence
  Description of Artificial Sequence: Synthetic oligonucleotide
  Target: SCNA; (+) strand; PAM type: YTN; PAM sequence: TTT
ttgtatttttagtaaagact

SEQ ID NO: 69465 - DNA, 20 bp, Artificial Sequence
  Description of Artificial Sequence: Synthetic oligonucleotide
  Target: SCNA; (+) strand; PAM type: YTN; PAM sequence: TTT
tgtatttttagtaaagactg

SEQ ID NO: 69466 - DNA, 20 bp, Artificial Sequence
  Description of Artificial Sequence: Synthetic oligonucleotide
  Target: SCNA; (+) strand; PAM type: YTN; PAM sequence: TTT
gtatttttagtaaagactgg

SEQ ID NO: 69467 - DNA, 20 bp, Artificial Sequence
  Description of Artificial Sequence: Synthetic oligonucleotide
  Target: SCNA; (+) strand; PAM type: YTN; PAM sequence: TTG
tatttttagtaaagactggg

SEQ ID NO: 69468 - DNA, 20 bp, Artificial Sequence
  Description of Artificial Sequence: Synthetic oligonucleotide
  Target: SCNA; (+) strand; PAM type: YTN; PAM sequence: TTT
ttagtaaagactgggtttca

SEQ ID NO: 69469 - DNA, 20 bp, Artificial Sequence
  Description of Artificial Sequence: Synthetic oligonucleotide
  Target: SCNA; (+) strand; PAM type: YTN; PAM sequence: TTT
tagtaaagactgggtttcat

SEQ ID NO: 69470 - DNA, 20 bp, Artificial Sequence
  Description of Artificial Sequence: Synthetic oligonucleotide
  Target: SCNA; (+) strand; PAM type: YTN; PAM sequence: TTT
agtaaagactgggtttcatg

SEQ ID NO: 69471 - DNA, 20 bp, Artificial Sequence
  Description of Artificial Sequence: Synthetic oligonucleotide
  Target: SCNA; (+) strand; PAM type: YTN; PAM sequence: TTA
gtaaagactgggtttcatgg

SEQ ID NO: 69472 - DNA, 20 bp, Artificial Sequence
  Description of Artificial Sequence: Synthetic oligonucleotide
  Target: SCNA; (+) strand; PAM type: YTN; PAM sequence: CTG
ggtttcatggtgttagctag

SEQ ID NO: 69473 - DNA, 20 bp, Artificial Sequence
  Description of Artificial Sequence: Synthetic oligonucleotide
  Target: SCNA; (+) strand; PAM type: YTN; PAM sequence: TTT
catggtgttagctaggatgg

SEQ ID NO: 69474 - DNA, 20 bp, Artificial Sequence
  Description of Artificial Sequence: Synthetic oligonucleotide
  Target: SCNA; (+) strand; PAM type: YTN; PAM sequence: TTC
atggtgttagctaggatggt

SEQ ID NO: 69475 - DNA, 20 bp, Artificial Sequence
  Description of Artificial Sequence: Synthetic oligonucleotide
  Target: SCNA; (+) strand; PAM type: YTN; PAM sequence: TTA
gctaggatggtctcgatctc

SEQ ID NO: 69476 - DNA, 20 bp, Artificial Sequence
  Description of Artificial Sequence: Synthetic oligonucleotide
  Target: SCNA; (+) strand; PAM type: YTN; PAM sequence: CTA
ggatggtctcgatctcctga

SEQ ID NO: 69477 - DNA, 20 bp, Artificial Sequence
  Description of Artificial Sequence: Synthetic oligonucleotide
  Target: SCNA; (+) strand; PAM type: YTN; PAM sequence: CTC
gatctcctgacctcatgatt

SEQ ID NO: 69478 - DNA, 20 bp, Artificial Sequence
  Description of Artificial Sequence: Synthetic oligonucleotide
  Target: SCNA; (+) strand; PAM type: YTN; PAM sequence: CTC
ctgacctcatgatttgccca

SEQ ID NO: 69479 - DNA, 20 bp, Artificial Sequence
  Description of Artificial Sequence: Synthetic oligonucleotide
  Target: SCNA; (+) strand; PAM type: YTN; PAM sequence: CTG
acctcatgatttgcccacct

SEQ ID NO: 69480 - DNA, 20 bp, Artificial Sequence
  Description of Artificial Sequence: Synthetic oligonucleotide
  Target: SCNA; (+) strand; PAM type: YTN; PAM sequence: CTC
atgatttgcccaccttggcc

SEQ ID NO: 69481 - DNA, 20 bp, Artificial Sequence
  Description of Artificial Sequence: Synthetic oligonucleotide
  Target: SCNA; (+) strand; PAM type: YTN; PAM sequence: TTT
gcccaccttggcctcccaaa

SEQ ID NO: 69482 - DNA, 20 bp, Artificial Sequence
  Description of Artificial Sequence: Synthetic oligonucleotide
  Target: SCNA; (+) strand; PAM type: YTN; PAM sequence: TTG
cccaccttggcctcccaaaa

SEQ ID NO: 69483 - DNA, 20 bp, Artificial Sequence
  Description of Artificial Sequence: Synthetic oligonucleotide
  Target: SCNA; (+) strand; PAM type: YTN; PAM sequence: CTT
ggcctcccaaaatgctgaga

SEQ ID NO: 69484 - DNA, 20 bp, Artificial Sequence
  Description of Artificial Sequence: Synthetic oligonucleotide
  Target: SCNA; (+) strand; PAM type: YTN; PAM sequence: TTG
gcctcccaaaatgctgagat

SEQ ID NO: 69485 - DNA, 20 bp, Artificial Sequence
  Description of Artificial Sequence: Synthetic oligonucleotide
  Target: SCNA; (+) strand; PAM type: YTN; PAM sequence: CTC
ccaaaatgctgagattacag

SEQ ID NO: 69486 - DNA, 20 bp, Artificial Sequence
  Description of Artificial Sequence: Synthetic oligonucleotide
  Target: SCNA; (+) strand; PAM type: YTN; PAM sequence: CTG
agattacaggtgtgagccac

SEQ ID NO: 69487 - DNA, 20 bp, Artificial Sequence
  Description of Artificial Sequence: Synthetic oligonucleotide
  Target: SCNA; (+) strand; PAM type: YTN; PAM sequence: TTA
caggtgtgagccaccgcgcc

SEQ ID NO: 69488 - DNA, 20 bp, Artificial Sequence
  Description of Artificial Sequence: Synthetic oligonucleotide
  Target: SCNA; (+) strand; PAM type: YTN; PAM sequence: CTG
gcccttattatagaattttt

SEQ ID NO: 69489 - DNA, 20 bp, Artificial Sequence
  Description of Artificial Sequence: Synthetic oligonucleotide
  Target: SCNA; (+) strand; PAM type: YTN; PAM sequence: CTT
attatagaatttttgggcat

SEQ ID NO: 69490 - DNA, 20 bp, Artificial Sequence
  Description of Artificial Sequence: Synthetic oligonucleotide
  Target: SCNA; (+) strand; PAM type: YTN; PAM sequence: TTA
ttatagaatttttgggcata

SEQ ID NO: 69491 - DNA, 20 bp, Artificial Sequence
  Description of Artificial Sequence: Synthetic oligonucleotide
  Target: SCNA; (+) strand; PAM type: YTN; PAM sequence: TTA
tagaatttttgggcatacat

SEQ ID NO: 69492 - DNA, 20 bp, Artificial Sequence
  Description of Artificial Sequence: Synthetic oligonucleotide
  Target: SCNA; (+) strand; PAM type: YTN; PAM sequence: TTT
ttgggcatacattgcacatt

SEQ ID NO: 69493 - DNA, 20 bp, Artificial Sequence
  Description of Artificial Sequence: Synthetic oligonucleotide
  Target: SCNA; (+) strand; PAM type: YTN; PAM sequence: TTT
tgggcatacattgcacattt

SEQ ID NO: 69494 - DNA, 20 bp, Artificial Sequence
  Description of Artificial Sequence: Synthetic oligonucleotide
  Target: SCNA; (+) strand; PAM type: YTN; PAM sequence: TTT
gggcatacattgcacatttt

SEQ ID NO: 69495 - DNA, 20 bp, Artificial Sequence
  Description of Artificial Sequence: Synthetic oligonucleotide
  Target: SCNA; (+) strand; PAM type: YTN; PAM sequence: TTG
ggcatacattgcacattttt

SEQ ID NO: 69496 - DNA, 20 bp, Artificial Sequence
  Description of Artificial Sequence: Synthetic oligonucleotide
  Target: SCNA; (+) strand; PAM type: YTN; PAM sequence: TTG
cacatttttctaattgtgct

SEQ ID NO: 69497 - DNA, 20 bp, Artificial Sequence
  Description of Artificial Sequence: Synthetic oligonucleotide
  Target: SCNA; (+) strand; PAM type: YTN; PAM sequence: TTT
ttctaattgtgcttcaataa

SEQ ID NO: 69498 - DNA, 20 bp, Artificial Sequence
  Description of Artificial Sequence: Synthetic oligonucleotide
  Target: SCNA; (+) strand; PAM type: YTN; PAM sequence: TTT
tctaattgtgcttcaataat

SEQ ID NO: 69499 - DNA, 20 bp, Artificial Sequence
  Description of Artificial Sequence: Synthetic oligonucleotide
  Target: SCNA; (+) strand; PAM type: YTN; PAM sequence: TTT
ctaattgtgcttcaataata

SEQ ID NO: 69500 - DNA, 20 bp, Artificial Sequence
  Description of Artificial Sequence: Synthetic oligonucleotide
  Target: SCNA; (+) strand; PAM type: YTN; PAM sequence: TTC
taattgtgcttcaataatac

SEQ ID NO: 69501 - DNA, 20 bp, Artificial Sequence
  Description of Artificial Sequence: Synthetic oligonucleotide
  Target: SCNA; (+) strand; PAM type: YTN; PAM sequence: CTA
attgtgcttcaataatacca

SEQ ID NO: 69502 - DNA, 20 bp, Artificial Sequence
  Description of Artificial Sequence: Synthetic oligonucleotide
  Target: SCNA; (+) strand; PAM type: YTN; PAM sequence: TTG
tgcttcaataataccaaaca

SEQ ID NO: 69503 - DNA, 20 bp, Artificial Sequence
  Description of Artificial Sequence: Synthetic oligonucleotide
  Target: SCNA; (+) strand; PAM type: YTN; PAM sequence: CTT
caataataccaaacaagtgg

SEQ ID NO: 69504 - DNA, 20 bp, Artificial Sequence
  Description of Artificial Sequence: Synthetic oligonucleotide
  Target: SCNA; (+) strand; PAM type: YTN; PAM sequence: TTC
aataataccaaacaagtggg

SEQ ID NO: 69505 - DNA, 20 bp, Artificial Sequence
  Description of Artificial Sequence: Synthetic oligonucleotide
  Target: SCNA; (+) strand; PAM type: YTN; PAM sequence: CTT
cactgggctacatttgcatc

SEQ ID NO: 69506 - DNA, 20 bp, Artificial Sequence
  Description of Artificial Sequence: Synthetic oligonucleotide
  Target: SCNA; (+) strand; PAM type: YTN; PAM sequence: TTC
actgggctacatttgcatcc

SEQ ID NO: 69507 - DNA, 20 bp, Artificial Sequence
  Description of Artificial Sequence: Synthetic oligonucleotide
  Target: SCNA; (+) strand; PAM type: YTN; PAM sequence: CTG
ggctacatttgcatccctga

SEQ ID NO: 69508 - DNA, 20 bp, Artificial Sequence
  Description of Artificial Sequence: Synthetic oligonucleotide
  Target: SCNA; (+) strand; PAM type: YTN; PAM sequence: CTA
catttgcatccctgagtaca

SEQ ID NO: 69509 - DNA, 20 bp, Artificial Sequence
  Description of Artificial Sequence: Synthetic oligonucleotide
  Target: SCNA; (+) strand; PAM type: YTN; PAM sequence: TTT
gcatccctgagtacaatttc

SEQ ID NO: 69510 - DNA, 20 bp, Artificial Sequence
  Description of Artificial Sequence: Synthetic oligonucleotide
  Target: SCNA; (+) strand; PAM type: YTN; PAM sequence: TTG
catccctgagtacaatttca

SEQ ID NO: 69511 - DNA, 20 bp, Artificial Sequence
  Description of Artificial Sequence: Synthetic oligonucleotide
  Target: SCNA; (+) strand; PAM type: YTN; PAM sequence: CTG
agtacaatttcacattggtt

SEQ ID NO: 69512 - DNA, 20 bp, Artificial Sequence
  Description of Artificial Sequence: Synthetic oligonucleotide
  Target: SCNA; (+) strand; PAM type: YTN; PAM sequence: TTT
cacattggttttggttttgt

SEQ ID NO: 69513 - DNA, 20 bp, Artificial Sequence
  Description of Artificial Sequence: Synthetic oligonucleotide
  Target: SCNA; (+) strand; PAM type: YTN; PAM sequence: TTC
acattggttttggttttgtg

SEQ ID NO: 69514 - DNA, 20 bp, Artificial Sequence
  Description of Artificial Sequence: Synthetic oligonucleotide
  Target: SCNA; (+) strand; PAM type: YTN; PAM sequence: TTG
gttttggttttgtgaatttt

SEQ ID NO: 69515 - DNA, 20 bp, Artificial Sequence
  Description of Artificial Sequence: Synthetic oligonucleotide
  Target: SCNA; (+) strand; PAM type: YTN; PAM sequence: TTT
tggttttgtgaattttggag

SEQ ID NO: 69516 - DNA, 20 bp, Artificial Sequence
  Description of Artificial Sequence: Synthetic oligonucleotide
  Target: SCNA; (+) strand; PAM type: YTN; PAM sequence: TTT
ggttttgtgaattttggagg

SEQ ID NO: 69517 - DNA, 20 bp, Artificial Sequence
  Description of Artificial Sequence: Synthetic oligonucleotide
  Target: SCNA; (+) strand; PAM type: YTN; PAM sequence: TTG
gttttgtgaattttggagga

SEQ ID NO: 69518 - DNA, 20 bp, Artificial Sequence
  Description of Artificial Sequence: Synthetic oligonucleotide
  Target: SCNA; (+) strand; PAM type: YTN; PAM sequence: TTT
tgtgaattttggaggaattt

SEQ ID NO: 69519 - DNA, 20 bp, Artificial Sequence
  Description of Artificial Sequence: Synthetic oligonucleotide
  Target: SCNA; (+) strand; PAM type: YTN; PAM sequence: TTT
gtgaattttggaggaattta

SEQ ID NO: 69520 - DNA, 20 bp, Artificial Sequence
  Description of Artificial Sequence: Synthetic oligonucleotide
  Target: SCNA; (+) strand; PAM type: YTN; PAM sequence: TTG
tgaattttggaggaatttat

SEQ ID NO: 69521 - DNA, 20 bp, Artificial Sequence
  Description of Artificial Sequence: Synthetic oligonucleotide
  Target: SCNA; (+) strand; PAM type: YTN; PAM sequence: TTT
tggaggaatttattttgaga

SEQ ID NO: 69522 - DNA, 20 bp, Artificial Sequence
  Description of Artificial Sequence: Synthetic oligonucleotide
  Target: SCNA; (+) strand; PAM type: YTN; PAM sequence: TTT
ggaggaatttattttgagag

SEQ ID NO: 69523 - DNA, 20 bp, Artificial Sequence
  Description of Artificial Sequence: Synthetic oligonucleotide
  Target: SCNA; (+) strand; PAM type: YTN; PAM sequence: TTG
gaggaatttattttgagaga

SEQ ID NO: 69524 - DNA, 20 bp, Artificial Sequence
  Description of Artificial Sequence: Synthetic oligonucleotide
  Target: SCNA; (+) strand; PAM type: YTN; PAM sequence: TTT
attttgagagatgcccctgg

SEQ ID NO: 69525 - DNA, 20 bp, Artificial Sequence
  Description of Artificial Sequence: Synthetic oligonucleotide
  Target: SCNA; (+) strand; PAM type: YTN; PAM sequence: TTA
ttttgagagatgcccctgga

SEQ ID NO: 69526 - DNA, 20 bp, Artificial Sequence
  Description of Artificial Sequence: Synthetic oligonucleotide
  Target: SCNA; (+) strand; PAM type: YTN; PAM sequence: TTT
tgagagatgcccctggaaat

SEQ ID NO: 69527 - DNA, 20 bp, Artificial Sequence
  Description of Artificial Sequence: Synthetic oligonucleotide
  Target: SCNA; (+) strand; PAM type: YTN; PAM sequence: TTT
gagagatgcccctggaaata

SEQ ID NO: 69528 - DNA, 20 bp, Artificial Sequence
  Description of Artificial Sequence: Synthetic oligonucleotide
  Target: SCNA; (+) strand; PAM type: YTN; PAM sequence: TTG
agagatgcccctggaaataa

SEQ ID NO: 69529 - DNA, 20 bp, Artificial Sequence
  Description of Artificial Sequence: Synthetic oligonucleotide
  Target: SCNA; (+) strand; PAM type: YTN; PAM sequence: CTG
gaaataaataatgctgatgt

SEQ ID NO: 69530 - DNA, 20 bp, Artificial Sequence
  Description of Artificial Sequence: Synthetic oligonucleotide
  Target: SCNA; (+) strand; PAM type: YTN; PAM sequence: CTG
atgttttggtgtaattttat

SEQ ID NO: 69531 - DNA, 20 bp, Artificial Sequence
  Description of Artificial Sequence: Synthetic oligonucleotide
  Target: SCNA; (+) strand; PAM type: YTN; PAM sequence: TTT
tggtgtaattttatttattg

SEQ ID NO: 69532 - DNA, 20 bp, Artificial Sequence
  Description of Artificial Sequence: Synthetic oligonucleotide
  Target: SCNA; (+) strand; PAM type: YTN; PAM sequence: TTT
ggtgtaattttatttattgc

SEQ ID NO: 69533 - DNA, 20 bp, Artificial Sequence
  Description of Artificial Sequence: Synthetic oligonucleotide
  Target: SCNA; (+) strand; PAM type: YTN; PAM sequence: TTG
gtgtaattttatttattgca

SEQ ID NO: 69534 - DNA, 20 bp, Artificial Sequence
  Description of Artificial Sequence: Synthetic oligonucleotide
  Target: SCNA; (+) strand; PAM type: YTN; PAM sequence: TTT
tatttattgcattaatggaa

SEQ ID NO: 69535 - DNA, 20 bp, Artificial Sequence
  Description of Artificial Sequence: Synthetic oligonucleotide
  Target: SCNA; (+) strand; PAM type: YTN; PAM sequence: TTT
atttattgcattaatggaat

SEQ ID NO: 69536 - DNA, 20 bp, Artificial Sequence
  Description of Artificial Sequence: Synthetic oligonucleotide
  Target: SCNA; (+) strand; PAM type: YTN; PAM sequence: TTA
tttattgcattaatggaata

SEQ ID NO: 69537 - DNA, 20 bp, Artificial Sequence
  Description of Artificial Sequence: Synthetic oligonucleotide
  Target: SCNA; (+) strand; PAM type: YTN; PAM sequence: TTT
attgcattaatggaatatgt

SEQ ID NO: 69538 - DNA, 20 bp, Artificial Sequence
  Description of Artificial Sequence: Synthetic oligonucleotide
  Target: SCNA; (+) strand; PAM type: YTN; PAM sequence: TTA
ttgcattaatggaatatgta

SEQ ID NO: 69539 - DNA, 20 bp, Artificial Sequence
  Description of Artificial Sequence: Synthetic oligonucleotide
  Target: SCNA; (+) strand; PAM type: YTN; PAM sequence: TTG
cattaatggaatatgtaaat

SEQ ID NO: 69540 - DNA, 20 bp, Artificial Sequence
  Description of Artificial Sequence: Synthetic oligonucleotide
  Target: SCNA; (+) strand; PAM type: YTN; PAM sequence: TTA
atggaatatgtaaatacaat

SEQ ID NO: 69541 - DNA, 20 bp, Artificial Sequence
  Description of Artificial Sequence: Synthetic oligonucleotide
  Target: SCNA; (+) strand; PAM type: YTN; PAM sequence: CTA
tcagcattaggcagaaaata

SEQ ID NO: 69542 - DNA, 20 bp, Artificial Sequence
  Description of Artificial Sequence: Synthetic oligonucleotide
  Target: SCNA; (+) strand; PAM type: YTN; PAM sequence: TTA
ggcagaaaatatttaagaga

SEQ ID NO: 69543 - DNA, 20 bp, Artificial Sequence
  Description of Artificial Sequence: Synthetic oligonucleotide
  Target: SCNA; (+) strand; PAM type: YTN; PAM sequence: TTT
aagagatatcaaattctttt

SEQ ID NO: 69544 - DNA, 20 bp, Artificial Sequence
  Description of Artificial Sequence: Synthetic oligonucleotide
  Target: SCNA; (+) strand; PAM type: YTN; PAM sequence: TTA
agagatatcaaattcttttg

SEQ ID NO: 69545 - DNA, 20 bp, Artificial Sequence
  Description of Artificial Sequence: Synthetic oligonucleotide
  Target: SCNA; (+) strand; PAM type: YTN; PAM sequence: TTC
ttttgccgagaaaggtagta

SEQ ID NO: 69546 - DNA, 20 bp, Artificial Sequence
  Description of Artificial Sequence: Synthetic oligonucleotide
  Target: SCNA; (+) strand; PAM type: YTN; PAM sequence: CTT
ttgccgagaaaggtagtagt

SEQ ID NO: 69547 - DNA, 20 bp, Artificial Sequence
  Description of Artificial Sequence: Synthetic oligonucleotide
  Target: SCNA; (+) strand; PAM type: YTN; PAM sequence: TTT
tgccgagaaaggtagtagtt

SEQ ID NO: 69548 - DNA, 20 bp, Artificial Sequence
  Description of Artificial Sequence: Synthetic oligonucleotide
  Target: SCNA; (+) strand; PAM type: YTN; PAM sequence: TTT
gccgagaaaggtagtagttt

SEQ ID NO: 69549 - DNA, 20 bp, Artificial Sequence
  Description of Artificial Sequence: Synthetic oligonucleotide
  Target: SCNA; (+) strand; PAM type: YTN; PAM sequence: TTG
ccgagaaaggtagtagtttg

SEQ ID NO: 69550 - DNA, 20 bp, Artificial Sequence
  Description of Artificial Sequence: Synthetic oligonucleotide
  Target: SCNA; (+) strand; PAM type: YTN; PAM sequence: TTT
gccaggaactacaagctttc

SEQ ID NO: 69551 - DNA, 20 bp, Artificial Sequence
  Description of Artificial Sequence: Synthetic oligonucleotide
  Target: SCNA; (+) strand; PAM type: YTN; PAM sequence: TTG
ccaggaactacaagctttct

SEQ ID NO: 69552 - DNA, 20 bp, Artificial Sequence
  Description of Artificial Sequence: Synthetic oligonucleotide
  Target: SCNA; (+) strand; PAM type: YTN; PAM sequence: CTA
caagctttctaactgaactt

SEQ ID NO: 69553 - DNA, 20 bp, Artificial Sequence
  Description of Artificial Sequence: Synthetic oligonucleotide
  Target: SCNA; (+) strand; PAM type: YTN; PAM sequence: CTT
tctaactgaacttttaaaaa

SEQ ID NO: 69554 - DNA, 20 bp, Artificial Sequence
  Description of Artificial Sequence: Synthetic oligonucleotide
  Target: SCNA; (+) strand; PAM type: YTN; PAM sequence: TTT
ctaactgaacttttaaaaat

SEQ ID NO: 69555 - DNA, 20 bp, Artificial Sequence
  Description of Artificial Sequence: Synthetic oligonucleotide
  Target: SCNA; (+) strand; PAM type: YTN; PAM sequence: TTC
taactgaacttttaaaaata

SEQ ID NO: 69556 - DNA, 20 bp, Artificial Sequence
  Description of Artificial Sequence: Synthetic oligonucleotide
  Target: SCNA; (+) strand; PAM type: YTN; PAM sequence: CTA
actgaacttttaaaaataaa

SEQ ID NO: 69557 - DNA, 20 bp, Artificial Sequence
  Description of Artificial Sequence: Synthetic oligonucleotide
  Target: SCNA; (+) strand; PAM type: YTN; PAM sequence: CTG
aacttttaaaaataaatttt

SEQ ID NO: 69558 - DNA, 20 bp, Artificial Sequence
  Description of Artificial Sequence: Synthetic oligonucleotide
  Target: SCNA; (+) strand; PAM type: YTN; PAM sequence: CTT
ttaaaaataaattttaattt

SEQ ID NO: 69559 - DNA, 20 bp, Artificial Sequence
  Description of Artificial Sequence: Synthetic oligonucleotide
  Target: SCNA; (+) strand; PAM type: YTN; PAM sequence: TTT
taaaaataaattttaatttt

SEQ ID NO: 69560 - DNA, 20 bp, Artificial Sequence
  Description of Artificial Sequence: Synthetic oligonucleotide
  Target: SCNA; (+) strand; PAM type: YTN; PAM sequence: TTT
aaaaataaattttaattttt

SEQ ID NO: 69561 - DNA, 20 bp, Artificial Sequence
  Description of Artificial Sequence: Synthetic oligonucleotide
  Target: SCNA; (+) strand; PAM type: YTN; PAM sequence: TTA
aaaataaattttaattttta

SEQ ID NO: 69562 - DNA, 20 bp, Artificial Sequence
  Description of Artificial Sequence: Synthetic oligonucleotide
  Target: SCNA; (+) strand; PAM type: YTN; PAM sequence: TTT
taatttttaattttgataga

SEQ ID NO: 69563 - DNA, 20 bp, Artificial Sequence
  Description of Artificial Sequence: Synthetic oligonucleotide
  Target: SCNA; (+) strand; PAM type: YTN; PAM sequence: TTT
aatttttaattttgatagat

SEQ ID NO: 69564 - DNA, 20 bp, Artificial Sequence
  Description of Artificial Sequence: Synthetic oligonucleotide
  Target: SCNA; (+) strand; PAM type: YTN; PAM sequence: TTA
atttttaattttgatagatc

SEQ ID NO: 69565 - DNA, 20 bp, Artificial Sequence
  Description of Artificial Sequence: Synthetic oligonucleotide
  Target: SCNA; (+) strand; PAM type: YTN; PAM sequence: TTT
ttaattttgatagatcatca

SEQ ID NO: 69566 - DNA, 20 bp, Artificial Sequence
  Description of Artificial Sequence: Synthetic oligonucleotide
  Target: SCNA; (+) strand; PAM type: YTN; PAM sequence: TTT
taattttgatagatcatcat

SEQ ID NO: 69567 - DNA, 20 bp, Artificial Sequence
  Description of Artificial Sequence: Synthetic oligonucleotide
  Target: SCNA; (+) strand; PAM type: YTN; PAM sequence: TTT
aattttgatagatcatcata

SEQ ID NO: 69568 - DNA, 20 bp, Artificial Sequence
  Description of Artificial Sequence: Synthetic oligonucleotide
  Target: SCNA; (+) strand; PAM type: YTN; PAM sequence: TTA
attttgatagatcatcatag

SEQ ID NO: 69569 - DNA, 20 bp, Artificial Sequence
  Description of Artificial Sequence: Synthetic oligonucleotide
  Target: SCNA; (+) strand; PAM type: YTN; PAM sequence: TTT
tgatagatcatcatagttgc

SEQ ID NO: 69570 - DNA, 20 bp, Artificial Sequence
  Description of Artificial Sequence: Synthetic oligonucleotide
  Target: SCNA; (+) strand; PAM type: YTN; PAM sequence: TTT
gatagatcatcatagttgca

SEQ ID NO: 69571 - DNA, 20 bp, Artificial Sequence
  Description of Artificial Sequence: Synthetic oligonucleotide
  Target: SCNA; (+) strand; PAM type: YTN; PAM sequence: TTG
atagatcatcatagttgcac

SEQ ID NO: 69572 - DNA, 20 bp, Artificial Sequence
  Description of Artificial Sequence: Synthetic oligonucleotide
  Target: SCNA; (+) strand; PAM type: YTN; PAM sequence: TTG
cacatatttaagggctatct

SEQ ID NO: 69573 - DNA, 20 bp, Artificial Sequence
  Description of Artificial Sequence: Synthetic oligonucleotide
  Target: SCNA; (+) strand; PAM type: YTN; PAM sequence: TTT
aagggctatctgtgatattt

SEQ ID NO: 69574 - DNA, 20 bp, Artificial Sequence
  Description of Artificial Sequence: Synthetic oligonucleotide
  Target: SCNA; (+) strand; PAM type: YTN; PAM sequence: TTA
agggctatctgtgatatttt

SEQ ID NO: 69575 - DNA, 20 bp, Artificial Sequence
  Description of Artificial Sequence: Synthetic oligonucleotide
  Target: SCNA; (+) strand; PAM type: YTN; PAM sequence: CTA
tctgtgatattttcatacaa

SEQ ID NO: 69576 - DNA, 20 bp, Artificial Sequence
  Description of Artificial Sequence: Synthetic oligonucleotide
  Target: SCNA; (+) strand; PAM type: YTN; PAM sequence: CTG
tgatattttcatacaatact

SEQ ID NO: 69577 - DNA, 20 bp, Artificial Sequence
  Description of Artificial Sequence: Synthetic oligonucleotide
  Target: SCNA; (+) strand; PAM type: YTN; PAM sequence: TTT
tcatacaatactgccatgtt

SEQ ID NO: 69578 - DNA, 20 bp, Artificial Sequence
  Description of Artificial Sequence: Synthetic oligonucleotide
  Target: SCNA; (+) strand; PAM type: YTN; PAM sequence: TTT
catacaatactgccatgttt

SEQ ID NO: 69579 - DNA, 20 bp, Artificial Sequence
  Description of Artificial Sequence: Synthetic oligonucleotide
  Target: SCNA; (+) strand; PAM type: YTN; PAM sequence: TTC
atacaatactgccatgttta

SEQ ID NO: 69580 - DNA, 20 bp, Artificial Sequence
  Description of Artificial Sequence: Synthetic oligonucleotide
  Target: SCNA; (+) strand; PAM type: YTN; PAM sequence: CTG
ccatgtttactgccactatt

SEQ ID NO: 69581 - DNA, 20 bp, Artificial Sequence
  Description of Artificial Sequence: Synthetic oligonucleotide
  Target: SCNA; (+) strand; PAM type: YTN; PAM sequence: TTT
actgccactattcacaatag

SEQ ID NO: 69582 - DNA, 20 bp, Artificial Sequence
  Description of Artificial Sequence: Synthetic oligonucleotide
  Target: SCNA; (+) strand; PAM type: YTN; PAM sequence: TTA
ctgccactattcacaatagc

SEQ ID NO: 69583 - DNA, 20 bp, Artificial Sequence
  Description of Artificial Sequence: Synthetic oligonucleotide
  Target: SCNA; (+) strand; PAM type: YTN; PAM sequence: CTG
ccactattcacaatagccac

SEQ ID NO: 69584 - DNA, 20 bp, Artificial Sequence
  Description of Artificial Sequence: Synthetic oligonucleotide
  Target: SCNA; (+) strand; PAM type: YTN; PAM sequence: CTA
ttcacaatagccacgatatg

SEQ ID NO: 69585 - DNA, 20 bp, Artificial Sequence
  Description of Artificial Sequence: Synthetic oligonucleotide
  Target: SCNA; (+) strand; PAM type: YTN; PAM sequence: TTC
acaatagccacgatatggaa

SEQ ID NO: 69586 - DNA, 20 bp, Artificial Sequence
  Description of Artificial Sequence: Synthetic oligonucleotide
  Target: SCNA; (+) strand; PAM type: YTN; PAM sequence: CTT
tgttcatcaacagaagagga

SEQ ID NO: 69587 - DNA, 20 bp, Artificial Sequence
  Description of Artificial Sequence: Synthetic oligonucleotide
  Target: SCNA; (+) strand; PAM type: YTN; PAM sequence: TTT
gttcatcaacagaagaggag

SEQ ID NO: 69588 - DNA, 20 bp, Artificial Sequence
  Description of Artificial Sequence: Synthetic oligonucleotide
  Target: SCNA; (+) strand; PAM type: YTN; PAM sequence: TTG
ttcatcaacagaagaggaga

SEQ ID NO: 69589 - DNA, 20 bp, Artificial Sequence
  Description of Artificial Sequence: Synthetic oligonucleotide
  Target: SCNA; (+) strand; PAM type: YTN; PAM sequence: TTC
atcaacagaagaggagacaa

SEQ ID NO: 69590 - DNA, 20 bp, Artificial Sequence
  Description of Artificial Sequence: Synthetic oligonucleotide
  Target: SCNA; (+) strand; PAM type: YTN; PAM sequence: CTG
actttggtctgtgctggctg

SEQ ID NO: 69591 - DNA, 20 bp, Artificial Sequence
  Description of Artificial Sequence: Synthetic oligonucleotide
  Target: SCNA; (+) strand; PAM type: YTN; PAM sequence: CTT
tggtctgtgctggctgcagg

SEQ ID NO: 69592 - DNA, 20 bp, Artificial Sequence
  Description of Artificial Sequence: Synthetic oligonucleotide
  Target: SCNA; (+) strand; PAM type: YTN; PAM sequence: TTT
ggtctgtgctggctgcaggt

SEQ ID NO: 69593 - DNA, 20 bp, Artificial Sequence
  Description of Artificial Sequence: Synthetic oligonucleotide
  Target: SCNA; (+) strand; PAM type: YTN; PAM sequence: TTG
gtctgtgctggctgcaggtt

SEQ ID NO: 69594 - DNA, 20 bp, Artificial Sequence
  Description of Artificial Sequence: Synthetic oligonucleotide
  Target: SCNA; (+) strand; PAM type: YTN; PAM sequence: CTG
tgctggctgcaggttctgga

SEQ ID NO: 69595 - DNA, 20 bp, Artificial Sequence
  Description of Artificial Sequence: Synthetic oligonucleotide
  Target: SCNA; (+) strand; PAM type: YTN; PAM sequence: CTG
gctgcaggttctggagagct

SEQ ID NO: 69596 - DNA, 20 bp, Artificial Sequence
  Description of Artificial Sequence: Synthetic oligonucleotide
  Target: SCNA; (+) strand; PAM type: YTN; PAM sequence: CTG
caggttctggagagctgttt

SEQ ID NO: 69597 - DNA, 20 bp, Artificial Sequence
  Description of Artificial Sequence: Synthetic oligonucleotide
  Target: SCNA; (+) strand; PAM type: YTN; PAM sequence: TTC
tggagagctgtttgaagtga

SEQ ID NO: 69598 - DNA, 20 bp, Artificial Sequence
  Description of Artificial Sequence: Synthetic oligonucleotide
  Target: SCNA; (+) strand; PAM type: YTN; PAM sequence: CTG
gagagctgtttgaagtgaca

SEQ ID NO: 69599 - DNA, 20 bp, Artificial Sequence
  Description of Artificial Sequence: Synthetic oligonucleotide
  Target: SCNA; (+) strand; PAM type: YTN; PAM sequence: CTG
tttgaagtgacaagatggca

SEQ ID NO: 69600 - DNA, 20 bp, Artificial Sequence
  Description of Artificial Sequence: Synthetic oligonucleotide
  Target: SCNA; (+) strand; PAM type: YTN; PAM sequence: TTT
gaagtgacaagatggcaaat

SEQ ID NO: 69601 - DNA, 20 bp, Artificial Sequence
  Description of Artificial Sequence: Synthetic oligonucleotide
  Target: SCNA; (+) strand; PAM type: YTN; PAM sequence: TTG
aagtgacaagatggcaaatg

SEQ ID NO: 69602 - DNA, 20 bp, Artificial Sequence
  Description of Artificial Sequence: Synthetic oligonucleotide
  Target: SCNA; (+) strand; PAM type: YTN; PAM sequence: TTG
gttgcctggtggattattcg

SEQ ID NO: 69603 - DNA, 20 bp, Artificial Sequence
  Description of Artificial Sequence: Synthetic oligonucleotide
  Target: SCNA; (+) strand; PAM type: YTN; PAM sequence: TTG
cctggtggattattcgtcct

SEQ ID NO: 69604 - DNA, 20 bp, Artificial Sequence
  Description of Artificial Sequence: Synthetic oligonucleotide
  Target: SCNA; (+) strand; PAM type: YTN; PAM sequence: CTG
gtggattattcgtcctcata

SEQ ID NO: 69605 - DNA, 20 bp, Artificial Sequence
  Description of Artificial Sequence: Synthetic oligonucleotide
  Target: SCNA; (+) strand; PAM type: YTN; PAM sequence: TTA
ttcgtcctcataacacttta

SEQ ID NO: 69606 - DNA, 20 bp, Artificial Sequence
  Description of Artificial Sequence: Synthetic oligonucleotide
  Target: SCNA; (+) strand; PAM type: YTN; PAM sequence: TTC
gtcctcataacactttacct

SEQ ID NO: 69607 - DNA, 20 bp, Artificial Sequence
  Description of Artificial Sequence: Synthetic oligonucleotide
  Target: SCNA; (+) strand; PAM type: YTN; PAM sequence: CTC
ataacactttacctagaaat

SEQ ID NO: 69608 - DNA, 20 bp, Artificial Sequence
  Description of Artificial Sequence: Synthetic oligonucleotide
  Target: SCNA; (+) strand; PAM type: YTN; PAM sequence: CTT
tacctagaaattttgccttt

SEQ ID NO: 69609 - DNA, 20 bp, Artificial Sequence
  Description of Artificial Sequence: Synthetic oligonucleotide
  Target: SCNA; (+) strand; PAM type: YTN; PAM sequence: TTT
acctagaaattttgcctttt

SEQ ID NO: 69610 - DNA, 20 bp, Artificial Sequence
  Description of Artificial Sequence: Synthetic oligonucleotide
  Target: SCNA; (+) strand; PAM type: YTN; PAM sequence: TTA
cctagaaattttgccttttc

SEQ ID NO: 69611 - DNA, 20 bp, Artificial Sequence
  Description of Artificial Sequence: Synthetic oligonucleotide
  Target: SCNA; (+) strand; PAM type: YTN; PAM sequence: CTA
gaaattttgccttttctcac

SEQ ID NO: 69612 - DNA, 20 bp, Artificial Sequence
  Description of Artificial Sequence: Synthetic oligonucleotide
  Target: SCNA; (+) strand; PAM type: YTN; PAM sequence: TTT
tgccttttctcacaaaacca

SEQ ID NO: 69613 - DNA, 20 bp, Artificial Sequence
  Description of Artificial Sequence: Synthetic oligonucleotide
  Target: SCNA; (+) strand; PAM type: YTN; PAM sequence: TTT
gccttttctcacaaaaccat

SEQ ID NO: 69614 - DNA, 20 bp, Artificial Sequence
  Description of Artificial Sequence: Synthetic oligonucleotide
  Target: SCNA; (+) strand; PAM type: YTN; PAM sequence: TTG
ccttttctcacaaaaccata

SEQ ID NO: 69615 - DNA, 20 bp, Artificial Sequence
  Description of Artificial Sequence: Synthetic oligonucleotide
  Target: SCNA; (+) strand; PAM type: YTN; PAM sequence: CTT
ttctcacaaaaccataataa

SEQ ID NO: 69616 - DNA, 20 bp, Artificial Sequence
  Description of Artificial Sequence: Synthetic oligonucleotide
  Target: SCNA; (+) strand; PAM type: YTN; PAM sequence: TTT
tctcacaaaaccataataat

SEQ ID NO: 69617 - DNA, 20 bp, Artificial Sequence
  Description of Artificial Sequence: Synthetic oligonucleotide
  Target: SCNA; (+) strand; PAM type: YTN; PAM sequence: TTT
ctcacaaaaccataataatg

SEQ ID NO: 69618 - DNA, 20 bp, Artificial Sequence
  Description of Artificial Sequence: Synthetic oligonucleotide
  Target: SCNA; (+) strand; PAM type: YTN; PAM sequence: TTC
tcacaaaaccataataatgg

SEQ ID NO: 69619 - DNA, 20 bp, Artificial Sequence
  Description of Artificial Sequence: Synthetic oligonucleotide
  Target: SCNA; (+) strand; PAM type: YTN; PAM sequence: CTC
acaaaaccataataatggac

SEQ ID NO: 69620 - DNA, 20 bp, Artificial Sequence
  Description of Artificial Sequence: Synthetic oligonucleotide
  Target: SCNA; (+) strand; PAM type: YTN; PAM sequence: CTA
gatatgcacccccagtcact

SEQ ID NO: 69621 - DNA, 20 bp, Artificial Sequence
  Description of Artificial Sequence: Synthetic oligonucleotide
  Target: SCNA; (+) strand; PAM type: YTN; PAM sequence: CTA
tcgtaaggtcaagttggtat

SEQ ID NO: 69622 - DNA, 20 bp, Artificial Sequence
  Description of Artificial Sequence: Synthetic oligonucleotide
  Target: SCNA; (+) strand; PAM type: YTN; PAM sequence: TTG
gtatgagtcacataagtaga

SEQ ID NO: 69623 - DNA, 20 bp, Artificial Sequence
  Description of Artificial Sequence: Synthetic oligonucleotide
  Target: SCNA; (+) strand; PAM type: YTN; PAM sequence: CTA
gaagttttatctgaatagta

SEQ ID NO: 69624 - DNA, 20 bp, Artificial Sequence
  Description of Artificial Sequence: Synthetic oligonucleotide
  Target: SCNA; (+) strand; PAM type: YTN; PAM sequence: TTT
tatctgaatagtattgtcat

SEQ ID NO: 69625 - DNA, 20 bp, Artificial Sequence
  Description of Artificial Sequence: Synthetic oligonucleotide
  Target: SCNA; (+) strand; PAM type: YTN; PAM sequence: TTT
atctgaatagtattgtcata

SEQ ID NO: 69626 - DNA, 20 bp, Artificial Sequence
  Description of Artificial Sequence: Synthetic oligonucleotide
  Target: SCNA; (+) strand; PAM type: YTN; PAM sequence: TTA
tctgaatagtattgtcatag

SEQ ID NO: 69627 - DNA, 20 bp, Artificial Sequence
  Description of Artificial Sequence: Synthetic oligonucleotide
  Target: SCNA; (+) strand; PAM type: YTN; PAM sequence: CTG
aatagtattgtcatagtggc

SEQ ID NO: 69628 - DNA, 20 bp, Artificial Sequence
  Description of Artificial Sequence: Synthetic oligonucleotide
  Target: SCNA; (+) strand; PAM type: YTN; PAM sequence: TTG
tcatagtggctaggaatgag

SEQ ID NO: 69629 - DNA, 20 bp, Artificial Sequence
  Description of Artificial Sequence: Synthetic oligonucleotide
  Target: SCNA; (+) strand; PAM type: YTN; PAM sequence: CTA
ggaatgagagtgaaaagtag

SEQ ID NO: 69630 - DNA, 20 bp, Artificial Sequence
  Description of Artificial Sequence: Synthetic oligonucleotide
  Target: SCNA; (+) strand; PAM type: YTN; PAM sequence: CTA
gatgtgtgctttgatatggc

SEQ ID NO: 69631 - DNA, 20 bp, Artificial Sequence
  Description of Artificial Sequence: Synthetic oligonucleotide
  Target: SCNA; (+) strand; PAM type: YTN; PAM sequence: CTT
tgatatggcttggagcaaaa

SEQ ID NO: 69632 - DNA, 20 bp, Artificial Sequence
  Description of Artificial Sequence: Synthetic oligonucleotide
  Target: SCNA; (+) strand; PAM type: YTN; PAM sequence: TTT
gatatggcttggagcaaaag

SEQ ID NO: 69633 - DNA, 20 bp, Artificial Sequence
  Description of Artificial Sequence: Synthetic oligonucleotide
  Target: SCNA; (+) strand; PAM type: YTN; PAM sequence: TTG
atatggcttggagcaaaagg

SEQ ID NO: 69634 - DNA, 20 bp, Artificial Sequence
  Description of Artificial Sequence: Synthetic oligonucleotide
  Target: SCNA; (+) strand; PAM type: YTN; PAM sequence: CTT
ggagcaaaaggtcaggtatt

SEQ ID NO: 69635 - DNA, 20 bp, Artificial Sequence
  Description of Artificial Sequence: Synthetic oligonucleotide
  Target: SCNA; (+) strand; PAM type: YTN; PAM sequence: TTG
gagcaaaaggtcaggtattg

SEQ ID NO: 69636 - DNA, 20 bp, Artificial Sequence
  Description of Artificial Sequence: Synthetic oligonucleotide
  Target: SCNA; (+) strand; PAM type: YTN; PAM sequence: TTG
gggcacttctgaaatgatat

SEQ ID NO: 69637 - DNA, 20 bp, Artificial Sequence
  Description of Artificial Sequence: Synthetic oligonucleotide
  Target: SCNA; (+) strand; PAM type: YTN; PAM sequence: CTT
ctgaaatgatatctattatt

SEQ ID NO: 69638 - DNA, 20 bp, Artificial Sequence
  Description of Artificial Sequence: Synthetic oligonucleotide
  Target: SCNA; (+) strand; PAM type: YTN; PAM sequence: TTC
tgaaatgatatctattattt

SEQ ID NO: 69639 - DNA, 20 bp, Artificial Sequence
  Description of Artificial Sequence: Synthetic oligonucleotide
  Target: SCNA; (+) strand; PAM type: YTN; PAM sequence: CTG
aaatgatatctattatttag

SEQ ID NO: 69640 - DNA, 20 bp, Artificial Sequence
  Description of Artificial Sequence: Synthetic oligonucleotide
  Target: SCNA; (+) strand; PAM type: YTN; PAM sequence: CTA
ttatttaggaactgggtcag

SEQ ID NO: 69641 - DNA, 20 bp, Artificial Sequence
  Description of Artificial Sequence: Synthetic oligonucleotide
  Target: SCNA; (+) strand; PAM type: YTN; PAM sequence: TTA
tttaggaactgggtcaggaa

SEQ ID NO: 69642 - DNA, 20 bp, Artificial Sequence
  Description of Artificial Sequence: Synthetic oligonucleotide
  Target: SCNA; (+) strand; PAM type: YTN; PAM sequence: TTT
aggaactgggtcaggaaaat

SEQ ID NO: 69643 - DNA, 20 bp, Artificial Sequence
  Description of Artificial Sequence: Synthetic oligonucleotide
  Target: SCNA; (+) strand; PAM type: YTN; PAM sequence: TTA
ggaactgggtcaggaaaatc

SEQ ID NO: 69644 - DNA, 20 bp, Artificial Sequence
  Description of Artificial Sequence: Synthetic oligonucleotide
  Target: SCNA; (+) strand; PAM type: YTN; PAM sequence: CTG
ggtcaggaaaatctataatt

SEQ ID NO: 69645 - DNA, 20 bp, Artificial Sequence
  Description of Artificial Sequence: Synthetic oligonucleotide
  Target: SCNA; (+) strand; PAM type: YTN; PAM sequence: CTA
taattacattcctactgtat

SEQ ID NO: 69646 - DNA, 20 bp, Artificial Sequence
  Description of Artificial Sequence: Synthetic oligonucleotide
  Target: SCNA; (+) strand; PAM type: YTN; PAM sequence: TTA
cattcctactgtatttacat

SEQ ID NO: 69647 - DNA, 20 bp, Artificial Sequence
  Description of Artificial Sequence: Synthetic oligonucleotide
  Target: SCNA; (+) strand; PAM type: YTN; PAM sequence: TTC
ctactgtatttacataccat

SEQ ID NO: 69648 - DNA, 20 bp, Artificial Sequence
  Description of Artificial Sequence: Synthetic oligonucleotide
  Target: SCNA; (+) strand; PAM type: YTN; PAM sequence: CTA
ctgtatttacataccattca

SEQ ID NO: 69649 - DNA, 20 bp, Artificial Sequence
  Description of Artificial Sequence: Synthetic oligonucleotide
  Target: SCNA; (+) strand; PAM type: YTN; PAM sequence: CTG
tatttacataccattcattc

SEQ ID NO: 69650 - DNA, 20 bp, Artificial Sequence
  Description of Artificial Sequence: Synthetic oligonucleotide
  Target: SCNA; (+) strand; PAM type: YTN; PAM sequence: TTT
acataccattcattcctaag

SEQ ID NO: 69651 - DNA, 20 bp, Artificial Sequence
  Description of Artificial Sequence: Synthetic oligonucleotide
  Target: SCNA; (+) strand; PAM type: YTN; PAM sequence: TTA
cataccattcattcctaaga

SEQ ID NO: 69652 - DNA, 20 bp, Artificial Sequence
  Description of Artificial Sequence: Synthetic oligonucleotide
  Target: SCNA; (+) strand; PAM type: YTN; PAM sequence: TTC
attcctaagagagctcttcc

SEQ ID NO: 69653 - DNA, 20 bp, Artificial Sequence
  Description of Artificial Sequence: Synthetic oligonucleotide
  Target: SCNA; (+) strand; PAM type: YTN; PAM sequence: TTC
ctaagagagctcttccaaaa

SEQ ID NO: 69654 - DNA, 20 bp, Artificial Sequence
  Description of Artificial Sequence: Synthetic oligonucleotide
  Target: SCNA; (+) strand; PAM type: YTN; PAM sequence: CTA
agagagctcttccaaaaaaa

SEQ ID NO: 69655 - DNA, 20 bp, Artificial Sequence
  Description of Artificial Sequence: Synthetic oligonucleotide
  Target: SCNA; (+) strand; PAM type: YTN; PAM sequence: CTC
ttccaaaaaaaaaaaaaaag

SEQ ID NO: 69656 - DNA, 20 bp, Artificial Sequence
  Description of Artificial Sequence: Synthetic oligonucleotide
  Target: SCNA; (+) strand; PAM type: YTN; PAM sequence: CTT
ccaaaaaaaaaaaaaaagag

SEQ ID NO: 69657 - DNA, 20 bp, Artificial Sequence
  Description of Artificial Sequence: Synthetic oligonucleotide
  Target: SCNA; (+) strand; PAM type: YTN; PAM sequence: TTC
caaaaaaaaaaaaaaagaga

SEQ ID NO: 69658 - DNA, 20 bp, Artificial Sequence
  Description of Artificial Sequence: Synthetic oligonucleotide
  Target: SCNA; (+) strand; PAM type: YTN; PAM sequence: CTC
catttctttctcaagcccaa

SEQ ID NO: 69659 - DNA, 20 bp, Artificial Sequence
  Description of Artificial Sequence: Synthetic oligonucleotide
  Target: SCNA; (+) strand; PAM type: YTN; PAM sequence: TTT
ctttctcaagcccaaagtac

SEQ ID NO: 69660 - DNA, 20 bp, Artificial Sequence
  Description of Artificial Sequence: Synthetic oligonucleotide
  Target: SCNA; (+) strand; PAM type: YTN; PAM sequence: TTC
tttctcaagcccaaagtaca

SEQ ID NO: 69661 - DNA, 20 bp, Artificial Sequence
  Description of Artificial Sequence: Synthetic oligonucleotide
  Target: SCNA; (+) strand; PAM type: YTN; PAM sequence: CTT
tctcaagcccaaagtacata

SEQ ID NO: 69662 - DNA, 20 bp, Artificial Sequence
  Description of Artificial Sequence: Synthetic oligonucleotide
  Target: SCNA; (+) strand; PAM type: YTN; PAM sequence: TTT
ctcaagcccaaagtacataa

SEQ ID NO: 69663 - DNA, 20 bp, Artificial Sequence
  Description of Artificial Sequence: Synthetic oligonucleotide
  Target: SCNA; (+) strand; PAM type: YTN; PAM sequence: TTC
tcaagcccaaagtacataaa

SEQ ID NO: 69664 - DNA, 20 bp, Artificial Sequence
  Description of Artificial Sequence: Synthetic oligonucleotide
  Target: SCNA; (+) strand; PAM type: YTN; PAM sequence: CTC
aagcccaaagtacataaatc

SEQ ID NO: 69665 - DNA, 20 bp, Artificial Sequence
  Description of Artificial Sequence: Synthetic oligonucleotide
  Target: SCNA; (+) strand; PAM type: YTN; PAM sequence: CTT
gaaattttccagctaaaaaa

SEQ ID NO: 69666 - DNA, 20 bp, Artificial Sequence
  Description of Artificial Sequence: Synthetic oligonucleotide
  Target: SCNA; (+) strand; PAM type: YTN; PAM sequence: TTG
aaattttccagctaaaaaat

SEQ ID NO: 69667 - DNA, 20 bp, Artificial Sequence
  Description of Artificial Sequence: Synthetic oligonucleotide
  Target: SCNA; (+) strand; PAM type: YTN; PAM sequence: TTT
tccagctaaaaaataggcat

SEQ ID NO: 69668 - DNA, 20 bp, Artificial Sequence
  Description of Artificial Sequence: Synthetic oligonucleotide
  Target: SCNA; (+) strand; PAM type: YTN; PAM sequence: TTT
ccagctaaaaaataggcata

SEQ ID NO: 69669 - DNA, 20 bp, Artificial Sequence
  Description of Artificial Sequence: Synthetic oligonucleotide
  Target: SCNA; (+) strand; PAM type: YTN; PAM sequence: TTC
cagctaaaaaataggcatat

SEQ ID NO: 69670 - DNA, 20 bp, Artificial Sequence
  Description of Artificial Sequence: Synthetic oligonucleotide
  Target: SCNA; (+) strand; PAM type: YTN; PAM sequence: CTA
aaaaataggcatatgttcta

SEQ ID NO: 69671 - DNA, 20 bp, Artificial Sequence
  Description of Artificial Sequence: Synthetic oligonucleotide
  Target: SCNA; (+) strand; PAM type: YTN; PAM sequence: TTC
tagcatcagctttaatttat

SEQ ID NO: 69672 - DNA, 20 bp, Artificial Sequence
  Description of Artificial Sequence: Synthetic oligonucleotide
  Target: SCNA; (+) strand; PAM type: YTN; PAM sequence: CTA
gcatcagctttaatttatcc

SEQ ID NO: 69673 - DNA, 20 bp, Artificial Sequence
  Description of Artificial Sequence: Synthetic oligonucleotide
  Target: SCNA; (+) strand; PAM type: YTN; PAM sequence: CTT
taatttatcccacattcatt

SEQ ID NO: 69674 - DNA, 20 bp, Artificial Sequence
  Description of Artificial Sequence: Synthetic oligonucleotide
  Target: SCNA; (+) strand; PAM type: YTN; PAM sequence: TTT
aatttatcccacattcattc

SEQ ID NO: 69675 - DNA, 20 bp, Artificial Sequence
  Description of Artificial Sequence: Synthetic oligonucleotide
  Target: SCNA; (+) strand; PAM type: YTN; PAM sequence: TTA
atttatcccacattcattct

SEQ ID NO: 69676 - DNA, 20 bp, Artificial Sequence
  Description of Artificial Sequence: Synthetic oligonucleotide
  Target: SCNA; (+) strand; PAM type: YTN; PAM sequence: TTT
atcccacattcattctctgc

SEQ ID NO: 69677 - DNA, 20 bp, Artificial Sequence
  Description of Artificial Sequence: Synthetic oligonucleotide
  Target: SCNA; (+) strand; PAM type: YTN; PAM sequence: TTA
tcccacattcattctctgct

SEQ ID NO: 69678 - DNA, 20 bp, Artificial Sequence
  Description of Artificial Sequence: Synthetic oligonucleotide
  Target: SCNA; (+) strand; PAM type: YTN; PAM sequence: TTC
attctctgctacaataaagt

SEQ ID NO: 69679 - DNA, 20 bp, Artificial Sequence
  Description of Artificial Sequence: Synthetic oligonucleotide
  Target: SCNA; (+) strand; PAM type: YTN; PAM sequence: TTC
tctgctacaataaagtgaca

SEQ ID NO: 69680 - DNA, 20 bp, Artificial Sequence
  Description of Artificial Sequence: Synthetic oligonucleotide
  Target: SCNA; (+) strand; PAM type: YTN; PAM sequence: CTC
tgctacaataaagtgacaaa

SEQ ID NO: 69681 - DNA, 20 bp, Artificial Sequence
  Description of Artificial Sequence: Synthetic oligonucleotide
  Target: SCNA; (+) strand; PAM type: YTN; PAM sequence: CTG
ctacaataaagtgacaaagc

SEQ ID NO: 69682 - DNA, 20 bp, Artificial Sequence
  Description of Artificial Sequence: Synthetic oligonucleotide
  Target: SCNA; (+) strand; PAM type: YTN; PAM sequence: CTA
caataaagtgacaaagccat

SEQ ID NO: 69683 - DNA, 20 bp, Artificial Sequence
  Description of Artificial Sequence: Synthetic oligonucleotide
  Target: SCNA; (+) strand; PAM type: YTN; PAM sequence: TTC
atattttatgttacatctaa

SEQ ID NO: 69684 - DNA, 20 bp, Artificial Sequence
  Description of Artificial Sequence: Synthetic oligonucleotide
  Target: SCNA; (+) strand; PAM type: YTN; PAM sequence: TTT
tatgttacatctaattatct

SEQ ID NO: 69685 - DNA, 20 bp, Artificial Sequence
  Description of Artificial Sequence: Synthetic oligonucleotide
  Target: SCNA; (+) strand; PAM type: YTN; PAM sequence: TTT
atgttacatctaattatctg

SEQ ID NO: 69686 - DNA, 20 bp, Artificial Sequence
  Description of Artificial Sequence: Synthetic oligonucleotide
  Target: SCNA; (+) strand; PAM type: YTN; PAM sequence: TTA
tgttacatctaattatctgt

SEQ ID NO: 69687 - DNA, 20 bp, Artificial Sequence
  Description of Artificial Sequence: Synthetic oligonucleotide
  Target: SCNA; (+) strand; PAM type: YTN; PAM sequence: TTA
catctaattatctgtttttc

SEQ ID NO: 69688 - DNA, 20 bp, Artificial Sequence
  Description of Artificial Sequence: Synthetic oligonucleotide
  Target: SCNA; (+) strand; PAM type: YTN; PAM sequence: CTA
attatctgtttttcagttag

SEQ ID NO: 69689 - DNA, 20 bp, Artificial Sequence
  Description of Artificial Sequence: Synthetic oligonucleotide
  Target: SCNA; (+) strand; PAM type: YTN; PAM sequence: TTA
tctgtttttcagttagataa

SEQ ID NO: 69690 - DNA, 20 bp, Artificial Sequence
  Description of Artificial Sequence: Synthetic oligonucleotide
  Target: SCNA; (+) strand; PAM type: YTN; PAM sequence: CTG
tttttcagttagataaatat

SEQ ID NO: 69691 - DNA, 20 bp, Artificial Sequence
  Description of Artificial Sequence: Synthetic oligonucleotide
  Target: SCNA; (+) strand; PAM type: YTN; PAM sequence: TTT
ttcagttagataaatatgct

SEQ ID NO: 69692 - DNA, 20 bp, Artificial Sequence
  Description of Artificial Sequence: Synthetic oligonucleotide
  Target: SCNA; (+) strand; PAM type: YTN; PAM sequence: TTT
tcagttagataaatatgctt

SEQ ID NO: 69693 - DNA, 20 bp, Artificial Sequence
  Description of Artificial Sequence: Synthetic oligonucleotide
  Target: SCNA; (+) strand; PAM type: YTN; PAM sequence: TTT
cagttagataaatatgcttt

SEQ ID NO: 69694 - DNA, 20 bp, Artificial Sequence
  Description of Artificial Sequence: Synthetic oligonucleotide
  Target: SCNA; (+) strand; PAM type: YTN; PAM sequence: TTC
agttagataaatatgcttta

SEQ ID NO: 69695 - DNA, 20 bp, Artificial Sequence
  Description of Artificial Sequence: Synthetic oligonucleotide
  Target: SCNA; (+) strand; PAM type: YTN; PAM sequence: TTA
gataaatatgctttatatcc

SEQ ID NO: 69696 - DNA, 20 bp, Artificial Sequence
  Description of Artificial Sequence: Synthetic oligonucleotide
  Target: SCNA; (+) strand; PAM type: YTN; PAM sequence: CTT
tatatcctaggtaccatcag

SEQ ID NO: 69697 - DNA, 20 bp, Artificial Sequence
  Description of Artificial Sequence: Synthetic oligonucleotide
  Target: SCNA; (+) strand; PAM type: YTN; PAM sequence: TTT
atatcctaggtaccatcaga

SEQ ID NO: 69698 - DNA, 20 bp, Artificial Sequence
  Description of Artificial Sequence: Synthetic oligonucleotide
  Target: SCNA; (+) strand; PAM type: YTN; PAM sequence: TTA
tatcctaggtaccatcagaa

SEQ ID NO: 69699 - DNA, 20 bp, Artificial Sequence
  Description of Artificial Sequence: Synthetic oligonucleotide
  Target: SCNA; (+) strand; PAM type: YTN; PAM sequence: CTA
ggtaccatcagaatttcaaa

SEQ ID NO: 69700 - DNA, 20 bp, Artificial Sequence
  Description of Artificial Sequence: Synthetic oligonucleotide
  Target: SCNA; (+) strand; PAM type: YTN; PAM sequence: TTT
caaagctcagaaaatcacta

SEQ ID NO: 69701 - DNA, 20 bp, Artificial Sequence
  Description of Artificial Sequence: Synthetic oligonucleotide
  Target: SCNA; (+) strand; PAM type: YTN; PAM sequence: TTC
aaagctcagaaaatcactaa

SEQ ID NO: 69702 - DNA, 20 bp, Artificial Sequence
  Description of Artificial Sequence: Synthetic oligonucleotide
  Target: SCNA; (+) strand; PAM type: YTN; PAM sequence: CTC
agaaaatcactaatgagaat

SEQ ID NO: 69703 - DNA, 20 bp, Artificial Sequence
  Description of Artificial Sequence: Synthetic oligonucleotide
  Target: SCNA; (+) strand; PAM type: YTN; PAM sequence: CTA
atgagaatggaaggaattaa

SEQ ID NO: 69704 - DNA, 20 bp, Artificial Sequence
  Description of Artificial Sequence: Synthetic oligonucleotide
  Target: SCNA; (+) strand; PAM type: YTN; PAM sequence: TTA
accatcatgcaagcagaagc

SEQ ID NO: 69705 - DNA, 20 bp, Artificial Sequence
  Description of Artificial Sequence: Synthetic oligonucleotide
  Target: SCNA; (+) strand; PAM type: YTN; PAM sequence: CTA
ccatgctacattgctcagag

SEQ ID NO: 69706 - DNA, 20 bp, Artificial Sequence
  Description of Artificial Sequence: Synthetic oligonucleotide
  Target: SCNA; (+) strand; PAM type: YTN; PAM sequence: CTA
cattgctcagagttcatgta

SEQ ID NO: 69707 - DNA, 20 bp, Artificial Sequence
  Description of Artificial Sequence: Synthetic oligonucleotide
  Target: SCNA; (+) strand; PAM type: YTN; PAM sequence: TTG
ctcagagttcatgtagcagt

SEQ ID NO: 69708 - DNA, 20 bp, Artificial Sequence
  Description of Artificial Sequence: Synthetic oligonucleotide
  Target: SCNA; (+) strand; PAM type: YTN; PAM sequence: CTC
agagttcatgtagcagttta

SEQ ID NO: 69709 - DNA, 20 bp, Artificial Sequence
  Description of Artificial Sequence: Synthetic oligonucleotide
  Target: SCNA; (+) strand; PAM type: YTN; PAM sequence: TTC
atgtagcagtttaatcaggg

SEQ ID NO: 69710 - DNA, 20 bp, Artificial Sequence
  Description of Artificial Sequence: Synthetic oligonucleotide
  Target: SCNA; (+) strand; PAM type: YTN; PAM sequence: TTT
aatcagggtagcagctgtgc

SEQ ID NO: 69711 - DNA, 20 bp, Artificial Sequence
  Description of Artificial Sequence: Synthetic oligonucleotide
  Target: SCNA; (+) strand; PAM type: YTN; PAM sequence: TTA
atcagggtagcagctgtgca

SEQ ID NO: 69712 - DNA, 20 bp, Artificial Sequence
  Description of Artificial Sequence: Synthetic oligonucleotide
  Target: SCNA; (+) strand; PAM type: YTN; PAM sequence: CTG
tgcaatgagctttgttggaa

SEQ ID NO: 69713 - DNA, 20 bp, Artificial Sequence
  Description of Artificial Sequence: Synthetic oligonucleotide
  Target: SCNA; (+) strand; PAM type: YTN; PAM sequence: CTT
tgttggaactggagtctcgc

SEQ ID NO: 69714 - DNA, 20 bp, Artificial Sequence
  Description of Artificial Sequence: Synthetic oligonucleotide
  Target: SCNA; (+) strand; PAM type: YTN; PAM sequence: TTT
gttggaactggagtctcgca

SEQ ID NO: 69715 - DNA, 20 bp, Artificial Sequence
  Description of Artificial Sequence: Synthetic oligonucleotide
  Target: SCNA; (+) strand; PAM type: YTN; PAM sequence: TTG
ttggaactggagtctcgcat

SEQ ID NO: 69716 - DNA, 20 bp, Artificial Sequence
  Description of Artificial Sequence: Synthetic oligonucleotide
  Target: SCNA; (+) strand; PAM type: YTN; PAM sequence: TTG
gaactggagtctcgcatcct

SEQ ID NO: 69717 - DNA, 20 bp, Artificial Sequence
  Description of Artificial Sequence: Synthetic oligonucleotide
  Target: SCNA; (+) strand; PAM type: YTN; PAM sequence: CTG
gagtctcgcatcctaaatgt

SEQ ID NO: 69718 - DNA, 20 bp, Artificial Sequence
  Description of Artificial Sequence: Synthetic oligonucleotide
  Target: SCNA; (+) strand; PAM type: YTN; PAM sequence: CTC
gcatcctaaatgtgaaatat

SEQ ID NO: 69719 - DNA, 20 bp, Artificial Sequence
  Description of Artificial Sequence: Synthetic oligonucleotide
  Target: SCNA; (+) strand; PAM type: YTN; PAM sequence: CTA
aatgtgaaatatctactgtt

SEQ ID NO: 69720 - DNA, 20 bp, Artificial Sequence
  Description of Artificial Sequence: Synthetic oligonucleotide
  Target: SCNA; (+) strand; PAM type: YTN; PAM sequence: CTA
ctgtttgaaagggtgataac

SEQ ID NO: 69721 - DNA, 20 bp, Artificial Sequence
  Description of Artificial Sequence: Synthetic oligonucleotide
  Target: SCNA; (+) strand; PAM type: YTN; PAM sequence: CTG
tttgaaagggtgataacttt

SEQ ID NO: 69722 - DNA, 20 bp, Artificial Sequence
  Description of Artificial Sequence: Synthetic oligonucleotide
  Target: SCNA; (+) strand; PAM type: YTN; PAM sequence: TTT
gaaagggtgataactttatg

SEQ ID NO: 69723 - DNA, 20 bp, Artificial Sequence
  Description of Artificial Sequence: Synthetic oligonucleotide
  Target: SCNA; (+) strand; PAM type: YTN; PAM sequence: TTG
aaagggtgataactttatgc

SEQ ID NO: 69724 - DNA, 20 bp, Artificial Sequence
  Description of Artificial Sequence: Synthetic oligonucleotide
  Target: SCNA; (+) strand; PAM type: YTN; PAM sequence: CTT
tatgccttgcaaagaaaaca

SEQ ID NO: 69725 - DNA, 20 bp, Artificial Sequence
  Description of Artificial Sequence: Synthetic oligonucleotide
  Target: SCNA; (+) strand; PAM type: YTN; PAM sequence: TTT
atgccttgcaaagaaaacag

SEQ ID NO: 69726 - DNA, 20 bp, Artificial Sequence
  Description of Artificial Sequence: Synthetic oligonucleotide
  Target: SCNA; (+) strand; PAM type: YTN; PAM sequence: TTA
tgccttgcaaagaaaacagt

SEQ ID NO: 69727 - DNA, 20 bp, Artificial Sequence
  Description of Artificial Sequence: Synthetic oligonucleotide
  Target: SCNA; (+) strand; PAM type: YTN; PAM sequence: CTT
gcaaagaaaacagtcctcaa

SEQ ID NO: 69728 - DNA, 20 bp, Artificial Sequence
  Description of Artificial Sequence: Synthetic oligonucleotide
  Target: SCNA; (+) strand; PAM type: YTN; PAM sequence: TTG
caaagaaaacagtcctcaag

SEQ ID NO: 69729 - DNA, 20 bp, Artificial Sequence
  Description of Artificial Sequence: Synthetic oligonucleotide
  Target: SCNA; (+) strand; PAM type: YTN; PAM sequence: CTC
aagtgttattttttaatgaa

SEQ ID NO: 69730 - DNA, 20 bp, Artificial Sequence
  Description of Artificial Sequence: Synthetic oligonucleotide
  Target: SCNA; (+) strand; PAM type: YTN; PAM sequence: TTA
ttttttaatgaattaaccct

SEQ ID NO: 69731 - DNA, 20 bp, Artificial Sequence
  Description of Artificial Sequence: Synthetic oligonucleotide
  Target: SCNA; (+) strand; PAM type: YTN; PAM sequence: TTT
tttaatgaattaacccttta

SEQ ID NO: 69732 - DNA, 20 bp, Artificial Sequence
  Description of Artificial Sequence: Synthetic oligonucleotide
  Target: SCNA; (+) strand; PAM type: YTN; PAM sequence: TTT
ttaatgaattaaccctttat

SEQ ID NO: 69733 - DNA, 20 bp, Artificial Sequence
  Description of Artificial Sequence: Synthetic oligonucleotide
  Target: SCNA; (+) strand; PAM type: YTN; PAM sequence: TTT
taatgaattaaccctttatc

SEQ ID NO: 69734 - DNA, 20 bp, Artificial Sequence
  Description of Artificial Sequence: Synthetic oligonucleotide
  Target: SCNA; (+) strand; PAM type: YTN; PAM sequence: TTT
aatgaattaaccctttatct

SEQ ID NO: 69735 - DNA, 20 bp, Artificial Sequence
  Description of Artificial Sequence: Synthetic oligonucleotide
  Target: SCNA; (+) strand; PAM type: YTN; PAM sequence: TTA
atgaattaaccctttatctt

SEQ ID NO: 69736 - DNA, 20 bp, Artificial Sequence
  Description of Artificial Sequence: Synthetic oligonucleotide
  Target: SCNA; (+) strand; PAM type: YTN; PAM sequence: TTA
accctttatctttcctcaca

SEQ ID NO: 69737 - DNA, 20 bp, Artificial Sequence
  Description of Artificial Sequence: Synthetic oligonucleotide
  Target: SCNA; (+) strand; PAM type: YTN; PAM sequence: CTT
tatctttcctcacacctttt

SEQ ID NO: 69738 - DNA, 20 bp, Artificial Sequence
  Description of Artificial Sequence: Synthetic oligonucleotide
  Target: SCNA; (+) strand; PAM type: YTN; PAM sequence: TTT
atctttcctcacaccttttc

SEQ ID NO: 69739 - DNA, 20 bp, Artificial Sequence
  Description of Artificial Sequence: Synthetic oligonucleotide
  Target: SCNA; (+) strand; PAM type: YTN; PAM sequence: TTA
tctttcctcacaccttttct

SEQ ID NO: 69740 - DNA, 20 bp, Artificial Sequence
  Description of Artificial Sequence: Synthetic oligonucleotide
  Target: SCNA; (+) strand; PAM type: YTN; PAM sequence: CTT
tcctcacaccttttctcttc

SEQ ID NO: 69741 - DNA, 20 bp, Artificial Sequence
  Description of Artificial Sequence: Synthetic oligonucleotide
  Target: SCNA; (+) strand; PAM type: YTN; PAM sequence: TTT
cctcacaccttttctcttct

SEQ ID NO: 69742 - DNA, 20 bp, Artificial Sequence
  Description of Artificial Sequence: Synthetic oligonucleotide
  Target: SCNA; (+) strand; PAM type: YTN; PAM sequence: TTC
ctcacaccttttctcttctt

SEQ ID NO: 69743 - DNA, 20 bp, Artificial Sequence
  Description of Artificial Sequence: Synthetic oligonucleotide
  Target: SCNA; (+) strand; PAM type: YTN; PAM sequence: CTC
acaccttttctcttcttttt

SEQ ID NO: 69744 - DNA, 20 bp, Artificial Sequence
  Description of Artificial Sequence: Synthetic oligonucleotide
  Target: SCNA; (+) strand; PAM type: YTN; PAM sequence: CTT
ttctcttctttttttttttt

SEQ ID NO: 69745 - DNA, 20 bp, Artificial Sequence
  Description of Artificial Sequence: Synthetic oligonucleotide
  Target: SCNA; (+) strand; PAM type: YTN; PAM sequence: TTT
tctcttcttttttttttttt

SEQ ID NO: 69746 - DNA, 20 bp, Artificial Sequence
  Description of Artificial Sequence: Synthetic oligonucleotide
  Target: SCNA; (+) strand; PAM type: YTN; PAM sequence: TTT
ctcttctttttttttttttt

SEQ ID NO: 69747 - DNA, 20 bp, Artificial Sequence
  Description of Artificial Sequence: Synthetic oligonucleotide
  Target: SCNA; (+) strand; PAM type: YTN; PAM sequence: TTC
tcttcttttttttttttttt

SEQ ID NO: 69748 - DNA, 20 bp, Artificial Sequence
  Description of Artificial Sequence: Synthetic oligonucleotide
  Target: SCNA; (+) strand; PAM type: YTN; PAM sequence: CTC
ttcttttttttttttttttt

SEQ ID NO: 69749 - DNA, 20 bp, Artificial Sequence
  Description of Artificial Sequence: Synthetic oligonucleotide
  Target: SCNA; (+) strand; PAM type: YTN; PAM sequence: CTT
ctttttttttttttttttgc

SEQ ID NO: 69750 - DNA, 20 bp, Artificial Sequence
  Description of Artificial Sequence: Synthetic oligonucleotide
  Target: SCNA; (+) strand; PAM type: YTN; PAM sequence: TTC
tttttttttttttttttgcc

SEQ ID NO: 69751 - DNA, 20 bp, Artificial Sequence
  Description of Artificial Sequence: Synthetic oligonucleotide
  Target: SCNA; (+) strand; PAM type: YTN; PAM sequence: CTT
tttttttttttttttgccct

SEQ ID NO: 69752 - DNA, 20 bp, Artificial Sequence
  Description of Artificial Sequence: Synthetic oligonucleotide
  Target: SCNA; (+) strand; PAM type: YTN; PAM sequence: TTT
ttttttttttttttgccctc

SEQ ID NO: 69753 - DNA, 20 bp, Artificial Sequence
  Description of Artificial Sequence: Synthetic oligonucleotide
  Target: SCNA; (+) strand; PAM type: YTN; PAM sequence: TTT
tttttttttttttgccctca

SEQ ID NO: 69754 - DNA, 20 bp, Artificial Sequence
  Description of Artificial Sequence: Synthetic oligonucleotide
  Target: SCNA; (+) strand; PAM type: YTN; PAM sequence: TTT
ttttttttttttgccctcag

SEQ ID NO: 69755 - DNA, 20 bp, Artificial Sequence
  Description of Artificial Sequence: Synthetic oligonucleotide
  Target: SCNA; (+) strand; PAM type: YTN; PAM sequence: TTT
tttttttttttgccctcaga

SEQ ID NO: 69756 - DNA, 20 bp, Artificial Sequence
  Description of Artificial Sequence: Synthetic oligonucleotide
  Target: SCNA; (+) strand; PAM type: YTN; PAM sequence: TTT
ttttttttttgccctcagaa

SEQ ID NO: 69757 - DNA, 20 bp, Artificial Sequence
  Description of Artificial Sequence: Synthetic oligonucleotide
  Target: SCNA; (+) strand; PAM type: YTN; PAM sequence: TTT
tttttttttgccctcagaag

SEQ ID NO: 69758 - DNA, 20 bp, Artificial Sequence
  Description of Artificial Sequence: Synthetic oligonucleotide
  Target: SCNA; (+) strand; PAM type: YTN; PAM sequence: TTT
ttttttttgccctcagaagt

SEQ ID NO: 69759 - DNA, 20 bp, Artificial Sequence
  Description of Artificial Sequence: Synthetic oligonucleotide
  Target: SCNA; (+) strand; PAM type: YTN; PAM sequence: TTT
tttttttgccctcagaagta

SEQ ID NO: 69760 - DNA, 20 bp, Artificial Sequence
  Description of Artificial Sequence: Synthetic oligonucleotide
  Target: SCNA; (+) strand; PAM type: YTN; PAM sequence: TTT
ttttttgccctcagaagtat

SEQ ID NO: 69761 - DNA, 20 bp, Artificial Sequence
  Description of Artificial Sequence: Synthetic oligonucleotide
  Target: SCNA; (+) strand; PAM type: YTN; PAM sequence: TTT
tttttgccctcagaagtatt

SEQ ID NO: 69762 - DNA, 20 bp, Artificial Sequence
  Description of Artificial Sequence: Synthetic oligonucleotide
  Target: SCNA; (+) strand; PAM type: YTN; PAM sequence: TTT
ttttgccctcagaagtattt

SEQ ID NO: 69763 - DNA, 20 bp, Artificial Sequence
  Description of Artificial Sequence: Synthetic oligonucleotide
  Target: SCNA; (+) strand; PAM type: YTN; PAM sequence: TTT
tttgccctcagaagtattta

SEQ ID NO: 69764 - DNA, 20 bp, Artificial Sequence
  Description of Artificial Sequence: Synthetic oligonucleotide
  Target: SCNA; (+) strand; PAM type: YTN; PAM sequence: TTT
ttgccctcagaagtatttaa

SEQ ID NO: 69765 - DNA, 20 bp, Artificial Sequence
  Description of Artificial Sequence: Synthetic oligonucleotide
  Target: SCNA; (+) strand; PAM type: YTN; PAM sequence: TTT
tgccctcagaagtatttaaa

SEQ ID NO: 69766 - DNA, 20 bp, Artificial Sequence
  Description of Artificial Sequence: Synthetic oligonucleotide
  Target: SCNA; (+) strand; PAM type: YTN; PAM sequence: TTT
gccctcagaagtatttaaag

SEQ ID NO: 69767 - DNA, 20 bp, Artificial Sequence
  Description of Artificial Sequence: Synthetic oligonucleotide
  Target: SCNA; (+) strand; PAM type: YTN; PAM sequence: TTG
ccctcagaagtatttaaagg

SEQ ID NO: 69768 - DNA, 20 bp, Artificial Sequence
  Description of Artificial Sequence: Synthetic oligonucleotide
  Target: SCNA; (+) strand; PAM type: YTN; PAM sequence: CTC
agaagtatttaaaggataat

SEQ ID NO: 69769 - DNA, 20 bp, Artificial Sequence
  Description of Artificial Sequence: Synthetic oligonucleotide
  Target: SCNA; (+) strand; PAM type: YTN; PAM sequence: TTT
aaaggataatcccatatgat

SEQ ID NO: 69770 - DNA, 20 bp, Artificial Sequence
  Description of Artificial Sequence: Synthetic oligonucleotide
  Target: SCNA; (+) strand; PAM type: YTN; PAM sequence: TTA
aaggataatcccatatgata

SEQ ID NO: 69771 - DNA, 20 bp, Artificial Sequence
  Description of Artificial Sequence: Synthetic oligonucleotide
  Target: SCNA; (+) strand; PAM type: YTN; PAM sequence: CTC
acactgcctagcttcagtac

SEQ ID NO: 69772 - DNA, 20 bp, Artificial Sequence
  Description of Artificial Sequence: Synthetic oligonucleotide
  Target: SCNA; (+) strand; PAM type: YTN; PAM sequence: CTG
cctagcttcagtacaatgtc

SEQ ID NO: 69773 - DNA, 20 bp, Artificial Sequence
  Description of Artificial Sequence: Synthetic oligonucleotide
  Target: SCNA; (+) strand; PAM type: YTN; PAM sequence: CTA
gcttcagtacaatgtctcat

SEQ ID NO: 69774 - DNA, 20 bp, Artificial Sequence
  Description of Artificial Sequence: Synthetic oligonucleotide
  Target: SCNA; (+) strand; PAM type: YTN; PAM sequence: CTT
cagtacaatgtctcatacat

SEQ ID NO: 69775 - DNA, 20 bp, Artificial Sequence
  Description of Artificial Sequence: Synthetic oligonucleotide
  Target: SCNA; (+) strand; PAM type: YTN; PAM sequence: TTC
agtacaatgtctcatacatt

SEQ ID NO: 69776 - DNA, 20 bp, Artificial Sequence
  Description of Artificial Sequence: Synthetic oligonucleotide
  Target: SCNA; (+) strand; PAM type: YTN; PAM sequence: CTC
atacattgcaggcactcaca

SEQ ID NO: 69777 - DNA, 20 bp, Artificial Sequence
  Description of Artificial Sequence: Synthetic oligonucleotide
  Target: SCNA; (+) strand; PAM type: YTN; PAM sequence: TTG
caggcactcacaaacatttg

SEQ ID NO: 69778 - DNA, 20 bp, Artificial Sequence
  Description of Artificial Sequence: Synthetic oligonucleotide
  Target: SCNA; (+) strand; PAM type: YTN; PAM sequence: CTC
acaaacatttgtttaatgaa

SEQ ID NO: 69779 - DNA, 20 bp, Artificial Sequence
  Description of Artificial Sequence: Synthetic oligonucleotide
  Target: SCNA; (+) strand; PAM type: YTN; PAM sequence: TTT
gtttaatgaatgaataagtg

SEQ ID NO: 69780 - DNA, 20 bp, Artificial Sequence
  Description of Artificial Sequence: Synthetic oligonucleotide
  Target: SCNA; (+) strand; PAM type: YTN; PAM sequence: TTG
tttaatgaatgaataagtga

SEQ ID NO: 69781 - DNA, 20 bp, Artificial Sequence
  Description of Artificial Sequence: Synthetic oligonucleotide
  Target: SCNA; (+) strand; PAM type: YTN; PAM sequence: TTT
aatgaatgaataagtgaaag

SEQ ID NO: 69782 - DNA, 20 bp, Artificial Sequence
  Description of Artificial Sequence: Synthetic oligonucleotide
  Target: SCNA; (+) strand; PAM type: YTN; PAM sequence: TTA
atgaatgaataagtgaaagt

SEQ ID NO: 69783 - DNA, 20 bp, Artificial Sequence
  Description of Artificial Sequence: Synthetic oligonucleotide
  Target: SCNA; (+) strand; PAM type: YTN; PAM sequence: TTA
cactgttgaatttacaatgg

SEQ ID NO: 69784 - DNA, 20 bp, Artificial Sequence
  Description of Artificial Sequence: Synthetic oligonucleotide
  Target: SCNA; (+) strand; PAM type: YTN; PAM sequence: CTG
ttgaatttacaatggtttta

SEQ ID NO: 69785 - DNA, 20 bp, Artificial Sequence
  Description of Artificial Sequence: Synthetic oligonucleotide
  Target: SCNA; (+) strand; PAM type: YTN; PAM sequence: TTG
aatttacaatggttttagag

SEQ ID NO: 69786 - DNA, 20 bp, Artificial Sequence
  Description of Artificial Sequence: Synthetic oligonucleotide
  Target: SCNA; (+) strand; PAM type: YTN; PAM sequence: TTT
acaatggttttagaggtaca

SEQ ID NO: 69787 - DNA, 20 bp, Artificial Sequence
  Description of Artificial Sequence: Synthetic oligonucleotide
  Target: SCNA; (+) strand; PAM type: YTN; PAM sequence: TTA
caatggttttagaggtacat

SEQ ID NO: 69788 - DNA, 20 bp, Artificial Sequence
  Description of Artificial Sequence: Synthetic oligonucleotide
  Target: SCNA; (+) strand; PAM type: YTN; PAM sequence: TTT
tagaggtacatctctaaatt

SEQ ID NO: 69789 - DNA, 20 bp, Artificial Sequence
  Description of Artificial Sequence: Synthetic oligonucleotide
  Target: SCNA; (+) strand; PAM type: YTN; PAM sequence: TTT
agaggtacatctctaaattt

SEQ ID NO: 69790 - DNA, 20 bp, Artificial Sequence
  Description of Artificial Sequence: Synthetic oligonucleotide
  Target: SCNA; (+) strand; PAM type: YTN; PAM sequence: TTA
gaggtacatctctaaatttg

SEQ ID NO: 69791 - DNA, 20 bp, Artificial Sequence
  Description of Artificial Sequence: Synthetic oligonucleotide
  Target: SCNA; (+) strand; PAM type: YTN; PAM sequence: CTC
taaatttgttgatttattta

SEQ ID NO: 69792 - DNA, 20 bp, Artificial Sequence
  Description of Artificial Sequence: Synthetic oligonucleotide
  Target: SCNA; (+) strand; PAM type: YTN; PAM sequence: CTA
aatttgttgatttatttagg

SEQ ID NO: 69793 - DNA, 20 bp, Artificial Sequence
  Description of Artificial Sequence: Synthetic oligonucleotide
  Target: SCNA; (+) strand; PAM type: YTN; PAM sequence: TTT
gttgatttatttaggattgt

SEQ ID NO: 69794 - DNA, 20 bp, Artificial Sequence
  Description of Artificial Sequence: Synthetic oligonucleotide
  Target: SCNA; (+) strand; PAM type: YTN; PAM sequence: TTG
ttgatttatttaggattgta

SEQ ID NO: 69795 - DNA, 20 bp, Artificial Sequence
  Description of Artificial Sequence: Synthetic oligonucleotide
  Target: SCNA; (+) strand; PAM type: YTN; PAM sequence: TTG
atttatttaggattgtacat

SEQ ID NO: 69796 - DNA, 20 bp, Artificial Sequence
  Description of Artificial Sequence: Synthetic oligonucleotide
  Target: SCNA; (+) strand; PAM type: YTN; PAM sequence: TTT
atttaggattgtacattgtc

SEQ ID NO: 69797 - DNA, 20 bp, Artificial Sequence
  Description of Artificial Sequence: Synthetic oligonucleotide
  Target: SCNA; (+) strand; PAM type: YTN; PAM sequence: TTA
tttaggattgtacattgtca

SEQ ID NO: 69798 - DNA, 20 bp, Artificial Sequence
  Description of Artificial Sequence: Synthetic oligonucleotide
  Target: SCNA; (+) strand; PAM type: YTN; PAM sequence: TTT
aggattgtacattgtcacat

SEQ ID NO: 69799 - DNA, 20 bp, Artificial Sequence
  Description of Artificial Sequence: Synthetic oligonucleotide
  Target: SCNA; (+) strand; PAM type: YTN; PAM sequence: TTA
ggattgtacattgtcacatt

SEQ ID NO: 69800 - DNA, 20 bp, Artificial Sequence
  Description of Artificial Sequence: Synthetic oligonucleotide
  Target: SCNA; (+) strand; PAM type: YTN; PAM sequence: TTG
tacattgtcacattttcact

SEQ ID NO: 69801 - DNA, 20 bp, Artificial Sequence
  Description of Artificial Sequence: Synthetic oligonucleotide
  Target: SCNA; (+) strand; PAM type: YTN; PAM sequence: TTG
tcacattttcactgctaaat

SEQ ID NO: 69802 - DNA, 20 bp, Artificial Sequence
  Description of Artificial Sequence: Synthetic oligonucleotide
  Target: SCNA; (+) strand; PAM type: YTN; PAM sequence: TTT
tcactgctaaatttcatatt

SEQ ID NO: 69803 - DNA, 20 bp, Artificial Sequence
  Description of Artificial Sequence: Synthetic oligonucleotide
  Target: SCNA; (+) strand; PAM type: YTN; PAM sequence: TTT
cactgctaaatttcatatta

SEQ ID NO: 69804 - DNA, 20 bp, Artificial Sequence
  Description of Artificial Sequence: Synthetic oligonucleotide
  Target: SCNA; (+) strand; PAM type: YTN; PAM sequence: TTC
actgctaaatttcatattat

SEQ ID NO: 69805 - DNA, 20 bp, Artificial Sequence
  Description of Artificial Sequence: Synthetic oligonucleotide
  Target: SCNA; (+) strand; PAM type: YTN; PAM sequence: CTG
ctaaatttcatattattcat

SEQ ID NO: 69806 - DNA, 20 bp, Artificial Sequence
  Description of Artificial Sequence: Synthetic oligonucleotide
  Target: SCNA; (+) strand; PAM type: YTN; PAM sequence: CTA
aatttcatattattcattaa

SEQ ID NO: 69807 - DNA, 20 bp, Artificial Sequence
  Description of Artificial Sequence: Synthetic oligonucleotide
  Target: SCNA; (+) strand; PAM type: YTN; PAM sequence: TTT
catattattcattaaagaaa

SEQ ID NO: 69808 - DNA, 20 bp, Artificial Sequence
  Description of Artificial Sequence: Synthetic oligonucleotide
  Target: SCNA; (+) strand; PAM type: YTN; PAM sequence: TTC
atattattcattaaagaaag

SEQ ID NO: 69809 - DNA, 20 bp, Artificial Sequence
  Description of Artificial Sequence: Synthetic oligonucleotide
  Target: SCNA; (+) strand; PAM type: YTN; PAM sequence: TTA
ttcattaaagaaaggcagtg

SEQ ID NO: 69810 - DNA, 20 bp, Artificial Sequence
  Description of Artificial Sequence: Synthetic oligonucleotide
  Target: SCNA; (+) strand; PAM type: YTN; PAM sequence: TTC
attaaagaaaggcagtgttg

SEQ ID NO: 69811 - DNA, 20 bp, Artificial Sequence
  Description of Artificial Sequence: Synthetic oligonucleotide
  Target: SCNA; (+) strand; PAM type: YTN; PAM sequence: TTA
aagaaaggcagtgttggaga

SEQ ID NO: 69812 - DNA, 20 bp, Artificial Sequence
  Description of Artificial Sequence: Synthetic oligonucleotide
  Target: SCNA; (+) strand; PAM type: YTN; PAM sequence: TTG
gagagttttatagttgacag

SEQ ID NO: 69813 - DNA, 20 bp, Artificial Sequence
  Description of Artificial Sequence: Synthetic oligonucleotide
  Target: SCNA; (+) strand; PAM type: YTN; PAM sequence: TTT
tatagttgacagatgaatta

SEQ ID NO: 69814 - DNA, 20 bp, Artificial Sequence
  Description of Artificial Sequence: Synthetic oligonucleotide
  Target: SCNA; (+) strand; PAM type: YTN; PAM sequence: TTT
atagttgacagatgaattat

SEQ ID NO: 69815 - DNA, 20 bp, Artificial Sequence
  Description of Artificial Sequence: Synthetic oligonucleotide
  Target: SCNA; (+) strand; PAM type: YTN; PAM sequence: TTA
tagttgacagatgaattatc

SEQ ID NO: 69816 - DNA, 20 bp, Artificial Sequence
  Description of Artificial Sequence: Synthetic oligonucleotide
  Target: SCNA; (+) strand; PAM type: YTN; PAM sequence: TTG
acagatgaattatctataac

SEQ ID NO: 69817 - DNA, 20 bp, Artificial Sequence
  Description of Artificial Sequence: Synthetic oligonucleotide
  Target: SCNA; (+) strand; PAM type: YTN; PAM sequence: TTA
tctataacttctaatatact

SEQ ID NO: 69818 - DNA, 20 bp, Artificial Sequence
  Description of Artificial Sequence: Synthetic oligonucleotide
  Target: SCNA; (+) strand; PAM type: YTN; PAM sequence: CTA
taacttctaatatactcaga

SEQ ID NO: 69819 - DNA, 20 bp, Artificial Sequence
  Description of Artificial Sequence: Synthetic oligonucleotide
  Target: SCNA; (+) strand; PAM type: YTN; PAM sequence: CTT
ctaatatactcagacatcat

SEQ ID NO: 69820 - DNA, 20 bp, Artificial Sequence
  Description of Artificial Sequence: Synthetic oligonucleotide
  Target: SCNA; (+) strand; PAM type: YTN; PAM sequence: TTC
taatatactcagacatcatg

SEQ ID NO: 69821 - DNA, 20 bp, Artificial Sequence
  Description of Artificial Sequence: Synthetic oligonucleotide
  Target: SCNA; (+) strand; PAM type: YTN; PAM sequence: CTA
atatactcagacatcatgtt

SEQ ID NO: 69822 - DNA, 20 bp, Artificial Sequence
  Description of Artificial Sequence: Synthetic oligonucleotide
  Target: SCNA; (+) strand; PAM type: YTN; PAM sequence: CTC
agacatcatgtttttctagc

SEQ ID NO: 69823 - DNA, 20 bp, Artificial Sequence
  Description of Artificial Sequence: Synthetic oligonucleotide
  Target: SCNA; (+) strand; PAM type: YTN; PAM sequence: TTT
ttctagcatgtaacttttaa

SEQ ID NO: 69824 - DNA, 20 bp, Artificial Sequence
  Description of Artificial Sequence: Synthetic oligonucleotide
  Target: SCNA; (+) strand; PAM type: YTN; PAM sequence: TTT
tctagcatgtaacttttaaa

SEQ ID NO: 69825 - DNA, 20 bp, Artificial Sequence
  Description of Artificial Sequence: Synthetic oligonucleotide
  Target: SCNA; (+) strand; PAM type: YTN; PAM sequence: TTT
ctagcatgtaacttttaaaa

SEQ ID NO: 69826 - DNA, 20 bp, Artificial Sequence
  Description of Artificial Sequence: Synthetic oligonucleotide
  Target: SCNA; (+) strand; PAM type: YTN; PAM sequence: TTC
tagcatgtaacttttaaaat

SEQ ID NO: 69827 - DNA, 20 bp, Artificial Sequence
  Description of Artificial Sequence: Synthetic oligonucleotide
  Target: SCNA; (+) strand; PAM type: YTN; PAM sequence: CTA
gcatgtaacttttaaaatat

SEQ ID NO: 69828 - DNA, 20 bp, Artificial Sequence
  Description of Artificial Sequence: Synthetic oligonucleotide
  Target: SCNA; (+) strand; PAM type: YTN; PAM sequence: CTT
ttaaaatataaactctccaa

SEQ ID NO: 69829 - DNA, 20 bp, Artificial Sequence
  Description of Artificial Sequence: Synthetic oligonucleotide
  Target: SCNA; (+) strand; PAM type: YTN; PAM sequence: TTT
taaaatataaactctccaac

SEQ ID NO: 69830 - DNA, 20 bp, Artificial Sequence
  Description of Artificial Sequence: Synthetic oligonucleotide
  Target: SCNA; (+) strand; PAM type: YTN; PAM sequence: TTT
aaaatataaactctccaaca

SEQ ID NO: 69831 - DNA, 20 bp, Artificial Sequence
  Description of Artificial Sequence: Synthetic oligonucleotide
  Target: SCNA; (+) strand; PAM type: YTN; PAM sequence: TTA
aaatataaactctccaacat

SEQ ID NO: 69832 - DNA, 20 bp, Artificial Sequence
  Description of Artificial Sequence: Synthetic oligonucleotide
  Target: SCNA; (+) strand; PAM type: YTN; PAM sequence: CTC
tccaacatttaaagttttaa

SEQ ID NO: 69833 - DNA, 20 bp, Artificial Sequence
  Description of Artificial Sequence: Synthetic oligonucleotide
  Target: SCNA; (+) strand; PAM type: YTN; PAM sequence: CTC
caacatttaaagttttaaca

SEQ ID NO: 69834 - DNA, 20 bp, Artificial Sequence
  Description of Artificial Sequence: Synthetic oligonucleotide
  Target: SCNA; (+) strand; PAM type: YTN; PAM sequence: TTT
aaagttttaacactttttag

SEQ ID NO: 69835 - DNA, 20 bp, Artificial Sequence
  Description of Artificial Sequence: Synthetic oligonucleotide
  Target: SCNA; (+) strand; PAM type: YTN; PAM sequence: TTA
aagttttaacactttttagt

SEQ ID NO: 69836 - DNA, 20 bp, Artificial Sequence
  Description of Artificial Sequence: Synthetic oligonucleotide
  Target: SCNA; (+) strand; PAM type: YTN; PAM sequence: TTT
taacactttttagtaatttt

SEQ ID NO: 69837 - DNA, 20 bp, Artificial Sequence
  Description of Artificial Sequence: Synthetic oligonucleotide
  Target: SCNA; (+) strand; PAM type: YTN; PAM sequence: TTT
aacactttttagtaattttt

SEQ ID NO: 69838 - DNA, 20 bp, Artificial Sequence
  Description of Artificial Sequence: Synthetic oligonucleotide
  Target: SCNA; (+) strand; PAM type: YTN; PAM sequence: TTA
acactttttagtaatttttt

SEQ ID NO: 69839 - DNA, 20 bp, Artificial Sequence
  Description of Artificial Sequence: Synthetic oligonucleotide
  Target: SCNA; (+) strand; PAM type: YTN; PAM sequence: CTT
tttagtaattttttaagaaa

SEQ ID NO: 69840 - DNA, 20 bp, Artificial Sequence
  Description of Artificial Sequence: Synthetic oligonucleotide
  Target: SCNA; (+) strand; PAM type: YTN; PAM sequence: TTT
ttagtaattttttaagaaat

SEQ ID NO: 69841 - DNA, 20 bp, Artificial Sequence
  Description of Artificial Sequence: Synthetic oligonucleotide
  Target: SCNA; (+) strand; PAM type: YTN; PAM sequence: TTT
tagtaattttttaagaaatg

SEQ ID NO: 69842 - DNA, 20 bp, Artificial Sequence
  Description of Artificial Sequence: Synthetic oligonucleotide
  Target: SCNA; (+) strand; PAM type: YTN; PAM sequence: TTT
agtaattttttaagaaatga

SEQ ID NO: 69843 - DNA, 20 bp, Artificial Sequence
  Description of Artificial Sequence: Synthetic oligonucleotide
  Target: SCNA; (+) strand; PAM type: YTN; PAM sequence: TTA
gtaattttttaagaaatgac

SEQ ID NO: 69844 - DNA, 20 bp, Artificial Sequence
  Description of Artificial Sequence: Synthetic oligonucleotide
  Target: SCNA; (+) strand; PAM type: YTN; PAM sequence: TTT
tttaagaaatgacagatcaa

SEQ ID NO: 69845 - DNA, 20 bp, Artificial Sequence
  Description of Artificial Sequence: Synthetic oligonucleotide
  Target: SCNA; (+) strand; PAM type: YTN; PAM sequence: TTT
ttaagaaatgacagatcaat

SEQ ID NO: 69846 - DNA, 20 bp, Artificial Sequence
  Description of Artificial Sequence: Synthetic oligonucleotide
  Target: SCNA; (+) strand; PAM type: YTN; PAM sequence: TTT
taagaaatgacagatcaata

SEQ ID NO: 69847 - DNA, 20 bp, Artificial Sequence
  Description of Artificial Sequence: Synthetic oligonucleotide
  Target: SCNA; (+) strand; PAM type: YTN; PAM sequence: TTT
aagaaatgacagatcaatag

SEQ ID NO: 69848 - DNA, 20 bp, Artificial Sequence
  Description of Artificial Sequence: Synthetic oligonucleotide
  Target: SCNA; (+) strand; PAM type: YTN; PAM sequence: TTA
agaaatgacagatcaatagt

SEQ ID NO: 69849 - DNA, 20 bp, Artificial Sequence
  Description of Artificial Sequence: Synthetic oligonucleotide
  Target: SCNA; (+) strand; PAM type: YTN; PAM sequence: CTT
tccataaataaaagcctatt

SEQ ID NO: 69850 - DNA, 20 bp, Artificial Sequence
  Description of Artificial Sequence: Synthetic oligonucleotide
  Target: SCNA; (+) strand; PAM type: YTN; PAM sequence: TTT
ccataaataaaagcctatta

SEQ ID NO: 69851 - DNA, 20 bp, Artificial Sequence
  Description of Artificial Sequence: Synthetic oligonucleotide
  Target: SCNA; (+) strand; PAM type: YTN; PAM sequence: TTC
cataaataaaagcctattaa

SEQ ID NO: 69852 - DNA, 20 bp, Artificial Sequence
  Description of Artificial Sequence: Synthetic oligonucleotide
  Target: SCNA; (+) strand; PAM type: YTN; PAM sequence: CTA
ttaatttgtataacataaca

SEQ ID NO: 69853 - DNA, 20 bp, Artificial Sequence
  Description of Artificial Sequence: Synthetic oligonucleotide
  Target: SCNA; (+) strand; PAM type: YTN; PAM sequence: TTA
atttgtataacataacaaaa

SEQ ID NO: 69854 - DNA, 20 bp, Artificial Sequence
  Description of Artificial Sequence: Synthetic oligonucleotide
  Target: SCNA; (+) strand; PAM type: YTN; PAM sequence: TTT
gtataacataacaaaattca

SEQ ID NO: 69855 - DNA, 20 bp, Artificial Sequence
  Description of Artificial Sequence: Synthetic oligonucleotide
  Target: SCNA; (+) strand; PAM type: YTN; PAM sequence: TTG
tataacataacaaaattcag

SEQ ID NO: 69856 - DNA, 20 bp, Artificial Sequence
  Description of Artificial Sequence: Synthetic oligonucleotide
  Target: SCNA; (+) strand; PAM type: YTN; PAM sequence: TTC
agtgcaacataaattcatat

SEQ ID NO: 69857 - DNA, 20 bp, Artificial Sequence
  Description of Artificial Sequence: Synthetic oligonucleotide
  Target: SCNA; (+) strand; PAM type: YTN; PAM sequence: TTC
atatagtactcctacaagaa

SEQ ID NO: 69858 - DNA, 20 bp, Artificial Sequence
  Description of Artificial Sequence: Synthetic oligonucleotide
  Target: SCNA; (+) strand; PAM type: YTN; PAM sequence: CTC
ctacaagaaatctataggag

SEQ ID NO: 69859 - DNA, 20 bp, Artificial Sequence
  Description of Artificial Sequence: Synthetic oligonucleotide
  Target: SCNA; (+) strand; PAM type: YTN; PAM sequence: CTA
caagaaatctataggagtaa

SEQ ID NO: 69860 - DNA, 20 bp, Artificial Sequence
  Description of Artificial Sequence: Synthetic oligonucleotide
  Target: SCNA; (+) strand; PAM type: YTN; PAM sequence: CTA
taggagtaaaattatgatta

SEQ ID NO: 69861 - DNA, 20 bp, Artificial Sequence
  Description of Artificial Sequence: Synthetic oligonucleotide
  Target: SCNA; (+) strand; PAM type: YTN; PAM sequence: TTA
tgattataaaaatcaacaga

SEQ ID NO: 69862 - DNA, 20 bp, Artificial Sequence
  Description of Artificial Sequence: Synthetic oligonucleotide
  Target: SCNA; (+) strand; PAM type: YTN; PAM sequence: TTA
taaaaatcaacagacttaaa

SEQ ID NO: 69863 - DNA, 20 bp, Artificial Sequence
  Description of Artificial Sequence: Synthetic oligonucleotide
  Target: SCNA; (+) strand; PAM type: YTN; PAM sequence: CTT
aaacaaacaaataacagctt

SEQ ID NO: 69864 - DNA, 20 bp, Artificial Sequence
  Description of Artificial Sequence: Synthetic oligonucleotide
  Target: SCNA; (+) strand; PAM type: YTN; PAM sequence: TTA
aacaaacaaataacagcttt

SEQ ID NO: 69865 - DNA, 20 bp, Artificial Sequence
  Description of Artificial Sequence: Synthetic oligonucleotide
  Target: SCNA; (+) strand; PAM type: YTN; PAM sequence: CTT
tcaattaagtttatagatac

SEQ ID NO: 69866 - DNA, 20 bp, Artificial Sequence
  Description of Artificial Sequence: Synthetic oligonucleotide
  Target: SCNA; (+) strand; PAM type: YTN; PAM sequence: TTT
caattaagtttatagatacc

SEQ ID NO: 69867 - DNA, 20 bp, Artificial Sequence
  Description of Artificial Sequence: Synthetic oligonucleotide
  Target: SCNA; (+) strand; PAM type: YTN; PAM sequence: TTC
aattaagtttatagatacca

SEQ ID NO: 69868 - DNA, 20 bp, Artificial Sequence
  Description of Artificial Sequence: Synthetic oligonucleotide
  Target: SCNA; (+) strand; PAM type: YTN; PAM sequence: TTA
agtttatagataccaaagac

SEQ ID NO: 69869 - DNA, 20 bp, Artificial Sequence
  Description of Artificial Sequence: Synthetic oligonucleotide
  Target: SCNA; (+) strand; PAM type: YTN; PAM sequence: TTT
atagataccaaagacattca

SEQ ID NO: 69870 - DNA, 20 bp, Artificial Sequence
  Description of Artificial Sequence: Synthetic oligonucleotide
  Target: SCNA; (+) strand; PAM type: YTN; PAM sequence: TTA
tagataccaaagacattcaa

SEQ ID NO: 69871 - DNA, 20 bp, Artificial Sequence
  Description of Artificial Sequence: Synthetic oligonucleotide
  Target: SCNA; (+) strand; PAM type: YTN; PAM sequence: TTC
aacctttaacatcccactgt

SEQ ID NO: 69872 - DNA, 20 bp, Artificial Sequence
  Description of Artificial Sequence: Synthetic oligonucleotide
  Target: SCNA; (+) strand; PAM type: YTN; PAM sequence: CTT
taacatcccactgtgtaaaa

SEQ ID NO: 69873 - DNA, 20 bp, Artificial Sequence
  Description of Artificial Sequence: Synthetic oligonucleotide
  Target: SCNA; (+) strand; PAM type: YTN; PAM sequence: TTT
aacatcccactgtgtaaaat

SEQ ID NO: 69874 - DNA, 20 bp, Artificial Sequence
  Description of Artificial Sequence: Synthetic oligonucleotide
  Target: SCNA; (+) strand; PAM type: YTN; PAM sequence: TTA
acatcccactgtgtaaaatc

SEQ ID NO: 69875 - DNA, 20 bp, Artificial Sequence
  Description of Artificial Sequence: Synthetic oligonucleotide
  Target: SCNA; (+) strand; PAM type: YTN; PAM sequence: CTG
tgtaaaatcaaatgggaaag

SEQ ID NO: 69876 - DNA, 20 bp, Artificial Sequence
  Description of Artificial Sequence: Synthetic oligonucleotide
  Target: SCNA; (+) strand; PAM type: YTN; PAM sequence: CTA
tggttagtaatataattgat

SEQ ID NO: 69877 - DNA, 20 bp, Artificial Sequence
  Description of Artificial Sequence: Synthetic oligonucleotide
  Target: SCNA; (+) strand; PAM type: YTN; PAM sequence: TTA
gtaatataattgattgctgc

SEQ ID NO: 69878 - DNA, 20 bp, Artificial Sequence
  Description of Artificial Sequence: Synthetic oligonucleotide
  Target: SCNA; (+) strand; PAM type: YTN; PAM sequence: TTG
attgctgccctacctacaaa

SEQ ID NO: 69879 - DNA, 20 bp, Artificial Sequence
  Description of Artificial Sequence: Synthetic oligonucleotide
  Target: SCNA; (+) strand; PAM type: YTN; PAM sequence: TTG
ctgccctacctacaaactaa

SEQ ID NO: 69880 - DNA, 20 bp, Artificial Sequence
  Description of Artificial Sequence: Synthetic oligonucleotide
  Target: SCNA; (+) strand; PAM type: YTN; PAM sequence: CTG
ccctacctacaaactaattt

SEQ ID NO: 69881 - DNA, 20 bp, Artificial Sequence
  Description of Artificial Sequence: Synthetic oligonucleotide
  Target: SCNA; (+) strand; PAM type: YTN; PAM sequence: CTA
cctacaaactaatttgtttt

SEQ ID NO: 69882 - DNA, 20 bp, Artificial Sequence
  Description of Artificial Sequence: Synthetic oligonucleotide
  Target: SCNA; (+) strand; PAM type: YTN; PAM sequence: CTA
caaactaatttgttttaata

SEQ ID NO: 69883 - DNA, 20 bp, Artificial Sequence
  Description of Artificial Sequence: Synthetic oligonucleotide
  Target: SCNA; (+) strand; PAM type: YTN; PAM sequence: CTA
atttgttttaatatctgtgc

SEQ ID NO: 69884 - DNA, 20 bp, Artificial Sequence
  Description of Artificial Sequence: Synthetic oligonucleotide
  Target: SCNA; (+) strand; PAM type: YTN; PAM sequence: TTT
gttttaatatctgtgctaga

SEQ ID NO: 69885 - DNA, 20 bp, Artificial Sequence
  Description of Artificial Sequence: Synthetic oligonucleotide
  Target: SCNA; (+) strand; PAM type: YTN; PAM sequence: TTG
ttttaatatctgtgctagaa

SEQ ID NO: 69886 - DNA, 20 bp, Artificial Sequence
  Description of Artificial Sequence: Synthetic oligonucleotide
  Target: SCNA; (+) strand; PAM type: YTN; PAM sequence: TTT
taatatctgtgctagaacca

SEQ ID NO: 69887 - DNA, 20 bp, Artificial Sequence
  Description of Artificial Sequence: Synthetic oligonucleotide
  Target: SCNA; (+) strand; PAM type: YTN; PAM sequence: TTT
aatatctgtgctagaaccag

SEQ ID NO: 69888 - DNA, 20 bp, Artificial Sequence
  Description of Artificial Sequence: Synthetic oligonucleotide
  Target: SCNA; (+) strand; PAM type: YTN; PAM sequence: TTA
atatctgtgctagaaccagt

SEQ ID NO: 69889 - DNA, 20 bp, Artificial Sequence
  Description of Artificial Sequence: Synthetic oligonucleotide
  Target: SCNA; (+) strand; PAM type: YTN; PAM sequence: CTG
tgctagaaccagtatgttac

SEQ ID NO: 69890 - DNA, 20 bp, Artificial Sequence
  Description of Artificial Sequence: Synthetic oligonucleotide
  Target: SCNA; (+) strand; PAM type: YTN; PAM sequence: CTA
gaaccagtatgttacccctt

SEQ ID NO: 69891 - DNA, 20 bp, Artificial Sequence
  Description of Artificial Sequence: Synthetic oligonucleotide
  Target: SCNA; (+) strand; PAM type: YTN; PAM sequence: TTA
ccccttttaactttagctaa

SEQ ID NO: 69892 - DNA, 20 bp, Artificial Sequence
  Description of Artificial Sequence: Synthetic oligonucleotide
  Target: SCNA; (+) strand; PAM type: YTN; PAM sequence: CTT
ttaactttagctaaataatg

SEQ ID NO: 69893 - DNA, 20 bp, Artificial Sequence
  Description of Artificial Sequence: Synthetic oligonucleotide
  Target: SCNA; (+) strand; PAM type: YTN; PAM sequence: TTT
taactttagctaaataatgt

SEQ ID NO: 69894 - DNA, 20 bp, Artificial Sequence
  Description of Artificial Sequence: Synthetic oligonucleotide
  Target: SCNA; (+) strand; PAM type: YTN; PAM sequence: TTT
aactttagctaaataatgtt

SEQ ID NO: 69895 - DNA, 20 bp, Artificial Sequence
  Description of Artificial Sequence: Synthetic oligonucleotide
  Target: SCNA; (+) strand; PAM type: YTN; PAM sequence: TTA
actttagctaaataatgttt

SEQ ID NO: 69896 - DNA, 20 bp, Artificial Sequence
  Description of Artificial Sequence: Synthetic oligonucleotide
  Target: SCNA; (+) strand; PAM type: YTN; PAM sequence: CTT
tagctaaataatgtttatac

SEQ ID NO: 69897 - DNA, 20 bp, Artificial Sequence
  Description of Artificial Sequence: Synthetic oligonucleotide
  Target: SCNA; (+) strand; PAM type: YTN; PAM sequence: TTT
agctaaataatgtttataca

SEQ ID NO: 69898 - DNA, 20 bp, Artificial Sequence
  Description of Artificial Sequence: Synthetic oligonucleotide
  Target: SCNA; (+) strand; PAM type: YTN; PAM sequence: TTA
gctaaataatgtttatacaa

SEQ ID NO: 69899 - DNA, 20 bp, Artificial Sequence
  Description of Artificial Sequence: Synthetic oligonucleotide
  Target: SCNA; (+) strand; PAM type: YTN; PAM sequence: CTA
aataatgtttatacaaacct

SEQ ID NO: 69900 - DNA, 20 bp, Artificial Sequence
  Description of Artificial Sequence: Synthetic oligonucleotide
  Target: SCNA; (+) strand; PAM type: YTN; PAM sequence: TTT
atacaaaccttactatgcag

SEQ ID NO: 69901 - DNA, 20 bp, Artificial Sequence
  Description of Artificial Sequence: Synthetic oligonucleotide
  Target: SCNA; (+) strand; PAM type: YTN; PAM sequence: TTA
tacaaaccttactatgcaga

SEQ ID NO: 69902 - DNA, 20 bp, Artificial Sequence
  Description of Artificial Sequence: Synthetic oligonucleotide
  Target: SCNA; (+) strand; PAM type: YTN; PAM sequence: CTT
actatgcagagctatcttta

SEQ ID NO: 69903 - DNA, 20 bp, Artificial Sequence
  Description of Artificial Sequence: Synthetic oligonucleotide
  Target: SCNA; (+) strand; PAM type: YTN; PAM sequence: TTA
ctatgcagagctatctttaa

SEQ ID NO: 69904 - DNA, 20 bp, Artificial Sequence
  Description of Artificial Sequence: Synthetic oligonucleotide
  Target: SCNA; (+) strand; PAM type: YTN; PAM sequence: CTA
tgcagagctatctttaacaa

SEQ ID NO: 69905 - DNA, 20 bp, Artificial Sequence
  Description of Artificial Sequence: Synthetic oligonucleotide
  Target: SCNA; (+) strand; PAM type: YTN; PAM sequence: CTA
tctttaacaagagcatccca

SEQ ID NO: 69906 - DNA, 20 bp, Artificial Sequence
  Description of Artificial Sequence: Synthetic oligonucleotide
  Target: SCNA; (+) strand; PAM type: YTN; PAM sequence: CTT
taacaagagcatcccattga

SEQ ID NO: 69907 - DNA, 20 bp, Artificial Sequence
  Description of Artificial Sequence: Synthetic oligonucleotide
  Target: SCNA; (+) strand; PAM type: YTN; PAM sequence: TTT
aacaagagcatcccattgag

SEQ ID NO: 69908 - DNA, 20 bp, Artificial Sequence
  Description of Artificial Sequence: Synthetic oligonucleotide
  Target: SCNA; (+) strand; PAM type: YTN; PAM sequence: TTA
acaagagcatcccattgagg

SEQ ID NO: 69909 - DNA, 20 bp, Artificial Sequence
  Description of Artificial Sequence: Synthetic oligonucleotide
  Target: SCNA; (+) strand; PAM type: YTN; PAM sequence: TTG
aggaaaaaagaaaatagaaa

SEQ ID NO: 69910 - DNA, 20 bp, Artificial Sequence
  Description of Artificial Sequence: Synthetic oligonucleotide
  Target: SCNA; (+) strand; PAM type: YTN; PAM sequence: TTT
tcacttttttctaataccaa

SEQ ID NO: 69911 - DNA, 20 bp, Artificial Sequence
  Description of Artificial Sequence: Synthetic oligonucleotide
  Target: SCNA; (+) strand; PAM type: YTN; PAM sequence: TTT
cacttttttctaataccaac

SEQ ID NO: 69912 - DNA, 20 bp, Artificial Sequence
  Description of Artificial Sequence: Synthetic oligonucleotide
  Target: SCNA; (+) strand; PAM type: YTN; PAM sequence: TTC
acttttttctaataccaaca

SEQ ID NO: 69913 - DNA, 20 bp, Artificial Sequence
  Description of Artificial Sequence: Synthetic oligonucleotide
  Target: SCNA; (+) strand; PAM type: YTN; PAM sequence: CTT
ttttctaataccaacagata

SEQ ID NO: 69914 - DNA, 20 bp, Artificial Sequence
  Description of Artificial Sequence: Synthetic oligonucleotide
  Target: SCNA; (+) strand; PAM type: YTN; PAM sequence: TTT
tttctaataccaacagatat

SEQ ID NO: 69915 - DNA, 20 bp, Artificial Sequence
  Description of Artificial Sequence: Synthetic oligonucleotide
  Target: SCNA; (+) strand; PAM type: YTN; PAM sequence: TTT
ttctaataccaacagatatc

SEQ ID NO: 69916 - DNA, 20 bp, Artificial Sequence
  Description of Artificial Sequence: Synthetic oligonucleotide
  Target: SCNA; (+) strand; PAM type: YTN; PAM sequence: TTT
tctaataccaacagatatca

SEQ ID NO: 69917 - DNA, 20 bp, Artificial Sequence
  Description of Artificial Sequence: Synthetic oligonucleotide
  Target: SCNA; (+) strand; PAM type: YTN; PAM sequence: TTT
ctaataccaacagatatcac

SEQ ID NO: 69918 - DNA, 20 bp, Artificial Sequence
  Description of Artificial Sequence: Synthetic oligonucleotide
  Target: SCNA; (+) strand; PAM type: YTN; PAM sequence: TTC
taataccaacagatatcact

SEQ ID NO: 69919 - DNA, 20 bp, Artificial Sequence
  Description of Artificial Sequence: Synthetic oligonucleotide
  Target: SCNA; (+) strand; PAM type: YTN; PAM sequence: CTA
ataccaacagatatcacttt

SEQ ID NO: 69920 - DNA, 20 bp, Artificial Sequence
  Description of Artificial Sequence: Synthetic oligonucleotide
  Target: SCNA; (+) strand; PAM type: YTN; PAM sequence: CTT
tattgatattgcatttctgt

SEQ ID NO: 69921 - DNA, 20 bp, Artificial Sequence
  Description of Artificial Sequence: Synthetic oligonucleotide
  Target: SCNA; (+) strand; PAM type: YTN; PAM sequence: TTT
attgatattgcatttctgta

SEQ ID NO: 69922 - DNA, 20 bp, Artificial Sequence
  Description of Artificial Sequence: Synthetic oligonucleotide
  Target: SCNA; (+) strand; PAM type: YTN; PAM sequence: TTA
ttgatattgcatttctgtat

SEQ ID NO: 69923 - DNA, 20 bp, Artificial Sequence
  Description of Artificial Sequence: Synthetic oligonucleotide
  Target: SCNA; (+) strand; PAM type: YTN; PAM sequence: TTG
atattgcatttctgtatata

SEQ ID NO: 69924 - DNA, 20 bp, Artificial Sequence
  Description of Artificial Sequence: Synthetic oligonucleotide
  Target: SCNA; (+) strand; PAM type: YTN; PAM sequence: TTG
catttctgtatataatgaca

SEQ ID NO: 69925 - DNA, 20 bp, Artificial Sequence
  Description of Artificial Sequence: Synthetic oligonucleotide
  Target: SCNA; (+) strand; PAM type: YTN; PAM sequence: TTT
ctgtatataatgacatagaa

SEQ ID NO: 69926 - DNA, 20 bp, Artificial Sequence
  Description of Artificial Sequence: Synthetic oligonucleotide
  Target: SCNA; (+) strand; PAM type: YTN; PAM sequence: TTC
tgtatataatgacatagaat

SEQ ID NO: 69927 - DNA, 20 bp, Artificial Sequence
  Description of Artificial Sequence: Synthetic oligonucleotide
  Target: SCNA; (+) strand; PAM type: YTN; PAM sequence: CTG
tatataatgacatagaatat

SEQ ID NO: 69928 - DNA, 20 bp, Artificial Sequence
  Description of Artificial Sequence: Synthetic oligonucleotide
  Target: SCNA; (+) strand; PAM type: YTN; PAM sequence: TTC
cctgtagttcagttttactg

SEQ ID NO: 69929 - DNA, 20 bp, Artificial Sequence
  Description of Artificial Sequence: Synthetic oligonucleotide
  Target: SCNA; (+) strand; PAM type: YTN; PAM sequence: CTG
tagttcagttttactgacag

SEQ ID NO: 69930 - DNA, 20 bp, Artificial Sequence
  Description of Artificial Sequence: Synthetic oligonucleotide
  Target: SCNA; (+) strand; PAM type: YTN; PAM sequence: TTC
agttttactgacagtaacat

SEQ ID NO: 69931 - DNA, 20 bp, Artificial Sequence
  Description of Artificial Sequence: Synthetic oligonucleotide
  Target: SCNA; (+) strand; PAM type: YTN; PAM sequence: TTT
tactgacagtaacattgcac

SEQ ID NO: 69932 - DNA, 20 bp, Artificial Sequence
  Description of Artificial Sequence: Synthetic oligonucleotide
  Target: SCNA; (+) strand; PAM type: YTN; PAM sequence: TTT
actgacagtaacattgcaca

SEQ ID NO: 69933 - DNA, 20 bp, Artificial Sequence
  Description of Artificial Sequence: Synthetic oligonucleotide
  Target: SCNA; (+) strand; PAM type: YTN; PAM sequence: TTA
ctgacagtaacattgcacaa

SEQ ID NO: 69934 - DNA, 20 bp, Artificial Sequence
  Description of Artificial Sequence: Synthetic oligonucleotide
  Target: SCNA; (+) strand; PAM type: YTN; PAM sequence: CTG
acagtaacattgcacaaatc

SEQ ID NO: 69935 - DNA, 20 bp, Artificial Sequence
  Description of Artificial Sequence: Synthetic oligonucleotide
  Target: SCNA; (+) strand; PAM type: YTN; PAM sequence: TTG
cacaaatcattttagggcta

SEQ ID NO: 69936 - DNA, 20 bp, Artificial Sequence
  Description of Artificial Sequence: Synthetic oligonucleotide
  Target: SCNA; (+) strand; PAM type: YTN; PAM sequence: TTT
tagggctatgtgctatgcag

SEQ ID NO: 69937 - DNA, 20 bp, Artificial Sequence
  Description of Artificial Sequence: Synthetic oligonucleotide
  Target: SCNA; (+) strand; PAM type: YTN; PAM sequence: TTT
agggctatgtgctatgcaga

SEQ ID NO: 69938 - DNA, 20 bp, Artificial Sequence
  Description of Artificial Sequence: Synthetic oligonucleotide
  Target: SCNA; (+) strand; PAM type: YTN; PAM sequence: TTA
gggctatgtgctatgcagag

SEQ ID NO: 69939 - DNA, 20 bp, Artificial Sequence
  Description of Artificial Sequence: Synthetic oligonucleotide
  Target: SCNA; (+) strand; PAM type: YTN; PAM sequence: CTA
tgtgctatgcagagacattg

SEQ ID NO: 69940 - DNA, 20 bp, Artificial Sequence
  Description of Artificial Sequence: Synthetic oligonucleotide
  Target: SCNA; (+) strand; PAM type: YTN; PAM sequence: CTA
tgcagagacattgtacagtt

SEQ ID NO: 69941 - DNA, 20 bp, Artificial Sequence
  Description of Artificial Sequence: Synthetic oligonucleotide
  Target: SCNA; (+) strand; PAM type: YTN; PAM sequence: TTG
tacagttaattggcatcatt

SEQ ID NO: 69942 - DNA, 20 bp, Artificial Sequence
  Description of Artificial Sequence: Synthetic oligonucleotide
  Target: SCNA; (+) strand; PAM type: YTN; PAM sequence: TTA
attggcatcattaagtaaca

SEQ ID NO: 69943 - DNA, 20 bp, Artificial Sequence
  Description of Artificial Sequence: Synthetic oligonucleotide
  Target: SCNA; (+) strand; PAM type: YTN; PAM sequence: TTG
gcatcattaagtaacatttt

SEQ ID NO: 69944 - DNA, 20 bp, Artificial Sequence
  Description of Artificial Sequence: Synthetic oligonucleotide
  Target: SCNA; (+) strand; PAM type: YTN; PAM sequence: TTA
agtaacattttgaaatgatg

SEQ ID NO: 69945 - DNA, 20 bp, Artificial Sequence
  Description of Artificial Sequence: Synthetic oligonucleotide
  Target: SCNA; (+) strand; PAM type: YTN; PAM sequence: TTT
tgaaatgatgaggtgttcaa

SEQ ID NO: 69946 - DNA, 20 bp, Artificial Sequence
  Description of Artificial Sequence: Synthetic oligonucleotide
  Target: SCNA; (+) strand; PAM type: YTN; PAM sequence: TTT
gaaatgatgaggtgttcaaa

SEQ ID NO: 69947 - DNA, 20 bp, Artificial Sequence
  Description of Artificial Sequence: Synthetic oligonucleotide
  Target: SCNA; (+) strand; PAM type: YTN; PAM sequence: TTG
aaatgatgaggtgttcaaat

SEQ ID NO: 69948 - DNA, 20 bp, Artificial Sequence
  Description of Artificial Sequence: Synthetic oligonucleotide
  Target: SCNA; (+) strand; PAM type: YTN; PAM sequence: TTC
aaatgtagtagttaaaggct

SEQ ID NO: 69949 - DNA, 20 bp, Artificial Sequence
  Description of Artificial Sequence: Synthetic oligonucleotide
  Target: SCNA; (+) strand; PAM type: YTN; PAM sequence: TTA
aaggcttgattggacattgc

SEQ ID NO: 69950 - DNA, 20 bp, Artificial Sequence
  Description of Artificial Sequence: Synthetic oligonucleotide
  Target: SCNA; (+) strand; PAM type: YTN; PAM sequence: CTT
gattggacattgctaaattg

SEQ ID NO: 69951 - DNA, 20 bp, Artificial Sequence
  Description of Artificial Sequence: Synthetic oligonucleotide
  Target: SCNA; (+) strand; PAM type: YTN; PAM sequence: TTG
attggacattgctaaattgg

SEQ ID NO: 69952 - DNA, 20 bp, Artificial Sequence
  Description of Artificial Sequence: Synthetic oligonucleotide
  Target: SCNA; (+) strand; PAM type: YTN; PAM sequence: TTG
gacattgctaaattgggtac

SEQ ID NO: 69953 - DNA, 20 bp, Artificial Sequence
  Description of Artificial Sequence: Synthetic oligonucleotide
  Target: SCNA; (+) strand; PAM type: YTN; PAM sequence: TTG
ctaaattgggtactagatct

SEQ ID NO: 69954 - DNA, 20 bp, Artificial Sequence
  Description of Artificial Sequence: Synthetic oligonucleotide
  Target: SCNA; (+) strand; PAM type: YTN; PAM sequence: CTA
aattgggtactagatctcta

SEQ ID NO: 69955 - DNA, 20 bp, Artificial Sequence
  Description of Artificial Sequence: Synthetic oligonucleotide
  Target: SCNA; (+) strand; PAM type: YTN; PAM sequence: TTG
ggtactagatctctaaagag

SEQ ID NO: 69956 - DNA, 20 bp, Artificial Sequence
  Description of Artificial Sequence: Synthetic oligonucleotide
  Target: SCNA; (+) strand; PAM type: YTN; PAM sequence: CTA
gatctctaaagagatggaat

SEQ ID NO: 69957 - DNA, 20 bp, Artificial Sequence
  Description of Artificial Sequence: Synthetic oligonucleotide
  Target: SCNA; (+) strand; PAM type: YTN; PAM sequence: CTC
taaagagatggaatttaccc

SEQ ID NO: 69958 - DNA, 20 bp, Artificial Sequence
  Description of Artificial Sequence: Synthetic oligonucleotide
  Target: SCNA; (+) strand; PAM type: YTN; PAM sequence: CTA
aagagatggaatttaccccc

SEQ ID NO: 69959 - DNA, 20 bp, Artificial Sequence
  Description of Artificial Sequence: Synthetic oligonucleotide
  Target: SCNA; (+) strand; PAM type: YTN; PAM sequence: TTT
accccctagtaggctttatc

SEQ ID NO: 69960 - DNA, 20 bp, Artificial Sequence
  Description of Artificial Sequence: Synthetic oligonucleotide
  Target: SCNA; (+) strand; PAM type: YTN; PAM sequence: TTA
ccccctagtaggctttatcc

SEQ ID NO: 69961 - DNA, 20 bp, Artificial Sequence
  Description of Artificial Sequence: Synthetic oligonucleotide
  Target: SCNA; (+) strand; PAM type: YTN; PAM sequence: CTA
gtaggctttatcctttttca

SEQ ID NO: 69962 - DNA, 20 bp, Artificial Sequence
  Description of Artificial Sequence: Synthetic oligonucleotide
  Target: SCNA; (+) strand; PAM type: YTN; PAM sequence: CTT
tatcctttttcacttgtctc

SEQ ID NO: 69963 - DNA, 20 bp, Artificial Sequence
  Description of Artificial Sequence: Synthetic oligonucleotide
  Target: SCNA; (+) strand; PAM type: YTN; PAM sequence: TTT
atcctttttcacttgtctca

SEQ ID NO: 69964 - DNA, 20 bp, Artificial Sequence
  Description of Artificial Sequence: Synthetic oligonucleotide
  Target: SCNA; (+) strand; PAM type: YTN; PAM sequence: TTA
tcctttttcacttgtctcag

SEQ ID NO: 69965 - DNA, 20 bp, Artificial Sequence
  Description of Artificial Sequence: Synthetic oligonucleotide
  Target: SCNA; (+) strand; PAM type: YTN; PAM sequence: CTT
tttcacttgtctcagatttg

SEQ ID NO: 69966 - DNA, 20 bp, Artificial Sequence
  Description of Artificial Sequence: Synthetic oligonucleotide
  Target: SCNA; (+) strand; PAM type: YTN; PAM sequence: TTT
ttcacttgtctcagatttgg

SEQ ID NO: 69967 - DNA, 20 bp, Artificial Sequence
  Description of Artificial Sequence: Synthetic oligonucleotide
  Target: SCNA; (+) strand; PAM type: YTN; PAM sequence: TTT
tcacttgtctcagatttgga

SEQ ID NO: 69968 - DNA, 20 bp, Artificial Sequence
  Description of Artificial Sequence: Synthetic oligonucleotide
  Target: SCNA; (+) strand; PAM type: YTN; PAM sequence: TTT
cacttgtctcagatttggaa

SEQ ID NO: 69969 - DNA, 20 bp, Artificial Sequence
  Description of Artificial Sequence: Synthetic oligonucleotide
  Target: SCNA; (+) strand; PAM type: YTN; PAM sequence: TTC
acttgtctcagatttggaac

SEQ ID NO: 69970 - DNA, 20 bp, Artificial Sequence
  Description of Artificial Sequence: Synthetic oligonucleotide
  Target: SCNA; (+) strand; PAM type: YTN; PAM sequence: CTT
gtctcagatttggaactcat

SEQ ID NO: 69971 - DNA, 20 bp, Artificial Sequence
  Description of Artificial Sequence: Synthetic oligonucleotide
  Target: SCNA; (+) strand; PAM type: YTN; PAM sequence: TTG
tctcagatttggaactcatt

SEQ ID NO: 69972 - DNA, 20 bp, Artificial Sequence
  Description of Artificial Sequence: Synthetic oligonucleotide
  Target: SCNA; (+) strand; PAM type: YTN; PAM sequence: CTC
agatttggaactcatttctt

SEQ ID NO: 69973 - DNA, 20 bp, Artificial Sequence
  Description of Artificial Sequence: Synthetic oligonucleotide
  Target: SCNA; (+) strand; PAM type: YTN; PAM sequence: TTT
ggaactcatttcttttaggt

SEQ ID NO: 69974 - DNA, 20 bp, Artificial Sequence
  Description of Artificial Sequence: Synthetic oligonucleotide
  Target: SCNA; (+) strand; PAM type: YTN; PAM sequence: TTG
gaactcatttcttttaggtt

SEQ ID NO: 69975 - DNA, 20 bp, Artificial Sequence
  Description of Artificial Sequence: Synthetic oligonucleotide
  Target: SCNA; (+) strand; PAM type: YTN; PAM sequence: CTC
atttcttttaggttgaaaat

SEQ ID NO: 69976 - DNA, 20 bp, Artificial Sequence
  Description of Artificial Sequence: Synthetic oligonucleotide
  Target: SCNA; (+) strand; PAM type: YTN; PAM sequence: TTT
cttttaggttgaaaatttta

SEQ ID NO: 69977 - DNA, 20 bp, Artificial Sequence
  Description of Artificial Sequence: Synthetic oligonucleotide
  Target: SCNA; (+) strand; PAM type: YTN; PAM sequence: TTC
ttttaggttgaaaattttat

SEQ ID NO: 69978 - DNA, 20 bp, Artificial Sequence
  Description of Artificial Sequence: Synthetic oligonucleotide
  Target: SCNA; (+) strand; PAM type: YTN; PAM sequence: CTT
ttaggttgaaaattttatgt

SEQ ID NO: 69979 - DNA, 20 bp, Artificial Sequence
  Description of Artificial Sequence: Synthetic oligonucleotide
  Target: SCNA; (+) strand; PAM type: YTN; PAM sequence: TTT
taggttgaaaattttatgtt

SEQ ID NO: 69980 - DNA, 20 bp, Artificial Sequence
  Description of Artificial Sequence: Synthetic oligonucleotide
  Target: SCNA; (+) strand; PAM type: YTN; PAM sequence: TTT
aggttgaaaattttatgttc

SEQ ID NO: 69981 - DNA, 20 bp, Artificial Sequence
  Description of Artificial Sequence: Synthetic oligonucleotide
  Target: SCNA; (+) strand; PAM type: YTN; PAM sequence: TTA
ggttgaaaattttatgttca

SEQ ID NO: 69982 - DNA, 20 bp, Artificial Sequence
  Description of Artificial Sequence: Synthetic oligonucleotide
  Target: SCNA; (+) strand; PAM type: YTN; PAM sequence: TTG
aaaattttatgttcatgttg

SEQ ID NO: 69983 - DNA, 20 bp, Artificial Sequence
  Description of Artificial Sequence: Synthetic oligonucleotide
  Target: SCNA; (+) strand; PAM type: YTN; PAM sequence: TTT
tatgttcatgttggaaactt

SEQ ID NO: 69984 - DNA, 20 bp, Artificial Sequence
  Description of Artificial Sequence: Synthetic oligonucleotide
  Target: SCNA; (+) strand; PAM type: YTN; PAM sequence: TTT
atgttcatgttggaaactta

SEQ ID NO: 69985 - DNA, 20 bp, Artificial Sequence
  Description of Artificial Sequence: Synthetic oligonucleotide
  Target: SCNA; (+) strand; PAM type: YTN; PAM sequence: TTA
tgttcatgttggaaacttaa

SEQ ID NO: 69986 - DNA, 20 bp, Artificial Sequence
  Description of Artificial Sequence: Synthetic oligonucleotide
  Target: SCNA; (+) strand; PAM type: YTN; PAM sequence: TTC
atgttggaaacttaaatttt

SEQ ID NO: 69987 - DNA, 20 bp, Artificial Sequence
  Description of Artificial Sequence: Synthetic oligonucleotide
  Target: SCNA; (+) strand; PAM type: YTN; PAM sequence: TTG
gaaacttaaattttaacaat

SEQ ID NO: 69988 - DNA, 20 bp, Artificial Sequence
  Description of Artificial Sequence: Synthetic oligonucleotide
  Target: SCNA; (+) strand; PAM type: YTN; PAM sequence: CTT
aaattttaacaattaaaaga

SEQ ID NO: 69989 - DNA, 20 bp, Artificial Sequence
  Description of Artificial Sequence: Synthetic oligonucleotide
  Target: SCNA; (+) strand; PAM type: YTN; PAM sequence: TTA
aattttaacaattaaaagat

SEQ ID NO: 69990 - DNA, 20 bp, Artificial Sequence
  Description of Artificial Sequence: Synthetic oligonucleotide
  Target: SCNA; (+) strand; PAM type: YTN; PAM sequence: TTT
taacaattaaaagattactt

SEQ ID NO: 69991 - DNA, 20 bp, Artificial Sequence
  Description of Artificial Sequence: Synthetic oligonucleotide
  Target: SCNA; (+) strand; PAM type: YTN; PAM sequence: TTT
aacaattaaaagattacttg

SEQ ID NO: 69992 - DNA, 20 bp, Artificial Sequence
  Description of Artificial Sequence: Synthetic oligonucleotide
  Target: SCNA; (+) strand; PAM type: YTN; PAM sequence: TTA
acaattaaaagattacttga

SEQ ID NO: 69993 - DNA, 20 bp, Artificial Sequence
  Description of Artificial Sequence: Synthetic oligonucleotide
  Target: SCNA; (+) strand; PAM type: YTN; PAM sequence: TTA
aaagattacttgaaatgcaa

SEQ ID NO: 69994 - DNA, 20 bp, Artificial Sequence
  Description of Artificial Sequence: Synthetic oligonucleotide
  Target: SCNA; (+) strand; PAM type: YTN; PAM sequence: TTA
cttgaaatgcaatgctaccc

SEQ ID NO: 69995 - DNA, 20 bp, Artificial Sequence
  Description of Artificial Sequence: Synthetic oligonucleotide
  Target: SCNA; (+) strand; PAM type: YTN; PAM sequence: CTT
gaaatgcaatgctacccacg

SEQ ID NO: 69996 - DNA, 20 bp, Artificial Sequence
  Description of Artificial Sequence: Synthetic oligonucleotide
  Target: SCNA; (+) strand; PAM type: YTN; PAM sequence: TTG
aaatgcaatgctacccacgg

SEQ ID NO: 69997 - DNA, 20 bp, Artificial Sequence
  Description of Artificial Sequence: Synthetic oligonucleotide
  Target: SCNA; (+) strand; PAM type: YTN; PAM sequence: CTA
cccacggctgcctgtcattt

SEQ ID NO: 69998 - DNA, 20 bp, Artificial Sequence
  Description of Artificial Sequence: Synthetic oligonucleotide
  Target: SCNA; (+) strand; PAM type: YTN; PAM sequence: CTG
cctgtcattttgggagtttc

SEQ ID NO: 69999 - DNA, 20 bp, Artificial Sequence
  Description of Artificial Sequence: Synthetic oligonucleotide
  Target: SCNA; (+) strand; PAM type: YTN; PAM sequence: CTG
tcattttgggagtttcttat

SEQ ID NO: 70000 - DNA, 20 bp, Artificial Sequence
  Description of Artificial Sequence: Synthetic oligonucleotide
  Target: SCNA; (+) strand; PAM type: YTN; PAM sequence: TTT
tgggagtttcttatagattc

SEQ ID NO: 70001 - DNA, 20 bp, Artificial Sequence
  Description of Artificial Sequence: Synthetic oligonucleotide
  Target: SCNA; (+) strand; PAM type: YTN; PAM sequence: TTT
gggagtttcttatagattct

SEQ ID NO: 70002 - DNA, 20 bp, Artificial Sequence
  Description of Artificial Sequence: Synthetic oligonucleotide
  Target: SCNA; (+) strand; PAM type: YTN; PAM sequence: TTG
ggagtttcttatagattctt

SEQ ID NO: 70003 - DNA, 20 bp, Artificial Sequence
  Description of Artificial Sequence: Synthetic oligonucleotide
  Target: SCNA; (+) strand; PAM type: YTN; PAM sequence: TTT
cttatagattctttttaggg

SEQ ID NO: 70004 - DNA, 20 bp, Artificial Sequence
  Description of Artificial Sequence: Synthetic oligonucleotide
  Target: SCNA; (+) strand; PAM type: YTN; PAM sequence: TTC
ttatagattctttttaggga

SEQ ID NO: 70005 - DNA, 20 bp, Artificial Sequence
  Description of Artificial Sequence: Synthetic oligonucleotide
  Target: SCNA; (+) strand; PAM type: YTN; PAM sequence: CTT
atagattctttttagggata

SEQ ID NO: 70006 - DNA, 20 bp, Artificial Sequence
  Description of Artificial Sequence: Synthetic oligonucleotide
  Target: SCNA; (+) strand; PAM type: YTN; PAM sequence: TTA
tagattctttttagggataa

SEQ ID NO: 70007 - DNA, 20 bp, Artificial Sequence
  Description of Artificial Sequence: Synthetic oligonucleotide
  Target: SCNA; (+) strand; PAM type: YTN; PAM sequence: TTC
tttttagggataagaattat

SEQ ID NO: 70008 - DNA, 20 bp, Artificial Sequence
  Description of Artificial Sequence: Synthetic oligonucleotide
  Target: SCNA; (+) strand; PAM type: YTN; PAM sequence: CTT
tttagggataagaattatgt

SEQ ID NO: 70009 - DNA, 20 bp, Artificial Sequence
  Description of Artificial Sequence: Synthetic oligonucleotide
  Target: SCNA; (+) strand; PAM type: YTN; PAM sequence: TTT
ttagggataagaattatgtt

SEQ ID NO: 70010 - DNA, 20 bp, Artificial Sequence
  Description of Artificial Sequence: Synthetic oligonucleotide
  Target: SCNA; (+) strand; PAM type: YTN; PAM sequence: TTT
tagggataagaattatgtta

SEQ ID NO: 70011 - DNA, 20 bp, Artificial Sequence
  Description of Artificial Sequence: Synthetic oligonucleotide
  Target: SCNA; (+) strand; PAM type: YTN; PAM sequence: TTT
agggataagaattatgttaa

SEQ ID NO: 70012 - DNA, 20 bp, Artificial Sequence
  Description of Artificial Sequence: Synthetic oligonucleotide
  Target: SCNA; (+) strand; PAM type: YTN; PAM sequence: TTA
gggataagaattatgttaaa

SEQ ID NO: 70013 - DNA, 20 bp, Artificial Sequence
  Description of Artificial Sequence: Synthetic oligonucleotide
  Target: SCNA; (+) strand; PAM type: YTN; PAM sequence: TTA
tgttaaaaccagatgctaga

SEQ ID NO: 70014 - DNA, 20 bp, Artificial Sequence
  Description of Artificial Sequence: Synthetic oligonucleotide
  Target: SCNA; (+) strand; PAM type: YTN; PAM sequence: TTA
aaaccagatgctagaattgc

SEQ ID NO: 70015 - DNA, 20 bp, Artificial Sequence
  Description of Artificial Sequence: Synthetic oligonucleotide
  Target: SCNA; (+) strand; PAM type: YTN; PAM sequence: CTA
gaattgctttaatttttatt

SEQ ID NO: 70016 - DNA, 20 bp, Artificial Sequence
  Description of Artificial Sequence: Synthetic oligonucleotide
  Target: SCNA; (+) strand; PAM type: YTN; PAM sequence: TTG
ctttaatttttattccccag

SEQ ID NO: 70017 - DNA, 20 bp, Artificial Sequence
  Description of Artificial Sequence: Synthetic oligonucleotide
  Target: SCNA; (+) strand; PAM type: YTN; PAM sequence: CTT
taatttttattccccagttt

SEQ ID NO: 70018 - DNA, 20 bp, Artificial Sequence
  Description of Artificial Sequence: Synthetic oligonucleotide
  Target: SCNA; (+) strand; PAM type: YTN; PAM sequence: TTT
aatttttattccccagtttc

SEQ ID NO: 70019 - DNA, 20 bp, Artificial Sequence
  Description of Artificial Sequence: Synthetic oligonucleotide
  Target: SCNA; (+) strand; PAM type: YTN; PAM sequence: TTA
atttttattccccagtttct

SEQ ID NO: 70020 - DNA, 20 bp, Artificial Sequence
  Description of Artificial Sequence: Synthetic oligonucleotide
  Target: SCNA; (+) strand; PAM type: YTN; PAM sequence: TTT
ttattccccagtttctcatt

SEQ ID NO: 70021 - DNA, 20 bp, Artificial Sequence
  Description of Artificial Sequence: Synthetic oligonucleotide
  Target: SCNA; (+) strand; PAM type: YTN; PAM sequence: TTT
tattccccagtttctcattt

SEQ ID NO: 70022 - DNA, 20 bp, Artificial Sequence
  Description of Artificial Sequence: Synthetic oligonucleotide
  Target: SCNA; (+) strand; PAM type: YTN; PAM sequence: TTT
attccccagtttctcatttc

SEQ ID NO: 70023 - DNA, 20 bp, Artificial Sequence
  Description of Artificial Sequence: Synthetic oligonucleotide
  Target: SCNA; (+) strand; PAM type: YTN; PAM sequence: TTA
ttccccagtttctcatttcc

SEQ ID NO: 70024 - DNA, 20 bp, Artificial Sequence
  Description of Artificial Sequence: Synthetic oligonucleotide
  Target: SCNA; (+) strand; PAM type: YTN; PAM sequence: TTC
cccagtttctcatttccatt

SEQ ID NO: 70025 - DNA, 20 bp, Artificial Sequence
  Description of Artificial Sequence: Synthetic oligonucleotide
  Target: SCNA; (+) strand; PAM type: YTN; PAM sequence: TTT
ctcatttccattttgacaaa

SEQ ID NO: 70026 - DNA, 20 bp, Artificial Sequence
  Description of Artificial Sequence: Synthetic oligonucleotide
  Target: SCNA; (+) strand; PAM type: YTN; PAM sequence: TTC
tcatttccattttgacaaag

SEQ ID NO: 70027 - DNA, 20 bp, Artificial Sequence
  Description of Artificial Sequence: Synthetic oligonucleotide
  Target: SCNA; (+) strand; PAM type: YTN; PAM sequence: CTC
atttccattttgacaaagag

SEQ ID NO: 70028 - DNA, 20 bp, Artificial Sequence
  Description of Artificial Sequence: Synthetic oligonucleotide
  Target: SCNA; (+) strand; PAM type: YTN; PAM sequence: TTT
ccattttgacaaagaggccc

SEQ ID NO: 70029 - DNA, 20 bp, Artificial Sequence
  Description of Artificial Sequence: Synthetic oligonucleotide
  Target: SCNA; (+) strand; PAM type: YTN; PAM sequence: TTC
cattttgacaaagaggccca

SEQ ID NO: 70030 - DNA, 20 bp, Artificial Sequence
  Description of Artificial Sequence: Synthetic oligonucleotide
  Target: SCNA; (+) strand; PAM type: YTN; PAM sequence: TTT
tgacaaagaggcccaaaaca

SEQ ID NO: 70031 - DNA, 20 bp, Artificial Sequence
  Description of Artificial Sequence: Synthetic oligonucleotide
  Target: SCNA; (+) strand; PAM type: YTN; PAM sequence: TTT
gacaaagaggcccaaaacat

SEQ ID NO: 70032 - DNA, 20 bp, Artificial Sequence
  Description of Artificial Sequence: Synthetic oligonucleotide
  Target: SCNA; (+) strand; PAM type: YTN; PAM sequence: TTG
acaaagaggcccaaaacatg

SEQ ID NO: 70033 - DNA, 20 bp, Artificial Sequence
  Description of Artificial Sequence: Synthetic oligonucleotide
  Target: SCNA; (+) strand; PAM type: YTN; PAM sequence: CTT
ttgatctgtttttttctccc

SEQ ID NO: 70034 - DNA, 20 bp, Artificial Sequence
  Description of Artificial Sequence: Synthetic oligonucleotide
  Target: SCNA; (+) strand; PAM type: YTN; PAM sequence: TTT
tgatctgtttttttctccca

SEQ ID NO: 70035 - DNA, 20 bp, Artificial Sequence
  Description of Artificial Sequence: Synthetic oligonucleotide
  Target: SCNA; (+) strand; PAM type: YTN; PAM sequence: TTT
gatctgtttttttctcccat

SEQ ID NO: 70036 - DNA, 20 bp, Artificial Sequence
  Description of Artificial Sequence: Synthetic oligonucleotide
  Target: SCNA; (+) strand; PAM type: YTN; PAM sequence: TTG
atctgtttttttctcccata

SEQ ID NO: 70037 - DNA, 20 bp, Artificial Sequence
  Description of Artificial Sequence: Synthetic oligonucleotide
  Target: SCNA; (+) strand; PAM type: YTN; PAM sequence: CTG
tttttttctcccatatcagt

SEQ ID NO: 70038 - DNA, 20 bp, Artificial Sequence
  Description of Artificial Sequence: Synthetic oligonucleotide
  Target: SCNA; (+) strand; PAM type: YTN; PAM sequence: TTT
ttttctcccatatcagttcc

SEQ ID NO: 70039 - DNA, 20 bp, Artificial Sequence
  Description of Artificial Sequence: Synthetic oligonucleotide
  Target: SCNA; (+) strand; PAM type: YTN; PAM sequence: TTT
tttctcccatatcagttccc

SEQ ID NO: 70040 - DNA, 20 bp, Artificial Sequence
  Description of Artificial Sequence: Synthetic oligonucleotide
  Target: SCNA; (+) strand; PAM type: YTN; PAM sequence: TTT
ttctcccatatcagttccca

SEQ ID NO: 70041 - DNA, 20 bp, Artificial Sequence
  Description of Artificial Sequence: Synthetic oligonucleotide
  Target: SCNA; (+) strand; PAM type: YTN; PAM sequence: TTT
tctcccatatcagttcccat

SEQ ID NO: 70042 - DNA, 20 bp, Artificial Sequence
  Description of Artificial Sequence: Synthetic oligonucleotide
  Target: SCNA; (+) strand; PAM type: YTN; PAM sequence: TTT
ctcccatatcagttcccatg

SEQ ID NO: 70043 - DNA, 20 bp, Artificial Sequence
  Description of Artificial Sequence: Synthetic oligonucleotide
  Target: SCNA; (+) strand; PAM type: YTN; PAM sequence: TTC
tcccatatcagttcccatga

SEQ ID NO: 70044 - DNA, 20 bp, Artificial Sequence
  Description of Artificial Sequence: Synthetic oligonucleotide
  Target: SCNA; (+) strand; PAM type: YTN; PAM sequence: CTC
ccatatcagttcccatgaga

SEQ ID NO: 70045 - DNA, 20 bp, Artificial Sequence
  Description of Artificial Sequence: Synthetic oligonucleotide
  Target: SCNA; (+) strand; PAM type: YTN; PAM sequence: TTC
ccatgagaccagtgacttca

SEQ ID NO: 70046 - DNA, 20 bp, Artificial Sequence
  Description of Artificial Sequence: Synthetic oligonucleotide
  Target: SCNA; (+) strand; PAM type: YTN; PAM sequence: CTT
cattctttctgttattgcag

SEQ ID NO: 70047 - DNA, 20 bp, Artificial Sequence
  Description of Artificial Sequence: Synthetic oligonucleotide
  Target: SCNA; (+) strand; PAM type: YTN; PAM sequence: TTC
attctttctgttattgcagg

SEQ ID NO: 70048 - DNA, 20 bp, Artificial Sequence
  Description of Artificial Sequence: Synthetic oligonucleotide
  Target: SCNA; (+) strand; PAM type: YTN; PAM sequence: TTC
tttctgttattgcaggttta

SEQ ID NO: 70049 - DNA, 20 bp, Artificial Sequence
  Description of Artificial Sequence: Synthetic oligonucleotide
  Target: SCNA; (+) strand; PAM type: YTN; PAM sequence: CTT
tctgttattgcaggtttaca

SEQ ID NO: 70050 - DNA, 20 bp, Artificial Sequence
  Description of Artificial Sequence: Synthetic oligonucleotide
  Target: SCNA; (+) strand; PAM type: YTN; PAM sequence: TTT
ctgttattgcaggtttacat

SEQ ID NO: 70051 - DNA, 20 bp, Artificial Sequence
  Description of Artificial Sequence: Synthetic oligonucleotide
  Target: SCNA; (+) strand; PAM type: YTN; PAM sequence: TTC
tgttattgcaggtttacatt

SEQ ID NO: 70052 - DNA, 20 bp, Artificial Sequence
  Description of Artificial Sequence: Synthetic oligonucleotide
  Target: SCNA; (+) strand; PAM type: YTN; PAM sequence: CTG
ttattgcaggtttacatttt

SEQ ID NO: 70053 - DNA, 20 bp, Artificial Sequence
  Description of Artificial Sequence: Synthetic oligonucleotide
  Target: SCNA; (+) strand; PAM type: YTN; PAM sequence: TTA
ttgcaggtttacattttgca

SEQ ID NO: 70054 - DNA, 20 bp, Artificial Sequence
  Description of Artificial Sequence: Synthetic oligonucleotide
  Target: SCNA; (+) strand; PAM type: YTN; PAM sequence: TTG
caggtttacattttgcagtc

SEQ ID NO: 70055 - DNA, 20 bp, Artificial Sequence
  Description of Artificial Sequence: Synthetic oligonucleotide
  Target: SCNA; (+) strand; PAM type: YTN; PAM sequence: TTT
acattttgcagtcatctttt

SEQ ID NO: 70056 - DNA, 20 bp, Artificial Sequence
  Description of Artificial Sequence: Synthetic oligonucleotide
  Target: SCNA; (+) strand; PAM type: YTN; PAM sequence: TTA
cattttgcagtcatctttta

SEQ ID NO: 70057 - DNA, 20 bp, Artificial Sequence
  Description of Artificial Sequence: Synthetic oligonucleotide
  Target: SCNA; (+) strand; PAM type: YTN; PAM sequence: TTT
tgcagtcatcttttattctt

SEQ ID NO: 70058 - DNA, 20 bp, Artificial Sequence
  Description of Artificial Sequence: Synthetic oligonucleotide
  Target: SCNA; (+) strand; PAM type: YTN; PAM sequence: TTT
gcagtcatcttttattcttg

SEQ ID NO: 70059 - DNA, 20 bp, Artificial Sequence
  Description of Artificial Sequence: Synthetic oligonucleotide
  Target: SCNA; (+) strand; PAM type: YTN; PAM sequence: TTG
cagtcatcttttattcttgt

SEQ ID NO: 70060 - DNA, 20 bp, Artificial Sequence
  Description of Artificial Sequence: Synthetic oligonucleotide
  Target: SCNA; (+) strand; PAM type: YTN; PAM sequence: CTT
ttattcttgtatcactatct

SEQ ID NO: 70061 - DNA, 20 bp, Artificial Sequence
  Description of Artificial Sequence: Synthetic oligonucleotide
  Target: SCNA; (+) strand; PAM type: YTN; PAM sequence: TTT
tattcttgtatcactatctt

SEQ ID NO: 70062 - DNA, 20 bp, Artificial Sequence
  Description of Artificial Sequence: Synthetic oligonucleotide
  Target: SCNA; (+) strand; PAM type: YTN; PAM sequence: TTT
attcttgtatcactatcttc

SEQ ID NO: 70063 - DNA, 20 bp, Artificial Sequence
  Description of Artificial Sequence: Synthetic oligonucleotide
  Target: SCNA; (+) strand; PAM type: YTN; PAM sequence: TTA
ttcttgtatcactatcttca

SEQ ID NO: 70064 - DNA, 20 bp, Artificial Sequence
  Description of Artificial Sequence: Synthetic oligonucleotide
  Target: SCNA; (+) strand; PAM type: YTN; PAM sequence: TTC
ttgtatcactatcttcaatc

SEQ ID NO: 70065 - DNA, 20 bp, Artificial Sequence
  Description of Artificial Sequence: Synthetic oligonucleotide
  Target: SCNA; (+) strand; PAM type: YTN; PAM sequence: CTT
gtatcactatcttcaatcat

SEQ ID NO: 70066 - DNA, 20 bp, Artificial Sequence
  Description of Artificial Sequence: Synthetic oligonucleotide
  Target: SCNA; (+) strand; PAM type: YTN; PAM sequence: TTG
tatcactatcttcaatcatt

SEQ ID NO: 70067 - DNA, 20 bp, Artificial Sequence
  Description of Artificial Sequence: Synthetic oligonucleotide
  Target: SCNA; (+) strand; PAM type: YTN; PAM sequence: CTA
tcttcaatcattgtggccaa

SEQ ID NO: 70068 - DNA, 20 bp, Artificial Sequence
  Description of Artificial Sequence: Synthetic oligonucleotide
  Target: SCNA; (+) strand; PAM type: YTN; PAM sequence: CTT
caatcattgtggccaattct

SEQ ID NO: 70069 - DNA, 20 bp, Artificial Sequence
  Description of Artificial Sequence: Synthetic oligonucleotide
  Target: SCNA; (+) strand; PAM type: YTN; PAM sequence: TTC
aatcattgtggccaattctt

SEQ ID NO: 70070 - DNA, 20 bp, Artificial Sequence
  Description of Artificial Sequence: Synthetic oligonucleotide
  Target: SCNA; (+) strand; PAM type: YTN; PAM sequence: TTG
tggccaattctttccaggtc

SEQ ID NO: 70071 - DNA, 20 bp, Artificial Sequence
  Description of Artificial Sequence: Synthetic oligonucleotide
  Target: SCNA; (+) strand; PAM type: YTN; PAM sequence: TTC
tttccaggtcattctcaaac

SEQ ID NO: 70072 - DNA, 20 bp, Artificial Sequence
  Description of Artificial Sequence: Synthetic oligonucleotide
  Target: SCNA; (+) strand; PAM type: YTN; PAM sequence: CTT
tccaggtcattctcaaacct

SEQ ID NO: 70073 - DNA, 20 bp, Artificial Sequence
  Description of Artificial Sequence: Synthetic oligonucleotide
  Target: SCNA; (+) strand; PAM type: YTN; PAM sequence: TTT
ccaggtcattctcaaacctc

SEQ ID NO: 70074 - DNA, 20 bp, Artificial Sequence
  Description of Artificial Sequence: Synthetic oligonucleotide
  Target: SCNA; (+) strand; PAM type: YTN; PAM sequence: TTC
caggtcattctcaaacctcc

SEQ ID NO: 70075 - DNA, 20 bp, Artificial Sequence
  Description of Artificial Sequence: Synthetic oligonucleotide
  Target: SCNA; (+) strand; PAM type: YTN; PAM sequence: TTC
tcaaacctccatatcaaagc

SEQ ID NO: 70076 - DNA, 20 bp, Artificial Sequence
  Description of Artificial Sequence: Synthetic oligonucleotide
  Target: SCNA; (+) strand; PAM type: YTN; PAM sequence: CTC
aaacctccatatcaaagcta

SEQ ID NO: 70077 - DNA, 20 bp, Artificial Sequence
  Description of Artificial Sequence: Synthetic oligonucleotide
  Target: SCNA; (+) strand; PAM type: YTN; PAM sequence: CTC
catatcaaagctatagatca

SEQ ID NO: 70078 - DNA, 20 bp, Artificial Sequence
  Description of Artificial Sequence: Synthetic oligonucleotide
  Target: SCNA; (+) strand; PAM type: YTN; PAM sequence: CTA
tagatcaataactatcagaa

SEQ ID NO: 70079 - DNA, 20 bp, Artificial Sequence
  Description of Artificial Sequence: Synthetic oligonucleotide
  Target: SCNA; (+) strand; PAM type: YTN; PAM sequence: CTA
tcagaacaagttaaacatta

SEQ ID NO: 70080 - DNA, 20 bp, Artificial Sequence
  Description of Artificial Sequence: Synthetic oligonucleotide
  Target: SCNA; (+) strand; PAM type: YTN; PAM sequence: TTA
aacattaagataaagttaat

SEQ ID NO: 70081 - DNA, 20 bp, Artificial Sequence
  Description of Artificial Sequence: Synthetic oligonucleotide
  Target: SCNA; (+) strand; PAM type: YTN; PAM sequence: TTA
agataaagttaatcatcttt

SEQ ID NO: 70082 - DNA, 20 bp, Artificial Sequence
  Description of Artificial Sequence: Synthetic oligonucleotide
  Target: SCNA; (+) strand; PAM type: YTN; PAM sequence: TTA
atcatcttttctttataata

SEQ ID NO: 70083 - DNA, 20 bp, Artificial Sequence
  Description of Artificial Sequence: Synthetic oligonucleotide
  Target: SCNA; (+) strand; PAM type: YTN; PAM sequence: CTT
ttctttataataataaccac

SEQ ID NO: 70084 - DNA, 20 bp, Artificial Sequence
  Description of Artificial Sequence: Synthetic oligonucleotide
  Target: SCNA; (+) strand; PAM type: YTN; PAM sequence: TTT
tctttataataataaccacc

SEQ ID NO: 70085 - DNA, 20 bp, Artificial Sequence
  Description of Artificial Sequence: Synthetic oligonucleotide
  Target: SCNA; (+) strand; PAM type: YTN; PAM sequence: TTT
ctttataataataaccacca

SEQ ID NO: 70086 - DNA, 20 bp, Artificial Sequence
  Description of Artificial Sequence: Synthetic oligonucleotide
  Target: SCNA; (+) strand; PAM type: YTN; PAM sequence: TTC
tttataataataaccaccac

SEQ ID NO: 70087 - DNA, 20 bp, Artificial Sequence
  Description of Artificial Sequence: Synthetic oligonucleotide
  Target: SCNA; (+) strand; PAM type: YTN; PAM sequence: CTT
tataataataaccaccactg

SEQ ID NO: 70088 - DNA, 20 bp, Artificial Sequence
  Description of Artificial Sequence: Synthetic oligonucleotide
  Target: SCNA; (+) strand; PAM type: YTN; PAM sequence: TTT
ataataataaccaccactga

SEQ ID NO: 70089 - DNA, 20 bp, Artificial Sequence
  Description of Artificial Sequence: Synthetic oligonucleotide
  Target: SCNA; (+) strand; PAM type: YTN; PAM sequence: TTA
taataataaccaccactgaa

SEQ ID NO: 70090 - DNA, 20 bp, Artificial Sequence
  Description of Artificial Sequence: Synthetic oligonucleotide
  Target: SCNA; (+) strand; PAM type: YTN; PAM sequence: CTG
aattgcaattgttatgaggt

SEQ ID NO: 70091 - DNA, 20 bp, Artificial Sequence
  Description of Artificial Sequence: Synthetic oligonucleotide
  Target: SCNA; (+) strand; PAM type: YTN; PAM sequence: TTG
caattgttatgaggtattat

SEQ ID NO: 70092 - DNA, 20 bp, Artificial Sequence
  Description of Artificial Sequence: Synthetic oligonucleotide
  Target: SCNA; (+) strand; PAM type: YTN; PAM sequence: TTG
ttatgaggtattatgctaaa

SEQ ID NO: 70093 - DNA, 20 bp, Artificial Sequence
  Description of Artificial Sequence: Synthetic oligonucleotide
  Target: SCNA; (+) strand; PAM type: YTN; PAM sequence: TTA
tgaggtattatgctaaacac

SEQ ID NO: 70094 - DNA, 20 bp, Artificial Sequence
  Description of Artificial Sequence: Synthetic oligonucleotide
  Target: SCNA; (+) strand; PAM type: YTN; PAM sequence: TTA
tgctaaacactttatcaaat

SEQ ID NO: 70095 - DNA, 20 bp, Artificial Sequence
  Description of Artificial Sequence: Synthetic oligonucleotide
  Target: SCNA; (+) strand; PAM type: YTN; PAM sequence: CTA
aacactttatcaaatcttat

SEQ ID NO: 70096 - DNA, 20 bp, Artificial Sequence
  Description of Artificial Sequence: Synthetic oligonucleotide
  Target: SCNA; (+) strand; PAM type: YTN; PAM sequence: CTT
tatcaaatcttatgaaatag

SEQ ID NO: 70097 - DNA, 20 bp, Artificial Sequence
  Description of Artificial Sequence: Synthetic oligonucleotide
  Target: SCNA; (+) strand; PAM type: YTN; PAM sequence: TTT
atcaaatcttatgaaatagg

SEQ ID NO: 70098 - DNA, 20 bp, Artificial Sequence
  Description of Artificial Sequence: Synthetic oligonucleotide
  Target: SCNA; (+) strand; PAM type: YTN; PAM sequence: TTA
tcaaatcttatgaaataggg

SEQ ID NO: 70099 - DNA, 20 bp, Artificial Sequence
  Description of Artificial Sequence: Synthetic oligonucleotide
  Target: SCNA; (+) strand; PAM type: YTN; PAM sequence: CTT
atgaaataggggtaattttt

SEQ ID NO: 70100 - DNA, 20 bp, Artificial Sequence
  Description of Artificial Sequence: Synthetic oligonucleotide
  Target: SCNA; (+) strand; PAM type: YTN; PAM sequence: TTA
tgaaataggggtaattttta

SEQ ID NO: 70101 - DNA, 20 bp, Artificial Sequence
  Description of Artificial Sequence: Synthetic oligonucleotide
  Target: SCNA; (+) strand; PAM type: YTN; PAM sequence: TTT
ttattctcatctcacatgag

SEQ ID NO: 70102 - DNA, 20 bp, Artificial Sequence
  Description of Artificial Sequence: Synthetic oligonucleotide
  Target: SCNA; (+) strand; PAM type: YTN; PAM sequence: TTT
tattctcatctcacatgaga

SEQ ID NO: 70103 - DNA, 20 bp, Artificial Sequence
  Description of Artificial Sequence: Synthetic oligonucleotide
  Target: SCNA; (+) strand; PAM type: YTN; PAM sequence: TTT
attctcatctcacatgagaa

SEQ ID NO: 70104 - DNA, 20 bp, Artificial Sequence
  Description of Artificial Sequence: Synthetic oligonucleotide
  Target: SCNA; (+) strand; PAM type: YTN; PAM sequence: TTA
ttctcatctcacatgagaac

SEQ ID NO: 70105 - DNA, 20 bp, Artificial Sequence
  Description of Artificial Sequence: Synthetic oligonucleotide
  Target: SCNA; (+) strand; PAM type: YTN; PAM sequence: TTC
tcatctcacatgagaacttg

SEQ ID NO: 70106 - DNA, 20 bp, Artificial Sequence
  Description of Artificial Sequence: Synthetic oligonucleotide
  Target: SCNA; (+) strand; PAM type: YTN; PAM sequence: CTC
atctcacatgagaacttgag

SEQ ID NO: 70107 - DNA, 20 bp, Artificial Sequence
  Description of Artificial Sequence: Synthetic oligonucleotide
  Target: SCNA; (+) strand; PAM type: YTN; PAM sequence: CTC
acatgagaacttgaggcaca

SEQ ID NO: 70108 - DNA, 20 bp, Artificial Sequence
  Description of Artificial Sequence: Synthetic oligonucleotide
  Target: SCNA; (+) strand; PAM type: YTN; PAM sequence: CTT
gaggcacataaaaattaagg

SEQ ID NO: 70109 - DNA, 20 bp, Artificial Sequence
  Description of Artificial Sequence: Synthetic oligonucleotide
  Target: SCNA; (+) strand; PAM type: YTN; PAM sequence: TTG
aggcacataaaaattaaggc

SEQ ID NO: 70110 - DNA, 20 bp, Artificial Sequence
  Description of Artificial Sequence: Synthetic oligonucleotide
  Target: SCNA; (+) strand; PAM type: YTN; PAM sequence: TTA
aggcattttgccccaggtct

SEQ ID NO: 70111 - DNA, 20 bp, Artificial Sequence
  Description of Artificial Sequence: Synthetic oligonucleotide
  Target: SCNA; (+) strand; PAM type: YTN; PAM sequence: TTT
tgccccaggtctcatggctg

SEQ ID NO: 70112 - DNA, 20 bp, Artificial Sequence
  Description of Artificial Sequence: Synthetic oligonucleotide
  Target: SCNA; (+) strand; PAM type: YTN; PAM sequence: TTT
gccccaggtctcatggctgg

SEQ ID NO: 70113 - DNA, 20 bp, Artificial Sequence
  Description of Artificial Sequence: Synthetic oligonucleotide
  Target: SCNA; (+) strand; PAM type: YTN; PAM sequence: TTG
ccccaggtctcatggctggc

SEQ ID NO: 70114 - DNA, 20 bp, Artificial Sequence
  Description of Artificial Sequence: Synthetic oligonucleotide
  Target: SCNA; (+) strand; PAM type: YTN; PAM sequence: CTC
atggctggcaagtggtctgt

SEQ ID NO: 70115 - DNA, 20 bp, Artificial Sequence
  Description of Artificial Sequence: Synthetic oligonucleotide
  Target: SCNA; (+) strand; PAM type: YTN; PAM sequence: CTG
gcaagtggtctgtctgacag

SEQ ID NO: 70116 - DNA, 20 bp, Artificial Sequence
  Description of Artificial Sequence: Synthetic oligonucleotide
  Target: SCNA; (+) strand; PAM type: YTN; PAM sequence: CTG
tctgacagtagagagccagc

SEQ ID NO: 70117 - DNA, 20 bp, Artificial Sequence
  Description of Artificial Sequence: Synthetic oligonucleotide
  Target: SCNA; (+) strand; PAM type: YTN; PAM sequence: CTG
acagtagagagccagcttca

SEQ ID NO: 70118 - DNA, 20 bp, Artificial Sequence
  Description of Artificial Sequence: Synthetic oligonucleotide
  Target: SCNA; (+) strand; PAM type: YTN; PAM sequence: CTT
caagcactgtactatagggc

SEQ ID NO: 70119 - DNA, 20 bp, Artificial Sequence
  Description of Artificial Sequence: Synthetic oligonucleotide
  Target: SCNA; (+) strand; PAM type: YTN; PAM sequence: TTC
aagcactgtactatagggcc

SEQ ID NO: 70120 - DNA, 20 bp, Artificial Sequence
  Description of Artificial Sequence: Synthetic oligonucleotide
  Target: SCNA; (+) strand; PAM type: YTN; PAM sequence: CTG
tactatagggccactgtgtc

SEQ ID NO: 70121 - DNA, 20 bp, Artificial Sequence
  Description of Artificial Sequence: Synthetic oligonucleotide
  Target: SCNA; (+) strand; PAM type: YTN; PAM sequence: CTA
tagggccactgtgtcatgac

SEQ ID NO: 70122 - DNA, 20 bp, Artificial Sequence
  Description of Artificial Sequence: Synthetic oligonucleotide
  Target: SCNA; (+) strand; PAM type: YTN; PAM sequence: CTG
tgtcatgactataaaccttt

SEQ ID NO: 70123 - DNA, 20 bp, Artificial Sequence
  Description of Artificial Sequence: Synthetic oligonucleotide
  Target: SCNA; (+) strand; PAM type: YTN; PAM sequence: CTA
taaacctttcatggcatggt

SEQ ID NO: 70124 - DNA, 20 bp, Artificial Sequence
  Description of Artificial Sequence: Synthetic oligonucleotide
  Target: SCNA; (+) strand; PAM type: YTN; PAM sequence: CTT
tcatggcatggtctatacat

SEQ ID NO: 70125 - DNA, 20 bp, Artificial Sequence
  Description of Artificial Sequence: Synthetic oligonucleotide
  Target: SCNA; (+) strand; PAM type: YTN; PAM sequence: TTT
catggcatggtctatacatt

SEQ ID NO: 70126 - DNA, 20 bp, Artificial Sequence
  Description of Artificial Sequence: Synthetic oligonucleotide
  Target: SCNA; (+) strand; PAM type: YTN; PAM sequence: TTC
atggcatggtctatacattt

SEQ ID NO: 70127 - DNA, 20 bp, Artificial Sequence
  Description of Artificial Sequence: Synthetic oligonucleotide
  Target: SCNA; (+) strand; PAM type: YTN; PAM sequence: CTA
tacatttgggctcttcagct

SEQ ID NO: 70128 - DNA, 20 bp, Artificial Sequence
  Description of Artificial Sequence: Synthetic oligonucleotide
  Target: SCNA; (+) strand; PAM type: YTN; PAM sequence: TTT
gggctcttcagcttcaaatt

SEQ ID NO: 70129 - DNA, 20 bp, Artificial Sequence
  Description of Artificial Sequence: Synthetic oligonucleotide
  Target: SCNA; (+) strand; PAM type: YTN; PAM sequence: TTG
ggctcttcagcttcaaattt

SEQ ID NO: 70130 - DNA, 20 bp, Artificial Sequence
  Description of Artificial Sequence: Synthetic oligonucleotide
  Target: SCNA; (+) strand; PAM type: YTN; PAM sequence: CTC
ttcagcttcaaatttatcta

SEQ ID NO: 70131 - DNA, 20 bp, Artificial Sequence
  Description of Artificial Sequence: Synthetic oligonucleotide
  Target: SCNA; (+) strand; PAM type: YTN; PAM sequence: CTT
cagcttcaaatttatctatc

SEQ ID NO: 70132 - DNA, 20 bp, Artificial Sequence
  Description of Artificial Sequence: Synthetic oligonucleotide
  Target: SCNA; (+) strand; PAM type: YTN; PAM sequence: TTC
agcttcaaatttatctatca

SEQ ID NO: 70133 - DNA, 20 bp, Artificial Sequence
  Description of Artificial Sequence: Synthetic oligonucleotide
  Target: SCNA; (+) strand; PAM type: YTN; PAM sequence: CTT
caaatttatctatcatgcag

SEQ ID NO: 70134 - DNA, 20 bp, Artificial Sequence
  Description of Artificial Sequence: Synthetic oligonucleotide
  Target: SCNA; (+) strand; PAM type: YTN; PAM sequence: TTC
aaatttatctatcatgcagg

SEQ ID NO: 70135 - DNA, 20 bp, Artificial Sequence
  Description of Artificial Sequence: Synthetic oligonucleotide
  Target: SCNA; (+) strand; PAM type: YTN; PAM sequence: TTT
atctatcatgcaggcatgac

SEQ ID NO: 70136 - DNA, 20 bp, Artificial Sequence
  Description of Artificial Sequence: Synthetic oligonucleotide
  Target: SCNA; (+) strand; PAM type: YTN; PAM sequence: TTA
tctatcatgcaggcatgaca

SEQ ID NO: 70137 - DNA, 20 bp, Artificial Sequence
  Description of Artificial Sequence: Synthetic oligonucleotide
  Target: SCNA; (+) strand; PAM type: YTN; PAM sequence: CTA
tcatgcaggcatgacactag

SEQ ID NO: 70138 - DNA, 20 bp, Artificial Sequence
  Description of Artificial Sequence: Synthetic oligonucleotide
  Target: SCNA; (+) strand; PAM type: YTN; PAM sequence: CTA
ggttttcacttgcactggaa

SEQ ID NO: 70139 - DNA, 20 bp, Artificial Sequence
  Description of Artificial Sequence: Synthetic oligonucleotide
  Target: SCNA; (+) strand; PAM type: YTN; PAM sequence: TTT
tcacttgcactggaagtcaa

SEQ ID NO: 70140 - DNA, 20 bp, Artificial Sequence
  Description of Artificial Sequence: Synthetic oligonucleotide
  Target: SCNA; (+) strand; PAM type: YTN; PAM sequence: TTT
cacttgcactggaagtcaac

SEQ ID NO: 70141 - DNA, 20 bp, Artificial Sequence
  Description of Artificial Sequence: Synthetic oligonucleotide
  Target: SCNA; (+) strand; PAM type: YTN; PAM sequence: TTC
acttgcactggaagtcaact

SEQ ID NO: 70142 - DNA, 20 bp, Artificial Sequence
  Description of Artificial Sequence: Synthetic oligonucleotide
  Target: SCNA; (+) strand; PAM type: YTN; PAM sequence: CTT
gcactggaagtcaactgctg

SEQ ID NO: 70143 - DNA, 20 bp, Artificial Sequence
  Description of Artificial Sequence: Synthetic oligonucleotide
  Target: SCNA; (+) strand; PAM type: YTN; PAM sequence: TTG
cactggaagtcaactgctgg

SEQ ID NO: 70144 - DNA, 20 bp, Artificial Sequence
  Description of Artificial Sequence: Synthetic oligonucleotide
  Target: SCNA; (+) strand; PAM type: YTN; PAM sequence: CTG
gaagtcaactgctggaaaat

SEQ ID NO: 70145 - DNA, 20 bp, Artificial Sequence
  Description of Artificial Sequence: Synthetic oligonucleotide
  Target: SCNA; (+) strand; PAM type: YTN; PAM sequence: CTG
ctggaaaattagtctgtaga

SEQ ID NO: 70146 - DNA, 20 bp, Artificial Sequence
  Description of Artificial Sequence: Synthetic oligonucleotide
  Target: SCNA; (+) strand; PAM type: YTN; PAM sequence: CTG
gaaaattagtctgtagaaaa

SEQ ID NO: 70147 - DNA, 20 bp, Artificial Sequence
  Description of Artificial Sequence: Synthetic oligonucleotide
  Target: SCNA; (+) strand; PAM type: YTN; PAM sequence: TTA
gtctgtagaaaaccgtaggc

SEQ ID NO: 70148 - DNA, 20 bp, Artificial Sequence
  Description of Artificial Sequence: Synthetic oligonucleotide
  Target: SCNA; (+) strand; PAM type: YTN; PAM sequence: CTG
tagaaaaccgtaggccacag

SEQ ID NO: 70149 - DNA, 20 bp, Artificial Sequence
  Description of Artificial Sequence: Synthetic oligonucleotide
  Target: SCNA; (+) strand; PAM type: YTN; PAM sequence: TTC
ctgaatgtgttagtaagagg

SEQ ID NO: 70150 - DNA, 20 bp, Artificial Sequence
  Description of Artificial Sequence: Synthetic oligonucleotide
  Target: SCNA; (+) strand; PAM type: YTN; PAM sequence: CTG
aatgtgttagtaagaggctt

SEQ ID NO: 70151 - DNA, 20 bp, Artificial Sequence
  Description of Artificial Sequence: Synthetic oligonucleotide
  Target: SCNA; (+) strand; PAM type: YTN; PAM sequence: TTA
gtaagaggcttagattttat

SEQ ID NO: 70152 - DNA, 20 bp, Artificial Sequence
  Description of Artificial Sequence: Synthetic oligonucleotide
  Target: SCNA; (+) strand; PAM type: YTN; PAM sequence: CTT
agattttattttggatgggc

SEQ ID NO: 70153 - DNA, 20 bp, Artificial Sequence
  Description of Artificial Sequence: Synthetic oligonucleotide
  Target: SCNA; (+) strand; PAM type: YTN; PAM sequence: TTA
gattttattttggatgggct

SEQ ID NO: 70154 - DNA, 20 bp, Artificial Sequence
  Description of Artificial Sequence: Synthetic oligonucleotide
  Target: SCNA; (+) strand; PAM type: YTN; PAM sequence: TTT
tattttggatgggctgggaa

SEQ ID NO: 70155 - DNA, 20 bp, Artificial Sequence
  Description of Artificial Sequence: Synthetic oligonucleotide
  Target: SCNA; (+) strand; PAM type: YTN; PAM sequence: TTT
attttggatgggctgggaaa

SEQ ID NO: 70156 - DNA, 20 bp, Artificial Sequence
  Description of Artificial Sequence: Synthetic oligonucleotide
  Target: SCNA; (+) strand; PAM type: YTN; PAM sequence: TTA
ttttggatgggctgggaaat

SEQ ID NO: 70157 - DNA, 20 bp, Artificial Sequence
  Description of Artificial Sequence: Synthetic oligonucleotide
  Target: SCNA; (+) strand; PAM type: YTN; PAM sequence: TTT
tggatgggctgggaaataat

SEQ ID NO: 70158 - DNA, 20 bp, Artificial Sequence
  Description of Artificial Sequence: Synthetic oligonucleotide
  Target: SCNA; (+) strand; PAM type: YTN; PAM sequence: TTT
ggatgggctgggaaataatt

SEQ ID NO: 70159 - DNA, 20 bp, Artificial Sequence
  Description of Artificial Sequence: Synthetic oligonucleotide
  Target: SCNA; (+) strand; PAM type: YTN; PAM sequence: TTG
gatgggctgggaaataattg

SEQ ID NO: 70160 - DNA, 20 bp, Artificial Sequence
  Description of Artificial Sequence: Synthetic oligonucleotide
  Target: SCNA; (+) strand; PAM type: YTN; PAM sequence: CTG
ggaaataattgaagggttgt

SEQ ID NO: 70161 - DNA, 20 bp, Artificial Sequence
  Description of Artificial Sequence: Synthetic oligonucleotide
  Target: SCNA; (+) strand; PAM type: YTN; PAM sequence: TTG
aagggttgtaacagggaatg

SEQ ID NO: 70162 - DNA, 20 bp, Artificial Sequence
  Description of Artificial Sequence: Synthetic oligonucleotide
  Target: SCNA; (+) strand; PAM type: YTN; PAM sequence: TTG
taacagggaatgtgcagaat

SEQ ID NO: 70163 - DNA, 20 bp, Artificial Sequence
  Description of Artificial Sequence: Synthetic oligonucleotide
  Target: SCNA; (+) strand; PAM type: YTN; PAM sequence: TTG
cattgtggagagatctaatt

SEQ ID NO: 70164 - DNA, 20 bp, Artificial Sequence
  Description of Artificial Sequence: Synthetic oligonucleotide
  Target: SCNA; (+) strand; PAM type: YTN; PAM sequence: TTG
tggagagatctaattggaga

SEQ ID NO: 70165 - DNA, 20 bp, Artificial Sequence
  Description of Artificial Sequence: Synthetic oligonucleotide
  Target: SCNA; (+) strand; PAM type: YTN; PAM sequence: CTA
attggagattgggggaaaga

SEQ ID NO: 70166 - DNA, 20 bp, Artificial Sequence
  Description of Artificial Sequence: Synthetic oligonucleotide
  Target: SCNA; (+) strand; PAM type: YTN; PAM sequence: TTG
gagattgggggaaagatgag

SEQ ID NO: 70167 - DNA, 20 bp, Artificial Sequence
  Description of Artificial Sequence: Synthetic oligonucleotide
  Target: SCNA; (+) strand; PAM type: YTN; PAM sequence: TTG
ggggaaagatgagcaggccc

SEQ ID NO: 70168 - DNA, 20 bp, Artificial Sequence
  Description of Artificial Sequence: Synthetic oligonucleotide
  Target: SCNA; (+) strand; PAM type: YTN; PAM sequence: CTA
aactgtgataatgttggcaa

SEQ ID NO: 70169 - DNA, 20 bp, Artificial Sequence
  Description of Artificial Sequence: Synthetic oligonucleotide
  Target: SCNA; (+) strand; PAM type: YTN; PAM sequence: CTG
tgataatgttggcaagcttg

SEQ ID NO: 70170 - DNA, 20 bp, Artificial Sequence
  Description of Artificial Sequence: Synthetic oligonucleotide
  Target: SCNA; (+) strand; PAM type: YTN; PAM sequence: TTG
gcaagcttgaagggagggac

SEQ ID NO: 70171 - DNA, 20 bp, Artificial Sequence
  Description of Artificial Sequence: Synthetic oligonucleotide
  Target: SCNA; (+) strand; PAM type: YTN; PAM sequence: CTT
gaagggagggacagaatcag

SEQ ID NO: 70172 - DNA, 20 bp, Artificial Sequence
  Description of Artificial Sequence: Synthetic oligonucleotide
  Target: SCNA; (+) strand; PAM type: YTN; PAM sequence: TTG
aagggagggacagaatcaga

SEQ ID NO: 70173 - DNA, 20 bp, Artificial Sequence
  Description of Artificial Sequence: Synthetic oligonucleotide
  Target: SCNA; (+) strand; PAM type: YTN; PAM sequence: TTT
gtaagtgacatttctaggcc

SEQ ID NO: 70174 - DNA, 20 bp, Artificial Sequence
  Description of Artificial Sequence: Synthetic oligonucleotide
  Target: SCNA; (+) strand; PAM type: YTN; PAM sequence: TTG
taagtgacatttctaggccc

SEQ ID NO: 70175 - DNA, 20 bp, Artificial Sequence
  Description of Artificial Sequence: Synthetic oligonucleotide
  Target: SCNA; (+) strand; PAM type: YTN; PAM sequence: TTT
ctaggcccctgtgatttact

SEQ ID NO: 70176 - DNA, 20 bp, Artificial Sequence
  Description of Artificial Sequence: Synthetic oligonucleotide
  Target: SCNA; (+) strand; PAM type: YTN; PAM sequence: TTC
taggcccctgtgatttactg

SEQ ID NO: 70177 - DNA, 20 bp, Artificial Sequence
  Description of Artificial Sequence: Synthetic oligonucleotide
  Target: SCNA; (+) strand; PAM type: YTN; PAM sequence: CTA
ggcccctgtgatttactggc

SEQ ID NO: 70178 - DNA, 20 bp, Artificial Sequence
  Description of Artificial Sequence: Synthetic oligonucleotide
  Target: SCNA; (+) strand; PAM type: YTN; PAM sequence: CTG
tgatttactggctggaggat

SEQ ID NO: 70179 - DNA, 20 bp, Artificial Sequence
  Description of Artificial Sequence: Synthetic oligonucleotide
  Target: SCNA; (+) strand; PAM type: YTN; PAM sequence: TTT
actggctggaggatgagcag

SEQ ID NO: 70180 - DNA, 20 bp, Artificial Sequence
  Description of Artificial Sequence: Synthetic oligonucleotide
  Target: SCNA; (+) strand; PAM type: YTN; PAM sequence: TTA
ctggctggaggatgagcagg

SEQ ID NO: 70181 - DNA, 20 bp, Artificial Sequence
  Description of Artificial Sequence: Synthetic oligonucleotide
  Target: SCNA; (+) strand; PAM type: YTN; PAM sequence: CTG
gctggaggatgagcaggtga

SEQ ID NO: 70182 - DNA, 20 bp, Artificial Sequence
  Description of Artificial Sequence: Synthetic oligonucleotide
  Target: SCNA; (+) strand; PAM type: YTN; PAM sequence: CTG
gaggatgagcaggtgagagg

SEQ ID NO: 70183 - DNA, 20 bp, Artificial Sequence
  Description of Artificial Sequence: Synthetic oligonucleotide
  Target: SCNA; (+) strand; PAM type: YTN; PAM sequence: TTT
gttttgaaaaaagtgatttt

SEQ ID NO: 70184 - DNA, 20 bp, Artificial Sequence
  Description of Artificial Sequence: Synthetic oligonucleotide
  Target: SCNA; (+) strand; PAM type: YTN; PAM sequence: TTG
ttttgaaaaaagtgattttg

SEQ ID NO: 70185 - DNA, 20 bp, Artificial Sequence
  Description of Artificial Sequence: Synthetic oligonucleotide
  Target: SCNA; (+) strand; PAM type: YTN; PAM sequence: TTT
tgaaaaaagtgattttgaag

SEQ ID NO: 70186 - DNA, 20 bp, Artificial Sequence
  Description of Artificial Sequence: Synthetic oligonucleotide
  Target: SCNA; (+) strand; PAM type: YTN; PAM sequence: TTT
gaaaaaagtgattttgaaga

SEQ ID NO: 70187 - DNA, 20 bp, Artificial Sequence
  Description of Artificial Sequence: Synthetic oligonucleotide
  Target: SCNA; (+) strand; PAM type: YTN; PAM sequence: TTG
aaaaaagtgattttgaagag

SEQ ID NO: 70188 - DNA, 20 bp, Artificial Sequence
  Description of Artificial Sequence: Synthetic oligonucleotide
  Target: SCNA; (+) strand; PAM type: YTN; PAM sequence: TTT
tgaagagaggtcagaaaaag

SEQ ID NO: 70189 - DNA, 20 bp, Artificial Sequence
  Description of Artificial Sequence: Synthetic oligonucleotide
  Target: SCNA; (+) strand; PAM type: YTN; PAM sequence: TTT
gaagagaggtcagaaaaaga

SEQ ID NO: 70190 - DNA, 20 bp, Artificial Sequence
  Description of Artificial Sequence: Synthetic oligonucleotide
  Target: SCNA; (+) strand; PAM type: YTN; PAM sequence: TTG
aagagaggtcagaaaaagat

SEQ ID NO: 70191 - DNA, 20 bp, Artificial Sequence
  Description of Artificial Sequence: Synthetic oligonucleotide
  Target: SCNA; (+) strand; PAM type: YTN; PAM sequence: TTT
tcatttttttacttcatgtg

SEQ ID NO: 70192 - DNA, 20 bp, Artificial Sequence
  Description of Artificial Sequence: Synthetic oligonucleotide
  Target: SCNA; (+) strand; PAM type: YTN; PAM sequence: TTT
catttttttacttcatgtgt

SEQ ID NO: 70193 - DNA, 20 bp, Artificial Sequence
  Description of Artificial Sequence: Synthetic oligonucleotide
  Target: SCNA; (+) strand; PAM type: YTN; PAM sequence: TTC
atttttttacttcatgtgtt

SEQ ID NO: 70194 - DNA, 20 bp, Artificial Sequence
  Description of Artificial Sequence: Synthetic oligonucleotide
  Target: SCNA; (+) strand; PAM type: YTN; PAM sequence: TTT
ttttacttcatgtgttcatg

SEQ ID NO: 70195 - DNA, 20 bp, Artificial Sequence
  Description of Artificial Sequence: Synthetic oligonucleotide
  Target: SCNA; (+) strand; PAM type: YTN; PAM sequence: TTT
tttacttcatgtgttcatga

SEQ ID NO: 70196 - DNA, 20 bp, Artificial Sequence
  Description of Artificial Sequence: Synthetic oligonucleotide
  Target: SCNA; (+) strand; PAM type: YTN; PAM sequence: TTT
ttacttcatgtgttcatgag

SEQ ID NO: 70197 - DNA, 20 bp, Artificial Sequence
  Description of Artificial Sequence: Synthetic oligonucleotide
  Target: SCNA; (+) strand; PAM type: YTN; PAM sequence: TTT
tacttcatgtgttcatgagt

SEQ ID NO: 70198 - DNA, 20 bp, Artificial Sequence
  Description of Artificial Sequence: Synthetic oligonucleotide
  Target: SCNA; (+) strand; PAM type: YTN; PAM sequence: TTT
acttcatgtgttcatgagtt

SEQ ID NO: 70199 - DNA, 20 bp, Artificial Sequence
  Description of Artificial Sequence: Synthetic oligonucleotide
  Target: SCNA; (+) strand; PAM type: YTN; PAM sequence: TTA
cttcatgtgttcatgagttg

SEQ ID NO: 70200 - DNA, 20 bp, Artificial Sequence
  Description of Artificial Sequence: Synthetic oligonucleotide
  Target: SCNA; (+) strand; PAM type: YTN; PAM sequence: CTT
catgtgttcatgagttgggg

SEQ ID NO: 70201 - DNA, 20 bp, Artificial Sequence
  Description of Artificial Sequence: Synthetic oligonucleotide
  Target: SCNA; (+) strand; PAM type: YTN; PAM sequence: TTC
atgtgttcatgagttgggga

SEQ ID NO: 70202 - DNA, 20 bp, Artificial Sequence
  Description of Artificial Sequence: Synthetic oligonucleotide
  Target: SCNA; (+) strand; PAM type: YTN; PAM sequence: TTC
atgagttggggagtcagggt

SEQ ID NO: 70203 - DNA, 20 bp, Artificial Sequence
  Description of Artificial Sequence: Synthetic oligonucleotide
  Target: SCNA; (+) strand; PAM type: YTN; PAM sequence: TTG
gggagtcagggtacagaagg

SEQ ID NO: 70204 - DNA, 20 bp, Artificial Sequence
  Description of Artificial Sequence: Synthetic oligonucleotide
  Target: SCNA; (+) strand; PAM type: YTN; PAM sequence: CTG
acacagagaccagacacaca

SEQ ID NO: 70205 - DNA, 20 bp, Artificial Sequence
  Description of Artificial Sequence: Synthetic oligonucleotide
  Target: SCNA; (+) strand; PAM type: YTN; PAM sequence: CTT
catggatagctgttgaatga

SEQ ID NO: 70206 - DNA, 20 bp, Artificial Sequence
  Description of Artificial Sequence: Synthetic oligonucleotide
  Target: SCNA; (+) strand; PAM type: YTN; PAM sequence: TTC
atggatagctgttgaatgat

SEQ ID NO: 70207 - DNA, 20 bp, Artificial Sequence
  Description of Artificial Sequence: Synthetic oligonucleotide
  Target: SCNA; (+) strand; PAM type: YTN; PAM sequence: CTG
ttgaatgatttgtgaaaatc

SEQ ID NO: 70208 - DNA, 20 bp, Artificial Sequence
  Description of Artificial Sequence: Synthetic oligonucleotide
  Target: SCNA; (+) strand; PAM type: YTN; PAM sequence: TTG
aatgatttgtgaaaatcaga

SEQ ID NO: 70209 - DNA, 20 bp, Artificial Sequence
  Description of Artificial Sequence: Synthetic oligonucleotide
  Target: SCNA; (+) strand; PAM type: YTN; PAM sequence: TTT
gtgaaaatcagatagcagtg

SEQ ID NO: 70210 - DNA, 20 bp, Artificial Sequence
  Description of Artificial Sequence: Synthetic oligonucleotide
  Target: SCNA; (+) strand; PAM type: YTN; PAM sequence: TTG
tgaaaatcagatagcagtgg

SEQ ID NO: 70211 - DNA, 20 bp, Artificial Sequence
  Description of Artificial Sequence: Synthetic oligonucleotide
  Target: SCNA; (+) strand; PAM type: YTN; PAM sequence: TTT
ttatgcaagtgaaatacaaa

SEQ ID NO: 70212 - DNA, 20 bp, Artificial Sequence
  Description of Artificial Sequence: Synthetic oligonucleotide
  Target: SCNA; (+) strand; PAM type: YTN; PAM sequence: TTT
tatgcaagtgaaatacaaat

SEQ ID NO: 70213 - DNA, 20 bp, Artificial Sequence
  Description of Artificial Sequence: Synthetic oligonucleotide
  Target: SCNA; (+) strand; PAM type: YTN; PAM sequence: TTT
atgcaagtgaaatacaaatg

SEQ ID NO: 70214 - DNA, 20 bp, Artificial Sequence
  Description of Artificial Sequence: Synthetic oligonucleotide
  Target: SCNA; (+) strand; PAM type: YTN; PAM sequence: TTA
tgcaagtgaaatacaaatga

SEQ ID NO: 70215 - DNA, 20 bp, Artificial Sequence
  Description of Artificial Sequence: Synthetic oligonucleotide
  Target: SCNA; (+) strand; PAM type: YTN; PAM sequence: CTT
ctcaaggtgccatatctgag

SEQ ID NO: 70216 - DNA, 20 bp, Artificial Sequence
  Description of Artificial Sequence: Synthetic oligonucleotide
  Target: SCNA; (+) strand; PAM type: YTN; PAM sequence: TTC
tcaaggtgccatatctgagt

SEQ ID NO: 70217 - DNA, 20 bp, Artificial Sequence
  Description of Artificial Sequence: Synthetic oligonucleotide
  Target: SCNA; (+) strand; PAM type: YTN; PAM sequence: CTC
aaggtgccatatctgagttg

SEQ ID NO: 70218 - DNA, 20 bp, Artificial Sequence
  Description of Artificial Sequence: Synthetic oligonucleotide
  Target: SCNA; (+) strand; PAM type: YTN; PAM sequence: CTG
agttgtggctttgatctggt

SEQ ID NO: 70219 - DNA, 20 bp, Artificial Sequence
  Description of Artificial Sequence: Synthetic oligonucleotide
  Target: SCNA; (+) strand; PAM type: YTN; PAM sequence: TTG
tggctttgatctggttcctg

SEQ ID NO: 70220 - DNA, 20 bp, Artificial Sequence
  Description of Artificial Sequence: Synthetic oligonucleotide
  Target: SCNA; (+) strand; PAM type: YTN; PAM sequence: CTT
tgatctggttcctgactttg

SEQ ID NO: 70221 - DNA, 20 bp, Artificial Sequence
  Description of Artificial Sequence: Synthetic oligonucleotide
  Target: SCNA; (+) strand; PAM type: YTN; PAM sequence: TTT
gatctggttcctgactttga

SEQ ID NO: 70222 - DNA, 20 bp, Artificial Sequence
  Description of Artificial Sequence: Synthetic oligonucleotide
  Target: SCNA; (+) strand; PAM type: YTN; PAM sequence: TTG
atctggttcctgactttgaa

SEQ ID NO: 70223 - DNA, 20 bp, Artificial Sequence
  Description of Artificial Sequence: Synthetic oligonucleotide
  Target: SCNA; (+) strand; PAM type: YTN; PAM sequence: CTG
gttcctgactttgaattatt

SEQ ID NO: 70224 - DNA, 20 bp, Artificial Sequence
  Description of Artificial Sequence: Synthetic oligonucleotide
  Target: SCNA; (+) strand; PAM type: YTN; PAM sequence: TTC
ctgactttgaattattttgt

SEQ ID NO: 70225 - DNA, 20 bp, Artificial Sequence
  Description of Artificial Sequence: Synthetic oligonucleotide
  Target: SCNA; (+) strand; PAM type: YTN; PAM sequence: CTG
actttgaattattttgttcc

SEQ ID NO: 70226 - DNA, 20 bp, Artificial Sequence
  Description of Artificial Sequence: Synthetic oligonucleotide
  Target: SCNA; (+) strand; PAM type: YTN; PAM sequence: CTT
tgaattattttgttcctatg

SEQ ID NO: 70227 - DNA, 20 bp, Artificial Sequence
  Description of Artificial Sequence: Synthetic oligonucleotide
  Target: SCNA; (+) strand; PAM type: YTN; PAM sequence: TTT
gaattattttgttcctatga

SEQ ID NO: 70228 - DNA, 20 bp, Artificial Sequence
  Description of Artificial Sequence: Synthetic oligonucleotide
  Target: SCNA; (+) strand; PAM type: YTN; PAM sequence: TTG
aattattttgttcctatgaa

SEQ ID NO: 70229 - DNA, 20 bp, Artificial Sequence
  Description of Artificial Sequence: Synthetic oligonucleotide
  Target: SCNA; (+) strand; PAM type: YTN; PAM sequence: TTA
ttttgttcctatgaagtaca

SEQ ID NO: 70230 - DNA, 20 bp, Artificial Sequence
  Description of Artificial Sequence: Synthetic oligonucleotide
  Target: SCNA; (+) strand; PAM type: YTN; PAM sequence: TTT
tgttcctatgaagtacagga

SEQ ID NO: 70231 - DNA, 20 bp, Artificial Sequence
  Description of Artificial Sequence: Synthetic oligonucleotide
  Target: SCNA; (+) strand; PAM type: YTN; PAM sequence: TTT
gttcctatgaagtacaggac

SEQ ID NO: 70232 - DNA, 20 bp, Artificial Sequence
  Description of Artificial Sequence: Synthetic oligonucleotide
  Target: SCNA; (+) strand; PAM type: YTN; PAM sequence: TTG
ttcctatgaagtacaggact

SEQ ID NO: 70233 - DNA, 20 bp, Artificial Sequence
  Description of Artificial Sequence: Synthetic oligonucleotide
  Target: SCNA; (+) strand; PAM type: YTN; PAM sequence: TTC
ctatgaagtacaggactttg

SEQ ID NO: 70234 - DNA, 20 bp, Artificial Sequence
  Description of Artificial Sequence: Synthetic oligonucleotide
  Target: SCNA; (+) strand; PAM type: YTN; PAM sequence: CTA
tgaagtacaggactttgtaa

SEQ ID NO: 70235 - DNA, 20 bp, Artificial Sequence
  Description of Artificial Sequence: Synthetic oligonucleotide
  Target: SCNA; (+) strand; PAM type: YTN; PAM sequence: CTT
tgtaataaaaatccaccata

SEQ ID NO: 70236 - DNA, 20 bp, Artificial Sequence
  Description of Artificial Sequence: Synthetic oligonucleotide
  Target: SCNA; (+) strand; PAM type: YTN; PAM sequence: TTT
gtaataaaaatccaccatac

SEQ ID NO: 70237 - DNA, 20 bp, Artificial Sequence
  Description of Artificial Sequence: Synthetic oligonucleotide
  Target: SCNA; (+) strand; PAM type: YTN; PAM sequence: TTG
taataaaaatccaccataca

SEQ ID NO: 70238 - DNA, 20 bp, Artificial Sequence
  Description of Artificial Sequence: Synthetic oligonucleotide
  Target: SCNA; (+) strand; PAM type: YTN; PAM sequence: CTG
gacttaagaatatctccaca

SEQ ID NO: 70239 - DNA, 20 bp, Artificial Sequence
  Description of Artificial Sequence: Synthetic oligonucleotide
  Target: SCNA; (+) strand; PAM type: YTN; PAM sequence: CTT
aagaatatctccacaagtta

SEQ ID NO: 70240 - DNA, 20 bp, Artificial Sequence
  Description of Artificial Sequence: Synthetic oligonucleotide
  Target: SCNA; (+) strand; PAM type: YTN; PAM sequence: TTA
agaatatctccacaagttat

SEQ ID NO: 70241 - DNA, 20 bp, Artificial Sequence
  Description of Artificial Sequence: Synthetic oligonucleotide
  Target: SCNA; (+) strand; PAM type: YTN; PAM sequence: CTC
cacaagttataagaattgaa

SEQ ID NO: 70242 - DNA, 20 bp, Artificial Sequence
  Description of Artificial Sequence: Synthetic oligonucleotide
  Target: SCNA; (+) strand; PAM type: YTN; PAM sequence: TTA
taagaattgaaactgcttag

SEQ ID NO: 70243 - DNA, 20 bp, Artificial Sequence
  Description of Artificial Sequence: Synthetic oligonucleotide
  Target: SCNA; (+) strand; PAM type: YTN; PAM sequence: TTG
aaactgcttagaaggaacaa

SEQ ID NO: 70244 - DNA, 20 bp, Artificial Sequence
  Description of Artificial Sequence: Synthetic oligonucleotide
  Target: SCNA; (+) strand; PAM type: YTN; PAM sequence: CTG
cttagaaggaacaattgctt

SEQ ID NO: 70245 - DNA, 20 bp, Artificial Sequence
  Description of Artificial Sequence: Synthetic oligonucleotide
  Target: SCNA; (+) strand; PAM type: YTN; PAM sequence: CTT
agaaggaacaattgcttgta

SEQ ID NO: 70246 - DNA, 20 bp, Artificial Sequence
  Description of Artificial Sequence: Synthetic oligonucleotide
  Target: SCNA; (+) strand; PAM type: YTN; PAM sequence: TTA
gaaggaacaattgcttgtac

SEQ ID NO: 70247 - DNA, 20 bp, Artificial Sequence
  Description of Artificial Sequence: Synthetic oligonucleotide
  Target: SCNA; (+) strand; PAM type: YTN; PAM sequence: TTG
cttgtactcagccagtcatc

SEQ ID NO: 70248 - DNA, 20 bp, Artificial Sequence
  Description of Artificial Sequence: Synthetic oligonucleotide
  Target: SCNA; (+) strand; PAM type: YTN; PAM sequence: CTT
gtactcagccagtcatcctc

SEQ ID NO: 70249 - DNA, 20 bp, Artificial Sequence
  Description of Artificial Sequence: Synthetic oligonucleotide
  Target: SCNA; (+) strand; PAM type: YTN; PAM sequence: TTG
tactcagccagtcatcctca

SEQ ID NO: 70250 - DNA, 20 bp, Artificial Sequence
  Description of Artificial Sequence: Synthetic oligonucleotide
  Target: SCNA; (+) strand; PAM type: YTN; PAM sequence: CTC
agccagtcatcctcagctgc

SEQ ID NO: 70251 - DNA, 20 bp, Artificial Sequence
  Description of Artificial Sequence: Synthetic oligonucleotide
  Target: SCNA; (+) strand; PAM type: YTN; PAM sequence: CTC
agctgcatgagtctcaaaac

SEQ ID NO: 70252 - DNA, 20 bp, Artificial Sequence
  Description of Artificial Sequence: Synthetic oligonucleotide
  Target: SCNA; (+) strand; PAM type: YTN; PAM sequence: CTG
catgagtctcaaaacggggg

SEQ ID NO: 70253 - DNA, 20 bp, Artificial Sequence
  Description of Artificial Sequence: Synthetic oligonucleotide
  Target: SCNA; (+) strand; PAM type: YTN; PAM sequence: CTC
aaaacgggggtggagagtgt

SEQ ID NO: 70254 - DNA, 20 bp, Artificial Sequence
  Description of Artificial Sequence: Synthetic oligonucleotide
  Target: SCNA; (+) strand; PAM type: YTN; PAM sequence: CTA
cctcctccagaaaaggtttt

SEQ ID NO: 70255 - DNA, 20 bp, Artificial Sequence
  Description of Artificial Sequence: Synthetic oligonucleotide
  Target: SCNA; (+) strand; PAM type: YTN; PAM sequence: CTC
ctccagaaaaggtttttaga

SEQ ID NO: 70256 - DNA, 20 bp, Artificial Sequence
  Description of Artificial Sequence: Synthetic oligonucleotide
  Target: SCNA; (+) strand; PAM type: YTN; PAM sequence: CTC
cagaaaaggtttttagagcg

SEQ ID NO: 70257 - DNA, 20 bp, Artificial Sequence
  Description of Artificial Sequence: Synthetic oligonucleotide
  Target: SCNA; (+) strand; PAM type: YTN; PAM sequence: TTT
ttagagcgaaatcaaagaga

SEQ ID NO: 70258 - DNA, 20 bp, Artificial Sequence
  Description of Artificial Sequence: Synthetic oligonucleotide
  Target: SCNA; (+) strand; PAM type: YTN; PAM sequence: TTT
tagagcgaaatcaaagagac

SEQ ID NO: 70259 - DNA, 20 bp, Artificial Sequence
  Description of Artificial Sequence: Synthetic oligonucleotide
  Target: SCNA; (+) strand; PAM type: YTN; PAM sequence: TTT
agagcgaaatcaaagagact

SEQ ID NO: 70260 - DNA, 20 bp, Artificial Sequence
  Description of Artificial Sequence: Synthetic oligonucleotide
  Target: SCNA; (+) strand; PAM type: YTN; PAM sequence: TTA
gagcgaaatcaaagagactg

SEQ ID NO: 70261 - DNA, 20 bp, Artificial Sequence
  Description of Artificial Sequence: Synthetic oligonucleotide
  Target: SCNA; (+) strand; PAM type: YTN; PAM sequence: CTG
cctcttctccaccaaaatta

SEQ ID NO: 70262 - DNA, 20 bp, Artificial Sequence
  Description of Artificial Sequence: Synthetic oligonucleotide
  Target: SCNA; (+) strand; PAM type: YTN; PAM sequence: CTC
ttctccaccaaaattatttg

SEQ ID NO: 70263 - DNA, 20 bp, Artificial Sequence
  Description of Artificial Sequence: Synthetic oligonucleotide
  Target: SCNA; (+) strand; PAM type: YTN; PAM sequence: CTT
ctccaccaaaattatttgtc

SEQ ID NO: 70264 - DNA, 20 bp, Artificial Sequence
  Description of Artificial Sequence: Synthetic oligonucleotide
  Target: SCNA; (+) strand; PAM type: YTN; PAM sequence: TTC
tccaccaaaattatttgtct

SEQ ID NO: 70265 - DNA, 20 bp, Artificial Sequence
  Description of Artificial Sequence: Synthetic oligonucleotide
  Target: SCNA; (+) strand; PAM type: YTN; PAM sequence: CTC
caccaaaattatttgtctta

SEQ ID NO: 70266 - DNA, 20 bp, Artificial Sequence
  Description of Artificial Sequence: Synthetic oligonucleotide
  Target: SCNA; (+) strand; PAM type: YTN; PAM sequence: TTA
tttgtcttaagatggggaca

SEQ ID NO: 70267 - DNA, 20 bp, Artificial Sequence
  Description of Artificial Sequence: Synthetic oligonucleotide
  Target: SCNA; (+) strand; PAM type: YTN; PAM sequence: TTT
gtcttaagatggggacaaga

SEQ ID NO: 70268 - DNA, 20 bp, Artificial Sequence
  Description of Artificial Sequence: Synthetic oligonucleotide
  Target: SCNA; (+) strand; PAM type: YTN; PAM sequence: TTG
tcttaagatggggacaagaa

SEQ ID NO: 70269 - DNA, 20 bp, Artificial Sequence
  Description of Artificial Sequence: Synthetic oligonucleotide
  Target: SCNA; (+) strand; PAM type: YTN; PAM sequence: CTT
aagatggggacaagaaacct

SEQ ID NO: 70270 - DNA, 20 bp, Artificial Sequence
  Description of Artificial Sequence: Synthetic oligonucleotide
  Target: SCNA; (+) strand; PAM type: YTN; PAM sequence: TTA
agatggggacaagaaacctg

SEQ ID NO: 70271 - DNA, 20 bp, Artificial Sequence
  Description of Artificial Sequence: Synthetic oligonucleotide
  Target: SCNA; (+) strand; PAM type: YTN; PAM sequence: CTG
gcacccaggagtaaggacac

SEQ ID NO: 70272 - DNA, 20 bp, Artificial Sequence
  Description of Artificial Sequence: Synthetic oligonucleotide
  Target: SCNA; (+) strand; PAM type: YTN; PAM sequence: CTC
tctcattttaagctgaagct

SEQ ID NO: 70273 - DNA, 20 bp, Artificial Sequence
  Description of Artificial Sequence: Synthetic oligonucleotide
  Target: SCNA; (+) strand; PAM type: YTN; PAM sequence: CTC
tcattttaagctgaagctga

SEQ ID NO: 70274 - DNA, 20 bp, Artificial Sequence
  Description of Artificial Sequence: Synthetic oligonucleotide
  Target: SCNA; (+) strand; PAM type: YTN; PAM sequence: CTC
attttaagctgaagctgaac

SEQ ID NO: 70275 - DNA, 20 bp, Artificial Sequence
  Description of Artificial Sequence: Synthetic oligonucleotide
  Target: SCNA; (+) strand; PAM type: YTN; PAM sequence: TTT
taagctgaagctgaactgtc

SEQ ID NO: 70276 - DNA, 20 bp, Artificial Sequence
  Description of Artificial Sequence: Synthetic oligonucleotide
  Target: SCNA; (+) strand; PAM type: YTN; PAM sequence: TTT
aagctgaagctgaactgtct

SEQ ID NO: 70277 - DNA, 20 bp, Artificial Sequence
  Description of Artificial Sequence: Synthetic oligonucleotide
  Target: SCNA; (+) strand; PAM type: YTN; PAM sequence: TTA
agctgaagctgaactgtctt

SEQ ID NO: 70278 - DNA, 20 bp, Artificial Sequence
  Description of Artificial Sequence: Synthetic oligonucleotide
  Target: SCNA; (+) strand; PAM type: YTN; PAM sequence: CTG
aagctgaactgtcttgtcct

SEQ ID NO: 70279 - DNA, 20 bp, Artificial Sequence
  Description of Artificial Sequence: Synthetic oligonucleotide
  Target: SCNA; (+) strand; PAM type: YTN; PAM sequence: CTG
aactgtcttgtcctaaaaac

SEQ ID NO: 70280 - DNA, 20 bp, Artificial Sequence
  Description of Artificial Sequence: Synthetic oligonucleotide
  Target: SCNA; (+) strand; PAM type: YTN; PAM sequence: CTG
tcttgtcctaaaaacatatg

SEQ ID NO: 70281 - DNA, 20 bp, Artificial Sequence
  Description of Artificial Sequence: Synthetic oligonucleotide
  Target: SCNA; (+) strand; PAM type: YTN; PAM sequence: CTT
gtcctaaaaacatatgccca

SEQ ID NO: 70282 - DNA, 20 bp, Artificial Sequence
  Description of Artificial Sequence: Synthetic oligonucleotide
  Target: SCNA; (+) strand; PAM type: YTN; PAM sequence: TTG
tcctaaaaacatatgcccag

SEQ ID NO: 70283 - DNA, 20 bp, Artificial Sequence
  Description of Artificial Sequence: Synthetic oligonucleotide
  Target: SCNA; (+) strand; PAM type: YTN; PAM sequence: CTA
aaaacatatgcccagactct

SEQ ID NO: 70284 - DNA, 20 bp, Artificial Sequence
  Description of Artificial Sequence: Synthetic oligonucleotide
  Target: SCNA; (+) strand; PAM type: YTN; PAM sequence: CTC
tagaaaagctctcttagaca

SEQ ID NO: 70285 - DNA, 20 bp, Artificial Sequence
  Description of Artificial Sequence: Synthetic oligonucleotide
  Target: SCNA; (+) strand; PAM type: YTN; PAM sequence: CTA
gaaaagctctcttagacaga

SEQ ID NO: 70286 - DNA, 20 bp, Artificial Sequence
  Description of Artificial Sequence: Synthetic oligonucleotide
  Target: SCNA; (+) strand; PAM type: YTN; PAM sequence: CTC
tcttagacagactgctaatt

SEQ ID NO: 70287 - DNA, 20 bp, Artificial Sequence
  Description of Artificial Sequence: Synthetic oligonucleotide
  Target: SCNA; (+) strand; PAM type: YTN; PAM sequence: CTC
ttagacagactgctaatttc

SEQ ID NO: 70288 - DNA, 20 bp, Artificial Sequence
  Description of Artificial Sequence: Synthetic oligonucleotide
  Target: SCNA; (+) strand; PAM type: YTN; PAM sequence: CTT
agacagactgctaatttctc

SEQ ID NO: 70289 - DNA, 20 bp, Artificial Sequence
  Description of Artificial Sequence: Synthetic oligonucleotide
  Target: SCNA; (+) strand; PAM type: YTN; PAM sequence: TTA
gacagactgctaatttctcc

SEQ ID NO: 70290 - DNA, 20 bp, Artificial Sequence
  Description of Artificial Sequence: Synthetic oligonucleotide
  Target: SCNA; (+) strand; PAM type: YTN; PAM sequence: CTG
ctaatttctccatttctgtc

SEQ ID NO: 70291 - DNA, 20 bp, Artificial Sequence
  Description of Artificial Sequence: Synthetic oligonucleotide
  Target: SCNA; (+) strand; PAM type: YTN; PAM sequence: CTA
atttctccatttctgtcact

SEQ ID NO: 70292 - DNA, 20 bp, Artificial Sequence
  Description of Artificial Sequence: Synthetic oligonucleotide
  Target: SCNA; (+) strand; PAM type: YTN; PAM sequence: TTT
ctccatttctgtcacttaag

SEQ ID NO: 70293 - DNA, 20 bp, Artificial Sequence
  Description of Artificial Sequence: Synthetic oligonucleotide
  Target: SCNA; (+) strand; PAM type: YTN; PAM sequence: TTC
tccatttctgtcacttaaga

SEQ ID NO: 70294 - DNA, 20 bp, Artificial Sequence
  Description of Artificial Sequence: Synthetic oligonucleotide
  Target: SCNA; (+) strand; PAM type: YTN; PAM sequence: CTC
catttctgtcacttaagagg

SEQ ID NO: 70295 - DNA, 20 bp, Artificial Sequence
  Description of Artificial Sequence: Synthetic oligonucleotide
  Target: SCNA; (+) strand; PAM type: YTN; PAM sequence: TTT
ctgtcacttaagaggatttt

SEQ ID NO: 70296 - DNA, 20 bp, Artificial Sequence
  Description of Artificial Sequence: Synthetic oligonucleotide
  Target: SCNA; (+) strand; PAM type: YTN; PAM sequence: TTC
tgtcacttaagaggatttta

SEQ ID NO: 70297 - DNA, 20 bp, Artificial Sequence
  Description of Artificial Sequence: Synthetic oligonucleotide
  Target: SCNA; (+) strand; PAM type: YTN; PAM sequence: CTG
tcacttaagaggattttagg

SEQ ID NO: 70298 - DNA, 20 bp, Artificial Sequence
  Description of Artificial Sequence: Synthetic oligonucleotide
  Target: SCNA; (+) strand; PAM type: YTN; PAM sequence: CTT
aagaggattttagggacata

SEQ ID NO: 70299 - DNA, 20 bp, Artificial Sequence
  Description of Artificial Sequence: Synthetic oligonucleotide
  Target: SCNA; (+) strand; PAM type: YTN; PAM sequence: TTA
agaggattttagggacatat

SEQ ID NO: 70300 - DNA, 20 bp, Artificial Sequence
  Description of Artificial Sequence: Synthetic oligonucleotide
  Target: SCNA; (+) strand; PAM type: YTN; PAM sequence: TTT
tagggacatataactttgag

SEQ ID NO: 70301 - DNA, 20 bp, Artificial Sequence
  Description of Artificial Sequence: Synthetic oligonucleotide
  Target: SCNA; (+) strand; PAM type: YTN; PAM sequence: TTT
agggacatataactttgaga

SEQ ID NO: 70302 - DNA, 20 bp, Artificial Sequence
  Description of Artificial Sequence: Synthetic oligonucleotide
  Target: SCNA; (+) strand; PAM type: YTN; PAM sequence: TTA
gggacatataactttgagaa

SEQ ID NO: 70303 - DNA, 20 bp, Artificial Sequence
  Description of Artificial Sequence: Synthetic oligonucleotide
  Target: SCNA; (+) strand; PAM type: YTN; PAM sequence: CTT
tgagaattccattctgcagc

SEQ ID NO: 70304 - DNA, 20 bp, Artificial Sequence
  Description of Artificial Sequence: Synthetic oligonucleotide
  Target: SCNA; (+) strand; PAM type: YTN; PAM sequence: TTT
gagaattccattctgcagct

SEQ ID NO: 70305 - DNA, 20 bp, Artificial Sequence
  Description of Artificial Sequence: Synthetic oligonucleotide
  Target: SCNA; (+) strand; PAM type: YTN; PAM sequence: TTG
agaattccattctgcagctt

SEQ ID NO: 70306 - DNA, 20 bp, Artificial Sequence
  Description of Artificial Sequence: Synthetic oligonucleotide
  Target: SCNA; (+) strand; PAM type: YTN; PAM sequence: TTC
cattctgcagctttcagagg

SEQ ID NO: 70307 - DNA, 20 bp, Artificial Sequence
  Description of Artificial Sequence: Synthetic oligonucleotide
  Target: SCNA; (+) strand; PAM type: YTN; PAM sequence: TTC
tgcagctttcagaggtaata

SEQ ID NO: 70308 - DNA, 20 bp, Artificial Sequence
  Description of Artificial Sequence: Synthetic oligonucleotide
  Target: SCNA; (+) strand; PAM type: YTN; PAM sequence: CTG
cagctttcagaggtaataca

SEQ ID NO: 70309 - DNA, 20 bp, Artificial Sequence
  Description of Artificial Sequence: Synthetic oligonucleotide
  Target: SCNA; (+) strand; PAM type: YTN; PAM sequence: CTT
tcagaggtaatacaatccaa

SEQ ID NO: 70310 - DNA, 20 bp, Artificial Sequence
  Description of Artificial Sequence: Synthetic oligonucleotide
  Target: SCNA; (+) strand; PAM type: YTN; PAM sequence: TTT
cagaggtaatacaatccaat

SEQ ID NO: 70311 - DNA, 20 bp, Artificial Sequence
  Description of Artificial Sequence: Synthetic oligonucleotide
  Target: SCNA; (+) strand; PAM type: YTN; PAM sequence: TTC
agaggtaatacaatccaata

SEQ ID NO: 70312 - DNA, 20 bp, Artificial Sequence
  Description of Artificial Sequence: Synthetic oligonucleotide
  Target: SCNA; (+) strand; PAM type: YTN; PAM sequence: CTC
atagtgggcttatggtgtac

SEQ ID NO: 70313 - DNA, 20 bp, Artificial Sequence
  Description of Artificial Sequence: Synthetic oligonucleotide
  Target: SCNA; (+) strand; PAM type: YTN; PAM sequence: CTT
atggtgtacccggcactttt

SEQ ID NO: 70314 - DNA, 20 bp, Artificial Sequence
  Description of Artificial Sequence: Synthetic oligonucleotide
  Target: SCNA; (+) strand; PAM type: YTN; PAM sequence: TTA
tggtgtacccggcacttttc

SEQ ID NO: 70315 - DNA, 20 bp, Artificial Sequence
  Description of Artificial Sequence: Synthetic oligonucleotide
  Target: SCNA; (+) strand; PAM type: YTN; PAM sequence: CTT
ttccaaacattctacttgtt

SEQ ID NO: 70316 - DNA, 20 bp, Artificial Sequence
  Description of Artificial Sequence: Synthetic oligonucleotide
  Target: SCNA; (+) strand; PAM type: YTN; PAM sequence: TTT
tccaaacattctacttgtta

SEQ ID NO: 70317 - DNA, 20 bp, Artificial Sequence
  Description of Artificial Sequence: Synthetic oligonucleotide
  Target: SCNA; (+) strand; PAM type: YTN; PAM sequence: TTT
ccaaacattctacttgttat

SEQ ID NO: 70318 - DNA, 20 bp, Artificial Sequence
  Description of Artificial Sequence: Synthetic oligonucleotide
  Target: SCNA; (+) strand; PAM type: YTN; PAM sequence: TTC
caaacattctacttgttata

SEQ ID NO: 70319 - DNA, 20 bp, Artificial Sequence
  Description of Artificial Sequence: Synthetic oligonucleotide
  Target: SCNA; (+) strand; PAM type: YTN; PAM sequence: TTC
tacttgttatagcttcttta

SEQ ID NO: 70320 - DNA, 20 bp, Artificial Sequence
  Description of Artificial Sequence: Synthetic oligonucleotide
  Target: SCNA; (+) strand; PAM type: YTN; PAM sequence: CTA
cttgttatagcttctttaat

SEQ ID NO: 70321 - DNA, 20 bp, Artificial Sequence
  Description of Artificial Sequence: Synthetic oligonucleotide
  Target: SCNA; (+) strand; PAM type: YTN; PAM sequence: CTT
gttatagcttctttaattga

SEQ ID NO: 70322 - DNA, 20 bp, Artificial Sequence
  Description of Artificial Sequence: Synthetic oligonucleotide
  Target: SCNA; (+) strand; PAM type: YTN; PAM sequence: TTG
ttatagcttctttaattgag

SEQ ID NO: 70323 - DNA, 20 bp, Artificial Sequence
  Description of Artificial Sequence: Synthetic oligonucleotide
  Target: SCNA; (+) strand; PAM type: YTN; PAM sequence: TTA
tagcttctttaattgaggta

SEQ ID NO: 70324 - DNA, 20 bp, Artificial Sequence
  Description of Artificial Sequence: Synthetic oligonucleotide
  Target: SCNA; (+) strand; PAM type: YTN; PAM sequence: CTT
ctttaattgaggtacgtatt

SEQ ID NO: 70325 - DNA, 20 bp, Artificial Sequence
  Description of Artificial Sequence: Synthetic oligonucleotide
  Target: SCNA; (+) strand; PAM type: YTN; PAM sequence: TTC
tttaattgaggtacgtattc

SEQ ID NO: 70326 - DNA, 20 bp, Artificial Sequence
  Description of Artificial Sequence: Synthetic oligonucleotide
  Target: SCNA; (+) strand; PAM type: YTN; PAM sequence: CTT
taattgaggtacgtattctt

SEQ ID NO: 70327 - DNA, 20 bp, Artificial Sequence
  Description of Artificial Sequence: Synthetic oligonucleotide
  Target: SCNA; (+) strand; PAM type: YTN; PAM sequence: TTT
aattgaggtacgtattctta

SEQ ID NO: 70328 - DNA, 20 bp, Artificial Sequence
  Description of Artificial Sequence: Synthetic oligonucleotide
  Target: SCNA; (+) strand; PAM type: YTN; PAM sequence: TTA
attgaggtacgtattcttat

SEQ ID NO: 70329 - DNA, 20 bp, Artificial Sequence
  Description of Artificial Sequence: Synthetic oligonucleotide
  Target: SCNA; (+) strand; PAM type: YTN; PAM sequence: TTG
aggtacgtattcttatcatt

SEQ ID NO: 70330 - DNA, 20 bp, Artificial Sequence
  Description of Artificial Sequence: Synthetic oligonucleotide
  Target: SCNA; (+) strand; PAM type: YTN; PAM sequence: TTC
ttatcattctccatttggga

SEQ ID NO: 70331 - DNA, 20 bp, Artificial Sequence
  Description of Artificial Sequence: Synthetic oligonucleotide
  Target: SCNA; (+) strand; PAM type: YTN; PAM sequence: CTT
atcattctccatttgggaga

SEQ ID NO: 70332 - DNA, 20 bp, Artificial Sequence
  Description of Artificial Sequence: Synthetic oligonucleotide
  Target: SCNA; (+) strand; PAM type: YTN; PAM sequence: TTA
tcattctccatttgggagat

SEQ ID NO: 70333 - DNA, 20 bp, Artificial Sequence
  Description of Artificial Sequence: Synthetic oligonucleotide
  Target: SCNA; (+) strand; PAM type: YTN; PAM sequence: TTC
tccatttgggagatttgaga

SEQ ID NO: 70334 - DNA, 20 bp, Artificial Sequence
  Description of Artificial Sequence: Synthetic oligonucleotide
  Target: SCNA; (+) strand; PAM type: YTN; PAM sequence: CTC
catttgggagatttgagaga

SEQ ID NO: 70335 - DNA, 20 bp, Artificial Sequence
  Description of Artificial Sequence: Synthetic oligonucleotide
  Target: SCNA; (+) strand; PAM type: YTN; PAM sequence: TTT
gggagatttgagagagaggc

SEQ ID NO: 70336 - DNA, 20 bp, Artificial Sequence
  Description of Artificial Sequence: Synthetic oligonucleotide
  Target: SCNA; (+) strand; PAM type: YTN; PAM sequence: TTG
ggagatttgagagagaggca

SEQ ID NO: 70337 - DNA, 20 bp, Artificial Sequence
  Description of Artificial Sequence: Synthetic oligonucleotide
  Target: SCNA; (+) strand; PAM type: YTN; PAM sequence: TTT
gagagagaggcaaagtatgt

SEQ ID NO: 70338 - DNA, 20 bp, Artificial Sequence
  Description of Artificial Sequence: Synthetic oligonucleotide
  Target: SCNA; (+) strand; PAM type: YTN; PAM sequence: TTG
agagagaggcaaagtatgtg

SEQ ID NO: 70339 - DNA, 20 bp, Artificial Sequence
  Description of Artificial Sequence: Synthetic oligonucleotide
  Target: SCNA; (+) strand; PAM type: YTN; PAM sequence: CTT
aagatgacacagttggtaag

SEQ ID NO: 70340 - DNA, 20 bp, Artificial Sequence
  Description of Artificial Sequence: Synthetic oligonucleotide
  Target: SCNA; (+) strand; PAM type: YTN; PAM sequence: TTA
agatgacacagttggtaagt

SEQ ID NO: 70341 - DNA, 20 bp, Artificial Sequence
  Description of Artificial Sequence: Synthetic oligonucleotide
  Target: SCNA; (+) strand; PAM type: YTN; PAM sequence: TTG
gtaagtaggaaagcagaact

SEQ ID NO: 70342 - DNA, 20 bp, Artificial Sequence
  Description of Artificial Sequence: Synthetic oligonucleotide
  Target: SCNA; (+) strand; PAM type: YTN; PAM sequence: CTT
taacatcagcagtaaaaccc

SEQ ID NO: 70343 - DNA, 20 bp, Artificial Sequence
  Description of Artificial Sequence: Synthetic oligonucleotide
  Target: SCNA; (+) strand; PAM type: YTN; PAM sequence: TTT
aacatcagcagtaaaaccct

SEQ ID NO: 70344 - DNA, 20 bp, Artificial Sequence
  Description of Artificial Sequence: Synthetic oligonucleotide
  Target: SCNA; (+) strand; PAM type: YTN; PAM sequence: TTA
acatcagcagtaaaaccctg

SEQ ID NO: 70345 - DNA, 20 bp, Artificial Sequence
  Description of Artificial Sequence: Synthetic oligonucleotide
  Target: SCNA; (+) strand; PAM type: YTN; PAM sequence: CTG
agactattgttttaatgtgt

SEQ ID NO: 70346 - DNA, 20 bp, Artificial Sequence
  Description of Artificial Sequence: Synthetic oligonucleotide
  Target: SCNA; (+) strand; PAM type: YTN; PAM sequence: CTA
ttgttttaatgtgtttaata

SEQ ID NO: 70347 - DNA, 20 bp, Artificial Sequence
  Description of Artificial Sequence: Synthetic oligonucleotide
  Target: SCNA; (+) strand; PAM type: YTN; PAM sequence: TTG
ttttaatgtgtttaataaat

SEQ ID NO: 70348 - DNA, 20 bp, Artificial Sequence
  Description of Artificial Sequence: Synthetic oligonucleotide
  Target: SCNA; (+) strand; PAM type: YTN; PAM sequence: TTT
taatgtgtttaataaatgcc

SEQ ID NO: 70349 - DNA, 20 bp, Artificial Sequence
  Description of Artificial Sequence: Synthetic oligonucleotide
  Target: SCNA; (+) strand; PAM type: YTN; PAM sequence: TTT
aatgtgtttaataaatgccc

SEQ ID NO: 70350 - DNA, 20 bp, Artificial Sequence
  Description of Artificial Sequence: Synthetic oligonucleotide
  Target: SCNA; (+) strand; PAM type: YTN; PAM sequence: TTA
atgtgtttaataaatgcccc

SEQ ID NO: 70351 - DNA, 20 bp, Artificial Sequence
  Description of Artificial Sequence: Synthetic oligonucleotide
  Target: SCNA; (+) strand; PAM type: YTN; PAM sequence: TTT
aataaatgccccactaagaa

SEQ ID NO: 70352 - DNA, 20 bp, Artificial Sequence
  Description of Artificial Sequence: Synthetic oligonucleotide
  Target: SCNA; (+) strand; PAM type: YTN; PAM sequence: TTA
ataaatgccccactaagaaa

SEQ ID NO: 70353 - DNA, 20 bp, Artificial Sequence
  Description of Artificial Sequence: Synthetic oligonucleotide
  Target: SCNA; (+) strand; PAM type: YTN; PAM sequence: CTA
agaaaccagagcaaattaaa

SEQ ID NO: 70354 - DNA, 20 bp, Artificial Sequence
  Description of Artificial Sequence: Synthetic oligonucleotide
  Target: SCNA; (+) strand; PAM type: YTN; PAM sequence: TTA
aaagtatgctgtgttctatt

SEQ ID NO: 70355 - DNA, 20 bp, Artificial Sequence
  Description of Artificial Sequence: Synthetic oligonucleotide
  Target: SCNA; (+) strand; PAM type: YTN; PAM sequence: CTG
tgttctattaatttgataca

SEQ ID NO: 70356 - DNA, 20 bp, Artificial Sequence
  Description of Artificial Sequence: Synthetic oligonucleotide
  Target: SCNA; (+) strand; PAM type: YTN; PAM sequence: TTC
tattaatttgatacaggcag

SEQ ID NO: 70357 - DNA, 20 bp, Artificial Sequence
  Description of Artificial Sequence: Synthetic oligonucleotide
  Target: SCNA; (+) strand; PAM type: YTN; PAM sequence: CTA
ttaatttgatacaggcagaa

SEQ ID NO: 70358 - DNA, 20 bp, Artificial Sequence
  Description of Artificial Sequence: Synthetic oligonucleotide
  Target: SCNA; (+) strand; PAM type: YTN; PAM sequence: TTA
atttgatacaggcagaagaa

SEQ ID NO: 70359 - DNA, 20 bp, Artificial Sequence
  Description of Artificial Sequence: Synthetic oligonucleotide
  Target: SCNA; (+) strand; PAM type: YTN; PAM sequence: TTT
gatacaggcagaagaaatct

SEQ ID NO: 70360 - DNA, 20 bp, Artificial Sequence
  Description of Artificial Sequence: Synthetic oligonucleotide
  Target: SCNA; (+) strand; PAM type: YTN; PAM sequence: TTG
atacaggcagaagaaatcta

SEQ ID NO: 70361 - DNA, 20 bp, Artificial Sequence
  Description of Artificial Sequence: Synthetic oligonucleotide
  Target: SCNA; (+) strand; PAM type: YTN; PAM sequence: CTA
aaaacagcaaagaatgatat

SEQ ID NO: 70362 - DNA, 20 bp, Artificial Sequence
  Description of Artificial Sequence: Synthetic oligonucleotide
  Target: SCNA; (+) strand; PAM type: YTN; PAM sequence: TTT
aagaagaactctattttaag

SEQ ID NO: 70363 - DNA, 20 bp, Artificial Sequence
  Description of Artificial Sequence: Synthetic oligonucleotide
  Target: SCNA; (+) strand; PAM type: YTN; PAM sequence: TTA
agaagaactctattttaagt

SEQ ID NO: 70364 - DNA, 20 bp, Artificial Sequence
  Description of Artificial Sequence: Synthetic oligonucleotide
  Target: SCNA; (+) strand; PAM type: YTN; PAM sequence: CTC
tattttaagtagttatagga

SEQ ID NO: 70365 - DNA, 20 bp, Artificial Sequence
  Description of Artificial Sequence: Synthetic oligonucleotide
  Target: SCNA; (+) strand; PAM type: YTN; PAM sequence: CTA
ttttaagtagttataggaca

SEQ ID NO: 70366 - DNA, 20 bp, Artificial Sequence
  Description of Artificial Sequence: Synthetic oligonucleotide
  Target: SCNA; (+) strand; PAM type: YTN; PAM sequence: TTT
taagtagttataggacatat

SEQ ID NO: 70367 - DNA, 20 bp, Artificial Sequence
  Description of Artificial Sequence: Synthetic oligonucleotide
  Target: SCNA; (+) strand; PAM type: YTN; PAM sequence: TTT
aagtagttataggacatatg

SEQ ID NO: 70368 - DNA, 20 bp, Artificial Sequence
  Description of Artificial Sequence: Synthetic oligonucleotide
  Target: SCNA; (+) strand; PAM type: YTN; PAM sequence: TTA
agtagttataggacatatgc

SEQ ID NO: 70369 - DNA, 20 bp, Artificial Sequence
  Description of Artificial Sequence: Synthetic oligonucleotide
  Target: SCNA; (+) strand; PAM type: YTN; PAM sequence: TTA
taggacatatgcttaaactg

SEQ ID NO: 70370 - DNA, 20 bp, Artificial Sequence
  Description of Artificial Sequence: Synthetic oligonucleotide
  Target: SCNA; (+) strand; PAM type: YTN; PAM sequence: CTT
aaactgagtgaactttttat

SEQ ID NO: 70371 - DNA, 20 bp, Artificial Sequence
  Description of Artificial Sequence: Synthetic oligonucleotide
  Target: SCNA; (+) strand; PAM type: YTN; PAM sequence: TTA
aactgagtgaactttttatg

SEQ ID NO: 70372 - DNA, 20 bp, Artificial Sequence
  Description of Artificial Sequence: Synthetic oligonucleotide
  Target: SCNA; (+) strand; PAM type: YTN; PAM sequence: CTG
agtgaactttttatgaactt

SEQ ID NO: 70373 - DNA, 20 bp, Artificial Sequence
  Description of Artificial Sequence: Synthetic oligonucleotide
  Target: SCNA; (+) strand; PAM type: YTN; PAM sequence: CTT
tttatgaacttttcatcaga

SEQ ID NO: 70374 - DNA, 20 bp, Artificial Sequence
  Description of Artificial Sequence: Synthetic oligonucleotide
  Target: SCNA; (+) strand; PAM type: YTN; PAM sequence: TTT
ttatgaacttttcatcagag

SEQ ID NO: 70375 - DNA, 20 bp, Artificial Sequence
  Description of Artificial Sequence: Synthetic oligonucleotide
  Target: SCNA; (+) strand; PAM type: YTN; PAM sequence: TTT
tatgaacttttcatcagaga

SEQ ID NO: 70376 - DNA, 20 bp, Artificial Sequence
  Description of Artificial Sequence: Synthetic oligonucleotide
  Target: SCNA; (+) strand; PAM type: YTN; PAM sequence: TTT
atgaacttttcatcagagat

SEQ ID NO: 70377 - DNA, 20 bp, Artificial Sequence
  Description of Artificial Sequence: Synthetic oligonucleotide
  Target: SCNA; (+) strand; PAM type: YTN; PAM sequence: TTA
tgaacttttcatcagagatt

SEQ ID NO: 70378 - DNA, 20 bp, Artificial Sequence
  Description of Artificial Sequence: Synthetic oligonucleotide
  Target: SCNA; (+) strand; PAM type: YTN; PAM sequence: CTT
ttcatcagagattttttttt

SEQ ID NO: 70379 - DNA, 20 bp, Artificial Sequence
  Description of Artificial Sequence: Synthetic oligonucleotide
  Target: SCNA; (+) strand; PAM type: YTN; PAM sequence: TTT
tcatcagagattttttttta

SEQ ID NO: 70380 - DNA, 20 bp, Artificial Sequence
  Description of Artificial Sequence: Synthetic oligonucleotide
  Target: SCNA; (+) strand; PAM type: YTN; PAM sequence: TTT
catcagagatttttttttaa

SEQ ID NO: 70381 - DNA, 20 bp, Artificial Sequence
  Description of Artificial Sequence: Synthetic oligonucleotide
  Target: SCNA; (+) strand; PAM type: YTN; PAM sequence: TTC
atcagagatttttttttaat

SEQ ID NO: 70382 - DNA, 20 bp, Artificial Sequence
  Description of Artificial Sequence: Synthetic oligonucleotide
  Target: SCNA; (+) strand; PAM type: YTN; PAM sequence: TTT
ttttttaattgttgtttttc

SEQ ID NO: 70383 - DNA, 20 bp, Artificial Sequence
  Description of Artificial Sequence: Synthetic oligonucleotide
  Target: SCNA; (+) strand; PAM type: YTN; PAM sequence: TTT
tttttaattgttgtttttct

SEQ ID NO: 70384 - DNA, 20 bp, Artificial Sequence
  Description of Artificial Sequence: Synthetic oligonucleotide
  Target: SCNA; (+) strand; PAM type: YTN; PAM sequence: TTT
ttttaattgttgtttttctc

SEQ ID NO: 70385 - DNA, 20 bp, Artificial Sequence
  Description of Artificial Sequence: Synthetic oligonucleotide
  Target: SCNA; (+) strand; PAM type: YTN; PAM sequence: TTT
tttaattgttgtttttctcc

SEQ ID NO: 70386 - DNA, 20 bp, Artificial Sequence
  Description of Artificial Sequence: Synthetic oligonucleotide
  Target: SCNA; (+) strand; PAM type: YTN; PAM sequence: TTT
ttaattgttgtttttctcct

SEQ ID NO: 70387 - DNA, 20 bp, Artificial Sequence
  Description of Artificial Sequence: Synthetic oligonucleotide
  Target: SCNA; (+) strand; PAM type: YTN; PAM sequence: TTT
taattgttgtttttctcctg

SEQ ID NO: 70388 - DNA, 20 bp, Artificial Sequence
  Description of Artificial Sequence: Synthetic oligonucleotide
  Target: SCNA; (+) strand; PAM type: YTN; PAM sequence: TTT
aattgttgtttttctcctgt

SEQ ID NO: 70389 - DNA, 20 bp, Artificial Sequence
  Description of Artificial Sequence: Synthetic oligonucleotide
  Target: SCNA; (+) strand; PAM type: YTN; PAM sequence: TTA
attgttgtttttctcctgtg

SEQ ID NO: 70390 - DNA, 20 bp, Artificial Sequence
  Description of Artificial Sequence: Synthetic oligonucleotide
  Target: SCNA; (+) strand; PAM type: YTN; PAM sequence: TTG
ttgtttttctcctgtgtctg

SEQ ID NO: 70391 - DNA, 20 bp, Artificial Sequence
  Description of Artificial Sequence: Synthetic oligonucleotide
  Target: SCNA; (+) strand; PAM type: YTN; PAM sequence: TTG
tttttctcctgtgtctgtga

SEQ ID NO: 70392 - DNA, 20 bp, Artificial Sequence
  Description of Artificial Sequence: Synthetic oligonucleotide
  Target: SCNA; (+) strand; PAM type: YTN; PAM sequence: TTT
ttctcctgtgtctgtgactg

SEQ ID NO: 70393 - DNA, 20 bp, Artificial Sequence
  Description of Artificial Sequence: Synthetic oligonucleotide
  Target: SCNA; (+) strand; PAM type: YTN; PAM sequence: TTT
tctcctgtgtctgtgactga

SEQ ID NO: 70394 - DNA, 20 bp, Artificial Sequence
  Description of Artificial Sequence: Synthetic oligonucleotide
  Target: SCNA; (+) strand; PAM type: YTN; PAM sequence: TTT
ctcctgtgtctgtgactgaa

SEQ ID NO: 70395 - DNA, 20 bp, Artificial Sequence
  Description of Artificial Sequence: Synthetic oligonucleotide
  Target: SCNA; (+) strand; PAM type: YTN; PAM sequence: TTC
tcctgtgtctgtgactgaat

SEQ ID NO: 70396 - DNA, 20 bp, Artificial Sequence
  Description of Artificial Sequence: Synthetic oligonucleotide
  Target: SCNA; (+) strand; PAM type: YTN; PAM sequence: CTC
ctgtgtctgtgactgaataa

SEQ ID NO: 70397 - DNA, 20 bp, Artificial Sequence
  Description of Artificial Sequence: Synthetic oligonucleotide
  Target: SCNA; (+) strand; PAM type: YTN; PAM sequence: CTG
tgtctgtgactgaataaatg

SEQ ID NO: 70398 - DNA, 20 bp, Artificial Sequence
  Description of Artificial Sequence: Synthetic oligonucleotide
  Target: SCNA; (+) strand; PAM type: YTN; PAM sequence: CTG
tgactgaataaatggcctct

SEQ ID NO: 70399 - DNA, 20 bp, Artificial Sequence
  Description of Artificial Sequence: Synthetic oligonucleotide
  Target: SCNA; (+) strand; PAM type: YTN; PAM sequence: CTG
aataaatggcctctgttcac

SEQ ID NO: 70400 - DNA, 20 bp, Artificial Sequence
  Description of Artificial Sequence: Synthetic oligonucleotide
  Target: SCNA; (+) strand; PAM type: YTN; PAM sequence: CTC
tgttcactggaatgcttcac

SEQ ID NO: 70401 - DNA, 20 bp, Artificial Sequence
  Description of Artificial Sequence: Synthetic oligonucleotide
  Target: SCNA; (+) strand; PAM type: YTN; PAM sequence: CTG
ttcactggaatgcttcacat

SEQ ID NO: 70402 - DNA, 20 bp, Artificial Sequence
  Description of Artificial Sequence: Synthetic oligonucleotide
  Target: SCNA; (+) strand; PAM type: YTN; PAM sequence: TTC
actggaatgcttcacatgct

SEQ ID NO: 70403 - DNA, 20 bp, Artificial Sequence
  Description of Artificial Sequence: Synthetic oligonucleotide
  Target: SCNA; (+) strand; PAM type: YTN; PAM sequence: CTG
gaatgcttcacatgcttcct

SEQ ID NO: 70404 - DNA, 20 bp, Artificial Sequence
  Description of Artificial Sequence: Synthetic oligonucleotide
  Target: SCNA; (+) strand; PAM type: YTN; PAM sequence: CTT
cacatgcttcctctctcagt

SEQ ID NO: 70405 - DNA, 20 bp, Artificial Sequence
  Description of Artificial Sequence: Synthetic oligonucleotide
  Target: SCNA; (+) strand; PAM type: YTN; PAM sequence: TTC
acatgcttcctctctcagtt

SEQ ID NO: 70406 - DNA, 20 bp, Artificial Sequence
  Description of Artificial Sequence: Synthetic oligonucleotide
  Target: SCNA; (+) strand; PAM type: YTN; PAM sequence: CTT
cctctctcagttgtaggtgt

SEQ ID NO: 70407 - DNA, 20 bp, Artificial Sequence
  Description of Artificial Sequence: Synthetic oligonucleotide
  Target: SCNA; (+) strand; PAM type: YTN; PAM sequence: TTC
ctctctcagttgtaggtgtg

SEQ ID NO: 70408 - DNA, 20 bp, Artificial Sequence
  Description of Artificial Sequence: Synthetic oligonucleotide
  Target: SCNA; (+) strand; PAM type: YTN; PAM sequence: CTC
tctcagttgtaggtgtgttt

SEQ ID NO: 70409 - DNA, 20 bp, Artificial Sequence
  Description of Artificial Sequence: Synthetic oligonucleotide
  Target: SCNA; (+) strand; PAM type: YTN; PAM sequence: CTC
tcagttgtaggtgtgtttat

SEQ ID NO: 70410 - DNA, 20 bp, Artificial Sequence
  Description of Artificial Sequence: Synthetic oligonucleotide
  Target: SCNA; (+) strand; PAM type: YTN; PAM sequence: CTC
agttgtaggtgtgtttattt

SEQ ID NO: 70411 - DNA, 20 bp, Artificial Sequence
  Description of Artificial Sequence: Synthetic oligonucleotide
  Target: SCNA; (+) strand; PAM type: YTN; PAM sequence: TTG
taggtgtgtttatttctatt

SEQ ID NO: 70412 - DNA, 20 bp, Artificial Sequence
  Description of Artificial Sequence: Synthetic oligonucleotide
  Target: SCNA; (+) strand; PAM type: YTN; PAM sequence: TTT
atttctattcagacaccaaa

SEQ ID NO: 70413 - DNA, 20 bp, Artificial Sequence
  Description of Artificial Sequence: Synthetic oligonucleotide
  Target: SCNA; (+) strand; PAM type: YTN; PAM sequence: TTA
tttctattcagacaccaaag

SEQ ID NO: 70414 - DNA, 20 bp, Artificial Sequence
  Description of Artificial Sequence: Synthetic oligonucleotide
  Target: SCNA; (+) strand; PAM type: YTN; PAM sequence: TTT
ctattcagacaccaaaggcc

SEQ ID NO: 70415 - DNA, 20 bp, Artificial Sequence
  Description of Artificial Sequence: Synthetic oligonucleotide
  Target: SCNA; (+) strand; PAM type: YTN; PAM sequence: TTC
tattcagacaccaaaggcct

SEQ ID NO: 70416 - DNA, 20 bp, Artificial Sequence
  Description of Artificial Sequence: Synthetic oligonucleotide
  Target: SCNA; (+) strand; PAM type: YTN; PAM sequence: CTA
ttcagacaccaaaggcctat

SEQ ID NO: 70417 - DNA, 20 bp, Artificial Sequence
  Description of Artificial Sequence: Synthetic oligonucleotide
  Target: SCNA; (+) strand; PAM type: YTN; PAM sequence: TTC
agacaccaaaggcctatggg

SEQ ID NO: 70418 - DNA, 20 bp, Artificial Sequence
  Description of Artificial Sequence: Synthetic oligonucleotide
  Target: SCNA; (+) strand; PAM type: YTN; PAM sequence: CTA
tgggtatctgcaaattaaca

SEQ ID NO: 70419 - DNA, 20 bp, Artificial Sequence
  Description of Artificial Sequence: Synthetic oligonucleotide
  Target: SCNA; (+) strand; PAM type: YTN; PAM sequence: CTG
caaattaacagtttcatttg

SEQ ID NO: 70420 - DNA, 20 bp, Artificial Sequence
  Description of Artificial Sequence: Synthetic oligonucleotide
  Target: SCNA; (+) strand; PAM type: YTN; PAM sequence: TTA
acagtttcatttgctattat

SEQ ID NO: 70421 - DNA, 20 bp, Artificial Sequence
  Description of Artificial Sequence: Synthetic oligonucleotide
  Target: SCNA; (+) strand; PAM type: YTN; PAM sequence: TTT
catttgctattatgttccat

SEQ ID NO: 70422 - DNA, 20 bp, Artificial Sequence
  Description of Artificial Sequence: Synthetic oligonucleotide
  Target: SCNA; (+) strand; PAM type: YTN; PAM sequence: TTC
atttgctattatgttccatc

SEQ ID NO: 70423 - DNA, 20 bp, Artificial Sequence
  Description of Artificial Sequence: Synthetic oligonucleotide
  Target: SCNA; (+) strand; PAM type: YTN; PAM sequence: TTT
gctattatgttccatcattg

SEQ ID NO: 70424 - DNA, 20 bp, Artificial Sequence
  Description of Artificial Sequence: Synthetic oligonucleotide
  Target: SCNA; (+) strand; PAM type: YTN; PAM sequence: TTG
ctattatgttccatcattgt

SEQ ID NO: 70425 - DNA, 20 bp, Artificial Sequence
  Description of Artificial Sequence: Synthetic oligonucleotide
  Target: SCNA; (+) strand; PAM type: YTN; PAM sequence: CTA
ttatgttccatcattgtgaa

SEQ ID NO: 70426 - DNA, 20 bp, Artificial Sequence
  Description of Artificial Sequence: Synthetic oligonucleotide
  Target: SCNA; (+) strand; PAM type: YTN; PAM sequence: TTA
tgttccatcattgtgaagca

SEQ ID NO: 70427 - DNA, 20 bp, Artificial Sequence
  Description of Artificial Sequence: Synthetic oligonucleotide
  Target: SCNA; (+) strand; PAM type: YTN; PAM sequence: TTC
catcattgtgaagcagcaca

SEQ ID NO: 70428 - DNA, 20 bp, Artificial Sequence
  Description of Artificial Sequence: Synthetic oligonucleotide
  Target: SCNA; (+) strand; PAM type: YTN; PAM sequence: TTG
tgaagcagcacaggaaatta

SEQ ID NO: 70429 - DNA, 20 bp, Artificial Sequence
  Description of Artificial Sequence: Synthetic oligonucleotide
  Target: SCNA; (+) strand; PAM type: YTN; PAM sequence: TTA
acatatctgtaaccacgccc

SEQ ID NO: 70430 - DNA, 20 bp, Artificial Sequence
  Description of Artificial Sequence: Synthetic oligonucleotide
  Target: SCNA; (+) strand; PAM type: YTN; PAM sequence: CTG
taaccacgcccttactatat

SEQ ID NO: 70431 - DNA, 20 bp, Artificial Sequence
  Description of Artificial Sequence: Synthetic oligonucleotide
  Target: SCNA; (+) strand; PAM type: YTN; PAM sequence: CTT
actatataatatgaaagtgt

SEQ ID NO: 70432 - DNA, 20 bp, Artificial Sequence
  Description of Artificial Sequence: Synthetic oligonucleotide
  Target: SCNA; (+) strand; PAM type: YTN; PAM sequence: TTA
ctatataatatgaaagtgta

SEQ ID NO: 70433 - DNA, 20 bp, Artificial Sequence
  Description of Artificial Sequence: Synthetic oligonucleotide
  Target: SCNA; (+) strand; PAM type: YTN; PAM sequence: CTA
tataatatgaaagtgtaaat

SEQ ID NO: 70434 - DNA, 20 bp, Artificial Sequence
  Description of Artificial Sequence: Synthetic oligonucleotide
  Target: SCNA; (+) strand; PAM type: YTN; PAM sequence: TTA
aaacatgccgtgttcattaa

SEQ ID NO: 70435 - DNA, 20 bp, Artificial Sequence
  Description of Artificial Sequence: Synthetic oligonucleotide
  Target: SCNA; (+) strand; PAM type: YTN; PAM sequence: TTC
attaaactgagataaaacca

SEQ ID NO: 70436 - DNA, 20 bp, Artificial Sequence
  Description of Artificial Sequence: Synthetic oligonucleotide
  Target: SCNA; (+) strand; PAM type: YTN; PAM sequence: TTA
aactgagataaaaccacatt

SEQ ID NO: 70437 - DNA, 20 bp, Artificial Sequence
  Description of Artificial Sequence: Synthetic oligonucleotide
  Target: SCNA; (+) strand; PAM type: YTN; PAM sequence: CTG
agataaaaccacattttgaa

SEQ ID NO: 70438 - DNA, 20 bp, Artificial Sequence
  Description of Artificial Sequence: Synthetic oligonucleotide
  Target: SCNA; (+) strand; PAM type: YTN; PAM sequence: TTT
tgaaaataaagtttagtaag

SEQ ID NO: 70439 - DNA, 20 bp, Artificial Sequence
  Description of Artificial Sequence: Synthetic oligonucleotide
  Target: SCNA; (+) strand; PAM type: YTN; PAM sequence: TTT
gaaaataaagtttagtaagt

SEQ ID NO: 70440 - DNA, 20 bp, Artificial Sequence
  Description of Artificial Sequence: Synthetic oligonucleotide
  Target: SCNA; (+) strand; PAM type: YTN; PAM sequence: TTG
aaaataaagtttagtaagtg

SEQ ID NO: 70441 - DNA, 20 bp, Artificial Sequence
  Description of Artificial Sequence: Synthetic oligonucleotide
  Target: SCNA; (+) strand; PAM type: YTN; PAM sequence: TTT
agtaagtggatacttagtat

SEQ ID NO: 70442 - DNA, 20 bp, Artificial Sequence
  Description of Artificial Sequence: Synthetic oligonucleotide
  Target: SCNA; (+) strand; PAM type: YTN; PAM sequence: TTA
gtaagtggatacttagtatc

SEQ ID NO: 70443 - DNA, 20 bp, Artificial Sequence
  Description of Artificial Sequence: Synthetic oligonucleotide
  Target: SCNA; (+) strand; PAM type: YTN; PAM sequence: CTT
agtatcacattggcgatact

SEQ ID NO: 70444 - DNA, 20 bp, Artificial Sequence
  Description of Artificial Sequence: Synthetic oligonucleotide
  Target: SCNA; (+) strand; PAM type: YTN; PAM sequence: TTA
gtatcacattggcgatacta

SEQ ID NO: 70445 - DNA, 20 bp, Artificial Sequence
  Description of Artificial Sequence: Synthetic oligonucleotide
  Target: SCNA; (+) strand; PAM type: YTN; PAM sequence: TTG
gcgatactaagcttatgact

SEQ ID NO: 70446 - DNA, 20 bp, Artificial Sequence
  Description of Artificial Sequence: Synthetic oligonucleotide
  Target: SCNA; (+) strand; PAM type: YTN; PAM sequence: CTA
agcttatgacttgcttttaa

SEQ ID NO: 70447 - DNA, 20 bp, Artificial Sequence
  Description of Artificial Sequence: Synthetic oligonucleotide
  Target: SCNA; (+) strand; PAM type: YTN; PAM sequence: CTT
atgacttgcttttaatattt

SEQ ID NO: 70448 - DNA, 20 bp, Artificial Sequence
  Description of Artificial Sequence: Synthetic oligonucleotide
  Target: SCNA; (+) strand; PAM type: YTN; PAM sequence: TTA
tgacttgcttttaatatttg

SEQ ID NO: 70449 - DNA, 20 bp, Artificial Sequence
  Description of Artificial Sequence: Synthetic oligonucleotide
  Target: SCNA; (+) strand; PAM type: YTN; PAM sequence: CTT
gcttttaatatttggattgc

SEQ ID NO: 70450 - DNA, 20 bp, Artificial Sequence
  Description of Artificial Sequence: Synthetic oligonucleotide
  Target: SCNA; (+) strand; PAM type: YTN; PAM sequence: TTG
cttttaatatttggattgca

SEQ ID NO: 70451 - DNA, 20 bp, Artificial Sequence
  Description of Artificial Sequence: Synthetic oligonucleotide
  Target: SCNA; (+) strand; PAM type: YTN; PAM sequence: CTT
ttaatatttggattgcaaat

SEQ ID NO: 70452 - DNA, 20 bp, Artificial Sequence
  Description of Artificial Sequence: Synthetic oligonucleotide
  Target: SCNA; (+) strand; PAM type: YTN; PAM sequence: TTT
taatatttggattgcaaata

SEQ ID NO: 70453 - DNA, 20 bp, Artificial Sequence
  Description of Artificial Sequence: Synthetic oligonucleotide
  Target: SCNA; (+) strand; PAM type: YTN; PAM sequence: TTT
aatatttggattgcaaataa

SEQ ID NO: 70454 - DNA, 20 bp, Artificial Sequence
  Description of Artificial Sequence: Synthetic oligonucleotide
  Target: SCNA; (+) strand; PAM type: YTN; PAM sequence: TTA
atatttggattgcaaataaa

SEQ ID NO: 70455 - DNA, 20 bp, Artificial Sequence
  Description of Artificial Sequence: Synthetic oligonucleotide
  Target: SCNA; (+) strand; PAM type: YTN; PAM sequence: TTT
ggattgcaaataaatttgga

SEQ ID NO: 70456 - DNA, 20 bp, Artificial Sequence
  Description of Artificial Sequence: Synthetic oligonucleotide
  Target: SCNA; (+) strand; PAM type: YTN; PAM sequence: TTG
gattgcaaataaatttggaa

SEQ ID NO: 70457 - DNA, 20 bp, Artificial Sequence
  Description of Artificial Sequence: Synthetic oligonucleotide
  Target: SCNA; (+) strand; PAM type: YTN; PAM sequence: TTG
caaataaatttggaagctaa

SEQ ID NO: 70458 - DNA, 20 bp, Artificial Sequence
  Description of Artificial Sequence: Synthetic oligonucleotide
  Target: SCNA; (+) strand; PAM type: YTN; PAM sequence: TTT
ggaagctaatgtatggagta

SEQ ID NO: 70459 - DNA, 20 bp, Artificial Sequence
  Description of Artificial Sequence: Synthetic oligonucleotide
  Target: SCNA; (+) strand; PAM type: YTN; PAM sequence: TTG
gaagctaatgtatggagtac

SEQ ID NO: 70460 - DNA, 20 bp, Artificial Sequence
  Description of Artificial Sequence: Synthetic oligonucleotide
  Target: SCNA; (+) strand; PAM type: YTN; PAM sequence: CTA
atgtatggagtacaataata

SEQ ID NO: 70461 - DNA, 20 bp, Artificial Sequence
  Description of Artificial Sequence: Synthetic oligonucleotide
  Target: SCNA; (+) strand; PAM type: YTN; PAM sequence: CTT
tgatattagacatggctatg

SEQ ID NO: 70462 - DNA, 20 bp, Artificial Sequence
  Description of Artificial Sequence: Synthetic oligonucleotide
  Target: SCNA; (+) strand; PAM type: YTN; PAM sequence: TTT
gatattagacatggctatgc

SEQ ID NO: 70463 - DNA, 20 bp, Artificial Sequence
  Description of Artificial Sequence: Synthetic oligonucleotide
  Target: SCNA; (+) strand; PAM type: YTN; PAM sequence: TTG
atattagacatggctatgca

SEQ ID NO: 70464 - DNA, 20 bp, Artificial Sequence
  Description of Artificial Sequence: Synthetic oligonucleotide
  Target: SCNA; (+) strand; PAM type: YTN; PAM sequence: TTA
gacatggctatgcatccgaa

SEQ ID NO: 70465 - DNA, 20 bp, Artificial Sequence
  Description of Artificial Sequence: Synthetic oligonucleotide
  Target: SCNA; (+) strand; PAM type: YTN; PAM sequence: CTA
tgcatccgaatatcttatta

SEQ ID NO: 70466 - DNA, 20 bp, Artificial Sequence
  Description of Artificial Sequence: Synthetic oligonucleotide
  Target: SCNA; (+) strand; PAM type: YTN; PAM sequence: CTT
attattggatattcgattca

SEQ ID NO: 70467 - DNA, 20 bp, Artificial Sequence
  Description of Artificial Sequence: Synthetic oligonucleotide
  Target: SCNA; (+) strand; PAM type: YTN; PAM sequence: TTA
ttattggatattcgattcaa

SEQ ID NO: 70468 - DNA, 20 bp, Artificial Sequence
  Description of Artificial Sequence: Synthetic oligonucleotide
  Target: SCNA; (+) strand; PAM type: YTN; PAM sequence: TTA
ttggatattcgattcaagaa

SEQ ID NO: 70469 - DNA, 20 bp, Artificial Sequence
  Description of Artificial Sequence: Synthetic oligonucleotide
  Target: SCNA; (+) strand; PAM type: YTN; PAM sequence: TTG
gatattcgattcaagaacat

SEQ ID NO: 70470 - DNA, 20 bp, Artificial Sequence
  Description of Artificial Sequence: Synthetic oligonucleotide
  Target: SCNA; (+) strand; PAM type: YTN; PAM sequence: TTC
gattcaagaacatatcagaa

SEQ ID NO: 70471 - DNA, 20 bp, Artificial Sequence
  Description of Artificial Sequence: Synthetic oligonucleotide
  Target: SCNA; (+) strand; PAM type: YTN; PAM sequence: TTC
aagaacatatcagaatagta

SEQ ID NO: 70472 - DNA, 20 bp, Artificial Sequence
  Description of Artificial Sequence: Synthetic oligonucleotide
  Target: SCNA; (+) strand; PAM type: YTN; PAM sequence: TTA
tgttgtatttgattcagtgg

SEQ ID NO: 70473 - DNA, 20 bp, Artificial Sequence
  Description of Artificial Sequence: Synthetic oligonucleotide
  Target: SCNA; (+) strand; PAM type: YTN; PAM sequence: TTG
tatttgattcagtggctgag

SEQ ID NO: 70474 - DNA, 20 bp, Artificial Sequence
  Description of Artificial Sequence: Synthetic oligonucleotide
  Target: SCNA; (+) strand; PAM type: YTN; PAM sequence: TTT
gattcagtggctgagattga

SEQ ID NO: 70475 - DNA, 20 bp, Artificial Sequence
  Description of Artificial Sequence: Synthetic oligonucleotide
  Target: SCNA; (+) strand; PAM type: YTN; PAM sequence: TTG
attcagtggctgagattgaa

SEQ ID NO: 70476 - DNA, 20 bp, Artificial Sequence
  Description of Artificial Sequence: Synthetic oligonucleotide
  Target: SCNA; (+) strand; PAM type: YTN; PAM sequence: TTC
agtggctgagattgaagggc

SEQ ID NO: 70477 - DNA, 20 bp, Artificial Sequence
  Description of Artificial Sequence: Synthetic oligonucleotide
  Target: SCNA; (+) strand; PAM type: YTN; PAM sequence: CTG
agattgaagggcaactaacc

SEQ ID NO: 70478 - DNA, 20 bp, Artificial Sequence
  Description of Artificial Sequence: Synthetic oligonucleotide
  Target: SCNA; (+) strand; PAM type: YTN; PAM sequence: TTG
aagggcaactaaccaacaga

SEQ ID NO: 70479 - DNA, 20 bp, Artificial Sequence
  Description of Artificial Sequence: Synthetic oligonucleotide
  Target: SCNA; (+) strand; PAM type: YTN; PAM sequence: CTA
accaacagaggagaagatat

SEQ ID NO: 70480 - DNA, 20 bp, Artificial Sequence
  Description of Artificial Sequence: Synthetic oligonucleotide
  Target: SCNA; (+) strand; PAM type: YTN; PAM sequence: TTA
ttgattgttctaaagattta

SEQ ID NO: 70481 - DNA, 20 bp, Artificial Sequence
  Description of Artificial Sequence: Synthetic oligonucleotide
  Target: SCNA; (+) strand; PAM type: YTN; PAM sequence: TTG
attgttctaaagatttatcc

SEQ ID NO: 70482 - DNA, 20 bp, Artificial Sequence
  Description of Artificial Sequence: Synthetic oligonucleotide
  Target: SCNA; (+) strand; PAM type: YTN; PAM sequence: TTG
ttctaaagatttatcctcca

SEQ ID NO: 70483 - DNA, 20 bp, Artificial Sequence
  Description of Artificial Sequence: Synthetic oligonucleotide
  Target: SCNA; (+) strand; PAM type: YTN; PAM sequence: TTC
taaagatttatcctccaaag

SEQ ID NO: 70484 - DNA, 20 bp, Artificial Sequence
  Description of Artificial Sequence: Synthetic oligonucleotide
  Target: SCNA; (+) strand; PAM type: YTN; PAM sequence: CTA
aagatttatcctccaaagct

SEQ ID NO: 70485 - DNA, 20 bp, Artificial Sequence
  Description of Artificial Sequence: Synthetic oligonucleotide
  Target: SCNA; (+) strand; PAM type: YTN; PAM sequence: TTT
atcctccaaagctttccttt

SEQ ID NO: 70486 - DNA, 20 bp, Artificial Sequence
  Description of Artificial Sequence: Synthetic oligonucleotide
  Target: SCNA; (+) strand; PAM type: YTN; PAM sequence: TTA
tcctccaaagctttccttta

SEQ ID NO: 70487 - DNA, 20 bp, Artificial Sequence
  Description of Artificial Sequence: Synthetic oligonucleotide
  Target: SCNA; (+) strand; PAM type: YTN; PAM sequence: CTC
caaagctttcctttacccta

SEQ ID NO: 70488 - DNA, 20 bp, Artificial Sequence
  Description of Artificial Sequence: Synthetic oligonucleotide
  Target: SCNA; (+) strand; PAM type: YTN; PAM sequence: CTT
tcctttaccctatcttgtta

SEQ ID NO: 70489 - DNA, 20 bp, Artificial Sequence
  Description of Artificial Sequence: Synthetic oligonucleotide
  Target: SCNA; (+) strand; PAM type: YTN; PAM sequence: TTT
cctttaccctatcttgttac

SEQ ID NO: 70490 - DNA, 20 bp, Artificial Sequence
  Description of Artificial Sequence: Synthetic oligonucleotide
  Target: SCNA; (+) strand; PAM type: YTN; PAM sequence: TTC
ctttaccctatcttgttaca

SEQ ID NO: 70491 - DNA, 20 bp, Artificial Sequence
  Description of Artificial Sequence: Synthetic oligonucleotide
  Target: SCNA; (+) strand; PAM type: YTN; PAM sequence: CTT
taccctatcttgttacatct

SEQ ID NO: 70492 - DNA, 20 bp, Artificial Sequence
  Description of Artificial Sequence: Synthetic oligonucleotide
  Target: SCNA; (+) strand; PAM type: YTN; PAM sequence: TTT
accctatcttgttacatctt

SEQ ID NO: 70493 - DNA, 20 bp, Artificial Sequence
  Description of Artificial Sequence: Synthetic oligonucleotide
  Target: SCNA; (+) strand; PAM type: YTN; PAM sequence: TTA
ccctatcttgttacatcttt

SEQ ID NO: 70494 - DNA, 20 bp, Artificial Sequence
  Description of Artificial Sequence: Synthetic oligonucleotide
  Target: SCNA; (+) strand; PAM type: YTN; PAM sequence: CTA
tcttgttacatcttttttaa

SEQ ID NO: 70495 - DNA, 20 bp, Artificial Sequence
  Description of Artificial Sequence: Synthetic oligonucleotide
  Target: SCNA; (+) strand; PAM type: YTN; PAM sequence: CTT
gttacatcttttttaaacaa

SEQ ID NO: 70496 - DNA, 20 bp, Artificial Sequence
  Description of Artificial Sequence: Synthetic oligonucleotide
  Target: SCNA; (+) strand; PAM type: YTN; PAM sequence: TTG
ttacatcttttttaaacaat

SEQ ID NO: 70497 - DNA, 20 bp, Artificial Sequence
  Description of Artificial Sequence: Synthetic oligonucleotide
  Target: SCNA; (+) strand; PAM type: YTN; PAM sequence: TTA
catcttttttaaacaatgct

SEQ ID NO: 70498 - DNA, 20 bp, Artificial Sequence
  Description of Artificial Sequence: Synthetic oligonucleotide
  Target: SCNA; (+) strand; PAM type: YTN; PAM sequence: CTT
ttttaaacaatgctaattgt

SEQ ID NO: 70499 - DNA, 20 bp, Artificial Sequence
  Description of Artificial Sequence: Synthetic oligonucleotide
  Target: SCNA; (+) strand; PAM type: YTN; PAM sequence: TTT
tttaaacaatgctaattgtg

SEQ ID NO: 70500 - DNA, 20 bp, Artificial Sequence
  Description of Artificial Sequence: Synthetic oligonucleotide
  Target: SCNA; (+) strand; PAM type: YTN; PAM sequence: TTT
ttaaacaatgctaattgtgt

SEQ ID NO: 70501 - DNA, 20 bp, Artificial Sequence
  Description of Artificial Sequence: Synthetic oligonucleotide
  Target: SCNA; (+) strand; PAM type: YTN; PAM sequence: TTT
taaacaatgctaattgtgtc

SEQ ID NO: 70502 - DNA, 20 bp, Artificial Sequence
  Description of Artificial Sequence: Synthetic oligonucleotide
  Target: SCNA; (+) strand; PAM type: YTN; PAM sequence: TTT
aaacaatgctaattgtgtcc

SEQ ID NO: 70503 - DNA, 20 bp, Artificial Sequence
  Description of Artificial Sequence: Synthetic oligonucleotide
  Target: SCNA; (+) strand; PAM type: YTN; PAM sequence: TTA
aacaatgctaattgtgtccc

SEQ ID NO: 70504 - DNA, 20 bp, Artificial Sequence
  Description of Artificial Sequence: Synthetic oligonucleotide
  Target: SCNA; (+) strand; PAM type: YTN; PAM sequence: CTA
attgtgtcccttgtacatat

SEQ ID NO: 70505 - DNA, 20 bp, Artificial Sequence
  Description of Artificial Sequence: Synthetic oligonucleotide
  Target: SCNA; (+) strand; PAM type: YTN; PAM sequence: TTG
tgtcccttgtacatattctt

SEQ ID NO: 70506 - DNA, 20 bp, Artificial Sequence
  Description of Artificial Sequence: Synthetic oligonucleotide
  Target: SCNA; (+) strand; PAM type: YTN; PAM sequence: CTT
gtacatattcttattcaact

SEQ ID NO: 70507 - DNA, 20 bp, Artificial Sequence
  Description of Artificial Sequence: Synthetic oligonucleotide
  Target: SCNA; (+) strand; PAM type: YTN; PAM sequence: TTG
tacatattcttattcaactc

SEQ ID NO: 70508 - DNA, 20 bp, Artificial Sequence
  Description of Artificial Sequence: Synthetic oligonucleotide
  Target: SCNA; (+) strand; PAM type: YTN; PAM sequence: TTC
ttattcaactcctcagcaaa

SEQ ID NO: 70509 - DNA, 20 bp, Artificial Sequence
  Description of Artificial Sequence: Synthetic oligonucleotide
  Target: SCNA; (+) strand; PAM type: YTN; PAM sequence: CTT
attcaactcctcagcaaaca

SEQ ID NO: 70510 - DNA, 20 bp, Artificial Sequence
  Description of Artificial Sequence: Synthetic oligonucleotide
  Target: SCNA; (+) strand; PAM type: YTN; PAM sequence: TTA
ttcaactcctcagcaaacat

SEQ ID NO: 70511 - DNA, 20 bp, Artificial Sequence
  Description of Artificial Sequence: Synthetic oligonucleotide
  Target: SCNA; (+) strand; PAM type: YTN; PAM sequence: TTC
aactcctcagcaaacatctt

SEQ ID NO: 70512 - DNA, 20 bp, Artificial Sequence
  Description of Artificial Sequence: Synthetic oligonucleotide
  Target: SCNA; (+) strand; PAM type: YTN; PAM sequence: CTC
ctcagcaaacatcttctatg

SEQ ID NO: 70513 - DNA, 20 bp, Artificial Sequence
  Description of Artificial Sequence: Synthetic oligonucleotide
  Target: SCNA; (+) strand; PAM type: YTN; PAM sequence: CTC
agcaaacatcttctatgtga

SEQ ID NO: 70514 - DNA, 20 bp, Artificial Sequence
  Description of Artificial Sequence: Synthetic oligonucleotide
  Target: SCNA; (+) strand; PAM type: YTN; PAM sequence: CTT
ctatgtgaccaacattctga

SEQ ID NO: 70515 - DNA, 20 bp, Artificial Sequence
  Description of Artificial Sequence: Synthetic oligonucleotide
  Target: SCNA; (+) strand; PAM type: YTN; PAM sequence: TTC
tatgtgaccaacattctgag

SEQ ID NO: 70516 - DNA, 20 bp, Artificial Sequence
  Description of Artificial Sequence: Synthetic oligonucleotide
  Target: SCNA; (+) strand; PAM type: YTN; PAM sequence: CTA
tgtgaccaacattctgagag

SEQ ID NO: 70517 - DNA, 20 bp, Artificial Sequence
  Description of Artificial Sequence: Synthetic oligonucleotide
  Target: SCNA; (+) strand; PAM type: YTN; PAM sequence: TTC
tgagaggtgctggagatgca

SEQ ID NO: 70518 - DNA, 20 bp, Artificial Sequence
  Description of Artificial Sequence: Synthetic oligonucleotide
  Target: SCNA; (+) strand; PAM type: YTN; PAM sequence: CTG
agaggtgctggagatgcagg

SEQ ID NO: 70519 - DNA, 20 bp, Artificial Sequence
  Description of Artificial Sequence: Synthetic oligonucleotide
  Target: SCNA; (+) strand; PAM type: YTN; PAM sequence: CTG
gagatgcagggaagagtaag

SEQ ID NO: 70520 - DNA, 20 bp, Artificial Sequence
  Description of Artificial Sequence: Synthetic oligonucleotide
  Target: SCNA; (+) strand; PAM type: YTN; PAM sequence: CTA
tgcttgacctgcagtatctt

SEQ ID NO: 70521 - DNA, 20 bp, Artificial Sequence
  Description of Artificial Sequence: Synthetic oligonucleotide
  Target: SCNA; (+) strand; PAM type: YTN; PAM sequence: CTT
gacctgcagtatcttgaagc

SEQ ID NO: 70522 - DNA, 20 bp, Artificial Sequence
  Description of Artificial Sequence: Synthetic oligonucleotide
  Target: SCNA; (+) strand; PAM type: YTN; PAM sequence: TTG
acctgcagtatcttgaagct

SEQ ID NO: 70523 - DNA, 20 bp, Artificial Sequence
  Description of Artificial Sequence: Synthetic oligonucleotide
  Target: SCNA; (+) strand; PAM type: YTN; PAM sequence: CTG
cagtatcttgaagctagttg

SEQ ID NO: 70524 - DNA, 20 bp, Artificial Sequence
  Description of Artificial Sequence: Synthetic oligonucleotide
  Target: SCNA; (+) strand; PAM type: YTN; PAM sequence: CTT
gaagctagttggggcagcaa

SEQ ID NO: 70525 - DNA, 20 bp, Artificial Sequence
  Description of Artificial Sequence: Synthetic oligonucleotide
  Target: SCNA; (+) strand; PAM type: YTN; PAM sequence: TTG
aagctagttggggcagcaaa

SEQ ID NO: 70526 - DNA, 20 bp, Artificial Sequence
  Description of Artificial Sequence: Synthetic oligonucleotide
  Target: SCNA; (+) strand; PAM type: YTN; PAM sequence: CTA
gttggggcagcaaaccatta

SEQ ID NO: 70527 - DNA, 20 bp, Artificial Sequence
  Description of Artificial Sequence: Synthetic oligonucleotide
  Target: SCNA; (+) strand; PAM type: YTN; PAM sequence: TTG
gggcagcaaaccattaagac

SEQ ID NO: 70528 - DNA, 20 bp, Artificial Sequence
  Description of Artificial Sequence: Synthetic oligonucleotide
  Target: SCNA; (+) strand; PAM type: YTN; PAM sequence: TTA
agacattcagcagcatagct

SEQ ID NO: 70529 - DNA, 20 bp, Artificial Sequence
  Description of Artificial Sequence: Synthetic oligonucleotide
  Target: SCNA; (+) strand; PAM type: YTN; PAM sequence: TTC
agcagcatagctgttgtctg

SEQ ID NO: 70530 - DNA, 20 bp, Artificial Sequence
  Description of Artificial Sequence: Synthetic oligonucleotide
  Target: SCNA; (+) strand; PAM type: YTN; PAM sequence: CTG
ttgtctgcagaaacagatgg

SEQ ID NO: 70531 - DNA, 20 bp, Artificial Sequence
  Description of Artificial Sequence: Synthetic oligonucleotide
  Target: SCNA; (+) strand; PAM type: YTN; PAM sequence: TTG
tctgcagaaacagatgggga

SEQ ID NO: 70532 - DNA, 20 bp, Artificial Sequence
  Description of Artificial Sequence: Synthetic oligonucleotide
  Target: SCNA; (+) strand; PAM type: YTN; PAM sequence: CTG
cagaaacagatggggatcca

SEQ ID NO: 70533 - DNA, 20 bp, Artificial Sequence
  Description of Artificial Sequence: Synthetic oligonucleotide
  Target: SCNA; (+) strand; PAM type: YTN; PAM sequence: TTG
gaaataatacagaggagaga

SEQ ID NO: 70534 - DNA, 20 bp, Artificial Sequence
  Description of Artificial Sequence: Synthetic oligonucleotide
  Target: SCNA; (+) strand; PAM type: YTN; PAM sequence: TTC
atttgaagagttctcttgtt

SEQ ID NO: 70535 - DNA, 20 bp, Artificial Sequence
  Description of Artificial Sequence: Synthetic oligonucleotide
  Target: SCNA; (+) strand; PAM type: YTN; PAM sequence: TTT
gaagagttctcttgttgcat

SEQ ID NO: 70536 - DNA, 20 bp, Artificial Sequence
  Description of Artificial Sequence: Synthetic oligonucleotide
  Target: SCNA; (+) strand; PAM type: YTN; PAM sequence: TTG
aagagttctcttgttgcatg

SEQ ID NO: 70537 - DNA, 20 bp, Artificial Sequence
  Description of Artificial Sequence: Synthetic oligonucleotide
  Target: SCNA; (+) strand; PAM type: YTN; PAM sequence: TTC
tcttgttgcatgcttaatat

SEQ ID NO: 70538 - DNA, 20 bp, Artificial Sequence
  Description of Artificial Sequence: Synthetic oligonucleotide
  Target: SCNA; (+) strand; PAM type: YTN; PAM sequence: CTC
ttgttgcatgcttaatataa

SEQ ID NO: 70539 - DNA, 20 bp, Artificial Sequence
  Description of Artificial Sequence: Synthetic oligonucleotide
  Target: SCNA; (+) strand; PAM type: YTN; PAM sequence: CTT
gttgcatgcttaatataatt

SEQ ID NO: 70540 - DNA, 20 bp, Artificial Sequence
  Description of Artificial Sequence: Synthetic oligonucleotide
  Target: SCNA; (+) strand; PAM type: YTN; PAM sequence: TTG
ttgcatgcttaatataatta

SEQ ID NO: 70541 - DNA, 20 bp, Artificial Sequence
  Description of Artificial Sequence: Synthetic oligonucleotide
  Target: SCNA; (+) strand; PAM type: YTN; PAM sequence: TTG
catgcttaatataattaaag

SEQ ID NO: 70542 - DNA, 20 bp, Artificial Sequence
  Description of Artificial Sequence: Synthetic oligonucleotide
  Target: SCNA; (+) strand; PAM type: YTN; PAM sequence: CTT
aatataattaaagtgcctag

SEQ ID NO: 70543 - DNA, 20 bp, Artificial Sequence
  Description of Artificial Sequence: Synthetic oligonucleotide
  Target: SCNA; (+) strand; PAM type: YTN; PAM sequence: TTA
atataattaaagtgcctagc

SEQ ID NO: 70544 - DNA, 20 bp, Artificial Sequence
  Description of Artificial Sequence: Synthetic oligonucleotide
  Target: SCNA; (+) strand; PAM type: YTN; PAM sequence: TTA
aagtgcctagccactagtag

SEQ ID NO: 70545 - DNA, 20 bp, Artificial Sequence
  Description of Artificial Sequence: Synthetic oligonucleotide
  Target: SCNA; (+) strand; PAM type: YTN; PAM sequence: CTA
gccactagtagatgacagtt

SEQ ID NO: 70546 - DNA, 20 bp, Artificial Sequence
  Description of Artificial Sequence: Synthetic oligonucleotide
  Target: SCNA; (+) strand; PAM type: YTN; PAM sequence: CTA
gtagatgacagttttctaat

SEQ ID NO: 70547 - DNA, 20 bp, Artificial Sequence
  Description of Artificial Sequence: Synthetic oligonucleotide
  Target: SCNA; (+) strand; PAM type: YTN; PAM sequence: TTT
tctaattttacacatcatgt

SEQ ID NO: 70548 - DNA, 20 bp, Artificial Sequence
  Description of Artificial Sequence: Synthetic oligonucleotide
  Target: SCNA; (+) strand; PAM type: YTN; PAM sequence: TTT
ctaattttacacatcatgta

SEQ ID NO: 70549 - DNA, 20 bp, Artificial Sequence
  Description of Artificial Sequence: Synthetic oligonucleotide
  Target: SCNA; (+) strand; PAM type: YTN; PAM sequence: TTC
taattttacacatcatgtaa

SEQ ID NO: 70550 - DNA, 20 bp, Artificial Sequence
  Description of Artificial Sequence: Synthetic oligonucleotide
  Target: SCNA; (+) strand; PAM type: YTN; PAM sequence: CTA
attttacacatcatgtaatc

SEQ ID NO: 70551 - DNA, 20 bp, Artificial Sequence
  Description of Artificial Sequence: Synthetic oligonucleotide
  Target: SCNA; (+) strand; PAM type: YTN; PAM sequence: TTT
tacacatcatgtaatcccct

SEQ ID NO: 70552 - DNA, 20 bp, Artificial Sequence
  Description of Artificial Sequence: Synthetic oligonucleotide
  Target: SCNA; (+) strand; PAM type: YTN; PAM sequence: TTT
acacatcatgtaatcccctt

SEQ ID NO: 70553 - DNA, 20 bp, Artificial Sequence
  Description of Artificial Sequence: Synthetic oligonucleotide
  Target: SCNA; (+) strand; PAM type: YTN; PAM sequence: TTA
cacatcatgtaatcccctta

SEQ ID NO: 70554 - DNA, 20 bp, Artificial Sequence
  Description of Artificial Sequence: Synthetic oligonucleotide
  Target: SCNA; (+) strand; PAM type: YTN; PAM sequence: CTT
agtcttgaagatattgatgg

SEQ ID NO: 70555 - DNA, 20 bp, Artificial Sequence
  Description of Artificial Sequence: Synthetic oligonucleotide
  Target: SCNA; (+) strand; PAM type: YTN; PAM sequence: TTA
gtcttgaagatattgatggt

SEQ ID NO: 70556 - DNA, 20 bp, Artificial Sequence
  Description of Artificial Sequence: Synthetic oligonucleotide
  Target: SCNA; (+) strand; PAM type: YTN; PAM sequence: CTT
gaagatattgatggtgttaa

SEQ ID NO: 70557 - DNA, 20 bp, Artificial Sequence
  Description of Artificial Sequence: Synthetic oligonucleotide
  Target: SCNA; (+) strand; PAM type: YTN; PAM sequence: TTG
aagatattgatggtgttaat

SEQ ID NO: 70558 - DNA, 20 bp, Artificial Sequence
  Description of Artificial Sequence: Synthetic oligonucleotide
  Target: SCNA; (+) strand; PAM type: YTN; PAM sequence: TTG
atggtgttaatcacttgaat

SEQ ID NO: 70559 - DNA, 20 bp, Artificial Sequence
  Description of Artificial Sequence: Synthetic oligonucleotide
  Target: SCNA; (+) strand; PAM type: YTN; PAM sequence: TTA
atcacttgaatgcagtgaca

SEQ ID NO: 70560 - DNA, 20 bp, Artificial Sequence
  Description of Artificial Sequence: Synthetic oligonucleotide
  Target: SCNA; (+) strand; PAM type: YTN; PAM sequence: CTT
gaatgcagtgacattaataa

SEQ ID NO: 70561 - DNA, 20 bp, Artificial Sequence
  Description of Artificial Sequence: Synthetic oligonucleotide
  Target: SCNA; (+) strand; PAM type: YTN; PAM sequence: TTG
aatgcagtgacattaataat

SEQ ID NO: 70562 - DNA, 20 bp, Artificial Sequence
  Description of Artificial Sequence: Synthetic oligonucleotide
  Target: SCNA; (+) strand; PAM type: YTN; PAM sequence: TTA
ataatttcttagataaaaag

SEQ ID NO: 70563 - DNA, 20 bp, Artificial Sequence
  Description of Artificial Sequence: Synthetic oligonucleotide
  Target: SCNA; (+) strand; PAM type: YTN; PAM sequence: TTT
cttagataaaaagtatactg

SEQ ID NO: 70564 - DNA, 20 bp, Artificial Sequence
  Description of Artificial Sequence: Synthetic oligonucleotide
  Target: SCNA; (+) strand; PAM type: YTN; PAM sequence: TTC
ttagataaaaagtatactgt

SEQ ID NO: 70565 - DNA, 20 bp, Artificial Sequence
  Description of Artificial Sequence: Synthetic oligonucleotide
  Target: SCNA; (+) strand; PAM type: YTN; PAM sequence: CTT
agataaaaagtatactgttt

SEQ ID NO: 70566 - DNA, 20 bp, Artificial Sequence
  Description of Artificial Sequence: Synthetic oligonucleotide
  Target: SCNA; (+) strand; PAM type: YTN; PAM sequence: TTA
gataaaaagtatactgtttc

SEQ ID NO: 70567 - DNA, 20 bp, Artificial Sequence
  Description of Artificial Sequence: Synthetic oligonucleotide
  Target: SCNA; (+) strand; PAM type: YTN; PAM sequence: CTG
tttccaatcataaattccct

SEQ ID NO: 70568 - DNA, 20 bp, Artificial Sequence
  Description of Artificial Sequence: Synthetic oligonucleotide
  Target: SCNA; (+) strand; PAM type: YTN; PAM sequence: TTT
ccaatcataaattccctgcc

SEQ ID NO: 70569 - DNA, 20 bp, Artificial Sequence
  Description of Artificial Sequence: Synthetic oligonucleotide
  Target: SCNA; (+) strand; PAM type: YTN; PAM sequence: TTC
caatcataaattccctgcct

SEQ ID NO: 70570 - DNA, 20 bp, Artificial Sequence
  Description of Artificial Sequence: Synthetic oligonucleotide
  Target: SCNA; (+) strand; PAM type: YTN; PAM sequence: TTC
cctgcctcccagactctctg

SEQ ID NO: 70571 - DNA, 20 bp, Artificial Sequence
  Description of Artificial Sequence: Synthetic oligonucleotide
  Target: SCNA; (+) strand; PAM type: YTN; PAM sequence: CTG
cctcccagactctctgtgag

SEQ ID NO: 70572 - DNA, 20 bp, Artificial Sequence
  Description of Artificial Sequence: Synthetic oligonucleotide
  Target: SCNA; (+) strand; PAM type: YTN; PAM sequence: CTC
ccagactctctgtgagcctc

SEQ ID NO: 70573 - DNA, 20 bp, Artificial Sequence
  Description of Artificial Sequence: Synthetic oligonucleotide
  Target: SCNA; (+) strand; PAM type: YTN; PAM sequence: CTC
tctgtgagcctcatgtgcat

SEQ ID NO: 70574 - DNA, 20 bp, Artificial Sequence
  Description of Artificial Sequence: Synthetic oligonucleotide
  Target: SCNA; (+) strand; PAM type: YTN; PAM sequence: CTC
tgtgagcctcatgtgcataa

SEQ ID NO: 70575 - DNA, 20 bp, Artificial Sequence
  Description of Artificial Sequence: Synthetic oligonucleotide
  Target: SCNA; (+) strand; PAM type: YTN; PAM sequence: CTG
tgagcctcatgtgcataagt

SEQ ID NO: 70576 - DNA, 20 bp, Artificial Sequence
  Description of Artificial Sequence: Synthetic oligonucleotide
  Target: SCNA; (+) strand; PAM type: YTN; PAM sequence: CTC
atgtgcataagtggagggaa

SEQ ID NO: 70577 - DNA, 20 bp, Artificial Sequence
  Description of Artificial Sequence: Synthetic oligonucleotide
  Target: SCNA; (+) strand; PAM type: YTN; PAM sequence: CTG
ctgatctaagaataccccta

SEQ ID NO: 70578 - DNA, 20 bp, Artificial Sequence
  Description of Artificial Sequence: Synthetic oligonucleotide
  Target: SCNA; (+) strand; PAM type: YTN; PAM sequence: CTG
atctaagaatacccctagtg

SEQ ID NO: 70579 - DNA, 20 bp, Artificial Sequence
  Description of Artificial Sequence: Synthetic oligonucleotide
  Target: SCNA; (+) strand; PAM type: YTN; PAM sequence: CTA
agaatacccctagtgtcaaa

SEQ ID NO: 70580 - DNA, 20 bp, Artificial Sequence
  Description of Artificial Sequence: Synthetic oligonucleotide
  Target: SCNA; (+) strand; PAM type: YTN; PAM sequence: CTA
gtgtcaaagaagtaaatggt

SEQ ID NO: 70581 - DNA, 20 bp, Artificial Sequence
  Description of Artificial Sequence: Synthetic oligonucleotide
  Target: SCNA; (+) strand; PAM type: YTN; PAM sequence: TTG
tcctaagaagccatgttacc

SEQ ID NO: 70582 - DNA, 20 bp, Artificial Sequence
  Description of Artificial Sequence: Synthetic oligonucleotide
  Target: SCNA; (+) strand; PAM type: YTN; PAM sequence: CTA
agaagccatgttaccccttc

SEQ ID NO: 70583 - DNA, 20 bp, Artificial Sequence
  Description of Artificial Sequence: Synthetic oligonucleotide
  Target: SCNA; (+) strand; PAM type: YTN; PAM sequence: TTA
ccccttctgctggtgagcac

SEQ ID NO: 70584 - DNA, 20 bp, Artificial Sequence
  Description of Artificial Sequence: Synthetic oligonucleotide
  Target: SCNA; (+) strand; PAM type: YTN; PAM sequence: CTT
ctgctggtgagcacagagcc

SEQ ID NO: 70585 - DNA, 20 bp, Artificial Sequence
  Description of Artificial Sequence: Synthetic oligonucleotide
  Target: SCNA; (+) strand; PAM type: YTN; PAM sequence: TTC
tgctggtgagcacagagccc

SEQ ID NO: 70586 - DNA, 20 bp, Artificial Sequence
  Description of Artificial Sequence: Synthetic oligonucleotide
  Target: SCNA; (+) strand; PAM type: YTN; PAM sequence: CTG
ctggtgagcacagagcccag

SEQ ID NO: 70587 - DNA, 20 bp, Artificial Sequence
  Description of Artificial Sequence: Synthetic oligonucleotide
  Target: SCNA; (+) strand; PAM type: YTN; PAM sequence: CTG
gtgagcacagagcccaggta

SEQ ID NO: 70588 - DNA, 20 bp, Artificial Sequence
  Description of Artificial Sequence: Synthetic oligonucleotide
  Target: SCNA; (+) strand; PAM type: YTN; PAM sequence: TTT
tttttttttttttttgagac

SEQ ID NO: 70589 - DNA, 20 bp, Artificial Sequence
  Description of Artificial Sequence: Synthetic oligonucleotide
  Target: SCNA; (+) strand; PAM type: YTN; PAM sequence: TTT
ttttttttttttttgagaca

SEQ ID NO: 70590 - DNA, 20 bp, Artificial Sequence
  Description of Artificial Sequence: Synthetic oligonucleotide
  Target: SCNA; (+) strand; PAM type: YTN; PAM sequence: TTT
tttttttttttttgagacag

SEQ ID NO: 70591 - DNA, 20 bp, Artificial Sequence
  Description of Artificial Sequence: Synthetic oligonucleotide
  Target: SCNA; (+) strand; PAM type: YTN; PAM sequence: TTT
ttttttttttttgagacaga

SEQ ID NO: 70592 - DNA, 20 bp, Artificial Sequence
  Description of Artificial Sequence: Synthetic oligonucleotide
  Target: SCNA; (+) strand; PAM type: YTN; PAM sequence: TTT
tttttttttttgagacagag

SEQ ID NO: 70593 - DNA, 20 bp, Artificial Sequence
  Description of Artificial Sequence: Synthetic oligonucleotide
  Target: SCNA; (+) strand; PAM type: YTN; PAM sequence: TTT
ttttttttttgagacagagt

SEQ ID NO: 70594 - DNA, 20 bp, Artificial Sequence
  Description of Artificial Sequence: Synthetic oligonucleotide
  Target: SCNA; (+) strand; PAM type: YTN; PAM sequence: TTT
tttttttttgagacagagtc

SEQ ID NO: 70595 - DNA, 20 bp, Artificial Sequence
  Description of Artificial Sequence: Synthetic oligonucleotide
  Target: SCNA; (+) strand; PAM type: YTN; PAM sequence: TTT
ttttttttgagacagagtct

SEQ ID NO: 70596 - DNA, 20 bp, Artificial Sequence
  Description of Artificial Sequence: Synthetic oligonucleotide
  Target: SCNA; (+) strand; PAM type: YTN; PAM sequence: TTT
tttttttgagacagagtctc

SEQ ID NO: 70597 - DNA, 20 bp, Artificial Sequence
  Description of Artificial Sequence: Synthetic oligonucleotide
  Target: SCNA; (+) strand; PAM type: YTN; PAM sequence: TTT
ttttttgagacagagtctcg

SEQ ID NO: 70598 - DNA, 20 bp, Artificial Sequence
  Description of Artificial Sequence: Synthetic oligonucleotide
  Target: SCNA; (+) strand; PAM type: YTN; PAM sequence: TTT
tttttgagacagagtctcgc

SEQ ID NO: 70599 - DNA, 20 bp, Artificial Sequence
  Description of Artificial Sequence: Synthetic oligonucleotide
  Target: SCNA; (+) strand; PAM type: YTN; PAM sequence: TTT
ttttgagacagagtctcgct

SEQ ID NO: 70600 - DNA, 20 bp, Artificial Sequence
  Description of Artificial Sequence: Synthetic oligonucleotide
  Target: SCNA; (+) strand; PAM type: YTN; PAM sequence: TTT
tttgagacagagtctcgctc

SEQ ID NO: 70601 - DNA, 20 bp, Artificial Sequence
  Description of Artificial Sequence: Synthetic oligonucleotide
  Target: SCNA; (+) strand; PAM type: YTN; PAM sequence: TTT
ttgagacagagtctcgctct

SEQ ID NO: 70602 - DNA, 20 bp, Artificial Sequence
  Description of Artificial Sequence: Synthetic oligonucleotide
  Target: SCNA; (+) strand; PAM type: YTN; PAM sequence: TTT
tgagacagagtctcgctctg

SEQ ID NO: 70603 - DNA, 20 bp, Artificial Sequence
  Description of Artificial Sequence: Synthetic oligonucleotide
  Target: SCNA; (+) strand; PAM type: YTN; PAM sequence: TTT
gagacagagtctcgctctgt

SEQ ID NO: 70604 - DNA, 20 bp, Artificial Sequence
  Description of Artificial Sequence: Synthetic oligonucleotide
  Target: SCNA; (+) strand; PAM type: YTN; PAM sequence: TTG
agacagagtctcgctctgtc

SEQ ID NO: 70605 - DNA, 20 bp, Artificial Sequence
  Description of Artificial Sequence: Synthetic oligonucleotide
  Target: SCNA; (+) strand; PAM type: YTN; PAM sequence: CTC
gctctgtcacccaggctgga

SEQ ID NO: 70606 - DNA, 20 bp, Artificial Sequence
  Description of Artificial Sequence: Synthetic oligonucleotide
  Target: SCNA; (+) strand; PAM type: YTN; PAM sequence: CTC
tgtcacccaggctggagtgc

SEQ ID NO: 70607 - DNA, 20 bp, Artificial Sequence
  Description of Artificial Sequence: Synthetic oligonucleotide
  Target: SCNA; (+) strand; PAM type: YTN; PAM sequence: CTG
tcacccaggctggagtgcag

SEQ ID NO: 70608 - DNA, 20 bp, Artificial Sequence
  Description of Artificial Sequence: Synthetic oligonucleotide
  Target: SCNA; (+) strand; PAM type: YTN; PAM sequence: CTG
gagtgcagtggtgcaatctc

SEQ ID NO: 70609 - DNA, 20 bp, Artificial Sequence
  Description of Artificial Sequence: Synthetic oligonucleotide
  Target: SCNA; (+) strand; PAM type: YTN; PAM sequence: CTC
ggctcaccgcaacctccacc

SEQ ID NO: 70610 - DNA, 20 bp, Artificial Sequence
  Description of Artificial Sequence: Synthetic oligonucleotide
  Target: SCNA; (+) strand; PAM type: YTN; PAM sequence: CTC
accgcaacctccacctcccg

SEQ ID NO: 70611 - DNA, 20 bp, Artificial Sequence
  Description of Artificial Sequence: Synthetic oligonucleotide
  Target: SCNA; (+) strand; PAM type: YTN; PAM sequence: CTC
cacctcccgggttcaagcga

SEQ ID NO: 70612 - DNA, 20 bp, Artificial Sequence
  Description of Artificial Sequence: Synthetic oligonucleotide
  Target: SCNA; (+) strand; PAM type: YTN; PAM sequence: CTC
ccgggttcaagcgattctcc

SEQ ID NO: 70613 - DNA, 20 bp, Artificial Sequence
  Description of Artificial Sequence: Synthetic oligonucleotide
  Target: SCNA; (+) strand; PAM type: YTN; PAM sequence: TTC
aagcgattctcctgccttag

SEQ ID NO: 70614 - DNA, 20 bp, Artificial Sequence
  Description of Artificial Sequence: Synthetic oligonucleotide
  Target: SCNA; (+) strand; PAM type: YTN; PAM sequence: TTC
tcctgccttagcctcccgag

SEQ ID NO: 70615 - DNA, 20 bp, Artificial Sequence
  Description of Artificial Sequence: Synthetic oligonucleotide
  Target: SCNA; (+) strand; PAM type: YTN; PAM sequence: CTC
ctgccttagcctcccgagca

SEQ ID NO: 70616 - DNA, 20 bp, Artificial Sequence
  Description of Artificial Sequence: Synthetic oligonucleotide
  Target: SCNA; (+) strand; PAM type: YTN; PAM sequence: CTG
ccttagcctcccgagcagct

SEQ ID NO: 70617 - DNA, 20 bp, Artificial Sequence
  Description of Artificial Sequence: Synthetic oligonucleotide
  Target: SCNA; (+) strand; PAM type: YTN; PAM sequence: CTT
agcctcccgagcagctggga

SEQ ID NO: 70618 - DNA, 20 bp, Artificial Sequence
  Description of Artificial Sequence: Synthetic oligonucleotide
  Target: SCNA; (+) strand; PAM type: YTN; PAM sequence: TTA
gcctcccgagcagctgggac

SEQ ID NO: 70619 - DNA, 20 bp, Artificial Sequence
  Description of Artificial Sequence: Synthetic oligonucleotide
  Target: SCNA; (+) strand; PAM type: YTN; PAM sequence: CTC
ccgagcagctgggactacaa

SEQ ID NO: 70620 - DNA, 20 bp, Artificial Sequence
  Description of Artificial Sequence: Synthetic oligonucleotide
  Target: SCNA; (+) strand; PAM type: YTN; PAM sequence: CTG
ggactacaagcacatgacac

SEQ ID NO: 70621 - DNA, 20 bp, Artificial Sequence
  Description of Artificial Sequence: Synthetic oligonucleotide
  Target: SCNA; (+) strand; PAM type: YTN; PAM sequence: CTA
caagcacatgacaccacacc

SEQ ID NO: 70622 - DNA, 20 bp, Artificial Sequence
  Description of Artificial Sequence: Synthetic oligonucleotide
  Target: SCNA; (+) strand; PAM type: YTN; PAM sequence: CTG
gctaattttttgtattttta

SEQ ID NO: 70623 - DNA, 20 bp, Artificial Sequence
  Description of Artificial Sequence: Synthetic oligonucleotide
  Target: SCNA; (+) strand; PAM type: YTN; PAM sequence: CTA
attttttgtatttttagtag

SEQ ID NO: 70624 - DNA, 20 bp, Artificial Sequence
  Description of Artificial Sequence: Synthetic oligonucleotide
  Target: SCNA; (+) strand; PAM type: YTN; PAM sequence: TTT
tttgtatttttagtagagat

SEQ ID NO: 70625 - DNA, 20 bp, Artificial Sequence
  Description of Artificial Sequence: Synthetic oligonucleotide
  Target: SCNA; (+) strand; PAM type: YTN; PAM sequence: TTT
ttgtatttttagtagagatg

SEQ ID NO: 70626 - DNA, 20 bp, Artificial Sequence
  Description of Artificial Sequence: Synthetic oligonucleotide
  Target: SCNA; (+) strand; PAM type: YTN; PAM sequence: TTT
tgtatttttagtagagatgg

SEQ ID NO: 70627 - DNA, 20 bp, Artificial Sequence
  Description of Artificial Sequence: Synthetic oligonucleotide
  Target: SCNA; (+) strand; PAM type: YTN; PAM sequence: TTT
gtatttttagtagagatggg

SEQ ID NO: 70628 - DNA, 20 bp, Artificial Sequence
  Description of Artificial Sequence: Synthetic oligonucleotide
  Target: SCNA; (+) strand; PAM type: YTN; PAM sequence: TTG
tatttttagtagagatgggg

SEQ ID NO: 70629 - DNA, 20 bp, Artificial Sequence
  Description of Artificial Sequence: Synthetic oligonucleotide
  Target: SCNA; (+) strand; PAM type: YTN; PAM sequence: TTT
ttagtagagatggggtttca

SEQ ID NO: 70630 - DNA, 20 bp, Artificial Sequence
  Description of Artificial Sequence: Synthetic oligonucleotide
  Target: SCNA; (+) strand; PAM type: YTN; PAM sequence: TTT
tagtagagatggggtttcac

SEQ ID NO: 70631 - DNA, 20 bp, Artificial Sequence
  Description of Artificial Sequence: Synthetic oligonucleotide
  Target: SCNA; (+) strand; PAM type: YTN; PAM sequence: TTT
agtagagatggggtttcacc

SEQ ID NO: 70632 - DNA, 20 bp, Artificial Sequence
  Description of Artificial Sequence: Synthetic oligonucleotide
  Target: SCNA; (+) strand; PAM type: YTN; PAM sequence: TTA
gtagagatggggtttcacca

SEQ ID NO: 70633 - DNA, 20 bp, Artificial Sequence
  Description of Artificial Sequence: Synthetic oligonucleotide
  Target: SCNA; (+) strand; PAM type: YTN; PAM sequence: TTT
caccatgttagccaggatag

SEQ ID NO: 70634 - DNA, 20 bp, Artificial Sequence
  Description of Artificial Sequence: Synthetic oligonucleotide
  Target: SCNA; (+) strand; PAM type: YTN; PAM sequence: TTC
accatgttagccaggatagt

SEQ ID NO: 70635 - DNA, 20 bp, Artificial Sequence
  Description of Artificial Sequence: Synthetic oligonucleotide
  Target: SCNA; (+) strand; PAM type: YTN; PAM sequence: TTA
gccaggatagtctcgatctc

SEQ ID NO: 70636 - DNA, 20 bp, Artificial Sequence
  Description of Artificial Sequence: Synthetic oligonucleotide
  Target: SCNA; (+) strand; PAM type: YTN; PAM sequence: CTC
gatctcctgacctcatgatc

SEQ ID NO: 70637 - DNA, 20 bp, Artificial Sequence
  Description of Artificial Sequence: Synthetic oligonucleotide
  Target: SCNA; (+) strand; PAM type: YTN; PAM sequence: CTC
ctgacctcatgatctgcccg

SEQ ID NO: 70638 - DNA, 20 bp, Artificial Sequence
  Description of Artificial Sequence: Synthetic oligonucleotide
  Target: SCNA; (+) strand; PAM type: YTN; PAM sequence: CTG
acctcatgatctgcccgcct

SEQ ID NO: 70639 - DNA, 20 bp, Artificial Sequence
  Description of Artificial Sequence: Synthetic oligonucleotide
  Target: SCNA; (+) strand; PAM type: YTN; PAM sequence: CTC
atgatctgcccgcctcagcc

SEQ ID NO: 70640 - DNA, 20 bp, Artificial Sequence
  Description of Artificial Sequence: Synthetic oligonucleotide
  Target: SCNA; (+) strand; PAM type: YTN; PAM sequence: CTG
cccgcctcagcctcccaaag

SEQ ID NO: 70641 - DNA, 20 bp, Artificial Sequence
  Description of Artificial Sequence: Synthetic oligonucleotide
  Target: SCNA; (+) strand; PAM type: YTN; PAM sequence: CTC
agcctcccaaagtgctggga

SEQ ID NO: 70642 - DNA, 20 bp, Artificial Sequence
  Description of Artificial Sequence: Synthetic oligonucleotide
  Target: SCNA; (+) strand; PAM type: YTN; PAM sequence: CTC
ccaaagtgctgggattacag

SEQ ID NO: 70643 - DNA, 20 bp, Artificial Sequence
  Description of Artificial Sequence: Synthetic oligonucleotide
  Target: SCNA; (+) strand; PAM type: YTN; PAM sequence: CTG
ggattacaggtgtgagccac

SEQ ID NO: 70644 - DNA, 20 bp, Artificial Sequence
  Description of Artificial Sequence: Synthetic oligonucleotide
  Target: SCNA; (+) strand; PAM type: YTN; PAM sequence: TTA
caggtgtgagccaccacgcc

SEQ ID NO: 70645 - DNA, 20 bp, Artificial Sequence
  Description of Artificial Sequence: Synthetic oligonucleotide
  Target: SCNA; (+) strand; PAM type: YTN; PAM sequence: CTG
gctgcagaatctttacctag

SEQ ID NO: 70646 - DNA, 20 bp, Artificial Sequence
  Description of Artificial Sequence: Synthetic oligonucleotide
  Target: SCNA; (+) strand; PAM type: YTN; PAM sequence: CTG
cagaatctttacctaggtta

SEQ ID NO: 70647 - DNA, 20 bp, Artificial Sequence
  Description of Artificial Sequence: Synthetic oligonucleotide
  Target: SCNA; (+) strand; PAM type: YTN; PAM sequence: CTT
tacctaggttactgttgtcc

SEQ ID NO: 70648 - DNA, 20 bp, Artificial Sequence
  Description of Artificial Sequence: Synthetic oligonucleotide
  Target: SCNA; (+) strand; PAM type: YTN; PAM sequence: TTT
acctaggttactgttgtcca

SEQ ID NO: 70649 - DNA, 20 bp, Artificial Sequence
  Description of Artificial Sequence: Synthetic oligonucleotide
  Target: SCNA; (+) strand; PAM type: YTN; PAM sequence: TTA
cctaggttactgttgtccat

SEQ ID NO: 70650 - DNA, 20 bp, Artificial Sequence
  Description of Artificial Sequence: Synthetic oligonucleotide
  Target: SCNA; (+) strand; PAM type: YTN; PAM sequence: CTA
ggttactgttgtccatgtgg

SEQ ID NO: 70651 - DNA, 20 bp, Artificial Sequence
  Description of Artificial Sequence: Synthetic oligonucleotide
  Target: SCNA; (+) strand; PAM type: YTN; PAM sequence: TTA
ctgttgtccatgtgggtaac

SEQ ID NO: 70652 - DNA, 20 bp, Artificial Sequence
  Description of Artificial Sequence: Synthetic oligonucleotide
  Target: SCNA; (+) strand; PAM type: YTN; PAM sequence: CTG
ttgtccatgtgggtaacaat

SEQ ID NO: 70653 - DNA, 20 bp, Artificial Sequence
  Description of Artificial Sequence: Synthetic oligonucleotide
  Target: SCNA; (+) strand; PAM type: YTN; PAM sequence: TTG
tccatgtgggtaacaatctt

SEQ ID NO: 70654 - DNA, 20 bp, Artificial Sequence
  Description of Artificial Sequence: Synthetic oligonucleotide
  Target: SCNA; (+) strand; PAM type: YTN; PAM sequence: CTT
gacatctgaagtgttcattg

SEQ ID NO: 70655 - DNA, 20 bp, Artificial Sequence
  Description of Artificial Sequence: Synthetic oligonucleotide
  Target: SCNA; (+) strand; PAM type: YTN; PAM sequence: TTG
acatctgaagtgttcattga

SEQ ID NO: 70656 - DNA, 20 bp, Artificial Sequence
  Description of Artificial Sequence: Synthetic oligonucleotide
  Target: SCNA; (+) strand; PAM type: YTN; PAM sequence: CTG
aagtgttcattgaataaaaa

SEQ ID NO: 70657 - DNA, 20 bp, Artificial Sequence
  Description of Artificial Sequence: Synthetic oligonucleotide
  Target: SCNA; (+) strand; PAM type: YTN; PAM sequence: TTC
attgaataaaaatttgtatt

SEQ ID NO: 70658 - DNA, 20 bp, Artificial Sequence
  Description of Artificial Sequence: Synthetic oligonucleotide
  Target: SCNA; (+) strand; PAM type: YTN; PAM sequence: TTG
aataaaaatttgtattgaat

SEQ ID NO: 70659 - DNA, 20 bp, Artificial Sequence
  Description of Artificial Sequence: Synthetic oligonucleotide
  Target: SCNA; (+) strand; PAM type: YTN; PAM sequence: TTT
gtattgaatattcttctaac

SEQ ID NO: 70660 - DNA, 20 bp, Artificial Sequence
  Description of Artificial Sequence: Synthetic oligonucleotide
  Target: SCNA; (+) strand; PAM type: YTN; PAM sequence: TTG
tattgaatattcttctaaca

SEQ ID NO: 70661 - DNA, 20 bp, Artificial Sequence
  Description of Artificial Sequence: Synthetic oligonucleotide
  Target: SCNA; (+) strand; PAM type: YTN; PAM sequence: TTG
aatattcttctaacaaaatc

SEQ ID NO: 70662 - DNA, 20 bp, Artificial Sequence
  Description of Artificial Sequence: Synthetic oligonucleotide
  Target: SCNA; (+) strand; PAM type: YTN; PAM sequence: TTC
ttctaacaaaatctgaaaaa

SEQ ID NO: 70663 - DNA, 20 bp, Artificial Sequence
  Description of Artificial Sequence: Synthetic oligonucleotide
  Target: SCNA; (+) strand; PAM type: YTN; PAM sequence: CTT
ctaacaaaatctgaaaaaag

SEQ ID NO: 70664 - DNA, 20 bp, Artificial Sequence
  Description of Artificial Sequence: Synthetic oligonucleotide
  Target: SCNA; (+) strand; PAM type: YTN; PAM sequence: TTC
taacaaaatctgaaaaaagt

SEQ ID NO: 70665 - DNA, 20 bp, Artificial Sequence
  Description of Artificial Sequence: Synthetic oligonucleotide
  Target: SCNA; (+) strand; PAM type: YTN; PAM sequence: CTA
acaaaatctgaaaaaagtac

SEQ ID NO: 70666 - DNA, 20 bp, Artificial Sequence
  Description of Artificial Sequence: Synthetic oligonucleotide
  Target: SCNA; (+) strand; PAM type: YTN; PAM sequence: CTG
aaaaaagtacagagctattt

SEQ ID NO: 70667 - DNA, 20 bp, Artificial Sequence
  Description of Artificial Sequence: Synthetic oligonucleotide
  Target: SCNA; (+) strand; PAM type: YTN; PAM sequence: CTA
tttttgaaatggatgagaat

SEQ ID NO: 70668 - DNA, 20 bp, Artificial Sequence
  Description of Artificial Sequence: Synthetic oligonucleotide
  Target: SCNA; (+) strand; PAM type: YTN; PAM sequence: TTT
ttgaaatggatgagaatgta

SEQ ID NO: 70669 - DNA, 20 bp, Artificial Sequence
  Description of Artificial Sequence: Synthetic oligonucleotide
  Target: SCNA; (+) strand; PAM type: YTN; PAM sequence: TTT
tgaaatggatgagaatgtat

SEQ ID NO: 70670 - DNA, 20 bp, Artificial Sequence
  Description of Artificial Sequence: Synthetic oligonucleotide
  Target: SCNA; (+) strand; PAM type: YTN; PAM sequence: TTT
gaaatggatgagaatgtatg

SEQ ID NO: 70671 - DNA, 20 bp, Artificial Sequence
  Description of Artificial Sequence: Synthetic oligonucleotide
  Target: SCNA; (+) strand; PAM type: YTN; PAM sequence: TTG
aaatggatgagaatgtatgg

SEQ ID NO: 70672 - DNA, 20 bp, Artificial Sequence
  Description of Artificial Sequence: Synthetic oligonucleotide
  Target: SCNA; (+) strand; PAM type: YTN; PAM sequence: TTT
agctagttcattgtatgtgt

SEQ ID NO: 70673 - DNA, 20 bp, Artificial Sequence
  Description of Artificial Sequence: Synthetic oligonucleotide
  Target: SCNA; (+) strand; PAM type: YTN; PAM sequence: TTA
gctagttcattgtatgtgtc

SEQ ID NO: 70674 - DNA, 20 bp, Artificial Sequence
  Description of Artificial Sequence: Synthetic oligonucleotide
  Target: SCNA; (+) strand; PAM type: YTN; PAM sequence: CTA
gttcattgtatgtgtcctgt

SEQ ID NO: 70675 - DNA, 20 bp, Artificial Sequence
  Description of Artificial Sequence: Synthetic oligonucleotide
  Target: SCNA; (+) strand; PAM type: YTN; PAM sequence: TTC
attgtatgtgtcctgttttc

SEQ ID NO: 70676 - DNA, 20 bp, Artificial Sequence
  Description of Artificial Sequence: Synthetic oligonucleotide
  Target: SCNA; (+) strand; PAM type: YTN; PAM sequence: TTG
tatgtgtcctgttttcagtt

SEQ ID NO: 70677 - DNA, 20 bp, Artificial Sequence
  Description of Artificial Sequence: Synthetic oligonucleotide
  Target: SCNA; (+) strand; PAM type: YTN; PAM sequence: CTG
ttttcagttatcattgctac

SEQ ID NO: 70678 - DNA, 20 bp, Artificial Sequence
  Description of Artificial Sequence: Synthetic oligonucleotide
  Target: SCNA; (+) strand; PAM type: YTN; PAM sequence: TTT
tcagttatcattgctactga

SEQ ID NO: 70679 - DNA, 20 bp, Artificial Sequence
  Description of Artificial Sequence: Synthetic oligonucleotide
  Target: SCNA; (+) strand; PAM type: YTN; PAM sequence: TTT
cagttatcattgctactgaa

SEQ ID NO: 70680 - DNA, 20 bp, Artificial Sequence
  Description of Artificial Sequence: Synthetic oligonucleotide
  Target: SCNA; (+) strand; PAM type: YTN; PAM sequence: TTC
agttatcattgctactgaat

SEQ ID NO: 70681 - DNA, 20 bp, Artificial Sequence
  Description of Artificial Sequence: Synthetic oligonucleotide
  Target: SCNA; (+) strand; PAM type: YTN; PAM sequence: TTA
tcattgctactgaattattt

SEQ ID NO: 70682 - DNA, 20 bp, Artificial Sequence
  Description of Artificial Sequence: Synthetic oligonucleotide
  Target: SCNA; (+) strand; PAM type: YTN; PAM sequence: TTG
ctactgaattatttatcttt

SEQ ID NO: 70683 - DNA, 20 bp, Artificial Sequence
  Description of Artificial Sequence: Synthetic oligonucleotide
  Target: SCNA; (+) strand; PAM type: YTN; PAM sequence: CTA
ctgaattatttatctttagg

SEQ ID NO: 70684 - DNA, 20 bp, Artificial Sequence
  Description of Artificial Sequence: Synthetic oligonucleotide
  Target: SCNA; (+) strand; PAM type: YTN; PAM sequence: CTG
aattatttatctttaggtgt

SEQ ID NO: 70685 - DNA, 20 bp, Artificial Sequence
  Description of Artificial Sequence: Synthetic oligonucleotide
  Target: SCNA; (+) strand; PAM type: YTN; PAM sequence: TTA
tttatctttaggtgtataaa

SEQ ID NO: 70686 - DNA, 20 bp, Artificial Sequence
  Description of Artificial Sequence: Synthetic oligonucleotide
  Target: SCNA; (+) strand; PAM type: YTN; PAM sequence: TTT
atctttaggtgtataaatta

SEQ ID NO: 70687 - DNA, 20 bp, Artificial Sequence
  Description of Artificial Sequence: Synthetic oligonucleotide
  Target: SCNA; (+) strand; PAM type: YTN; PAM sequence: TTA
tctttaggtgtataaattat

SEQ ID NO: 70688 - DNA, 20 bp, Artificial Sequence
  Description of Artificial Sequence: Synthetic oligonucleotide
  Target: SCNA; (+) strand; PAM type: YTN; PAM sequence: CTT
taggtgtataaattatagtc

SEQ ID NO: 70689 - DNA, 20 bp, Artificial Sequence
  Description of Artificial Sequence: Synthetic oligonucleotide
  Target: SCNA; (+) strand; PAM type: YTN; PAM sequence: TTT
aggtgtataaattatagtca

SEQ ID NO: 70690 - DNA, 20 bp, Artificial Sequence
  Description of Artificial Sequence: Synthetic oligonucleotide
  Target: SCNA; (+) strand; PAM type: YTN; PAM sequence: TTA
ggtgtataaattatagtcaa

SEQ ID NO: 70691 - DNA, 20 bp, Artificial Sequence
  Description of Artificial Sequence: Synthetic oligonucleotide
  Target: SCNA; (+) strand; PAM type: YTN; PAM sequence: TTA
tagtcaagatgcttacaatt

SEQ ID NO: 70692 - DNA, 20 bp, Artificial Sequence
  Description of Artificial Sequence: Synthetic oligonucleotide
  Target: SCNA; (+) strand; PAM type: YTN; PAM sequence: CTT
acaattgatgaaggaagaat

SEQ ID NO: 70693 - DNA, 20 bp, Artificial Sequence
  Description of Artificial Sequence: Synthetic oligonucleotide
  Target: SCNA; (+) strand; PAM type: YTN; PAM sequence: TTA
caattgatgaaggaagaatg

SEQ ID NO: 70694 - DNA, 20 bp, Artificial Sequence
  Description of Artificial Sequence: Synthetic oligonucleotide
  Target: SCNA; (+) strand; PAM type: YTN; PAM sequence: TTG
atgaaggaagaatgatttta

SEQ ID NO: 70695 - DNA, 20 bp, Artificial Sequence
  Description of Artificial Sequence: Synthetic oligonucleotide
  Target: SCNA; (+) strand; PAM type: YTN; PAM sequence: TTT
taaaacacagagcaaaatgt

SEQ ID NO: 70696 - DNA, 20 bp, Artificial Sequence
  Description of Artificial Sequence: Synthetic oligonucleotide
  Target: SCNA; (+) strand; PAM type: YTN; PAM sequence: TTT
aaaacacagagcaaaatgtt

SEQ ID NO: 70697 - DNA, 20 bp, Artificial Sequence
  Description of Artificial Sequence: Synthetic oligonucleotide
  Target: SCNA; (+) strand; PAM type: YTN; PAM sequence: TTA
aaacacagagcaaaatgtta

SEQ ID NO: 70698 - DNA, 20 bp, Artificial Sequence
  Description of Artificial Sequence: Synthetic oligonucleotide
  Target: SCNA; (+) strand; PAM type: YTN; PAM sequence: TTA
ttttaaatacagaagtctat

SEQ ID NO: 70699 - DNA, 20 bp, Artificial Sequence
  Description of Artificial Sequence: Synthetic oligonucleotide
  Target: SCNA; (+) strand; PAM type: YTN; PAM sequence: TTT
taaatacagaagtctattct

SEQ ID NO: 70700 - DNA, 20 bp, Artificial Sequence
  Description of Artificial Sequence: Synthetic oligonucleotide
  Target: SCNA; (+) strand; PAM type: YTN; PAM sequence: TTT
aaatacagaagtctattctt

SEQ ID NO: 70701 - DNA, 20 bp, Artificial Sequence
  Description of Artificial Sequence: Synthetic oligonucleotide
  Target: SCNA; (+) strand; PAM type: YTN; PAM sequence: TTA
aatacagaagtctattcttc

SEQ ID NO: 70702 - DNA, 20 bp, Artificial Sequence
  Description of Artificial Sequence: Synthetic oligonucleotide
  Target: SCNA; (+) strand; PAM type: YTN; PAM sequence: CTA
ttcttctcctccatgaataa

SEQ ID NO: 70703 - DNA, 20 bp, Artificial Sequence
  Description of Artificial Sequence: Synthetic oligonucleotide
  Target: SCNA; (+) strand; PAM type: YTN; PAM sequence: TTC
ttctcctccatgaataactg

SEQ ID NO: 70704 - DNA, 20 bp, Artificial Sequence
  Description of Artificial Sequence: Synthetic oligonucleotide
  Target: SCNA; (+) strand; PAM type: YTN; PAM sequence: CTT
ctcctccatgaataactggc

SEQ ID NO: 70705 - DNA, 20 bp, Artificial Sequence
  Description of Artificial Sequence: Synthetic oligonucleotide
  Target: SCNA; (+) strand; PAM type: YTN; PAM sequence: TTC
tcctccatgaataactggca

SEQ ID NO: 70706 - DNA, 20 bp, Artificial Sequence
  Description of Artificial Sequence: Synthetic oligonucleotide
  Target: SCNA; (+) strand; PAM type: YTN; PAM sequence: CTC
ctccatgaataactggcatt

SEQ ID NO: 70707 - DNA, 20 bp, Artificial Sequence
  Description of Artificial Sequence: Synthetic oligonucleotide
  Target: SCNA; (+) strand; PAM type: YTN; PAM sequence: CTC
catgaataactggcattctg

SEQ ID NO: 70708 - DNA, 20 bp, Artificial Sequence
  Description of Artificial Sequence: Synthetic oligonucleotide
  Target: SCNA; (+) strand; PAM type: YTN; PAM sequence: CTG
gcattctgtttctattgtat

SEQ ID NO: 70709 - DNA, 20 bp, Artificial Sequence
  Description of Artificial Sequence: Synthetic oligonucleotide
  Target: SCNA; (+) strand; PAM type: YTN; PAM sequence: TTC
tgtttctattgtatattagg

SEQ ID NO: 70710 - DNA, 20 bp, Artificial Sequence
  Description of Artificial Sequence: Synthetic oligonucleotide
  Target: SCNA; (+) strand; PAM type: YTN; PAM sequence: CTG
tttctattgtatattaggtt

SEQ ID NO: 70711 - DNA, 20 bp, Artificial Sequence
  Description of Artificial Sequence: Synthetic oligonucleotide
  Target: SCNA; (+) strand; PAM type: YTN; PAM sequence: TTT
ctattgtatattaggttgaa

SEQ ID NO: 70712 - DNA, 20 bp, Artificial Sequence
  Description of Artificial Sequence: Synthetic oligonucleotide
  Target: SCNA; (+) strand; PAM type: YTN; PAM sequence: TTC
tattgtatattaggttgaaa

SEQ ID NO: 70713 - DNA, 20 bp, Artificial Sequence
  Description of Artificial Sequence: Synthetic oligonucleotide
  Target: SCNA; (+) strand; PAM type: YTN; PAM sequence: CTA
ttgtatattaggttgaaata

SEQ ID NO: 70714 - DNA, 20 bp, Artificial Sequence
  Description of Artificial Sequence: Synthetic oligonucleotide
  Target: SCNA; (+) strand; PAM type: YTN; PAM sequence: TTG
tatattaggttgaaatatgt

SEQ ID NO: 70715 - DNA, 20 bp, Artificial Sequence
  Description of Artificial Sequence: Synthetic oligonucleotide
  Target: SCNA; (+) strand; PAM type: YTN; PAM sequence: TTA
ggttgaaatatgtgtttttg

SEQ ID NO: 70716 - DNA, 20 bp, Artificial Sequence
  Description of Artificial Sequence: Synthetic oligonucleotide
  Target: SCNA; (+) strand; PAM type: YTN; PAM sequence: TTG
aaatatgtgtttttgtcatt

SEQ ID NO: 70717 - DNA, 20 bp, Artificial Sequence
  Description of Artificial Sequence: Synthetic oligonucleotide
  Target: SCNA; (+) strand; PAM type: YTN; PAM sequence: TTT
ttgtcattaccagtgtttcc

SEQ ID NO: 70718 - DNA, 20 bp, Artificial Sequence
  Description of Artificial Sequence: Synthetic oligonucleotide
  Target: SCNA; (+) strand; PAM type: YTN; PAM sequence: TTT
tgtcattaccagtgtttcca

SEQ ID NO: 70719 - DNA, 20 bp, Artificial Sequence
  Description of Artificial Sequence: Synthetic oligonucleotide
  Target: SCNA; (+) strand; PAM type: YTN; PAM sequence: TTT
gtcattaccagtgtttccac

SEQ ID NO: 70720 - DNA, 20 bp, Artificial Sequence
  Description of Artificial Sequence: Synthetic oligonucleotide
  Target: SCNA; (+) strand; PAM type: YTN; PAM sequence: TTG
tcattaccagtgtttccaca

SEQ ID NO: 70721 - DNA, 20 bp, Artificial Sequence
  Description of Artificial Sequence: Synthetic oligonucleotide
  Target: SCNA; (+) strand; PAM type: YTN; PAM sequence: TTA
ccagtgtttccacaggataa

SEQ ID NO: 70722 - DNA, 20 bp, Artificial Sequence
  Description of Artificial Sequence: Synthetic oligonucleotide
  Target: SCNA; (+) strand; PAM type: YTN; PAM sequence: TTT
ccacaggataagactgaagg

SEQ ID NO: 70723 - DNA, 20 bp, Artificial Sequence
  Description of Artificial Sequence: Synthetic oligonucleotide
  Target: SCNA; (+) strand; PAM type: YTN; PAM sequence: TTC
cacaggataagactgaaggc

SEQ ID NO: 70724 - DNA, 20 bp, Artificial Sequence
  Description of Artificial Sequence: Synthetic oligonucleotide
  Target: SCNA; (+) strand; PAM type: YTN; PAM sequence: CTG
aaggcacaagcatttaatat

SEQ ID NO: 70725 - DNA, 20 bp, Artificial Sequence
  Description of Artificial Sequence: Synthetic oligonucleotide
  Target: SCNA; (+) strand; PAM type: YTN; PAM sequence: TTT
aatatttgctgaaagcactt

SEQ ID NO: 70726 - DNA, 20 bp, Artificial Sequence
  Description of Artificial Sequence: Synthetic oligonucleotide
  Target: SCNA; (+) strand; PAM type: YTN; PAM sequence: TTA
atatttgctgaaagcactta

SEQ ID NO: 70727 - DNA, 20 bp, Artificial Sequence
  Description of Artificial Sequence: Synthetic oligonucleotide
  Target: SCNA; (+) strand; PAM type: YTN; PAM sequence: TTT
gctgaaagcacttaaacaga

SEQ ID NO: 70728 - DNA, 20 bp, Artificial Sequence
  Description of Artificial Sequence: Synthetic oligonucleotide
  Target: SCNA; (+) strand; PAM type: YTN; PAM sequence: TTG
ctgaaagcacttaaacagaa

SEQ ID NO: 70729 - DNA, 20 bp, Artificial Sequence
  Description of Artificial Sequence: Synthetic oligonucleotide
  Target: SCNA; (+) strand; PAM type: YTN; PAM sequence: CTG
aaagcacttaaacagaaaaa

SEQ ID NO: 70730 - DNA, 20 bp, Artificial Sequence
  Description of Artificial Sequence: Synthetic oligonucleotide
  Target: SCNA; (+) strand; PAM type: YTN; PAM sequence: CTT
aaacagaaaaaatattggct

SEQ ID NO: 70731 - DNA, 20 bp, Artificial Sequence
  Description of Artificial Sequence: Synthetic oligonucleotide
  Target: SCNA; (+) strand; PAM type: YTN; PAM sequence: TTA
aacagaaaaaatattggcta

SEQ ID NO: 70732 - DNA, 20 bp, Artificial Sequence
  Description of Artificial Sequence: Synthetic oligonucleotide
  Target: SCNA; (+) strand; PAM type: YTN; PAM sequence: TTG
gctagtgagattaagaatga

SEQ ID NO: 70733 - DNA, 20 bp, Artificial Sequence
  Description of Artificial Sequence: Synthetic oligonucleotide
  Target: SCNA; (+) strand; PAM type: YTN; PAM sequence: CTA
gtgagattaagaatgaaata

SEQ ID NO: 70734 - DNA, 20 bp, Artificial Sequence
  Description of Artificial Sequence: Synthetic oligonucleotide
  Target: SCNA; (+) strand; PAM type: YTN; PAM sequence: TTA
agaatgaaataaggtagaca

SEQ ID NO: 70735 - DNA, 20 bp, Artificial Sequence
  Description of Artificial Sequence: Synthetic oligonucleotide
  Target: SCNA; (+) strand; PAM type: YTN; PAM sequence: CTG
gctgcaaaagagaccttaaa

SEQ ID NO: 70736 - DNA, 20 bp, Artificial Sequence
  Description of Artificial Sequence: Synthetic oligonucleotide
  Target: SCNA; (+) strand; PAM type: YTN; PAM sequence: CTG
caaaagagaccttaaaaagt

SEQ ID NO: 70737 - DNA, 20 bp, Artificial Sequence
  Description of Artificial Sequence: Synthetic oligonucleotide
  Target: SCNA; (+) strand; PAM type: YTN; PAM sequence: CTT
aaaaagtttctcagagcctg

SEQ ID NO: 70738 - DNA, 20 bp, Artificial Sequence
  Description of Artificial Sequence: Synthetic oligonucleotide
  Target: SCNA; (+) strand; PAM type: YTN; PAM sequence: TTA
aaaagtttctcagagcctgg

SEQ ID NO: 70739 - DNA, 20 bp, Artificial Sequence
  Description of Artificial Sequence: Synthetic oligonucleotide
  Target: SCNA; (+) strand; PAM type: YTN; PAM sequence: TTT
ctcagagcctggccaaaatg

SEQ ID NO: 70740 - DNA, 20 bp, Artificial Sequence
  Description of Artificial Sequence: Synthetic oligonucleotide
  Target: SCNA; (+) strand; PAM type: YTN; PAM sequence: TTC
tcagagcctggccaaaatgg

SEQ ID NO: 70741 - DNA, 20 bp, Artificial Sequence
  Description of Artificial Sequence: Synthetic oligonucleotide
  Target: SCNA; (+) strand; PAM type: YTN; PAM sequence: CTC
agagcctggccaaaatggca

SEQ ID NO: 70742 - DNA, 20 bp, Artificial Sequence
  Description of Artificial Sequence: Synthetic oligonucleotide
  Target: SCNA; (+) strand; PAM type: YTN; PAM sequence: CTG
gccaaaatggcaaaacccca

SEQ ID NO: 70743 - DNA, 20 bp, Artificial Sequence
  Description of Artificial Sequence: Synthetic oligonucleotide
  Target: SCNA; (+) strand; PAM type: YTN; PAM sequence: CTC
tactaagaatacaaaaatta

SEQ ID NO: 70744 - DNA, 20 bp, Artificial Sequence
  Description of Artificial Sequence: Synthetic oligonucleotide
  Target: SCNA; (+) strand; PAM type: YTN; PAM sequence: CTA
ctaagaatacaaaaattagt

SEQ ID NO: 70745 - DNA, 20 bp, Artificial Sequence
  Description of Artificial Sequence: Synthetic oligonucleotide
  Target: SCNA; (+) strand; PAM type: YTN; PAM sequence: CTA
agaatacaaaaattagtggg

SEQ ID NO: 70746 - DNA, 20 bp, Artificial Sequence
  Description of Artificial Sequence: Synthetic oligonucleotide
  Target: SCNA; (+) strand; PAM type: YTN; PAM sequence: TTA
gtggggtgtggtaccatgca

SEQ ID NO: 70747 - DNA, 20 bp, Artificial Sequence
  Description of Artificial Sequence: Synthetic oligonucleotide
  Target: SCNA; (+) strand; PAM type: YTN; PAM sequence: CTG
taatctcagctactcaagag

SEQ ID NO: 70748 - DNA, 20 bp, Artificial Sequence
  Description of Artificial Sequence: Synthetic oligonucleotide
  Target: SCNA; (+) strand; PAM type: YTN; PAM sequence: CTC
agctactcaagaggctgagg

SEQ ID NO: 70749 - DNA, 20 bp, Artificial Sequence
  Description of Artificial Sequence: Synthetic oligonucleotide
  Target: SCNA; (+) strand; PAM type: YTN; PAM sequence: CTA
ctcaagaggctgaggcagga

SEQ ID NO: 70750 - DNA, 20 bp, Artificial Sequence
  Description of Artificial Sequence: Synthetic oligonucleotide
  Target: SCNA; (+) strand; PAM type: YTN; PAM sequence: CTC
aagaggctgaggcaggagaa

SEQ ID NO: 70751 - DNA, 20 bp, Artificial Sequence
  Description of Artificial Sequence: Synthetic oligonucleotide
  Target: SCNA; (+) strand; PAM type: YTN; PAM sequence: CTG
aggcaggagaattgcttgaa

SEQ ID NO: 70752 - DNA, 20 bp, Artificial Sequence
  Description of Artificial Sequence: Synthetic oligonucleotide
  Target: SCNA; (+) strand; PAM type: YTN; PAM sequence: TTG
cttgaacccaggaggcagag

SEQ ID NO: 70753 - DNA, 20 bp, Artificial Sequence
  Description of Artificial Sequence: Synthetic oligonucleotide
  Target: SCNA; (+) strand; PAM type: YTN; PAM sequence: CTT
gaacccaggaggcagaggta

SEQ ID NO: 70754 - DNA, 20 bp, Artificial Sequence
  Description of Artificial Sequence: Synthetic oligonucleotide
  Target: SCNA; (+) strand; PAM type: YTN; PAM sequence: TTG
aacccaggaggcagaggtag

SEQ ID NO: 70755 - DNA, 20 bp, Artificial Sequence
  Description of Artificial Sequence: Synthetic oligonucleotide
  Target: SCNA; (+) strand; PAM type: YTN; PAM sequence: TTG
cagtgagccaagatcatggc

SEQ ID NO: 70756 - DNA, 20 bp, Artificial Sequence
  Description of Artificial Sequence: Synthetic oligonucleotide
  Target: SCNA; (+) strand; PAM type: YTN; PAM sequence: CTG
tattccagcctgggcaatag

SEQ ID NO: 70757 - DNA, 20 bp, Artificial Sequence
  Description of Artificial Sequence: Synthetic oligonucleotide
  Target: SCNA; (+) strand; PAM type: YTN; PAM sequence: TTC
cagcctgggcaatagagcaa

SEQ ID NO: 70758 - DNA, 20 bp, Artificial Sequence
  Description of Artificial Sequence: Synthetic oligonucleotide
  Target: SCNA; (+) strand; PAM type: YTN; PAM sequence: CTG
ggcaatagagcaagactctg

SEQ ID NO: 70759 - DNA, 20 bp, Artificial Sequence
  Description of Artificial Sequence: Synthetic oligonucleotide
  Target: SCNA; (+) strand; PAM type: YTN; PAM sequence: CTC
tgtctcaaaaaaagaaagtt

SEQ ID NO: 70760 - DNA, 20 bp, Artificial Sequence
  Description of Artificial Sequence: Synthetic oligonucleotide
  Target: SCNA; (+) strand; PAM type: YTN; PAM sequence: CTG
tctcaaaaaaagaaagttta

SEQ ID NO: 70761 - DNA, 20 bp, Artificial Sequence
  Description of Artificial Sequence: Synthetic oligonucleotide
  Target: SCNA; (+) strand; PAM type: YTN; PAM sequence: CTC
aaaaaaagaaagtttatcag

SEQ ID NO: 70762 - DNA, 20 bp, Artificial Sequence
  Description of Artificial Sequence: Synthetic oligonucleotide
  Target: SCNA; (+) strand; PAM type: YTN; PAM sequence: TTT
atcagtctattaagaatata

SEQ ID NO: 70763 - DNA, 20 bp, Artificial Sequence
  Description of Artificial Sequence: Synthetic oligonucleotide
  Target: SCNA; (+) strand; PAM type: YTN; PAM sequence: TTA
tcagtctattaagaatatac

SEQ ID NO: 70764 - DNA, 20 bp, Artificial Sequence
  Description of Artificial Sequence: Synthetic oligonucleotide
  Target: SCNA; (+) strand; PAM type: YTN; PAM sequence: CTA
ttaagaatatacttgatttt

SEQ ID NO: 70765 - DNA, 20 bp, Artificial Sequence
  Description of Artificial Sequence: Synthetic oligonucleotide
  Target: SCNA; (+) strand; PAM type: YTN; PAM sequence: TTA
agaatatacttgatttttac

SEQ ID NO: 70766 - DNA, 20 bp, Artificial Sequence
  Description of Artificial Sequence: Synthetic oligonucleotide
  Target: SCNA; (+) strand; PAM type: YTN; PAM sequence: CTT
gatttttacaagaagaatca

SEQ ID NO: 70767 - DNA, 20 bp, Artificial Sequence
  Description of Artificial Sequence: Synthetic oligonucleotide
  Target: SCNA; (+) strand; PAM type: YTN; PAM sequence: TTG
atttttacaagaagaatcaa

SEQ ID NO: 70768 - DNA, 20 bp, Artificial Sequence
  Description of Artificial Sequence: Synthetic oligonucleotide
  Target: SCNA; (+) strand; PAM type: YTN; PAM sequence: TTT
ttacaagaagaatcaattgc

SEQ ID NO: 70769 - DNA, 20 bp, Artificial Sequence
  Description of Artificial Sequence: Synthetic oligonucleotide
  Target: SCNA; (+) strand; PAM type: YTN; PAM sequence: TTT
tacaagaagaatcaattgct

SEQ ID NO: 70770 - DNA, 20 bp, Artificial Sequence
  Description of Artificial Sequence: Synthetic oligonucleotide
  Target: SCNA; (+) strand; PAM type: YTN; PAM sequence: TTT
acaagaagaatcaattgctt

SEQ ID NO: 70771 - DNA, 20 bp, Artificial Sequence
  Description of Artificial Sequence: Synthetic oligonucleotide
  Target: SCNA; (+) strand; PAM type: YTN; PAM sequence: TTA
caagaagaatcaattgcttt

SEQ ID NO: 70772 - DNA, 20 bp, Artificial Sequence
  Description of Artificial Sequence: Synthetic oligonucleotide
  Target: SCNA; (+) strand; PAM type: YTN; PAM sequence: TTG
ctttacaaagttatttatct

SEQ ID NO: 70773 - DNA, 20 bp, Artificial Sequence
  Description of Artificial Sequence: Synthetic oligonucleotide
  Target: SCNA; (+) strand; PAM type: YTN; PAM sequence: CTT
tacaaagttatttatctaaa

SEQ ID NO: 70774 - DNA, 20 bp, Artificial Sequence
  Description of Artificial Sequence: Synthetic oligonucleotide
  Target: SCNA; (+) strand; PAM type: YTN; PAM sequence: TTT
acaaagttatttatctaaaa

SEQ ID NO: 70775 - DNA, 20 bp, Artificial Sequence
  Description of Artificial Sequence: Synthetic oligonucleotide
  Target: SCNA; (+) strand; PAM type: YTN; PAM sequence: TTA
caaagttatttatctaaaat

SEQ ID NO: 70776 - DNA, 20 bp, Artificial Sequence
  Description of Artificial Sequence: Synthetic oligonucleotide
  Target: SCNA; (+) strand; PAM type: YTN; PAM sequence: TTA
tttatctaaaatgtatgaat

SEQ ID NO: 70777 - DNA, 20 bp, Artificial Sequence
  Description of Artificial Sequence: Synthetic oligonucleotide
  Target: SCNA; (+) strand; PAM type: YTN; PAM sequence: TTT
atctaaaatgtatgaataaa

SEQ ID NO: 70778 - DNA, 20 bp, Artificial Sequence
  Description of Artificial Sequence: Synthetic oligonucleotide
  Target: SCNA; (+) strand; PAM type: YTN; PAM sequence: TTA
tctaaaatgtatgaataaaa

SEQ ID NO: 70779 - DNA, 20 bp, Artificial Sequence
  Description of Artificial Sequence: Synthetic oligonucleotide
  Target: SCNA; (+) strand; PAM type: YTN; PAM sequence: CTA
aaatgtatgaataaaaatgt

SEQ ID NO: 70780 - DNA, 20 bp, Artificial Sequence
  Description of Artificial Sequence: Synthetic oligonucleotide
  Target: SCNA; (+) strand; PAM type: YTN; PAM sequence: CTA
taaacatatctataaaacta

SEQ ID NO: 70781 - DNA, 20 bp, Artificial Sequence
  Description of Artificial Sequence: Synthetic oligonucleotide
  Target: SCNA; (+) strand; PAM type: YTN; PAM sequence: CTA
taaaactagtaaagatcaaa

SEQ ID NO: 70782 - DNA, 20 bp, Artificial Sequence
  Description of Artificial Sequence: Synthetic oligonucleotide
  Target: SCNA; (+) strand; PAM type: YTN; PAM sequence: CTA
gtaaagatcaaaagctcagg

SEQ ID NO: 70783 - DNA, 20 bp, Artificial Sequence
  Description of Artificial Sequence: Synthetic oligonucleotide
  Target: SCNA; (+) strand; PAM type: YTN; PAM sequence: CTC
aggtatctttaactttctct

SEQ ID NO: 70784 - DNA, 20 bp, Artificial Sequence
  Description of Artificial Sequence: Synthetic oligonucleotide
  Target: SCNA; (+) strand; PAM type: YTN; PAM sequence: CTT
taactttctctgcttctact

SEQ ID NO: 70785 - DNA, 20 bp, Artificial Sequence
  Description of Artificial Sequence: Synthetic oligonucleotide
  Target: SCNA; (+) strand; PAM type: YTN; PAM sequence: TTT
aactttctctgcttctacta

SEQ ID NO: 70786 - DNA, 20 bp, Artificial Sequence
  Description of Artificial Sequence: Synthetic oligonucleotide
  Target: SCNA; (+) strand; PAM type: YTN; PAM sequence: TTA
actttctctgcttctactat

SEQ ID NO: 70787 - DNA, 20 bp, Artificial Sequence
  Description of Artificial Sequence: Synthetic oligonucleotide
  Target: SCNA; (+) strand; PAM type: YTN; PAM sequence: CTT
tctctgcttctactattcac

SEQ ID NO: 70788 - DNA, 20 bp, Artificial Sequence
  Description of Artificial Sequence: Synthetic oligonucleotide
  Target: SCNA; (+) strand; PAM type: YTN; PAM sequence: TTT
ctctgcttctactattcaca

SEQ ID NO: 70789 - DNA, 20 bp, Artificial Sequence
  Description of Artificial Sequence: Synthetic oligonucleotide
  Target: SCNA; (+) strand; PAM type: YTN; PAM sequence: TTC
tctgcttctactattcacaa

SEQ ID NO: 70790 - DNA, 20 bp, Artificial Sequence
  Description of Artificial Sequence: Synthetic oligonucleotide
  Target: SCNA; (+) strand; PAM type: YTN; PAM sequence: CTC
tgcttctactattcacaaaa

SEQ ID NO: 70791 - DNA, 20 bp, Artificial Sequence
  Description of Artificial Sequence: Synthetic oligonucleotide
  Target: SCNA; (+) strand; PAM type: YTN; PAM sequence: CTG
cttctactattcacaaaaat

SEQ ID NO: 70792 - DNA, 20 bp, Artificial Sequence
  Description of Artificial Sequence: Synthetic oligonucleotide
  Target: SCNA; (+) strand; PAM type: YTN; PAM sequence: CTT
ctactattcacaaaaatatt

SEQ ID NO: 70793 - DNA, 20 bp, Artificial Sequence
  Description of Artificial Sequence: Synthetic oligonucleotide
  Target: SCNA; (+) strand; PAM type: YTN; PAM sequence: TTC
tactattcacaaaaatattt

SEQ ID NO: 70794 - DNA, 20 bp, Artificial Sequence
  Description of Artificial Sequence: Synthetic oligonucleotide
  Target: SCNA; (+) strand; PAM type: YTN; PAM sequence: CTA
ctattcacaaaaatatttgc

SEQ ID NO: 70795 - DNA, 20 bp, Artificial Sequence
  Description of Artificial Sequence: Synthetic oligonucleotide
  Target: SCNA; (+) strand; PAM type: YTN; PAM sequence: CTA
ttcacaaaaatatttgctca

SEQ ID NO: 70796 - DNA, 20 bp, Artificial Sequence
  Description of Artificial Sequence: Synthetic oligonucleotide
  Target: SCNA; (+) strand; PAM type: YTN; PAM sequence: TTC
acaaaaatatttgctcagag

SEQ ID NO: 70797 - DNA, 20 bp, Artificial Sequence
  Description of Artificial Sequence: Synthetic oligonucleotide
  Target: SCNA; (+) strand; PAM type: YTN; PAM sequence: TTT
gctcagagacacagaaactc

SEQ ID NO: 70798 - DNA, 20 bp, Artificial Sequence
  Description of Artificial Sequence: Synthetic oligonucleotide
  Target: SCNA; (+) strand; PAM type: YTN; PAM sequence: TTG
ctcagagacacagaaactca

SEQ ID NO: 70799 - DNA, 20 bp, Artificial Sequence
  Description of Artificial Sequence: Synthetic oligonucleotide
  Target: SCNA; (+) strand; PAM type: YTN; PAM sequence: CTC
agagacacagaaactcatct

SEQ ID NO: 70800 - DNA, 20 bp, Artificial Sequence
  Description of Artificial Sequence: Synthetic oligonucleotide
  Target: SCNA; (+) strand; PAM type: YTN; PAM sequence: CTC
atcttcaagatttattttta

SEQ ID NO: 70801 - DNA, 20 bp, Artificial Sequence
  Description of Artificial Sequence: Synthetic oligonucleotide
  Target: SCNA; (+) strand; PAM type: YTN; PAM sequence: CTT
caagatttatttttatctgg

SEQ ID NO: 70802 - DNA, 20 bp, Artificial Sequence
  Description of Artificial Sequence: Synthetic oligonucleotide
  Target: SCNA; (+) strand; PAM type: YTN; PAM sequence: TTC
aagatttatttttatctggg

SEQ ID NO: 70803 - DNA, 20 bp, Artificial Sequence
  Description of Artificial Sequence: Synthetic oligonucleotide
  Target: SCNA; (+) strand; PAM type: YTN; PAM sequence: TTT
atttttatctgggtggagtt

SEQ ID NO: 70804 - DNA, 20 bp, Artificial Sequence
  Description of Artificial Sequence: Synthetic oligonucleotide
  Target: SCNA; (+) strand; PAM type: YTN; PAM sequence: TTA
tttttatctgggtggagtta

SEQ ID NO: 70805 - DNA, 20 bp, Artificial Sequence
  Description of Artificial Sequence: Synthetic oligonucleotide
  Target: SCNA; (+) strand; PAM type: YTN; PAM sequence: TTT
ttatctgggtggagttacag

SEQ ID NO: 70806 - DNA, 20 bp, Artificial Sequence
  Description of Artificial Sequence: Synthetic oligonucleotide
  Target: SCNA; (+) strand; PAM type: YTN; PAM sequence: TTT
tatctgggtggagttacaga

SEQ ID NO: 70807 - DNA, 20 bp, Artificial Sequence
  Description of Artificial Sequence: Synthetic oligonucleotide
  Target: SCNA; (+) strand; PAM type: YTN; PAM sequence: TTT
atctgggtggagttacagag

SEQ ID NO: 70808 - DNA, 20 bp, Artificial Sequence
  Description of Artificial Sequence: Synthetic oligonucleotide
  Target: SCNA; (+) strand; PAM type: YTN; PAM sequence: TTA
tctgggtggagttacagagt

SEQ ID NO: 70809 - DNA, 20 bp, Artificial Sequence
  Description of Artificial Sequence: Synthetic oligonucleotide
  Target: SCNA; (+) strand; PAM type: YTN; PAM sequence: CTG
ggtggagttacagagttgcc

SEQ ID NO: 70810 - DNA, 20 bp, Artificial Sequence
  Description of Artificial Sequence: Synthetic oligonucleotide
  Target: SCNA; (+) strand; PAM type: YTN; PAM sequence: TTA
cagagttgccttggtaacag

SEQ ID NO: 70811 - DNA, 20 bp, Artificial Sequence
  Description of Artificial Sequence: Synthetic oligonucleotide
  Target: SCNA; (+) strand; PAM type: YTN; PAM sequence: TTG
ccttggtaacagcaactatc

SEQ ID NO: 70812 - DNA, 20 bp, Artificial Sequence
  Description of Artificial Sequence: Synthetic oligonucleotide
  Target: SCNA; (+) strand; PAM type: YTN; PAM sequence: CTT
ggtaacagcaactatcacca

SEQ ID NO: 70813 - DNA, 20 bp, Artificial Sequence
  Description of Artificial Sequence: Synthetic oligonucleotide
  Target: SCNA; (+) strand; PAM type: YTN; PAM sequence: TTG
gtaacagcaactatcaccaa

SEQ ID NO: 70814 - DNA, 20 bp, Artificial Sequence
  Description of Artificial Sequence: Synthetic oligonucleotide
  Target: SCNA; (+) strand; PAM type: YTN; PAM sequence: CTA
tcaccaaattaagtgttaag

SEQ ID NO: 70815 - DNA, 20 bp, Artificial Sequence
  Description of Artificial Sequence: Synthetic oligonucleotide
  Target: SCNA; (+) strand; PAM type: YTN; PAM sequence: TTA
agtgttaagcacacgttttt

SEQ ID NO: 70816 - DNA, 20 bp, Artificial Sequence
  Description of Artificial Sequence: Synthetic oligonucleotide
  Target: SCNA; (+) strand; PAM type: YTN; PAM sequence: TTA
agcacacgtttttaaacatt

SEQ ID NO: 70817 - DNA, 20 bp, Artificial Sequence
  Description of Artificial Sequence: Synthetic oligonucleotide
  Target: SCNA; (+) strand; PAM type: YTN; PAM sequence: TTT
ttaaacatttttaacatttt

SEQ ID NO: 70818 - DNA, 20 bp, Artificial Sequence
  Description of Artificial Sequence: Synthetic oligonucleotide
  Target: SCNA; (+) strand; PAM type: YTN; PAM sequence: TTT
taaacatttttaacatttta

SEQ ID NO: 70819 - DNA, 20 bp, Artificial Sequence
  Description of Artificial Sequence: Synthetic oligonucleotide
  Target: SCNA; (+) strand; PAM type: YTN; PAM sequence: TTT
aaacatttttaacattttaa

SEQ ID NO: 70820 - DNA, 20 bp, Artificial Sequence
  Description of Artificial Sequence: Synthetic oligonucleotide
  Target: SCNA; (+) strand; PAM type: YTN; PAM sequence: TTA
aacatttttaacattttaaa

SEQ ID NO: 70821 - DNA, 20 bp, Artificial Sequence
  Description of Artificial Sequence: Synthetic oligonucleotide
  Target: SCNA; (+) strand; PAM type: YTN; PAM sequence: TTT
ttaacattttaaaaatgcag

SEQ ID NO: 70822 - DNA, 20 bp, Artificial Sequence
  Description of Artificial Sequence: Synthetic oligonucleotide
  Target: SCNA; (+) strand; PAM type: YTN; PAM sequence: TTT
taacattttaaaaatgcaga

SEQ ID NO: 70823 - DNA, 20 bp, Artificial Sequence
  Description of Artificial Sequence: Synthetic oligonucleotide
  Target: SCNA; (+) strand; PAM type: YTN; PAM sequence: TTT
aacattttaaaaatgcagat

SEQ ID NO: 70824 - DNA, 20 bp, Artificial Sequence
  Description of Artificial Sequence: Synthetic oligonucleotide
  Target: SCNA; (+) strand; PAM type: YTN; PAM sequence: TTA
acattttaaaaatgcagatg

SEQ ID NO: 70825 - DNA, 20 bp, Artificial Sequence
  Description of Artificial Sequence: Synthetic oligonucleotide
  Target: SCNA; (+) strand; PAM type: YTN; PAM sequence: TTT
taaaaatgcagatgccaaag

SEQ ID NO: 70826 - DNA, 20 bp, Artificial Sequence
  Description of Artificial Sequence: Synthetic oligonucleotide
  Target: SCNA; (+) strand; PAM type: YTN; PAM sequence: TTT
aaaaatgcagatgccaaagg

SEQ ID NO: 70827 - DNA, 20 bp, Artificial Sequence
  Description of Artificial Sequence: Synthetic oligonucleotide
  Target: SCNA; (+) strand; PAM type: YTN; PAM sequence: TTA
aaaatgcagatgccaaagga

SEQ ID NO: 70828 - DNA, 20 bp, Artificial Sequence
  Description of Artificial Sequence: Synthetic oligonucleotide
  Target: SCNA; (+) strand; PAM type: YTN; PAM sequence: TTG
taaactccctttttcccaca

SEQ ID NO: 70829 - DNA, 20 bp, Artificial Sequence
  Description of Artificial Sequence: Synthetic oligonucleotide
  Target: SCNA; (+) strand; PAM type: YTN; PAM sequence: CTC
cctttttcccacatctactt

SEQ ID NO: 70830 - DNA, 20 bp, Artificial Sequence
  Description of Artificial Sequence: Synthetic oligonucleotide
  Target: SCNA; (+) strand; PAM type: YTN; PAM sequence: CTT
tttcccacatctacttgaca

SEQ ID NO: 70831 - DNA, 20 bp, Artificial Sequence
  Description of Artificial Sequence: Synthetic oligonucleotide
  Target: SCNA; (+) strand; PAM type: YTN; PAM sequence: TTT
ttcccacatctacttgacat

SEQ ID NO: 70832 - DNA, 20 bp, Artificial Sequence
  Description of Artificial Sequence: Synthetic oligonucleotide
  Target: SCNA; (+) strand; PAM type: YTN; PAM sequence: TTT
tcccacatctacttgacatt

SEQ ID NO: 70833 - DNA, 20 bp, Artificial Sequence
  Description of Artificial Sequence: Synthetic oligonucleotide
  Target: SCNA; (+) strand; PAM type: YTN; PAM sequence: TTT
cccacatctacttgacatta

SEQ ID NO: 70834 - DNA, 20 bp, Artificial Sequence
  Description of Artificial Sequence: Synthetic oligonucleotide
  Target: SCNA; (+) strand; PAM type: YTN; PAM sequence: TTC
ccacatctacttgacattac

SEQ ID NO: 70835 - DNA, 20 bp, Artificial Sequence
  Description of Artificial Sequence: Synthetic oligonucleotide
  Target: SCNA; (+) strand; PAM type: YTN; PAM sequence: CTA
cttgacattacaaggtttgt

SEQ ID NO: 70836 - DNA, 20 bp, Artificial Sequence
  Description of Artificial Sequence: Synthetic oligonucleotide
  Target: SCNA; (+) strand; PAM type: YTN; PAM sequence: CTT
gacattacaaggtttgtact

SEQ ID NO: 70837 - DNA, 20 bp, Artificial Sequence
  Description of Artificial Sequence: Synthetic oligonucleotide
  Target: SCNA; (+) strand; PAM type: YTN; PAM sequence: TTG
acattacaaggtttgtacta

SEQ ID NO: 70838 - DNA, 20 bp, Artificial Sequence
  Description of Artificial Sequence: Synthetic oligonucleotide
  Target: SCNA; (+) strand; PAM type: YTN; PAM sequence: TTA
caaggtttgtactactttca

SEQ ID NO: 70839 - DNA, 20 bp, Artificial Sequence
  Description of Artificial Sequence: Synthetic oligonucleotide
  Target: SCNA; (+) strand; PAM type: YTN; PAM sequence: TTT
gtactactttcagaaattct

SEQ ID NO: 70840 - DNA, 20 bp, Artificial Sequence
  Description of Artificial Sequence: Synthetic oligonucleotide
  Target: SCNA; (+) strand; PAM type: YTN; PAM sequence: TTG
tactactttcagaaattctc

SEQ ID NO: 70841 - DNA, 20 bp, Artificial Sequence
  Description of Artificial Sequence: Synthetic oligonucleotide
  Target: SCNA; (+) strand; PAM type: YTN; PAM sequence: CTA
ctttcagaaattctccagtg

SEQ ID NO: 70842 - DNA, 20 bp, Artificial Sequence
  Description of Artificial Sequence: Synthetic oligonucleotide
  Target: SCNA; (+) strand; PAM type: YTN; PAM sequence: CTT
tcagaaattctccagtgttt

SEQ ID NO: 70843 - DNA, 20 bp, Artificial Sequence
  Description of Artificial Sequence: Synthetic oligonucleotide
  Target: SCNA; (+) strand; PAM type: YTN; PAM sequence: TTT
cagaaattctccagtgttta

SEQ ID NO: 70844 - DNA, 20 bp, Artificial Sequence
  Description of Artificial Sequence: Synthetic oligonucleotide
  Target: SCNA; (+) strand; PAM type: YTN; PAM sequence: TTC
agaaattctccagtgtttaa

SEQ ID NO: 70845 - DNA, 20 bp, Artificial Sequence
  Description of Artificial Sequence: Synthetic oligonucleotide
  Target: SCNA; (+) strand; PAM type: YTN; PAM sequence: TTC
tccagtgtttaaaaaatgcg

SEQ ID NO: 70846 - DNA, 20 bp, Artificial Sequence
  Description of Artificial Sequence: Synthetic oligonucleotide
  Target: SCNA; (+) strand; PAM type: YTN; PAM sequence: CTC
cagtgtttaaaaaatgcgtc

SEQ ID NO: 70847 - DNA, 20 bp, Artificial Sequence
  Description of Artificial Sequence: Synthetic oligonucleotide
  Target: SCNA; (+) strand; PAM type: YTN; PAM sequence: TTT
aaaaaatgcgtctataaaca

SEQ ID NO: 70848 - DNA, 20 bp, Artificial Sequence
  Description of Artificial Sequence: Synthetic oligonucleotide
  Target: SCNA; (+) strand; PAM type: YTN; PAM sequence: TTA
aaaaatgcgtctataaacac

SEQ ID NO: 70849 - DNA, 20 bp, Artificial Sequence
  Description of Artificial Sequence: Synthetic oligonucleotide
  Target: SCNA; (+) strand; PAM type: YTN; PAM sequence: CTA
taaacacacatatacacaga

SEQ ID NO: 70850 - DNA, 20 bp, Artificial Sequence
  Description of Artificial Sequence: Synthetic oligonucleotide
  Target: SCNA; (+) strand; PAM type: YTN; PAM sequence: CTT
cttattgaagtaatcacctt

SEQ ID NO: 70851 - DNA, 20 bp, Artificial Sequence
  Description of Artificial Sequence: Synthetic oligonucleotide
  Target: SCNA; (+) strand; PAM type: YTN; PAM sequence: TTC
ttattgaagtaatcacctta

SEQ ID NO: 70852 - DNA, 20 bp, Artificial Sequence
  Description of Artificial Sequence: Synthetic oligonucleotide
  Target: SCNA; (+) strand; PAM type: YTN; PAM sequence: CTT
attgaagtaatcaccttaaa

SEQ ID NO: 70853 - DNA, 20 bp, Artificial Sequence
  Description of Artificial Sequence: Synthetic oligonucleotide
  Target: SCNA; (+) strand; PAM type: YTN; PAM sequence: TTA
ttgaagtaatcaccttaaaa

SEQ ID NO: 70854 - DNA, 20 bp, Artificial Sequence
  Description of Artificial Sequence: Synthetic oligonucleotide
  Target: SCNA; (+) strand; PAM type: YTN; PAM sequence: TTG
aagtaatcaccttaaaaatt

SEQ ID NO: 70855 - DNA, 20 bp, Artificial Sequence
  Description of Artificial Sequence: Synthetic oligonucleotide
  Target: SCNA; (+) strand; PAM type: YTN; PAM sequence: CTT
aaaaattatgtaatgcaatg

SEQ ID NO: 70856 - DNA, 20 bp, Artificial Sequence
  Description of Artificial Sequence: Synthetic oligonucleotide
  Target: SCNA; (+) strand; PAM type: YTN; PAM sequence: TTA
aaaattatgtaatgcaatga

SEQ ID NO: 70857 - DNA, 20 bp, Artificial Sequence
  Description of Artificial Sequence: Synthetic oligonucleotide
  Target: SCNA; (+) strand; PAM type: YTN; PAM sequence: TTA
tgtaatgcaatgaaaaccac

SEQ ID NO: 70858 - DNA, 20 bp, Artificial Sequence
  Description of Artificial Sequence: Synthetic oligonucleotide
  Target: SCNA; (+) strand; PAM type: YTN; PAM sequence: TTT
tcctaccattgactaagaaa

SEQ ID NO: 70859 - DNA, 20 bp, Artificial Sequence
  Description of Artificial Sequence: Synthetic oligonucleotide
  Target: SCNA; (+) strand; PAM type: YTN; PAM sequence: TTT
cctaccattgactaagaaag

SEQ ID NO: 70860 - DNA, 20 bp, Artificial Sequence
  Description of Artificial Sequence: Synthetic oligonucleotide
  Target: SCNA; (+) strand; PAM type: YTN; PAM sequence: TTC
ctaccattgactaagaaagc

SEQ ID NO: 70861 - DNA, 20 bp, Artificial Sequence
  Description of Artificial Sequence: Synthetic oligonucleotide
  Target: SCNA; (+) strand; PAM type: YTN; PAM sequence: CTA
ccattgactaagaaagcaaa

SEQ ID NO: 70862 - DNA, 20 bp, Artificial Sequence
  Description of Artificial Sequence: Synthetic oligonucleotide
  Target: SCNA; (+) strand; PAM type: YTN; PAM sequence: TTG
actaagaaagcaaaggacct

SEQ ID NO: 70863 - DNA, 20 bp, Artificial Sequence
  Description of Artificial Sequence: Synthetic oligonucleotide
  Target: SCNA; (+) strand; PAM type: YTN; PAM sequence: CTA
agaaagcaaaggacctttct

SEQ ID NO: 70864 - DNA, 20 bp, Artificial Sequence
  Description of Artificial Sequence: Synthetic oligonucleotide
  Target: SCNA; (+) strand; PAM type: YTN; PAM sequence: CTT
tcttctgaaagtgaggagga

SEQ ID NO: 70865 - DNA, 20 bp, Artificial Sequence
  Description of Artificial Sequence: Synthetic oligonucleotide
  Target: SCNA; (+) strand; PAM type: YTN; PAM sequence: TTT
cttctgaaagtgaggaggac

SEQ ID NO: 70866 - DNA, 20 bp, Artificial Sequence
  Description of Artificial Sequence: Synthetic oligonucleotide
  Target: SCNA; (+) strand; PAM type: YTN; PAM sequence: TTC
ttctgaaagtgaggaggacc

SEQ ID NO: 70867 - DNA, 20 bp, Artificial Sequence
  Description of Artificial Sequence: Synthetic oligonucleotide
  Target: SCNA; (+) strand; PAM type: YTN; PAM sequence: CTT
ctgaaagtgaggaggacctc

SEQ ID NO: 70868 - DNA, 20 bp, Artificial Sequence
  Description of Artificial Sequence: Synthetic oligonucleotide
  Target: SCNA; (+) strand; PAM type: YTN; PAM sequence: TTC
tgaaagtgaggaggacctct

SEQ ID NO: 70869 - DNA, 20 bp, Artificial Sequence
  Description of Artificial Sequence: Synthetic oligonucleotide
  Target: SCNA; (+) strand; PAM type: YTN; PAM sequence: CTG
aaagtgaggaggacctcttg

SEQ ID NO: 70870 - DNA, 20 bp, Artificial Sequence
  Description of Artificial Sequence: Synthetic oligonucleotide
  Target: SCNA; (+) strand; PAM type: YTN; PAM sequence: CTC
ttgcctcctgtcatttgtga

SEQ ID NO: 70871 - DNA, 20 bp, Artificial Sequence
  Description of Artificial Sequence: Synthetic oligonucleotide
  Target: SCNA; (+) strand; PAM type: YTN; PAM sequence: CTT
gcctcctgtcatttgtgaat

SEQ ID NO: 70872 - DNA, 20 bp, Artificial Sequence
  Description of Artificial Sequence: Synthetic oligonucleotide
  Target: SCNA; (+) strand; PAM type: YTN; PAM sequence: TTG
cctcctgtcatttgtgaata

SEQ ID NO: 70873 - DNA, 20 bp, Artificial Sequence
  Description of Artificial Sequence: Synthetic oligonucleotide
  Target: SCNA; (+) strand; PAM type: YTN; PAM sequence: CTC
ctgtcatttgtgaatagaac

SEQ ID NO: 70874 - DNA, 20 bp, Artificial Sequence
  Description of Artificial Sequence: Synthetic oligonucleotide
  Target: SCNA; (+) strand; PAM type: YTN; PAM sequence: CTG
tcatttgtgaatagaactct

SEQ ID NO: 70875 - DNA, 20 bp, Artificial Sequence
  Description of Artificial Sequence: Synthetic oligonucleotide
  Target: SCNA; (+) strand; PAM type: YTN; PAM sequence: TTT
gtgaatagaactctgtagtc

SEQ ID NO: 70876 - DNA, 20 bp, Artificial Sequence
  Description of Artificial Sequence: Synthetic oligonucleotide
  Target: SCNA; (+) strand; PAM type: YTN; PAM sequence: TTG
tgaatagaactctgtagtca

SEQ ID NO: 70877 - DNA, 20 bp, Artificial Sequence
  Description of Artificial Sequence: Synthetic oligonucleotide
  Target: SCNA; (+) strand; PAM type: YTN; PAM sequence: CTC
tgtagtcagaaccagagcat

SEQ ID NO: 70878 - DNA, 20 bp, Artificial Sequence
  Description of Artificial Sequence: Synthetic oligonucleotide
  Target: SCNA; (+) strand; PAM type: YTN; PAM sequence: CTG
tagtcagaaccagagcattt

SEQ ID NO: 70879 - DNA, 20 bp, Artificial Sequence
  Description of Artificial Sequence: Synthetic oligonucleotide
  Target: SCNA; (+) strand; PAM type: YTN; PAM sequence: TTT
ctggcatttggtctagaatc

SEQ ID NO: 70880 - DNA, 20 bp, Artificial Sequence
  Description of Artificial Sequence: Synthetic oligonucleotide
  Target: SCNA; (+) strand; PAM type: YTN; PAM sequence: TTC
tggcatttggtctagaatca

SEQ ID NO: 70881 - DNA, 20 bp, Artificial Sequence
  Description of Artificial Sequence: Synthetic oligonucleotide
  Target: SCNA; (+) strand; PAM type: YTN; PAM sequence: CTG
gcatttggtctagaatcatt

SEQ ID NO: 70882 - DNA, 20 bp, Artificial Sequence
  Description of Artificial Sequence: Synthetic oligonucleotide
  Target: SCNA; (+) strand; PAM type: YTN; PAM sequence: TTT
ggtctagaatcattctgaag

SEQ ID NO: 70883 - DNA, 20 bp, Artificial Sequence
  Description of Artificial Sequence: Synthetic oligonucleotide
  Target: SCNA; (+) strand; PAM type: YTN; PAM sequence: TTG
gtctagaatcattctgaagg

SEQ ID NO: 70884 - DNA, 20 bp, Artificial Sequence
  Description of Artificial Sequence: Synthetic oligonucleotide
  Target: SCNA; (+) strand; PAM type: YTN; PAM sequence: CTA
gaatcattctgaagggcaag

SEQ ID NO: 70885 - DNA, 20 bp, Artificial Sequence
  Description of Artificial Sequence: Synthetic oligonucleotide
  Target: SCNA; (+) strand; PAM type: YTN; PAM sequence: TTC
tgaagggcaagcctggtgct

SEQ ID NO: 70886 - DNA, 20 bp, Artificial Sequence
  Description of Artificial Sequence: Synthetic oligonucleotide
  Target: SCNA; (+) strand; PAM type: YTN; PAM sequence: CTG
aagggcaagcctggtgctgt

SEQ ID NO: 70887 - DNA, 20 bp, Artificial Sequence
  Description of Artificial Sequence: Synthetic oligonucleotide
  Target: SCNA; (+) strand; PAM type: YTN; PAM sequence: CTG
gtgctgtgttgctaagcaca

SEQ ID NO: 70888 - DNA, 20 bp, Artificial Sequence
  Description of Artificial Sequence: Synthetic oligonucleotide
  Target: SCNA; (+) strand; PAM type: YTN; PAM sequence: CTG
tgttgctaagcacaaacaat

SEQ ID NO: 70889 - DNA, 20 bp, Artificial Sequence
  Description of Artificial Sequence: Synthetic oligonucleotide
  Target: SCNA; (+) strand; PAM type: YTN; PAM sequence: TTG
ctaagcacaaacaatttggt

SEQ ID NO: 70890 - DNA, 20 bp, Artificial Sequence
  Description of Artificial Sequence: Synthetic oligonucleotide
  Target: SCNA; (+) strand; PAM type: YTN; PAM sequence: CTA
agcacaaacaatttggtatt

SEQ ID NO: 70891 - DNA, 20 bp, Artificial Sequence
  Description of Artificial Sequence: Synthetic oligonucleotide
  Target: SCNA; (+) strand; PAM type: YTN; PAM sequence: TTT
ggtatttggctccaaaaata

SEQ ID NO: 70892 - DNA, 20 bp, Artificial Sequence
  Description of Artificial Sequence: Synthetic oligonucleotide
  Target: SCNA; (+) strand; PAM type: YTN; PAM sequence: TTG
gtatttggctccaaaaatat

SEQ ID NO: 70893 - DNA, 20 bp, Artificial Sequence
  Description of Artificial Sequence: Synthetic oligonucleotide
  Target: SCNA; (+) strand; PAM type: YTN; PAM sequence: TTT
ggctccaaaaatatgctcga

SEQ ID NO: 70894 - DNA, 20 bp, Artificial Sequence
  Description of Artificial Sequence: Synthetic oligonucleotide
  Target: SCNA; (+) strand; PAM type: YTN; PAM sequence: TTG
gctccaaaaatatgctcgag

SEQ ID NO: 70895 - DNA, 20 bp, Artificial Sequence
  Description of Artificial Sequence: Synthetic oligonucleotide
  Target: SCNA; (+) strand; PAM type: YTN; PAM sequence: CTC
caaaaatatgctcgagatta

SEQ ID NO: 70896 - DNA, 20 bp, Artificial Sequence
  Description of Artificial Sequence: Synthetic oligonucleotide
  Target: SCNA; (+) strand; PAM type: YTN; PAM sequence: CTC
gagattagttcttccctcag

SEQ ID NO: 70897 - DNA, 20 bp, Artificial Sequence
  Description of Artificial Sequence: Synthetic oligonucleotide
  Target: SCNA; (+) strand; PAM type: YTN; PAM sequence: TTA
gttcttccctcagcaacagg

SEQ ID NO: 70898 - DNA, 20 bp, Artificial Sequence
  Description of Artificial Sequence: Synthetic oligonucleotide
  Target: SCNA; (+) strand; PAM type: YTN; PAM sequence: TTC
ttccctcagcaacaggcgct

SEQ ID NO: 70899 - DNA, 20 bp, Artificial Sequence
  Description of Artificial Sequence: Synthetic oligonucleotide
  Target: SCNA; (+) strand; PAM type: YTN; PAM sequence: CTT
ccctcagcaacaggcgctca

SEQ ID NO: 70900 - DNA, 20 bp, Artificial Sequence
  Description of Artificial Sequence: Synthetic oligonucleotide
  Target: SCNA; (+) strand; PAM type: YTN; PAM sequence: TTC
cctcagcaacaggcgctcag

SEQ ID NO: 70901 - DNA, 20 bp, Artificial Sequence
  Description of Artificial Sequence: Synthetic oligonucleotide
  Target: SCNA; (+) strand; PAM type: YTN; PAM sequence: CTC
agcaacaggcgctcagccaa

SEQ ID NO: 70902 - DNA, 20 bp, Artificial Sequence
  Description of Artificial Sequence: Synthetic oligonucleotide
  Target: SCNA; (+) strand; PAM type: YTN; PAM sequence: CTC
agccaaataatttttaacca

SEQ ID NO: 70903 - DNA, 20 bp, Artificial Sequence
  Description of Artificial Sequence: Synthetic oligonucleotide
  Target: SCNA; (+) strand; PAM type: YTN; PAM sequence: TTT
ttaaccaactctcagagccc

SEQ ID NO: 70904 - DNA, 20 bp, Artificial Sequence
  Description of Artificial Sequence: Synthetic oligonucleotide
  Target: SCNA; (+) strand; PAM type: YTN; PAM sequence: TTT
taaccaactctcagagccca

SEQ ID NO: 70905 - DNA, 20 bp, Artificial Sequence
  Description of Artificial Sequence: Synthetic oligonucleotide
  Target: SCNA; (+) strand; PAM type: YTN; PAM sequence: TTT
aaccaactctcagagcccag

SEQ ID NO: 70906 - DNA, 20 bp, Artificial Sequence
  Description of Artificial Sequence: Synthetic oligonucleotide
  Target: SCNA; (+) strand; PAM type: YTN; PAM sequence: TTA
accaactctcagagcccagt

SEQ ID NO: 70907 - DNA, 20 bp, Artificial Sequence
  Description of Artificial Sequence: Synthetic oligonucleotide
  Target: SCNA; (+) strand; PAM type: YTN; PAM sequence: CTC
tcagagcccagtattgcttg

SEQ ID NO: 70908 - DNA, 20 bp, Artificial Sequence
  Description of Artificial Sequence: Synthetic oligonucleotide
  Target: SCNA; (+) strand; PAM type: YTN; PAM sequence: CTC
agagcccagtattgcttgag

SEQ ID NO: 70909 - DNA, 20 bp, Artificial Sequence
  Description of Artificial Sequence: Synthetic oligonucleotide
  Target: SCNA; (+) strand; PAM type: YTN; PAM sequence: TTG
cttgagctactgagatccta

SEQ ID NO: 70910 - DNA, 20 bp, Artificial Sequence
  Description of Artificial Sequence: Synthetic oligonucleotide
  Target: SCNA; (+) strand; PAM type: YTN; PAM sequence: CTT
gagctactgagatcctattt

SEQ ID NO: 70911 - DNA, 20 bp, Artificial Sequence
  Description of Artificial Sequence: Synthetic oligonucleotide
  Target: SCNA; (+) strand; PAM type: YTN; PAM sequence: TTG
agctactgagatcctatttc

SEQ ID NO: 70912 - DNA, 20 bp, Artificial Sequence
  Description of Artificial Sequence: Synthetic oligonucleotide
  Target: SCNA; (+) strand; PAM type: YTN; PAM sequence: CTA
ctgagatcctatttcaagtt

SEQ ID NO: 70913 - DNA, 20 bp, Artificial Sequence
  Description of Artificial Sequence: Synthetic oligonucleotide
  Target: SCNA; (+) strand; PAM type: YTN; PAM sequence: CTG
agatcctatttcaagttatt

SEQ ID NO: 70914 - DNA, 20 bp, Artificial Sequence
  Description of Artificial Sequence: Synthetic oligonucleotide
  Target: SCNA; (+) strand; PAM type: YTN; PAM sequence: CTA
tttcaagttattgctatcaa

SEQ ID NO: 70915 - DNA, 20 bp, Artificial Sequence
  Description of Artificial Sequence: Synthetic oligonucleotide
  Target: SCNA; (+) strand; PAM type: YTN; PAM sequence: TTT
caagttattgctatcaagat

SEQ ID NO: 70916 - DNA, 20 bp, Artificial Sequence
  Description of Artificial Sequence: Synthetic oligonucleotide
  Target: SCNA; (+) strand; PAM type: YTN; PAM sequence: TTC
aagttattgctatcaagata

SEQ ID NO: 70917 - DNA, 20 bp, Artificial Sequence
  Description of Artificial Sequence: Synthetic oligonucleotide
  Target: SCNA; (+) strand; PAM type: YTN; PAM sequence: TTA
ttgctatcaagatatggagg

SEQ ID NO: 70918 - DNA, 20 bp, Artificial Sequence
  Description of Artificial Sequence: Synthetic oligonucleotide
  Target: SCNA; (+) strand; PAM type: YTN; PAM sequence: TTG
ctatcaagatatggaggaga

SEQ ID NO: 70919 - DNA, 20 bp, Artificial Sequence
  Description of Artificial Sequence: Synthetic oligonucleotide
  Target: SCNA; (+) strand; PAM type: YTN; PAM sequence: CTA
tcaagatatggaggagagtg

SEQ ID NO: 70920 - DNA, 20 bp, Artificial Sequence
  Description of Artificial Sequence: Synthetic oligonucleotide
  Target: SCNA; (+) strand; PAM type: YTN; PAM sequence: CTG
acacttgtgagatcccaaga

SEQ ID NO: 70921 - DNA, 20 bp, Artificial Sequence
  Description of Artificial Sequence: Synthetic oligonucleotide
  Target: SCNA; (+) strand; PAM type: YTN; PAM sequence: CTT
gtgagatcccaagacttaca

SEQ ID NO: 70922 - DNA, 20 bp, Artificial Sequence
  Description of Artificial Sequence: Synthetic oligonucleotide
  Target: SCNA; (+) strand; PAM type: YTN; PAM sequence: TTG
tgagatcccaagacttacac

SEQ ID NO: 70923 - DNA, 20 bp, Artificial Sequence
  Description of Artificial Sequence: Synthetic oligonucleotide
  Target: SCNA; (+) strand; PAM type: YTN; PAM sequence: CTT
acactaaatccatacaattt

SEQ ID NO: 70924 - DNA, 20 bp, Artificial Sequence
  Description of Artificial Sequence: Synthetic oligonucleotide
  Target: SCNA; (+) strand; PAM type: YTN; PAM sequence: TTA
cactaaatccatacaatttc

SEQ ID NO: 70925 - DNA, 20 bp, Artificial Sequence
  Description of Artificial Sequence: Synthetic oligonucleotide
  Target: SCNA; (+) strand; PAM type: YTN; PAM sequence: CTA
aatccatacaatttctgtcc

SEQ ID NO: 70926 - DNA, 20 bp, Artificial Sequence
  Description of Artificial Sequence: Synthetic oligonucleotide
  Target: SCNA; (+) strand; PAM type: YTN; PAM sequence: TTT
ctgtcctgaattaaaaattt

SEQ ID NO: 70927 - DNA, 20 bp, Artificial Sequence
  Description of Artificial Sequence: Synthetic oligonucleotide
  Target: SCNA; (+) strand; PAM type: YTN; PAM sequence: TTC
tgtcctgaattaaaaatttt

SEQ ID NO: 70928 - DNA, 20 bp, Artificial Sequence
  Description of Artificial Sequence: Synthetic oligonucleotide
  Target: SCNA; (+) strand; PAM type: YTN; PAM sequence: CTG
tcctgaattaaaaatttttt

SEQ ID NO: 70929 - DNA, 20 bp, Artificial Sequence
  Description of Artificial Sequence: Synthetic oligonucleotide
  Target: SCNA; (+) strand; PAM type: YTN; PAM sequence: CTG
aattaaaaatttttttaaaa

SEQ ID NO: 70930 - DNA, 20 bp, Artificial Sequence
  Description of Artificial Sequence: Synthetic oligonucleotide
  Target: SCNA; (+) strand; PAM type: YTN; PAM sequence: TTA
aaaatttttttaaaaaagag

SEQ ID NO: 70931 - DNA, 20 bp, Artificial Sequence
  Description of Artificial Sequence: Synthetic oligonucleotide
  Target: SCNA; (+) strand; PAM type: YTN; PAM sequence: TTT
ttttaaaaaagagatgaaaa

SEQ ID NO: 70932 - DNA, 20 bp, Artificial Sequence
  Description of Artificial Sequence: Synthetic oligonucleotide
  Target: SCNA; (+) strand; PAM type: YTN; PAM sequence: TTT
tttaaaaaagagatgaaaag

SEQ ID NO: 70933 - DNA, 20 bp, Artificial Sequence
  Description of Artificial Sequence: Synthetic oligonucleotide
  Target: SCNA; (+) strand; PAM type: YTN; PAM sequence: TTT
ttaaaaaagagatgaaaagt

SEQ ID NO: 70934 - DNA, 20 bp, Artificial Sequence
  Description of Artificial Sequence: Synthetic oligonucleotide
  Target: SCNA; (+) strand; PAM type: YTN; PAM sequence: TTT
taaaaaagagatgaaaagtg

SEQ ID NO: 70935 - DNA, 20 bp, Artificial Sequence
  Description of Artificial Sequence: Synthetic oligonucleotide
  Target: SCNA; (+) strand; PAM type: YTN; PAM sequence: TTT
aaaaaagagatgaaaagtgt

SEQ ID NO: 70936 - DNA, 20 bp, Artificial Sequence
  Description of Artificial Sequence: Synthetic oligonucleotide
  Target: SCNA; (+) strand; PAM type: YTN; PAM sequence: TTA
aaaaagagatgaaaagtgtg

SEQ ID NO: 70937 - DNA, 20 bp, Artificial Sequence
  Description of Artificial Sequence: Synthetic oligonucleotide
  Target: SCNA; (+) strand; PAM type: YTN; PAM sequence: TTT
ccaaaccacgtaattggttt

SEQ ID NO: 70938 - DNA, 20 bp, Artificial Sequence
  Description of Artificial Sequence: Synthetic oligonucleotide
  Target: SCNA; (+) strand; PAM type: YTN; PAM sequence: TTC
caaaccacgtaattggtttc

SEQ ID NO: 70939 - DNA, 20 bp, Artificial Sequence
  Description of Artificial Sequence: Synthetic oligonucleotide
  Target: SCNA; (+) strand; PAM type: YTN; PAM sequence: TTG
gtttctttcaccttaaactc

SEQ ID NO: 70940 - DNA, 20 bp, Artificial Sequence
  Description of Artificial Sequence: Synthetic oligonucleotide
  Target: SCNA; (+) strand; PAM type: YTN; PAM sequence: TTT
ctttcaccttaaactccaag

SEQ ID NO: 70941 - DNA, 20 bp, Artificial Sequence
  Description of Artificial Sequence: Synthetic oligonucleotide
  Target: SCNA; (+) strand; PAM type: YTN; PAM sequence: TTC
tttcaccttaaactccaagt

SEQ ID NO: 70942 - DNA, 20 bp, Artificial Sequence
  Description of Artificial Sequence: Synthetic oligonucleotide
  Target: SCNA; (+) strand; PAM type: YTN; PAM sequence: CTT
tcaccttaaactccaagtta

SEQ ID NO: 70943 - DNA, 20 bp, Artificial Sequence
  Description of Artificial Sequence: Synthetic oligonucleotide
  Target: SCNA; (+) strand; PAM type: YTN; PAM sequence: TTT
caccttaaactccaagttag

SEQ ID NO: 70944 - DNA, 20 bp, Artificial Sequence
  Description of Artificial Sequence: Synthetic oligonucleotide
  Target: SCNA; (+) strand; PAM type: YTN; PAM sequence: TTC
accttaaactccaagttaga

SEQ ID NO: 70945 - DNA, 20 bp, Artificial Sequence
  Description of Artificial Sequence: Synthetic oligonucleotide
  Target: SCNA; (+) strand; PAM type: YTN; PAM sequence: CTT
aaactccaagttagagaagt

SEQ ID NO: 70946 - DNA, 20 bp, Artificial Sequence
  Description of Artificial Sequence: Synthetic oligonucleotide
  Target: SCNA; (+) strand; PAM type: YTN; PAM sequence: TTA
aactccaagttagagaagta

SEQ ID NO: 70947 - DNA, 20 bp, Artificial Sequence
  Description of Artificial Sequence: Synthetic oligonucleotide
  Target: SCNA; (+) strand; PAM type: YTN; PAM sequence: CTC
caagttagagaagtattttg

SEQ ID NO: 70948 - DNA, 20 bp, Artificial Sequence
  Description of Artificial Sequence: Synthetic oligonucleotide
  Target: SCNA; (+) strand; PAM type: YTN; PAM sequence: TTA
gagaagtattttgttgttgt

SEQ ID NO: 70949 - DNA, 20 bp, Artificial Sequence
  Description of Artificial Sequence: Synthetic oligonucleotide
  Target: SCNA; (+) strand; PAM type: YTN; PAM sequence: TTT
tgttgttgtttgttttgttt

SEQ ID NO: 70950 - DNA, 20 bp, Artificial Sequence
  Description of Artificial Sequence: Synthetic oligonucleotide
  Target: SCNA; (+) strand; PAM type: YTN; PAM sequence: TTT
gttgttgtttgttttgtttt

SEQ ID NO: 70951 - DNA, 20 bp, Artificial Sequence
  Description of Artificial Sequence: Synthetic oligonucleotide
  Target: SCNA; (+) strand; PAM type: YTN; PAM sequence: TTG
ttgttgtttgttttgtttta

SEQ ID NO: 70952 - DNA, 20 bp, Artificial Sequence
  Description of Artificial Sequence: Synthetic oligonucleotide
  Target: SCNA; (+) strand; PAM type: YTN; PAM sequence: TTG
ttgtttgttttgttttaaaa

SEQ ID NO: 70953 - DNA, 20 bp, Artificial Sequence
  Description of Artificial Sequence: Synthetic oligonucleotide
  Target: SCNA; (+) strand; PAM type: YTN; PAM sequence: TTG
tttgttttgttttaaaacta

SEQ ID NO: 70954 - DNA, 20 bp, Artificial Sequence
  Description of Artificial Sequence: Synthetic oligonucleotide
  Target: SCNA; (+) strand; PAM type: YTN; PAM sequence: TTT
gttttgttttaaaactagac

SEQ ID NO: 70955 - DNA, 20 bp, Artificial Sequence
  Description of Artificial Sequence: Synthetic oligonucleotide
  Target: SCNA; (+) strand; PAM type: YTN; PAM sequence: TTG
ttttgttttaaaactagact

SEQ ID NO: 70956 - DNA, 20 bp, Artificial Sequence
  Description of Artificial Sequence: Synthetic oligonucleotide
  Target: SCNA; (+) strand; PAM type: YTN; PAM sequence: TTT
tgttttaaaactagacttgg

SEQ ID NO: 70957 - DNA, 20 bp, Artificial Sequence
  Description of Artificial Sequence: Synthetic oligonucleotide
  Target: SCNA; (+) strand; PAM type: YTN; PAM sequence: TTT
gttttaaaactagacttggt

SEQ ID NO: 70958 - DNA, 20 bp, Artificial Sequence
  Description of Artificial Sequence: Synthetic oligonucleotide
  Target: SCNA; (+) strand; PAM type: YTN; PAM sequence: TTG
ttttaaaactagacttggtg

SEQ ID NO: 70959 - DNA, 20 bp, Artificial Sequence
  Description of Artificial Sequence: Synthetic oligonucleotide
  Target: SCNA; (+) strand; PAM type: YTN; PAM sequence: TTT
taaaactagacttggtggaa

SEQ ID NO: 70960 - DNA, 20 bp, Artificial Sequence
  Description of Artificial Sequence: Synthetic oligonucleotide
  Target: SCNA; (+) strand; PAM type: YTN; PAM sequence: TTT
aaaactagacttggtggaat

SEQ ID NO: 70961 - DNA, 20 bp, Artificial Sequence
  Description of Artificial Sequence: Synthetic oligonucleotide
  Target: SCNA; (+) strand; PAM type: YTN; PAM sequence: TTA
aaactagacttggtggaata

SEQ ID NO: 70962 - DNA, 20 bp, Artificial Sequence
  Description of Artificial Sequence: Synthetic oligonucleotide
  Target: SCNA; (+) strand; PAM type: YTN; PAM sequence: CTA
gacttggtggaatacagaac

SEQ ID NO: 70963 - DNA, 20 bp, Artificial Sequence
  Description of Artificial Sequence: Synthetic oligonucleotide
  Target: SCNA; (+) strand; PAM type: YTN; PAM sequence: CTT
ggtggaatacagaacataaa

SEQ ID NO: 70964 - DNA, 20 bp, Artificial Sequence
  Description of Artificial Sequence: Synthetic oligonucleotide
  Target: SCNA; (+) strand; PAM type: YTN; PAM sequence: TTG
gtggaatacagaacataaac

SEQ ID NO: 70965 - DNA, 20 bp, Artificial Sequence
  Description of Artificial Sequence: Synthetic oligonucleotide
  Target: SCNA; (+) strand; PAM type: YTN; PAM sequence: TTT
taaacaaaatattaaacttc

SEQ ID NO: 70966 - DNA, 20 bp, Artificial Sequence
  Description of Artificial Sequence: Synthetic oligonucleotide
  Target: SCNA; (+) strand; PAM type: YTN; PAM sequence: TTT
aaacaaaatattaaacttct

SEQ ID NO: 70967 - DNA, 20 bp, Artificial Sequence
  Description of Artificial Sequence: Synthetic oligonucleotide
  Target: SCNA; (+) strand; PAM type: YTN; PAM sequence: TTA
aacaaaatattaaacttcta

SEQ ID NO: 70968 - DNA, 20 bp, Artificial Sequence
  Description of Artificial Sequence: Synthetic oligonucleotide
  Target: SCNA; (+) strand; PAM type: YTN; PAM sequence: TTA
aacttctagaacagtggatc

SEQ ID NO: 70969 - DNA, 20 bp, Artificial Sequence
  Description of Artificial Sequence: Synthetic oligonucleotide
  Target: SCNA; (+) strand; PAM type: YTN; PAM sequence: CTT
ctagaacagtggatcactta

SEQ ID NO: 70970 - DNA, 20 bp, Artificial Sequence
  Description of Artificial Sequence: Synthetic oligonucleotide
  Target: SCNA; (+) strand; PAM type: YTN; PAM sequence: TTC
tagaacagtggatcacttaa

SEQ ID NO: 70971 - DNA, 20 bp, Artificial Sequence
  Description of Artificial Sequence: Synthetic oligonucleotide
  Target: SCNA; (+) strand; PAM type: YTN; PAM sequence: CTA
gaacagtggatcacttaaaa

SEQ ID NO: 70972 - DNA, 20 bp, Artificial Sequence
  Description of Artificial Sequence: Synthetic oligonucleotide
  Target: SCNA; (+) strand; PAM type: YTN; PAM sequence: CTT
aaaatgaaaactttaagact

SEQ ID NO: 70973 - DNA, 20 bp, Artificial Sequence
  Description of Artificial Sequence: Synthetic oligonucleotide
  Target: SCNA; (+) strand; PAM type: YTN; PAM sequence: TTA
aaatgaaaactttaagactt

SEQ ID NO: 70974 - DNA, 20 bp, Artificial Sequence
  Description of Artificial Sequence: Synthetic oligonucleotide
  Target: SCNA; (+) strand; PAM type: YTN; PAM sequence: CTT
taagactttccttagactga

SEQ ID NO: 70975 - DNA, 20 bp, Artificial Sequence
  Description of Artificial Sequence: Synthetic oligonucleotide
  Target: SCNA; (+) strand; PAM type: YTN; PAM sequence: TTT
aagactttccttagactgag

SEQ ID NO: 70976 - DNA, 20 bp, Artificial Sequence
  Description of Artificial Sequence: Synthetic oligonucleotide
  Target: SCNA; (+) strand; PAM type: YTN; PAM sequence: TTA
agactttccttagactgagt

SEQ ID NO: 70977 - DNA, 20 bp, Artificial Sequence
  Description of Artificial Sequence: Synthetic oligonucleotide
  Target: SCNA; (+) strand; PAM type: YTN; PAM sequence: CTT
tccttagactgagtttttta

SEQ ID NO: 70978 - DNA, 20 bp, Artificial Sequence
  Description of Artificial Sequence: Synthetic oligonucleotide
  Target: SCNA; (+) strand; PAM type: YTN; PAM sequence: TTT
ccttagactgagttttttat

SEQ ID NO: 70979 - DNA, 20 bp, Artificial Sequence
  Description of Artificial Sequence: Synthetic oligonucleotide
  Target: SCNA; (+) strand; PAM type: YTN; PAM sequence: TTC
cttagactgagttttttatt

SEQ ID NO: 70980 - DNA, 20 bp, Artificial Sequence
  Description of Artificial Sequence: Synthetic oligonucleotide
  Target: SCNA; (+) strand; PAM type: YTN; PAM sequence: CTT
agactgagttttttattctt

SEQ ID NO: 70981 - DNA, 20 bp, Artificial Sequence
  Description of Artificial Sequence: Synthetic oligonucleotide
  Target: SCNA; (+) strand; PAM type: YTN; PAM sequence: TTA
gactgagttttttattctta

SEQ ID NO: 70982 - DNA, 20 bp, Artificial Sequence
  Description of Artificial Sequence: Synthetic oligonucleotide
  Target: SCNA; (+) strand; PAM type: YTN; PAM sequence: CTG
agttttttattcttaaaaaa

SEQ ID NO: 70983 - DNA, 20 bp, Artificial Sequence
  Description of Artificial Sequence: Synthetic oligonucleotide
  Target: SCNA; (+) strand; PAM type: YTN; PAM sequence: TTT
tttattcttaaaaaaaatta

SEQ ID NO: 70984 - DNA, 20 bp, Artificial Sequence
  Description of Artificial Sequence: Synthetic oligonucleotide
  Target: SCNA; (+) strand; PAM type: YTN; PAM sequence: TTT
ttattcttaaaaaaaattaa

SEQ ID NO: 70985 - DNA, 20 bp, Artificial Sequence
  Description of Artificial Sequence: Synthetic oligonucleotide
  Target: SCNA; (+) strand; PAM type: YTN; PAM sequence: TTT
tattcttaaaaaaaattaaa

SEQ ID NO: 70986 - DNA, 20 bp, Artificial Sequence
  Description of Artificial Sequence: Synthetic oligonucleotide
  Target: SCNA; (+) strand; PAM type: YTN; PAM sequence: TTT
attcttaaaaaaaattaaaa

SEQ ID NO: 70987 - DNA, 20 bp, Artificial Sequence
  Description of Artificial Sequence: Synthetic oligonucleotide
  Target: SCNA; (+) strand; PAM type: YTN; PAM sequence: TTA
ttcttaaaaaaaattaaaag

SEQ ID NO: 70988 - DNA, 20 bp, Artificial Sequence
  Description of Artificial Sequence: Synthetic oligonucleotide
  Target: SCNA; (+) strand; PAM type: YTN; PAM sequence: TTC
ttaaaaaaaattaaaaggaa

SEQ ID NO: 70989 - DNA, 20 bp, Artificial Sequence
  Description of Artificial Sequence: Synthetic oligonucleotide
  Target: SCNA; (+) strand; PAM type: YTN; PAM sequence: CTT
aaaaaaaattaaaaggaagt

SEQ ID NO: 70990 - DNA, 20 bp, Artificial Sequence
  Description of Artificial Sequence: Synthetic oligonucleotide
  Target: SCNA; (+) strand; PAM type: YTN; PAM sequence: TTA
aaaaaaattaaaaggaagtt

SEQ ID NO: 70991 - DNA, 20 bp, Artificial Sequence
  Description of Artificial Sequence: Synthetic oligonucleotide
  Target: SCNA; (+) strand; PAM type: YTN; PAM sequence: TTA
aaaggaagttgaattttatt

SEQ ID NO: 70992 - DNA, 20 bp, Artificial Sequence
  Description of Artificial Sequence: Synthetic oligonucleotide
  Target: SCNA; (+) strand; PAM type: YTN; PAM sequence: TTG
aattttatttctaaacggtg

SEQ ID NO: 70993 - DNA, 20 bp, Artificial Sequence
  Description of Artificial Sequence: Synthetic oligonucleotide
  Target: SCNA; (+) strand; PAM type: YTN; PAM sequence: TTT
tatttctaaacggtgcagga

SEQ ID NO: 70994 - DNA, 20 bp, Artificial Sequence
  Description of Artificial Sequence: Synthetic oligonucleotide
  Target: SCNA; (+) strand; PAM type: YTN; PAM sequence: TTT
atttctaaacggtgcaggac

SEQ ID NO: 70995 - DNA, 20 bp, Artificial Sequence
  Description of Artificial Sequence: Synthetic oligonucleotide
  Target: SCNA; (+) strand; PAM type: YTN; PAM sequence: TTA
tttctaaacggtgcaggaca

SEQ ID NO: 70996 - DNA, 20 bp, Artificial Sequence
  Description of Artificial Sequence: Synthetic oligonucleotide
  Target: SCNA; (+) strand; PAM type: YTN; PAM sequence: TTT
ctaaacggtgcaggacaaat

SEQ ID NO: 70997 - DNA, 20 bp, Artificial Sequence
  Description of Artificial Sequence: Synthetic oligonucleotide
  Target: SCNA; (+) strand; PAM type: YTN; PAM sequence: TTC
taaacggtgcaggacaaatg

SEQ ID NO: 70998 - DNA, 20 bp, Artificial Sequence
  Description of Artificial Sequence: Synthetic oligonucleotide
  Target: SCNA; (+) strand; PAM type: YTN; PAM sequence: CTA
aacggtgcaggacaaatgaa

SEQ ID NO: 70999 - DNA, 20 bp, Artificial Sequence
  Description of Artificial Sequence: Synthetic oligonucleotide
  Target: SCNA; (+) strand; PAM type: YTN; PAM sequence: TTT
tgcctctgtcttaaacttag

SEQ ID NO: 71000 - DNA, 20 bp, Artificial Sequence
  Description of Artificial Sequence: Synthetic oligonucleotide
  Target: SCNA; (+) strand; PAM type: YTN; PAM sequence: TTT
gcctctgtcttaaacttaga

SEQ ID NO: 71001 - DNA, 20 bp, Artificial Sequence
  Description of Artificial Sequence: Synthetic oligonucleotide
  Target: SCNA; (+) strand; PAM type: YTN; PAM sequence: TTG
cctctgtcttaaacttagaa

SEQ ID NO: 71002 - DNA, 20 bp, Artificial Sequence
  Description of Artificial Sequence: Synthetic oligonucleotide
  Target: SCNA; (+) strand; PAM type: YTN; PAM sequence: CTC
tgtcttaaacttagaacaga

SEQ ID NO: 71003 - DNA, 20 bp, Artificial Sequence
  Description of Artificial Sequence: Synthetic oligonucleotide
  Target: SCNA; (+) strand; PAM type: YTN; PAM sequence: CTG
tcttaaacttagaacagata

SEQ ID NO: 71004 - DNA, 20 bp, Artificial Sequence
  Description of Artificial Sequence: Synthetic oligonucleotide
  Target: SCNA; (+) strand; PAM type: YTN; PAM sequence: CTT
aaacttagaacagatacgca

SEQ ID NO: 71005 - DNA, 20 bp, Artificial Sequence
  Description of Artificial Sequence: Synthetic oligonucleotide
  Target: SCNA; (+) strand; PAM type: YTN; PAM sequence: TTA
aacttagaacagatacgcaa

SEQ ID NO: 71006 - DNA, 20 bp, Artificial Sequence
  Description of Artificial Sequence: Synthetic oligonucleotide
  Target: SCNA; (+) strand; PAM type: YTN; PAM sequence: CTT
agaacagatacgcaatctct

SEQ ID NO: 71007 - DNA, 20 bp, Artificial Sequence
  Description of Artificial Sequence: Synthetic oligonucleotide
  Target: SCNA; (+) strand; PAM type: YTN; PAM sequence: TTA
gaacagatacgcaatctctt

SEQ ID NO: 71008 - DNA, 20 bp, Artificial Sequence
  Description of Artificial Sequence: Synthetic oligonucleotide
  Target: SCNA; (+) strand; PAM type: YTN; PAM sequence: CTC
tttaacagtatgtaaaaatt

SEQ ID NO: 71009 - DNA, 20 bp, Artificial Sequence
  Description of Artificial Sequence: Synthetic oligonucleotide
  Target: SCNA; (+) strand; PAM type: YTN; PAM sequence: CTT
taacagtatgtaaaaattca

SEQ ID NO: 71010 - DNA, 20 bp, Artificial Sequence
  Description of Artificial Sequence: Synthetic oligonucleotide
  Target: SCNA; (+) strand; PAM type: YTN; PAM sequence: TTT
aacagtatgtaaaaattcag

SEQ ID NO: 71011 - DNA, 20 bp, Artificial Sequence
  Description of Artificial Sequence: Synthetic oligonucleotide
  Target: SCNA; (+) strand; PAM type: YTN; PAM sequence: TTA
acagtatgtaaaaattcagt

SEQ ID NO: 71012 - DNA, 20 bp, Artificial Sequence
  Description of Artificial Sequence: Synthetic oligonucleotide
  Target: SCNA; (+) strand; PAM type: YTN; PAM sequence: TTC
agtcttttctttctttggtt

SEQ ID NO: 71013 - DNA, 20 bp, Artificial Sequence
  Description of Artificial Sequence: Synthetic oligonucleotide
  Target: SCNA; (+) strand; PAM type: YTN; PAM sequence: CTT
ttctttctttggtttccaaa

SEQ ID NO: 71014 - DNA, 20 bp, Artificial Sequence
  Description of Artificial Sequence: Synthetic oligonucleotide
  Target: SCNA; (+) strand; PAM type: YTN; PAM sequence: TTT
tctttctttggtttccaaat

SEQ ID NO: 71015 - DNA, 20 bp, Artificial Sequence
  Description of Artificial Sequence: Synthetic oligonucleotide
  Target: SCNA; (+) strand; PAM type: YTN; PAM sequence: TTT
ctttctttggtttccaaatt

SEQ ID NO: 71016 - DNA, 20 bp, Artificial Sequence
  Description of Artificial Sequence: Synthetic oligonucleotide
  Target: SCNA; (+) strand; PAM type: YTN; PAM sequence: TTC
tttctttggtttccaaatta

SEQ ID NO: 71017 - DNA, 20 bp, Artificial Sequence
  Description of Artificial Sequence: Synthetic oligonucleotide
  Target: SCNA; (+) strand; PAM type: YTN; PAM sequence: CTT
tctttggtttccaaattaca

SEQ ID NO: 71018 - DNA, 20 bp, Artificial Sequence
  Description of Artificial Sequence: Synthetic oligonucleotide
  Target: SCNA; (+) strand; PAM type: YTN; PAM sequence: TTT
ctttggtttccaaattacag

SEQ ID NO: 71019 - DNA, 20 bp, Artificial Sequence
  Description of Artificial Sequence: Synthetic oligonucleotide
  Target: SCNA; (+) strand; PAM type: YTN; PAM sequence: TTC
tttggtttccaaattacagt

SEQ ID NO: 71020 - DNA, 20 bp, Artificial Sequence
  Description of Artificial Sequence: Synthetic oligonucleotide
  Target: SCNA; (+) strand; PAM type: YTN; PAM sequence: CTT
tggtttccaaattacagtga

SEQ ID NO: 71021 - DNA, 20 bp, Artificial Sequence
  Description of Artificial Sequence: Synthetic oligonucleotide
  Target: SCNA; (+) strand; PAM type: YTN; PAM sequence: TTT
ggtttccaaattacagtgaa

SEQ ID NO: 71022 - DNA, 20 bp, Artificial Sequence
  Description of Artificial Sequence: Synthetic oligonucleotide
  Target: SCNA; (+) strand; PAM type: YTN; PAM sequence: TTG
gtttccaaattacagtgaaa

SEQ ID NO: 71023 - DNA, 20 bp, Artificial Sequence
  Description of Artificial Sequence: Synthetic oligonucleotide
  Target: SCNA; (+) strand; PAM type: YTN; PAM sequence: TTT
ccaaattacagtgaaatgaa

SEQ ID NO: 71024 - DNA, 20 bp, Artificial Sequence
  Description of Artificial Sequence: Synthetic oligonucleotide
  Target: SCNA; (+) strand; PAM type: YTN; PAM sequence: TTC
caaattacagtgaaatgaaa

SEQ ID NO: 71025 - DNA, 20 bp, Artificial Sequence
  Description of Artificial Sequence: Synthetic oligonucleotide
  Target: SCNA; (+) strand; PAM type: YTN; PAM sequence: TTA
cagtgaaatgaaacattttc

SEQ ID NO: 71026 - DNA, 20 bp, Artificial Sequence
  Description of Artificial Sequence: Synthetic oligonucleotide
  Target: SCNA; (+) strand; PAM type: YTN; PAM sequence: TTT
tccttttatgtgtaattagt

SEQ ID NO: 71027 - DNA, 20 bp, Artificial Sequence
  Description of Artificial Sequence: Synthetic oligonucleotide
  Target: SCNA; (+) strand; PAM type: YTN; PAM sequence: TTT
ccttttatgtgtaattagtg

SEQ ID NO: 71028 - DNA, 20 bp, Artificial Sequence
  Description of Artificial Sequence: Synthetic oligonucleotide
  Target: SCNA; (+) strand; PAM type: YTN; PAM sequence: TTC
cttttatgtgtaattagtgc

SEQ ID NO: 71029 - DNA, 20 bp, Artificial Sequence
  Description of Artificial Sequence: Synthetic oligonucleotide
  Target: SCNA; (+) strand; PAM type: YTN; PAM sequence: CTT
ttatgtgtaattagtgcagt

SEQ ID NO: 71030 - DNA, 20 bp, Artificial Sequence
  Description of Artificial Sequence: Synthetic oligonucleotide
  Target: SCNA; (+) strand; PAM type: YTN; PAM sequence: TTT
tatgtgtaattagtgcagtt

SEQ ID NO: 71031 - DNA, 20 bp, Artificial Sequence
  Description of Artificial Sequence: Synthetic oligonucleotide
  Target: SCNA; (+) strand; PAM type: YTN; PAM sequence: TTT
atgtgtaattagtgcagttt

SEQ ID NO: 71032 - DNA, 20 bp, Artificial Sequence
  Description of Artificial Sequence: Synthetic oligonucleotide
  Target: SCNA; (+) strand; PAM type: YTN; PAM sequence: TTA
tgtgtaattagtgcagttta

SEQ ID NO: 71033 - DNA, 20 bp, Artificial Sequence
  Description of Artificial Sequence: Synthetic oligonucleotide
  Target: SCNA; (+) strand; PAM type: YTN; PAM sequence: TTA
gtgcagtttaactaagagtt

SEQ ID NO: 71034 - DNA, 20 bp, Artificial Sequence
  Description of Artificial Sequence: Synthetic oligonucleotide
  Target: SCNA; (+) strand; PAM type: YTN; PAM sequence: TTT
aactaagagttatggagcat

SEQ ID NO: 71035 - DNA, 20 bp, Artificial Sequence
  Description of Artificial Sequence: Synthetic oligonucleotide
  Target: SCNA; (+) strand; PAM type: YTN; PAM sequence: TTA
actaagagttatggagcatc

SEQ ID NO: 71036 - DNA, 20 bp, Artificial Sequence
  Description of Artificial Sequence: Synthetic oligonucleotide
  Target: SCNA; (+) strand; PAM type: YTN; PAM sequence: CTA
agagttatggagcatctttc

SEQ ID NO: 71037 - DNA, 20 bp, Artificial Sequence
  Description of Artificial Sequence: Synthetic oligonucleotide
  Target: SCNA; (+) strand; PAM type: YTN; PAM sequence: TTA
tggagcatctttccacctca

SEQ ID NO: 71038 - DNA, 20 bp, Artificial Sequence
  Description of Artificial Sequence: Synthetic oligonucleotide
  Target: SCNA; (+) strand; PAM type: YTN; PAM sequence: CTT
tccacctcatggtgtatcca

SEQ ID NO: 71039 - DNA, 20 bp, Artificial Sequence
  Description of Artificial Sequence: Synthetic oligonucleotide
  Target: SCNA; (+) strand; PAM type: YTN; PAM sequence: TTT
ccacctcatggtgtatccat

SEQ ID NO: 71040 - DNA, 20 bp, Artificial Sequence
  Description of Artificial Sequence: Synthetic oligonucleotide
  Target: SCNA; (+) strand; PAM type: YTN; PAM sequence: TTC
cacctcatggtgtatccatg

SEQ ID NO: 71041 - DNA, 20 bp, Artificial Sequence
  Description of Artificial Sequence: Synthetic oligonucleotide
  Target: SCNA; (+) strand; PAM type: YTN; PAM sequence: CTC
atggtgtatccatgtagctg

SEQ ID NO: 71042 - DNA, 20 bp, Artificial Sequence
  Description of Artificial Sequence: Synthetic oligonucleotide
  Target: SCNA; (+) strand; PAM type: YTN; PAM sequence: CTG
aatttcttcagcatttgctt

SEQ ID NO: 71043 - DNA, 20 bp, Artificial Sequence
  Description of Artificial Sequence: Synthetic oligonucleotide
  Target: SCNA; (+) strand; PAM type: YTN; PAM sequence: TTT
cttcagcatttgctttttta

SEQ ID NO: 71044 - DNA, 20 bp, Artificial Sequence
  Description of Artificial Sequence: Synthetic oligonucleotide
  Target: SCNA; (+) strand; PAM type: YTN; PAM sequence: TTC
ttcagcatttgcttttttaa

SEQ ID NO: 71045 - DNA, 20 bp, Artificial Sequence
  Description of Artificial Sequence: Synthetic oligonucleotide
  Target: SCNA; (+) strand; PAM type: YTN; PAM sequence: CTT
cagcatttgcttttttaatt

SEQ ID NO: 71046 - DNA, 20 bp, Artificial Sequence
  Description of Artificial Sequence: Synthetic oligonucleotide
  Target: SCNA; (+) strand; PAM type: YTN; PAM sequence: TTC
agcatttgcttttttaattt

SEQ ID NO: 71047 - DNA, 20 bp, Artificial Sequence
  Description of Artificial Sequence: Synthetic oligonucleotide
  Target: SCNA; (+) strand; PAM type: YTN; PAM sequence: TTT
gcttttttaatttgtataag

SEQ ID NO: 71048 - DNA, 20 bp, Artificial Sequence
  Description of Artificial Sequence: Synthetic oligonucleotide
  Target: SCNA; (+) strand; PAM type: YTN; PAM sequence: TTG
cttttttaatttgtataagg

SEQ ID NO: 71049 - DNA, 20 bp, Artificial Sequence
  Description of Artificial Sequence: Synthetic oligonucleotide
  Target: SCNA; (+) strand; PAM type: YTN; PAM sequence: CTT
ttttaatttgtataaggagt

SEQ ID NO: 71050 - DNA, 20 bp, Artificial Sequence
  Description of Artificial Sequence: Synthetic oligonucleotide
  Target: SCNA; (+) strand; PAM type: YTN; PAM sequence: TTT
tttaatttgtataaggagta

SEQ ID NO: 71051 - DNA, 20 bp, Artificial Sequence
  Description of Artificial Sequence: Synthetic oligonucleotide
  Target: SCNA; (+) strand; PAM type: YTN; PAM sequence: TTT
ttaatttgtataaggagtaa

SEQ ID NO: 71052 - DNA, 20 bp, Artificial Sequence
  Description of Artificial Sequence: Synthetic oligonucleotide
  Target: SCNA; (+) strand; PAM type: YTN; PAM sequence: TTT
taatttgtataaggagtaac

SEQ ID NO: 71053 - DNA, 20 bp, Artificial Sequence
  Description of Artificial Sequence: Synthetic oligonucleotide
  Target: SCNA; (+) strand; PAM type: YTN; PAM sequence: TTT
aatttgtataaggagtaact

SEQ ID NO: 71054 - DNA, 20 bp, Artificial Sequence
  Description of Artificial Sequence: Synthetic oligonucleotide
  Target: SCNA; (+) strand; PAM type: YTN; PAM sequence: TTA
atttgtataaggagtaactg

SEQ ID NO: 71055 - DNA, 20 bp, Artificial Sequence
  Description of Artificial Sequence: Synthetic oligonucleotide
  Target: SCNA; (+) strand; PAM type: YTN; PAM sequence: TTT
gtataaggagtaactgttcc

SEQ ID NO: 71056 - DNA, 20 bp, Artificial Sequence
  Description of Artificial Sequence: Synthetic oligonucleotide
  Target: SCNA; (+) strand; PAM type: YTN; PAM sequence: TTG
tataaggagtaactgttcca

SEQ ID NO: 71057 - DNA, 20 bp, Artificial Sequence
  Description of Artificial Sequence: Synthetic oligonucleotide
  Target: SCNA; (+) strand; PAM type: YTN; PAM sequence: CTG
ttccatatcttagaaatctt

SEQ ID NO: 71058 - DNA, 20 bp, Artificial Sequence
  Description of Artificial Sequence: Synthetic oligonucleotide
  Target: SCNA; (+) strand; PAM type: YTN; PAM sequence: TTC
catatcttagaaatctttga

SEQ ID NO: 71059 - DNA, 20 bp, Artificial Sequence
  Description of Artificial Sequence: Synthetic oligonucleotide
  Target: SCNA; (+) strand; PAM type: YTN; PAM sequence: CTT
agaaatctttgaaattagaa

SEQ ID NO: 71060 - DNA, 20 bp, Artificial Sequence
  Description of Artificial Sequence: Synthetic oligonucleotide
  Target: SCNA; (+) strand; PAM type: YTN; PAM sequence: TTA
gaaatctttgaaattagaag

SEQ ID NO: 71061 - DNA, 20 bp, Artificial Sequence
  Description of Artificial Sequence: Synthetic oligonucleotide
  Target: SCNA; (+) strand; PAM type: YTN; PAM sequence: CTT
tgaaattagaagttgatcta

SEQ ID NO: 71062 - DNA, 20 bp, Artificial Sequence
  Description of Artificial Sequence: Synthetic oligonucleotide
  Target: SCNA; (+) strand; PAM type: YTN; PAM sequence: TTT
gaaattagaagttgatctaa

SEQ ID NO: 71063 - DNA, 20 bp, Artificial Sequence
  Description of Artificial Sequence: Synthetic oligonucleotide
  Target: SCNA; (+) strand; PAM type: YTN; PAM sequence: TTG
aaattagaagttgatctaat

SEQ ID NO: 71064 - DNA, 20 bp, Artificial Sequence
  Description of Artificial Sequence: Synthetic oligonucleotide
  Target: SCNA; (+) strand; PAM type: YTN; PAM sequence: TTA
gaagttgatctaatagcatc

SEQ ID NO: 71065 - DNA, 20 bp, Artificial Sequence
  Description of Artificial Sequence: Synthetic oligonucleotide
  Target: SCNA; (+) strand; PAM type: YTN; PAM sequence: TTG
atctaatagcatctctaatg

SEQ ID NO: 71066 - DNA, 20 bp, Artificial Sequence
  Description of Artificial Sequence: Synthetic oligonucleotide
  Target: SCNA; (+) strand; PAM type: YTN; PAM sequence: CTA
atagcatctctaatgtagtc

SEQ ID NO: 71067 - DNA, 20 bp, Artificial Sequence
  Description of Artificial Sequence: Synthetic oligonucleotide
  Target: SCNA; (+) strand; PAM type: YTN; PAM sequence: CTC
taatgtagtctctccttgaa

SEQ ID NO: 71068 - DNA, 20 bp, Artificial Sequence
  Description of Artificial Sequence: Synthetic oligonucleotide
  Target: SCNA; (+) strand; PAM type: YTN; PAM sequence: CTA
atgtagtctctccttgaatt

SEQ ID NO: 71069 - DNA, 20 bp, Artificial Sequence
  Description of Artificial Sequence: Synthetic oligonucleotide
  Target: SCNA; (+) strand; PAM type: YTN; PAM sequence: CTC
tccttgaattttaaatataa

SEQ ID NO: 71070 - DNA, 20 bp, Artificial Sequence
  Description of Artificial Sequence: Synthetic oligonucleotide
  Target: SCNA; (+) strand; PAM type: YTN; PAM sequence: CTC
cttgaattttaaatataata

SEQ ID NO: 71071 - DNA, 20 bp, Artificial Sequence
  Description of Artificial Sequence: Synthetic oligonucleotide
  Target: SCNA; (+) strand; PAM type: YTN; PAM sequence: CTT
gaattttaaatataatagat

SEQ ID NO: 71072 - DNA, 20 bp, Artificial Sequence
  Description of Artificial Sequence: Synthetic oligonucleotide
  Target: SCNA; (+) strand; PAM type: YTN; PAM sequence: TTG
aattttaaatataatagata

SEQ ID NO: 71073 - DNA, 20 bp, Artificial Sequence
  Description of Artificial Sequence: Synthetic oligonucleotide
  Target: SCNA; (+) strand; PAM type: YTN; PAM sequence: TTT
taaatataatagatatgacc

SEQ ID NO: 71074 - DNA, 20 bp, Artificial Sequence
  Description of Artificial Sequence: Synthetic oligonucleotide
  Target: SCNA; (+) strand; PAM type: YTN; PAM sequence: TTT
aaatataatagatatgacct

SEQ ID NO: 71075 - DNA, 20 bp, Artificial Sequence
  Description of Artificial Sequence: Synthetic oligonucleotide
  Target: SCNA; (+) strand; PAM type: YTN; PAM sequence: TTA
aatataatagatatgacctg

SEQ ID NO: 71076 - DNA, 20 bp, Artificial Sequence
  Description of Artificial Sequence: Synthetic oligonucleotide
  Target: SCNA; (+) strand; PAM type: YTN; PAM sequence: CTG
ttatttaaaagatatagtgt

SEQ ID NO: 71077 - DNA, 20 bp, Artificial Sequence
  Description of Artificial Sequence: Synthetic oligonucleotide
  Target: SCNA; (+) strand; PAM type: YTN; PAM sequence: TTA
tttaaaagatatagtgttta

SEQ ID NO: 71078 - DNA, 20 bp, Artificial Sequence
  Description of Artificial Sequence: Synthetic oligonucleotide
  Target: SCNA; (+) strand; PAM type: YTN; PAM sequence: TTT
aaaagatatagtgtttactg

SEQ ID NO: 71079 - DNA, 20 bp, Artificial Sequence
  Description of Artificial Sequence: Synthetic oligonucleotide
  Target: SCNA; (+) strand; PAM type: YTN; PAM sequence: TTA
aaagatatagtgtttactgg

SEQ ID NO: 71080 - DNA, 20 bp, Artificial Sequence
  Description of Artificial Sequence: Synthetic oligonucleotide
  Target: SCNA; (+) strand; PAM type: YTN; PAM sequence: TTT
actggcatataacagttgtg

SEQ ID NO: 71081 - DNA, 20 bp, Artificial Sequence
  Description of Artificial Sequence: Synthetic oligonucleotide
  Target: SCNA; (+) strand; PAM type: YTN; PAM sequence: TTA
ctggcatataacagttgtgt

SEQ ID NO: 71082 - DNA, 20 bp, Artificial Sequence
  Description of Artificial Sequence: Synthetic oligonucleotide
  Target: SCNA; (+) strand; PAM type: YTN; PAM sequence: CTG
gcatataacagttgtgttga

SEQ ID NO: 71083 - DNA, 20 bp, Artificial Sequence
  Description of Artificial Sequence: Synthetic oligonucleotide
  Target: SCNA; (+) strand; PAM type: YTN; PAM sequence: TTG
tgttgagaatttttcattga

SEQ ID NO: 71084 - DNA, 20 bp, Artificial Sequence
  Description of Artificial Sequence: Synthetic oligonucleotide
  Target: SCNA; (+) strand; PAM type: YTN; PAM sequence: TTG
agaatttttcattgaataaa

SEQ ID NO: 71085 - DNA, 20 bp, Artificial Sequence
  Description of Artificial Sequence: Synthetic oligonucleotide
  Target: SCNA; (+) strand; PAM type: YTN; PAM sequence: TTT
ttcattgaataaaatatatt

SEQ ID NO: 71086 - DNA, 20 bp, Artificial Sequence
  Description of Artificial Sequence: Synthetic oligonucleotide
  Target: SCNA; (+) strand; PAM type: YTN; PAM sequence: TTT
tcattgaataaaatatattt

SEQ ID NO: 71087 - DNA, 20 bp, Artificial Sequence
  Description of Artificial Sequence: Synthetic oligonucleotide
  Target: SCNA; (+) strand; PAM type: YTN; PAM sequence: TTT
cattgaataaaatatatttc

SEQ ID NO: 71088 - DNA, 20 bp, Artificial Sequence
  Description of Artificial Sequence: Synthetic oligonucleotide
  Target: SCNA; (+) strand; PAM type: YTN; PAM sequence: TTC
attgaataaaatatatttcc

SEQ ID NO: 71089 - DNA, 20 bp, Artificial Sequence
  Description of Artificial Sequence: Synthetic oligonucleotide
  Target: SCNA; (+) strand; PAM type: YTN; PAM sequence: TTG
aataaaatatatttcccttg

SEQ ID NO: 71090 - DNA, 20 bp, Artificial Sequence
  Description of Artificial Sequence: Synthetic oligonucleotide
  Target: SCNA; (+) strand; PAM type: YTN; PAM sequence: TTT
cccttgaaatttttgtttta

SEQ ID NO: 71091 - DNA, 20 bp, Artificial Sequence
  Description of Artificial Sequence: Synthetic oligonucleotide
  Target: SCNA; (+) strand; PAM type: YTN; PAM sequence: TTC
ccttgaaatttttgttttat

SEQ ID NO: 71092 - DNA, 20 bp, Artificial Sequence
  Description of Artificial Sequence: Synthetic oligonucleotide
  Target: SCNA; (+) strand; PAM type: YTN; PAM sequence: CTT
gaaatttttgttttatggtc

SEQ ID NO: 71093 - DNA, 20 bp, Artificial Sequence
  Description of Artificial Sequence: Synthetic oligonucleotide
  Target: SCNA; (+) strand; PAM type: YTN; PAM sequence: TTG
aaatttttgttttatggtca

SEQ ID NO: 71094 - DNA, 20 bp, Artificial Sequence
  Description of Artificial Sequence: Synthetic oligonucleotide
  Target: SCNA; (+) strand; PAM type: YTN; PAM sequence: TTT
ttgttttatggtcatatctc

SEQ ID NO: 71095 - DNA, 20 bp, Artificial Sequence
  Description of Artificial Sequence: Synthetic oligonucleotide
  Target: SCNA; (+) strand; PAM type: YTN; PAM sequence: TTT
tgttttatggtcatatctca

SEQ ID NO: 71096 - DNA, 20 bp, Artificial Sequence
  Description of Artificial Sequence: Synthetic oligonucleotide
  Target: SCNA; (+) strand; PAM type: YTN; PAM sequence: TTT
gttttatggtcatatctcat

SEQ ID NO: 71097 - DNA, 20 bp, Artificial Sequence
  Description of Artificial Sequence: Synthetic oligonucleotide
  Target: SCNA; (+) strand; PAM type: YTN; PAM sequence: TTG
ttttatggtcatatctcata

SEQ ID NO: 71098 - DNA, 20 bp, Artificial Sequence
  Description of Artificial Sequence: Synthetic oligonucleotide
  Target: SCNA; (+) strand; PAM type: YTN; PAM sequence: TTT
tatggtcatatctcataatc

SEQ ID NO: 71099 - DNA, 20 bp, Artificial Sequence
  Description of Artificial Sequence: Synthetic oligonucleotide
  Target: SCNA; (+) strand; PAM type: YTN; PAM sequence: TTT
atggtcatatctcataatcc

SEQ ID NO: 71100 - DNA, 20 bp, Artificial Sequence
  Description of Artificial Sequence: Synthetic oligonucleotide
  Target: SCNA; (+) strand; PAM type: YTN; PAM sequence: TTA
tggtcatatctcataatcca

SEQ ID NO: 71101 - DNA, 20 bp, Artificial Sequence
  Description of Artificial Sequence: Synthetic oligonucleotide
  Target: SCNA; (+) strand; PAM type: YTN; PAM sequence: CTC
ataatccacctctgaatcaa

SEQ ID NO: 71102 - DNA, 20 bp, Artificial Sequence
  Description of Artificial Sequence: Synthetic oligonucleotide
  Target: SCNA; (+) strand; PAM type: YTN; PAM sequence: CTC
tgaatcaatgaacacttgta

SEQ ID NO: 71103 - DNA, 20 bp, Artificial Sequence
  Description of Artificial Sequence: Synthetic oligonucleotide
  Target: SCNA; (+) strand; PAM type: YTN; PAM sequence: CTG
aatcaatgaacacttgtatt

SEQ ID NO: 71104 - DNA, 20 bp, Artificial Sequence
  Description of Artificial Sequence: Synthetic oligonucleotide
  Target: SCNA; (+) strand; PAM type: YTN; PAM sequence: CTT
gtattggtggagaaaacaaa

SEQ ID NO: 71105 - DNA, 20 bp, Artificial Sequence
  Description of Artificial Sequence: Synthetic oligonucleotide
  Target: SCNA; (+) strand; PAM type: YTN; PAM sequence: TTG
tattggtggagaaaacaaag

SEQ ID NO: 71106 - DNA, 20 bp, Artificial Sequence
  Description of Artificial Sequence: Synthetic oligonucleotide
  Target: SCNA; (+) strand; PAM type: YTN; PAM sequence: TTG
gtggagaaaacaaagatcct

SEQ ID NO: 71107 - DNA, 20 bp, Artificial Sequence
  Description of Artificial Sequence: Synthetic oligonucleotide
  Target: SCNA; (+) strand; PAM type: YTN; PAM sequence: CTT
cagacagactttctgtgtgg

SEQ ID NO: 71108 - DNA, 20 bp, Artificial Sequence
  Description of Artificial Sequence: Synthetic oligonucleotide
  Target: SCNA; (+) strand; PAM type: YTN; PAM sequence: TTC
agacagactttctgtgtggt

SEQ ID NO: 71109 - DNA, 20 bp, Artificial Sequence
  Description of Artificial Sequence: Synthetic oligonucleotide
  Target: SCNA; (+) strand; PAM type: YTN; PAM sequence: CTT
tctgtgtggtatgttctttc

SEQ ID NO: 71110 - DNA, 20 bp, Artificial Sequence
  Description of Artificial Sequence: Synthetic oligonucleotide
  Target: SCNA; (+) strand; PAM type: YTN; PAM sequence: TTT
ctgtgtggtatgttctttct

SEQ ID NO: 71111 - DNA, 20 bp, Artificial Sequence
  Description of Artificial Sequence: Synthetic oligonucleotide
  Target: SCNA; (+) strand; PAM type: YTN; PAM sequence: TTC
tgtgtggtatgttctttctg

SEQ ID NO: 71112 - DNA, 20 bp, Artificial Sequence
  Description of Artificial Sequence: Synthetic oligonucleotide
  Target: SCNA; (+) strand; PAM type: YTN; PAM sequence: CTG
tgtggtatgttctttctgtt

SEQ ID NO: 71113 - DNA, 20 bp, Artificial Sequence
  Description of Artificial Sequence: Synthetic oligonucleotide
  Target: SCNA; (+) strand; PAM type: YTN; PAM sequence: TTC
tttctgtttcttttctaata

SEQ ID NO: 71114 - DNA, 20 bp, Artificial Sequence
  Description of Artificial Sequence: Synthetic oligonucleotide
  Target: SCNA; (+) strand; PAM type: YTN; PAM sequence: CTT
tctgtttcttttctaataac

SEQ ID NO: 71115 - DNA, 20 bp, Artificial Sequence
  Description of Artificial Sequence: Synthetic oligonucleotide
  Target: SCNA; (+) strand; PAM type: YTN; PAM sequence: TTT
ctgtttcttttctaataaca

SEQ ID NO: 71116 - DNA, 20 bp, Artificial Sequence
  Description of Artificial Sequence: Synthetic oligonucleotide
  Target: SCNA; (+) strand; PAM type: YTN; PAM sequence: TTC
tgtttcttttctaataacat

SEQ ID NO: 71117 - DNA, 20 bp, Artificial Sequence
  Description of Artificial Sequence: Synthetic oligonucleotide
  Target: SCNA; (+) strand; PAM type: YTN; PAM sequence: CTG
tttcttttctaataacatta

SEQ ID NO: 71118 - DNA, 20 bp, Artificial Sequence
  Description of Artificial Sequence: Synthetic oligonucleotide
  Target: SCNA; (+) strand; PAM type: YTN; PAM sequence: TTT
cttttctaataacattaact

SEQ ID NO: 71119 - DNA, 20 bp, Artificial Sequence
  Description of Artificial Sequence: Synthetic oligonucleotide
  Target: SCNA; (+) strand; PAM type: YTN; PAM sequence: TTC
ttttctaataacattaactt

SEQ ID NO: 71120 - DNA, 20 bp, Artificial Sequence
  Description of Artificial Sequence: Synthetic oligonucleotide
  Target: SCNA; (+) strand; PAM type: YTN; PAM sequence: CTT
ttctaataacattaacttac

SEQ ID NO: 71121 - DNA, 20 bp, Artificial Sequence
  Description of Artificial Sequence: Synthetic oligonucleotide
  Target: SCNA; (+) strand; PAM type: YTN; PAM sequence: TTT
tctaataacattaacttaca

SEQ ID NO: 71122 - DNA, 20 bp, Artificial Sequence
  Description of Artificial Sequence: Synthetic oligonucleotide
  Target: SCNA; (+) strand; PAM type: YTN; PAM sequence: TTT
ctaataacattaacttacat

SEQ ID NO: 71123 - DNA, 20 bp, Artificial Sequence
  Description of Artificial Sequence: Synthetic oligonucleotide
  Target: SCNA; (+) strand; PAM type: YTN; PAM sequence: TTC
taataacattaacttacatt

SEQ ID NO: 71124 - DNA, 20 bp, Artificial Sequence
  Description of Artificial Sequence: Synthetic oligonucleotide
  Target: SCNA; (+) strand; PAM type: YTN; PAM sequence: CTA
ataacattaacttacattta

SEQ ID NO: 71125 - DNA, 20 bp, Artificial Sequence
  Description of Artificial Sequence: Synthetic oligonucleotide
  Target: SCNA; (+) strand; PAM type: YTN; PAM sequence: TTA
acttacatttaaaattatta

SEQ ID NO: 71126 - DNA, 20 bp, Artificial Sequence
  Description of Artificial Sequence: Synthetic oligonucleotide
  Target: SCNA; (+) strand; PAM type: YTN; PAM sequence: CTT
acatttaaaattattataat

SEQ ID NO: 71127 - DNA, 20 bp, Artificial Sequence
  Description of Artificial Sequence: Synthetic oligonucleotide
  Target: SCNA; (+) strand; PAM type: YTN; PAM sequence: TTA
catttaaaattattataatt

SEQ ID NO: 71128 - DNA, 20 bp, Artificial Sequence
  Description of Artificial Sequence: Synthetic oligonucleotide
  Target: SCNA; (+) strand; PAM type: YTN; PAM sequence: TTT
aaaattattataattcactc

SEQ ID NO: 71129 - DNA, 20 bp, Artificial Sequence
  Description of Artificial Sequence: Synthetic oligonucleotide
  Target: SCNA; (+) strand; PAM type: YTN; PAM sequence: TTA
aaattattataattcactct

SEQ ID NO: 71130 - DNA, 20 bp, Artificial Sequence
  Description of Artificial Sequence: Synthetic oligonucleotide
  Target: SCNA; (+) strand; PAM type: YTN; PAM sequence: TTA
ttataattcactctattttc

SEQ ID NO: 71131 - DNA, 20 bp, Artificial Sequence
  Description of Artificial Sequence: Synthetic oligonucleotide
  Target: SCNA; (+) strand; PAM type: YTN; PAM sequence: TTA
taattcactctattttcaca

SEQ ID NO: 71132 - DNA, 20 bp, Artificial Sequence
  Description of Artificial Sequence: Synthetic oligonucleotide
  Target: SCNA; (+) strand; PAM type: YTN; PAM sequence: TTC
actctattttcacaaatcat

SEQ ID NO: 71133 - DNA, 20 bp, Artificial Sequence
  Description of Artificial Sequence: Synthetic oligonucleotide
  Target: SCNA; (+) strand; PAM type: YTN; PAM sequence: CTC
tattttcacaaatcatcaaa

SEQ ID NO: 71134 - DNA, 20 bp, Artificial Sequence
  Description of Artificial Sequence: Synthetic oligonucleotide
  Target: SCNA; (+) strand; PAM type: YTN; PAM sequence: CTA
ttttcacaaatcatcaaatc

SEQ ID NO: 71135 - DNA, 20 bp, Artificial Sequence
  Description of Artificial Sequence: Synthetic oligonucleotide
  Target: SCNA; (+) strand; PAM type: YTN; PAM sequence: TTT
tcacaaatcatcaaatcata

SEQ ID NO: 71136 - DNA, 20 bp, Artificial Sequence
  Description of Artificial Sequence: Synthetic oligonucleotide
  Target: SCNA; (+) strand; PAM type: YTN; PAM sequence: TTT
cacaaatcatcaaatcatac

SEQ ID NO: 71137 - DNA, 20 bp, Artificial Sequence
  Description of Artificial Sequence: Synthetic oligonucleotide
  Target: SCNA; (+) strand; PAM type: YTN; PAM sequence: TTC
acaaatcatcaaatcatact

SEQ ID NO: 71138 - DNA, 20 bp, Artificial Sequence
  Description of Artificial Sequence: Synthetic oligonucleotide
  Target: SCNA; (+) strand; PAM type: YTN; PAM sequence: CTC
agatatttaaaaataaattt

SEQ ID NO: 71139 - DNA, 20 bp, Artificial Sequence
  Description of Artificial Sequence: Synthetic oligonucleotide
  Target: SCNA; (+) strand; PAM type: YTN; PAM sequence: TTT
aaaaataaattttattgtat

SEQ ID NO: 71140 - DNA, 20 bp, Artificial Sequence
  Description of Artificial Sequence: Synthetic oligonucleotide
  Target: SCNA; (+) strand; PAM type: YTN; PAM sequence: TTA
aaaataaattttattgtata

SEQ ID NO: 71141 - DNA, 20 bp, Artificial Sequence
  Description of Artificial Sequence: Synthetic oligonucleotide
  Target: SCNA; (+) strand; PAM type: YTN; PAM sequence: TTT
tattgtatatatttacagta

SEQ ID NO: 71142 - DNA, 20 bp, Artificial Sequence
  Description of Artificial Sequence: Synthetic oligonucleotide
  Target: SCNA; (+) strand; PAM type: YTN; PAM sequence: TTT
attgtatatatttacagtaa

SEQ ID NO: 71143 - DNA, 20 bp, Artificial Sequence
  Description of Artificial Sequence: Synthetic oligonucleotide
  Target: SCNA; (+) strand; PAM type: YTN; PAM sequence: TTA
ttgtatatatttacagtaaa

SEQ ID NO: 71144 - DNA, 20 bp, Artificial Sequence
  Description of Artificial Sequence: Synthetic oligonucleotide
  Target: SCNA; (+) strand; PAM type: YTN; PAM sequence: TTG
tatatatttacagtaaacaa

SEQ ID NO: 71145 - DNA, 20 bp, Artificial Sequence
  Description of Artificial Sequence: Synthetic oligonucleotide
  Target: SCNA; (+) strand; PAM type: YTN; PAM sequence: TTT
acagtaaacaacatgctgtt

SEQ ID NO: 71146 - DNA, 20 bp, Artificial Sequence
  Description of Artificial Sequence: Synthetic oligonucleotide
  Target: SCNA; (+) strand; PAM type: YTN; PAM sequence: TTA
cagtaaacaacatgctgtta

SEQ ID NO: 71147 - DNA, 20 bp, Artificial Sequence
  Description of Artificial Sequence: Synthetic oligonucleotide
  Target: SCNA; (+) strand; PAM type: YTN; PAM sequence: CTG
ttataagatgaatgtatatg

SEQ ID NO: 71148 - DNA, 20 bp, Artificial Sequence
  Description of Artificial Sequence: Synthetic oligonucleotide
  Target: SCNA; (+) strand; PAM type: YTN; PAM sequence: TTA
taagatgaatgtatatggtg

SEQ ID NO: 71149 - DNA, 20 bp, Artificial Sequence
  Description of Artificial Sequence: Synthetic oligonucleotide
  Target: SCNA; (+) strand; PAM type: YTN; PAM sequence: TTA
ttatagtgacaaaaattaac

SEQ ID NO: 71150 - DNA, 20 bp, Artificial Sequence
  Description of Artificial Sequence: Synthetic oligonucleotide
  Target: SCNA; (+) strand; PAM type: YTN; PAM sequence: TTA
tagtgacaaaaattaacaca

SEQ ID NO: 71151 - DNA, 20 bp, Artificial Sequence
  Description of Artificial Sequence: Synthetic oligonucleotide
  Target: SCNA; (+) strand; PAM type: YTN; PAM sequence: TTA
acacatccattgtctatctc

SEQ ID NO: 71152 - DNA, 20 bp, Artificial Sequence
  Description of Artificial Sequence: Synthetic oligonucleotide
  Target: SCNA; (+) strand; PAM type: YTN; PAM sequence: TTG
tctatctcacgtagttaccc

SEQ ID NO: 71153 - DNA, 20 bp, Artificial Sequence
  Description of Artificial Sequence: Synthetic oligonucleotide
  Target: SCNA; (+) strand; PAM type: YTN; PAM sequence: CTA
tctcacgtagttacccactt

SEQ ID NO: 71154 - DNA, 20 bp, Artificial Sequence
  Description of Artificial Sequence: Synthetic oligonucleotide
  Target: SCNA; (+) strand; PAM type: YTN; PAM sequence: CTC
acgtagttacccactttttc

SEQ ID NO: 71155 - DNA, 20 bp, Artificial Sequence
  Description of Artificial Sequence: Synthetic oligonucleotide
  Target: SCNA; (+) strand; PAM type: YTN; PAM sequence: TTA
cccactttttcccctgtggc

SEQ ID NO: 71156 - DNA, 20 bp, Artificial Sequence
  Description of Artificial Sequence: Synthetic oligonucleotide
  Target: SCNA; (+) strand; PAM type: YTN; PAM sequence: CTT
tttcccctgtggcaagagca

SEQ ID NO: 71157 - DNA, 20 bp, Artificial Sequence
  Description of Artificial Sequence: Synthetic oligonucleotide
  Target: SCNA; (+) strand; PAM type: YTN; PAM sequence: TTT
ttcccctgtggcaagagcag

SEQ ID NO: 71158 - DNA, 20 bp, Artificial Sequence
  Description of Artificial Sequence: Synthetic oligonucleotide
  Target: SCNA; (+) strand; PAM type: YTN; PAM sequence: TTT
tcccctgtggcaagagcagc

SEQ ID NO: 71159 - DNA, 20 bp, Artificial Sequence
  Description of Artificial Sequence: Synthetic oligonucleotide
  Target: SCNA; (+) strand; PAM type: YTN; PAM sequence: TTT
cccctgtggcaagagcagct

SEQ ID NO: 71160 - DNA, 20 bp, Artificial Sequence
  Description of Artificial Sequence: Synthetic oligonucleotide
  Target: SCNA; (+) strand; PAM type: YTN; PAM sequence: TTC
ccctgtggcaagagcagcta

SEQ ID NO: 71161 - DNA, 20 bp, Artificial Sequence
  Description of Artificial Sequence: Synthetic oligonucleotide
  Target: SCNA; (+) strand; PAM type: YTN; PAM sequence: CTG
tggcaagagcagctataatc

SEQ ID NO: 71162 - DNA, 20 bp, Artificial Sequence
  Description of Artificial Sequence: Synthetic oligonucleotide
  Target: SCNA; (+) strand; PAM type: YTN; PAM sequence: CTA
taatctactcaattagcaaa

SEQ ID NO: 71163 - DNA, 20 bp, Artificial Sequence
  Description of Artificial Sequence: Synthetic oligonucleotide
  Target: SCNA; (+) strand; PAM type: YTN; PAM sequence: CTA
ctcaattagcaaaaatcctg

SEQ ID NO: 71164 - DNA, 20 bp, Artificial Sequence
  Description of Artificial Sequence: Synthetic oligonucleotide
  Target: SCNA; (+) strand; PAM type: YTN; PAM sequence: CTC
aattagcaaaaatcctgaat

SEQ ID NO: 71165 - DNA, 20 bp, Artificial Sequence
  Description of Artificial Sequence: Synthetic oligonucleotide
  Target: SCNA; (+) strand; PAM type: YTN; PAM sequence: TTA
gcaaaaatcctgaatacaat

SEQ ID NO: 71166 - DNA, 20 bp, Artificial Sequence
  Description of Artificial Sequence: Synthetic oligonucleotide
  Target: SCNA; (+) strand; PAM type: YTN; PAM sequence: CTG
aatacaatacactattacta

SEQ ID NO: 71167 - DNA, 20 bp, Artificial Sequence
  Description of Artificial Sequence: Synthetic oligonucleotide
  Target: SCNA; (+) strand; PAM type: YTN; PAM sequence: CTA
ttactaactatagttgtcat

SEQ ID NO: 71168 - DNA, 20 bp, Artificial Sequence
  Description of Artificial Sequence: Synthetic oligonucleotide
  Target: SCNA; (+) strand; PAM type: YTN; PAM sequence: TTA
ctaactatagttgtcatcct

SEQ ID NO: 71169 - DNA, 20 bp, Artificial Sequence
  Description of Artificial Sequence: Synthetic oligonucleotide
  Target: SCNA; (+) strand; PAM type: YTN; PAM sequence: CTA
actatagttgtcatcctgca

SEQ ID NO: 71170 - DNA, 20 bp, Artificial Sequence
  Description of Artificial Sequence: Synthetic oligonucleotide
  Target: SCNA; (+) strand; PAM type: YTN; PAM sequence: CTA
tagttgtcatcctgcatgtc

SEQ ID NO: 71171 - DNA, 20 bp, Artificial Sequence
  Description of Artificial Sequence: Synthetic oligonucleotide
  Target: SCNA; (+) strand; PAM type: YTN; PAM sequence: TTG
tcatcctgcatgtcagcttt

SEQ ID NO: 71172 - DNA, 20 bp, Artificial Sequence
  Description of Artificial Sequence: Synthetic oligonucleotide
  Target: SCNA; (+) strand; PAM type: YTN; PAM sequence: CTG
catgtcagctttttagttcc

SEQ ID NO: 71173 - DNA, 20 bp, Artificial Sequence
  Description of Artificial Sequence: Synthetic oligonucleotide
  Target: SCNA; (+) strand; PAM type: YTN; PAM sequence: CTT
tttagttcctcctacatatc

SEQ ID NO: 71174 - DNA, 20 bp, Artificial Sequence
  Description of Artificial Sequence: Synthetic oligonucleotide
  Target: SCNA; (+) strand; PAM type: YTN; PAM sequence: TTT
ttagttcctcctacatatct

SEQ ID NO: 71175 - DNA, 20 bp, Artificial Sequence
  Description of Artificial Sequence: Synthetic oligonucleotide
  Target: SCNA; (+) strand; PAM type: YTN; PAM sequence: TTT
tagttcctcctacatatctg

SEQ ID NO: 71176 - DNA, 20 bp, Artificial Sequence
  Description of Artificial Sequence: Synthetic oligonucleotide
  Target: SCNA; (+) strand; PAM type: YTN; PAM sequence: TTT
agttcctcctacatatctgc

SEQ ID NO: 71177 - DNA, 20 bp, Artificial Sequence
  Description of Artificial Sequence: Synthetic oligonucleotide
  Target: SCNA; (+) strand; PAM type: YTN; PAM sequence: TTA
gttcctcctacatatctgct

SEQ ID NO: 71178 - DNA, 20 bp, Artificial Sequence
  Description of Artificial Sequence: Synthetic oligonucleotide
  Target: SCNA; (+) strand; PAM type: YTN; PAM sequence: TTC
ctcctacatatctgctactt

SEQ ID NO: 71179 - DNA, 20 bp, Artificial Sequence
  Description of Artificial Sequence: Synthetic oligonucleotide
  Target: SCNA; (+) strand; PAM type: YTN; PAM sequence: CTC
ctacatatctgctactttgt

SEQ ID NO: 71180 - DNA, 20 bp, Artificial Sequence
  Description of Artificial Sequence: Synthetic oligonucleotide
  Target: SCNA; (+) strand; PAM type: YTN; PAM sequence: CTA
catatctgctactttgtatc

SEQ ID NO: 71181 - DNA, 20 bp, Artificial Sequence
  Description of Artificial Sequence: Synthetic oligonucleotide
  Target: SCNA; (+) strand; PAM type: YTN; PAM sequence: CTG
ctactttgtatccttagatc

SEQ ID NO: 71182 - DNA, 20 bp, Artificial Sequence
  Description of Artificial Sequence: Synthetic oligonucleotide
  Target: SCNA; (+) strand; PAM type: YTN; PAM sequence: CTA
ctttgtatccttagatctac

SEQ ID NO: 71183 - DNA, 20 bp, Artificial Sequence
  Description of Artificial Sequence: Synthetic oligonucleotide
  Target: SCNA; (+) strand; PAM type: YTN; PAM sequence: CTT
tgtatccttagatctacatc

SEQ ID NO: 71184 - DNA, 20 bp, Artificial Sequence
  Description of Artificial Sequence: Synthetic oligonucleotide
  Target: SCNA; (+) strand; PAM type: YTN; PAM sequence: TTT
gtatccttagatctacatct

SEQ ID NO: 71185 - DNA, 20 bp, Artificial Sequence
  Description of Artificial Sequence: Synthetic oligonucleotide
  Target: SCNA; (+) strand; PAM type: YTN; PAM sequence: TTG
tatccttagatctacatctc

SEQ ID NO: 71186 - DNA, 20 bp, Artificial Sequence
  Description of Artificial Sequence: Synthetic oligonucleotide
  Target: SCNA; (+) strand; PAM type: YTN; PAM sequence: CTT
agatctacatctcccaatct

SEQ ID NO: 71187 - DNA, 20 bp, Artificial Sequence
  Description of Artificial Sequence: Synthetic oligonucleotide
  Target: SCNA; (+) strand; PAM type: YTN; PAM sequence: TTA
gatctacatctcccaatctc

SEQ ID NO: 71188 - DNA, 20 bp, Artificial Sequence
  Description of Artificial Sequence: Synthetic oligonucleotide
  Target: SCNA; (+) strand; PAM type: YTN; PAM sequence: CTA
catctcccaatctcctccct

SEQ ID NO: 71189 - DNA, 20 bp, Artificial Sequence
  Description of Artificial Sequence: Synthetic oligonucleotide
  Target: SCNA; (+) strand; PAM type: YTN; PAM sequence: CTC
ccaatctcctccctgccacc

SEQ ID NO: 71190 - DNA, 20 bp, Artificial Sequence
  Description of Artificial Sequence: Synthetic oligonucleotide
  Target: SCNA; (+) strand; PAM type: YTN; PAM sequence: CTC
ctccctgccacctcactcat

SEQ ID NO: 71191 - DNA, 20 bp, Artificial Sequence
  Description of Artificial Sequence: Synthetic oligonucleotide
  Target: SCNA; (+) strand; PAM type: YTN; PAM sequence: CTC
cctgccacctcactcatggt

SEQ ID NO: 71192 - DNA, 20 bp, Artificial Sequence
  Description of Artificial Sequence: Synthetic oligonucleotide
  Target: SCNA; (+) strand; PAM type: YTN; PAM sequence: CTG
ccacctcactcatggtaacc

SEQ ID NO: 71193 - DNA, 20 bp, Artificial Sequence
  Description of Artificial Sequence: Synthetic oligonucleotide
  Target: SCNA; (+) strand; PAM type: YTN; PAM sequence: CTC
actcatggtaaccagtgtgt

SEQ ID NO: 71194 - DNA, 20 bp, Artificial Sequence
  Description of Artificial Sequence: Synthetic oligonucleotide
  Target: SCNA; (+) strand; PAM type: YTN; PAM sequence: CTC
atggtaaccagtgtgtggac

SEQ ID NO: 71195 - DNA, 20 bp, Artificial Sequence
  Description of Artificial Sequence: Synthetic oligonucleotide
  Target: SCNA; (+) strand; PAM type: YTN; PAM sequence: CTG
tgttttttgtttttttattt

SEQ ID NO: 71196 - DNA, 20 bp, Artificial Sequence
  Description of Artificial Sequence: Synthetic oligonucleotide
  Target: SCNA; (+) strand; PAM type: YTN; PAM sequence: TTT
tttgtttttttattttgaga

SEQ ID NO: 71197 - DNA, 20 bp, Artificial Sequence
  Description of Artificial Sequence: Synthetic oligonucleotide
  Target: SCNA; (+) strand; PAM type: YTN; PAM sequence: TTT
ttgtttttttattttgagac

SEQ ID NO: 71198 - DNA, 20 bp, Artificial Sequence
  Description of Artificial Sequence: Synthetic oligonucleotide
  Target: SCNA; (+) strand; PAM type: YTN; PAM sequence: TTT
tgtttttttattttgagaca

SEQ ID NO: 71199 - DNA, 20 bp, Artificial Sequence
  Description of Artificial Sequence: Synthetic oligonucleotide
  Target: SCNA; (+) strand; PAM type: YTN; PAM sequence: TTT
gtttttttattttgagacag

SEQ ID NO: 71200 - DNA, 20 bp, Artificial Sequence
  Description of Artificial Sequence: Synthetic oligonucleotide
  Target: SCNA; (+) strand; PAM type: YTN; PAM sequence: TTG
tttttttattttgagacaga

SEQ ID NO: 71201 - DNA, 20 bp, Artificial Sequence
  Description of Artificial Sequence: Synthetic oligonucleotide
  Target: SCNA; (+) strand; PAM type: YTN; PAM sequence: TTT
ttttattttgagacagagtt

SEQ ID NO: 71202 - DNA, 20 bp, Artificial Sequence
  Description of Artificial Sequence: Synthetic oligonucleotide
  Target: SCNA; (+) strand; PAM type: YTN; PAM sequence: TTT
tttattttgagacagagttt

SEQ ID NO: 71203 - DNA, 20 bp, Artificial Sequence
  Description of Artificial Sequence: Synthetic oligonucleotide
  Target: SCNA; (+) strand; PAM type: YTN; PAM sequence: TTT
ttattttgagacagagtttt

SEQ ID NO: 71204 - DNA, 20 bp, Artificial Sequence
  Description of Artificial Sequence: Synthetic oligonucleotide
  Target: SCNA; (+) strand; PAM type: YTN; PAM sequence: TTT
tattttgagacagagttttg

SEQ ID NO: 71205 - DNA, 20 bp, Artificial Sequence
  Description of Artificial Sequence: Synthetic oligonucleotide
  Target: SCNA; (+) strand; PAM type: YTN; PAM sequence: TTT
attttgagacagagttttgc

SEQ ID NO: 71206 - DNA, 20 bp, Artificial Sequence
  Description of Artificial Sequence: Synthetic oligonucleotide
  Target: SCNA; (+) strand; PAM type: YTN; PAM sequence: TTA
ttttgagacagagttttgct

SEQ ID NO: 71207 - DNA, 20 bp, Artificial Sequence
  Description of Artificial Sequence: Synthetic oligonucleotide
  Target: SCNA; (+) strand; PAM type: YTN; PAM sequence: TTT
tgagacagagttttgctctt

SEQ ID NO: 71208 - DNA, 20 bp, Artificial Sequence
  Description of Artificial Sequence: Synthetic oligonucleotide
  Target: SCNA; (+) strand; PAM type: YTN; PAM sequence: TTT
gagacagagttttgctcttt

SEQ ID NO: 71209 - DNA, 20 bp, Artificial Sequence
  Description of Artificial Sequence: Synthetic oligonucleotide
  Target: SCNA; (+) strand; PAM type: YTN; PAM sequence: TTG
agacagagttttgctctttt

SEQ ID NO: 71210 - DNA, 20 bp, Artificial Sequence
  Description of Artificial Sequence: Synthetic oligonucleotide
  Target: SCNA; (+) strand; PAM type: YTN; PAM sequence: TTT
tgctcttttgcccaggctgg

SEQ ID NO: 71211 - DNA, 20 bp, Artificial Sequence
  Description of Artificial Sequence: Synthetic oligonucleotide
  Target: SCNA; (+) strand; PAM type: YTN; PAM sequence: TTT
gctcttttgcccaggctgga

SEQ ID NO: 71212 - DNA, 20 bp, Artificial Sequence
  Description of Artificial Sequence: Synthetic oligonucleotide
  Target: SCNA; (+) strand; PAM type: YTN; PAM sequence: TTG
ctcttttgcccaggctggag

SEQ ID NO: 71213 - DNA, 20 bp, Artificial Sequence
  Description of Artificial Sequence: Synthetic oligonucleotide
  Target: SCNA; (+) strand; PAM type: YTN; PAM sequence: CTC
ttttgcccaggctggagtga

SEQ ID NO: 71214 - DNA, 20 bp, Artificial Sequence
  Description of Artificial Sequence: Synthetic oligonucleotide
  Target: SCNA; (+) strand; PAM type: YTN; PAM sequence: CTT
ttgcccaggctggagtgaag

SEQ ID NO: 71215 - DNA, 20 bp, Artificial Sequence
  Description of Artificial Sequence: Synthetic oligonucleotide
  Target: SCNA; (+) strand; PAM type: YTN; PAM sequence: TTT
tgcccaggctggagtgaagt

SEQ ID NO: 71216 - DNA, 20 bp, Artificial Sequence
  Description of Artificial Sequence: Synthetic oligonucleotide
  Target: SCNA; (+) strand; PAM type: YTN; PAM sequence: TTT
gcccaggctggagtgaagtg

SEQ ID NO: 71217 - DNA, 20 bp, Artificial Sequence
  Description of Artificial Sequence: Synthetic oligonucleotide
  Target: SCNA; (+) strand; PAM type: YTN; PAM sequence: TTG
cccaggctggagtgaagtgg

SEQ ID NO: 71218 - DNA, 20 bp, Artificial Sequence
  Description of Artificial Sequence: Synthetic oligonucleotide
  Target: SCNA; (+) strand; PAM type: YTN; PAM sequence: CTG
gagtgaagtggcgccatctc

SEQ ID NO: 71219 - DNA, 20 bp, Artificial Sequence
  Description of Artificial Sequence: Synthetic oligonucleotide
  Target: SCNA; (+) strand; PAM type: YTN; PAM sequence: CTC
ggctcactgcaacctatgcc

SEQ ID NO: 71220 - DNA, 20 bp, Artificial Sequence
  Description of Artificial Sequence: Synthetic oligonucleotide
  Target: SCNA; (+) strand; PAM type: YTN; PAM sequence: CTC
actgcaacctatgcctcctg

SEQ ID NO: 71221 - DNA, 20 bp, Artificial Sequence
  Description of Artificial Sequence: Synthetic oligonucleotide
  Target: SCNA; (+) strand; PAM type: YTN; PAM sequence: CTG
caacctatgcctcctgagtt

SEQ ID NO: 71222 - DNA, 20 bp, Artificial Sequence
  Description of Artificial Sequence: Synthetic oligonucleotide
  Target: SCNA; (+) strand; PAM type: YTN; PAM sequence: CTA
tgcctcctgagttcaagtga

SEQ ID NO: 71223 - DNA, 20 bp, Artificial Sequence
  Description of Artificial Sequence: Synthetic oligonucleotide
  Target: SCNA; (+) strand; PAM type: YTN; PAM sequence: CTC
ctgagttcaagtgattctcc

SEQ ID NO: 71224 - DNA, 20 bp, Artificial Sequence
  Description of Artificial Sequence: Synthetic oligonucleotide
  Target: SCNA; (+) strand; PAM type: YTN; PAM sequence: CTG
agttcaagtgattctccttt

SEQ ID NO: 71225 - DNA, 20 bp, Artificial Sequence
  Description of Artificial Sequence: Synthetic oligonucleotide
  Target: SCNA; (+) strand; PAM type: YTN; PAM sequence: TTC
aagtgattctcctttctcaa

SEQ ID NO: 71226 - DNA, 20 bp, Artificial Sequence
  Description of Artificial Sequence: Synthetic oligonucleotide
  Target: SCNA; (+) strand; PAM type: YTN; PAM sequence: TTC
tcctttctcaactgcctgag

SEQ ID NO: 71227 - DNA, 20 bp, Artificial Sequence
  Description of Artificial Sequence: Synthetic oligonucleotide
  Target: SCNA; (+) strand; PAM type: YTN; PAM sequence: CTC
ctttctcaactgcctgagta

SEQ ID NO: 71228 - DNA, 20 bp, Artificial Sequence
  Description of Artificial Sequence: Synthetic oligonucleotide
  Target: SCNA; (+) strand; PAM type: YTN; PAM sequence: CTT
tctcaactgcctgagtagct

SEQ ID NO: 71229 - DNA, 20 bp, Artificial Sequence
  Description of Artificial Sequence: Synthetic oligonucleotide
  Target: SCNA; (+) strand; PAM type: YTN; PAM sequence: TTT
ctcaactgcctgagtagctg

SEQ ID NO: 71230 - DNA, 20 bp, Artificial Sequence
  Description of Artificial Sequence: Synthetic oligonucleotide
  Target: SCNA; (+) strand; PAM type: YTN; PAM sequence: TTC
tcaactgcctgagtagctgg

SEQ ID NO: 71231 - DNA, 20 bp, Artificial Sequence
  Description of Artificial Sequence: Synthetic oligonucleotide
  Target: SCNA; (+) strand; PAM type: YTN; PAM sequence: CTC
aactgcctgagtagctggga

SEQ ID NO: 71232 - DNA, 20 bp, Artificial Sequence
  Description of Artificial Sequence: Synthetic oligonucleotide
  Target: SCNA; (+) strand; PAM type: YTN; PAM sequence: CTG
cctgagtagctgggattaca

SEQ ID NO: 71233 - DNA, 20 bp, Artificial Sequence
  Description of Artificial Sequence: Synthetic oligonucleotide
  Target: SCNA; (+) strand; PAM type: YTN; PAM sequence: CTG
agtagctgggattacaggca

SEQ ID NO: 71234 - DNA, 20 bp, Artificial Sequence
  Description of Artificial Sequence: Synthetic oligonucleotide
  Target: SCNA; (+) strand; PAM type: YTN; PAM sequence: CTG
ggattacaggcacctgccac

SEQ ID NO: 71235 - DNA, 20 bp, Artificial Sequence
  Description of Artificial Sequence: Synthetic oligonucleotide
  Target: SCNA; (+) strand; PAM type: YTN; PAM sequence: TTA
caggcacctgccactatgcc

SEQ ID NO: 71236 - DNA, 20 bp, Artificial Sequence
  Description of Artificial Sequence: Synthetic oligonucleotide
  Target: SCNA; (+) strand; PAM type: YTN; PAM sequence: CTG
ccactatgcccggctaattt

SEQ ID NO: 71237 - DNA, 20 bp, Artificial Sequence
  Description of Artificial Sequence: Synthetic oligonucleotide
  Target: SCNA; (+) strand; PAM type: YTN; PAM sequence: CTA
tgcccggctaatttttgtac

SEQ ID NO: 71238 - DNA, 20 bp, Artificial Sequence
  Description of Artificial Sequence: Synthetic oligonucleotide
  Target: SCNA; (+) strand; PAM type: YTN; PAM sequence: CTA
atttttgtacttttagtaga

SEQ ID NO: 71239 - DNA, 20 bp, Artificial Sequence
  Description of Artificial Sequence: Synthetic oligonucleotide
  Target: SCNA; (+) strand; PAM type: YTN; PAM sequence: TTT
ttgtacttttagtagaaaca

SEQ ID NO: 71240 - DNA, 20 bp, Artificial Sequence
  Description of Artificial Sequence: Synthetic oligonucleotide
  Target: SCNA; (+) strand; PAM type: YTN; PAM sequence: TTT
tgtacttttagtagaaacag

SEQ ID NO: 71241 - DNA, 20 bp, Artificial Sequence
  Description of Artificial Sequence: Synthetic oligonucleotide
  Target: SCNA; (+) strand; PAM type: YTN; PAM sequence: TTT
gtacttttagtagaaacagg

SEQ ID NO: 71242 - DNA, 20 bp, Artificial Sequence
  Description of Artificial Sequence: Synthetic oligonucleotide
  Target: SCNA; (+) strand; PAM type: YTN; PAM sequence: TTG
tacttttagtagaaacagga

SEQ ID NO: 71243 - DNA, 20 bp, Artificial Sequence
  Description of Artificial Sequence: Synthetic oligonucleotide
  Target: SCNA; (+) strand; PAM type: YTN; PAM sequence: CTT
ttagtagaaacaggatttca

SEQ ID NO: 71244 - DNA, 20 bp, Artificial Sequence
  Description of Artificial Sequence: Synthetic oligonucleotide
  Target: SCNA; (+) strand; PAM type: YTN; PAM sequence: TTT
tagtagaaacaggatttcac

SEQ ID NO: 71245 - DNA, 20 bp, Artificial Sequence
  Description of Artificial Sequence: Synthetic oligonucleotide
  Target: SCNA; (+) strand; PAM type: YTN; PAM sequence: TTT
agtagaaacaggatttcacc

SEQ ID NO: 71246 - DNA, 20 bp, Artificial Sequence
  Description of Artificial Sequence: Synthetic oligonucleotide
  Target: SCNA; (+) strand; PAM type: YTN; PAM sequence: TTA
gtagaaacaggatttcacca

SEQ ID NO: 71247 - DNA, 20 bp, Artificial Sequence
  Description of Artificial Sequence: Synthetic oligonucleotide
  Target: SCNA; (+) strand; PAM type: YTN; PAM sequence: TTT
caccatgttggtcaggctgg

SEQ ID NO: 71248 - DNA, 20 bp, Artificial Sequence
  Description of Artificial Sequence: Synthetic oligonucleotide
  Target: SCNA; (+) strand; PAM type: YTN; PAM sequence: TTC
accatgttggtcaggctggt

SEQ ID NO: 71249 - DNA, 20 bp, Artificial Sequence
  Description of Artificial Sequence: Synthetic oligonucleotide
  Target: SCNA; (+) strand; PAM type: YTN; PAM sequence: TTG
gtcaggctggtcttgaactc

SEQ ID NO: 71250 - DNA, 20 bp, Artificial Sequence
  Description of Artificial Sequence: Synthetic oligonucleotide
  Target: SCNA; (+) strand; PAM type: YTN; PAM sequence: CTG
gtcttgaactcctgacctca

SEQ ID NO: 71251 - DNA, 20 bp, Artificial Sequence
  Description of Artificial Sequence: Synthetic oligonucleotide
  Target: SCNA; (+) strand; PAM type: YTN; PAM sequence: CTT
gaactcctgacctcaggtga

SEQ ID NO: 71252 - DNA, 20 bp, Artificial Sequence
  Description of Artificial Sequence: Synthetic oligonucleotide
  Target: SCNA; (+) strand; PAM type: YTN; PAM sequence: TTG
aactcctgacctcaggtgat

SEQ ID NO: 71253 - DNA, 20 bp, Artificial Sequence
  Description of Artificial Sequence: Synthetic oligonucleotide
  Target: SCNA; (+) strand; PAM type: YTN; PAM sequence: CTC
ctgacctcaggtgattcacc

SEQ ID NO: 71254 - DNA, 20 bp, Artificial Sequence
  Description of Artificial Sequence: Synthetic oligonucleotide
  Target: SCNA; (+) strand; PAM type: YTN; PAM sequence: CTG
acctcaggtgattcacccac

SEQ ID NO: 71255 - DNA, 20 bp, Artificial Sequence
  Description of Artificial Sequence: Synthetic oligonucleotide
  Target: SCNA; (+) strand; PAM type: YTN; PAM sequence: CTC
aggtgattcacccacctcgg

SEQ ID NO: 71256 - DNA, 20 bp, Artificial Sequence
  Description of Artificial Sequence: Synthetic oligonucleotide
  Target: SCNA; (+) strand; PAM type: YTN; PAM sequence: TTC
acccacctcggcttcccaaa

SEQ ID NO: 71257 - DNA, 20 bp, Artificial Sequence
  Description of Artificial Sequence: Synthetic oligonucleotide
  Target: SCNA; (+) strand; PAM type: YTN; PAM sequence: CTC
ggcttcccaaagggctagga

SEQ ID NO: 71258 - DNA, 20 bp, Artificial Sequence
  Description of Artificial Sequence: Synthetic oligonucleotide
  Target: SCNA; (+) strand; PAM type: YTN; PAM sequence: CTT
cccaaagggctaggattaca

SEQ ID NO: 71259 - DNA, 20 bp, Artificial Sequence
  Description of Artificial Sequence: Synthetic oligonucleotide
  Target: SCNA; (+) strand; PAM type: YTN; PAM sequence: TTC
ccaaagggctaggattacag

SEQ ID NO: 71260 - DNA, 20 bp, Artificial Sequence
  Description of Artificial Sequence: Synthetic oligonucleotide
  Target: SCNA; (+) strand; PAM type: YTN; PAM sequence: CTA
ggattacaggcgtgagctac

SEQ ID NO: 71261 - DNA, 20 bp, Artificial Sequence
  Description of Artificial Sequence: Synthetic oligonucleotide
  Target: SCNA; (+) strand; PAM type: YTN; PAM sequence: TTA
caggcgtgagctaccacatc

SEQ ID NO: 71262 - DNA, 20 bp, Artificial Sequence
  Description of Artificial Sequence: Synthetic oligonucleotide
  Target: SCNA; (+) strand; PAM type: YTN; PAM sequence: CTA
ccacatccggccggtaacca

SEQ ID NO: 71263 - DNA, 20 bp, Artificial Sequence
  Description of Artificial Sequence: Synthetic oligonucleotide
  Target: SCNA; (+) strand; PAM type: YTN; PAM sequence: CTG
ttttattctaactttatatt

SEQ ID NO: 71264 - DNA, 20 bp, Artificial Sequence
  Description of Artificial Sequence: Synthetic oligonucleotide
  Target: SCNA; (+) strand; PAM type: YTN; PAM sequence: TTT
tattctaactttatatttga

SEQ ID NO: 71265 - DNA, 20 bp, Artificial Sequence
  Description of Artificial Sequence: Synthetic oligonucleotide
  Target: SCNA; (+) strand; PAM type: YTN; PAM sequence: TTT
attctaactttatatttgaa

SEQ ID NO: 71266 - DNA, 20 bp, Artificial Sequence
  Description of Artificial Sequence: Synthetic oligonucleotide
  Target: SCNA; (+) strand; PAM type: YTN; PAM sequence: TTA
ttctaactttatatttgaac

SEQ ID NO: 71267 - DNA, 20 bp, Artificial Sequence
  Description of Artificial Sequence: Synthetic oligonucleotide
  Target: SCNA; (+) strand; PAM type: YTN; PAM sequence: TTC
taactttatatttgaacttt

SEQ ID NO: 71268 - DNA, 20 bp, Artificial Sequence
  Description of Artificial Sequence: Synthetic oligonucleotide
  Target: SCNA; (+) strand; PAM type: YTN; PAM sequence: CTA
actttatatttgaacttttt

SEQ ID NO: 71269 - DNA, 20 bp, Artificial Sequence
  Description of Artificial Sequence: Synthetic oligonucleotide
  Target: SCNA; (+) strand; PAM type: YTN; PAM sequence: CTT
tatatttgaactttttcttt

SEQ ID NO: 71270 - DNA, 20 bp, Artificial Sequence
  Description of Artificial Sequence: Synthetic oligonucleotide
  Target: SCNA; (+) strand; PAM type: YTN; PAM sequence: TTT
atatttgaactttttctttt

SEQ ID NO: 71271 - DNA, 20 bp, Artificial Sequence
  Description of Artificial Sequence: Synthetic oligonucleotide
  Target: SCNA; (+) strand; PAM type: YTN; PAM sequence: TTA
tatttgaactttttcttttt

SEQ ID NO: 71272 - DNA, 20 bp, Artificial Sequence
  Description of Artificial Sequence: Synthetic oligonucleotide
  Target: SCNA; (+) strand; PAM type: YTN; PAM sequence: TTT
gaactttttctttttagatt

SEQ ID NO: 71273 - DNA, 20 bp, Artificial Sequence
  Description of Artificial Sequence: Synthetic oligonucleotide
  Target: SCNA; (+) strand; PAM type: YTN; PAM sequence: TTG
aactttttctttttagattc

SEQ ID NO: 71274 - DNA, 20 bp, Artificial Sequence
  Description of Artificial Sequence: Synthetic oligonucleotide
  Target: SCNA; (+) strand; PAM type: YTN; PAM sequence: CTT
tttctttttagattccacat

SEQ ID NO: 71275 - DNA, 20 bp, Artificial Sequence
  Description of Artificial Sequence: Synthetic oligonucleotide
  Target: SCNA; (+) strand; PAM type: YTN; PAM sequence: TTT
ttctttttagattccacata

SEQ ID NO: 71276 - DNA, 20 bp, Artificial Sequence
  Description of Artificial Sequence: Synthetic oligonucleotide
  Target: SCNA; (+) strand; PAM type: YTN; PAM sequence: TTT
tctttttagattccacatat

SEQ ID NO: 71277 - DNA, 20 bp, Artificial Sequence
  Description of Artificial Sequence: Synthetic oligonucleotide
  Target: SCNA; (+) strand; PAM type: YTN; PAM sequence: TTT
ctttttagattccacatata

SEQ ID NO: 71278 - DNA, 20 bp, Artificial Sequence
  Description of Artificial Sequence: Synthetic oligonucleotide
  Target: SCNA; (+) strand; PAM type: YTN; PAM sequence: TTC
tttttagattccacatataa

SEQ ID NO: 71279 - DNA, 20 bp, Artificial Sequence
  Description of Artificial Sequence: Synthetic oligonucleotide
  Target: SCNA; (+) strand; PAM type: YTN; PAM sequence: CTT
tttagattccacatataagt

SEQ ID NO: 71280 - DNA, 20 bp, Artificial Sequence
  Description of Artificial Sequence: Synthetic oligonucleotide
  Target: SCNA; (+) strand; PAM type: YTN; PAM sequence: TTT
ttagattccacatataagtg

SEQ ID NO: 71281 - DNA, 20 bp, Artificial Sequence
  Description of Artificial Sequence: Synthetic oligonucleotide
  Target: SCNA; (+) strand; PAM type: YTN; PAM sequence: TTT
tagattccacatataagtga

SEQ ID NO: 71282 - DNA, 20 bp, Artificial Sequence
  Description of Artificial Sequence: Synthetic oligonucleotide
  Target: SCNA; (+) strand; PAM type: YTN; PAM sequence: TTT
agattccacatataagtgag

SEQ ID NO: 71283 - DNA, 20 bp, Artificial Sequence
  Description of Artificial Sequence: Synthetic oligonucleotide
  Target: SCNA; (+) strand; PAM type: YTN; PAM sequence: TTA
gattccacatataagtgaga

SEQ ID NO: 71284 - DNA, 20 bp, Artificial Sequence
  Description of Artificial Sequence: Synthetic oligonucleotide
  Target: SCNA; (+) strand; PAM type: YTN; PAM sequence: TTC
cacatataagtgagattatg

SEQ ID NO: 71285 - DNA, 20 bp, Artificial Sequence
  Description of Artificial Sequence: Synthetic oligonucleotide
  Target: SCNA; (+) strand; PAM type: YTN; PAM sequence: TTA
tgcaattttgtgtgtggatg

SEQ ID NO: 71286 - DNA, 20 bp, Artificial Sequence
  Description of Artificial Sequence: Synthetic oligonucleotide
  Target: SCNA; (+) strand; PAM type: YTN; PAM sequence: TTT
tgtgtgtggatgtgtgttgg

SEQ ID NO: 71287 - DNA, 20 bp, Artificial Sequence
  Description of Artificial Sequence: Synthetic oligonucleotide
  Target: SCNA; (+) strand; PAM type: YTN; PAM sequence: TTT
gtgtgtggatgtgtgttgga

SEQ ID NO: 71288 - DNA, 20 bp, Artificial Sequence
  Description of Artificial Sequence: Synthetic oligonucleotide
  Target: SCNA; (+) strand; PAM type: YTN; PAM sequence: TTG
tgtgtggatgtgtgttggac

SEQ ID NO: 71289 - DNA, 20 bp, Artificial Sequence
  Description of Artificial Sequence: Synthetic oligonucleotide
  Target: SCNA; (+) strand; PAM type: YTN; PAM sequence: TTG
gacttatttcccacagctta

SEQ ID NO: 71290 - DNA, 20 bp, Artificial Sequence
  Description of Artificial Sequence: Synthetic oligonucleotide
  Target: SCNA; (+) strand; PAM type: YTN; PAM sequence: CTT
atttcccacagcttaatatc

SEQ ID NO: 71291 - DNA, 20 bp, Artificial Sequence
  Description of Artificial Sequence: Synthetic oligonucleotide
  Target: SCNA; (+) strand; PAM type: YTN; PAM sequence: TTA
tttcccacagcttaatatcc

SEQ ID NO: 71292 - DNA, 20 bp, Artificial Sequence
  Description of Artificial Sequence: Synthetic oligonucleotide
  Target: SCNA; (+) strand; PAM type: YTN; PAM sequence: TTT
cccacagcttaatatcctcc

SEQ ID NO: 71293 - DNA, 20 bp, Artificial Sequence
  Description of Artificial Sequence: Synthetic oligonucleotide
  Target: SCNA; (+) strand; PAM type: YTN; PAM sequence: TTC
ccacagcttaatatcctcca

SEQ ID NO: 71294 - DNA, 20 bp, Artificial Sequence
  Description of Artificial Sequence: Synthetic oligonucleotide
  Target: SCNA; (+) strand; PAM type: YTN; PAM sequence: CTT
aatatcctccaggtccatgc

SEQ ID NO: 71295 - DNA, 20 bp, Artificial Sequence
  Description of Artificial Sequence: Synthetic oligonucleotide
  Target: SCNA; (+) strand; PAM type: YTN; PAM sequence: TTA
atatcctccaggtccatgca

SEQ ID NO: 71296 - DNA, 20 bp, Artificial Sequence
  Description of Artificial Sequence: Synthetic oligonucleotide
  Target: SCNA; (+) strand; PAM type: YTN; PAM sequence: CTC
caggtccatgcatgttgtgg

SEQ ID NO: 71297 - DNA, 20 bp, Artificial Sequence
  Description of Artificial Sequence: Synthetic oligonucleotide
  Target: SCNA; (+) strand; PAM type: YTN; PAM sequence: TTG
tggcaaatgacagggtcttc

SEQ ID NO: 71298 - DNA, 20 bp, Artificial Sequence
  Description of Artificial Sequence: Synthetic oligonucleotide
  Target: SCNA; (+) strand; PAM type: YTN; PAM sequence: CTT
ctccttttttaaggctgaat

SEQ ID NO: 71299 - DNA, 20 bp, Artificial Sequence
  Description of Artificial Sequence: Synthetic oligonucleotide
  Target: SCNA; (+) strand; PAM type: YTN; PAM sequence: TTC
tccttttttaaggctgaata

SEQ ID NO: 71300 - DNA, 20 bp, Artificial Sequence
  Description of Artificial Sequence: Synthetic oligonucleotide
  Target: SCNA; (+) strand; PAM type: YTN; PAM sequence: CTC
cttttttaaggctgaataat

SEQ ID NO: 71301 - DNA, 20 bp, Artificial Sequence
  Description of Artificial Sequence: Synthetic oligonucleotide
  Target: SCNA; (+) strand; PAM type: YTN; PAM sequence: CTT
ttttaaggctgaataatatt

SEQ ID NO: 71302 - DNA, 20 bp, Artificial Sequence
  Description of Artificial Sequence: Synthetic oligonucleotide
  Target: SCNA; (+) strand; PAM type: YTN; PAM sequence: TTT
tttaaggctgaataatattc

SEQ ID NO: 71303 - DNA, 20 bp, Artificial Sequence
  Description of Artificial Sequence: Synthetic oligonucleotide
  Target: SCNA; (+) strand; PAM type: YTN; PAM sequence: TTT
ttaaggctgaataatattcc

SEQ ID NO: 71304 - DNA, 20 bp, Artificial Sequence
  Description of Artificial Sequence: Synthetic oligonucleotide
  Target: SCNA; (+) strand; PAM type: YTN; PAM sequence: TTT
taaggctgaataatattcca

SEQ ID NO: 71305 - DNA, 20 bp, Artificial Sequence
  Description of Artificial Sequence: Synthetic oligonucleotide
  Target: SCNA; (+) strand; PAM type: YTN; PAM sequence: TTT
aaggctgaataatattccat

SEQ ID NO: 71306 - DNA, 20 bp, Artificial Sequence
  Description of Artificial Sequence: Synthetic oligonucleotide
  Target: SCNA; (+) strand; PAM type: YTN; PAM sequence: TTA
aggctgaataatattccatt

SEQ ID NO: 71307 - DNA, 20 bp, Artificial Sequence
  Description of Artificial Sequence: Synthetic oligonucleotide
  Target: SCNA; (+) strand; PAM type: YTN; PAM sequence: CTG
aataatattccattgtatat

SEQ ID NO: 71308 - DNA, 20 bp, Artificial Sequence
  Description of Artificial Sequence: Synthetic oligonucleotide
  Target: SCNA; (+) strand; PAM type: YTN; PAM sequence: TTC
cattgtatatacatatacca

SEQ ID NO: 71309 - DNA, 20 bp, Artificial Sequence
  Description of Artificial Sequence: Synthetic oligonucleotide
  Target: SCNA; (+) strand; PAM type: YTN; PAM sequence: TTG
tatatacatataccacagtt

SEQ ID NO: 71310 - DNA, 20 bp, Artificial Sequence
  Description of Artificial Sequence: Synthetic oligonucleotide
  Target: SCNA; (+) strand; PAM type: YTN; PAM sequence: TTT
cttttatccattcatgcacc

SEQ ID NO: 71311 - DNA, 20 bp, Artificial Sequence
  Description of Artificial Sequence: Synthetic oligonucleotide
  Target: SCNA; (+) strand; PAM type: YTN; PAM sequence: TTC
ttttatccattcatgcacca

SEQ ID NO: 71312 - DNA, 20 bp, Artificial Sequence
  Description of Artificial Sequence: Synthetic oligonucleotide
  Target: SCNA; (+) strand; PAM type: YTN; PAM sequence: CTT
ttatccattcatgcaccaac

SEQ ID NO: 71313 - DNA, 20 bp, Artificial Sequence
  Description of Artificial Sequence: Synthetic oligonucleotide
  Target: SCNA; (+) strand; PAM type: YTN; PAM sequence: TTT
tatccattcatgcaccaaca

SEQ ID NO: 71314 - DNA, 20 bp, Artificial Sequence
  Description of Artificial Sequence: Synthetic oligonucleotide
  Target: SCNA; (+) strand; PAM type: YTN; PAM sequence: TTT
atccattcatgcaccaacac

SEQ ID NO: 71315 - DNA, 20 bp, Artificial Sequence
  Description of Artificial Sequence: Synthetic oligonucleotide
  Target: SCNA; (+) strand; PAM type: YTN; PAM sequence: TTA
tccattcatgcaccaacaca

SEQ ID NO: 71316 - DNA, 20 bp, Artificial Sequence
  Description of Artificial Sequence: Synthetic oligonucleotide
  Target: SCNA; (+) strand; PAM type: YTN; PAM sequence: TTC
atgcaccaacacatacctag

SEQ ID NO: 71317 - DNA, 20 bp, Artificial Sequence
  Description of Artificial Sequence: Synthetic oligonucleotide
  Target: SCNA; (+) strand; PAM type: YTN; PAM sequence: CTA
ggtggtttccatatcttggc

SEQ ID NO: 71318 - DNA, 20 bp, Artificial Sequence
  Description of Artificial Sequence: Synthetic oligonucleotide
  Target: SCNA; (+) strand; PAM type: YTN; PAM sequence: TTT
ccatatcttggctactgtaa

SEQ ID NO: 71319 - DNA, 20 bp, Artificial Sequence
  Description of Artificial Sequence: Synthetic oligonucleotide
  Target: SCNA; (+) strand; PAM type: YTN; PAM sequence: TTC
catatcttggctactgtaaa

SEQ ID NO: 71320 - DNA, 20 bp, Artificial Sequence
  Description of Artificial Sequence: Synthetic oligonucleotide
  Target: SCNA; (+) strand; PAM type: YTN; PAM sequence: CTT
ggctactgtaaataatgctg

SEQ ID NO: 71321 - DNA, 20 bp, Artificial Sequence
  Description of Artificial Sequence: Synthetic oligonucleotide
  Target: SCNA; (+) strand; PAM type: YTN; PAM sequence: TTG
gctactgtaaataatgctgc

SEQ ID NO: 71322 - DNA, 20 bp, Artificial Sequence
  Description of Artificial Sequence: Synthetic oligonucleotide
  Target: SCNA; (+) strand; PAM type: YTN; PAM sequence: CTA
ctgtaaataatgctgcaatg

SEQ ID NO: 71323 - DNA, 20 bp, Artificial Sequence
  Description of Artificial Sequence: Synthetic oligonucleotide
  Target: SCNA; (+) strand; PAM type: YTN; PAM sequence: CTG
taaataatgctgcaatgaat

SEQ ID NO: 71324 - DNA, 20 bp, Artificial Sequence
  Description of Artificial Sequence: Synthetic oligonucleotide
  Target: SCNA; (+) strand; PAM type: YTN; PAM sequence: CTG
caatgaatatagcagtgcag

SEQ ID NO: 71325 - DNA, 20 bp, Artificial Sequence
  Description of Artificial Sequence: Synthetic oligonucleotide
  Target: SCNA; (+) strand; PAM type: YTN; PAM sequence: CTT
tatgaggtgatgattttatt

SEQ ID NO: 71326 - DNA, 20 bp, Artificial Sequence
  Description of Artificial Sequence: Synthetic oligonucleotide
  Target: SCNA; (+) strand; PAM type: YTN; PAM sequence: TTT
atgaggtgatgattttattt

SEQ ID NO: 71327 - DNA, 20 bp, Artificial Sequence
  Description of Artificial Sequence: Synthetic oligonucleotide
  Target: SCNA; (+) strand; PAM type: YTN; PAM sequence: TTA
tgaggtgatgattttatttc

SEQ ID NO: 71328 - DNA, 20 bp, Artificial Sequence
  Description of Artificial Sequence: Synthetic oligonucleotide
  Target: SCNA; (+) strand; PAM type: YTN; PAM sequence: TTT
tatttcctttgggtacatcc

SEQ ID NO: 71329 - DNA, 20 bp, Artificial Sequence
  Description of Artificial Sequence: Synthetic oligonucleotide
  Target: SCNA; (+) strand; PAM type: YTN; PAM sequence: TTT
atttcctttgggtacatcca

SEQ ID NO: 71330 - DNA, 20 bp, Artificial Sequence
  Description of Artificial Sequence: Synthetic oligonucleotide
  Target: SCNA; (+) strand; PAM type: YTN; PAM sequence: TTA
tttcctttgggtacatccag

SEQ ID NO: 71331 - DNA, 20 bp, Artificial Sequence
  Description of Artificial Sequence: Synthetic oligonucleotide
  Target: SCNA; (+) strand; PAM type: YTN; PAM sequence: TTT
cctttgggtacatccagagg

SEQ ID NO: 71332 - DNA, 20 bp, Artificial Sequence
  Description of Artificial Sequence: Synthetic oligonucleotide
  Target: SCNA; (+) strand; PAM type: YTN; PAM sequence: TTC
ctttgggtacatccagagga

SEQ ID NO: 71333 - DNA, 20 bp, Artificial Sequence
  Description of Artificial Sequence: Synthetic oligonucleotide
  Target: SCNA; (+) strand; PAM type: YTN; PAM sequence: CTT
tgggtacatccagaggaggg

SEQ ID NO: 71334 - DNA, 20 bp, Artificial Sequence
  Description of Artificial Sequence: Synthetic oligonucleotide
  Target: SCNA; (+) strand; PAM type: YTN; PAM sequence: TTT
gggtacatccagaggaggga

SEQ ID NO: 71335 - DNA, 20 bp, Artificial Sequence
  Description of Artificial Sequence: Synthetic oligonucleotide
  Target: SCNA; (+) strand; PAM type: YTN; PAM sequence: TTG
ggtacatccagaggagggat

SEQ ID NO: 71336 - DNA, 20 bp, Artificial Sequence
  Description of Artificial Sequence: Synthetic oligonucleotide
  Target: SCNA; (+) strand; PAM type: YTN; PAM sequence: TTG
ctgggtcttaggtaattcta

SEQ ID NO: 71337 - DNA, 20 bp, Artificial Sequence
  Description of Artificial Sequence: Synthetic oligonucleotide
  Target: SCNA; (+) strand; PAM type: YTN; PAM sequence: CTG
ggtcttaggtaattctaatt

SEQ ID NO: 71338 - DNA, 20 bp, Artificial Sequence
  Description of Artificial Sequence: Synthetic oligonucleotide
  Target: SCNA; (+) strand; PAM type: YTN; PAM sequence: CTT
aggtaattctaattttaatt

SEQ ID NO: 71339 - DNA, 20 bp, Artificial Sequence
  Description of Artificial Sequence: Synthetic oligonucleotide
  Target: SCNA; (+) strand; PAM type: YTN; PAM sequence: TTA
ggtaattctaattttaattt

SEQ ID NO: 71340 - DNA, 20 bp, Artificial Sequence
  Description of Artificial Sequence: Synthetic oligonucleotide
  Target: SCNA; (+) strand; PAM type: YTN; PAM sequence: TTC
taattttaatttctttagga

SEQ ID NO: 71341 - DNA, 20 bp, Artificial Sequence
  Description of Artificial Sequence: Synthetic oligonucleotide
  Target: SCNA; (+) strand; PAM type: YTN; PAM sequence: CTA
attttaatttctttaggaac

SEQ ID NO: 71342 - DNA, 20 bp, Artificial Sequence
  Description of Artificial Sequence: Synthetic oligonucleotide
  Target: SCNA; (+) strand; PAM type: YTN; PAM sequence: TTT
taatttctttaggaacctcc

SEQ ID NO: 71343 - DNA, 20 bp, Artificial Sequence
  Description of Artificial Sequence: Synthetic oligonucleotide
  Target: SCNA; (+) strand; PAM type: YTN; PAM sequence: TTT
aatttctttaggaacctccg

SEQ ID NO: 71344 - DNA, 20 bp, Artificial Sequence
  Description of Artificial Sequence: Synthetic oligonucleotide
  Target: SCNA; (+) strand; PAM type: YTN; PAM sequence: TTA
atttctttaggaacctccgt

SEQ ID NO: 71345 - DNA, 20 bp, Artificial Sequence
  Description of Artificial Sequence: Synthetic oligonucleotide
  Target: SCNA; (+) strand; PAM type: YTN; PAM sequence: TTT
ctttaggaacctccgtacta

SEQ ID NO: 71346 - DNA, 20 bp, Artificial Sequence
  Description of Artificial Sequence: Synthetic oligonucleotide
  Target: SCNA; (+) strand; PAM type: YTN; PAM sequence: TTC
tttaggaacctccgtactat

SEQ ID NO: 71347 - DNA, 20 bp, Artificial Sequence
  Description of Artificial Sequence: Synthetic oligonucleotide
  Target: SCNA; (+) strand; PAM type: YTN; PAM sequence: CTT
taggaacctccgtactattg

SEQ ID NO: 71348 - DNA, 20 bp, Artificial Sequence
  Description of Artificial Sequence: Synthetic oligonucleotide
  Target: SCNA; (+) strand; PAM type: YTN; PAM sequence: TTT
aggaacctccgtactattgt

SEQ ID NO: 71349 - DNA, 20 bp, Artificial Sequence
  Description of Artificial Sequence: Synthetic oligonucleotide
  Target: SCNA; (+) strand; PAM type: YTN; PAM sequence: TTA
ggaacctccgtactattgtc

SEQ ID NO: 71350 - DNA, 20 bp, Artificial Sequence
  Description of Artificial Sequence: Synthetic oligonucleotide
  Target: SCNA; (+) strand; PAM type: YTN; PAM sequence: CTC
cgtactattgtccataatga

SEQ ID NO: 71351 - DNA, 20 bp, Artificial Sequence
  Description of Artificial Sequence: Synthetic oligonucleotide
  Target: SCNA; (+) strand; PAM type: YTN; PAM sequence: CTA
ttgtccataatgactgcacc

SEQ ID NO: 71352 - DNA, 20 bp, Artificial Sequence
  Description of Artificial Sequence: Synthetic oligonucleotide
  Target: SCNA; (+) strand; PAM type: YTN; PAM sequence: TTG
tccataatgactgcaccaat

SEQ ID NO: 71353 - DNA, 20 bp, Artificial Sequence
  Description of Artificial Sequence: Synthetic oligonucleotide
  Target: SCNA; (+) strand; PAM type: YTN; PAM sequence: CTG
caccaatctatatttccacc

SEQ ID NO: 71354 - DNA, 20 bp, Artificial Sequence
  Description of Artificial Sequence: Synthetic oligonucleotide
  Target: SCNA; (+) strand; PAM type: YTN; PAM sequence: CTA
tatttccaccaacaatgtac

SEQ ID NO: 71355 - DNA, 20 bp, Artificial Sequence
  Description of Artificial Sequence: Synthetic oligonucleotide
  Target: SCNA; (+) strand; PAM type: YTN; PAM sequence: TTT
ccaccaacaatgtacaaggg

SEQ ID NO: 71356 - DNA, 20 bp, Artificial Sequence
  Description of Artificial Sequence: Synthetic oligonucleotide
  Target: SCNA; (+) strand; PAM type: YTN; PAM sequence: TTC
caccaacaatgtacaagggt

SEQ ID NO: 71357 - DNA, 20 bp, Artificial Sequence
  Description of Artificial Sequence: Synthetic oligonucleotide
  Target: SCNA; (+) strand; PAM type: YTN; PAM sequence: TTC
ccttttctctacacacttat

SEQ ID NO: 71358 - DNA, 20 bp, Artificial Sequence
  Description of Artificial Sequence: Synthetic oligonucleotide
  Target: SCNA; (+) strand; PAM type: YTN; PAM sequence: CTT
ttctctacacacttatcaac

SEQ ID NO: 71359 - DNA, 20 bp, Artificial Sequence
  Description of Artificial Sequence: Synthetic oligonucleotide
  Target: SCNA; (+) strand; PAM type: YTN; PAM sequence: TTT
tctctacacacttatcaaca

SEQ ID NO: 71360 - DNA, 20 bp, Artificial Sequence
  Description of Artificial Sequence: Synthetic oligonucleotide
  Target: SCNA; (+) strand; PAM type: YTN; PAM sequence: TTT
ctctacacacttatcaacac

SEQ ID NO: 71361 - DNA, 20 bp, Artificial Sequence
  Description of Artificial Sequence: Synthetic oligonucleotide
  Target: SCNA; (+) strand; PAM type: YTN; PAM sequence: TTC
tctacacacttatcaacact

SEQ ID NO: 71362 - DNA, 20 bp, Artificial Sequence
  Description of Artificial Sequence: Synthetic oligonucleotide
  Target: SCNA; (+) strand; PAM type: YTN; PAM sequence: CTC
tacacacttatcaacactta

SEQ ID NO: 71363 - DNA, 20 bp, Artificial Sequence
  Description of Artificial Sequence: Synthetic oligonucleotide
  Target: SCNA; (+) strand; PAM type: YTN; PAM sequence: CTA
cacacttatcaacacttaaa

SEQ ID NO: 71364 - DNA, 20 bp, Artificial Sequence
  Description of Artificial Sequence: Synthetic oligonucleotide
  Target: SCNA; (+) strand; PAM type: YTN; PAM sequence: CTT
atcaacacttaaactgaaca

SEQ ID NO: 71365 - DNA, 20 bp, Artificial Sequence
  Description of Artificial Sequence: Synthetic oligonucleotide
  Target: SCNA; (+) strand; PAM type: YTN; PAM sequence: TTA
tcaacacttaaactgaacat

SEQ ID NO: 71366 - DNA, 20 bp, Artificial Sequence
  Description of Artificial Sequence: Synthetic oligonucleotide
  Target: SCNA; (+) strand; PAM type: YTN; PAM sequence: CTT
aaactgaacatgtagacttt

SEQ ID NO: 71367 - DNA, 20 bp, Artificial Sequence
  Description of Artificial Sequence: Synthetic oligonucleotide
  Target: SCNA; (+) strand; PAM type: YTN; PAM sequence: TTA
aactgaacatgtagactttt

SEQ ID NO: 71368 - DNA, 20 bp, Artificial Sequence
  Description of Artificial Sequence: Synthetic oligonucleotide
  Target: SCNA; (+) strand; PAM type: YTN; PAM sequence: CTG
aacatgtagactttttcttt

SEQ ID NO: 71369 - DNA, 20 bp, Artificial Sequence
  Description of Artificial Sequence: Synthetic oligonucleotide
  Target: SCNA; (+) strand; PAM type: YTN; PAM sequence: CTT
tttcttttcattattctcta

SEQ ID NO: 71370 - DNA, 20 bp, Artificial Sequence
  Description of Artificial Sequence: Synthetic oligonucleotide
  Target: SCNA; (+) strand; PAM type: YTN; PAM sequence: TTT
ttcttttcattattctctaa

SEQ ID NO: 71371 - DNA, 20 bp, Artificial Sequence
  Description of Artificial Sequence: Synthetic oligonucleotide
  Target: SCNA; (+) strand; PAM type: YTN; PAM sequence: TTT
tcttttcattattctctaaa

SEQ ID NO: 71372 - DNA, 20 bp, Artificial Sequence
  Description of Artificial Sequence: Synthetic oligonucleotide
  Target: SCNA; (+) strand; PAM type: YTN; PAM sequence: TTT
cttttcattattctctaaac

SEQ ID NO: 71373 - DNA, 20 bp, Artificial Sequence
  Description of Artificial Sequence: Synthetic oligonucleotide
  Target: SCNA; (+) strand; PAM type: YTN; PAM sequence: TTC
ttttcattattctctaaaca

SEQ ID NO: 71374 - DNA, 20 bp, Artificial Sequence
  Description of Artificial Sequence: Synthetic oligonucleotide
  Target: SCNA; (+) strand; PAM type: YTN; PAM sequence: CTT
ttcattattctctaaacaat

SEQ ID NO: 71375 - DNA, 20 bp, Artificial Sequence
  Description of Artificial Sequence: Synthetic oligonucleotide
  Target: SCNA; (+) strand; PAM type: YTN; PAM sequence: TTT
tcattattctctaaacaata

SEQ ID NO: 71376 - DNA, 20 bp, Artificial Sequence
  Description of Artificial Sequence: Synthetic oligonucleotide
  Target: SCNA; (+) strand; PAM type: YTN; PAM sequence: TTT
cattattctctaaacaatat

SEQ ID NO: 71377 - DNA, 20 bp, Artificial Sequence
  Description of Artificial Sequence: Synthetic oligonucleotide
  Target: SCNA; (+) strand; PAM type: YTN; PAM sequence: TTC
attattctctaaacaatata

SEQ ID NO: 71378 - DNA, 20 bp, Artificial Sequence
  Description of Artificial Sequence: Synthetic oligonucleotide
  Target: SCNA; (+) strand; PAM type: YTN; PAM sequence: TTA
ttctctaaacaatatagtat

SEQ ID NO: 71379 - DNA, 20 bp, Artificial Sequence
  Description of Artificial Sequence: Synthetic oligonucleotide
  Target: SCNA; (+) strand; PAM type: YTN; PAM sequence: TTC
tctaaacaatatagtataaa

SEQ ID NO: 71380 - DNA, 20 bp, Artificial Sequence
  Description of Artificial Sequence: Synthetic oligonucleotide
  Target: SCNA; (+) strand; PAM type: YTN; PAM sequence: CTC
taaacaatatagtataaaaa

SEQ ID NO: 71381 - DNA, 20 bp, Artificial Sequence
  Description of Artificial Sequence: Synthetic oligonucleotide
  Target: SCNA; (+) strand; PAM type: YTN; PAM sequence: CTA
aacaatatagtataaaaact

SEQ ID NO: 71382 - DNA, 20 bp, Artificial Sequence
  Description of Artificial Sequence: Synthetic oligonucleotide
  Target: SCNA; (+) strand; PAM type: YTN; PAM sequence: CTA
tttacatagaatttacattg

SEQ ID NO: 71383 - DNA, 20 bp, Artificial Sequence
  Description of Artificial Sequence: Synthetic oligonucleotide
  Target: SCNA; (+) strand; PAM type: YTN; PAM sequence: TTT
acatagaatttacattgtat

SEQ ID NO: 71384 - DNA, 20 bp, Artificial Sequence
  Description of Artificial Sequence: Synthetic oligonucleotide
  Target: SCNA; (+) strand; PAM type: YTN; PAM sequence: TTA
catagaatttacattgtatt

SEQ ID NO: 71385 - DNA, 20 bp, Artificial Sequence
  Description of Artificial Sequence: Synthetic oligonucleotide
  Target: SCNA; (+) strand; PAM type: YTN; PAM sequence: TTT
acattgtattgggcattatc

SEQ ID NO: 71386 - DNA, 20 bp, Artificial Sequence
  Description of Artificial Sequence: Synthetic oligonucleotide
  Target: SCNA; (+) strand; PAM type: YTN; PAM sequence: TTA
cattgtattgggcattatca

SEQ ID NO: 71387 - DNA, 20 bp, Artificial Sequence
  Description of Artificial Sequence: Synthetic oligonucleotide
  Target: SCNA; (+) strand; PAM type: YTN; PAM sequence: TTG
tattgggcattatcagtaat

SEQ ID NO: 71388 - DNA, 20 bp, Artificial Sequence
  Description of Artificial Sequence: Synthetic oligonucleotide
  Target: SCNA; (+) strand; PAM type: YTN; PAM sequence: TTG
ggcattatcagtaatctaga

SEQ ID NO: 71389 - DNA, 20 bp, Artificial Sequence
  Description of Artificial Sequence: Synthetic oligonucleotide
  Target: SCNA; (+) strand; PAM type: YTN; PAM sequence: TTA
tcagtaatctagagattatt

SEQ ID NO: 71390 - DNA, 20 bp, Artificial Sequence
  Description of Artificial Sequence: Synthetic oligonucleotide
  Target: SCNA; (+) strand; PAM type: YTN; PAM sequence: CTA
gagattatttaaagcagcag

SEQ ID NO: 71391 - DNA, 20 bp, Artificial Sequence
  Description of Artificial Sequence: Synthetic oligonucleotide
  Target: SCNA; (+) strand; PAM type: YTN; PAM sequence: TTA
tttaaagcagcagtccccaa

SEQ ID NO: 71392 - DNA, 20 bp, Artificial Sequence
  Description of Artificial Sequence: Synthetic oligonucleotide
  Target: SCNA; (+) strand; PAM type: YTN; PAM sequence: TTT
aaagcagcagtccccaacct

SEQ ID NO: 71393 - DNA, 20 bp, Artificial Sequence
  Description of Artificial Sequence: Synthetic oligonucleotide
  Target: SCNA; (+) strand; PAM type: YTN; PAM sequence: TTA
aagcagcagtccccaacctt

SEQ ID NO: 71394 - DNA, 20 bp, Artificial Sequence
  Description of Artificial Sequence: Synthetic oligonucleotide
  Target: SCNA; (+) strand; PAM type: YTN; PAM sequence: CTT
tctggcaccagggactggtt

SEQ ID NO: 71395 - DNA, 20 bp, Artificial Sequence
  Description of Artificial Sequence: Synthetic oligonucleotide
  Target: SCNA; (+) strand; PAM type: YTN; PAM sequence: TTT
ctggcaccagggactggttt

SEQ ID NO: 71396 - DNA, 20 bp, Artificial Sequence
  Description of Artificial Sequence: Synthetic oligonucleotide
  Target: SCNA; (+) strand; PAM type: YTN; PAM sequence: TTC
tggcaccagggactggtttt

SEQ ID NO: 71397 - DNA, 20 bp, Artificial Sequence
  Description of Artificial Sequence: Synthetic oligonucleotide
  Target: SCNA; (+) strand; PAM type: YTN; PAM sequence: CTG
gcaccagggactggttttct

SEQ ID NO: 71398 - DNA, 20 bp, Artificial Sequence
  Description of Artificial Sequence: Synthetic oligonucleotide
  Target: SCNA; (+) strand; PAM type: YTN; PAM sequence: CTG
gttttctggaagaaatgttt

SEQ ID NO: 71399 - DNA, 20 bp, Artificial Sequence
  Description of Artificial Sequence: Synthetic oligonucleotide
  Target: SCNA; (+) strand; PAM type: YTN; PAM sequence: TTT
tctggaagaaatgtttccac

SEQ ID NO: 71400 - DNA, 20 bp, Artificial Sequence
  Description of Artificial Sequence: Synthetic oligonucleotide
  Target: SCNA; (+) strand; PAM type: YTN; PAM sequence: TTT
ctggaagaaatgtttccacg

SEQ ID NO: 71401 - DNA, 20 bp, Artificial Sequence
  Description of Artificial Sequence: Synthetic oligonucleotide
  Target: SCNA; (+) strand; PAM type: YTN; PAM sequence: TTC
tggaagaaatgtttccacgg

SEQ ID NO: 71402 - DNA, 20 bp, Artificial Sequence
  Description of Artificial Sequence: Synthetic oligonucleotide
  Target: SCNA; (+) strand; PAM type: YTN; PAM sequence: CTG
gaagaaatgtttccacggac

SEQ ID NO: 71403 - DNA, 20 bp, Artificial Sequence
  Description of Artificial Sequence: Synthetic oligonucleotide
  Target: SCNA; (+) strand; PAM type: YTN; PAM sequence: TTT
ccacggacagggatggtgag

SEQ ID NO: 71404 - DNA, 20 bp, Artificial Sequence
  Description of Artificial Sequence: Synthetic oligonucleotide
  Target: SCNA; (+) strand; PAM type: YTN; PAM sequence: TTC
cacggacagggatggtgagg

SEQ ID NO: 71405 - DNA, 20 bp, Artificial Sequence
  Description of Artificial Sequence: Synthetic oligonucleotide
  Target: SCNA; (+) strand; PAM type: YTN; PAM sequence: TTT
tgggatgattcaagcacatt

SEQ ID NO: 71406 - DNA, 20 bp, Artificial Sequence
  Description of Artificial Sequence: Synthetic oligonucleotide
  Target: SCNA; (+) strand; PAM type: YTN; PAM sequence: TTT
gggatgattcaagcacatta

SEQ ID NO: 71407 - DNA, 20 bp, Artificial Sequence
  Description of Artificial Sequence: Synthetic oligonucleotide
  Target: SCNA; (+) strand; PAM type: YTN; PAM sequence: TTG
ggatgattcaagcacattac

SEQ ID NO: 71408 - DNA, 20 bp, Artificial Sequence
  Description of Artificial Sequence: Synthetic oligonucleotide
  Target: SCNA; (+) strand; PAM type: YTN; PAM sequence: TTC
aagcacattacatttatcat

SEQ ID NO: 71409 - DNA, 20 bp, Artificial Sequence
  Description of Artificial Sequence: Synthetic oligonucleotide
  Target: SCNA; (+) strand; PAM type: YTN; PAM sequence: TTA
catttatcattagattctca

SEQ ID NO: 71410 - DNA, 20 bp, Artificial Sequence
  Description of Artificial Sequence: Synthetic oligonucleotide
  Target: SCNA; (+) strand; PAM type: YTN; PAM sequence: TTT
atcattagattctcataagg

SEQ ID NO: 71411 - DNA, 20 bp, Artificial Sequence
  Description of Artificial Sequence: Synthetic oligonucleotide
  Target: SCNA; (+) strand; PAM type: YTN; PAM sequence: TTA
tcattagattctcataagga

SEQ ID NO: 71412 - DNA, 20 bp, Artificial Sequence
  Description of Artificial Sequence: Synthetic oligonucleotide
  Target: SCNA; (+) strand; PAM type: YTN; PAM sequence: TTA
gattctcataaggagcgcac

SEQ ID NO: 71413 - DNA, 20 bp, Artificial Sequence
  Description of Artificial Sequence: Synthetic oligonucleotide
  Target: SCNA; (+) strand; PAM type: YTN; PAM sequence: TTC
tcataaggagcgcacaacct

SEQ ID NO: 71414 - DNA, 20 bp, Artificial Sequence
  Description of Artificial Sequence: Synthetic oligonucleotide
  Target: SCNA; (+) strand; PAM type: YTN; PAM sequence: CTC
ataaggagcgcacaacctag

SEQ ID NO: 71415 - DNA, 20 bp, Artificial Sequence
  Description of Artificial Sequence: Synthetic oligonucleotide
  Target: SCNA; (+) strand; PAM type: YTN; PAM sequence: CTA
gatccctcacatgtgcagtt

SEQ ID NO: 71416 - DNA, 20 bp, Artificial Sequence
  Description of Artificial Sequence: Synthetic oligonucleotide
  Target: SCNA; (+) strand; PAM type: YTN; PAM sequence: CTC
acatgtgcagttcacaatag

SEQ ID NO: 71417 - DNA, 20 bp, Artificial Sequence
  Description of Artificial Sequence: Synthetic oligonucleotide
  Target: SCNA; (+) strand; PAM type: YTN; PAM sequence: TTC
acaatagggttcgtgctcct

SEQ ID NO: 71418 - DNA, 20 bp, Artificial Sequence
  Description of Artificial Sequence: Synthetic oligonucleotide
  Target: SCNA; (+) strand; PAM type: YTN; PAM sequence: TTC
gtgctcctatggcaatctaa

SEQ ID NO: 71419 - DNA, 20 bp, Artificial Sequence
  Description of Artificial Sequence: Synthetic oligonucleotide
  Target: SCNA; (+) strand; PAM type: YTN; PAM sequence: CTC
ctatggcaatctaatgccac

SEQ ID NO: 71420 - DNA, 20 bp, Artificial Sequence
  Description of Artificial Sequence: Synthetic oligonucleotide
  Target: SCNA; (+) strand; PAM type: YTN; PAM sequence: CTA
tggcaatctaatgccaccac

SEQ ID NO: 71421 - DNA, 20 bp, Artificial Sequence
  Description of Artificial Sequence: Synthetic oligonucleotide
  Target: SCNA; (+) strand; PAM type: YTN; PAM sequence: CTA
atgccaccactgagctgaca

SEQ ID NO: 71422 - DNA, 20 bp, Artificial Sequence
  Description of Artificial Sequence: Synthetic oligonucleotide
  Target: SCNA; (+) strand; PAM type: YTN; PAM sequence: CTG
agctgacaggaggaggagct

SEQ ID NO: 71423 - DNA, 20 bp, Artificial Sequence
  Description of Artificial Sequence: Synthetic oligonucleotide
  Target: SCNA; (+) strand; PAM type: YTN; PAM sequence: CTG
acaggaggaggagctcagct

SEQ ID NO: 71424 - DNA, 20 bp, Artificial Sequence
  Description of Artificial Sequence: Synthetic oligonucleotide
  Target: SCNA; (+) strand; PAM type: YTN; PAM sequence: CTC
agctcttgctgtgcagcctg

SEQ ID NO: 71425 - DNA, 20 bp, Artificial Sequence
  Description of Artificial Sequence: Synthetic oligonucleotide
  Target: SCNA; (+) strand; PAM type: YTN; PAM sequence: CTC
ttgctgtgcagcctggtatc

SEQ ID NO: 71426 - DNA, 20 bp, Artificial Sequence
  Description of Artificial Sequence: Synthetic oligonucleotide
  Target: SCNA; (+) strand; PAM type: YTN; PAM sequence: CTT
gctgtgcagcctggtatcga

SEQ ID NO: 71427 - DNA, 20 bp, Artificial Sequence
  Description of Artificial Sequence: Synthetic oligonucleotide
  Target: SCNA; (+) strand; PAM type: YTN; PAM sequence: TTG
ctgtgcagcctggtatcgaa

SEQ ID NO: 71428 - DNA, 20 bp, Artificial Sequence
  Description of Artificial Sequence: Synthetic oligonucleotide
  Target: SCNA; (+) strand; PAM type: YTN; PAM sequence: CTG
tgcagcctggtatcgaacag

SEQ ID NO: 71429 - DNA, 20 bp, Artificial Sequence
  Description of Artificial Sequence: Synthetic oligonucleotide
  Target: SCNA; (+) strand; PAM type: YTN; PAM sequence: CTG
gtatcgaacagcctaacagg

SEQ ID NO: 71430 - DNA, 20 bp, Artificial Sequence
  Description of Artificial Sequence: Synthetic oligonucleotide
  Target: SCNA; (+) strand; PAM type: YTN; PAM sequence: CTA
acaggctatggaccagtact

SEQ ID NO: 71431 - DNA, 20 bp, Artificial Sequence
  Description of Artificial Sequence: Synthetic oligonucleotide
  Target: SCNA; (+) strand; PAM type: YTN; PAM sequence: CTA
tggaccagtactggtcatgg

SEQ ID NO: 71432 - DNA, 20 bp, Artificial Sequence
  Description of Artificial Sequence: Synthetic oligonucleotide
  Target: SCNA; (+) strand; PAM type: YTN; PAM sequence: CTG
gtcatggccctggggttggg

SEQ ID NO: 71433 - DNA, 20 bp, Artificial Sequence
  Description of Artificial Sequence: Synthetic oligonucleotide
  Target: SCNA; (+) strand; PAM type: YTN; PAM sequence: CTG
gggttggggacccctgattg

SEQ ID NO: 71434 - DNA, 20 bp, Artificial Sequence
  Description of Artificial Sequence: Synthetic oligonucleotide
  Target: SCNA; (+) strand; PAM type: YTN; PAM sequence: TTG
gggacccctgattgaaagta

SEQ ID NO: 71435 - DNA, 20 bp, Artificial Sequence
  Description of Artificial Sequence: Synthetic oligonucleotide
  Target: SCNA; (+) strand; PAM type: YTN; PAM sequence: CTG
attgaaagtatatgagagga

SEQ ID NO: 71436 - DNA, 20 bp, Artificial Sequence
  Description of Artificial Sequence: Synthetic oligonucleotide
  Target: SCNA; (+) strand; PAM type: YTN; PAM sequence: TTG
aaagtatatgagaggatgtg

SEQ ID NO: 71437 - DNA, 20 bp, Artificial Sequence
  Description of Artificial Sequence: Synthetic oligonucleotide
  Target: SCNA; (+) strand; PAM type: YTN; PAM sequence: TTA
tatacaaatactaagccatt

SEQ ID NO: 71438 - DNA, 20 bp, Artificial Sequence
  Description of Artificial Sequence: Synthetic oligonucleotide
  Target: SCNA; (+) strand; PAM type: YTN; PAM sequence: CTA
agccattttataacaggggc

SEQ ID NO: 71439 - DNA, 20 bp, Artificial Sequence
  Description of Artificial Sequence: Synthetic oligonucleotide
  Target: SCNA; (+) strand; PAM type: YTN; PAM sequence: TTT
tataacaggggcttaggcat

SEQ ID NO: 71440 - DNA, 20 bp, Artificial Sequence
  Description of Artificial Sequence: Synthetic oligonucleotide
  Target: SCNA; (+) strand; PAM type: YTN; PAM sequence: TTT
ataacaggggcttaggcatc

SEQ ID NO: 71441 - DNA, 20 bp, Artificial Sequence
  Description of Artificial Sequence: Synthetic oligonucleotide
  Target: SCNA; (+) strand; PAM type: YTN; PAM sequence: TTA
taacaggggcttaggcatct

SEQ ID NO: 71442 - DNA, 20 bp, Artificial Sequence
  Description of Artificial Sequence: Synthetic oligonucleotide
  Target: SCNA; (+) strand; PAM type: YTN; PAM sequence: CTT
aggcatctgcagattttagt

SEQ ID NO: 71443 - DNA, 20 bp, Artificial Sequence
  Description of Artificial Sequence: Synthetic oligonucleotide
  Target: SCNA; (+) strand; PAM type: YTN; PAM sequence: TTA
ggcatctgcagattttagta

SEQ ID NO: 71444 - DNA, 20 bp, Artificial Sequence
  Description of Artificial Sequence: Synthetic oligonucleotide
  Target: SCNA; (+) strand; PAM type: YTN; PAM sequence: CTG
cagattttagtacccaaggg

SEQ ID NO: 71445 - DNA, 20 bp, Artificial Sequence
  Description of Artificial Sequence: Synthetic oligonucleotide
  Target: SCNA; (+) strand; PAM type: YTN; PAM sequence: TTT
tagtacccaagggaggtcct

SEQ ID NO: 71446 - DNA, 20 bp, Artificial Sequence
  Description of Artificial Sequence: Synthetic oligonucleotide
  Target: SCNA; (+) strand; PAM type: YTN; PAM sequence: TTT
agtacccaagggaggtcctg

SEQ ID NO: 71447 - DNA, 20 bp, Artificial Sequence
  Description of Artificial Sequence: Synthetic oligonucleotide
  Target: SCNA; (+) strand; PAM type: YTN; PAM sequence: TTA
gtacccaagggaggtcctga

SEQ ID NO: 71448 - DNA, 20 bp, Artificial Sequence
  Description of Artificial Sequence: Synthetic oligonucleotide
  Target: SCNA; (+) strand; PAM type: YTN; PAM sequence: CTG
aaaccaatcccctatggcta

SEQ ID NO: 71449 - DNA, 20 bp, Artificial Sequence
  Description of Artificial Sequence: Synthetic oligonucleotide
  Target: SCNA; (+) strand; PAM type: YTN; PAM sequence: CTA
tggctactgaaggacaactg

SEQ ID NO: 71450 - DNA, 20 bp, Artificial Sequence
  Description of Artificial Sequence: Synthetic oligonucleotide
  Target: SCNA; (+) strand; PAM type: YTN; PAM sequence: CTA
ctgaaggacaactgtgtatc

SEQ ID NO: 71451 - DNA, 20 bp, Artificial Sequence
  Description of Artificial Sequence: Synthetic oligonucleotide
  Target: SCNA; (+) strand; PAM type: YTN; PAM sequence: CTG
aaggacaactgtgtatcatt

SEQ ID NO: 71452 - DNA, 20 bp, Artificial Sequence
  Description of Artificial Sequence: Synthetic oligonucleotide
  Target: SCNA; (+) strand; PAM type: YTN; PAM sequence: CTG
tgtatcattcttaacagaaa

SEQ ID NO: 71453 - DNA, 20 bp, Artificial Sequence
  Description of Artificial Sequence: Synthetic oligonucleotide
  Target: SCNA; (+) strand; PAM type: YTN; PAM sequence: TTC
ttaacagaaaaaaacaaaat

SEQ ID NO: 71454 - DNA, 20 bp, Artificial Sequence
  Description of Artificial Sequence: Synthetic oligonucleotide
  Target: SCNA; (+) strand; PAM type: YTN; PAM sequence: CTT
aacagaaaaaaacaaaatct

SEQ ID NO: 71455 - DNA, 20 bp, Artificial Sequence
  Description of Artificial Sequence: Synthetic oligonucleotide
  Target: SCNA; (+) strand; PAM type: YTN; PAM sequence: TTA
acagaaaaaaacaaaatctg

SEQ ID NO: 71456 - DNA, 20 bp, Artificial Sequence
  Description of Artificial Sequence: Synthetic oligonucleotide
  Target: SCNA; (+) strand; PAM type: YTN; PAM sequence: CTG
ttttgtaaataaaatttttt

SEQ ID NO: 71457 - DNA, 20 bp, Artificial Sequence
  Description of Artificial Sequence: Synthetic oligonucleotide
  Target: SCNA; (+) strand; PAM type: YTN; PAM sequence: TTT
tgtaaataaaattttttcat

SEQ ID NO: 71458 - DNA, 20 bp, Artificial Sequence
  Description of Artificial Sequence: Synthetic oligonucleotide
  Target: SCNA; (+) strand; PAM type: YTN; PAM sequence: TTT
gtaaataaaattttttcatt

SEQ ID NO: 71459 - DNA, 20 bp, Artificial Sequence
  Description of Artificial Sequence: Synthetic oligonucleotide
  Target: SCNA; (+) strand; PAM type: YTN; PAM sequence: TTG
taaataaaattttttcatta

SEQ ID NO: 71460 - DNA, 20 bp, Artificial Sequence
  Description of Artificial Sequence: Synthetic oligonucleotide
  Target: SCNA; (+) strand; PAM type: YTN; PAM sequence: TTT
tttcattattatttccattt

SEQ ID NO: 71461 - DNA, 20 bp, Artificial Sequence
  Description of Artificial Sequence: Synthetic oligonucleotide
  Target: SCNA; (+) strand; PAM type: YTN; PAM sequence: TTT
ttcattattatttccatttc

SEQ ID NO: 71462 - DNA, 20 bp, Artificial Sequence
  Description of Artificial Sequence: Synthetic oligonucleotide
  Target: SCNA; (+) strand; PAM type: YTN; PAM sequence: TTT
tcattattatttccatttca

SEQ ID NO: 71463 - DNA, 20 bp, Artificial Sequence
  Description of Artificial Sequence: Synthetic oligonucleotide
  Target: SCNA; (+) strand; PAM type: YTN; PAM sequence: TTT
cattattatttccatttcac

SEQ ID NO: 71464 - DNA, 20 bp, Artificial Sequence
  Description of Artificial Sequence: Synthetic oligonucleotide
  Target: SCNA; (+) strand; PAM type: YTN; PAM sequence: TTC
attattatttccatttcact

SEQ ID NO: 71465 - DNA, 20 bp, Artificial Sequence
  Description of Artificial Sequence: Synthetic oligonucleotide
  Target: SCNA; (+) strand; PAM type: YTN; PAM sequence: TTA
ttatttccatttcactctgg

SEQ ID NO: 71466 - DNA, 20 bp, Artificial Sequence
  Description of Artificial Sequence: Synthetic oligonucleotide
  Target: SCNA; (+) strand; PAM type: YTN; PAM sequence: TTA
tttccatttcactctggaat

SEQ ID NO: 71467 - DNA, 20 bp, Artificial Sequence
  Description of Artificial Sequence: Synthetic oligonucleotide
  Target: SCNA; (+) strand; PAM type: YTN; PAM sequence: TTT
ccatttcactctggaattta

SEQ ID NO: 71468 - DNA, 20 bp, Artificial Sequence
  Description of Artificial Sequence: Synthetic oligonucleotide
  Target: SCNA; (+) strand; PAM type: YTN; PAM sequence: TTC
catttcactctggaatttag

SEQ ID NO: 71469 - DNA, 20 bp, Artificial Sequence
  Description of Artificial Sequence: Synthetic oligonucleotide
  Target: SCNA; (+) strand; PAM type: YTN; PAM sequence: TTT
cactctggaatttagttaga

SEQ ID NO: 71470 - DNA, 20 bp, Artificial Sequence
  Description of Artificial Sequence: Synthetic oligonucleotide
  Target: SCNA; (+) strand; PAM type: YTN; PAM sequence: TTC
actctggaatttagttagaa

SEQ ID NO: 71471 - DNA, 20 bp, Artificial Sequence
  Description of Artificial Sequence: Synthetic oligonucleotide
  Target: SCNA; (+) strand; PAM type: YTN; PAM sequence: CTC
tggaatttagttagaaatta

SEQ ID NO: 71472 - DNA, 20 bp, Artificial Sequence
  Description of Artificial Sequence: Synthetic oligonucleotide
  Target: SCNA; (+) strand; PAM type: YTN; PAM sequence: CTG
gaatttagttagaaattaag

SEQ ID NO: 71473 - DNA, 20 bp, Artificial Sequence
  Description of Artificial Sequence: Synthetic oligonucleotide
  Target: SCNA; (+) strand; PAM type: YTN; PAM sequence: TTT
agttagaaattaagattaac

SEQ ID NO: 71474 - DNA, 20 bp, Artificial Sequence
  Description of Artificial Sequence: Synthetic oligonucleotide
  Target: SCNA; (+) strand; PAM type: YTN; PAM sequence: TTA
gttagaaattaagattaaca

SEQ ID NO: 71475 - DNA, 20 bp, Artificial Sequence
  Description of Artificial Sequence: Synthetic oligonucleotide
  Target: SCNA; (+) strand; PAM type: YTN; PAM sequence: TTA
gaaattaagattaacaaaat

SEQ ID NO: 71476 - DNA, 20 bp, Artificial Sequence
  Description of Artificial Sequence: Synthetic oligonucleotide
  Target: SCNA; (+) strand; PAM type: YTN; PAM sequence: TTA
agattaacaaaatattaatt

SEQ ID NO: 71477 - DNA, 20 bp, Artificial Sequence
  Description of Artificial Sequence: Synthetic oligonucleotide
  Target: SCNA; (+) strand; PAM type: YTN; PAM sequence: TTA
acaaaatattaattgactac

SEQ ID NO: 71478 - DNA, 20 bp, Artificial Sequence
  Description of Artificial Sequence: Synthetic oligonucleotide
  Target: SCNA; (+) strand; PAM type: YTN; PAM sequence: TTA
attgactactaaaatgtacc

SEQ ID NO: 71479 - DNA, 20 bp, Artificial Sequence
  Description of Artificial Sequence: Synthetic oligonucleotide
  Target: SCNA; (+) strand; PAM type: YTN; PAM sequence: TTG
actactaaaatgtaccagca

SEQ ID NO: 71480 - DNA, 20 bp, Artificial Sequence
  Description of Artificial Sequence: Synthetic oligonucleotide
  Target: SCNA; (+) strand; PAM type: YTN; PAM sequence: CTA
ctaaaatgtaccagcactag

SEQ ID NO: 71481 - DNA, 20 bp, Artificial Sequence
  Description of Artificial Sequence: Synthetic oligonucleotide
  Target: SCNA; (+) strand; PAM type: YTN; PAM sequence: CTA
aaatgtaccagcactagcag

SEQ ID NO: 71482 - DNA, 20 bp, Artificial Sequence
  Description of Artificial Sequence: Synthetic oligonucleotide
  Target: SCNA; (+) strand; PAM type: YTN; PAM sequence: CTA
gcagcacataccaaaaacta

SEQ ID NO: 71483 - DNA, 20 bp, Artificial Sequence
  Description of Artificial Sequence: Synthetic oligonucleotide
  Target: SCNA; (+) strand; PAM type: YTN; PAM sequence: CTA
atacaaatattccaataata

SEQ ID NO: 71484 - DNA, 20 bp, Artificial Sequence
  Description of Artificial Sequence: Synthetic oligonucleotide
  Target: SCNA; (+) strand; PAM type: YTN; PAM sequence: TTC
caataatattaaataatgac

SEQ ID NO: 71485 - DNA, 20 bp, Artificial Sequence
  Description of Artificial Sequence: Synthetic oligonucleotide
  Target: SCNA; (+) strand; PAM type: YTN; PAM sequence: TTA
aataatgactgcatttgtat

SEQ ID NO: 71486 - DNA, 20 bp, Artificial Sequence
  Description of Artificial Sequence: Synthetic oligonucleotide
  Target: SCNA; (+) strand; PAM type: YTN; PAM sequence: CTG
catttgtatttcatctgaga

SEQ ID NO: 71487 - DNA, 20 bp, Artificial Sequence
  Description of Artificial Sequence: Synthetic oligonucleotide
  Target: SCNA; (+) strand; PAM type: YTN; PAM sequence: TTT
gtatttcatctgagagtggt

SEQ ID NO: 71488 - DNA, 20 bp, Artificial Sequence
  Description of Artificial Sequence: Synthetic oligonucleotide
  Target: SCNA; (+) strand; PAM type: YTN; PAM sequence: TTG
tatttcatctgagagtggtt

SEQ ID NO: 71489 - DNA, 20 bp, Artificial Sequence
  Description of Artificial Sequence: Synthetic oligonucleotide
  Target: SCNA; (+) strand; PAM type: YTN; PAM sequence: TTT
catctgagagtggtttatgg

SEQ ID NO: 71490 - DNA, 20 bp, Artificial Sequence
  Description of Artificial Sequence: Synthetic oligonucleotide
  Target: SCNA; (+) strand; PAM type: YTN; PAM sequence: TTC
atctgagagtggtttatggt

SEQ ID NO: 71491 - DNA, 20 bp, Artificial Sequence
  Description of Artificial Sequence: Synthetic oligonucleotide
  Target: SCNA; (+) strand; PAM type: YTN; PAM sequence: CTG
agagtggtttatggttcttc

SEQ ID NO: 71492 - DNA, 20 bp, Artificial Sequence
  Description of Artificial Sequence: Synthetic oligonucleotide
  Target: SCNA; (+) strand; PAM type: YTN; PAM sequence: TTT
atggttcttccccataagtg

SEQ ID NO: 71493 - DNA, 20 bp, Artificial Sequence
  Description of Artificial Sequence: Synthetic oligonucleotide
  Target: SCNA; (+) strand; PAM type: YTN; PAM sequence: TTA
tggttcttccccataagtgg

SEQ ID NO: 71494 - DNA, 20 bp, Artificial Sequence
  Description of Artificial Sequence: Synthetic oligonucleotide
  Target: SCNA; (+) strand; PAM type: YTN; PAM sequence: TTC
ttccccataagtggctgatt

SEQ ID NO: 71495 - DNA, 20 bp, Artificial Sequence
  Description of Artificial Sequence: Synthetic oligonucleotide
  Target: SCNA; (+) strand; PAM type: YTN; PAM sequence: CTT
ccccataagtggctgattta

SEQ ID NO: 71496 - DNA, 20 bp, Artificial Sequence
  Description of Artificial Sequence: Synthetic oligonucleotide
  Target: SCNA; (+) strand; PAM type: YTN; PAM sequence: TTC
cccataagtggctgatttat

SEQ ID NO: 71497 - DNA, 20 bp, Artificial Sequence
  Description of Artificial Sequence: Synthetic oligonucleotide
  Target: SCNA; (+) strand; PAM type: YTN; PAM sequence: CTG
atttattgatggccactttt

SEQ ID NO: 71498 - DNA, 20 bp, Artificial Sequence
  Description of Artificial Sequence: Synthetic oligonucleotide
  Target: SCNA; (+) strand; PAM type: YTN; PAM sequence: TTT
attgatggccactttttctt

SEQ ID NO: 71499 - DNA, 20 bp, Artificial Sequence
  Description of Artificial Sequence: Synthetic oligonucleotide
  Target: SCNA; (+) strand; PAM type: YTN; PAM sequence: TTA
ttgatggccactttttctta

SEQ ID NO: 71500 - DNA, 20 bp, Artificial Sequence
  Description of Artificial Sequence: Synthetic oligonucleotide
  Target: SCNA; (+) strand; PAM type: YTN; PAM sequence: TTG
atggccactttttcttaact

SEQ ID NO: 71501 - DNA, 20 bp, Artificial Sequence
  Description of Artificial Sequence: Synthetic oligonucleotide
  Target: SCNA; (+) strand; PAM type: YTN; PAM sequence: CTT
tttcttaactcctggtcttt

SEQ ID NO: 71502 - DNA, 20 bp, Artificial Sequence
  Description of Artificial Sequence: Synthetic oligonucleotide
  Target: SCNA; (+) strand; PAM type: YTN; PAM sequence: TTT
ttcttaactcctggtctttc

SEQ ID NO: 71503 - DNA, 20 bp, Artificial Sequence
  Description of Artificial Sequence: Synthetic oligonucleotide
  Target: SCNA; (+) strand; PAM type: YTN; PAM sequence: TTT
tcttaactcctggtctttct

SEQ ID NO: 71504 - DNA, 20 bp, Artificial Sequence
  Description of Artificial Sequence: Synthetic oligonucleotide
  Target: SCNA; (+) strand; PAM type: YTN; PAM sequence: TTT
cttaactcctggtctttctc

SEQ ID NO: 71505 - DNA, 20 bp, Artificial Sequence
  Description of Artificial Sequence: Synthetic oligonucleotide
  Target: SCNA; (+) strand; PAM type: YTN; PAM sequence: TTC
ttaactcctggtctttctca

SEQ ID NO: 71506 - DNA, 20 bp, Artificial Sequence
  Description of Artificial Sequence: Synthetic oligonucleotide
  Target: SCNA; (+) strand; PAM type: YTN; PAM sequence: CTT
aactcctggtctttctcaca

SEQ ID NO: 71507 - DNA, 20 bp, Artificial Sequence
  Description of Artificial Sequence: Synthetic oligonucleotide
  Target: SCNA; (+) strand; PAM type: YTN; PAM sequence: TTA
actcctggtctttctcacaa

SEQ ID NO: 71508 - DNA, 20 bp, Artificial Sequence
  Description of Artificial Sequence: Synthetic oligonucleotide
  Target: SCNA; (+) strand; PAM type: YTN; PAM sequence: CTC
ctggtctttctcacaatcac

SEQ ID NO: 71509 - DNA, 20 bp, Artificial Sequence
  Description of Artificial Sequence: Synthetic oligonucleotide
  Target: SCNA; (+) strand; PAM type: YTN; PAM sequence: CTG
gtctttctcacaatcacaga

SEQ ID NO: 71510 - DNA, 20 bp, Artificial Sequence
  Description of Artificial Sequence: Synthetic oligonucleotide
  Target: SCNA; (+) strand; PAM type: YTN; PAM sequence: CTT
tctcacaatcacagaaaaca

SEQ ID NO: 71511 - DNA, 20 bp, Artificial Sequence
  Description of Artificial Sequence: Synthetic oligonucleotide
  Target: SCNA; (+) strand; PAM type: YTN; PAM sequence: TTT
ctcacaatcacagaaaacag

SEQ ID NO: 71512 - DNA, 20 bp, Artificial Sequence
  Description of Artificial Sequence: Synthetic oligonucleotide
  Target: SCNA; (+) strand; PAM type: YTN; PAM sequence: TTC
tcacaatcacagaaaacagt

SEQ ID NO: 71513 - DNA, 20 bp, Artificial Sequence
  Description of Artificial Sequence: Synthetic oligonucleotide
  Target: SCNA; (+) strand; PAM type: YTN; PAM sequence: CTC
acaatcacagaaaacagtcc

SEQ ID NO: 71514 - DNA, 20 bp, Artificial Sequence
  Description of Artificial Sequence: Synthetic oligonucleotide
  Target: SCNA; (+) strand; PAM type: YTN; PAM sequence: CTT
atcacacaaataaaaaagtc

SEQ ID NO: 71515 - DNA, 20 bp, Artificial Sequence
  Description of Artificial Sequence: Synthetic oligonucleotide
  Target: SCNA; (+) strand; PAM type: YTN; PAM sequence: TTA
tcacacaaataaaaaagtca

SEQ ID NO: 71516 - DNA, 20 bp, Artificial Sequence
  Description of Artificial Sequence: Synthetic oligonucleotide
  Target: SCNA; (+) strand; PAM type: YTN; PAM sequence: CTC
accattcctctgtacctttt

SEQ ID NO: 71517 - DNA, 20 bp, Artificial Sequence
  Description of Artificial Sequence: Synthetic oligonucleotide
  Target: SCNA; (+) strand; PAM type: YTN; PAM sequence: TTC
ctctgtaccttttatcttaa

SEQ ID NO: 71518 - DNA, 20 bp, Artificial Sequence
  Description of Artificial Sequence: Synthetic oligonucleotide
  Target: SCNA; (+) strand; PAM type: YTN; PAM sequence: CTC
tgtaccttttatcttaacag

SEQ ID NO: 71519 - DNA, 20 bp, Artificial Sequence
  Description of Artificial Sequence: Synthetic oligonucleotide
  Target: SCNA; (+) strand; PAM type: YTN; PAM sequence: CTG
taccttttatcttaacagac

SEQ ID NO: 71520 - DNA, 20 bp, Artificial Sequence
  Description of Artificial Sequence: Synthetic oligonucleotide
  Target: SCNA; (+) strand; PAM type: YTN; PAM sequence: CTT
ttatcttaacagacttgtgt

SEQ ID NO: 71521 - DNA, 20 bp, Artificial Sequence
  Description of Artificial Sequence: Synthetic oligonucleotide
  Target: SCNA; (+) strand; PAM type: YTN; PAM sequence: TTT
tatcttaacagacttgtgtt

SEQ ID NO: 71522 - DNA, 20 bp, Artificial Sequence
  Description of Artificial Sequence: Synthetic oligonucleotide
  Target: SCNA; (+) strand; PAM type: YTN; PAM sequence: TTT
atcttaacagacttgtgttt

SEQ ID NO: 71523 - DNA, 20 bp, Artificial Sequence
  Description of Artificial Sequence: Synthetic oligonucleotide
  Target: SCNA; (+) strand; PAM type: YTN; PAM sequence: TTA
tcttaacagacttgtgtttt

SEQ ID NO: 71524 - DNA, 20 bp, Artificial Sequence
  Description of Artificial Sequence: Synthetic oligonucleotide
  Target: SCNA; (+) strand; PAM type: YTN; PAM sequence: CTT
aacagacttgtgttttgaaa

SEQ ID NO: 71525 - DNA, 20 bp, Artificial Sequence
  Description of Artificial Sequence: Synthetic oligonucleotide
  Target: SCNA; (+) strand; PAM type: YTN; PAM sequence: TTA
acagacttgtgttttgaaat

SEQ ID NO: 71526 - DNA, 20 bp, Artificial Sequence
  Description of Artificial Sequence: Synthetic oligonucleotide
  Target: SCNA; (+) strand; PAM type: YTN; PAM sequence: CTT
gtgttttgaaatattattta

SEQ ID NO: 71527 - DNA, 20 bp, Artificial Sequence
  Description of Artificial Sequence: Synthetic oligonucleotide
  Target: SCNA; (+) strand; PAM type: YTN; PAM sequence: TTG
tgttttgaaatattatttat

SEQ ID NO: 71528 - DNA, 20 bp, Artificial Sequence
  Description of Artificial Sequence: Synthetic oligonucleotide
  Target: SCNA; (+) strand; PAM type: YTN; PAM sequence: TTT
tgaaatattatttatactat

SEQ ID NO: 71529 - DNA, 20 bp, Artificial Sequence
  Description of Artificial Sequence: Synthetic oligonucleotide
  Target: SCNA; (+) strand; PAM type: YTN; PAM sequence: TTT
gaaatattatttatactatt

SEQ ID NO: 71530 - DNA, 20 bp, Artificial Sequence
  Description of Artificial Sequence: Synthetic oligonucleotide
  Target: SCNA; (+) strand; PAM type: YTN; PAM sequence: TTG
aaatattatttatactattt

SEQ ID NO: 71531 - DNA, 20 bp, Artificial Sequence
  Description of Artificial Sequence: Synthetic oligonucleotide
  Target: SCNA; (+) strand; PAM type: YTN; PAM sequence: TTA
tttatactattttttaattt

SEQ ID NO: 71532 - DNA, 20 bp, Artificial Sequence
  Description of Artificial Sequence: Synthetic oligonucleotide
  Target: SCNA; (+) strand; PAM type: YTN; PAM sequence: TTT
atactattttttaatttttt

SEQ ID NO: 71533 - DNA, 20 bp, Artificial Sequence
  Description of Artificial Sequence: Synthetic oligonucleotide
  Target: SCNA; (+) strand; PAM type: YTN; PAM sequence: TTA
tactattttttaattttttg

SEQ ID NO: 71534 - DNA, 20 bp, Artificial Sequence
  Description of Artificial Sequence: Synthetic oligonucleotide
  Target: SCNA; (+) strand; PAM type: YTN; PAM sequence: CTA
ttttttaattttttgagacc

SEQ ID NO: 71535 - DNA, 20 bp, Artificial Sequence
  Description of Artificial Sequence: Synthetic oligonucleotide
  Target: SCNA; (+) strand; PAM type: YTN; PAM sequence: TTT
tttaattttttgagaccggg

SEQ ID NO: 71536 - DNA, 20 bp, Artificial Sequence
  Description of Artificial Sequence: Synthetic oligonucleotide
  Target: SCNA; (+) strand; PAM type: YTN; PAM sequence: TTT
ttaattttttgagaccgggt

SEQ ID NO: 71537 - DNA, 20 bp, Artificial Sequence
  Description of Artificial Sequence: Synthetic oligonucleotide
  Target: SCNA; (+) strand; PAM type: YTN; PAM sequence: TTT
taattttttgagaccgggtc

SEQ ID NO: 71538 - DNA, 20 bp, Artificial Sequence
  Description of Artificial Sequence: Synthetic oligonucleotide
  Target: SCNA; (+) strand; PAM type: YTN; PAM sequence: TTT
aattttttgagaccgggtct

SEQ ID NO: 71539 - DNA, 20 bp, Artificial Sequence
  Description of Artificial Sequence: Synthetic oligonucleotide
  Target: SCNA; (+) strand; PAM type: YTN; PAM sequence: TTA
attttttgagaccgggtctt

SEQ ID NO: 71540 - DNA, 20 bp, Artificial Sequence
  Description of Artificial Sequence: Synthetic oligonucleotide
  Target: SCNA; (+) strand; PAM type: YTN; PAM sequence: TTT
tttgagaccgggtctttctc

SEQ ID NO: 71541 - DNA, 20 bp, Artificial Sequence
  Description of Artificial Sequence: Synthetic oligonucleotide
  Target: SCNA; (+) strand; PAM type: YTN; PAM sequence: TTT
ttgagaccgggtctttctct

SEQ ID NO: 71542 - DNA, 20 bp, Artificial Sequence
  Description of Artificial Sequence: Synthetic oligonucleotide
  Target: SCNA; (+) strand; PAM type: YTN; PAM sequence: TTT
tgagaccgggtctttctctg

SEQ ID NO: 71543 - DNA, 20 bp, Artificial Sequence
  Description of Artificial Sequence: Synthetic oligonucleotide
  Target: SCNA; (+) strand; PAM type: YTN; PAM sequence: TTT
gagaccgggtctttctctgt

SEQ ID NO: 71544 - DNA, 20 bp, Artificial Sequence
  Description of Artificial Sequence: Synthetic oligonucleotide
  Target: SCNA; (+) strand; PAM type: YTN; PAM sequence: TTG
agaccgggtctttctctgtc

SEQ ID NO: 71545 - DNA, 20 bp, Artificial Sequence
  Description of Artificial Sequence: Synthetic oligonucleotide
  Target: SCNA; (+) strand; PAM type: YTN; PAM sequence: CTT
tctctgtcacccagtctgga

SEQ ID NO: 71546 - DNA, 20 bp, Artificial Sequence
  Description of Artificial Sequence: Synthetic oligonucleotide
  Target: SCNA; (+) strand; PAM type: YTN; PAM sequence: TTT
ctctgtcacccagtctggag

SEQ ID NO: 71547 - DNA, 20 bp, Artificial Sequence
  Description of Artificial Sequence: Synthetic oligonucleotide
  Target: SCNA; (+) strand; PAM type: YTN; PAM sequence: TTC
tctgtcacccagtctggagt

SEQ ID NO: 71548 - DNA, 20 bp, Artificial Sequence
  Description of Artificial Sequence: Synthetic oligonucleotide
  Target: SCNA; (+) strand; PAM type: YTN; PAM sequence: CTC
tgtcacccagtctggagtgc

SEQ ID NO: 71549 - DNA, 20 bp, Artificial Sequence
  Description of Artificial Sequence: Synthetic oligonucleotide
  Target: SCNA; (+) strand; PAM type: YTN; PAM sequence: CTG
tcacccagtctggagtgcag

SEQ ID NO: 71550 - DNA, 20 bp, Artificial Sequence
  Description of Artificial Sequence: Synthetic oligonucleotide
  Target: SCNA; (+) strand; PAM type: YTN; PAM sequence: CTG
gagtgcagtgcgcgatcttg

SEQ ID NO: 71551 - DNA, 20 bp, Artificial Sequence
  Description of Artificial Sequence: Synthetic oligonucleotide
  Target: SCNA; (+) strand; PAM type: YTN; PAM sequence: CTT
ggctcactgcagccccagct

SEQ ID NO: 71552 - DNA, 20 bp, Artificial Sequence
  Description of Artificial Sequence: Synthetic oligonucleotide
  Target: SCNA; (+) strand; PAM type: YTN; PAM sequence: TTG
gctcactgcagccccagctt

SEQ ID NO: 71553 - DNA, 20 bp, Artificial Sequence
  Description of Artificial Sequence: Synthetic oligonucleotide
  Target: SCNA; (+) strand; PAM type: YTN; PAM sequence: CTC
actgcagccccagcttccgg

SEQ ID NO: 71554 - DNA, 20 bp, Artificial Sequence
  Description of Artificial Sequence: Synthetic oligonucleotide
  Target: SCNA; (+) strand; PAM type: YTN; PAM sequence: CTG
cagccccagcttccgggttc

SEQ ID NO: 71555 - DNA, 20 bp, Artificial Sequence
  Description of Artificial Sequence: Synthetic oligonucleotide
  Target: SCNA; (+) strand; PAM type: YTN; PAM sequence: CTT
ccgggttcaagcaattctcc

SEQ ID NO: 71556 - DNA, 20 bp, Artificial Sequence
  Description of Artificial Sequence: Synthetic oligonucleotide
  Target: SCNA; (+) strand; PAM type: YTN; PAM sequence: TTC
cgggttcaagcaattctcct

SEQ ID NO: 71557 - DNA, 20 bp, Artificial Sequence
  Description of Artificial Sequence: Synthetic oligonucleotide
  Target: SCNA; (+) strand; PAM type: YTN; PAM sequence: TTC
aagcaattctcctgcttcag

SEQ ID NO: 71558 - DNA, 20 bp, Artificial Sequence
  Description of Artificial Sequence: Synthetic oligonucleotide
  Target: SCNA; (+) strand; PAM type: YTN; PAM sequence: TTC
tcctgcttcagtttcttgag

SEQ ID NO: 71559 - DNA, 20 bp, Artificial Sequence
  Description of Artificial Sequence: Synthetic oligonucleotide
  Target: SCNA; (+) strand; PAM type: YTN; PAM sequence: CTC
ctgcttcagtttcttgagta

SEQ ID NO: 71560 - DNA, 20 bp, Artificial Sequence
  Description of Artificial Sequence: Synthetic oligonucleotide
  Target: SCNA; (+) strand; PAM type: YTN; PAM sequence: CTG
cttcagtttcttgagtagct

SEQ ID NO: 71561 - DNA, 20 bp, Artificial Sequence
  Description of Artificial Sequence: Synthetic oligonucleotide
  Target: SCNA; (+) strand; PAM type: YTN; PAM sequence: CTT
cagtttcttgagtagctggg

SEQ ID NO: 71562 - DNA, 20 bp, Artificial Sequence
  Description of Artificial Sequence: Synthetic oligonucleotide
  Target: SCNA; (+) strand; PAM type: YTN; PAM sequence: TTC
agtttcttgagtagctggga

SEQ ID NO: 71563 - DNA, 20 bp, Artificial Sequence
  Description of Artificial Sequence: Synthetic oligonucleotide
  Target: SCNA; (+) strand; PAM type: YTN; PAM sequence: TTT
cttgagtagctgggattacc

SEQ ID NO: 71564 - DNA, 20 bp, Artificial Sequence
  Description of Artificial Sequence: Synthetic oligonucleotide
  Target: SCNA; (+) strand; PAM type: YTN; PAM sequence: TTC
ttgagtagctgggattacca

SEQ ID NO: 71565 - DNA, 20 bp, Artificial Sequence
  Description of Artificial Sequence: Synthetic oligonucleotide
  Target: SCNA; (+) strand; PAM type: YTN; PAM sequence: CTT
gagtagctgggattaccagc

SEQ ID NO: 71566 - DNA, 20 bp, Artificial Sequence
  Description of Artificial Sequence: Synthetic oligonucleotide
  Target: SCNA; (+) strand; PAM type: YTN; PAM sequence: TTG
agtagctgggattaccagcg

SEQ ID NO: 71567 - DNA, 20 bp, Artificial Sequence
  Description of Artificial Sequence: Synthetic oligonucleotide
  Target: SCNA; (+) strand; PAM type: YTN; PAM sequence: CTG
ggattaccagcgcccatcac

SEQ ID NO: 71568 - DNA, 20 bp, Artificial Sequence
  Description of Artificial Sequence: Synthetic oligonucleotide
  Target: SCNA; (+) strand; PAM type: YTN; PAM sequence: TTA
ccagcgcccatcaccacacc

SEQ ID NO: 71569 - DNA, 20 bp, Artificial Sequence
  Description of Artificial Sequence: Synthetic oligonucleotide
  Target: SCNA; (+) strand; PAM type: YTN; PAM sequence: CTA
atttctgtatttttagtaga

SEQ ID NO: 71570 - DNA, 20 bp, Artificial Sequence
  Description of Artificial Sequence: Synthetic oligonucleotide
  Target: SCNA; (+) strand; PAM type: YTN; PAM sequence: TTT
ctgtatttttagtagagatg

SEQ ID NO: 71571 - DNA, 20 bp, Artificial Sequence
  Description of Artificial Sequence: Synthetic oligonucleotide
  Target: SCNA; (+) strand; PAM type: YTN; PAM sequence: TTC
tgtatttttagtagagatgg

SEQ ID NO: 71572 - DNA, 20 bp, Artificial Sequence
  Description of Artificial Sequence: Synthetic oligonucleotide
  Target: SCNA; (+) strand; PAM type: YTN; PAM sequence: CTG
tatttttagtagagatgggt

SEQ ID NO: 71573 - DNA, 20 bp, Artificial Sequence
  Description of Artificial Sequence: Synthetic oligonucleotide
  Target: SCNA; (+) strand; PAM type: YTN; PAM sequence: TTT
ttagtagagatgggtttcac

SEQ ID NO: 71574 - DNA, 20 bp, Artificial Sequence
  Description of Artificial Sequence: Synthetic oligonucleotide
  Target: SCNA; (+) strand; PAM type: YTN; PAM sequence: TTT
tagtagagatgggtttcacc

SEQ ID NO: 71575 - DNA, 20 bp, Artificial Sequence
  Description of Artificial Sequence: Synthetic oligonucleotide
  Target: SCNA; (+) strand; PAM type: YTN; PAM sequence: TTT
agtagagatgggtttcacca

SEQ ID NO: 71576 - DNA, 20 bp, Artificial Sequence
  Description of Artificial Sequence: Synthetic oligonucleotide
  Target: SCNA; (+) strand; PAM type: YTN; PAM sequence: TTA
gtagagatgggtttcaccat

SEQ ID NO: 71577 - DNA, 20 bp, Artificial Sequence
  Description of Artificial Sequence: Synthetic oligonucleotide
  Target: SCNA; (+) strand; PAM type: YTN; PAM sequence: TTT
caccatgttggctaggcttg

SEQ ID NO: 71578 - DNA, 20 bp, Artificial Sequence
  Description of Artificial Sequence: Synthetic oligonucleotide
  Target: SCNA; (+) strand; PAM type: YTN; PAM sequence: TTC
accatgttggctaggcttgt

SEQ ID NO: 71579 - DNA, 20 bp, Artificial Sequence
  Description of Artificial Sequence: Synthetic oligonucleotide
  Target: SCNA; (+) strand; PAM type: YTN; PAM sequence: TTG
gctaggcttgtctctatccc

SEQ ID NO: 71580 - DNA, 20 bp, Artificial Sequence
  Description of Artificial Sequence: Synthetic oligonucleotide
  Target: SCNA; (+) strand; PAM type: YTN; PAM sequence: CTA
ggcttgtctctatcccctgt

SEQ ID NO: 71581 - DNA, 20 bp, Artificial Sequence
  Description of Artificial Sequence: Synthetic oligonucleotide
  Target: SCNA; (+) strand; PAM type: YTN; PAM sequence: CTT
gtctctatcccctgtcctca

SEQ ID NO: 71582 - DNA, 20 bp, Artificial Sequence
  Description of Artificial Sequence: Synthetic oligonucleotide
  Target: SCNA; (+) strand; PAM type: YTN; PAM sequence: TTG
tctctatcccctgtcctcaa

SEQ ID NO: 71583 - DNA, 20 bp, Artificial Sequence
  Description of Artificial Sequence: Synthetic oligonucleotide
  Target: SCNA; (+) strand; PAM type: YTN; PAM sequence: CTC
tatcccctgtcctcaagtga

SEQ ID NO: 71584 - DNA, 20 bp, Artificial Sequence
  Description of Artificial Sequence: Synthetic oligonucleotide
  Target: SCNA; (+) strand; PAM type: YTN; PAM sequence: CTA
tcccctgtcctcaagtgatc

SEQ ID NO: 71585 - DNA, 20 bp, Artificial Sequence
  Description of Artificial Sequence: Synthetic oligonucleotide
  Target: SCNA; (+) strand; PAM type: YTN; PAM sequence: CTG
tcctcaagtgatccctgcaa

SEQ ID NO: 71586 - DNA, 20 bp, Artificial Sequence
  Description of Artificial Sequence: Synthetic oligonucleotide
  Target: SCNA; (+) strand; PAM type: YTN; PAM sequence: CTC
aagtgatccctgcaacttga

SEQ ID NO: 71587 - DNA, 20 bp, Artificial Sequence
  Description of Artificial Sequence: Synthetic oligonucleotide
  Target: SCNA; (+) strand; PAM type: YTN; PAM sequence: CTG
caacttgacctccaaaagtg

SEQ ID NO: 71588 - DNA, 20 bp, Artificial Sequence
  Description of Artificial Sequence: Synthetic oligonucleotide
  Target: SCNA; (+) strand; PAM type: YTN; PAM sequence: CTT
gacctccaaaagtgctggga

SEQ ID NO: 71589 - DNA, 20 bp, Artificial Sequence
  Description of Artificial Sequence: Synthetic oligonucleotide
  Target: SCNA; (+) strand; PAM type: YTN; PAM sequence: TTG
acctccaaaagtgctgggat

SEQ ID NO: 71590 - DNA, 20 bp, Artificial Sequence
  Description of Artificial Sequence: Synthetic oligonucleotide
  Target: SCNA; (+) strand; PAM type: YTN; PAM sequence: CTC
caaaagtgctgggattatag

SEQ ID NO: 71591 - DNA, 20 bp, Artificial Sequence
  Description of Artificial Sequence: Synthetic oligonucleotide
  Target: SCNA; (+) strand; PAM type: YTN; PAM sequence: CTG
ggattataggcatgagccac

SEQ ID NO: 71592 - DNA, 20 bp, Artificial Sequence
  Description of Artificial Sequence: Synthetic oligonucleotide
  Target: SCNA; (+) strand; PAM type: YTN; PAM sequence: TTA
taggcatgagccaccatgcc

SEQ ID NO: 71593 - DNA, 20 bp, Artificial Sequence
  Description of Artificial Sequence: Synthetic oligonucleotide
  Target: SCNA; (+) strand; PAM type: YTN; PAM sequence: CTG
gccttatttatattatatta

SEQ ID NO: 71594 - DNA, 20 bp, Artificial Sequence
  Description of Artificial Sequence: Synthetic oligonucleotide
  Target: SCNA; (+) strand; PAM type: YTN; PAM sequence: CTT
atttatattatattaactct

SEQ ID NO: 71595 - DNA, 20 bp, Artificial Sequence
  Description of Artificial Sequence: Synthetic oligonucleotide
  Target: SCNA; (+) strand; PAM type: YTN; PAM sequence: TTA
tttatattatattaactcta

SEQ ID NO: 71596 - DNA, 20 bp, Artificial Sequence
  Description of Artificial Sequence: Synthetic oligonucleotide
  Target: SCNA; (+) strand; PAM type: YTN; PAM sequence: TTT
atattatattaactctaata

SEQ ID NO: 71597 - DNA, 20 bp, Artificial Sequence
  Description of Artificial Sequence: Synthetic oligonucleotide
  Target: SCNA; (+) strand; PAM type: YTN; PAM sequence: TTA
tattatattaactctaataa

SEQ ID NO: 71598 - DNA, 20 bp, Artificial Sequence
  Description of Artificial Sequence: Synthetic oligonucleotide
  Target: SCNA; (+) strand; PAM type: YTN; PAM sequence: TTA
tattaactctaataatcact

SEQ ID NO: 71599 - DNA, 20 bp, Artificial Sequence
  Description of Artificial Sequence: Synthetic oligonucleotide
  Target: SCNA; (+) strand; PAM type: YTN; PAM sequence: TTA
actctaataatcactatgcc

SEQ ID NO: 71600 - DNA, 20 bp, Artificial Sequence
  Description of Artificial Sequence: Synthetic oligonucleotide
  Target: SCNA; (+) strand; PAM type: YTN; PAM sequence: CTC
taataatcactatgccactt

SEQ ID NO: 71601 - DNA, 20 bp, Artificial Sequence
  Description of Artificial Sequence: Synthetic oligonucleotide
  Target: SCNA; (+) strand; PAM type: YTN; PAM sequence: CTA
ataatcactatgccactttc

SEQ ID NO: 71602 - DNA, 20 bp, Artificial Sequence
  Description of Artificial Sequence: Synthetic oligonucleotide
  Target: SCNA; (+) strand; PAM type: YTN; PAM sequence: CTA
tgccactttctgttgtaatt

SEQ ID NO: 71603 - DNA, 20 bp, Artificial Sequence
  Description of Artificial Sequence: Synthetic oligonucleotide
  Target: SCNA; (+) strand; PAM type: YTN; PAM sequence: CTT
tctgttgtaattctttaggc

SEQ ID NO: 71604 - DNA, 20 bp, Artificial Sequence
  Description of Artificial Sequence: Synthetic oligonucleotide
  Target: SCNA; (+) strand; PAM type: YTN; PAM sequence: TTT
ctgttgtaattctttaggca

SEQ ID NO: 71605 - DNA, 20 bp, Artificial Sequence
  Description of Artificial Sequence: Synthetic oligonucleotide
  Target: SCNA; (+) strand; PAM type: YTN; PAM sequence: TTC
tgttgtaattctttaggcac

SEQ ID NO: 71606 - DNA, 20 bp, Artificial Sequence
  Description of Artificial Sequence: Synthetic oligonucleotide
  Target: SCNA; (+) strand; PAM type: YTN; PAM sequence: CTG
ttgtaattctttaggcactt

SEQ ID NO: 71607 - DNA, 20 bp, Artificial Sequence
  Description of Artificial Sequence: Synthetic oligonucleotide
  Target: SCNA; (+) strand; PAM type: YTN; PAM sequence: TTG
taattctttaggcacttctt

SEQ ID NO: 71608 - DNA, 20 bp, Artificial Sequence
  Description of Artificial Sequence: Synthetic oligonucleotide
  Target: SCNA; (+) strand; PAM type: YTN; PAM sequence: TTC
tttaggcacttcttctttgt

SEQ ID NO: 71609 - DNA, 20 bp, Artificial Sequence
  Description of Artificial Sequence: Synthetic oligonucleotide
  Target: SCNA; (+) strand; PAM type: YTN; PAM sequence: CTT
taggcacttcttctttgtat

SEQ ID NO: 71610 - DNA, 20 bp, Artificial Sequence
  Description of Artificial Sequence: Synthetic oligonucleotide
  Target: SCNA; (+) strand; PAM type: YTN; PAM sequence: TTT
aggcacttcttctttgtatg

SEQ ID NO: 71611 - DNA, 20 bp, Artificial Sequence
  Description of Artificial Sequence: Synthetic oligonucleotide
  Target: SCNA; (+) strand; PAM type: YTN; PAM sequence: TTA
ggcacttcttctttgtatgt

SEQ ID NO: 71612 - DNA, 20 bp, Artificial Sequence
  Description of Artificial Sequence: Synthetic oligonucleotide
  Target: SCNA; (+) strand; PAM type: YTN; PAM sequence: CTT
cttctttgtatgtttttaat

SEQ ID NO: 71613 - DNA, 20 bp, Artificial Sequence
  Description of Artificial Sequence: Synthetic oligonucleotide
  Target: SCNA; (+) strand; PAM type: YTN; PAM sequence: TTC
ttctttgtatgtttttaatt

SEQ ID NO: 71614 - DNA, 20 bp, Artificial Sequence
  Description of Artificial Sequence: Synthetic oligonucleotide
  Target: SCNA; (+) strand; PAM type: YTN; PAM sequence: CTT
ctttgtatgtttttaattag

SEQ ID NO: 71615 - DNA, 20 bp, Artificial Sequence
  Description of Artificial Sequence: Synthetic oligonucleotide
  Target: SCNA; (+) strand; PAM type: YTN; PAM sequence: TTC
tttgtatgtttttaattagc

SEQ ID NO: 71616 - DNA, 20 bp, Artificial Sequence
  Description of Artificial Sequence: Synthetic oligonucleotide
  Target: SCNA; (+) strand; PAM type: YTN; PAM sequence: CTT
tgtatgtttttaattagcat

SEQ ID NO: 71617 - DNA, 20 bp, Artificial Sequence
  Description of Artificial Sequence: Synthetic oligonucleotide
  Target: SCNA; (+) strand; PAM type: YTN; PAM sequence: TTT
gtatgtttttaattagcatg

SEQ ID NO: 71618 - DNA, 20 bp, Artificial Sequence
  Description of Artificial Sequence: Synthetic oligonucleotide
  Target: SCNA; (+) strand; PAM type: YTN; PAM sequence: TTG
tatgtttttaattagcatgt

SEQ ID NO: 71619 - DNA, 20 bp, Artificial Sequence
  Description of Artificial Sequence: Synthetic oligonucleotide
  Target: SCNA; (+) strand; PAM type: YTN; PAM sequence: TTT
ttaattagcatgtagttata

SEQ ID NO: 71620 - DNA, 20 bp, Artificial Sequence
  Description of Artificial Sequence: Synthetic oligonucleotide
  Target: SCNA; (+) strand; PAM type: YTN; PAM sequence: TTT
taattagcatgtagttatat

SEQ ID NO: 71621 - DNA, 20 bp, Artificial Sequence
  Description of Artificial Sequence: Synthetic oligonucleotide
  Target: SCNA; (+) strand; PAM type: YTN; PAM sequence: TTT
aattagcatgtagttatata

SEQ ID NO: 71622 - DNA, 20 bp, Artificial Sequence
  Description of Artificial Sequence: Synthetic oligonucleotide
  Target: SCNA; (+) strand; PAM type: YTN; PAM sequence: TTA
attagcatgtagttatatag

SEQ ID NO: 71623 - DNA, 20 bp, Artificial Sequence
  Description of Artificial Sequence: Synthetic oligonucleotide
  Target: SCNA; (+) strand; PAM type: YTN; PAM sequence: TTA
gcatgtagttatatagttat

SEQ ID NO: 71624 - DNA, 20 bp, Artificial Sequence
  Description of Artificial Sequence: Synthetic oligonucleotide
  Target: SCNA; (+) strand; PAM type: YTN; PAM sequence: TTA
tatagttatatatttacgtt

SEQ ID NO: 71625 - DNA, 20 bp, Artificial Sequence
  Description of Artificial Sequence: Synthetic oligonucleotide
  Target: SCNA; (+) strand; PAM type: YTN; PAM sequence: TTA
tatatttacgtttagatata

SEQ ID NO: 71626 - DNA, 20 bp, Artificial Sequence
  Description of Artificial Sequence: Synthetic oligonucleotide
  Target: SCNA; (+) strand; PAM type: YTN; PAM sequence: TTT
acgtttagatatacctccaa

SEQ ID NO: 71627 - DNA, 20 bp, Artificial Sequence
  Description of Artificial Sequence: Synthetic oligonucleotide
  Target: SCNA; (+) strand; PAM type: YTN; PAM sequence: TTA
cgtttagatatacctccaag

SEQ ID NO: 71628 - DNA, 20 bp, Artificial Sequence
  Description of Artificial Sequence: Synthetic oligonucleotide
  Target: SCNA; (+) strand; PAM type: YTN; PAM sequence: TTT
agatatacctccaagtagcc

SEQ ID NO: 71629 - DNA, 20 bp, Artificial Sequence
  Description of Artificial Sequence: Synthetic oligonucleotide
  Target: SCNA; (+) strand; PAM type: YTN; PAM sequence: TTA
gatatacctccaagtagcca

SEQ ID NO: 71630 - DNA, 20 bp, Artificial Sequence
  Description of Artificial Sequence: Synthetic oligonucleotide
  Target: SCNA; (+) strand; PAM type: YTN; PAM sequence: CTC
caagtagccaatattctaca

SEQ ID NO: 71631 - DNA, 20 bp, Artificial Sequence
  Description of Artificial Sequence: Synthetic oligonucleotide
  Target: SCNA; (+) strand; PAM type: YTN; PAM sequence: TTC
tacatgaagtgataaaggat

SEQ ID NO: 71632 - DNA, 20 bp, Artificial Sequence
  Description of Artificial Sequence: Synthetic oligonucleotide
  Target: SCNA; (+) strand; PAM type: YTN; PAM sequence: CTA
catgaagtgataaaggattt

SEQ ID NO: 71633 - DNA, 20 bp, Artificial Sequence
  Description of Artificial Sequence: Synthetic oligonucleotide
  Target: SCNA; (+) strand; PAM type: YTN; PAM sequence: TTT
atttatccctgaaattatga

SEQ ID NO: 71634 - DNA, 20 bp, Artificial Sequence
  Description of Artificial Sequence: Synthetic oligonucleotide
  Target: SCNA; (+) strand; PAM type: YTN; PAM sequence: TTA
tttatccctgaaattatgaa

SEQ ID NO: 71635 - DNA, 20 bp, Artificial Sequence
  Description of Artificial Sequence: Synthetic oligonucleotide
  Target: SCNA; (+) strand; PAM type: YTN; PAM sequence: TTT
atccctgaaattatgaaaag

SEQ ID NO: 71636 - DNA, 20 bp, Artificial Sequence
  Description of Artificial Sequence: Synthetic oligonucleotide
  Target: SCNA; (+) strand; PAM type: YTN; PAM sequence: TTA
tccctgaaattatgaaaagt

SEQ ID NO: 71637 - DNA, 20 bp, Artificial Sequence
  Description of Artificial Sequence: Synthetic oligonucleotide
  Target: SCNA; (+) strand; PAM type: YTN; PAM sequence: CTG
aaattatgaaaagtctgcct

SEQ ID NO: 71638 - DNA, 20 bp, Artificial Sequence
  Description of Artificial Sequence: Synthetic oligonucleotide
  Target: SCNA; (+) strand; PAM type: YTN; PAM sequence: TTA
tgaaaagtctgccttgtttt

SEQ ID NO: 71639 - DNA, 20 bp, Artificial Sequence
  Description of Artificial Sequence: Synthetic oligonucleotide
  Target: SCNA; (+) strand; PAM type: YTN; PAM sequence: CTG
ccttgttttttctttcttgc

SEQ ID NO: 71640 - DNA, 20 bp, Artificial Sequence
  Description of Artificial Sequence: Synthetic oligonucleotide
  Target: SCNA; (+) strand; PAM type: YTN; PAM sequence: CTT
gttttttctttcttgcattg

SEQ ID NO: 71641 - DNA, 20 bp, Artificial Sequence
  Description of Artificial Sequence: Synthetic oligonucleotide
  Target: SCNA; (+) strand; PAM type: YTN; PAM sequence: TTG
ttttttctttcttgcattgt

SEQ ID NO: 71642 - DNA, 20 bp, Artificial Sequence
  Description of Artificial Sequence: Synthetic oligonucleotide
  Target: SCNA; (+) strand; PAM type: YTN; PAM sequence: TTT
tttctttcttgcattgtgct

SEQ ID NO: 71643 - DNA, 20 bp, Artificial Sequence
  Description of Artificial Sequence: Synthetic oligonucleotide
  Target: SCNA; (+) strand; PAM type: YTN; PAM sequence: TTT
ttctttcttgcattgtgcta

SEQ ID NO: 71644 - DNA, 20 bp, Artificial Sequence
  Description of Artificial Sequence: Synthetic oligonucleotide
  Target: SCNA; (+) strand; PAM type: YTN; PAM sequence: TTT
tctttcttgcattgtgctac

SEQ ID NO: 71645 - DNA, 20 bp, Artificial Sequence
  Description of Artificial Sequence: Synthetic oligonucleotide
  Target: SCNA; (+) strand; PAM type: YTN; PAM sequence: TTT
ctttcttgcattgtgctaca

SEQ ID NO: 71646 - DNA, 20 bp, Artificial Sequence
  Description of Artificial Sequence: Synthetic oligonucleotide
  Target: SCNA; (+) strand; PAM type: YTN; PAM sequence: TTC
tttcttgcattgtgctacag

SEQ ID NO: 71647 - DNA, 20 bp, Artificial Sequence
  Description of Artificial Sequence: Synthetic oligonucleotide
  Target: SCNA; (+) strand; PAM type: YTN; PAM sequence: CTT
tcttgcattgtgctacagta

SEQ ID NO: 71648 - DNA, 20 bp, Artificial Sequence
  Description of Artificial Sequence: Synthetic oligonucleotide
  Target: SCNA; (+) strand; PAM type: YTN; PAM sequence: TTT
cttgcattgtgctacagtac

SEQ ID NO: 71649 - DNA, 20 bp, Artificial Sequence
  Description of Artificial Sequence: Synthetic oligonucleotide
  Target: SCNA; (+) strand; PAM type: YTN; PAM sequence: TTC
ttgcattgtgctacagtaca

SEQ ID NO: 71650 - DNA, 20 bp, Artificial Sequence
  Description of Artificial Sequence: Synthetic oligonucleotide
  Target: SCNA; (+) strand; PAM type: YTN; PAM sequence: CTT
gcattgtgctacagtacaca

SEQ ID NO: 71651 - DNA, 20 bp, Artificial Sequence
  Description of Artificial Sequence: Synthetic oligonucleotide
  Target: SCNA; (+) strand; PAM type: YTN; PAM sequence: TTG
cattgtgctacagtacacac

SEQ ID NO: 71652 - DNA, 20 bp, Artificial Sequence
  Description of Artificial Sequence: Synthetic oligonucleotide
  Target: SCNA; (+) strand; PAM type: YTN; PAM sequence: TTG
tgctacagtacacacataca

SEQ ID NO: 71653 - DNA, 20 bp, Artificial Sequence
  Description of Artificial Sequence: Synthetic oligonucleotide
  Target: SCNA; (+) strand; PAM type: YTN; PAM sequence: CTA
cagtacacacatacacggac

SEQ ID NO: 71654 - DNA, 20 bp, Artificial Sequence
  Description of Artificial Sequence: Synthetic oligonucleotide
  Target: SCNA; (+) strand; PAM type: YTN; PAM sequence: CTG
ggttctgctaattatcattt

SEQ ID NO: 71655 - DNA, 20 bp, Artificial Sequence
  Description of Artificial Sequence: Synthetic oligonucleotide
  Target: SCNA; (+) strand; PAM type: YTN; PAM sequence: TTC
tgctaattatcatttcctta

SEQ ID NO: 71656 - DNA, 20 bp, Artificial Sequence
  Description of Artificial Sequence: Synthetic oligonucleotide
  Target: SCNA; (+) strand; PAM type: YTN; PAM sequence: CTG
ctaattatcatttccttagt

SEQ ID NO: 71657 - DNA, 20 bp, Artificial Sequence
  Description of Artificial Sequence: Synthetic oligonucleotide
  Target: SCNA; (+) strand; PAM type: YTN; PAM sequence: CTA
attatcatttccttagttcc

SEQ ID NO: 71658 - DNA, 20 bp, Artificial Sequence
  Description of Artificial Sequence: Synthetic oligonucleotide
  Target: SCNA; (+) strand; PAM type: YTN; PAM sequence: TTA
tcatttccttagttccatat

SEQ ID NO: 71659 - DNA, 20 bp, Artificial Sequence
  Description of Artificial Sequence: Synthetic oligonucleotide
  Target: SCNA; (+) strand; PAM type: YTN; PAM sequence: TTT
ccttagttccatatcattcc

SEQ ID NO: 71660 - DNA, 20 bp, Artificial Sequence
  Description of Artificial Sequence: Synthetic oligonucleotide
  Target: SCNA; (+) strand; PAM type: YTN; PAM sequence: TTC
cttagttccatatcattccc

SEQ ID NO: 71661 - DNA, 20 bp, Artificial Sequence
  Description of Artificial Sequence: Synthetic oligonucleotide
  Target: SCNA; (+) strand; PAM type: YTN; PAM sequence: CTT
agttccatatcattccccaa

SEQ ID NO: 71662 - DNA, 20 bp, Artificial Sequence
  Description of Artificial Sequence: Synthetic oligonucleotide
  Target: SCNA; (+) strand; PAM type: YTN; PAM sequence: TTA
gttccatatcattccccaac

SEQ ID NO: 71663 - DNA, 20 bp, Artificial Sequence
  Description of Artificial Sequence: Synthetic oligonucleotide
  Target: SCNA; (+) strand; PAM type: YTN; PAM sequence: TTC
catatcattccccaacccct

SEQ ID NO: 71664 - DNA, 20 bp, Artificial Sequence
  Description of Artificial Sequence: Synthetic oligonucleotide
  Target: SCNA; (+) strand; PAM type: YTN; PAM sequence: TTC
cccaacccctaagccacctg

SEQ ID NO: 71665 - DNA, 20 bp, Artificial Sequence
  Description of Artificial Sequence: Synthetic oligonucleotide
  Target: SCNA; (+) strand; PAM type: YTN; PAM sequence: CTA
agccacctgtgtccatacca

SEQ ID NO: 71666 - DNA, 20 bp, Artificial Sequence
  Description of Artificial Sequence: Synthetic oligonucleotide
  Target: SCNA; (+) strand; PAM type: YTN; PAM sequence: CTG
tgtccataccagtcttccca

SEQ ID NO: 71667 - DNA, 20 bp, Artificial Sequence
  Description of Artificial Sequence: Synthetic oligonucleotide
  Target: SCNA; (+) strand; PAM type: YTN; PAM sequence: CTT
cccactgcctaccagcccca

SEQ ID NO: 71668 - DNA, 20 bp, Artificial Sequence
  Description of Artificial Sequence: Synthetic oligonucleotide
  Target: SCNA; (+) strand; PAM type: YTN; PAM sequence: TTC
ccactgcctaccagccccat

SEQ ID NO: 71669 - DNA, 20 bp, Artificial Sequence
  Description of Artificial Sequence: Synthetic oligonucleotide
  Target: SCNA; (+) strand; PAM type: YTN; PAM sequence: CTG
cctaccagccccatgtcaga

SEQ ID NO: 71670 - DNA, 20 bp, Artificial Sequence
  Description of Artificial Sequence: Synthetic oligonucleotide
  Target: SCNA; (+) strand; PAM type: YTN; PAM sequence: CTA
ccagccccatgtcagatgac

SEQ ID NO: 71671 - DNA, 20 bp, Artificial Sequence
  Description of Artificial Sequence: Synthetic oligonucleotide
  Target: SCNA; (+) strand; PAM type: YTN; PAM sequence: CTC
catcagtagtatctccattt

SEQ ID NO: 71672 - DNA, 20 bp, Artificial Sequence
  Description of Artificial Sequence: Synthetic oligonucleotide
  Target: SCNA; (+) strand; PAM type: YTN; PAM sequence: CTC
catttatggtgtctcgcctt

SEQ ID NO: 71673 - DNA, 20 bp, Artificial Sequence
  Description of Artificial Sequence: Synthetic oligonucleotide
  Target: SCNA; (+) strand; PAM type: YTN; PAM sequence: TTT
atggtgtctcgcctttctga

SEQ ID NO: 71674 - DNA, 20 bp, Artificial Sequence
  Description of Artificial Sequence: Synthetic oligonucleotide
  Target: SCNA; (+) strand; PAM type: YTN; PAM sequence: TTA
tggtgtctcgcctttctgac

SEQ ID NO: 71675 - DNA, 20 bp, Artificial Sequence
  Description of Artificial Sequence: Synthetic oligonucleotide
  Target: SCNA; (+) strand; PAM type: YTN; PAM sequence: CTC
gcctttctgacacatagtaa

SEQ ID NO: 71676 - DNA, 20 bp, Artificial Sequence
  Description of Artificial Sequence: Synthetic oligonucleotide
  Target: SCNA; (+) strand; PAM type: YTN; PAM sequence: CTT
tctgacacatagtaacaagt

SEQ ID NO: 71677 - DNA, 20 bp, Artificial Sequence
  Description of Artificial Sequence: Synthetic oligonucleotide
  Target: SCNA; (+) strand; PAM type: YTN; PAM sequence: TTT
ctgacacatagtaacaagtg

SEQ ID NO: 71678 - DNA, 20 bp, Artificial Sequence
  Description of Artificial Sequence: Synthetic oligonucleotide
  Target: SCNA; (+) strand; PAM type: YTN; PAM sequence: TTC
tgacacatagtaacaagtga

SEQ ID NO: 71679 - DNA, 20 bp, Artificial Sequence
  Description of Artificial Sequence: Synthetic oligonucleotide
  Target: SCNA; (+) strand; PAM type: YTN; PAM sequence: CTG
acacatagtaacaagtgagg

SEQ ID NO: 71680 - DNA, 20 bp, Artificial Sequence
  Description of Artificial Sequence: Synthetic oligonucleotide
  Target: SCNA; (+) strand; PAM type: YTN; PAM sequence: TTA
agactaacaagagaaagaag

SEQ ID NO: 71681 - DNA, 20 bp, Artificial Sequence
  Description of Artificial Sequence: Synthetic oligonucleotide
  Target: SCNA; (+) strand; PAM type: YTN; PAM sequence: CTA
acaagagaaagaaggcatta

SEQ ID NO: 71682 - DNA, 20 bp, Artificial Sequence
  Description of Artificial Sequence: Synthetic oligonucleotide
  Target: SCNA; (+) strand; PAM type: YTN; PAM sequence: TTA
ttcttatctggctagaaaga

SEQ ID NO: 71683 - DNA, 20 bp, Artificial Sequence
  Description of Artificial Sequence: Synthetic oligonucleotide
  Target: SCNA; (+) strand; PAM type: YTN; PAM sequence: TTC
ttatctggctagaaagaaaa

SEQ ID NO: 71684 - DNA, 20 bp, Artificial Sequence
  Description of Artificial Sequence: Synthetic oligonucleotide
  Target: SCNA; (+) strand; PAM type: YTN; PAM sequence: CTT
atctggctagaaagaaaaca

SEQ ID NO: 71685 - DNA, 20 bp, Artificial Sequence
  Description of Artificial Sequence: Synthetic oligonucleotide
  Target: SCNA; (+) strand; PAM type: YTN; PAM sequence: TTA
tctggctagaaagaaaacaa

SEQ ID NO: 71686 - DNA, 20 bp, Artificial Sequence
  Description of Artificial Sequence: Synthetic oligonucleotide
  Target: SCNA; (+) strand; PAM type: YTN; PAM sequence: CTG
gctagaaagaaaacaatcag

SEQ ID NO: 71687 - DNA, 20 bp, Artificial Sequence
  Description of Artificial Sequence: Synthetic oligonucleotide
  Target: SCNA; (+) strand; PAM type: YTN; PAM sequence: CTA
gaaagaaaacaatcagcaac

SEQ ID NO: 71688 - DNA, 20 bp, Artificial Sequence
  Description of Artificial Sequence: Synthetic oligonucleotide
  Target: SCNA; (+) strand; PAM type: YTN; PAM sequence: CTT
gtcttttatttaagggaaga

SEQ ID NO: 71689 - DNA, 20 bp, Artificial Sequence
  Description of Artificial Sequence: Synthetic oligonucleotide
  Target: SCNA; (+) strand; PAM type: YTN; PAM sequence: TTG
tcttttatttaagggaagaa

SEQ ID NO: 71690 - DNA, 20 bp, Artificial Sequence
  Description of Artificial Sequence: Synthetic oligonucleotide
  Target: SCNA; (+) strand; PAM type: YTN; PAM sequence: CTT
ttatttaagggaagaaggct

SEQ ID NO: 71691 - DNA, 20 bp, Artificial Sequence
  Description of Artificial Sequence: Synthetic oligonucleotide
  Target: SCNA; (+) strand; PAM type: YTN; PAM sequence: TTT
tatttaagggaagaaggctt

SEQ ID NO: 71692 - DNA, 20 bp, Artificial Sequence
  Description of Artificial Sequence: Synthetic oligonucleotide
  Target: SCNA; (+) strand; PAM type: YTN; PAM sequence: TTT
atttaagggaagaaggcttc

SEQ ID NO: 71693 - DNA, 20 bp, Artificial Sequence
  Description of Artificial Sequence: Synthetic oligonucleotide
  Target: SCNA; (+) strand; PAM type: YTN; PAM sequence: TTA
tttaagggaagaaggcttca

SEQ ID NO: 71694 - DNA, 20 bp, Artificial Sequence
  Description of Artificial Sequence: Synthetic oligonucleotide
  Target: SCNA; (+) strand; PAM type: YTN; PAM sequence: TTT
aagggaagaaggcttcactc

SEQ ID NO: 71695 - DNA, 20 bp, Artificial Sequence
  Description of Artificial Sequence: Synthetic oligonucleotide
  Target: SCNA; (+) strand; PAM type: YTN; PAM sequence: TTA
agggaagaaggcttcactct

SEQ ID NO: 71696 - DNA, 20 bp, Artificial Sequence
  Description of Artificial Sequence: Synthetic oligonucleotide
  Target: SCNA; (+) strand; PAM type: YTN; PAM sequence: CTT
cactctactatattttcaag

SEQ ID NO: 71697 - DNA, 20 bp, Artificial Sequence
  Description of Artificial Sequence: Synthetic oligonucleotide
  Target: SCNA; (+) strand; PAM type: YTN; PAM sequence: TTC
actctactatattttcaaga

SEQ ID NO: 71698 - DNA, 20 bp, Artificial Sequence
  Description of Artificial Sequence: Synthetic oligonucleotide
  Target: SCNA; (+) strand; PAM type: YTN; PAM sequence: CTC
tactatattttcaagatatt

SEQ ID NO: 71699 - DNA, 20 bp, Artificial Sequence
  Description of Artificial Sequence: Synthetic oligonucleotide
  Target: SCNA; (+) strand; PAM type: YTN; PAM sequence: CTA
ctatattttcaagatattcc

SEQ ID NO: 71700 - DNA, 20 bp, Artificial Sequence
  Description of Artificial Sequence: Synthetic oligonucleotide
  Target: SCNA; (+) strand; PAM type: YTN; PAM sequence: CTA
tattttcaagatattccaaa

SEQ ID NO: 71701 - DNA, 20 bp, Artificial Sequence
  Description of Artificial Sequence: Synthetic oligonucleotide
  Target: SCNA; (+) strand; PAM type: YTN; PAM sequence: TTT
tcaagatattccaaaactgc

SEQ ID NO: 71702 - DNA, 20 bp, Artificial Sequence
  Description of Artificial Sequence: Synthetic oligonucleotide
  Target: SCNA; (+) strand; PAM type: YTN; PAM sequence: TTT
caagatattccaaaactgca

SEQ ID NO: 71703 - DNA, 20 bp, Artificial Sequence
  Description of Artificial Sequence: Synthetic oligonucleotide
  Target: SCNA; (+) strand; PAM type: YTN; PAM sequence: TTC
aagatattccaaaactgcaa

SEQ ID NO: 71704 - DNA, 20 bp, Artificial Sequence
  Description of Artificial Sequence: Synthetic oligonucleotide
  Target: SCNA; (+) strand; PAM type: YTN; PAM sequence: TTC
caaaactgcaacagaccctt

SEQ ID NO: 71705 - DNA, 20 bp, Artificial Sequence
  Description of Artificial Sequence: Synthetic oligonucleotide
  Target: SCNA; (+) strand; PAM type: YTN; PAM sequence: CTG
caacagaccctttcaattat

SEQ ID NO: 71706 - DNA, 20 bp, Artificial Sequence
  Description of Artificial Sequence: Synthetic oligonucleotide
  Target: SCNA; (+) strand; PAM type: YTN; PAM sequence: CTT
tcaattattttactttcatc

SEQ ID NO: 71707 - DNA, 20 bp, Artificial Sequence
  Description of Artificial Sequence: Synthetic oligonucleotide
  Target: SCNA; (+) strand; PAM type: YTN; PAM sequence: TTT
caattattttactttcatct

SEQ ID NO: 71708 - DNA, 20 bp, Artificial Sequence
  Description of Artificial Sequence: Synthetic oligonucleotide
  Target: SCNA; (+) strand; PAM type: YTN; PAM sequence: TTC
aattattttactttcatcta

SEQ ID NO: 71709 - DNA, 20 bp, Artificial Sequence
  Description of Artificial Sequence: Synthetic oligonucleotide
  Target: SCNA; (+) strand; PAM type: YTN; PAM sequence: TTA
ttttactttcatctattacc

SEQ ID NO: 71710 - DNA, 20 bp, Artificial Sequence
  Description of Artificial Sequence: Synthetic oligonucleotide
  Target: SCNA; (+) strand; PAM type: YTN; PAM sequence: TTT
tactttcatctattaccaaa

SEQ ID NO: 71711 - DNA, 20 bp, Artificial Sequence
  Description of Artificial Sequence: Synthetic oligonucleotide
  Target: SCNA; (+) strand; PAM type: YTN; PAM sequence: TTT
actttcatctattaccaaaa

SEQ ID NO: 71712 - DNA, 20 bp, Artificial Sequence
  Description of Artificial Sequence: Synthetic oligonucleotide
  Target: SCNA; (+) strand; PAM type: YTN; PAM sequence: TTA
ctttcatctattaccaaaaa

SEQ ID NO: 71713 - DNA, 20 bp, Artificial Sequence
  Description of Artificial Sequence: Synthetic oligonucleotide
  Target: SCNA; (+) strand; PAM type: YTN; PAM sequence: CTT
tcatctattaccaaaaaggc

SEQ ID NO: 71714 - DNA, 20 bp, Artificial Sequence
  Description of Artificial Sequence: Synthetic oligonucleotide
  Target: SCNA; (+) strand; PAM type: YTN; PAM sequence: TTT
catctattaccaaaaaggcc

SEQ ID NO: 71715 - DNA, 20 bp, Artificial Sequence
  Description of Artificial Sequence: Synthetic oligonucleotide
  Target: SCNA; (+) strand; PAM type: YTN; PAM sequence: TTC
atctattaccaaaaaggcca

SEQ ID NO: 71716 - DNA, 20 bp, Artificial Sequence
  Description of Artificial Sequence: Synthetic oligonucleotide
  Target: SCNA; (+) strand; PAM type: YTN; PAM sequence: CTA
ttaccaaaaaggccaacttt

SEQ ID NO: 71717 - DNA, 20 bp, Artificial Sequence
  Description of Artificial Sequence: Synthetic oligonucleotide
  Target: SCNA; (+) strand; PAM type: YTN; PAM sequence: TTA
ccaaaaaggccaacttttag

SEQ ID NO: 71718 - DNA, 20 bp, Artificial Sequence
  Description of Artificial Sequence: Synthetic oligonucleotide
  Target: SCNA; (+) strand; PAM type: YTN; PAM sequence: CTT
ttagattgaggcaatgaaaa

SEQ ID NO: 71719 - DNA, 20 bp, Artificial Sequence
  Description of Artificial Sequence: Synthetic oligonucleotide
  Target: SCNA; (+) strand; PAM type: YTN; PAM sequence: TTT
tagattgaggcaatgaaaac

SEQ ID NO: 71720 - DNA, 20 bp, Artificial Sequence
  Description of Artificial Sequence: Synthetic oligonucleotide
  Target: SCNA; (+) strand; PAM type: YTN; PAM sequence: TTT
agattgaggcaatgaaaact

SEQ ID NO: 71721 - DNA, 20 bp, Artificial Sequence
  Description of Artificial Sequence: Synthetic oligonucleotide
  Target: SCNA; (+) strand; PAM type: YTN; PAM sequence: TTA
gattgaggcaatgaaaactc

SEQ ID NO: 71722 - DNA, 20 bp, Artificial Sequence
  Description of Artificial Sequence: Synthetic oligonucleotide
  Target: SCNA; (+) strand; PAM type: YTN; PAM sequence: TTG
aggcaatgaaaactcagaaa

SEQ ID NO: 71723 - DNA, 20 bp, Artificial Sequence
  Description of Artificial Sequence: Synthetic oligonucleotide
  Target: SCNA; (+) strand; PAM type: YTN; PAM sequence: CTC
agaaacttttttggaatgac

SEQ ID NO: 71724 - DNA, 20 bp, Artificial Sequence
  Description of Artificial Sequence: Synthetic oligonucleotide
  Target: SCNA; (+) strand; PAM type: YTN; PAM sequence: CTT
ttttggaatgaccttcagat

SEQ ID NO: 71725 - DNA, 20 bp, Artificial Sequence
  Description of Artificial Sequence: Synthetic oligonucleotide
  Target: SCNA; (+) strand; PAM type: YTN; PAM sequence: TTT
tttggaatgaccttcagatt

SEQ ID NO: 71726 - DNA, 20 bp, Artificial Sequence
  Description of Artificial Sequence: Synthetic oligonucleotide
  Target: SCNA; (+) strand; PAM type: YTN; PAM sequence: TTT
ttggaatgaccttcagattt

SEQ ID NO: 71727 - DNA, 20 bp, Artificial Sequence
  Description of Artificial Sequence: Synthetic oligonucleotide
  Target: SCNA; (+) strand; PAM type: YTN; PAM sequence: TTT
tggaatgaccttcagatttg

SEQ ID NO: 71728 - DNA, 20 bp, Artificial Sequence
  Description of Artificial Sequence: Synthetic oligonucleotide
  Target: SCNA; (+) strand; PAM type: YTN; PAM sequence: TTT
ggaatgaccttcagatttga

SEQ ID NO: 71729 - DNA, 20 bp, Artificial Sequence
  Description of Artificial Sequence: Synthetic oligonucleotide
  Target: SCNA; (+) strand; PAM type: YTN; PAM sequence: TTG
gaatgaccttcagatttgag

SEQ ID NO: 71730 - DNA, 20 bp, Artificial Sequence
  Description of Artificial Sequence: Synthetic oligonucleotide
  Target: SCNA; (+) strand; PAM type: YTN; PAM sequence: CTT
cagatttgagatgaccactg

SEQ ID NO: 71731 - DNA, 20 bp, Artificial Sequence
  Description of Artificial Sequence: Synthetic oligonucleotide
  Target: SCNA; (+) strand; PAM type: YTN; PAM sequence: TTC
agatttgagatgaccactgt

SEQ ID NO: 71732 - DNA, 20 bp, Artificial Sequence
  Description of Artificial Sequence: Synthetic oligonucleotide
  Target: SCNA; (+) strand; PAM type: YTN; PAM sequence: TTT
gagatgaccactgtttcaac

SEQ ID NO: 71733 - DNA, 20 bp, Artificial Sequence
  Description of Artificial Sequence: Synthetic oligonucleotide
  Target: SCNA; (+) strand; PAM type: YTN; PAM sequence: TTG
agatgaccactgtttcaaca

SEQ ID NO: 71734 - DNA, 20 bp, Artificial Sequence
  Description of Artificial Sequence: Synthetic oligonucleotide
  Target: SCNA; (+) strand; PAM type: YTN; PAM sequence: CTG
tttcaacaatatttcagtta

SEQ ID NO: 71735 - DNA, 20 bp, Artificial Sequence
  Description of Artificial Sequence: Synthetic oligonucleotide
  Target: SCNA; (+) strand; PAM type: YTN; PAM sequence: TTT
caacaatatttcagttataa

SEQ ID NO: 71736 - DNA, 20 bp, Artificial Sequence
  Description of Artificial Sequence: Synthetic oligonucleotide
  Target: SCNA; (+) strand; PAM type: YTN; PAM sequence: TTC
aacaatatttcagttataat

SEQ ID NO: 71737 - DNA, 20 bp, Artificial Sequence
  Description of Artificial Sequence: Synthetic oligonucleotide
  Target: SCNA; (+) strand; PAM type: YTN; PAM sequence: TTT
cagttataattctttctcta

SEQ ID NO: 71738 - DNA, 20 bp, Artificial Sequence
  Description of Artificial Sequence: Synthetic oligonucleotide
  Target: SCNA; (+) strand; PAM type: YTN; PAM sequence: TTC
agttataattctttctctat

SEQ ID NO: 71739 - DNA, 20 bp, Artificial Sequence
  Description of Artificial Sequence: Synthetic oligonucleotide
  Target: SCNA; (+) strand; PAM type: YTN; PAM sequence: TTA
taattctttctctatattca

SEQ ID NO: 71740 - DNA, 20 bp, Artificial Sequence
  Description of Artificial Sequence: Synthetic oligonucleotide
  Target: SCNA; (+) strand; PAM type: YTN; PAM sequence: TTC
tttctctatattcatttagg

SEQ ID NO: 71741 - DNA, 20 bp, Artificial Sequence
  Description of Artificial Sequence: Synthetic oligonucleotide
  Target: SCNA; (+) strand; PAM type: YTN; PAM sequence: CTT
tctctatattcatttaggga

SEQ ID NO: 71742 - DNA, 20 bp, Artificial Sequence
  Description of Artificial Sequence: Synthetic oligonucleotide
  Target: SCNA; (+) strand; PAM type: YTN; PAM sequence: TTT
ctctatattcatttagggaa

SEQ ID NO: 71743 - DNA, 20 bp, Artificial Sequence
  Description of Artificial Sequence: Synthetic oligonucleotide
  Target: SCNA; (+) strand; PAM type: YTN; PAM sequence: TTC
tctatattcatttagggaaa

SEQ ID NO: 71744 - DNA, 20 bp, Artificial Sequence
  Description of Artificial Sequence: Synthetic oligonucleotide
  Target: SCNA; (+) strand; PAM type: YTN; PAM sequence: CTC
tatattcatttagggaaatt

SEQ ID NO: 71745 - DNA, 20 bp, Artificial Sequence
  Description of Artificial Sequence: Synthetic oligonucleotide
  Target: SCNA; (+) strand; PAM type: YTN; PAM sequence: CTA
tattcatttagggaaatttg

SEQ ID NO: 71746 - DNA, 20 bp, Artificial Sequence
  Description of Artificial Sequence: Synthetic oligonucleotide
  Target: SCNA; (+) strand; PAM type: YTN; PAM sequence: TTC
atttagggaaatttgattct

SEQ ID NO: 71747 - DNA, 20 bp, Artificial Sequence
  Description of Artificial Sequence: Synthetic oligonucleotide
  Target: SCNA; (+) strand; PAM type: YTN; PAM sequence: TTT
agggaaatttgattctgaaa

SEQ ID NO: 71748 - DNA, 20 bp, Artificial Sequence
  Description of Artificial Sequence: Synthetic oligonucleotide
  Target: SCNA; (+) strand; PAM type: YTN; PAM sequence: TTA
gggaaatttgattctgaaaa

SEQ ID NO: 71749 - DNA, 20 bp, Artificial Sequence
  Description of Artificial Sequence: Synthetic oligonucleotide
  Target: SCNA; (+) strand; PAM type: YTN; PAM sequence: TTT
gattctgaaaaatacaaata

SEQ ID NO: 71750 - DNA, 20 bp, Artificial Sequence
  Description of Artificial Sequence: Synthetic oligonucleotide
  Target: SCNA; (+) strand; PAM type: YTN; PAM sequence: TTG
attctgaaaaatacaaatag

SEQ ID NO: 71751 - DNA, 20 bp, Artificial Sequence
  Description of Artificial Sequence: Synthetic oligonucleotide
  Target: SCNA; (+) strand; PAM type: YTN; PAM sequence: TTC
tgaaaaatacaaatagcttc

SEQ ID NO: 71752 - DNA, 20 bp, Artificial Sequence
  Description of Artificial Sequence: Synthetic oligonucleotide
  Target: SCNA; (+) strand; PAM type: YTN; PAM sequence: CTG
aaaaatacaaatagcttcct

SEQ ID NO: 71753 - DNA, 20 bp, Artificial Sequence
  Description of Artificial Sequence: Synthetic oligonucleotide
  Target: SCNA; (+) strand; PAM type: YTN; PAM sequence: CTT
cctttctcctgagctaggac

SEQ ID NO: 71754 - DNA, 20 bp, Artificial Sequence
  Description of Artificial Sequence: Synthetic oligonucleotide
  Target: SCNA; (+) strand; PAM type: YTN; PAM sequence: TTC
ctttctcctgagctaggact

SEQ ID NO: 71755 - DNA, 20 bp, Artificial Sequence
  Description of Artificial Sequence: Synthetic oligonucleotide
  Target: SCNA; (+) strand; PAM type: YTN; PAM sequence: CTT
tctcctgagctaggactgta

SEQ ID NO: 71756 - DNA, 20 bp, Artificial Sequence
  Description of Artificial Sequence: Synthetic oligonucleotide
  Target: SCNA; (+) strand; PAM type: YTN; PAM sequence: TTT
ctcctgagctaggactgtat

SEQ ID NO: 71757 - DNA, 20 bp, Artificial Sequence
  Description of Artificial Sequence: Synthetic oligonucleotide
  Target: SCNA; (+) strand; PAM type: YTN; PAM sequence: TTC
tcctgagctaggactgtatt

SEQ ID NO: 71758 - DNA, 20 bp, Artificial Sequence
  Description of Artificial Sequence: Synthetic oligonucleotide
  Target: SCNA; (+) strand; PAM type: YTN; PAM sequence: CTC
ctgagctaggactgtattta

SEQ ID NO: 71759 - DNA, 20 bp, Artificial Sequence
  Description of Artificial Sequence: Synthetic oligonucleotide
  Target: SCNA; (+) strand; PAM type: YTN; PAM sequence: CTG
agctaggactgtatttagaa

SEQ ID NO: 71760 - DNA, 20 bp, Artificial Sequence
  Description of Artificial Sequence: Synthetic oligonucleotide
  Target: SCNA; (+) strand; PAM type: YTN; PAM sequence: CTA
ggactgtatttagaagggaa

SEQ ID NO: 71761 - DNA, 20 bp, Artificial Sequence
  Description of Artificial Sequence: Synthetic oligonucleotide
  Target: SCNA; (+) strand; PAM type: YTN; PAM sequence: CTG
tatttagaagggaataaatt

SEQ ID NO: 71762 - DNA, 20 bp, Artificial Sequence
  Description of Artificial Sequence: Synthetic oligonucleotide
  Target: SCNA; (+) strand; PAM type: YTN; PAM sequence: TTT
agaagggaataaattgtaga

SEQ ID NO: 71763 - DNA, 20 bp, Artificial Sequence
  Description of Artificial Sequence: Synthetic oligonucleotide
  Target: SCNA; (+) strand; PAM type: YTN; PAM sequence: TTA
gaagggaataaattgtagat

SEQ ID NO: 71764 - DNA, 20 bp, Artificial Sequence
  Description of Artificial Sequence: Synthetic oligonucleotide
  Target: SCNA; (+) strand; PAM type: YTN; PAM sequence: TTG
tagattttattaaaatttga

SEQ ID NO: 71765 - DNA, 20 bp, Artificial Sequence
  Description of Artificial Sequence: Synthetic oligonucleotide
  Target: SCNA; (+) strand; PAM type: YTN; PAM sequence: TTT
tattaaaatttgatcacatt

SEQ ID NO: 71766 - DNA, 20 bp, Artificial Sequence
  Description of Artificial Sequence: Synthetic oligonucleotide
  Target: SCNA; (+) strand; PAM type: YTN; PAM sequence: TTT
attaaaatttgatcacattt

SEQ ID NO: 71767 - DNA, 20 bp, Artificial Sequence
  Description of Artificial Sequence: Synthetic oligonucleotide
  Target: SCNA; (+) strand; PAM type: YTN; PAM sequence: TTA
ttaaaatttgatcacatttt

SEQ ID NO: 71768 - DNA, 20 bp, Artificial Sequence
  Description of Artificial Sequence: Synthetic oligonucleotide
  Target: SCNA; (+) strand; PAM type: YTN; PAM sequence: TTA
aaatttgatcacattttctt

SEQ ID NO: 71769 - DNA, 20 bp, Artificial Sequence
  Description of Artificial Sequence: Synthetic oligonucleotide
  Target: SCNA; (+) strand; PAM type: YTN; PAM sequence: TTT
gatcacattttctttttttg

SEQ ID NO: 71770 - DNA, 20 bp, Artificial Sequence
  Description of Artificial Sequence: Synthetic oligonucleotide
  Target: SCNA; (+) strand; PAM type: YTN; PAM sequence: TTG
atcacattttctttttttgt

SEQ ID NO: 71771 - DNA, 20 bp, Artificial Sequence
  Description of Artificial Sequence: Synthetic oligonucleotide
  Target: SCNA; (+) strand; PAM type: YTN; PAM sequence: TTT
tctttttttgtgctacgaca

SEQ ID NO: 71772 - DNA, 20 bp, Artificial Sequence
  Description of Artificial Sequence: Synthetic oligonucleotide
  Target: SCNA; (+) strand; PAM type: YTN; PAM sequence: TTT
ctttttttgtgctacgacac

SEQ ID NO: 71773 - DNA, 20 bp, Artificial Sequence
  Description of Artificial Sequence: Synthetic oligonucleotide
  Target: SCNA; (+) strand; PAM type: YTN; PAM sequence: TTC
tttttttgtgctacgacaca

SEQ ID NO: 71774 - DNA, 20 bp, Artificial Sequence
  Description of Artificial Sequence: Synthetic oligonucleotide
  Target: SCNA; (+) strand; PAM type: YTN; PAM sequence: CTT
tttttgtgctacgacacagt

SEQ ID NO: 71775 - DNA, 20 bp, Artificial Sequence
  Description of Artificial Sequence: Synthetic oligonucleotide
  Target: SCNA; (+) strand; PAM type: YTN; PAM sequence: TTT
ttttgtgctacgacacagta

SEQ ID NO: 71776 - DNA, 20 bp, Artificial Sequence
  Description of Artificial Sequence: Synthetic oligonucleotide
  Target: SCNA; (+) strand; PAM type: YTN; PAM sequence: TTT
tttgtgctacgacacagtag

SEQ ID NO: 71777 - DNA, 20 bp, Artificial Sequence
  Description of Artificial Sequence: Synthetic oligonucleotide
  Target: SCNA; (+) strand; PAM type: YTN; PAM sequence: TTT
ttgtgctacgacacagtagc

SEQ ID NO: 71778 - DNA, 20 bp, Artificial Sequence
  Description of Artificial Sequence: Synthetic oligonucleotide
  Target: SCNA; (+) strand; PAM type: YTN; PAM sequence: TTT
tgtgctacgacacagtagca

SEQ ID NO: 71779 - DNA, 20 bp, Artificial Sequence
  Description of Artificial Sequence: Synthetic oligonucleotide
  Target: SCNA; (+) strand; PAM type: YTN; PAM sequence: TTT
gtgctacgacacagtagcaa

SEQ ID NO: 71780 - DNA, 20 bp, Artificial Sequence
  Description of Artificial Sequence: Synthetic oligonucleotide
  Target: SCNA; (+) strand; PAM type: YTN; PAM sequence: TTG
tgctacgacacagtagcaat

SEQ ID NO: 71781 - DNA, 20 bp, Artificial Sequence
  Description of Artificial Sequence: Synthetic oligonucleotide
  Target: SCNA; (+) strand; PAM type: YTN; PAM sequence: CTA
cgacacagtagcaatgtaga

SEQ ID NO: 71782 - DNA, 20 bp, Artificial Sequence
  Description of Artificial Sequence: Synthetic oligonucleotide
  Target: SCNA; (+) strand; PAM type: YTN; PAM sequence: TTG
aaggcttttacatgtatttt

SEQ ID NO: 71783 - DNA, 20 bp, Artificial Sequence
  Description of Artificial Sequence: Synthetic oligonucleotide
  Target: SCNA; (+) strand; PAM type: YTN; PAM sequence: CTT
ttacatgtatttttaaaatt

SEQ ID NO: 71784 - DNA, 20 bp, Artificial Sequence
  Description of Artificial Sequence: Synthetic oligonucleotide
  Target: SCNA; (+) strand; PAM type: YTN; PAM sequence: TTT
tacatgtatttttaaaattg

SEQ ID NO: 71785 - DNA, 20 bp, Artificial Sequence
  Description of Artificial Sequence: Synthetic oligonucleotide
  Target: SCNA; (+) strand; PAM type: YTN; PAM sequence: TTT
acatgtatttttaaaattgc

SEQ ID NO: 71786 - DNA, 20 bp, Artificial Sequence
  Description of Artificial Sequence: Synthetic oligonucleotide
  Target: SCNA; (+) strand; PAM type: YTN; PAM sequence: TTA
catgtatttttaaaattgcc

SEQ ID NO: 71787 - DNA, 20 bp, Artificial Sequence
  Description of Artificial Sequence: Synthetic oligonucleotide
  Target: SCNA; (+) strand; PAM type: YTN; PAM sequence: TTT
ttaaaattgccatagagaat

SEQ ID NO: 71788 - DNA, 20 bp, Artificial Sequence
  Description of Artificial Sequence: Synthetic oligonucleotide
  Target: SCNA; (+) strand; PAM type: YTN; PAM sequence: TTT
taaaattgccatagagaatt

SEQ ID NO: 71789 - DNA, 20 bp, Artificial Sequence
  Description of Artificial Sequence: Synthetic oligonucleotide
  Target: SCNA; (+) strand; PAM type: YTN; PAM sequence: TTT
aaaattgccatagagaatta

SEQ ID NO: 71790 - DNA, 20 bp, Artificial Sequence
  Description of Artificial Sequence: Synthetic oligonucleotide
  Target: SCNA; (+) strand; PAM type: YTN; PAM sequence: TTA
aaattgccatagagaattat

SEQ ID NO: 71791 - DNA, 20 bp, Artificial Sequence
  Description of Artificial Sequence: Synthetic oligonucleotide
  Target: SCNA; (+) strand; PAM type: YTN; PAM sequence: TTG
ccatagagaattatttgtat

SEQ ID NO: 71792 - DNA, 20 bp, Artificial Sequence
  Description of Artificial Sequence: Synthetic oligonucleotide
  Target: SCNA; (+) strand; PAM type: YTN; PAM sequence: TTA
tttgtattaatcatagattt

SEQ ID NO: 71793 - DNA, 20 bp, Artificial Sequence
  Description of Artificial Sequence: Synthetic oligonucleotide
  Target: SCNA; (+) strand; PAM type: YTN; PAM sequence: TTT
gtattaatcatagatttcca

SEQ ID NO: 71794 - DNA, 20 bp, Artificial Sequence
  Description of Artificial Sequence: Synthetic oligonucleotide
  Target: SCNA; (+) strand; PAM type: YTN; PAM sequence: TTG
tattaatcatagatttccaa

SEQ ID NO: 71795 - DNA, 20 bp, Artificial Sequence
  Description of Artificial Sequence: Synthetic oligonucleotide
  Target: SCNA; (+) strand; PAM type: YTN; PAM sequence: TTA
atcatagatttccaaggctg

SEQ ID NO: 71796 - DNA, 20 bp, Artificial Sequence
  Description of Artificial Sequence: Synthetic oligonucleotide
  Target: SCNA; (+) strand; PAM type: YTN; PAM sequence: TTT
ccaaggctgcaaaagctaaa

SEQ ID NO: 71797 - DNA, 20 bp, Artificial Sequence
  Description of Artificial Sequence: Synthetic oligonucleotide
  Target: SCNA; (+) strand; PAM type: YTN; PAM sequence: TTC
caaggctgcaaaagctaaat

SEQ ID NO: 71798 - DNA, 20 bp, Artificial Sequence
  Description of Artificial Sequence: Synthetic oligonucleotide
  Target: SCNA; (+) strand; PAM type: YTN; PAM sequence: CTG
caaaagctaaatagtaaagc

SEQ ID NO: 71799 - DNA, 20 bp, Artificial Sequence
  Description of Artificial Sequence: Synthetic oligonucleotide
  Target: SCNA; (+) strand; PAM type: YTN; PAM sequence: CTA
aatagtaaagcatataataa

SEQ ID NO: 71800 - DNA, 20 bp, Artificial Sequence
  Description of Artificial Sequence: Synthetic oligonucleotide
  Target: SCNA; (+) strand; PAM type: YTN; PAM sequence: TTA
atttgaaaaaaaattccagc

SEQ ID NO: 71801 - DNA, 20 bp, Artificial Sequence
  Description of Artificial Sequence: Synthetic oligonucleotide
  Target: SCNA; (+) strand; PAM type: YTN; PAM sequence: TTT
gaaaaaaaattccagctagc

SEQ ID NO: 71802 - DNA, 20 bp, Artificial Sequence
  Description of Artificial Sequence: Synthetic oligonucleotide
  Target: SCNA; (+) strand; PAM type: YTN; PAM sequence: TTG
aaaaaaaattccagctagca

SEQ ID NO: 71803 - DNA, 20 bp, Artificial Sequence
  Description of Artificial Sequence: Synthetic oligonucleotide
  Target: SCNA; (+) strand; PAM type: YTN; PAM sequence: TTC
cagctagcaaaacatgagtc

SEQ ID NO: 71804 - DNA, 20 bp, Artificial Sequence
  Description of Artificial Sequence: Synthetic oligonucleotide
  Target: SCNA; (+) strand; PAM type: YTN; PAM sequence: CTA
gcaaaacatgagtctagatg

SEQ ID NO: 71805 - DNA, 20 bp, Artificial Sequence
  Description of Artificial Sequence: Synthetic oligonucleotide
  Target: SCNA; (+) strand; PAM type: YTN; PAM sequence: CTA
gatgtagatatcatgttcaa

SEQ ID NO: 71806 - DNA, 20 bp, Artificial Sequence
  Description of Artificial Sequence: Synthetic oligonucleotide
  Target: SCNA; (+) strand; PAM type: YTN; PAM sequence: TTC
aaaaatcacaaagcagattg

SEQ ID NO: 71807 - DNA, 20 bp, Artificial Sequence
  Description of Artificial Sequence: Synthetic oligonucleotide
  Target: SCNA; (+) strand; PAM type: YTN; PAM sequence: TTG
ccagcaaaaaattgaaccaa

SEQ ID NO: 71808 - DNA, 20 bp, Artificial Sequence
  Description of Artificial Sequence: Synthetic oligonucleotide
  Target: SCNA; (+) strand; PAM type: YTN; PAM sequence: TTG
aaccaagtttttccccttca

SEQ ID NO: 71809 - DNA, 20 bp, Artificial Sequence
  Description of Artificial Sequence: Synthetic oligonucleotide
  Target: SCNA; (+) strand; PAM type: YTN; PAM sequence: TTT
ttccccttcagaaaactagc

SEQ ID NO: 71810 - DNA, 20 bp, Artificial Sequence
  Description of Artificial Sequence: Synthetic oligonucleotide
  Target: SCNA; (+) strand; PAM type: YTN; PAM sequence: TTT
tccccttcagaaaactagct

SEQ ID NO: 71811 - DNA, 20 bp, Artificial Sequence
  Description of Artificial Sequence: Synthetic oligonucleotide
  Target: SCNA; (+) strand; PAM type: YTN; PAM sequence: TTT
ccccttcagaaaactagctt

SEQ ID NO: 71812 - DNA, 20 bp, Artificial Sequence
  Description of Artificial Sequence: Synthetic oligonucleotide
  Target: SCNA; (+) strand; PAM type: YTN; PAM sequence: TTC
cccttcagaaaactagcttt

SEQ ID NO: 71813 - DNA, 20 bp, Artificial Sequence
  Description of Artificial Sequence: Synthetic oligonucleotide
  Target: SCNA; (+) strand; PAM type: YTN; PAM sequence: CTT
cagaaaactagctttattta

SEQ ID NO: 71814 - DNA, 20 bp, Artificial Sequence
  Description of Artificial Sequence: Synthetic oligonucleotide
  Target: SCNA; (+) strand; PAM type: YTN; PAM sequence: TTC
agaaaactagctttatttaa

SEQ ID NO: 71815 - DNA, 20 bp, Artificial Sequence
  Description of Artificial Sequence: Synthetic oligonucleotide
  Target: SCNA; (+) strand; PAM type: YTN; PAM sequence: CTA
gctttatttaaaaaaatttc

SEQ ID NO: 71816 - DNA, 20 bp, Artificial Sequence
  Description of Artificial Sequence: Synthetic oligonucleotide
  Target: SCNA; (+) strand; PAM type: YTN; PAM sequence: CTT
tatttaaaaaaatttcctaa

SEQ ID NO: 71817 - DNA, 20 bp, Artificial Sequence
  Description of Artificial Sequence: Synthetic oligonucleotide
  Target: SCNA; (+) strand; PAM type: YTN; PAM sequence: TTT
atttaaaaaaatttcctaat

SEQ ID NO: 71818 - DNA, 20 bp, Artificial Sequence
  Description of Artificial Sequence: Synthetic oligonucleotide
  Target: SCNA; (+) strand; PAM type: YTN; PAM sequence: TTA
tttaaaaaaatttcctaata

SEQ ID NO: 71819 - DNA, 20 bp, Artificial Sequence
  Description of Artificial Sequence: Synthetic oligonucleotide
  Target: SCNA; (+) strand; PAM type: YTN; PAM sequence: TTT
aaaaaaatttcctaatattt

SEQ ID NO: 71820 - DNA, 20 bp, Artificial Sequence
  Description of Artificial Sequence: Synthetic oligonucleotide
  Target: SCNA; (+) strand; PAM type: YTN; PAM sequence: TTA
aaaaaatttcctaatattta

SEQ ID NO: 71821 - DNA, 20 bp, Artificial Sequence
  Description of Artificial Sequence: Synthetic oligonucleotide
  Target: SCNA; (+) strand; PAM type: YTN; PAM sequence: TTT
cctaatatttaaattgattc

SEQ ID NO: 71822 - DNA, 20 bp, Artificial Sequence
  Description of Artificial Sequence: Synthetic oligonucleotide
  Target: SCNA; (+) strand; PAM type: YTN; PAM sequence: TTC
ctaatatttaaattgattca

SEQ ID NO: 71823 - DNA, 20 bp, Artificial Sequence
  Description of Artificial Sequence: Synthetic oligonucleotide
  Target: SCNA; (+) strand; PAM type: YTN; PAM sequence: CTA
atatttaaattgattcacac

SEQ ID NO: 71824 - DNA, 20 bp, Artificial Sequence
  Description of Artificial Sequence: Synthetic oligonucleotide
  Target: SCNA; (+) strand; PAM type: YTN; PAM sequence: TTT
aaattgattcacacgtttat

SEQ ID NO: 71825 - DNA, 20 bp, Artificial Sequence
  Description of Artificial Sequence: Synthetic oligonucleotide
  Target: SCNA; (+) strand; PAM type: YTN; PAM sequence: TTA
aattgattcacacgtttata

SEQ ID NO: 71826 - DNA, 20 bp, Artificial Sequence
  Description of Artificial Sequence: Synthetic oligonucleotide
  Target: SCNA; (+) strand; PAM type: YTN; PAM sequence: TTG
attcacacgtttataactat

SEQ ID NO: 71827 - DNA, 20 bp, Artificial Sequence
  Description of Artificial Sequence: Synthetic oligonucleotide
  Target: SCNA; (+) strand; PAM type: YTN; PAM sequence: TTC
acacgtttataactatacaa

SEQ ID NO: 71828 - DNA, 20 bp, Artificial Sequence
  Description of Artificial Sequence: Synthetic oligonucleotide
  Target: SCNA; (+) strand; PAM type: YTN; PAM sequence: TTT
ataactatacaagggtttcc

SEQ ID NO: 71829 - DNA, 20 bp, Artificial Sequence
  Description of Artificial Sequence: Synthetic oligonucleotide
  Target: SCNA; (+) strand; PAM type: YTN; PAM sequence: TTA
taactatacaagggtttcct

SEQ ID NO: 71830 - DNA, 20 bp, Artificial Sequence
  Description of Artificial Sequence: Synthetic oligonucleotide
  Target: SCNA; (+) strand; PAM type: YTN; PAM sequence: CTA
tacaagggtttccttgtttc

SEQ ID NO: 71831 - DNA, 20 bp, Artificial Sequence
  Description of Artificial Sequence: Synthetic oligonucleotide
  Target: SCNA; (+) strand; PAM type: YTN; PAM sequence: TTT
ccttgtttcatcaaagaaat

SEQ ID NO: 71832 - DNA, 20 bp, Artificial Sequence
  Description of Artificial Sequence: Synthetic oligonucleotide
  Target: SCNA; (+) strand; PAM type: YTN; PAM sequence: TTC
cttgtttcatcaaagaaata

SEQ ID NO: 71833 - DNA, 20 bp, Artificial Sequence
  Description of Artificial Sequence: Synthetic oligonucleotide
  Target: SCNA; (+) strand; PAM type: YTN; PAM sequence: CTT
gtttcatcaaagaaataagt

SEQ ID NO: 71834 - DNA, 20 bp, Artificial Sequence
  Description of Artificial Sequence: Synthetic oligonucleotide
  Target: SCNA; (+) strand; PAM type: YTN; PAM sequence: TTG
tttcatcaaagaaataagta

SEQ ID NO: 71835 - DNA, 20 bp, Artificial Sequence
  Description of Artificial Sequence: Synthetic oligonucleotide
  Target: SCNA; (+) strand; PAM type: YTN; PAM sequence: TTT
catcaaagaaataagtatga

SEQ ID NO: 71836 - DNA, 20 bp, Artificial Sequence
  Description of Artificial Sequence: Synthetic oligonucleotide
  Target: SCNA; (+) strand; PAM type: YTN; PAM sequence: TTC
atcaaagaaataagtatgaa

SEQ ID NO: 71837 - DNA, 20 bp, Artificial Sequence
  Description of Artificial Sequence: Synthetic oligonucleotide
  Target: SCNA; (+) strand; PAM type: YTN; PAM sequence: TTT
tagtataaaagtttacaaag

SEQ ID NO: 71838 - DNA, 20 bp, Artificial Sequence
  Description of Artificial Sequence: Synthetic oligonucleotide
  Target: SCNA; (+) strand; PAM type: YTN; PAM sequence: TTT
agtataaaagtttacaaagt

SEQ ID NO: 71839 - DNA, 20 bp, Artificial Sequence
  Description of Artificial Sequence: Synthetic oligonucleotide
  Target: SCNA; (+) strand; PAM type: YTN; PAM sequence: TTA
gtataaaagtttacaaagtt

SEQ ID NO: 71840 - DNA, 20 bp, Artificial Sequence
  Description of Artificial Sequence: Synthetic oligonucleotide
  Target: SCNA; (+) strand; PAM type: YTN; PAM sequence: TTT
acaaagtttattcacactcg

SEQ ID NO: 71841 - DNA, 20 bp, Artificial Sequence
  Description of Artificial Sequence: Synthetic oligonucleotide
  Target: SCNA; (+) strand; PAM type: YTN; PAM sequence: TTA
caaagtttattcacactcgg

SEQ ID NO: 71842 - DNA, 20 bp, Artificial Sequence
  Description of Artificial Sequence: Synthetic oligonucleotide
  Target: SCNA; (+) strand; PAM type: YTN; PAM sequence: TTT
attcacactcggaacaaagg

SEQ ID NO: 71843 - DNA, 20 bp, Artificial Sequence
  Description of Artificial Sequence: Synthetic oligonucleotide
  Target: SCNA; (+) strand; PAM type: YTN; PAM sequence: TTA
ttcacactcggaacaaagga

SEQ ID NO: 71844 - DNA, 20 bp, Artificial Sequence
  Description of Artificial Sequence: Synthetic oligonucleotide
  Target: SCNA; (+) strand; PAM type: YTN; PAM sequence: TTC
acactcggaacaaaggaata

SEQ ID NO: 71845 - DNA, 20 bp, Artificial Sequence
  Description of Artificial Sequence: Synthetic oligonucleotide
  Target: SCNA; (+) strand; PAM type: YTN; PAM sequence: CTC
ggaacaaaggaataagtagg

SEQ ID NO: 71846 - DNA, 20 bp, Artificial Sequence
  Description of Artificial Sequence: Synthetic oligonucleotide
  Target: SCNA; (+) strand; PAM type: YTN; PAM sequence: CTA
aaaacaaatgaattcttttc

SEQ ID NO: 71847 - DNA, 20 bp, Artificial Sequence
  Description of Artificial Sequence: Synthetic oligonucleotide
  Target: SCNA; (+) strand; PAM type: YTN; PAM sequence: TTC
ttttccccatccctctcgtt

SEQ ID NO: 71848 - DNA, 20 bp, Artificial Sequence
  Description of Artificial Sequence: Synthetic oligonucleotide
  Target: SCNA; (+) strand; PAM type: YTN; PAM sequence: CTT
ttccccatccctctcgtttg

SEQ ID NO: 71849 - DNA, 20 bp, Artificial Sequence
  Description of Artificial Sequence: Synthetic oligonucleotide
  Target: SCNA; (+) strand; PAM type: YTN; PAM sequence: TTT
tccccatccctctcgtttgt

SEQ ID NO: 71850 - DNA, 20 bp, Artificial Sequence
  Description of Artificial Sequence: Synthetic oligonucleotide
  Target: SCNA; (+) strand; PAM type: YTN; PAM sequence: TTT
ccccatccctctcgtttgtc

SEQ ID NO: 71851 - DNA, 20 bp, Artificial Sequence
  Description of Artificial Sequence: Synthetic oligonucleotide
  Target: SCNA; (+) strand; PAM type: YTN; PAM sequence: TTC
cccatccctctcgtttgtct

SEQ ID NO: 71852 - DNA, 20 bp, Artificial Sequence
  Description of Artificial Sequence: Synthetic oligonucleotide
  Target: SCNA; (+) strand; PAM type: YTN; PAM sequence: CTC
tcgtttgtctccaatcagtt

SEQ ID NO: 71853 - DNA, 20 bp, Artificial Sequence
  Description of Artificial Sequence: Synthetic oligonucleotide
  Target: SCNA; (+) strand; PAM type: YTN; PAM sequence: CTC
gtttgtctccaatcagttaa

SEQ ID NO: 71854 - DNA, 20 bp, Artificial Sequence
  Description of Artificial Sequence: Synthetic oligonucleotide
  Target: SCNA; (+) strand; PAM type: YTN; PAM sequence: TTT
gtctccaatcagttaaatcc

SEQ ID NO: 71855 - DNA, 20 bp, Artificial Sequence
  Description of Artificial Sequence: Synthetic oligonucleotide
  Target: SCNA; (+) strand; PAM type: YTN; PAM sequence: TTG
tctccaatcagttaaatcct

SEQ ID NO: 71856 - DNA, 20 bp, Artificial Sequence
  Description of Artificial Sequence: Synthetic oligonucleotide
  Target: SCNA; (+) strand; PAM type: YTN; PAM sequence: CTC
caatcagttaaatcctttta

SEQ ID NO: 71857 - DNA, 20 bp, Artificial Sequence
  Description of Artificial Sequence: Synthetic oligonucleotide
  Target: SCNA; (+) strand; PAM type: YTN; PAM sequence: TTA
aatccttttaatgatatatc

SEQ ID NO: 71858 - DNA, 20 bp, Artificial Sequence
  Description of Artificial Sequence: Synthetic oligonucleotide
  Target: SCNA; (+) strand; PAM type: YTN; PAM sequence: CTT
ttaatgatatatcataagta

SEQ ID NO: 71859 - DNA, 20 bp, Artificial Sequence
  Description of Artificial Sequence: Synthetic oligonucleotide
  Target: SCNA; (+) strand; PAM type: YTN; PAM sequence: TTT
taatgatatatcataagtag

SEQ ID NO: 71860 - DNA, 20 bp, Artificial Sequence
  Description of Artificial Sequence: Synthetic oligonucleotide
  Target: SCNA; (+) strand; PAM type: YTN; PAM sequence: TTT
aatgatatatcataagtagc

SEQ ID NO: 71861 - DNA, 20 bp, Artificial Sequence
  Description of Artificial Sequence: Synthetic oligonucleotide
  Target: SCNA; (+) strand; PAM type: YTN; PAM sequence: TTA
atgatatatcataagtagct

SEQ ID NO: 71862 - DNA, 20 bp, Artificial Sequence
  Description of Artificial Sequence: Synthetic oligonucleotide
  Target: SCNA; (+) strand; PAM type: YTN; PAM sequence: CTT
catgctttagttcacattga

SEQ ID NO: 71863 - DNA, 20 bp, Artificial Sequence
  Description of Artificial Sequence: Synthetic oligonucleotide
  Target: SCNA; (+) strand; PAM type: YTN; PAM sequence: TTC
atgctttagttcacattgac

SEQ ID NO: 71864 - DNA, 20 bp, Artificial Sequence
  Description of Artificial Sequence: Synthetic oligonucleotide
  Target: SCNA; (+) strand; PAM type: YTN; PAM sequence: CTT
tagttcacattgacgatatt

SEQ ID NO: 71865 - DNA, 20 bp, Artificial Sequence
  Description of Artificial Sequence: Synthetic oligonucleotide
  Target: SCNA; (+) strand; PAM type: YTN; PAM sequence: TTT
agttcacattgacgatattc

SEQ ID NO: 71866 - DNA, 20 bp, Artificial Sequence
  Description of Artificial Sequence: Synthetic oligonucleotide
  Target: SCNA; (+) strand; PAM type: YTN; PAM sequence: TTA
gttcacattgacgatattct

SEQ ID NO: 71867 - DNA, 20 bp, Artificial Sequence
  Description of Artificial Sequence: Synthetic oligonucleotide
  Target: SCNA; (+) strand; PAM type: YTN; PAM sequence: TTC
acattgacgatattcttata

SEQ ID NO: 71868 - DNA, 20 bp, Artificial Sequence
  Description of Artificial Sequence: Synthetic oligonucleotide
  Target: SCNA; (+) strand; PAM type: YTN; PAM sequence: TTG
acgatattcttatatctaca

SEQ ID NO: 71869 - DNA, 20 bp, Artificial Sequence
  Description of Artificial Sequence: Synthetic oligonucleotide
  Target: SCNA; (+) strand; PAM type: YTN; PAM sequence: TTC
ttatatctacatcattaata

SEQ ID NO: 71870 - DNA, 20 bp, Artificial Sequence
  Description of Artificial Sequence: Synthetic oligonucleotide
  Target: SCNA; (+) strand; PAM type: YTN; PAM sequence: CTT
atatctacatcattaataat

SEQ ID NO: 71871 - DNA, 20 bp, Artificial Sequence
  Description of Artificial Sequence: Synthetic oligonucleotide
  Target: SCNA; (+) strand; PAM type: YTN; PAM sequence: TTA
tatctacatcattaataatc

SEQ ID NO: 71872 - DNA, 20 bp, Artificial Sequence
  Description of Artificial Sequence: Synthetic oligonucleotide
  Target: SCNA; (+) strand; PAM type: YTN; PAM sequence: CTA
catcattaataatcaaaata

SEQ ID NO: 71873 - DNA, 20 bp, Artificial Sequence
  Description of Artificial Sequence: Synthetic oligonucleotide
  Target: SCNA; (+) strand; PAM type: YTN; PAM sequence: TTA
ataatcaaaatagtctttct

SEQ ID NO: 71874 - DNA, 20 bp, Artificial Sequence
  Description of Artificial Sequence: Synthetic oligonucleotide
  Target: SCNA; (+) strand; PAM type: YTN; PAM sequence: CTT
tctgtctttagttttgctgt

SEQ ID NO: 71875 - DNA, 20 bp, Artificial Sequence
  Description of Artificial Sequence: Synthetic oligonucleotide
  Target: SCNA; (+) strand; PAM type: YTN; PAM sequence: TTT
ctgtctttagttttgctgtc

SEQ ID NO: 71876 - DNA, 20 bp, Artificial Sequence
  Description of Artificial Sequence: Synthetic oligonucleotide
  Target: SCNA; (+) strand; PAM type: YTN; PAM sequence: TTC
tgtctttagttttgctgtct

SEQ ID NO: 71877 - DNA, 20 bp, Artificial Sequence
  Description of Artificial Sequence: Synthetic oligonucleotide
  Target: SCNA; (+) strand; PAM type: YTN; PAM sequence: CTG
tctttagttttgctgtctct

SEQ ID NO: 71878 - DNA, 20 bp, Artificial Sequence
  Description of Artificial Sequence: Synthetic oligonucleotide
  Target: SCNA; (+) strand; PAM type: YTN; PAM sequence: CTT
tagttttgctgtctctaagt

SEQ ID NO: 71879 - DNA, 20 bp, Artificial Sequence
  Description of Artificial Sequence: Synthetic oligonucleotide
  Target: SCNA; (+) strand; PAM type: YTN; PAM sequence: TTT
agttttgctgtctctaagtc

SEQ ID NO: 71880 - DNA, 20 bp, Artificial Sequence
  Description of Artificial Sequence: Synthetic oligonucleotide
  Target: SCNA; (+) strand; PAM type: YTN; PAM sequence: TTA
gttttgctgtctctaagtca

SEQ ID NO: 71881 - DNA, 20 bp, Artificial Sequence
  Description of Artificial Sequence: Synthetic oligonucleotide
  Target: SCNA; (+) strand; PAM type: YTN; PAM sequence: TTT
tgctgtctctaagtcagaac

SEQ ID NO: 71882 - DNA, 20 bp, Artificial Sequence
  Description of Artificial Sequence: Synthetic oligonucleotide
  Target: SCNA; (+) strand; PAM type: YTN; PAM sequence: TTT
gctgtctctaagtcagaact

SEQ ID NO: 71883 - DNA, 20 bp, Artificial Sequence
  Description of Artificial Sequence: Synthetic oligonucleotide
  Target: SCNA; (+) strand; PAM type: YTN; PAM sequence: TTG
ctgtctctaagtcagaactc

SEQ ID NO: 71884 - DNA, 20 bp, Artificial Sequence
  Description of Artificial Sequence: Synthetic oligonucleotide
  Target: SCNA; (+) strand; PAM type: YTN; PAM sequence: CTG
tctctaagtcagaactcaat

SEQ ID NO: 71885 - DNA, 20 bp, Artificial Sequence
  Description of Artificial Sequence: Synthetic oligonucleotide
  Target: SCNA; (+) strand; PAM type: YTN; PAM sequence: CTC
taagtcagaactcaatactg

SEQ ID NO: 71886 - DNA, 20 bp, Artificial Sequence
  Description of Artificial Sequence: Synthetic oligonucleotide
  Target: SCNA; (+) strand; PAM type: YTN; PAM sequence: CTA
agtcagaactcaatactgtt

SEQ ID NO: 71887 - DNA, 20 bp, Artificial Sequence
  Description of Artificial Sequence: Synthetic oligonucleotide
  Target: SCNA; (+) strand; PAM type: YTN; PAM sequence: CTC
aatactgttgctctaaaata

SEQ ID NO: 71888 - DNA, 20 bp, Artificial Sequence
  Description of Artificial Sequence: Synthetic oligonucleotide
  Target: SCNA; (+) strand; PAM type: YTN; PAM sequence: CTG
ttgctctaaaatacaaatgt

SEQ ID NO: 71889 - DNA, 20 bp, Artificial Sequence
  Description of Artificial Sequence: Synthetic oligonucleotide
  Target: SCNA; (+) strand; PAM type: YTN; PAM sequence: TTG
ctctaaaatacaaatgttaa

SEQ ID NO: 71890 - DNA, 20 bp, Artificial Sequence
  Description of Artificial Sequence: Synthetic oligonucleotide
  Target: SCNA; (+) strand; PAM type: YTN; PAM sequence: CTC
taaaatacaaatgttaagat

SEQ ID NO: 71891 - DNA, 20 bp, Artificial Sequence
  Description of Artificial Sequence: Synthetic oligonucleotide
  Target: SCNA; (+) strand; PAM type: YTN; PAM sequence: CTA
aaatacaaatgttaagatga

SEQ ID NO: 71892 - DNA, 20 bp, Artificial Sequence
  Description of Artificial Sequence: Synthetic oligonucleotide
  Target: SCNA; (+) strand; PAM type: YTN; PAM sequence: TTA
agatgattcttcaggagctt

SEQ ID NO: 71893 - DNA, 20 bp, Artificial Sequence
  Description of Artificial Sequence: Synthetic oligonucleotide
  Target: SCNA; (+) strand; PAM type: YTN; PAM sequence: TTC
ttcaggagcttctcatcacc

SEQ ID NO: 71894 - DNA, 20 bp, Artificial Sequence
  Description of Artificial Sequence: Synthetic oligonucleotide
  Target: SCNA; (+) strand; PAM type: YTN; PAM sequence: CTT
caggagcttctcatcacctg

SEQ ID NO: 71895 - DNA, 20 bp, Artificial Sequence
  Description of Artificial Sequence: Synthetic oligonucleotide
  Target: SCNA; (+) strand; PAM type: YTN; PAM sequence: TTC
aggagcttctcatcacctgt

SEQ ID NO: 71896 - DNA, 20 bp, Artificial Sequence
  Description of Artificial Sequence: Synthetic oligonucleotide
  Target: SCNA; (+) strand; PAM type: YTN; PAM sequence: CTT
ctcatcacctgtactataat

SEQ ID NO: 71897 - DNA, 20 bp, Artificial Sequence
  Description of Artificial Sequence: Synthetic oligonucleotide
  Target: SCNA; (+) strand; PAM type: YTN; PAM sequence: TTC
tcatcacctgtactataatg

SEQ ID NO: 71898 - DNA, 20 bp, Artificial Sequence
  Description of Artificial Sequence: Synthetic oligonucleotide
  Target: SCNA; (+) strand; PAM type: YTN; PAM sequence: CTC
atcacctgtactataatgct

SEQ ID NO: 71899 - DNA, 20 bp, Artificial Sequence
  Description of Artificial Sequence: Synthetic oligonucleotide
  Target: SCNA; (+) strand; PAM type: YTN; PAM sequence: CTG
tactataatgctactagcat

SEQ ID NO: 71900 - DNA, 20 bp, Artificial Sequence
  Description of Artificial Sequence: Synthetic oligonucleotide
  Target: SCNA; (+) strand; PAM type: YTN; PAM sequence: CTA
taatgctactagcatgagag

SEQ ID NO: 71901 - DNA, 20 bp, Artificial Sequence
  Description of Artificial Sequence: Synthetic oligonucleotide
  Target: SCNA; (+) strand; PAM type: YTN; PAM sequence: CTA
ctagcatgagagcacccacc

SEQ ID NO: 71902 - DNA, 20 bp, Artificial Sequence
  Description of Artificial Sequence: Synthetic oligonucleotide
  Target: SCNA; (+) strand; PAM type: YTN; PAM sequence: CTA
gcatgagagcacccacctag

SEQ ID NO: 71903 - DNA, 20 bp, Artificial Sequence
  Description of Artificial Sequence: Synthetic oligonucleotide
  Target: SCNA; (+) strand; PAM type: YTN; PAM sequence: CTA
gccttcttatctcaagtcct

SEQ ID NO: 71904 - DNA, 20 bp, Artificial Sequence
  Description of Artificial Sequence: Synthetic oligonucleotide
  Target: SCNA; (+) strand; PAM type: YTN; PAM sequence: CTT
cttatctcaagtcctgccct

SEQ ID NO: 71905 - DNA, 20 bp, Artificial Sequence
  Description of Artificial Sequence: Synthetic oligonucleotide
  Target: SCNA; (+) strand; PAM type: YTN; PAM sequence: TTC
ttatctcaagtcctgccctg

SEQ ID NO: 71906 - DNA, 20 bp, Artificial Sequence
  Description of Artificial Sequence: Synthetic oligonucleotide
  Target: SCNA; (+) strand; PAM type: YTN; PAM sequence: CTT
atctcaagtcctgccctgcc

SEQ ID NO: 71907 - DNA, 20 bp, Artificial Sequence
  Description of Artificial Sequence: Synthetic oligonucleotide
  Target: SCNA; (+) strand; PAM type: YTN; PAM sequence: TTA
tctcaagtcctgccctgcca

SEQ ID NO: 71908 - DNA, 20 bp, Artificial Sequence
  Description of Artificial Sequence: Synthetic oligonucleotide
  Target: SCNA; (+) strand; PAM type: YTN; PAM sequence: CTC
aagtcctgccctgccactct

SEQ ID NO: 71909 - DNA, 20 bp, Artificial Sequence
  Description of Artificial Sequence: Synthetic oligonucleotide
  Target: SCNA; (+) strand; PAM type: YTN; PAM sequence: CTG
ccctgccactctgtacatat

SEQ ID NO: 71910 - DNA, 20 bp, Artificial Sequence
  Description of Artificial Sequence: Synthetic oligonucleotide
  Target: SCNA; (+) strand; PAM type: YTN; PAM sequence: CTG
ccactctgtacatatatccc

SEQ ID NO: 71911 - DNA, 20 bp, Artificial Sequence
  Description of Artificial Sequence: Synthetic oligonucleotide
  Target: SCNA; (+) strand; PAM type: YTN; PAM sequence: CTC
tgtacatatatcccctcttt

SEQ ID NO: 71912 - DNA, 20 bp, Artificial Sequence
  Description of Artificial Sequence: Synthetic oligonucleotide
  Target: SCNA; (+) strand; PAM type: YTN; PAM sequence: CTG
tacatatatcccctctttaa

SEQ ID NO: 71913 - DNA, 20 bp, Artificial Sequence
  Description of Artificial Sequence: Synthetic oligonucleotide
  Target: SCNA; (+) strand; PAM type: YTN; PAM sequence: CTC
tttaattcacccttagacag

SEQ ID NO: 71914 - DNA, 20 bp, Artificial Sequence
  Description of Artificial Sequence: Synthetic oligonucleotide
  Target: SCNA; (+) strand; PAM type: YTN; PAM sequence: CTT
taattcacccttagacagag

SEQ ID NO: 71915 - DNA, 20 bp, Artificial Sequence
  Description of Artificial Sequence: Synthetic oligonucleotide
  Target: SCNA; (+) strand; PAM type: YTN; PAM sequence: TTT
aattcacccttagacagaga

SEQ ID NO: 71916 - DNA, 20 bp, Artificial Sequence
  Description of Artificial Sequence: Synthetic oligonucleotide
  Target: SCNA; (+) strand; PAM type: YTN; PAM sequence: TTA
attcacccttagacagagac

SEQ ID NO: 71917 - DNA, 20 bp, Artificial Sequence
  Description of Artificial Sequence: Synthetic oligonucleotide
  Target: SCNA; (+) strand; PAM type: YTN; PAM sequence: TTC
acccttagacagagacagag

SEQ ID NO: 71918 - DNA, 20 bp, Artificial Sequence
  Description of Artificial Sequence: Synthetic oligonucleotide
  Target: SCNA; (+) strand; PAM type: YTN; PAM sequence: CTT
agacagagacagagagggcc

SEQ ID NO: 71919 - DNA, 20 bp, Artificial Sequence
  Description of Artificial Sequence: Synthetic oligonucleotide
  Target: SCNA; (+) strand; PAM type: YTN; PAM sequence: TTA
gacagagacagagagggcca

SEQ ID NO: 71920 - DNA, 20 bp, Artificial Sequence
  Description of Artificial Sequence: Synthetic oligonucleotide
  Target: SCNA; (+) strand; PAM type: YTN; PAM sequence: CTT
gtcttttcctgaattaatat

SEQ ID NO: 71921 - DNA, 20 bp, Artificial Sequence
  Description of Artificial Sequence: Synthetic oligonucleotide
  Target: SCNA; (+) strand; PAM type: YTN; PAM sequence: TTG
tcttttcctgaattaatatg

SEQ ID NO: 71922 - DNA, 20 bp, Artificial Sequence
  Description of Artificial Sequence: Synthetic oligonucleotide
  Target: SCNA; (+) strand; PAM type: YTN; PAM sequence: CTT
ttcctgaattaatatgtggt

SEQ ID NO: 71923 - DNA, 20 bp, Artificial Sequence
  Description of Artificial Sequence: Synthetic oligonucleotide
  Target: SCNA; (+) strand; PAM type: YTN; PAM sequence: TTT
tcctgaattaatatgtggtt

SEQ ID NO: 71924 - DNA, 20 bp, Artificial Sequence
  Description of Artificial Sequence: Synthetic oligonucleotide
  Target: SCNA; (+) strand; PAM type: YTN; PAM sequence: TTT
cctgaattaatatgtggttt

SEQ ID NO: 71925 - DNA, 20 bp, Artificial Sequence
  Description of Artificial Sequence: Synthetic oligonucleotide
  Target: SCNA; (+) strand; PAM type: YTN; PAM sequence: TTC
ctgaattaatatgtggtttt

SEQ ID NO: 71926 - DNA, 20 bp, Artificial Sequence
  Description of Artificial Sequence: Synthetic oligonucleotide
  Target: SCNA; (+) strand; PAM type: YTN; PAM sequence: CTG
aattaatatgtggtttttgc

SEQ ID NO: 71927 - DNA, 20 bp, Artificial Sequence
  Description of Artificial Sequence: Synthetic oligonucleotide
  Target: SCNA; (+) strand; PAM type: YTN; PAM sequence: TTA
atatgtggtttttgccccat

SEQ ID NO: 71928 - DNA, 20 bp, Artificial Sequence
  Description of Artificial Sequence: Synthetic oligonucleotide
  Target: SCNA; (+) strand; PAM type: YTN; PAM sequence: TTT
ttgccccatgctttagcaca

SEQ ID NO: 71929 - DNA, 20 bp, Artificial Sequence
  Description of Artificial Sequence: Synthetic oligonucleotide
  Target: SCNA; (+) strand; PAM type: YTN; PAM sequence: TTT
tgccccatgctttagcacat

SEQ ID NO: 71930 - DNA, 20 bp, Artificial Sequence
  Description of Artificial Sequence: Synthetic oligonucleotide
  Target: SCNA; (+) strand; PAM type: YTN; PAM sequence: TTT
gccccatgctttagcacatg

SEQ ID NO: 71931 - DNA, 20 bp, Artificial Sequence
  Description of Artificial Sequence: Synthetic oligonucleotide
  Target: SCNA; (+) strand; PAM type: YTN; PAM sequence: TTG
ccccatgctttagcacatgt

SEQ ID NO: 71932 - DNA, 20 bp, Artificial Sequence
  Description of Artificial Sequence: Synthetic oligonucleotide
  Target: SCNA; (+) strand; PAM type: YTN; PAM sequence: CTT
tagcacatgtgaatccattt

SEQ ID NO: 71933 - DNA, 20 bp, Artificial Sequence
  Description of Artificial Sequence: Synthetic oligonucleotide
  Target: SCNA; (+) strand; PAM type: YTN; PAM sequence: TTT
agcacatgtgaatccatttg

SEQ ID NO: 71934 - DNA, 20 bp, Artificial Sequence
  Description of Artificial Sequence: Synthetic oligonucleotide
  Target: SCNA; (+) strand; PAM type: YTN; PAM sequence: TTA
gcacatgtgaatccatttgt

SEQ ID NO: 71935 - DNA, 20 bp, Artificial Sequence
  Description of Artificial Sequence: Synthetic oligonucleotide
  Target: SCNA; (+) strand; PAM type: YTN; PAM sequence: TTT
gtccagcatgcctttgctca

SEQ ID NO: 71936 - DNA, 20 bp, Artificial Sequence
  Description of Artificial Sequence: Synthetic oligonucleotide
  Target: SCNA; (+) strand; PAM type: YTN; PAM sequence: TTG
tccagcatgcctttgctcac

SEQ ID NO: 71937 - DNA, 20 bp, Artificial Sequence
  Description of Artificial Sequence: Synthetic oligonucleotide
  Target: SCNA; (+) strand; PAM type: YTN; PAM sequence: CTT
tgctcacctgtgtacaagaa

SEQ ID NO: 71938 - DNA, 20 bp, Artificial Sequence
  Description of Artificial Sequence: Synthetic oligonucleotide
  Target: SCNA; (+) strand; PAM type: YTN; PAM sequence: TTT
gctcacctgtgtacaagaag

SEQ ID NO: 71939 - DNA, 20 bp, Artificial Sequence
  Description of Artificial Sequence: Synthetic oligonucleotide
  Target: SCNA; (+) strand; PAM type: YTN; PAM sequence: TTG
ctcacctgtgtacaagaaga

SEQ ID NO: 71940 - DNA, 20 bp, Artificial Sequence
  Description of Artificial Sequence: Synthetic oligonucleotide
  Target: SCNA; (+) strand; PAM type: YTN; PAM sequence: CTC
acctgtgtacaagaagagct

SEQ ID NO: 71941 - DNA, 20 bp, Artificial Sequence
  Description of Artificial Sequence: Synthetic oligonucleotide
  Target: SCNA; (+) strand; PAM type: YTN; PAM sequence: CTG
tgtacaagaagagctacata

SEQ ID NO: 71942 - DNA, 20 bp, Artificial Sequence
  Description of Artificial Sequence: Synthetic oligonucleotide
  Target: SCNA; (+) strand; PAM type: YTN; PAM sequence: CTA
cataacagatcaaaaggaac

SEQ ID NO: 71943 - DNA, 20 bp, Artificial Sequence
  Description of Artificial Sequence: Synthetic oligonucleotide
  Target: SCNA; (+) strand; PAM type: YTN; PAM sequence: CTG
gttcttagagtctcatgtcc

SEQ ID NO: 71944 - DNA, 20 bp, Artificial Sequence
  Description of Artificial Sequence: Synthetic oligonucleotide
  Target: SCNA; (+) strand; PAM type: YTN; PAM sequence: TTC
ttagagtctcatgtccattc

SEQ ID NO: 71945 - DNA, 20 bp, Artificial Sequence
  Description of Artificial Sequence: Synthetic oligonucleotide
  Target: SCNA; (+) strand; PAM type: YTN; PAM sequence: CTT
agagtctcatgtccattcct

SEQ ID NO: 71946 - DNA, 20 bp, Artificial Sequence
  Description of Artificial Sequence: Synthetic oligonucleotide
  Target: SCNA; (+) strand; PAM type: YTN; PAM sequence: TTA
gagtctcatgtccattcctc

SEQ ID NO: 71947 - DNA, 20 bp, Artificial Sequence
  Description of Artificial Sequence: Synthetic oligonucleotide
  Target: SCNA; (+) strand; PAM type: YTN; PAM sequence: CTC
atgtccattcctccaattct

SEQ ID NO: 71948 - DNA, 20 bp, Artificial Sequence
  Description of Artificial Sequence: Synthetic oligonucleotide
  Target: SCNA; (+) strand; PAM type: YTN; PAM sequence: TTC
ctccaattctcgccacttct

SEQ ID NO: 71949 - DNA, 20 bp, Artificial Sequence
  Description of Artificial Sequence: Synthetic oligonucleotide
  Target: SCNA; (+) strand; PAM type: YTN; PAM sequence: CTC
caattctcgccacttctgga

SEQ ID NO: 71950 - DNA, 20 bp, Artificial Sequence
  Description of Artificial Sequence: Synthetic oligonucleotide
  Target: SCNA; (+) strand; PAM type: YTN; PAM sequence: TTC
tcgccacttctggatgcact

SEQ ID NO: 71951 - DNA, 20 bp, Artificial Sequence
  Description of Artificial Sequence: Synthetic oligonucleotide
  Target: SCNA; (+) strand; PAM type: YTN; PAM sequence: CTC
gccacttctggatgcactgt

SEQ ID NO: 71952 - DNA, 20 bp, Artificial Sequence
  Description of Artificial Sequence: Synthetic oligonucleotide
  Target: SCNA; (+) strand; PAM type: YTN; PAM sequence: CTT
ctggatgcactgtttcttat

SEQ ID NO: 71953 - DNA, 20 bp, Artificial Sequence
  Description of Artificial Sequence: Synthetic oligonucleotide
  Target: SCNA; (+) strand; PAM type: YTN; PAM sequence: TTC
tggatgcactgtttcttatg

SEQ ID NO: 71954 - DNA, 20 bp, Artificial Sequence
  Description of Artificial Sequence: Synthetic oligonucleotide
  Target: SCNA; (+) strand; PAM type: YTN; PAM sequence: CTG
gatgcactgtttcttatgag

SEQ ID NO: 71955 - DNA, 20 bp, Artificial Sequence
  Description of Artificial Sequence: Synthetic oligonucleotide
  Target: SCNA; (+) strand; PAM type: YTN; PAM sequence: CTG
tttcttatgagcttccttaa

SEQ ID NO: 71956 - DNA, 20 bp, Artificial Sequence
  Description of Artificial Sequence: Synthetic oligonucleotide
  Target: SCNA; (+) strand; PAM type: YTN; PAM sequence: TTT
cttatgagcttccttaaata

SEQ ID NO: 71957 - DNA, 20 bp, Artificial Sequence
  Description of Artificial Sequence: Synthetic oligonucleotide
  Target: SCNA; (+) strand; PAM type: YTN; PAM sequence: TTC
ttatgagcttccttaaatat

SEQ ID NO: 71958 - DNA, 20 bp, Artificial Sequence
  Description of Artificial Sequence: Synthetic oligonucleotide
  Target: SCNA; (+) strand; PAM type: YTN; PAM sequence: CTT
atgagcttccttaaatatgc

SEQ ID NO: 71959 - DNA, 20 bp, Artificial Sequence
  Description of Artificial Sequence: Synthetic oligonucleotide
  Target: SCNA; (+) strand; PAM type: YTN; PAM sequence: TTA
tgagcttccttaaatatgct

SEQ ID NO: 71960 - DNA, 20 bp, Artificial Sequence
  Description of Artificial Sequence: Synthetic oligonucleotide
  Target: SCNA; (+) strand; PAM type: YTN; PAM sequence: CTT
ccttaaatatgctgtgcctt

SEQ ID NO: 71961 - DNA, 20 bp, Artificial Sequence
  Description of Artificial Sequence: Synthetic oligonucleotide
  Target: SCNA; (+) strand; PAM type: YTN; PAM sequence: TTC
cttaaatatgctgtgccttt

SEQ ID NO: 71962 - DNA, 20 bp, Artificial Sequence
  Description of Artificial Sequence: Synthetic oligonucleotide
  Target: SCNA; (+) strand; PAM type: YTN; PAM sequence: CTT
aaatatgctgtgcctttttg

SEQ ID NO: 71963 - DNA, 20 bp, Artificial Sequence
  Description of Artificial Sequence: Synthetic oligonucleotide
  Target: SCNA; (+) strand; PAM type: YTN; PAM sequence: TTA
aatatgctgtgcctttttgc

SEQ ID NO: 71964 - DNA, 20 bp, Artificial Sequence
  Description of Artificial Sequence: Synthetic oligonucleotide
  Target: SCNA; (+) strand; PAM type: YTN; PAM sequence: CTG
tgcctttttgctttctgcgt

SEQ ID NO: 71965 - DNA, 20 bp, Artificial Sequence
  Description of Artificial Sequence: Synthetic oligonucleotide
  Target: SCNA; (+) strand; PAM type: YTN; PAM sequence: CTT
tttgctttctgcgtatgggc

SEQ ID NO: 71966 - DNA, 20 bp, Artificial Sequence
  Description of Artificial Sequence: Synthetic oligonucleotide
  Target: SCNA; (+) strand; PAM type: YTN; PAM sequence: TTT
ttgctttctgcgtatgggca

SEQ ID NO: 71967 - DNA, 20 bp, Artificial Sequence
  Description of Artificial Sequence: Synthetic oligonucleotide
  Target: SCNA; (+) strand; PAM type: YTN; PAM sequence: TTT
tgctttctgcgtatgggcat

SEQ ID NO: 71968 - DNA, 20 bp, Artificial Sequence
  Description of Artificial Sequence: Synthetic oligonucleotide
  Target: SCNA; (+) strand; PAM type: YTN; PAM sequence: TTT
gctttctgcgtatgggcatc

SEQ ID NO: 71969 - DNA, 20 bp, Artificial Sequence
  Description of Artificial Sequence: Synthetic oligonucleotide
  Target: SCNA; (+) strand; PAM type: YTN; PAM sequence: TTG
ctttctgcgtatgggcatct

SEQ ID NO: 71970 - DNA, 20 bp, Artificial Sequence
  Description of Artificial Sequence: Synthetic oligonucleotide
  Target: SCNA; (+) strand; PAM type: YTN; PAM sequence: CTT
tctgcgtatgggcatctcca

SEQ ID NO: 71971 - DNA, 20 bp, Artificial Sequence
  Description of Artificial Sequence: Synthetic oligonucleotide
  Target: SCNA; (+) strand; PAM type: YTN; PAM sequence: TTT
ctgcgtatgggcatctccag

SEQ ID NO: 71972 - DNA, 20 bp, Artificial Sequence
  Description of Artificial Sequence: Synthetic oligonucleotide
  Target: SCNA; (+) strand; PAM type: YTN; PAM sequence: TTC
tgcgtatgggcatctccagt

SEQ ID NO: 71973 - DNA, 20 bp, Artificial Sequence
  Description of Artificial Sequence: Synthetic oligonucleotide
  Target: SCNA; (+) strand; PAM type: YTN; PAM sequence: CTG
cgtatgggcatctccagtgc

SEQ ID NO: 71974 - DNA, 20 bp, Artificial Sequence
  Description of Artificial Sequence: Synthetic oligonucleotide
  Target: SCNA; (+) strand; PAM type: YTN; PAM sequence: CTC
cagtgccaaagtaagaggag

SEQ ID NO: 71975 - DNA, 20 bp, Artificial Sequence
  Description of Artificial Sequence: Synthetic oligonucleotide
  Target: SCNA; (+) strand; PAM type: YTN; PAM sequence: TTT
ctgcagaatttcaggaagtt

SEQ ID NO: 71976 - DNA, 20 bp, Artificial Sequence
  Description of Artificial Sequence: Synthetic oligonucleotide
  Target: SCNA; (+) strand; PAM type: YTN; PAM sequence: TTC
tgcagaatttcaggaagtta

SEQ ID NO: 71977 - DNA, 20 bp, Artificial Sequence
  Description of Artificial Sequence: Synthetic oligonucleotide
  Target: SCNA; (+) strand; PAM type: YTN; PAM sequence: CTG
cagaatttcaggaagttaat

SEQ ID NO: 71978 - DNA, 20 bp, Artificial Sequence
  Description of Artificial Sequence: Synthetic oligonucleotide
  Target: SCNA; (+) strand; PAM type: YTN; PAM sequence: TTT
caggaagttaatatcctagt

SEQ ID NO: 71979 - DNA, 20 bp, Artificial Sequence
  Description of Artificial Sequence: Synthetic oligonucleotide
  Target: SCNA; (+) strand; PAM type: YTN; PAM sequence: TTC
aggaagttaatatcctagtg

SEQ ID NO: 71980 - DNA, 20 bp, Artificial Sequence
  Description of Artificial Sequence: Synthetic oligonucleotide
  Target: SCNA; (+) strand; PAM type: YTN; PAM sequence: TTA
atatcctagtggcagctctc

SEQ ID NO: 71981 - DNA, 20 bp, Artificial Sequence
  Description of Artificial Sequence: Synthetic oligonucleotide
  Target: SCNA; (+) strand; PAM type: YTN; PAM sequence: CTA
gtggcagctctcagacaatg

SEQ ID NO: 71982 - DNA, 20 bp, Artificial Sequence
  Description of Artificial Sequence: Synthetic oligonucleotide
  Target: SCNA; (+) strand; PAM type: YTN; PAM sequence: CTC
tcagacaatgggagacagga

SEQ ID NO: 71983 - DNA, 20 bp, Artificial Sequence
  Description of Artificial Sequence: Synthetic oligonucleotide
  Target: SCNA; (+) strand; PAM type: YTN; PAM sequence: CTC
agacaatgggagacaggagc

SEQ ID NO: 71984 - DNA, 20 bp, Artificial Sequence
  Description of Artificial Sequence: Synthetic oligonucleotide
  Target: SCNA; (+) strand; PAM type: YTN; PAM sequence: CTA
atggctgtttcttcgttttg

SEQ ID NO: 71985 - DNA, 20 bp, Artificial Sequence
  Description of Artificial Sequence: Synthetic oligonucleotide
  Target: SCNA; (+) strand; PAM type: YTN; PAM sequence: CTG
tttcttcgttttgtccttca

SEQ ID NO: 71986 - DNA, 20 bp, Artificial Sequence
  Description of Artificial Sequence: Synthetic oligonucleotide
  Target: SCNA; (+) strand; PAM type: YTN; PAM sequence: TTT
cttcgttttgtccttcaggc

SEQ ID NO: 71987 - DNA, 20 bp, Artificial Sequence
  Description of Artificial Sequence: Synthetic oligonucleotide
  Target: SCNA; (+) strand; PAM type: YTN; PAM sequence: TTC
ttcgttttgtccttcaggct

SEQ ID NO: 71988 - DNA, 20 bp, Artificial Sequence
  Description of Artificial Sequence: Synthetic oligonucleotide
  Target: SCNA; (+) strand; PAM type: YTN; PAM sequence: CTT
cgttttgtccttcaggctga

SEQ ID NO: 71989 - DNA, 20 bp, Artificial Sequence
  Description of Artificial Sequence: Synthetic oligonucleotide
  Target: SCNA; (+) strand; PAM type: YTN; PAM sequence: TTC
gttttgtccttcaggctgat

SEQ ID NO: 71990 - DNA, 20 bp, Artificial Sequence
  Description of Artificial Sequence: Synthetic oligonucleotide
  Target: SCNA; (+) strand; PAM type: YTN; PAM sequence: TTT
tgtccttcaggctgataatc

SEQ ID NO: 71991 - DNA, 20 bp, Artificial Sequence
  Description of Artificial Sequence: Synthetic oligonucleotide
  Target: SCNA; (+) strand; PAM type: YTN; PAM sequence: TTT
gtccttcaggctgataatcc

SEQ ID NO: 71992 - DNA, 20 bp, Artificial Sequence
  Description of Artificial Sequence: Synthetic oligonucleotide
  Target: SCNA; (+) strand; PAM type: YTN; PAM sequence: TTG
tccttcaggctgataatcca

SEQ ID NO: 71993 - DNA, 20 bp, Artificial Sequence
  Description of Artificial Sequence: Synthetic oligonucleotide
  Target: SCNA; (+) strand; PAM type: YTN; PAM sequence: CTT
caggctgataatccagaaaa

SEQ ID NO: 71994 - DNA, 20 bp, Artificial Sequence
  Description of Artificial Sequence: Synthetic oligonucleotide
  Target: SCNA; (+) strand; PAM type: YTN; PAM sequence: TTC
aggctgataatccagaaaac

SEQ ID NO: 71995 - DNA, 20 bp, Artificial Sequence
  Description of Artificial Sequence: Synthetic oligonucleotide
  Target: SCNA; (+) strand; PAM type: YTN; PAM sequence: CTG
ataatccagaaaaccaatct

SEQ ID NO: 71996 - DNA, 20 bp, Artificial Sequence
  Description of Artificial Sequence: Synthetic oligonucleotide
  Target: SCNA; (+) strand; PAM type: YTN; PAM sequence: CTG
cacaatgcttgagaaggtgc

SEQ ID NO: 71997 - DNA, 20 bp, Artificial Sequence
  Description of Artificial Sequence: Synthetic oligonucleotide
  Target: SCNA; (+) strand; PAM type: YTN; PAM sequence: CTT
gagaaggtgcagagaattag

SEQ ID NO: 71998 - DNA, 20 bp, Artificial Sequence
  Description of Artificial Sequence: Synthetic oligonucleotide
  Target: SCNA; (+) strand; PAM type: YTN; PAM sequence: TTG
agaaggtgcagagaattaga

SEQ ID NO: 71999 - DNA, 20 bp, Artificial Sequence
  Description of Artificial Sequence: Synthetic oligonucleotide
  Target: SCNA; (+) strand; PAM type: YTN; PAM sequence: TTA
gagccctcattgccctcaat

SEQ ID NO: 72000 - DNA, 20 bp, Artificial Sequence
  Description of Artificial Sequence: Synthetic oligonucleotide
  Target: SCNA; (+) strand; PAM type: YTN; PAM sequence: CTC
attgccctcaatgcagtacc

SEQ ID NO: 72001 - DNA, 20 bp, Artificial Sequence
  Description of Artificial Sequence: Synthetic oligonucleotide
  Target: SCNA; (+) strand; PAM type: YTN; PAM sequence: TTG
ccctcaatgcagtaccttta

SEQ ID NO: 72002 - DNA, 20 bp, Artificial Sequence
  Description of Artificial Sequence: Synthetic oligonucleotide
  Target: SCNA; (+) strand; PAM type: YTN; PAM sequence: CTC
aatgcagtacctttatattg

SEQ ID NO: 72003 - DNA, 20 bp, Artificial Sequence
  Description of Artificial Sequence: Synthetic oligonucleotide
  Target: SCNA; (+) strand; PAM type: YTN; PAM sequence: CTT
tatattggctttttctcctt

SEQ ID NO: 72004 - DNA, 20 bp, Artificial Sequence
  Description of Artificial Sequence: Synthetic oligonucleotide
  Target: SCNA; (+) strand; PAM type: YTN; PAM sequence: TTT
atattggctttttctcctta

SEQ ID NO: 72005 - DNA, 20 bp, Artificial Sequence
  Description of Artificial Sequence: Synthetic oligonucleotide
  Target: SCNA; (+) strand; PAM type: YTN; PAM sequence: TTA
tattggctttttctccttat

SEQ ID NO: 72006 - DNA, 20 bp, Artificial Sequence
  Description of Artificial Sequence: Synthetic oligonucleotide
  Target: SCNA; (+) strand; PAM type: YTN; PAM sequence: TTG
gctttttctccttattcatc

SEQ ID NO: 72007 - DNA, 20 bp, Artificial Sequence
  Description of Artificial Sequence: Synthetic oligonucleotide
  Target: SCNA; (+) strand; PAM type: YTN; PAM sequence: CTT
tttctccttattcatcacat

SEQ ID NO: 72008 - DNA, 20 bp, Artificial Sequence
  Description of Artificial Sequence: Synthetic oligonucleotide
  Target: SCNA; (+) strand; PAM type: YTN; PAM sequence: TTT
ttctccttattcatcacatg

SEQ ID NO: 72009 - DNA, 20 bp, Artificial Sequence
  Description of Artificial Sequence: Synthetic oligonucleotide
  Target: SCNA; (+) strand; PAM type: YTN; PAM sequence: TTT
tctccttattcatcacatgc

SEQ ID NO: 72010 - DNA, 20 bp, Artificial Sequence
  Description of Artificial Sequence: Synthetic oligonucleotide
  Target: SCNA; (+) strand; PAM type: YTN; PAM sequence: TTT
ctccttattcatcacatgct

SEQ ID NO: 72011 - DNA, 20 bp, Artificial Sequence
  Description of Artificial Sequence: Synthetic oligonucleotide
  Target: SCNA; (+) strand; PAM type: YTN; PAM sequence: TTC
tccttattcatcacatgctc

SEQ ID NO: 72012 - DNA, 20 bp, Artificial Sequence
  Description of Artificial Sequence: Synthetic oligonucleotide
  Target: SCNA; (+) strand; PAM type: YTN; PAM sequence: CTC
cttattcatcacatgctcct

SEQ ID NO: 72013 - DNA, 20 bp, Artificial Sequence
  Description of Artificial Sequence: Synthetic oligonucleotide
  Target: SCNA; (+) strand; PAM type: YTN; PAM sequence: CTT
attcatcacatgctcctgtt

SEQ ID NO: 72014 - DNA, 20 bp, Artificial Sequence
  Description of Artificial Sequence: Synthetic oligonucleotide
  Target: SCNA; (+) strand; PAM type: YTN; PAM sequence: TTA
ttcatcacatgctcctgttt

SEQ ID NO: 72015 - DNA, 20 bp, Artificial Sequence
  Description of Artificial Sequence: Synthetic oligonucleotide
  Target: SCNA; (+) strand; PAM type: YTN; PAM sequence: TTC
atcacatgctcctgtttccc

SEQ ID NO: 72016 - DNA, 20 bp, Artificial Sequence
  Description of Artificial Sequence: Synthetic oligonucleotide
  Target: SCNA; (+) strand; PAM type: YTN; PAM sequence: CTC
ctgtttcccgagattgccac

SEQ ID NO: 72017 - DNA, 20 bp, Artificial Sequence
  Description of Artificial Sequence: Synthetic oligonucleotide
  Target: SCNA; (+) strand; PAM type: YTN; PAM sequence: CTG
tttcccgagattgccaccca

SEQ ID NO: 72018 - DNA, 20 bp, Artificial Sequence
  Description of Artificial Sequence: Synthetic oligonucleotide
  Target: SCNA; (+) strand; PAM type: YTN; PAM sequence: TTT
cccgagattgccacccacat

SEQ ID NO: 72019 - DNA, 20 bp, Artificial Sequence
  Description of Artificial Sequence: Synthetic oligonucleotide
  Target: SCNA; (+) strand; PAM type: YTN; PAM sequence: TTC
ccgagattgccacccacata

SEQ ID NO: 72020 - DNA, 20 bp, Artificial Sequence
  Description of Artificial Sequence: Synthetic oligonucleotide
  Target: SCNA; (+) strand; PAM type: YTN; PAM sequence: TTG
ccacccacatatactacttg

SEQ ID NO: 72021 - DNA, 20 bp, Artificial Sequence
  Description of Artificial Sequence: Synthetic oligonucleotide
  Target: SCNA; (+) strand; PAM type: YTN; PAM sequence: CTA
cttgcaccctacactatatt

SEQ ID NO: 72022 - DNA, 20 bp, Artificial Sequence
  Description of Artificial Sequence: Synthetic oligonucleotide
  Target: SCNA; (+) strand; PAM type: YTN; PAM sequence: CTT
gcaccctacactatatttca

SEQ ID NO: 72023 - DNA, 20 bp, Artificial Sequence
  Description of Artificial Sequence: Synthetic oligonucleotide
  Target: SCNA; (+) strand; PAM type: YTN; PAM sequence: TTG
caccctacactatatttcag

SEQ ID NO: 72024 - DNA, 20 bp, Artificial Sequence
  Description of Artificial Sequence: Synthetic oligonucleotide
  Target: SCNA; (+) strand; PAM type: YTN; PAM sequence: CTA
cactatatttcaggctcttc

SEQ ID NO: 72025 - DNA, 20 bp, Artificial Sequence
  Description of Artificial Sequence: Synthetic oligonucleotide
  Target: SCNA; (+) strand; PAM type: YTN; PAM sequence: CTA
tatttcaggctcttccttca

SEQ ID NO: 72026 - DNA, 20 bp, Artificial Sequence
  Description of Artificial Sequence: Synthetic oligonucleotide
  Target: SCNA; (+) strand; PAM type: YTN; PAM sequence: TTT
caggctcttccttcaggata

SEQ ID NO: 72027 - DNA, 20 bp, Artificial Sequence
  Description of Artificial Sequence: Synthetic oligonucleotide
  Target: SCNA; (+) strand; PAM type: YTN; PAM sequence: TTC
aggctcttccttcaggataa

SEQ ID NO: 72028 - DNA, 20 bp, Artificial Sequence
  Description of Artificial Sequence: Synthetic oligonucleotide
  Target: SCNA; (+) strand; PAM type: YTN; PAM sequence: CTC
ttccttcaggataatgaaac

SEQ ID NO: 72029 - DNA, 20 bp, Artificial Sequence
  Description of Artificial Sequence: Synthetic oligonucleotide
  Target: SCNA; (+) strand; PAM type: YTN; PAM sequence: CTT
ccttcaggataatgaaacca

SEQ ID NO: 72030 - DNA, 20 bp, Artificial Sequence
  Description of Artificial Sequence: Synthetic oligonucleotide
  Target: SCNA; (+) strand; PAM type: YTN; PAM sequence: TTC
cttcaggataatgaaaccaa

SEQ ID NO: 72031 - DNA, 20 bp, Artificial Sequence
  Description of Artificial Sequence: Synthetic oligonucleotide
  Target: SCNA; (+) strand; PAM type: YTN; PAM sequence: CTT
caggataatgaaaccaagct

SEQ ID NO: 72032 - DNA, 20 bp, Artificial Sequence
  Description of Artificial Sequence: Synthetic oligonucleotide
  Target: SCNA; (+) strand; PAM type: YTN; PAM sequence: TTC
aggataatgaaaccaagcta

SEQ ID NO: 72033 - DNA, 20 bp, Artificial Sequence
  Description of Artificial Sequence: Synthetic oligonucleotide
  Target: SCNA; (+) strand; PAM type: YTN; PAM sequence: CTA
aaggcaaaatccaacttttg

SEQ ID NO: 72034 - DNA, 20 bp, Artificial Sequence
  Description of Artificial Sequence: Synthetic oligonucleotide
  Target: SCNA; (+) strand; PAM type: YTN; PAM sequence: CTT
ttgtttaactcatcctgctt

SEQ ID NO: 72035 - DNA, 20 bp, Artificial Sequence
  Description of Artificial Sequence: Synthetic oligonucleotide
  Target: SCNA; (+) strand; PAM type: YTN; PAM sequence: TTT
tgtttaactcatcctgcttc

SEQ ID NO: 72036 - DNA, 20 bp, Artificial Sequence
  Description of Artificial Sequence: Synthetic oligonucleotide
  Target: SCNA; (+) strand; PAM type: YTN; PAM sequence: TTT
gtttaactcatcctgcttct

SEQ ID NO: 72037 - DNA, 20 bp, Artificial Sequence
  Description of Artificial Sequence: Synthetic oligonucleotide
  Target: SCNA; (+) strand; PAM type: YTN; PAM sequence: TTG
tttaactcatcctgcttctg

SEQ ID NO: 72038 - DNA, 20 bp, Artificial Sequence
  Description of Artificial Sequence: Synthetic oligonucleotide
  Target: SCNA; (+) strand; PAM type: YTN; PAM sequence: TTT
aactcatcctgcttctgagc

SEQ ID NO: 72039 - DNA, 20 bp, Artificial Sequence
  Description of Artificial Sequence: Synthetic oligonucleotide
  Target: SCNA; (+) strand; PAM type: YTN; PAM sequence: TTA
actcatcctgcttctgagct

SEQ ID NO: 72040 - DNA, 20 bp, Artificial Sequence
  Description of Artificial Sequence: Synthetic oligonucleotide
  Target: SCNA; (+) strand; PAM type: YTN; PAM sequence: CTC
atcctgcttctgagctccca

SEQ ID NO: 72041 - DNA, 20 bp, Artificial Sequence
  Description of Artificial Sequence: Synthetic oligonucleotide
  Target: SCNA; (+) strand; PAM type: YTN; PAM sequence: CTG
cttctgagctcccaagatcc

SEQ ID NO: 72042 - DNA, 20 bp, Artificial Sequence
  Description of Artificial Sequence: Synthetic oligonucleotide
  Target: SCNA; (+) strand; PAM type: YTN; PAM sequence: CTT
ctgagctcccaagatccctg

SEQ ID NO: 72043 - DNA, 20 bp, Artificial Sequence
  Description of Artificial Sequence: Synthetic oligonucleotide
  Target: SCNA; (+) strand; PAM type: YTN; PAM sequence: TTC
tgagctcccaagatccctga

SEQ ID NO: 72044 - DNA, 20 bp, Artificial Sequence
  Description of Artificial Sequence: Synthetic oligonucleotide
  Target: SCNA; (+) strand; PAM type: YTN; PAM sequence: CTG
agctcccaagatccctgaac

SEQ ID NO: 72045 - DNA, 20 bp, Artificial Sequence
  Description of Artificial Sequence: Synthetic oligonucleotide
  Target: SCNA; (+) strand; PAM type: YTN; PAM sequence: CTC
ccaagatccctgaacctact

SEQ ID NO: 72046 - DNA, 20 bp, Artificial Sequence
  Description of Artificial Sequence: Synthetic oligonucleotide
  Target: SCNA; (+) strand; PAM type: YTN; PAM sequence: CTG
aacctacttctcttatataa

SEQ ID NO: 72047 - DNA, 20 bp, Artificial Sequence
  Description of Artificial Sequence: Synthetic oligonucleotide
  Target: SCNA; (+) strand; PAM type: YTN; PAM sequence: CTA
cttctcttatataatttatt

SEQ ID NO: 72048 - DNA, 20 bp, Artificial Sequence
  Description of Artificial Sequence: Synthetic oligonucleotide
  Target: SCNA; (+) strand; PAM type: YTN; PAM sequence: CTT
ctcttatataatttattata

SEQ ID NO: 72049 - DNA, 20 bp, Artificial Sequence
  Description of Artificial Sequence: Synthetic oligonucleotide
  Target: SCNA; (+) strand; PAM type: YTN; PAM sequence: TTC
tcttatataatttattatag

SEQ ID NO: 72050 - DNA, 20 bp, Artificial Sequence
  Description of Artificial Sequence: Synthetic oligonucleotide
  Target: SCNA; (+) strand; PAM type: YTN; PAM sequence: CTC
ttatataatttattatagaa

SEQ ID NO: 72051 - DNA, 20 bp, Artificial Sequence
  Description of Artificial Sequence: Synthetic oligonucleotide
  Target: SCNA; (+) strand; PAM type: YTN; PAM sequence: CTT
atataatttattatagaaag

SEQ ID NO: 72052 - DNA, 20 bp, Artificial Sequence
  Description of Artificial Sequence: Synthetic oligonucleotide
  Target: SCNA; (+) strand; PAM type: YTN; PAM sequence: TTA
tataatttattatagaaagt

SEQ ID NO: 72053 - DNA, 20 bp, Artificial Sequence
  Description of Artificial Sequence: Synthetic oligonucleotide
  Target: SCNA; (+) strand; PAM type: YTN; PAM sequence: TTT
attatagaaagttatttaag

SEQ ID NO: 72054 - DNA, 20 bp, Artificial Sequence
  Description of Artificial Sequence: Synthetic oligonucleotide
  Target: SCNA; (+) strand; PAM type: YTN; PAM sequence: TTA
ttatagaaagttatttaagc

SEQ ID NO: 72055 - DNA, 20 bp, Artificial Sequence
  Description of Artificial Sequence: Synthetic oligonucleotide
  Target: SCNA; (+) strand; PAM type: YTN; PAM sequence: TTA
tagaaagttatttaagcatg

SEQ ID NO: 72056 - DNA, 20 bp, Artificial Sequence
  Description of Artificial Sequence: Synthetic oligonucleotide
  Target: SCNA; (+) strand; PAM type: YTN; PAM sequence: TTA
tttaagcatgagatttctct

SEQ ID NO: 72057 - DNA, 20 bp, Artificial Sequence
  Description of Artificial Sequence: Synthetic oligonucleotide
  Target: SCNA; (+) strand; PAM type: YTN; PAM sequence: TTT
aagcatgagatttctctagt

SEQ ID NO: 72058 - DNA, 20 bp, Artificial Sequence
  Description of Artificial Sequence: Synthetic oligonucleotide
  Target: SCNA; (+) strand; PAM type: YTN; PAM sequence: TTA
agcatgagatttctctagtt

SEQ ID NO: 72059 - DNA, 20 bp, Artificial Sequence
  Description of Artificial Sequence: Synthetic oligonucleotide
  Target: SCNA; (+) strand; PAM type: YTN; PAM sequence: TTT
ctctagtttatctttgaatc

SEQ ID NO: 72060 - DNA, 20 bp, Artificial Sequence
  Description of Artificial Sequence: Synthetic oligonucleotide
  Target: SCNA; (+) strand; PAM type: YTN; PAM sequence: TTC
tctagtttatctttgaatct

SEQ ID NO: 72061 - DNA, 20 bp, Artificial Sequence
  Description of Artificial Sequence: Synthetic oligonucleotide
  Target: SCNA; (+) strand; PAM type: YTN; PAM sequence: CTC
tagtttatctttgaatctcc

SEQ ID NO: 72062 - DNA, 20 bp, Artificial Sequence
  Description of Artificial Sequence: Synthetic oligonucleotide
  Target: SCNA; (+) strand; PAM type: YTN; PAM sequence: CTA
gtttatctttgaatctccac

SEQ ID NO: 72063 - DNA, 20 bp, Artificial Sequence
  Description of Artificial Sequence: Synthetic oligonucleotide
  Target: SCNA; (+) strand; PAM type: YTN; PAM sequence: TTT
atctttgaatctccactgtc

SEQ ID NO: 72064 - DNA, 20 bp, Artificial Sequence
  Description of Artificial Sequence: Synthetic oligonucleotide
  Target: SCNA; (+) strand; PAM type: YTN; PAM sequence: TTA
tctttgaatctccactgtca

SEQ ID NO: 72065 - DNA, 20 bp, Artificial Sequence
  Description of Artificial Sequence: Synthetic oligonucleotide
  Target: SCNA; (+) strand; PAM type: YTN; PAM sequence: CTT
tgaatctccactgtcaatat

SEQ ID NO: 72066 - DNA, 20 bp, Artificial Sequence
  Description of Artificial Sequence: Synthetic oligonucleotide
  Target: SCNA; (+) strand; PAM type: YTN; PAM sequence: TTT
gaatctccactgtcaatata

SEQ ID NO: 72067 - DNA, 20 bp, Artificial Sequence
  Description of Artificial Sequence: Synthetic oligonucleotide
  Target: SCNA; (+) strand; PAM type: YTN; PAM sequence: TTG
aatctccactgtcaatatag

SEQ ID NO: 72068 - DNA, 20 bp, Artificial Sequence
  Description of Artificial Sequence: Synthetic oligonucleotide
  Target: SCNA; (+) strand; PAM type: YTN; PAM sequence: CTC
cactgtcaatatagtctctg

SEQ ID NO: 72069 - DNA, 20 bp, Artificial Sequence
  Description of Artificial Sequence: Synthetic oligonucleotide
  Target: SCNA; (+) strand; PAM type: YTN; PAM sequence: CTG
tcaatatagtctctggccaa

SEQ ID NO: 72070 - DNA, 20 bp, Artificial Sequence
  Description of Artificial Sequence: Synthetic oligonucleotide
  Target: SCNA; (+) strand; PAM type: YTN; PAM sequence: CTC
tggccaatgaaagctgttca

SEQ ID NO: 72071 - DNA, 20 bp, Artificial Sequence
  Description of Artificial Sequence: Synthetic oligonucleotide
  Target: SCNA; (+) strand; PAM type: YTN; PAM sequence: CTG
gccaatgaaagctgttcagt

SEQ ID NO: 72072 - DNA, 20 bp, Artificial Sequence
  Description of Artificial Sequence: Synthetic oligonucleotide
  Target: SCNA; (+) strand; PAM type: YTN; PAM sequence: CTG
ttcagttaatgtgtggtgat

SEQ ID NO: 72073 - DNA, 20 bp, Artificial Sequence
  Description of Artificial Sequence: Synthetic oligonucleotide
  Target: SCNA; (+) strand; PAM type: YTN; PAM sequence: TTC
agttaatgtgtggtgattca

SEQ ID NO: 72074 - DNA, 20 bp, Artificial Sequence
  Description of Artificial Sequence: Synthetic oligonucleotide
  Target: SCNA; (+) strand; PAM type: YTN; PAM sequence: TTA
atgtgtggtgattcaataca

SEQ ID NO: 72075 - DNA, 20 bp, Artificial Sequence
  Description of Artificial Sequence: Synthetic oligonucleotide
  Target: SCNA; (+) strand; PAM type: YTN; PAM sequence: TTC
aatacatgcactcctaattc

SEQ ID NO: 72076 - DNA, 20 bp, Artificial Sequence
  Description of Artificial Sequence: Synthetic oligonucleotide
  Target: SCNA; (+) strand; PAM type: YTN; PAM sequence: CTC
ctaattctcatttatgaaca

SEQ ID NO: 72077 - DNA, 20 bp, Artificial Sequence
  Description of Artificial Sequence: Synthetic oligonucleotide
  Target: SCNA; (+) strand; PAM type: YTN; PAM sequence: CTA
attctcatttatgaacattt

SEQ ID NO: 72078 - DNA, 20 bp, Artificial Sequence
  Description of Artificial Sequence: Synthetic oligonucleotide
  Target: SCNA; (+) strand; PAM type: YTN; PAM sequence: TTC
tcatttatgaacattttgtt

SEQ ID NO: 72079 - DNA, 20 bp, Artificial Sequence
  Description of Artificial Sequence: Synthetic oligonucleotide
  Target: SCNA; (+) strand; PAM type: YTN; PAM sequence: CTC
atttatgaacattttgttaa

SEQ ID NO: 72080 - DNA, 20 bp, Artificial Sequence
  Description of Artificial Sequence: Synthetic oligonucleotide
  Target: SCNA; (+) strand; PAM type: YTN; PAM sequence: TTT
atgaacattttgttaaatcg

SEQ ID NO: 72081 - DNA, 20 bp, Artificial Sequence
  Description of Artificial Sequence: Synthetic oligonucleotide
  Target: SCNA; (+) strand; PAM type: YTN; PAM sequence: TTA
tgaacattttgttaaatcgt

SEQ ID NO: 72082 - DNA, 20 bp, Artificial Sequence
  Description of Artificial Sequence: Synthetic oligonucleotide
  Target: SCNA; (+) strand; PAM type: YTN; PAM sequence: TTT
tgttaaatcgtggcctatag

SEQ ID NO: 72083 - DNA, 20 bp, Artificial Sequence
  Description of Artificial Sequence: Synthetic oligonucleotide
  Target: SCNA; (+) strand; PAM type: YTN; PAM sequence: TTT
gttaaatcgtggcctatagg

SEQ ID NO: 72084 - DNA, 20 bp, Artificial Sequence
  Description of Artificial Sequence: Synthetic oligonucleotide
  Target: SCNA; (+) strand; PAM type: YTN; PAM sequence: TTG
ttaaatcgtggcctatagga

SEQ ID NO: 72085 - DNA, 20 bp, Artificial Sequence
  Description of Artificial Sequence: Synthetic oligonucleotide
  Target: SCNA; (+) strand; PAM type: YTN; PAM sequence: TTA
aatcgtggcctataggaaat

SEQ ID NO: 72086 - DNA, 20 bp, Artificial Sequence
  Description of Artificial Sequence: Synthetic oligonucleotide
  Target: SCNA; (+) strand; PAM type: YTN; PAM sequence: CTA
taggaaataggcatgtaaaa

SEQ ID NO: 72087 - DNA, 20 bp, Artificial Sequence
  Description of Artificial Sequence: Synthetic oligonucleotide
  Target: SCNA; (+) strand; PAM type: YTN; PAM sequence: CTG
taagttttatagcacctagt

SEQ ID NO: 72088 - DNA, 20 bp, Artificial Sequence
  Description of Artificial Sequence: Synthetic oligonucleotide
  Target: SCNA; (+) strand; PAM type: YTN; PAM sequence: TTT
tatagcacctagtacagagt

SEQ ID NO: 72089 - DNA, 20 bp, Artificial Sequence
  Description of Artificial Sequence: Synthetic oligonucleotide
  Target: SCNA; (+) strand; PAM type: YTN; PAM sequence: TTT
atagcacctagtacagagtg

SEQ ID NO: 72090 - DNA, 20 bp, Artificial Sequence
  Description of Artificial Sequence: Synthetic oligonucleotide
  Target: SCNA; (+) strand; PAM type: YTN; PAM sequence: TTA
tagcacctagtacagagtga

SEQ ID NO: 72091 - DNA, 20 bp, Artificial Sequence
  Description of Artificial Sequence: Synthetic oligonucleotide
  Target: SCNA; (+) strand; PAM type: YTN; PAM sequence: CTA
gtacagagtgacagctcaaa

SEQ ID NO: 72092 - DNA, 20 bp, Artificial Sequence
  Description of Artificial Sequence: Synthetic oligonucleotide
  Target: SCNA; (+) strand; PAM type: YTN; PAM sequence: CTC
aaaactatttgcagaatgaa

SEQ ID NO: 72093 - DNA, 20 bp, Artificial Sequence
  Description of Artificial Sequence: Synthetic oligonucleotide
  Target: SCNA; (+) strand; PAM type: YTN; PAM sequence: CTA
tttgcagaatgaaagaaaaa

SEQ ID NO: 72094 - DNA, 20 bp, Artificial Sequence
  Description of Artificial Sequence: Synthetic oligonucleotide
  Target: SCNA; (+) strand; PAM type: YTN; PAM sequence: TTT
gcagaatgaaagaaaaaagg

SEQ ID NO: 72095 - DNA, 20 bp, Artificial Sequence
  Description of Artificial Sequence: Synthetic oligonucleotide
  Target: SCNA; (+) strand; PAM type: YTN; PAM sequence: TTG
cagaatgaaagaaaaaagga

SEQ ID NO: 72096 - DNA, 20 bp, Artificial Sequence
  Description of Artificial Sequence: Synthetic oligonucleotide
  Target: SCNA; (+) strand; PAM type: YTN; PAM sequence: TTG
actctccaaaacaatacaca

SEQ ID NO: 72097 - DNA, 20 bp, Artificial Sequence
  Description of Artificial Sequence: Synthetic oligonucleotide
  Target: SCNA; (+) strand; PAM type: YTN; PAM sequence: CTC
tccaaaacaatacacatggc

SEQ ID NO: 72098 - DNA, 20 bp, Artificial Sequence
  Description of Artificial Sequence: Synthetic oligonucleotide
  Target: SCNA; (+) strand; PAM type: YTN; PAM sequence: CTC
caaaacaatacacatggcca

SEQ ID NO: 72099 - DNA, 20 bp, Artificial Sequence
  Description of Artificial Sequence: Synthetic oligonucleotide
  Target: SCNA; (+) strand; PAM type: YTN; PAM sequence: CTG
gaaaaaagtaatagtgtccc

SEQ ID NO: 72100 - DNA, 20 bp, Artificial Sequence
  Description of Artificial Sequence: Synthetic oligonucleotide
  Target: SCNA; (+) strand; PAM type: YTN; PAM sequence: CTT
ctaggaggtgtgaggaagaa

SEQ ID NO: 72101 - DNA, 20 bp, Artificial Sequence
  Description of Artificial Sequence: Synthetic oligonucleotide
  Target: SCNA; (+) strand; PAM type: YTN; PAM sequence: TTC
taggaggtgtgaggaagaaa

SEQ ID NO: 72102 - DNA, 20 bp, Artificial Sequence
  Description of Artificial Sequence: Synthetic oligonucleotide
  Target: SCNA; (+) strand; PAM type: YTN; PAM sequence: CTA
ggaggtgtgaggaagaaaga

SEQ ID NO: 72103 - DNA, 20 bp, Artificial Sequence
  Description of Artificial Sequence: Synthetic oligonucleotide
  Target: SCNA; (+) strand; PAM type: YTN; PAM sequence: TTG
gcaccttttcccaggcttta

SEQ ID NO: 72104 - DNA, 20 bp, Artificial Sequence
  Description of Artificial Sequence: Synthetic oligonucleotide
  Target: SCNA; (+) strand; PAM type: YTN; PAM sequence: CTT
ttcccaggctttagactgag

SEQ ID NO: 72105 - DNA, 20 bp, Artificial Sequence
  Description of Artificial Sequence: Synthetic oligonucleotide
  Target: SCNA; (+) strand; PAM type: YTN; PAM sequence: TTT
tcccaggctttagactgaga

SEQ ID NO: 72106 - DNA, 20 bp, Artificial Sequence
  Description of Artificial Sequence: Synthetic oligonucleotide
  Target: SCNA; (+) strand; PAM type: YTN; PAM sequence: TTT
cccaggctttagactgagag

SEQ ID NO: 72107 - DNA, 20 bp, Artificial Sequence
  Description of Artificial Sequence: Synthetic oligonucleotide
  Target: SCNA; (+) strand; PAM type: YTN; PAM sequence: TTC
ccaggctttagactgagaga

SEQ ID NO: 72108 - DNA, 20 bp, Artificial Sequence
  Description of Artificial Sequence: Synthetic oligonucleotide
  Target: SCNA; (+) strand; PAM type: YTN; PAM sequence: CTT
tagactgagagatattaact

SEQ ID NO: 72109 - DNA, 20 bp, Artificial Sequence
  Description of Artificial Sequence: Synthetic oligonucleotide
  Target: SCNA; (+) strand; PAM type: YTN; PAM sequence: TTT
agactgagagatattaactt

SEQ ID NO: 72110 - DNA, 20 bp, Artificial Sequence
  Description of Artificial Sequence: Synthetic oligonucleotide
  Target: SCNA; (+) strand; PAM type: YTN; PAM sequence: TTA
gactgagagatattaacttg

SEQ ID NO: 72111 - DNA, 20 bp, Artificial Sequence
  Description of Artificial Sequence: Synthetic oligonucleotide
  Target: SCNA; (+) strand; PAM type: YTN; PAM sequence: CTG
agagatattaacttggagag

SEQ ID NO: 72112 - DNA, 20 bp, Artificial Sequence
  Description of Artificial Sequence: Synthetic oligonucleotide
  Target: SCNA; (+) strand; PAM type: YTN; PAM sequence: TTA
acttggagaggggaaagcat

SEQ ID NO: 72113 - DNA, 20 bp, Artificial Sequence
  Description of Artificial Sequence: Synthetic oligonucleotide
  Target: SCNA; (+) strand; PAM type: YTN; PAM sequence: CTT
ggagaggggaaagcatagtc

SEQ ID NO: 72114 - DNA, 20 bp, Artificial Sequence
  Description of Artificial Sequence: Synthetic oligonucleotide
  Target: SCNA; (+) strand; PAM type: YTN; PAM sequence: TTG
gagaggggaaagcatagtct

SEQ ID NO: 72115 - DNA, 20 bp, Artificial Sequence
  Description of Artificial Sequence: Synthetic oligonucleotide
  Target: SCNA; (+) strand; PAM type: YTN; PAM sequence: CTA
aagagaaacagggctaagga

SEQ ID NO: 72116 - DNA, 20 bp, Artificial Sequence
  Description of Artificial Sequence: Synthetic oligonucleotide
  Target: SCNA; (+) strand; PAM type: YTN; PAM sequence: CTA
aggaaggtatcactttcttt

SEQ ID NO: 72117 - DNA, 20 bp, Artificial Sequence
  Description of Artificial Sequence: Synthetic oligonucleotide
  Target: SCNA; (+) strand; PAM type: YTN; PAM sequence: CTT
tcttttactatctctcagac

SEQ ID NO: 72118 - DNA, 20 bp, Artificial Sequence
  Description of Artificial Sequence: Synthetic oligonucleotide
  Target: SCNA; (+) strand; PAM type: YTN; PAM sequence: TTT
cttttactatctctcagaca

SEQ ID NO: 72119 - DNA, 20 bp, Artificial Sequence
  Description of Artificial Sequence: Synthetic oligonucleotide
  Target: SCNA; (+) strand; PAM type: YTN; PAM sequence: TTC
ttttactatctctcagacag

SEQ ID NO: 72120 - DNA, 20 bp, Artificial Sequence
  Description of Artificial Sequence: Synthetic oligonucleotide
  Target: SCNA; (+) strand; PAM type: YTN; PAM sequence: CTT
ttactatctctcagacagat

SEQ ID NO: 72121 - DNA, 20 bp, Artificial Sequence
  Description of Artificial Sequence: Synthetic oligonucleotide
  Target: SCNA; (+) strand; PAM type: YTN; PAM sequence: TTT
tactatctctcagacagatt

SEQ ID NO: 72122 - DNA, 20 bp, Artificial Sequence
  Description of Artificial Sequence: Synthetic oligonucleotide
  Target: SCNA; (+) strand; PAM type: YTN; PAM sequence: TTT
actatctctcagacagattg

SEQ ID NO: 72123 - DNA, 20 bp, Artificial Sequence
  Description of Artificial Sequence: Synthetic oligonucleotide
  Target: SCNA; (+) strand; PAM type: YTN; PAM sequence: TTA
ctatctctcagacagattgc

SEQ ID NO: 72124 - DNA, 20 bp, Artificial Sequence
  Description of Artificial Sequence: Synthetic oligonucleotide
  Target: SCNA; (+) strand; PAM type: YTN; PAM sequence: CTA
tctctcagacagattgcaat

SEQ ID NO: 72125 - DNA, 20 bp, Artificial Sequence
  Description of Artificial Sequence: Synthetic oligonucleotide
  Target: SCNA; (+) strand; PAM type: YTN; PAM sequence: CTC
tcagacagattgcaatgcaa

SEQ ID NO: 72126 - DNA, 20 bp, Artificial Sequence
  Description of Artificial Sequence: Synthetic oligonucleotide
  Target: SCNA; (+) strand; PAM type: YTN; PAM sequence: CTC
agacagattgcaatgcaatc

SEQ ID NO: 72127 - DNA, 20 bp, Artificial Sequence
  Description of Artificial Sequence: Synthetic oligonucleotide
  Target: SCNA; (+) strand; PAM type: YTN; PAM sequence: TTG
caatgcaatctcaaggcagc

SEQ ID NO: 72128 - DNA, 20 bp, Artificial Sequence
  Description of Artificial Sequence: Synthetic oligonucleotide
  Target: SCNA; (+) strand; PAM type: YTN; PAM sequence: CTC
aaggcagcactacactggac

SEQ ID NO: 72129 - DNA, 20 bp, Artificial Sequence
  Description of Artificial Sequence: Synthetic oligonucleotide
  Target: SCNA; (+) strand; PAM type: YTN; PAM sequence: CTA
cactggacaaggtactagga

SEQ ID NO: 72130 - DNA, 20 bp, Artificial Sequence
  Description of Artificial Sequence: Synthetic oligonucleotide
  Target: SCNA; (+) strand; PAM type: YTN; PAM sequence: CTG
gacaaggtactaggactctg

SEQ ID NO: 72131 - DNA, 20 bp, Artificial Sequence
  Description of Artificial Sequence: Synthetic oligonucleotide
  Target: SCNA; (+) strand; PAM type: YTN; PAM sequence: CTA
ggactctgaccattcttgtt

SEQ ID NO: 72132 - DNA, 20 bp, Artificial Sequence
  Description of Artificial Sequence: Synthetic oligonucleotide
  Target: SCNA; (+) strand; PAM type: YTN; PAM sequence: CTC
tgaccattcttgtttttatt

SEQ ID NO: 72133 - DNA, 20 bp, Artificial Sequence
  Description of Artificial Sequence: Synthetic oligonucleotide
  Target: SCNA; (+) strand; PAM type: YTN; PAM sequence: CTG
accattcttgtttttattct

SEQ ID NO: 72134 - DNA, 20 bp, Artificial Sequence
  Description of Artificial Sequence: Synthetic oligonucleotide
  Target: SCNA; (+) strand; PAM type: YTN; PAM sequence: TTC
ttgtttttattctttttttt

SEQ ID NO: 72135 - DNA, 20 bp, Artificial Sequence
  Description of Artificial Sequence: Synthetic oligonucleotide
  Target: SCNA; (+) strand; PAM type: YTN; PAM sequence: CTT
gtttttattctttttttttt

SEQ ID NO: 72136 - DNA, 20 bp, Artificial Sequence
  Description of Artificial Sequence: Synthetic oligonucleotide
  Target: SCNA; (+) strand; PAM type: YTN; PAM sequence: TTG
tttttattcttttttttttt

SEQ ID NO: 72137 - DNA, 20 bp, Artificial Sequence
  Description of Artificial Sequence: Synthetic oligonucleotide
  Target: SCNA; (+) strand; PAM type: YTN; PAM sequence: TTT
ttattctttttttttttttt

SEQ ID NO: 72138 - DNA, 20 bp, Artificial Sequence
  Description of Artificial Sequence: Synthetic oligonucleotide
  Target: SCNA; (+) strand; PAM type: YTN; PAM sequence: TTT
tattcttttttttttttttg

SEQ ID NO: 72139 - DNA, 20 bp, Artificial Sequence
  Description of Artificial Sequence: Synthetic oligonucleotide
  Target: SCNA; (+) strand; PAM type: YTN; PAM sequence: TTT
attcttttttttttttttga

SEQ ID NO: 72140 - DNA, 20 bp, Artificial Sequence
  Description of Artificial Sequence: Synthetic oligonucleotide
  Target: SCNA; (+) strand; PAM type: YTN; PAM sequence: TTA
ttcttttttttttttttgag

SEQ ID NO: 72141 - DNA, 20 bp, Artificial Sequence
  Description of Artificial Sequence: Synthetic oligonucleotide
  Target: SCNA; (+) strand; PAM type: YTN; PAM sequence: TTC
ttttttttttttttgagaca

SEQ ID NO: 72142 - DNA, 20 bp, Artificial Sequence
  Description of Artificial Sequence: Synthetic oligonucleotide
  Target: SCNA; (+) strand; PAM type: YTN; PAM sequence: CTT
ttttttttttttgagacaga

SEQ ID NO: 72143 - DNA, 20 bp, Artificial Sequence
  Description of Artificial Sequence: Synthetic oligonucleotide
  Target: SCNA; (+) strand; PAM type: YTN; PAM sequence: TTT
tttttttttttgagacagag

SEQ ID NO: 72144 - DNA, 20 bp, Artificial Sequence
  Description of Artificial Sequence: Synthetic oligonucleotide
  Target: SCNA; (+) strand; PAM type: YTN; PAM sequence: TTT
ttttttttttgagacagagt

SEQ ID NO: 72145 - DNA, 20 bp, Artificial Sequence
  Description of Artificial Sequence: Synthetic oligonucleotide
  Target: SCNA; (+) strand; PAM type: YTN; PAM sequence: TTT
tttttttttgagacagagtc

SEQ ID NO: 72146 - DNA, 20 bp, Artificial Sequence
  Description of Artificial Sequence: Synthetic oligonucleotide
  Target: SCNA; (+) strand; PAM type: YTN; PAM sequence: TTT
ttttttttgagacagagtct

SEQ ID NO: 72147 - DNA, 20 bp, Artificial Sequence
  Description of Artificial Sequence: Synthetic oligonucleotide
  Target: SCNA; (+) strand; PAM type: YTN; PAM sequence: TTT
tttttttgagacagagtctc

SEQ ID NO: 72148 - DNA, 20 bp, Artificial Sequence
  Description of Artificial Sequence: Synthetic oligonucleotide
  Target: SCNA; (+) strand; PAM type: YTN; PAM sequence: TTT
ttttttgagacagagtctca

SEQ ID NO: 72149 - DNA, 20 bp, Artificial Sequence
  Description of Artificial Sequence: Synthetic oligonucleotide
  Target: SCNA; (+) strand; PAM type: YTN; PAM sequence: TTT
tttttgagacagagtctcac

SEQ ID NO: 72150 - DNA, 20 bp, Artificial Sequence
  Description of Artificial Sequence: Synthetic oligonucleotide
  Target: SCNA; (+) strand; PAM type: YTN; PAM sequence: TTT
ttttgagacagagtctcact

SEQ ID NO: 72151 - DNA, 20 bp, Artificial Sequence
  Description of Artificial Sequence: Synthetic oligonucleotide
  Target: SCNA; (+) strand; PAM type: YTN; PAM sequence: TTT
tttgagacagagtctcacta

SEQ ID NO: 72152 - DNA, 20 bp, Artificial Sequence
  Description of Artificial Sequence: Synthetic oligonucleotide
  Target: SCNA; (+) strand; PAM type: YTN; PAM sequence: TTT
ttgagacagagtctcactat

SEQ ID NO: 72153 - DNA, 20 bp, Artificial Sequence
  Description of Artificial Sequence: Synthetic oligonucleotide
  Target: SCNA; (+) strand; PAM type: YTN; PAM sequence: TTT
tgagacagagtctcactatg

SEQ ID NO: 72154 - DNA, 20 bp, Artificial Sequence
  Description of Artificial Sequence: Synthetic oligonucleotide
  Target: SCNA; (+) strand; PAM type: YTN; PAM sequence: TTT
gagacagagtctcactatgt

SEQ ID NO: 72155 - DNA, 20 bp, Artificial Sequence
  Description of Artificial Sequence: Synthetic oligonucleotide
  Target: SCNA; (+) strand; PAM type: YTN; PAM sequence: TTG
agacagagtctcactatgtc

SEQ ID NO: 72156 - DNA, 20 bp, Artificial Sequence
  Description of Artificial Sequence: Synthetic oligonucleotide
  Target: SCNA; (+) strand; PAM type: YTN; PAM sequence: CTC
actatgtcacccaggctgga

SEQ ID NO: 72157 - DNA, 20 bp, Artificial Sequence
  Description of Artificial Sequence: Synthetic oligonucleotide
  Target: SCNA; (+) strand; PAM type: YTN; PAM sequence: CTA
tgtcacccaggctggagcac

SEQ ID NO: 72158 - DNA, 20 bp, Artificial Sequence
  Description of Artificial Sequence: Synthetic oligonucleotide
  Target: SCNA; (+) strand; PAM type: YTN; PAM sequence: CTG
gagcacagtggcactatctt

SEQ ID NO: 72159 - DNA, 20 bp, Artificial Sequence
  Description of Artificial Sequence: Synthetic oligonucleotide
  Target: SCNA; (+) strand; PAM type: YTN; PAM sequence: CTA
tcttggctcactgcaacctc

SEQ ID NO: 72160 - DNA, 20 bp, Artificial Sequence
  Description of Artificial Sequence: Synthetic oligonucleotide
  Target: SCNA; (+) strand; PAM type: YTN; PAM sequence: CTT
ggctcactgcaacctctgcc

SEQ ID NO: 72161 - DNA, 20 bp, Artificial Sequence
  Description of Artificial Sequence: Synthetic oligonucleotide
  Target: SCNA; (+) strand; PAM type: YTN; PAM sequence: TTG
gctcactgcaacctctgcct

SEQ ID NO: 72162 - DNA, 20 bp, Artificial Sequence
  Description of Artificial Sequence: Synthetic oligonucleotide
  Target: SCNA; (+) strand; PAM type: YTN; PAM sequence: CTC
actgcaacctctgcctcccg

SEQ ID NO: 72163 - DNA, 20 bp, Artificial Sequence
  Description of Artificial Sequence: Synthetic oligonucleotide
  Target: SCNA; (+) strand; PAM type: YTN; PAM sequence: CTG
caacctctgcctcccgggtt

SEQ ID NO: 72164 - DNA, 20 bp, Artificial Sequence
  Description of Artificial Sequence: Synthetic oligonucleotide
  Target: SCNA; (+) strand; PAM type: YTN; PAM sequence: CTC
tgcctcccgggttcaagtga

SEQ ID NO: 72165 - DNA, 20 bp, Artificial Sequence
  Description of Artificial Sequence: Synthetic oligonucleotide
  Target: SCNA; (+) strand; PAM type: YTN; PAM sequence: CTG
cctcccgggttcaagtgatt

SEQ ID NO: 72166 - DNA, 20 bp, Artificial Sequence
  Description of Artificial Sequence: Synthetic oligonucleotide
  Target: SCNA; (+) strand; PAM type: YTN; PAM sequence: CTC
ccgggttcaagtgattctcc

SEQ ID NO: 72167 - DNA, 20 bp, Artificial Sequence
  Description of Artificial Sequence: Synthetic oligonucleotide
  Target: SCNA; (+) strand; PAM type: YTN; PAM sequence: TTC
aagtgattctcctgcctcag

SEQ ID NO: 72168 - DNA, 20 bp, Artificial Sequence
  Description of Artificial Sequence: Synthetic oligonucleotide
  Target: SCNA; (+) strand; PAM type: YTN; PAM sequence: TTC
tcctgcctcagcctcccaag

SEQ ID NO: 72169 - DNA, 20 bp, Artificial Sequence
  Description of Artificial Sequence: Synthetic oligonucleotide
  Target: SCNA; (+) strand; PAM type: YTN; PAM sequence: CTC
ctgcctcagcctcccaagta

SEQ ID NO: 72170 - DNA, 20 bp, Artificial Sequence
  Description of Artificial Sequence: Synthetic oligonucleotide
  Target: SCNA; (+) strand; PAM type: YTN; PAM sequence: CTG
cctcagcctcccaagtagct

SEQ ID NO: 72171 - DNA, 20 bp, Artificial Sequence
  Description of Artificial Sequence: Synthetic oligonucleotide
  Target: SCNA; (+) strand; PAM type: YTN; PAM sequence: CTC
agcctcccaagtagctggga

SEQ ID NO: 72172 - DNA, 20 bp, Artificial Sequence
  Description of Artificial Sequence: Synthetic oligonucleotide
  Target: SCNA; (+) strand; PAM type: YTN; PAM sequence: CTC
ccaagtagctgggaatacag

SEQ ID NO: 72173 - DNA, 20 bp, Artificial Sequence
  Description of Artificial Sequence: Synthetic oligonucleotide
  Target: SCNA; (+) strand; PAM type: YTN; PAM sequence: CTG
ggaatacaggtgcctgtcac

SEQ ID NO: 72174 - DNA, 20 bp, Artificial Sequence
  Description of Artificial Sequence: Synthetic oligonucleotide
  Target: SCNA; (+) strand; PAM type: YTN; PAM sequence: CTG
tcaccacacctggctatttt

SEQ ID NO: 72175 - DNA, 20 bp, Artificial Sequence
  Description of Artificial Sequence: Synthetic oligonucleotide
  Target: SCNA; (+) strand; PAM type: YTN; PAM sequence: CTG
gctatttttttttttgtatt

SEQ ID NO: 72176 - DNA, 20 bp, Artificial Sequence
  Description of Artificial Sequence: Synthetic oligonucleotide
  Target: SCNA; (+) strand; PAM type: YTN; PAM sequence: CTA
tttttttttttgtatttttt

SEQ ID NO: 72177 - DNA, 20 bp, Artificial Sequence
  Description of Artificial Sequence: Synthetic oligonucleotide
  Target: SCNA; (+) strand; PAM type: YTN; PAM sequence: TTT
ttttttttgtattttttttg

SEQ ID NO: 72178 - DNA, 20 bp, Artificial Sequence
  Description of Artificial Sequence: Synthetic oligonucleotide
  Target: SCNA; (+) strand; PAM type: YTN; PAM sequence: TTT
tttttttgtattttttttgt

SEQ ID NO: 72179 - DNA, 20 bp, Artificial Sequence
  Description of Artificial Sequence: Synthetic oligonucleotide
  Target: SCNA; (+) strand; PAM type: YTN; PAM sequence: TTT
ttttttgtattttttttgta

SEQ ID NO: 72180 - DNA, 20 bp, Artificial Sequence
  Description of Artificial Sequence: Synthetic oligonucleotide
  Target: SCNA; (+) strand; PAM type: YTN; PAM sequence: TTT
tttttgtattttttttgtaa

SEQ ID NO: 72181 - DNA, 20 bp, Artificial Sequence
  Description of Artificial Sequence: Synthetic oligonucleotide
  Target: SCNA; (+) strand; PAM type: YTN; PAM sequence: TTT
ttttgtattttttttgtaat

SEQ ID NO: 72182 - DNA, 20 bp, Artificial Sequence
  Description of Artificial Sequence: Synthetic oligonucleotide
  Target: SCNA; (+) strand; PAM type: YTN; PAM sequence: TTT
tttgtattttttttgtaatt

SEQ ID NO: 72183 - DNA, 20 bp, Artificial Sequence
  Description of Artificial Sequence: Synthetic oligonucleotide
  Target: SCNA; (+) strand; PAM type: YTN; PAM sequence: TTT
ttgtattttttttgtaattt

SEQ ID NO: 72184 - DNA, 20 bp, Artificial Sequence
  Description of Artificial Sequence: Synthetic oligonucleotide
  Target: SCNA; (+) strand; PAM type: YTN; PAM sequence: TTT
tgtattttttttgtaatttt

SEQ ID NO: 72185 - DNA, 20 bp, Artificial Sequence
  Description of Artificial Sequence: Synthetic oligonucleotide
  Target: SCNA; (+) strand; PAM type: YTN; PAM sequence: TTT
gtattttttttgtaattttt

SEQ ID NO: 72186 - DNA, 20 bp, Artificial Sequence
  Description of Artificial Sequence: Synthetic oligonucleotide
  Target: SCNA; (+) strand; PAM type: YTN; PAM sequence: TTG
tattttttttgtaatttttt

SEQ ID NO: 72187 - DNA, 20 bp, Artificial Sequence
  Description of Artificial Sequence: Synthetic oligonucleotide
  Target: SCNA; (+) strand; PAM type: YTN; PAM sequence: TTT
tttttgtaatttttttttgt

SEQ ID NO: 72188 - DNA, 20 bp, Artificial Sequence
  Description of Artificial Sequence: Synthetic oligonucleotide
  Target: SCNA; (+) strand; PAM type: YTN; PAM sequence: TTT
ttttgtaatttttttttgta

SEQ ID NO: 72189 - DNA, 20 bp, Artificial Sequence
  Description of Artificial Sequence: Synthetic oligonucleotide
  Target: SCNA; (+) strand; PAM type: YTN; PAM sequence: TTT
tttgtaatttttttttgtat

SEQ ID NO: 72190 - DNA, 20 bp, Artificial Sequence
  Description of Artificial Sequence: Synthetic oligonucleotide
  Target: SCNA; (+) strand; PAM type: YTN; PAM sequence: TTT
ttgtaatttttttttgtatt

SEQ ID NO: 72191 - DNA, 20 bp, Artificial Sequence
  Description of Artificial Sequence: Synthetic oligonucleotide
  Target: SCNA; (+) strand; PAM type: YTN; PAM sequence: TTT
tgtaatttttttttgtattt

SEQ ID NO: 72192 - DNA, 20 bp, Artificial Sequence
  Description of Artificial Sequence: Synthetic oligonucleotide
  Target: SCNA; (+) strand; PAM type: YTN; PAM sequence: TTT
gtaatttttttttgtatttt

SEQ ID NO: 72193 - DNA, 20 bp, Artificial Sequence
  Description of Artificial Sequence: Synthetic oligonucleotide
  Target: SCNA; (+) strand; PAM type: YTN; PAM sequence: TTG
taatttttttttgtattttt

SEQ ID NO: 72194 - DNA, 20 bp, Artificial Sequence
  Description of Artificial Sequence: Synthetic oligonucleotide
  Target: SCNA; (+) strand; PAM type: YTN; PAM sequence: TTT
ttttttgtatttttagtaga

SEQ ID NO: 72195 - DNA, 20 bp, Artificial Sequence
  Description of Artificial Sequence: Synthetic oligonucleotide
  Target: SCNA; (+) strand; PAM type: YTN; PAM sequence: TTT
tttttgtatttttagtagag

SEQ ID NO: 72196 - DNA, 20 bp, Artificial Sequence
  Description of Artificial Sequence: Synthetic oligonucleotide
  Target: SCNA; (+) strand; PAM type: YTN; PAM sequence: TTT
ttttgtatttttagtagaga

SEQ ID NO: 72197 - DNA, 20 bp, Artificial Sequence
  Description of Artificial Sequence: Synthetic oligonucleotide
  Target: SCNA; (+) strand; PAM type: YTN; PAM sequence: TTT
tttgtatttttagtagagac

SEQ ID NO: 72198 - DNA, 20 bp, Artificial Sequence
  Description of Artificial Sequence: Synthetic oligonucleotide
  Target: SCNA; (+) strand; PAM type: YTN; PAM sequence: TTT
ttgtatttttagtagagaca

SEQ ID NO: 72199 - DNA, 20 bp, Artificial Sequence
  Description of Artificial Sequence: Synthetic oligonucleotide
  Target: SCNA; (+) strand; PAM type: YTN; PAM sequence: TTT
tgtatttttagtagagacag

SEQ ID NO: 72200 - DNA, 20 bp, Artificial Sequence
  Description of Artificial Sequence: Synthetic oligonucleotide
  Target: SCNA; (+) strand; PAM type: YTN; PAM sequence: TTT
gtatttttagtagagacagg

SEQ ID NO: 72201 - DNA, 20 bp, Artificial Sequence
  Description of Artificial Sequence: Synthetic oligonucleotide
  Target: SCNA; (+) strand; PAM type: YTN; PAM sequence: TTG
tatttttagtagagacaggg

SEQ ID NO: 72202 - DNA, 20 bp, Artificial Sequence
  Description of Artificial Sequence: Synthetic oligonucleotide
  Target: SCNA; (+) strand; PAM type: YTN; PAM sequence: TTT
ttagtagagacagggtttca

SEQ ID NO: 72203 - DNA, 20 bp, Artificial Sequence
  Description of Artificial Sequence: Synthetic oligonucleotide
  Target: SCNA; (+) strand; PAM type: YTN; PAM sequence: TTT
tagtagagacagggtttcac

SEQ ID NO: 72204 - DNA, 20 bp, Artificial Sequence
  Description of Artificial Sequence: Synthetic oligonucleotide
  Target: SCNA; (+) strand; PAM type: YTN; PAM sequence: TTT
agtagagacagggtttcact

SEQ ID NO: 72205 - DNA, 20 bp, Artificial Sequence
  Description of Artificial Sequence: Synthetic oligonucleotide
  Target: SCNA; (+) strand; PAM type: YTN; PAM sequence: TTA
gtagagacagggtttcacta

SEQ ID NO: 72206 - DNA, 20 bp, Artificial Sequence
  Description of Artificial Sequence: Synthetic oligonucleotide
  Target: SCNA; (+) strand; PAM type: YTN; PAM sequence: TTT
cactatgttggcctggctgg

SEQ ID NO: 72207 - DNA, 20 bp, Artificial Sequence
  Description of Artificial Sequence: Synthetic oligonucleotide
  Target: SCNA; (+) strand; PAM type: YTN; PAM sequence: TTC
actatgttggcctggctggt

SEQ ID NO: 72208 - DNA, 20 bp, Artificial Sequence
  Description of Artificial Sequence: Synthetic oligonucleotide
  Target: SCNA; (+) strand; PAM type: YTN; PAM sequence: CTA
tgttggcctggctggtcttg

SEQ ID NO: 72209 - DNA, 20 bp, Artificial Sequence
  Description of Artificial Sequence: Synthetic oligonucleotide
  Target: SCNA; (+) strand; PAM type: YTN; PAM sequence: TTG
gcctggctggtcttgaactc

SEQ ID NO: 72210 - DNA, 20 bp, Artificial Sequence
  Description of Artificial Sequence: Synthetic oligonucleotide
  Target: SCNA; (+) strand; PAM type: YTN; PAM sequence: CTG
gctggtcttgaactcctaac

SEQ ID NO: 72211 - DNA, 20 bp, Artificial Sequence
  Description of Artificial Sequence: Synthetic oligonucleotide
  Target: SCNA; (+) strand; PAM type: YTN; PAM sequence: CTG
gtcttgaactcctaaccttg

SEQ ID NO: 72212 - DNA, 20 bp, Artificial Sequence
  Description of Artificial Sequence: Synthetic oligonucleotide
  Target: SCNA; (+) strand; PAM type: YTN; PAM sequence: CTT
gaactcctaaccttgtgatc

SEQ ID NO: 72213 - DNA, 20 bp, Artificial Sequence
  Description of Artificial Sequence: Synthetic oligonucleotide
  Target: SCNA; (+) strand; PAM type: YTN; PAM sequence: TTG
aactcctaaccttgtgatcc

SEQ ID NO: 72214 - DNA, 20 bp, Artificial Sequence
  Description of Artificial Sequence: Synthetic oligonucleotide
  Target: SCNA; (+) strand; PAM type: YTN; PAM sequence: CTC
ctaaccttgtgatccacccg

SEQ ID NO: 72215 - DNA, 20 bp, Artificial Sequence
  Description of Artificial Sequence: Synthetic oligonucleotide
  Target: SCNA; (+) strand; PAM type: YTN; PAM sequence: CTA
accttgtgatccacccgcct

SEQ ID NO: 72216 - DNA, 20 bp, Artificial Sequence
  Description of Artificial Sequence: Synthetic oligonucleotide
  Target: SCNA; (+) strand; PAM type: YTN; PAM sequence: CTT
gtgatccacccgccttggcc

SEQ ID NO: 72217 - DNA, 20 bp, Artificial Sequence
  Description of Artificial Sequence: Synthetic oligonucleotide
  Target: SCNA; (+) strand; PAM type: YTN; PAM sequence: TTG
tgatccacccgccttggcct

SEQ ID NO: 72218 - DNA, 20 bp, Artificial Sequence
  Description of Artificial Sequence: Synthetic oligonucleotide
  Target: SCNA; (+) strand; PAM type: YTN; PAM sequence: CTT
ggcctcccacaaagtgctgg

SEQ ID NO: 72219 - DNA, 20 bp, Artificial Sequence
  Description of Artificial Sequence: Synthetic oligonucleotide
  Target: SCNA; (+) strand; PAM type: YTN; PAM sequence: TTG
gcctcccacaaagtgctggg

SEQ ID NO: 72220 - DNA, 20 bp, Artificial Sequence
  Description of Artificial Sequence: Synthetic oligonucleotide
  Target: SCNA; (+) strand; PAM type: YTN; PAM sequence: CTC
ccacaaagtgctgggattac

SEQ ID NO: 72221 - DNA, 20 bp, Artificial Sequence
  Description of Artificial Sequence: Synthetic oligonucleotide
  Target: SCNA; (+) strand; PAM type: YTN; PAM sequence: CTG
ggattacaggcatgagccac

SEQ ID NO: 72222 - DNA, 20 bp, Artificial Sequence
  Description of Artificial Sequence: Synthetic oligonucleotide
  Target: SCNA; (+) strand; PAM type: YTN; PAM sequence: TTA
caggcatgagccaccgggcc

SEQ ID NO: 72223 - DNA, 20 bp, Artificial Sequence
  Description of Artificial Sequence: Synthetic oligonucleotide
  Target: SCNA; (+) strand; PAM type: YTN; PAM sequence: TTT
ttattcttaaagaaccagaa

SEQ ID NO: 72224 - DNA, 20 bp, Artificial Sequence
  Description of Artificial Sequence: Synthetic oligonucleotide
  Target: SCNA; (+) strand; PAM type: YTN; PAM sequence: TTT
tattcttaaagaaccagaac

SEQ ID NO: 72225 - DNA, 20 bp, Artificial Sequence
  Description of Artificial Sequence: Synthetic oligonucleotide
  Target: SCNA; (+) strand; PAM type: YTN; PAM sequence: TTT
attcttaaagaaccagaact

SEQ ID NO: 72226 - DNA, 20 bp, Artificial Sequence
  Description of Artificial Sequence: Synthetic oligonucleotide
  Target: SCNA; (+) strand; PAM type: YTN; PAM sequence: TTA
ttcttaaagaaccagaacta

SEQ ID NO: 72227 - DNA, 20 bp, Artificial Sequence
  Description of Artificial Sequence: Synthetic oligonucleotide
  Target: SCNA; (+) strand; PAM type: YTN; PAM sequence: TTC
ttaaagaaccagaactatat

SEQ ID NO: 72228 - DNA, 20 bp, Artificial Sequence
  Description of Artificial Sequence: Synthetic oligonucleotide
  Target: SCNA; (+) strand; PAM type: YTN; PAM sequence: CTT
aaagaaccagaactatatgc

SEQ ID NO: 72229 - DNA, 20 bp, Artificial Sequence
  Description of Artificial Sequence: Synthetic oligonucleotide
  Target: SCNA; (+) strand; PAM type: YTN; PAM sequence: TTA
aagaaccagaactatatgca

SEQ ID NO: 72230 - DNA, 20 bp, Artificial Sequence
  Description of Artificial Sequence: Synthetic oligonucleotide
  Target: SCNA; (+) strand; PAM type: YTN; PAM sequence: CTA
tatgcatctagtgttcccca

SEQ ID NO: 72231 - DNA, 20 bp, Artificial Sequence
  Description of Artificial Sequence: Synthetic oligonucleotide
  Target: SCNA; (+) strand; PAM type: YTN; PAM sequence: CTA
gtgttccccaagttttcttc

SEQ ID NO: 72232 - DNA, 20 bp, Artificial Sequence
  Description of Artificial Sequence: Synthetic oligonucleotide
  Target: SCNA; (+) strand; PAM type: YTN; PAM sequence: TTC
cccaagttttcttctttgtc

SEQ ID NO: 72233 - DNA, 20 bp, Artificial Sequence
  Description of Artificial Sequence: Synthetic oligonucleotide
  Target: SCNA; (+) strand; PAM type: YTN; PAM sequence: TTT
tcttctttgtcttttaacat

SEQ ID NO: 72234 - DNA, 20 bp, Artificial Sequence
  Description of Artificial Sequence: Synthetic oligonucleotide
  Target: SCNA; (+) strand; PAM type: YTN; PAM sequence: TTT
cttctttgtcttttaacatt

SEQ ID NO: 72235 - DNA, 20 bp, Artificial Sequence
  Description of Artificial Sequence: Synthetic oligonucleotide
  Target: SCNA; (+) strand; PAM type: YTN; PAM sequence: TTC
ttctttgtcttttaacattc

SEQ ID NO: 72236 - DNA, 20 bp, Artificial Sequence
  Description of Artificial Sequence: Synthetic oligonucleotide
  Target: SCNA; (+) strand; PAM type: YTN; PAM sequence: CTT
ctttgtcttttaacattcca

SEQ ID NO: 72237 - DNA, 20 bp, Artificial Sequence
  Description of Artificial Sequence: Synthetic oligonucleotide
  Target: SCNA; (+) strand; PAM type: YTN; PAM sequence: TTC
tttgtcttttaacattccag

SEQ ID NO: 72238 - DNA, 20 bp, Artificial Sequence
  Description of Artificial Sequence: Synthetic oligonucleotide
  Target: SCNA; (+) strand; PAM type: YTN; PAM sequence: CTT
tgtcttttaacattccagga

SEQ ID NO: 72239 - DNA, 20 bp, Artificial Sequence
  Description of Artificial Sequence: Synthetic oligonucleotide
  Target: SCNA; (+) strand; PAM type: YTN; PAM sequence: TTT
gtcttttaacattccaggaa

SEQ ID NO: 72240 - DNA, 20 bp, Artificial Sequence
  Description of Artificial Sequence: Synthetic oligonucleotide
  Target: SCNA; (+) strand; PAM type: YTN; PAM sequence: TTG
tcttttaacattccaggaaa

SEQ ID NO: 72241 - DNA, 20 bp, Artificial Sequence
  Description of Artificial Sequence: Synthetic oligonucleotide
  Target: SCNA; (+) strand; PAM type: YTN; PAM sequence: CTT
ttaacattccaggaaaacag

SEQ ID NO: 72242 - DNA, 20 bp, Artificial Sequence
  Description of Artificial Sequence: Synthetic oligonucleotide
  Target: SCNA; (+) strand; PAM type: YTN; PAM sequence: TTT
taacattccaggaaaacaga

SEQ ID NO: 72243 - DNA, 20 bp, Artificial Sequence
  Description of Artificial Sequence: Synthetic oligonucleotide
  Target: SCNA; (+) strand; PAM type: YTN; PAM sequence: TTT
aacattccaggaaaacagat

SEQ ID NO: 72244 - DNA, 20 bp, Artificial Sequence
  Description of Artificial Sequence: Synthetic oligonucleotide
  Target: SCNA; (+) strand; PAM type: YTN; PAM sequence: TTA
acattccaggaaaacagata

SEQ ID NO: 72245 - DNA, 20 bp, Artificial Sequence
  Description of Artificial Sequence: Synthetic oligonucleotide
  Target: SCNA; (+) strand; PAM type: YTN; PAM sequence: TTC
caggaaaacagatattgagt

SEQ ID NO: 72246 - DNA, 20 bp, Artificial Sequence
  Description of Artificial Sequence: Synthetic oligonucleotide
  Target: SCNA; (+) strand; PAM type: YTN; PAM sequence: TTG
agtgttttgctggatcatgc

SEQ ID NO: 72247 - DNA, 20 bp, Artificial Sequence
  Description of Artificial Sequence: Synthetic oligonucleotide
  Target: SCNA; (+) strand; PAM type: YTN; PAM sequence: TTT
tgctggatcatgcatagttc

SEQ ID NO: 72248 - DNA, 20 bp, Artificial Sequence
  Description of Artificial Sequence: Synthetic oligonucleotide
  Target: SCNA; (+) strand; PAM type: YTN; PAM sequence: TTT
gctggatcatgcatagttcc

SEQ ID NO: 72249 - DNA, 20 bp, Artificial Sequence
  Description of Artificial Sequence: Synthetic oligonucleotide
  Target: SCNA; (+) strand; PAM type: YTN; PAM sequence: TTG
ctggatcatgcatagttcca

SEQ ID NO: 72250 - DNA, 20 bp, Artificial Sequence
  Description of Artificial Sequence: Synthetic oligonucleotide
  Target: SCNA; (+) strand; PAM type: YTN; PAM sequence: CTG
gatcatgcatagttccatat

SEQ ID NO: 72251 - DNA, 20 bp, Artificial Sequence
  Description of Artificial Sequence: Synthetic oligonucleotide
  Target: SCNA; (+) strand; PAM type: YTN; PAM sequence: TTC
catatccttttgaccctctg

SEQ ID NO: 72252 - DNA, 20 bp, Artificial Sequence
  Description of Artificial Sequence: Synthetic oligonucleotide
  Target: SCNA; (+) strand; PAM type: YTN; PAM sequence: CTT
ttgaccctctgtttgctgta

SEQ ID NO: 72253 - DNA, 20 bp, Artificial Sequence
  Description of Artificial Sequence: Synthetic oligonucleotide
  Target: SCNA; (+) strand; PAM type: YTN; PAM sequence: TTT
tgaccctctgtttgctgtag

SEQ ID NO: 72254 - DNA, 20 bp, Artificial Sequence
  Description of Artificial Sequence: Synthetic oligonucleotide
  Target: SCNA; (+) strand; PAM type: YTN; PAM sequence: TTT
gaccctctgtttgctgtagc

SEQ ID NO: 72255 - DNA, 20 bp, Artificial Sequence
  Description of Artificial Sequence: Synthetic oligonucleotide
  Target: SCNA; (+) strand; PAM type: YTN; PAM sequence: TTG
accctctgtttgctgtagcc

SEQ ID NO: 72256 - DNA, 20 bp, Artificial Sequence
  Description of Artificial Sequence: Synthetic oligonucleotide
  Target: SCNA; (+) strand; PAM type: YTN; PAM sequence: CTC
tgtttgctgtagccagcttt

SEQ ID NO: 72257 - DNA, 20 bp, Artificial Sequence
  Description of Artificial Sequence: Synthetic oligonucleotide
  Target: SCNA; (+) strand; PAM type: YTN; PAM sequence: CTG
tttgctgtagccagctttga

SEQ ID NO: 72258 - DNA, 20 bp, Artificial Sequence
  Description of Artificial Sequence: Synthetic oligonucleotide
  Target: SCNA; (+) strand; PAM type: YTN; PAM sequence: TTT
gctgtagccagctttgattc

SEQ ID NO: 72259 - DNA, 20 bp, Artificial Sequence
  Description of Artificial Sequence: Synthetic oligonucleotide
  Target: SCNA; (+) strand; PAM type: YTN; PAM sequence: TTG
ctgtagccagctttgattct

SEQ ID NO: 72260 - DNA, 20 bp, Artificial Sequence
  Description of Artificial Sequence: Synthetic oligonucleotide
  Target: SCNA; (+) strand; PAM type: YTN; PAM sequence: CTG
tagccagctttgattctttg

SEQ ID NO: 72261 - DNA, 20 bp, Artificial Sequence
  Description of Artificial Sequence: Synthetic oligonucleotide
  Target: SCNA; (+) strand; PAM type: YTN; PAM sequence: CTT
tgattctttggattcatggt

SEQ ID NO: 72262 - DNA, 20 bp, Artificial Sequence
  Description of Artificial Sequence: Synthetic oligonucleotide
  Target: SCNA; (+) strand; PAM type: YTN; PAM sequence: TTT
gattctttggattcatggtc

SEQ ID NO: 72263 - DNA, 20 bp, Artificial Sequence
  Description of Artificial Sequence: Synthetic oligonucleotide
  Target: SCNA; (+) strand; PAM type: YTN; PAM sequence: TTG
attctttggattcatggtca

SEQ ID NO: 72264 - DNA, 20 bp, Artificial Sequence
  Description of Artificial Sequence: Synthetic oligonucleotide
  Target: SCNA; (+) strand; PAM type: YTN; PAM sequence: TTC
tttggattcatggtcaccct

SEQ ID NO: 72265 - DNA, 20 bp, Artificial Sequence
  Description of Artificial Sequence: Synthetic oligonucleotide
  Target: SCNA; (+) strand; PAM type: YTN; PAM sequence: CTT
tggattcatggtcaccctat

SEQ ID NO: 72266 - DNA, 20 bp, Artificial Sequence
  Description of Artificial Sequence: Synthetic oligonucleotide
  Target: SCNA; (+) strand; PAM type: YTN; PAM sequence: TTT
ggattcatggtcaccctata

SEQ ID NO: 72267 - DNA, 20 bp, Artificial Sequence
  Description of Artificial Sequence: Synthetic oligonucleotide
  Target: SCNA; (+) strand; PAM type: YTN; PAM sequence: TTG
gattcatggtcaccctataa

SEQ ID NO: 72268 - DNA, 20 bp, Artificial Sequence
  Description of Artificial Sequence: Synthetic oligonucleotide
  Target: SCNA; (+) strand; PAM type: YTN; PAM sequence: TTC
atggtcaccctataacatat

SEQ ID NO: 72269 - DNA, 20 bp, Artificial Sequence
  Description of Artificial Sequence: Synthetic oligonucleotide
  Target: SCNA; (+) strand; PAM type: YTN; PAM sequence: CTA
taacatattcactaatccac

SEQ ID NO: 72270 - DNA, 20 bp, Artificial Sequence
  Description of Artificial Sequence: Synthetic oligonucleotide
  Target: SCNA; (+) strand; PAM type: YTN; PAM sequence: TTC
actaatccaccaatgaaagg

SEQ ID NO: 72271 - DNA, 20 bp, Artificial Sequence
  Description of Artificial Sequence: Synthetic oligonucleotide
  Target: SCNA; (+) strand; PAM type: YTN; PAM sequence: CTA
atccaccaatgaaaggttat

SEQ ID NO: 72272 - DNA, 20 bp, Artificial Sequence
  Description of Artificial Sequence: Synthetic oligonucleotide
  Target: SCNA; (+) strand; PAM type: YTN; PAM sequence: TTA
tgtaatgtataacaatcaac

SEQ ID NO: 72273 - DNA, 20 bp, Artificial Sequence
  Description of Artificial Sequence: Synthetic oligonucleotide
  Target: SCNA; (+) strand; PAM type: YTN; PAM sequence: CTC
agggttttctaatgacaatc

SEQ ID NO: 72274 - DNA, 20 bp, Artificial Sequence
  Description of Artificial Sequence: Synthetic oligonucleotide
  Target: SCNA; (+) strand; PAM type: YTN; PAM sequence: TTT
tctaatgacaatctttatca

SEQ ID NO: 72275 - DNA, 20 bp, Artificial Sequence
  Description of Artificial Sequence: Synthetic oligonucleotide
  Target: SCNA; (+) strand; PAM type: YTN; PAM sequence: TTT
ctaatgacaatctttatcaa

SEQ ID NO: 72276 - DNA, 20 bp, Artificial Sequence
  Description of Artificial Sequence: Synthetic oligonucleotide
  Target: SCNA; (+) strand; PAM type: YTN; PAM sequence: TTC
taatgacaatctttatcaat

SEQ ID NO: 72277 - DNA, 20 bp, Artificial Sequence
  Description of Artificial Sequence: Synthetic oligonucleotide
  Target: SCNA; (+) strand; PAM type: YTN; PAM sequence: CTA
atgacaatctttatcaatgt

SEQ ID NO: 72278 - DNA, 20 bp, Artificial Sequence
  Description of Artificial Sequence: Synthetic oligonucleotide
  Target: SCNA; (+) strand; PAM type: YTN; PAM sequence: CTT
tatcaatgttctataagctt

SEQ ID NO: 72279 - DNA, 20 bp, Artificial Sequence
  Description of Artificial Sequence: Synthetic oligonucleotide
  Target: SCNA; (+) strand; PAM type: YTN; PAM sequence: TTT
atcaatgttctataagcttg

SEQ ID NO: 72280 - DNA, 20 bp, Artificial Sequence
  Description of Artificial Sequence: Synthetic oligonucleotide
  Target: SCNA; (+) strand; PAM type: YTN; PAM sequence: TTA
tcaatgttctataagcttga

SEQ ID NO: 72281 - DNA, 20 bp, Artificial Sequence
  Description of Artificial Sequence: Synthetic oligonucleotide
  Target: SCNA; (+) strand; PAM type: YTN; PAM sequence: TTC
tataagcttgaaaattaatt

SEQ ID NO: 72282 - DNA, 20 bp, Artificial Sequence
  Description of Artificial Sequence: Synthetic oligonucleotide
  Target: SCNA; (+) strand; PAM type: YTN; PAM sequence: CTA
taagcttgaaaattaattta

SEQ ID NO: 72283 - DNA, 20 bp, Artificial Sequence
  Description of Artificial Sequence: Synthetic oligonucleotide
  Target: SCNA; (+) strand; PAM type: YTN; PAM sequence: CTT
gaaaattaatttaataattt

SEQ ID NO: 72284 - DNA, 20 bp, Artificial Sequence
  Description of Artificial Sequence: Synthetic oligonucleotide
  Target: SCNA; (+) strand; PAM type: YTN; PAM sequence: TTG
aaaattaatttaataattta

SEQ ID NO: 72285 - DNA, 20 bp, Artificial Sequence
  Description of Artificial Sequence: Synthetic oligonucleotide
  Target: SCNA; (+) strand; PAM type: YTN; PAM sequence: TTA
atttaataatttataccatt

SEQ ID NO: 72286 - DNA, 20 bp, Artificial Sequence
  Description of Artificial Sequence: Synthetic oligonucleotide
  Target: SCNA; (+) strand; PAM type: YTN; PAM sequence: TTT
aataatttataccattgtgc

SEQ ID NO: 72287 - DNA, 20 bp, Artificial Sequence
  Description of Artificial Sequence: Synthetic oligonucleotide
  Target: SCNA; (+) strand; PAM type: YTN; PAM sequence: TTA
ataatttataccattgtgca

SEQ ID NO: 72288 - DNA, 20 bp, Artificial Sequence
  Description of Artificial Sequence: Synthetic oligonucleotide
  Target: SCNA; (+) strand; PAM type: YTN; PAM sequence: TTT
ataccattgtgcataaaata

SEQ ID NO: 72289 - DNA, 20 bp, Artificial Sequence
  Description of Artificial Sequence: Synthetic oligonucleotide
  Target: SCNA; (+) strand; PAM type: YTN; PAM sequence: TTA
taccattgtgcataaaatat

SEQ ID NO: 72290 - DNA, 20 bp, Artificial Sequence
  Description of Artificial Sequence: Synthetic oligonucleotide
  Target: SCNA; (+) strand; PAM type: YTN; PAM sequence: TTG
tgcataaaatataataaaaa

SEQ ID NO: 72291 - DNA, 20 bp, Artificial Sequence
  Description of Artificial Sequence: Synthetic oligonucleotide
  Target: SCNA; (+) strand; PAM type: YTN; PAM sequence: CTT
taatttaataacgaaattca

SEQ ID NO: 72292 - DNA, 20 bp, Artificial Sequence
  Description of Artificial Sequence: Synthetic oligonucleotide
  Target: SCNA; (+) strand; PAM type: YTN; PAM sequence: TTT
aatttaataacgaaattcat

SEQ ID NO: 72293 - DNA, 20 bp, Artificial Sequence
  Description of Artificial Sequence: Synthetic oligonucleotide
  Target: SCNA; (+) strand; PAM type: YTN; PAM sequence: TTA
atttaataacgaaattcatg

SEQ ID NO: 72294 - DNA, 20 bp, Artificial Sequence
  Description of Artificial Sequence: Synthetic oligonucleotide
  Target: SCNA; (+) strand; PAM type: YTN; PAM sequence: TTT
aataacgaaattcatgcata

SEQ ID NO: 72295 - DNA, 20 bp, Artificial Sequence
  Description of Artificial Sequence: Synthetic oligonucleotide
  Target: SCNA; (+) strand; PAM type: YTN; PAM sequence: TTA
ataacgaaattcatgcatac

SEQ ID NO: 72296 - DNA, 20 bp, Artificial Sequence
  Description of Artificial Sequence: Synthetic oligonucleotide
  Target: SCNA; (+) strand; PAM type: YTN; PAM sequence: TTC
atgcatacttttacaaactt

SEQ ID NO: 72297 - DNA, 20 bp, Artificial Sequence
  Description of Artificial Sequence: Synthetic oligonucleotide
  Target: SCNA; (+) strand; PAM type: YTN; PAM sequence: CTT
ttacaaacttatcagtcatt

SEQ ID NO: 72298 - DNA, 20 bp, Artificial Sequence
  Description of Artificial Sequence: Synthetic oligonucleotide
  Target: SCNA; (+) strand; PAM type: YTN; PAM sequence: TTT
tacaaacttatcagtcattc

SEQ ID NO: 72299 - DNA, 20 bp, Artificial Sequence
  Description of Artificial Sequence: Synthetic oligonucleotide
  Target: SCNA; (+) strand; PAM type: YTN; PAM sequence: TTT
acaaacttatcagtcattca

SEQ ID NO: 72300 - DNA, 20 bp, Artificial Sequence
  Description of Artificial Sequence: Synthetic oligonucleotide
  Target: SCNA; (+) strand; PAM type: YTN; PAM sequence: TTA
caaacttatcagtcattcag

SEQ ID NO: 72301 - DNA, 20 bp, Artificial Sequence
  Description of Artificial Sequence: Synthetic oligonucleotide
  Target: SCNA; (+) strand; PAM type: YTN; PAM sequence: CTT
atcagtcattcagaagtaaa

SEQ ID NO: 72302 - DNA, 20 bp, Artificial Sequence
  Description of Artificial Sequence: Synthetic oligonucleotide
  Target: SCNA; (+) strand; PAM type: YTN; PAM sequence: TTA
tcagtcattcagaagtaaat

SEQ ID NO: 72303 - DNA, 20 bp, Artificial Sequence
  Description of Artificial Sequence: Synthetic oligonucleotide
  Target: SCNA; (+) strand; PAM type: YTN; PAM sequence: TTC
agaagtaaatgtggacttca

SEQ ID NO: 72304 - DNA, 20 bp, Artificial Sequence
  Description of Artificial Sequence: Synthetic oligonucleotide
  Target: SCNA; (+) strand; PAM type: YTN; PAM sequence: CTT
cagttttgtgggcaggggtt

SEQ ID NO: 72305 - DNA, 20 bp, Artificial Sequence
  Description of Artificial Sequence: Synthetic oligonucleotide
  Target: SCNA; (+) strand; PAM type: YTN; PAM sequence: TTC
agttttgtgggcaggggttt

SEQ ID NO: 72306 - DNA, 20 bp, Artificial Sequence
  Description of Artificial Sequence: Synthetic oligonucleotide
  Target: SCNA; (+) strand; PAM type: YTN; PAM sequence: TTT
tgtgggcaggggtttacaga

SEQ ID NO: 72307 - DNA, 20 bp, Artificial Sequence
  Description of Artificial Sequence: Synthetic oligonucleotide
  Target: SCNA; (+) strand; PAM type: YTN; PAM sequence: TTT
gtgggcaggggtttacagaa

SEQ ID NO: 72308 - DNA, 20 bp, Artificial Sequence
  Description of Artificial Sequence: Synthetic oligonucleotide
  Target: SCNA; (+) strand; PAM type: YTN; PAM sequence: TTG
tgggcaggggtttacagaag

SEQ ID NO: 72309 - DNA, 20 bp, Artificial Sequence
  Description of Artificial Sequence: Synthetic oligonucleotide
  Target: SCNA; (+) strand; PAM type: YTN; PAM sequence: TTT
acagaagtatgttttactaa

SEQ ID NO: 72310 - DNA, 20 bp, Artificial Sequence
  Description of Artificial Sequence: Synthetic oligonucleotide
  Target: SCNA; (+) strand; PAM type: YTN; PAM sequence: TTA
cagaagtatgttttactaaa

SEQ ID NO: 72311 - DNA, 20 bp, Artificial Sequence
  Description of Artificial Sequence: Synthetic oligonucleotide
  Target: SCNA; (+) strand; PAM type: YTN; PAM sequence: TTT
tactaaagtttggagaaaag

SEQ ID NO: 72312 - DNA, 20 bp, Artificial Sequence
  Description of Artificial Sequence: Synthetic oligonucleotide
  Target: SCNA; (+) strand; PAM type: YTN; PAM sequence: TTT
actaaagtttggagaaaaga

SEQ ID NO: 72313 - DNA, 20 bp, Artificial Sequence
  Description of Artificial Sequence: Synthetic oligonucleotide
  Target: SCNA; (+) strand; PAM type: YTN; PAM sequence: TTA
ctaaagtttggagaaaagat

SEQ ID NO: 72314 - DNA, 20 bp, Artificial Sequence
  Description of Artificial Sequence: Synthetic oligonucleotide
  Target: SCNA; (+) strand; PAM type: YTN; PAM sequence: CTA
aagtttggagaaaagatcag

SEQ ID NO: 72315 - DNA, 20 bp, Artificial Sequence
  Description of Artificial Sequence: Synthetic oligonucleotide
  Target: SCNA; (+) strand; PAM type: YTN; PAM sequence: TTT
ggagaaaagatcagtataaa

SEQ ID NO: 72316 - DNA, 20 bp, Artificial Sequence
  Description of Artificial Sequence: Synthetic oligonucleotide
  Target: SCNA; (+) strand; PAM type: YTN; PAM sequence: TTG
gagaaaagatcagtataaaa

SEQ ID NO: 72317 - DNA, 20 bp, Artificial Sequence
  Description of Artificial Sequence: Synthetic oligonucleotide
  Target: SCNA; (+) strand; PAM type: YTN; PAM sequence: TTA
taccaatagcattattagaa

SEQ ID NO: 72318 - DNA, 20 bp, Artificial Sequence
  Description of Artificial Sequence: Synthetic oligonucleotide
  Target: SCNA; (+) strand; PAM type: YTN; PAM sequence: TTA
ttagaaatagttaaaagaca

SEQ ID NO: 72319 - DNA, 20 bp, Artificial Sequence
  Description of Artificial Sequence: Synthetic oligonucleotide
  Target: SCNA; (+) strand; PAM type: YTN; PAM sequence: TTA
gaaatagttaaaagacaaag

SEQ ID NO: 72320 - DNA, 20 bp, Artificial Sequence
  Description of Artificial Sequence: Synthetic oligonucleotide
  Target: SCNA; (+) strand; PAM type: YTN; PAM sequence: TTA
aaagacaaagtttaagtatt

SEQ ID NO: 72321 - DNA, 20 bp, Artificial Sequence
  Description of Artificial Sequence: Synthetic oligonucleotide
  Target: SCNA; (+) strand; PAM type: YTN; PAM sequence: TTT
aagtattttcataatcatat

SEQ ID NO: 72322 - DNA, 20 bp, Artificial Sequence
  Description of Artificial Sequence: Synthetic oligonucleotide
  Target: SCNA; (+) strand; PAM type: YTN; PAM sequence: TTA
agtattttcataatcatatc

SEQ ID NO: 72323 - DNA, 20 bp, Artificial Sequence
  Description of Artificial Sequence: Synthetic oligonucleotide
  Target: SCNA; (+) strand; PAM type: YTN; PAM sequence: TTT
tcataatcatatcacttttt

SEQ ID NO: 72324 - DNA, 20 bp, Artificial Sequence
  Description of Artificial Sequence: Synthetic oligonucleotide
  Target: SCNA; (+) strand; PAM type: YTN; PAM sequence: TTT
cataatcatatcacttttta

SEQ ID NO: 72325 - DNA, 20 bp, Artificial Sequence
  Description of Artificial Sequence: Synthetic oligonucleotide
  Target: SCNA; (+) strand; PAM type: YTN; PAM sequence: TTC
ataatcatatcactttttaa

SEQ ID NO: 72326 - DNA, 20 bp, Artificial Sequence
  Description of Artificial Sequence: Synthetic oligonucleotide
  Target: SCNA; (+) strand; PAM type: YTN; PAM sequence: CTT
tttaagtgactaaactacta

SEQ ID NO: 72327 - DNA, 20 bp, Artificial Sequence
  Description of Artificial Sequence: Synthetic oligonucleotide
  Target: SCNA; (+) strand; PAM type: YTN; PAM sequence: TTT
ttaagtgactaaactactaa

SEQ ID NO: 72328 - DNA, 20 bp, Artificial Sequence
  Description of Artificial Sequence: Synthetic oligonucleotide
  Target: SCNA; (+) strand; PAM type: YTN; PAM sequence: TTT
taagtgactaaactactaaa

SEQ ID NO: 72329 - DNA, 20 bp, Artificial Sequence
  Description of Artificial Sequence: Synthetic oligonucleotide
  Target: SCNA; (+) strand; PAM type: YTN; PAM sequence: TTT
aagtgactaaactactaaag

SEQ ID NO: 72330 - DNA, 20 bp, Artificial Sequence
  Description of Artificial Sequence: Synthetic oligonucleotide
  Target: SCNA; (+) strand; PAM type: YTN; PAM sequence: TTA
agtgactaaactactaaaga

SEQ ID NO: 72331 - DNA, 20 bp, Artificial Sequence
  Description of Artificial Sequence: Synthetic oligonucleotide
  Target: SCNA; (+) strand; PAM type: YTN; PAM sequence: CTA
aactactaaagaaacattta

SEQ ID NO: 72332 - DNA, 20 bp, Artificial Sequence
  Description of Artificial Sequence: Synthetic oligonucleotide
  Target: SCNA; (+) strand; PAM type: YTN; PAM sequence: CTA
ctaaagaaacatttagttaa

SEQ ID NO: 72333 - DNA, 20 bp, Artificial Sequence
  Description of Artificial Sequence: Synthetic oligonucleotide
  Target: SCNA; (+) strand; PAM type: YTN; PAM sequence: CTA
aagaaacatttagttaactc

SEQ ID NO: 72334 - DNA, 20 bp, Artificial Sequence
  Description of Artificial Sequence: Synthetic oligonucleotide
  Target: SCNA; (+) strand; PAM type: YTN; PAM sequence: TTT
agttaactctaaaatattgt

SEQ ID NO: 72335 - DNA, 20 bp, Artificial Sequence
  Description of Artificial Sequence: Synthetic oligonucleotide
  Target: SCNA; (+) strand; PAM type: YTN; PAM sequence: TTA
gttaactctaaaatattgtt

SEQ ID NO: 72336 - DNA, 20 bp, Artificial Sequence
  Description of Artificial Sequence: Synthetic oligonucleotide
  Target: SCNA; (+) strand; PAM type: YTN; PAM sequence: TTA
actctaaaatattgttgtaa

SEQ ID NO: 72337 - DNA, 20 bp, Artificial Sequence
  Description of Artificial Sequence: Synthetic oligonucleotide
  Target: SCNA; (+) strand; PAM type: YTN; PAM sequence: CTC
taaaatattgttgtaaaatt

SEQ ID NO: 72338 - DNA, 20 bp, Artificial Sequence
  Description of Artificial Sequence: Synthetic oligonucleotide
  Target: SCNA; (+) strand; PAM type: YTN; PAM sequence: CTA
aaatattgttgtaaaatttc

SEQ ID NO: 72339 - DNA, 20 bp, Artificial Sequence
  Description of Artificial Sequence: Synthetic oligonucleotide
  Target: SCNA; (+) strand; PAM type: YTN; PAM sequence: TTG
ttgtaaaatttctatgtgtt

SEQ ID NO: 72340 - DNA, 20 bp, Artificial Sequence
  Description of Artificial Sequence: Synthetic oligonucleotide
  Target: SCNA; (+) strand; PAM type: YTN; PAM sequence: TTG
taaaatttctatgtgttttg

SEQ ID NO: 72341 - DNA, 20 bp, Artificial Sequence
  Description of Artificial Sequence: Synthetic oligonucleotide
  Target: SCNA; (+) strand; PAM type: YTN; PAM sequence: TTT
ctatgtgttttgaggaaaaa

SEQ ID NO: 72342 - DNA, 20 bp, Artificial Sequence
  Description of Artificial Sequence: Synthetic oligonucleotide
  Target: SCNA; (+) strand; PAM type: YTN; PAM sequence: TTC
tatgtgttttgaggaaaaat

SEQ ID NO: 72343 - DNA, 20 bp, Artificial Sequence
  Description of Artificial Sequence: Synthetic oligonucleotide
  Target: SCNA; (+) strand; PAM type: YTN; PAM sequence: CTA
tgtgttttgaggaaaaatac

SEQ ID NO: 72344 - DNA, 20 bp, Artificial Sequence
  Description of Artificial Sequence: Synthetic oligonucleotide
  Target: SCNA; (+) strand; PAM type: YTN; PAM sequence: TTT
tgaggaaaaatacttttatt

SEQ ID NO: 72345 - DNA, 20 bp, Artificial Sequence
  Description of Artificial Sequence: Synthetic oligonucleotide
  Target: SCNA; (+) strand; PAM type: YTN; PAM sequence: TTT
gaggaaaaatacttttattc

SEQ ID NO: 72346 - DNA, 20 bp, Artificial Sequence
  Description of Artificial Sequence: Synthetic oligonucleotide
  Target: SCNA; (+) strand; PAM type: YTN; PAM sequence: TTG
aggaaaaatacttttattcc

SEQ ID NO: 72347 - DNA, 20 bp, Artificial Sequence
  Description of Artificial Sequence: Synthetic oligonucleotide
  Target: SCNA; (+) strand; PAM type: YTN; PAM sequence: CTT
ttattccatcataaaatttt

SEQ ID NO: 72348 - DNA, 20 bp, Artificial Sequence
  Description of Artificial Sequence: Synthetic oligonucleotide
  Target: SCNA; (+) strand; PAM type: YTN; PAM sequence: TTT
tattccatcataaaattttc

SEQ ID NO: 72349 - DNA, 20 bp, Artificial Sequence
  Description of Artificial Sequence: Synthetic oligonucleotide
  Target: SCNA; (+) strand; PAM type: YTN; PAM sequence: TTT
attccatcataaaattttca

SEQ ID NO: 72350 - DNA, 20 bp, Artificial Sequence
  Description of Artificial Sequence: Synthetic oligonucleotide
  Target: SCNA; (+) strand; PAM type: YTN; PAM sequence: TTA
ttccatcataaaattttcaa

SEQ ID NO: 72351 - DNA, 20 bp, Artificial Sequence
  Description of Artificial Sequence: Synthetic oligonucleotide
  Target: SCNA; (+) strand; PAM type: YTN; PAM sequence: TTC
catcataaaattttcaactt

SEQ ID NO: 72352 - DNA, 20 bp, Artificial Sequence
  Description of Artificial Sequence: Synthetic oligonucleotide
  Target: SCNA; (+) strand; PAM type: YTN; PAM sequence: TTT
tcaacttagagaaacaattt

SEQ ID NO: 72353 - DNA, 20 bp, Artificial Sequence
  Description of Artificial Sequence: Synthetic oligonucleotide
  Target: SCNA; (+) strand; PAM type: YTN; PAM sequence: TTT
caacttagagaaacaatttg

SEQ ID NO: 72354 - DNA, 20 bp, Artificial Sequence
  Description of Artificial Sequence: Synthetic oligonucleotide
  Target: SCNA; (+) strand; PAM type: YTN; PAM sequence: TTC
aacttagagaaacaatttgt

SEQ ID NO: 72355 - DNA, 20 bp, Artificial Sequence
  Description of Artificial Sequence: Synthetic oligonucleotide
  Target: SCNA; (+) strand; PAM type: YTN; PAM sequence: CTT
agagaaacaatttgtttact

SEQ ID NO: 72356 - DNA, 20 bp, Artificial Sequence
  Description of Artificial Sequence: Synthetic oligonucleotide
  Target: SCNA; (+) strand; PAM type: YTN; PAM sequence: TTA
gagaaacaatttgtttactt

SEQ ID NO: 72357 - DNA, 20 bp, Artificial Sequence
  Description of Artificial Sequence: Synthetic oligonucleotide
  Target: SCNA; (+) strand; PAM type: YTN; PAM sequence: TTT
gtttacttgaaaaattataa

SEQ ID NO: 72358 - DNA, 20 bp, Artificial Sequence
  Description of Artificial Sequence: Synthetic oligonucleotide
  Target: SCNA; (+) strand; PAM type: YTN; PAM sequence: TTG
tttacttgaaaaattataat

SEQ ID NO: 72359 - DNA, 20 bp, Artificial Sequence
  Description of Artificial Sequence: Synthetic oligonucleotide
  Target: SCNA; (+) strand; PAM type: YTN; PAM sequence: TTT
acttgaaaaattataatatt

SEQ ID NO: 72360 - DNA, 20 bp, Artificial Sequence
  Description of Artificial Sequence: Synthetic oligonucleotide
  Target: SCNA; (+) strand; PAM type: YTN; PAM sequence: TTA
cttgaaaaattataatattt

SEQ ID NO: 72361 - DNA, 20 bp, Artificial Sequence
  Description of Artificial Sequence: Synthetic oligonucleotide
  Target: SCNA; (+) strand; PAM type: YTN; PAM sequence: CTT
gaaaaattataatattttca

SEQ ID NO: 72362 - DNA, 20 bp, Artificial Sequence
  Description of Artificial Sequence: Synthetic oligonucleotide
  Target: SCNA; (+) strand; PAM type: YTN; PAM sequence: TTG
aaaaattataatattttcaa

SEQ ID NO: 72363 - DNA, 20 bp, Artificial Sequence
  Description of Artificial Sequence: Synthetic oligonucleotide
  Target: SCNA; (+) strand; PAM type: YTN; PAM sequence: TTA
taatattttcaagtaaaaat

SEQ ID NO: 72364 - DNA, 20 bp, Artificial Sequence
  Description of Artificial Sequence: Synthetic oligonucleotide
  Target: SCNA; (+) strand; PAM type: YTN; PAM sequence: TTT
tcaagtaaaaatggttatac

SEQ ID NO: 72365 - DNA, 20 bp, Artificial Sequence
  Description of Artificial Sequence: Synthetic oligonucleotide
  Target: SCNA; (+) strand; PAM type: YTN; PAM sequence: TTT
caagtaaaaatggttatact

SEQ ID NO: 72366 - DNA, 20 bp, Artificial Sequence
  Description of Artificial Sequence: Synthetic oligonucleotide
  Target: SCNA; (+) strand; PAM type: YTN; PAM sequence: TTC
aagtaaaaatggttatactg

SEQ ID NO: 72367 - DNA, 20 bp, Artificial Sequence
  Description of Artificial Sequence: Synthetic oligonucleotide
  Target: SCNA; (+) strand; PAM type: YTN; PAM sequence: TTA
tactgacaatttattaaaac

SEQ ID NO: 72368 - DNA, 20 bp, Artificial Sequence
  Description of Artificial Sequence: Synthetic oligonucleotide
  Target: SCNA; (+) strand; PAM type: YTN; PAM sequence: CTG
acaatttattaaaacataaa

SEQ ID NO: 72369 - DNA, 20 bp, Artificial Sequence
  Description of Artificial Sequence: Synthetic oligonucleotide
  Target: SCNA; (+) strand; PAM type: YTN; PAM sequence: TTT
attaaaacataaataaaagt

SEQ ID NO: 72370 - DNA, 20 bp, Artificial Sequence
  Description of Artificial Sequence: Synthetic oligonucleotide
  Target: SCNA; (+) strand; PAM type: YTN; PAM sequence: TTA
ttaaaacataaataaaagtt

SEQ ID NO: 72371 - DNA, 20 bp, Artificial Sequence
  Description of Artificial Sequence: Synthetic oligonucleotide
  Target: SCNA; (+) strand; PAM type: YTN; PAM sequence: TTA
aaacataaataaaagttctt

SEQ ID NO: 72372 - DNA, 20 bp, Artificial Sequence
  Description of Artificial Sequence: Synthetic oligonucleotide
  Target: SCNA; (+) strand; PAM type: YTN; PAM sequence: TTC
ttcccacactttgacacatg

SEQ ID NO: 72373 - DNA, 20 bp, Artificial Sequence
  Description of Artificial Sequence: Synthetic oligonucleotide
  Target: SCNA; (+) strand; PAM type: YTN; PAM sequence: CTT
cccacactttgacacatgat

SEQ ID NO: 72374 - DNA, 20 bp, Artificial Sequence
  Description of Artificial Sequence: Synthetic oligonucleotide
  Target: SCNA; (+) strand; PAM type: YTN; PAM sequence: TTC
ccacactttgacacatgatt

SEQ ID NO: 72375 - DNA, 20 bp, Artificial Sequence
  Description of Artificial Sequence: Synthetic oligonucleotide
  Target: SCNA; (+) strand; PAM type: YTN; PAM sequence: CTT
tgacacatgattagaaaaaa

SEQ ID NO: 72376 - DNA, 20 bp, Artificial Sequence
  Description of Artificial Sequence: Synthetic oligonucleotide
  Target: SCNA; (+) strand; PAM type: YTN; PAM sequence: TTT
gacacatgattagaaaaaaa

SEQ ID NO: 72377 - DNA, 20 bp, Artificial Sequence
  Description of Artificial Sequence: Synthetic oligonucleotide
  Target: SCNA; (+) strand; PAM type: YTN; PAM sequence: TTG
acacatgattagaaaaaaaa

SEQ ID NO: 72378 - DNA, 20 bp, Artificial Sequence
  Description of Artificial Sequence: Synthetic oligonucleotide
  Target: SCNA; (+) strand; PAM type: YTN; PAM sequence: TTA
gaaaaaaaaaggcagtaaga

SEQ ID NO: 72379 - DNA, 20 bp, Artificial Sequence
  Description of Artificial Sequence: Synthetic oligonucleotide
  Target: SCNA; (+) strand; PAM type: YTN; PAM sequence: TTT
tcatacagaattctggggtt

SEQ ID NO: 72380 - DNA, 20 bp, Artificial Sequence
  Description of Artificial Sequence: Synthetic oligonucleotide
  Target: SCNA; (+) strand; PAM type: YTN; PAM sequence: TTT
catacagaattctggggtta

SEQ ID NO: 72381 - DNA, 20 bp, Artificial Sequence
  Description of Artificial Sequence: Synthetic oligonucleotide
  Target: SCNA; (+) strand; PAM type: YTN; PAM sequence: TTC
atacagaattctggggttaa

SEQ ID NO: 72382 - DNA, 20 bp, Artificial Sequence
  Description of Artificial Sequence: Synthetic oligonucleotide
  Target: SCNA; (+) strand; PAM type: YTN; PAM sequence: TTC
tggggttaagtagaattcac

SEQ ID NO: 72383 - DNA, 20 bp, Artificial Sequence
  Description of Artificial Sequence: Synthetic oligonucleotide
  Target: SCNA; (+) strand; PAM type: YTN; PAM sequence: CTG
gggttaagtagaattcactt

SEQ ID NO: 72384 - DNA, 20 bp, Artificial Sequence
  Description of Artificial Sequence: Synthetic oligonucleotide
  Target: SCNA; (+) strand; PAM type: YTN; PAM sequence: TTA
agtagaattcacttgtgttt

SEQ ID NO: 72385 - DNA, 20 bp, Artificial Sequence
  Description of Artificial Sequence: Synthetic oligonucleotide
  Target: SCNA; (+) strand; PAM type: YTN; PAM sequence: TTC
acttgtgtttgctggtctaa

SEQ ID NO: 72386 - DNA, 20 bp, Artificial Sequence
  Description of Artificial Sequence: Synthetic oligonucleotide
  Target: SCNA; (+) strand; PAM type: YTN; PAM sequence: CTT
gtgtttgctggtctaagatg

SEQ ID NO: 72387 - DNA, 20 bp, Artificial Sequence
  Description of Artificial Sequence: Synthetic oligonucleotide
  Target: SCNA; (+) strand; PAM type: YTN; PAM sequence: TTG
tgtttgctggtctaagatgc

SEQ ID NO: 72388 - DNA, 20 bp, Artificial Sequence
  Description of Artificial Sequence: Synthetic oligonucleotide
  Target: SCNA; (+) strand; PAM type: YTN; PAM sequence: TTT
gctggtctaagatgcaatgg

SEQ ID NO: 72389 - DNA, 20 bp, Artificial Sequence
  Description of Artificial Sequence: Synthetic oligonucleotide
  Target: SCNA; (+) strand; PAM type: YTN; PAM sequence: TTG
ctggtctaagatgcaatgga

SEQ ID NO: 72390 - DNA, 20 bp, Artificial Sequence
  Description of Artificial Sequence: Synthetic oligonucleotide
  Target: SCNA; (+) strand; PAM type: YTN; PAM sequence: CTG
gtctaagatgcaatggaatt

SEQ ID NO: 72391 - DNA, 20 bp, Artificial Sequence
  Description of Artificial Sequence: Synthetic oligonucleotide
  Target: SCNA; (+) strand; PAM type: YTN; PAM sequence: CTA
agatgcaatggaatttggag

SEQ ID NO: 72392 - DNA, 20 bp, Artificial Sequence
  Description of Artificial Sequence: Synthetic oligonucleotide
  Target: SCNA; (+) strand; PAM type: YTN; PAM sequence: TTT
ggaggcaatggggctggatt

SEQ ID NO: 72393 - DNA, 20 bp, Artificial Sequence
  Description of Artificial Sequence: Synthetic oligonucleotide
  Target: SCNA; (+) strand; PAM type: YTN; PAM sequence: TTG
gaggcaatggggctggattc

SEQ ID NO: 72394 - DNA, 20 bp, Artificial Sequence
  Description of Artificial Sequence: Synthetic oligonucleotide
  Target: SCNA; (+) strand; PAM type: YTN; PAM sequence: CTG
gattctatcaaatcagacac

SEQ ID NO: 72395 - DNA, 20 bp, Artificial Sequence
  Description of Artificial Sequence: Synthetic oligonucleotide
  Target: SCNA; (+) strand; PAM type: YTN; PAM sequence: TTC
tatcaaatcagacacacgga

SEQ ID NO: 72396 - DNA, 20 bp, Artificial Sequence
  Description of Artificial Sequence: Synthetic oligonucleotide
  Target: SCNA; (+) strand; PAM type: YTN; PAM sequence: CTA
tcaaatcagacacacggaag

SEQ ID NO: 72397 - DNA, 20 bp, Artificial Sequence
  Description of Artificial Sequence: Synthetic oligonucleotide
  Target: SCNA; (+) strand; PAM type: YTN; PAM sequence: TTA
taacgtgagaatttatattt

SEQ ID NO: 72398 - DNA, 20 bp, Artificial Sequence
  Description of Artificial Sequence: Synthetic oligonucleotide
  Target: SCNA; (+) strand; PAM type: YTN; PAM sequence: TTT
atattttttcattttctcag

SEQ ID NO: 72399 - DNA, 20 bp, Artificial Sequence
  Description of Artificial Sequence: Synthetic oligonucleotide
  Target: SCNA; (+) strand; PAM type: YTN; PAM sequence: TTA
tattttttcattttctcagc

SEQ ID NO: 72400 - DNA, 20 bp, Artificial Sequence
  Description of Artificial Sequence: Synthetic oligonucleotide
  Target: SCNA; (+) strand; PAM type: YTN; PAM sequence: TTT
tttcattttctcagcccaca

SEQ ID NO: 72401 - DNA, 20 bp, Artificial Sequence
  Description of Artificial Sequence: Synthetic oligonucleotide
  Target: SCNA; (+) strand; PAM type: YTN; PAM sequence: TTT
ttcattttctcagcccacac

SEQ ID NO: 72402 - DNA, 20 bp, Artificial Sequence
  Description of Artificial Sequence: Synthetic oligonucleotide
  Target: SCNA; (+) strand; PAM type: YTN; PAM sequence: TTT
tcattttctcagcccacact

SEQ ID NO: 72403 - DNA, 20 bp, Artificial Sequence
  Description of Artificial Sequence: Synthetic oligonucleotide
  Target: SCNA; (+) strand; PAM type: YTN; PAM sequence: TTT
cattttctcagcccacactt

SEQ ID NO: 72404 - DNA, 20 bp, Artificial Sequence
  Description of Artificial Sequence: Synthetic oligonucleotide
  Target: SCNA; (+) strand; PAM type: YTN; PAM sequence: TTC
attttctcagcccacacttg

SEQ ID NO: 72405 - DNA, 20 bp, Artificial Sequence
  Description of Artificial Sequence: Synthetic oligonucleotide
  Target: SCNA; (+) strand; PAM type: YTN; PAM sequence: TTT
tctcagcccacacttgaaat

SEQ ID NO: 72406 - DNA, 20 bp, Artificial Sequence
  Description of Artificial Sequence: Synthetic oligonucleotide
  Target: SCNA; (+) strand; PAM type: YTN; PAM sequence: TTT
ctcagcccacacttgaaata

SEQ ID NO: 72407 - DNA, 20 bp, Artificial Sequence
  Description of Artificial Sequence: Synthetic oligonucleotide
  Target: SCNA; (+) strand; PAM type: YTN; PAM sequence: TTC
tcagcccacacttgaaataa

SEQ ID NO: 72408 - DNA, 20 bp, Artificial Sequence
  Description of Artificial Sequence: Synthetic oligonucleotide
  Target: SCNA; (+) strand; PAM type: YTN; PAM sequence: CTC
agcccacacttgaaataaca

SEQ ID NO: 72409 - DNA, 20 bp, Artificial Sequence
  Description of Artificial Sequence: Synthetic oligonucleotide
  Target: SCNA; (+) strand; PAM type: YTN; PAM sequence: CTT
gaaataacaatttgcaagag

SEQ ID NO: 72410 - DNA, 20 bp, Artificial Sequence
  Description of Artificial Sequence: Synthetic oligonucleotide
  Target: SCNA; (+) strand; PAM type: YTN; PAM sequence: TTG
aaataacaatttgcaagagt

SEQ ID NO: 72411 - DNA, 20 bp, Artificial Sequence
  Description of Artificial Sequence: Synthetic oligonucleotide
  Target: SCNA; (+) strand; PAM type: YTN; PAM sequence: TTT
gcaagagttttgctttgctc

SEQ ID NO: 72412 - DNA, 20 bp, Artificial Sequence
  Description of Artificial Sequence: Synthetic oligonucleotide
  Target: SCNA; (+) strand; PAM type: YTN; PAM sequence: TTG
caagagttttgctttgctca

SEQ ID NO: 72413 - DNA, 20 bp, Artificial Sequence
  Description of Artificial Sequence: Synthetic oligonucleotide
  Target: SCNA; (+) strand; PAM type: YTN; PAM sequence: TTT
tgctttgctcaatattaggc

SEQ ID NO: 72414 - DNA, 20 bp, Artificial Sequence
  Description of Artificial Sequence: Synthetic oligonucleotide
  Target: SCNA; (+) strand; PAM type: YTN; PAM sequence: TTT
gctttgctcaatattaggcc

SEQ ID NO: 72415 - DNA, 20 bp, Artificial Sequence
  Description of Artificial Sequence: Synthetic oligonucleotide
  Target: SCNA; (+) strand; PAM type: YTN; PAM sequence: TTG
ctttgctcaatattaggcct

SEQ ID NO: 72416 - DNA, 20 bp, Artificial Sequence
  Description of Artificial Sequence: Synthetic oligonucleotide
  Target: SCNA; (+) strand; PAM type: YTN; PAM sequence: CTT
tgctcaatattaggcctgat

SEQ ID NO: 72417 - DNA, 20 bp, Artificial Sequence
  Description of Artificial Sequence: Synthetic oligonucleotide
  Target: SCNA; (+) strand; PAM type: YTN; PAM sequence: TTT
gctcaatattaggcctgatt

SEQ ID NO: 72418 - DNA, 20 bp, Artificial Sequence
  Description of Artificial Sequence: Synthetic oligonucleotide
  Target: SCNA; (+) strand; PAM type: YTN; PAM sequence: TTG
ctcaatattaggcctgatta

SEQ ID NO: 72419 - DNA, 20 bp, Artificial Sequence
  Description of Artificial Sequence: Synthetic oligonucleotide
  Target: SCNA; (+) strand; PAM type: YTN; PAM sequence: CTC
aatattaggcctgattagct

SEQ ID NO: 72420 - DNA, 20 bp, Artificial Sequence
  Description of Artificial Sequence: Synthetic oligonucleotide
  Target: SCNA; (+) strand; PAM type: YTN; PAM sequence: TTA
ggcctgattagctaaaatgc

SEQ ID NO: 72421 - DNA, 20 bp, Artificial Sequence
  Description of Artificial Sequence: Synthetic oligonucleotide
  Target: SCNA; (+) strand; PAM type: YTN; PAM sequence: CTG
attagctaaaatgctcaaat

SEQ ID NO: 72422 - DNA, 20 bp, Artificial Sequence
  Description of Artificial Sequence: Synthetic oligonucleotide
  Target: SCNA; (+) strand; PAM type: YTN; PAM sequence: TTA
gctaaaatgctcaaatttcc

SEQ ID NO: 72423 - DNA, 20 bp, Artificial Sequence
  Description of Artificial Sequence: Synthetic oligonucleotide
  Target: SCNA; (+) strand; PAM type: YTN; PAM sequence: CTA
aaatgctcaaatttccattc

SEQ ID NO: 72424 - DNA, 20 bp, Artificial Sequence
  Description of Artificial Sequence: Synthetic oligonucleotide
  Target: SCNA; (+) strand; PAM type: YTN; PAM sequence: CTC
aaatttccattcaatcctta

SEQ ID NO: 72425 - DNA, 20 bp, Artificial Sequence
  Description of Artificial Sequence: Synthetic oligonucleotide
  Target: SCNA; (+) strand; PAM type: YTN; PAM sequence: TTT
ccattcaatccttaaaaaca

SEQ ID NO: 72426 - DNA, 20 bp, Artificial Sequence
  Description of Artificial Sequence: Synthetic oligonucleotide
  Target: SCNA; (+) strand; PAM type: YTN; PAM sequence: TTC
cattcaatccttaaaaacag

SEQ ID NO: 72427 - DNA, 20 bp, Artificial Sequence
  Description of Artificial Sequence: Synthetic oligonucleotide
  Target: SCNA; (+) strand; PAM type: YTN; PAM sequence: TTC
aatccttaaaaacagatcca

SEQ ID NO: 72428 - DNA, 20 bp, Artificial Sequence
  Description of Artificial Sequence: Synthetic oligonucleotide
  Target: SCNA; (+) strand; PAM type: YTN; PAM sequence: CTT
aaaaacagatccacacttag

SEQ ID NO: 72429 - DNA, 20 bp, Artificial Sequence
  Description of Artificial Sequence: Synthetic oligonucleotide
  Target: SCNA; (+) strand; PAM type: YTN; PAM sequence: TTA
aaaacagatccacacttagt

SEQ ID NO: 72430 - DNA, 20 bp, Artificial Sequence
  Description of Artificial Sequence: Synthetic oligonucleotide
  Target: SCNA; (+) strand; PAM type: YTN; PAM sequence: CTT
agtcattcttcacacctctc

SEQ ID NO: 72431 - DNA, 20 bp, Artificial Sequence
  Description of Artificial Sequence: Synthetic oligonucleotide
  Target: SCNA; (+) strand; PAM type: YTN; PAM sequence: TTA
gtcattcttcacacctctct

SEQ ID NO: 72432 - DNA, 20 bp, Artificial Sequence
  Description of Artificial Sequence: Synthetic oligonucleotide
  Target: SCNA; (+) strand; PAM type: YTN; PAM sequence: TTC
ttcacacctctctccctcgc

SEQ ID NO: 72433 - DNA, 20 bp, Artificial Sequence
  Description of Artificial Sequence: Synthetic oligonucleotide
  Target: SCNA; (+) strand; PAM type: YTN; PAM sequence: CTT
cacacctctctccctcgccc

SEQ ID NO: 72434 - DNA, 20 bp, Artificial Sequence
  Description of Artificial Sequence: Synthetic oligonucleotide
  Target: SCNA; (+) strand; PAM type: YTN; PAM sequence: TTC
acacctctctccctcgccct

SEQ ID NO: 72435 - DNA, 20 bp, Artificial Sequence
  Description of Artificial Sequence: Synthetic oligonucleotide
  Target: SCNA; (+) strand; PAM type: YTN; PAM sequence: CTC
tctccctcgccctttcacac

SEQ ID NO: 72436 - DNA, 20 bp, Artificial Sequence
  Description of Artificial Sequence: Synthetic oligonucleotide
  Target: SCNA; (+) strand; PAM type: YTN; PAM sequence: CTC
tccctcgccctttcacaccc

SEQ ID NO: 72437 - DNA, 20 bp, Artificial Sequence
  Description of Artificial Sequence: Synthetic oligonucleotide
  Target: SCNA; (+) strand; PAM type: YTN; PAM sequence: CTC
cctcgccctttcacacccaa

SEQ ID NO: 72438 - DNA, 20 bp, Artificial Sequence
  Description of Artificial Sequence: Synthetic oligonucleotide
  Target: SCNA; (+) strand; PAM type: YTN; PAM sequence: CTC
gccctttcacacccaaattg

SEQ ID NO: 72439 - DNA, 20 bp, Artificial Sequence
  Description of Artificial Sequence: Synthetic oligonucleotide
  Target: SCNA; (+) strand; PAM type: YTN; PAM sequence: CTT
tcacacccaaattgttaact

SEQ ID NO: 72440 - DNA, 20 bp, Artificial Sequence
  Description of Artificial Sequence: Synthetic oligonucleotide
  Target: SCNA; (+) strand; PAM type: YTN; PAM sequence: TTT
cacacccaaattgttaactt

SEQ ID NO: 72441 - DNA, 20 bp, Artificial Sequence
  Description of Artificial Sequence: Synthetic oligonucleotide
  Target: SCNA; (+) strand; PAM type: YTN; PAM sequence: TTC
acacccaaattgttaacttt

SEQ ID NO: 72442 - DNA, 20 bp, Artificial Sequence
  Description of Artificial Sequence: Synthetic oligonucleotide
  Target: SCNA; (+) strand; PAM type: YTN; PAM sequence: TTG
ttaacttttttctctattct

SEQ ID NO: 72443 - DNA, 20 bp, Artificial Sequence
  Description of Artificial Sequence: Synthetic oligonucleotide
  Target: SCNA; (+) strand; PAM type: YTN; PAM sequence: TTA
acttttttctctattctcac

SEQ ID NO: 72444 - DNA, 20 bp, Artificial Sequence
  Description of Artificial Sequence: Synthetic oligonucleotide
  Target: SCNA; (+) strand; PAM type: YTN; PAM sequence: CTT
ttttctctattctcacattt

SEQ ID NO: 72445 - DNA, 20 bp, Artificial Sequence
  Description of Artificial Sequence: Synthetic oligonucleotide
  Target: SCNA; (+) strand; PAM type: YTN; PAM sequence: TTT
tttctctattctcacattta

SEQ ID NO: 72446 - DNA, 20 bp, Artificial Sequence
  Description of Artificial Sequence: Synthetic oligonucleotide
  Target: SCNA; (+) strand; PAM type: YTN; PAM sequence: TTT
ttctctattctcacatttat

SEQ ID NO: 72447 - DNA, 20 bp, Artificial Sequence
  Description of Artificial Sequence: Synthetic oligonucleotide
  Target: SCNA; (+) strand; PAM type: YTN; PAM sequence: TTT
tctctattctcacatttata

SEQ ID NO: 72448 - DNA, 20 bp, Artificial Sequence
  Description of Artificial Sequence: Synthetic oligonucleotide
  Target: SCNA; (+) strand; PAM type: YTN; PAM sequence: TTT
ctctattctcacatttatag

SEQ ID NO: 72449 - DNA, 20 bp, Artificial Sequence
  Description of Artificial Sequence: Synthetic oligonucleotide
  Target: SCNA; (+) strand; PAM type: YTN; PAM sequence: TTC
tctattctcacatttatagt

SEQ ID NO: 72450 - DNA, 20 bp, Artificial Sequence
  Description of Artificial Sequence: Synthetic oligonucleotide
  Target: SCNA; (+) strand; PAM type: YTN; PAM sequence: CTC
tattctcacatttatagtct

SEQ ID NO: 72451 - DNA, 20 bp, Artificial Sequence
  Description of Artificial Sequence: Synthetic oligonucleotide
  Target: SCNA; (+) strand; PAM type: YTN; PAM sequence: CTA
ttctcacatttatagtctgg

SEQ ID NO: 72452 - DNA, 20 bp, Artificial Sequence
  Description of Artificial Sequence: Synthetic oligonucleotide
  Target: SCNA; (+) strand; PAM type: YTN; PAM sequence: TTC
tcacatttatagtctggttc

SEQ ID NO: 72453 - DNA, 20 bp, Artificial Sequence
  Description of Artificial Sequence: Synthetic oligonucleotide
  Target: SCNA; (+) strand; PAM type: YTN; PAM sequence: CTC
acatttatagtctggttcag

SEQ ID NO: 72454 - DNA, 20 bp, Artificial Sequence
  Description of Artificial Sequence: Synthetic oligonucleotide
  Target: SCNA; (+) strand; PAM type: YTN; PAM sequence: TTT
atagtctggttcagacttcc

SEQ ID NO: 72455 - DNA, 20 bp, Artificial Sequence
  Description of Artificial Sequence: Synthetic oligonucleotide
  Target: SCNA; (+) strand; PAM type: YTN; PAM sequence: TTA
tagtctggttcagacttccg

SEQ ID NO: 72456 - DNA, 20 bp, Artificial Sequence
  Description of Artificial Sequence: Synthetic oligonucleotide
  Target: SCNA; (+) strand; PAM type: YTN; PAM sequence: CTG
gttcagacttccgtgatctg

SEQ ID NO: 72457 - DNA, 20 bp, Artificial Sequence
  Description of Artificial Sequence: Synthetic oligonucleotide
  Target: SCNA; (+) strand; PAM type: YTN; PAM sequence: TTC
agacttccgtgatctgtcac

SEQ ID NO: 72458 - DNA, 20 bp, Artificial Sequence
  Description of Artificial Sequence: Synthetic oligonucleotide
  Target: SCNA; (+) strand; PAM type: YTN; PAM sequence: CTT
ccgtgatctgtcacttgctc

SEQ ID NO: 72459 - DNA, 20 bp, Artificial Sequence
  Description of Artificial Sequence: Synthetic oligonucleotide
  Target: SCNA; (+) strand; PAM type: YTN; PAM sequence: TTC
cgtgatctgtcacttgctct

SEQ ID NO: 72460 - DNA, 20 bp, Artificial Sequence
  Description of Artificial Sequence: Synthetic oligonucleotide
  Target: SCNA; (+) strand; PAM type: YTN; PAM sequence: CTG
tcacttgctcttgtggttaa

SEQ ID NO: 72461 - DNA, 20 bp, Artificial Sequence
  Description of Artificial Sequence: Synthetic oligonucleotide
  Target: SCNA; (+) strand; PAM type: YTN; PAM sequence: CTT
gctcttgtggttaaatttct

SEQ ID NO: 72462 - DNA, 20 bp, Artificial Sequence
  Description of Artificial Sequence: Synthetic oligonucleotide
  Target: SCNA; (+) strand; PAM type: YTN; PAM sequence: TTG
ctcttgtggttaaatttctg

SEQ ID NO: 72463 - DNA, 20 bp, Artificial Sequence
  Description of Artificial Sequence: Synthetic oligonucleotide
  Target: SCNA; (+) strand; PAM type: YTN; PAM sequence: CTC
ttgtggttaaatttctgaag

SEQ ID NO: 72464 - DNA, 20 bp, Artificial Sequence
  Description of Artificial Sequence: Synthetic oligonucleotide
  Target: SCNA; (+) strand; PAM type: YTN; PAM sequence: CTT
gtggttaaatttctgaagtg

SEQ ID NO: 72465 - DNA, 20 bp, Artificial Sequence
  Description of Artificial Sequence: Synthetic oligonucleotide
  Target: SCNA; (+) strand; PAM type: YTN; PAM sequence: TTG
tggttaaatttctgaagtga

SEQ ID NO: 72466 - DNA, 20 bp, Artificial Sequence
  Description of Artificial Sequence: Synthetic oligonucleotide
  Target: SCNA; (+) strand; PAM type: YTN; PAM sequence: TTA
aatttctgaagtgaaattcc

SEQ ID NO: 72467 - DNA, 20 bp, Artificial Sequence
  Description of Artificial Sequence: Synthetic oligonucleotide
  Target: SCNA; (+) strand; PAM type: YTN; PAM sequence: TTT
ctgaagtgaaattcctatct

SEQ ID NO: 72468 - DNA, 20 bp, Artificial Sequence
  Description of Artificial Sequence: Synthetic oligonucleotide
  Target: SCNA; (+) strand; PAM type: YTN; PAM sequence: TTC
tgaagtgaaattcctatctc

SEQ ID NO: 72469 - DNA, 20 bp, Artificial Sequence
  Description of Artificial Sequence: Synthetic oligonucleotide
  Target: SCNA; (+) strand; PAM type: YTN; PAM sequence: CTG
aagtgaaattcctatctcta

SEQ ID NO: 72470 - DNA, 20 bp, Artificial Sequence
  Description of Artificial Sequence: Synthetic oligonucleotide
  Target: SCNA; (+) strand; PAM type: YTN; PAM sequence: TTC
ctatctctaatctcttctcc

SEQ ID NO: 72471 - DNA, 20 bp, Artificial Sequence
  Description of Artificial Sequence: Synthetic oligonucleotide
  Target: SCNA; (+) strand; PAM type: YTN; PAM sequence: CTA
tctctaatctcttctcctat

SEQ ID NO: 72472 - DNA, 20 bp, Artificial Sequence
  Description of Artificial Sequence: Synthetic oligonucleotide
  Target: SCNA; (+) strand; PAM type: YTN; PAM sequence: CTC
taatctcttctcctatgtat

SEQ ID NO: 72473 - DNA, 20 bp, Artificial Sequence
  Description of Artificial Sequence: Synthetic oligonucleotide
  Target: SCNA; (+) strand; PAM type: YTN; PAM sequence: CTA
atctcttctcctatgtatgt

SEQ ID NO: 72474 - DNA, 20 bp, Artificial Sequence
  Description of Artificial Sequence: Synthetic oligonucleotide
  Target: SCNA; (+) strand; PAM type: YTN; PAM sequence: CTC
ttctcctatgtatgtcatca

SEQ ID NO: 72475 - DNA, 20 bp, Artificial Sequence
  Description of Artificial Sequence: Synthetic oligonucleotide
  Target: SCNA; (+) strand; PAM type: YTN; PAM sequence: CTT
ctcctatgtatgtcatcaga

SEQ ID NO: 72476 - DNA, 20 bp, Artificial Sequence
  Description of Artificial Sequence: Synthetic oligonucleotide
  Target: SCNA; (+) strand; PAM type: YTN; PAM sequence: TTC
tcctatgtatgtcatcagac

SEQ ID NO: 72477 - DNA, 20 bp, Artificial Sequence
  Description of Artificial Sequence: Synthetic oligonucleotide
  Target: SCNA; (+) strand; PAM type: YTN; PAM sequence: CTC
ctatgtatgtcatcagactt

SEQ ID NO: 72478 - DNA, 20 bp, Artificial Sequence
  Description of Artificial Sequence: Synthetic oligonucleotide
  Target: SCNA; (+) strand; PAM type: YTN; PAM sequence: CTA
tgtatgtcatcagacttgca

SEQ ID NO: 72479 - DNA, 20 bp, Artificial Sequence
  Description of Artificial Sequence: Synthetic oligonucleotide
  Target: SCNA; (+) strand; PAM type: YTN; PAM sequence: CTT
gcaattttttctaaacccaa

SEQ ID NO: 72480 - DNA, 20 bp, Artificial Sequence
  Description of Artificial Sequence: Synthetic oligonucleotide
  Target: SCNA; (+) strand; PAM type: YTN; PAM sequence: TTG
caattttttctaaacccaaa

SEQ ID NO: 72481 - DNA, 20 bp, Artificial Sequence
  Description of Artificial Sequence: Synthetic oligonucleotide
  Target: SCNA; (+) strand; PAM type: YTN; PAM sequence: TTT
tttctaaacccaaaatgtgt

SEQ ID NO: 72482 - DNA, 20 bp, Artificial Sequence
  Description of Artificial Sequence: Synthetic oligonucleotide
  Target: SCNA; (+) strand; PAM type: YTN; PAM sequence: TTT
ttctaaacccaaaatgtgtt

SEQ ID NO: 72483 - DNA, 20 bp, Artificial Sequence
  Description of Artificial Sequence: Synthetic oligonucleotide
  Target: SCNA; (+) strand; PAM type: YTN; PAM sequence: TTT
tctaaacccaaaatgtgttt

SEQ ID NO: 72484 - DNA, 20 bp, Artificial Sequence
  Description of Artificial Sequence: Synthetic oligonucleotide
  Target: SCNA; (+) strand; PAM type: YTN; PAM sequence: TTT
ctaaacccaaaatgtgtttt

SEQ ID NO: 72485 - DNA, 20 bp, Artificial Sequence
  Description of Artificial Sequence: Synthetic oligonucleotide
  Target: SCNA; (+) strand; PAM type: YTN; PAM sequence: TTC
taaacccaaaatgtgttttc

SEQ ID NO: 72486 - DNA, 20 bp, Artificial Sequence
  Description of Artificial Sequence: Synthetic oligonucleotide
  Target: SCNA; (+) strand; PAM type: YTN; PAM sequence: CTA
aacccaaaatgtgttttcac

SEQ ID NO: 72487 - DNA, 20 bp, Artificial Sequence
  Description of Artificial Sequence: Synthetic oligonucleotide
  Target: SCNA; (+) strand; PAM type: YTN; PAM sequence: TTT
tcactagtcccctgttaaaa

SEQ ID NO: 72488 - DNA, 20 bp, Artificial Sequence
  Description of Artificial Sequence: Synthetic oligonucleotide
  Target: SCNA; (+) strand; PAM type: YTN; PAM sequence: TTT
cactagtcccctgttaaaaa

SEQ ID NO: 72489 - DNA, 20 bp, Artificial Sequence
  Description of Artificial Sequence: Synthetic oligonucleotide
  Target: SCNA; (+) strand; PAM type: YTN; PAM sequence: TTC
actagtcccctgttaaaaaa

SEQ ID NO: 72490 - DNA, 20 bp, Artificial Sequence
  Description of Artificial Sequence: Synthetic oligonucleotide
  Target: SCNA; (+) strand; PAM type: YTN; PAM sequence: CTA
gtcccctgttaaaaaactgt

SEQ ID NO: 72491 - DNA, 20 bp, Artificial Sequence
  Description of Artificial Sequence: Synthetic oligonucleotide
  Target: SCNA; (+) strand; PAM type: YTN; PAM sequence: CTG
ttaaaaaactgtcaacacat

SEQ ID NO: 72492 - DNA, 20 bp, Artificial Sequence
  Description of Artificial Sequence: Synthetic oligonucleotide
  Target: SCNA; (+) strand; PAM type: YTN; PAM sequence: TTA
aaaaactgtcaacacatcca

SEQ ID NO: 72493 - DNA, 20 bp, Artificial Sequence
  Description of Artificial Sequence: Synthetic oligonucleotide
  Target: SCNA; (+) strand; PAM type: YTN; PAM sequence: CTG
tcaacacatccacattgccc

SEQ ID NO: 72494 - DNA, 20 bp, Artificial Sequence
  Description of Artificial Sequence: Synthetic oligonucleotide
  Target: SCNA; (+) strand; PAM type: YTN; PAM sequence: TTG
cccactggctatagagttca

SEQ ID NO: 72495 - DNA, 20 bp, Artificial Sequence
  Description of Artificial Sequence: Synthetic oligonucleotide
  Target: SCNA; (+) strand; PAM type: YTN; PAM sequence: CTG
gctatagagttcaattcaaa

SEQ ID NO: 72496 - DNA, 20 bp, Artificial Sequence
  Description of Artificial Sequence: Synthetic oligonucleotide
  Target: SCNA; (+) strand; PAM type: YTN; PAM sequence: CTA
tagagttcaattcaaactag

SEQ ID NO: 72497 - DNA, 20 bp, Artificial Sequence
  Description of Artificial Sequence: Synthetic oligonucleotide
  Target: SCNA; (+) strand; PAM type: YTN; PAM sequence: TTC
aattcaaactagagtcattc

SEQ ID NO: 72498 - DNA, 20 bp, Artificial Sequence
  Description of Artificial Sequence: Synthetic oligonucleotide
  Target: SCNA; (+) strand; PAM type: YTN; PAM sequence: TTC
aaactagagtcattcactac

SEQ ID NO: 72499 - DNA, 20 bp, Artificial Sequence
  Description of Artificial Sequence: Synthetic oligonucleotide
  Target: SCNA; (+) strand; PAM type: YTN; PAM sequence: CTA
gagtcattcactacttggac

SEQ ID NO: 72500 - DNA, 20 bp, Artificial Sequence
  Description of Artificial Sequence: Synthetic oligonucleotide
  Target: SCNA; (+) strand; PAM type: YTN; PAM sequence: TTC
actacttggacaaccagctt

SEQ ID NO: 72501 - DNA, 20 bp, Artificial Sequence
  Description of Artificial Sequence: Synthetic oligonucleotide
  Target: SCNA; (+) strand; PAM type: YTN; PAM sequence: CTA
cttggacaaccagcttccca

SEQ ID NO: 72502 - DNA, 20 bp, Artificial Sequence
  Description of Artificial Sequence: Synthetic oligonucleotide
  Target: SCNA; (+) strand; PAM type: YTN; PAM sequence: CTT
ggacaaccagcttcccagct

SEQ ID NO: 72503 - DNA, 20 bp, Artificial Sequence
  Description of Artificial Sequence: Synthetic oligonucleotide
  Target: SCNA; (+) strand; PAM type: YTN; PAM sequence: TTG
gacaaccagcttcccagctc

SEQ ID NO: 72504 - DNA, 20 bp, Artificial Sequence
  Description of Artificial Sequence: Synthetic oligonucleotide
  Target: SCNA; (+) strand; PAM type: YTN; PAM sequence: CTT
cccagctccacctctgggta

SEQ ID NO: 72505 - DNA, 20 bp, Artificial Sequence
  Description of Artificial Sequence: Synthetic oligonucleotide
  Target: SCNA; (+) strand; PAM type: YTN; PAM sequence: TTC
ccagctccacctctgggtat

SEQ ID NO: 72506 - DNA, 20 bp, Artificial Sequence
  Description of Artificial Sequence: Synthetic oligonucleotide
  Target: SCNA; (+) strand; PAM type: YTN; PAM sequence: CTC
cacctctgggtattctttct

SEQ ID NO: 72507 - DNA, 20 bp, Artificial Sequence
  Description of Artificial Sequence: Synthetic oligonucleotide
  Target: SCNA; (+) strand; PAM type: YTN; PAM sequence: CTC
tgggtattctttctcttgcc

SEQ ID NO: 72508 - DNA, 20 bp, Artificial Sequence
  Description of Artificial Sequence: Synthetic oligonucleotide
  Target: SCNA; (+) strand; PAM type: YTN; PAM sequence: CTG
ggtattctttctcttgcctt

SEQ ID NO: 72509 - DNA, 20 bp, Artificial Sequence
  Description of Artificial Sequence: Synthetic oligonucleotide
  Target: SCNA; (+) strand; PAM type: YTN; PAM sequence: TTC
tttctcttgccttcagaatg

SEQ ID NO: 72510 - DNA, 20 bp, Artificial Sequence
  Description of Artificial Sequence: Synthetic oligonucleotide
  Target: SCNA; (+) strand; PAM type: YTN; PAM sequence: CTT
tctcttgccttcagaatggt

SEQ ID NO: 72511 - DNA, 20 bp, Artificial Sequence
  Description of Artificial Sequence: Synthetic oligonucleotide
  Target: SCNA; (+) strand; PAM type: YTN; PAM sequence: TTT
ctcttgccttcagaatggtg

SEQ ID NO: 72512 - DNA, 20 bp, Artificial Sequence
  Description of Artificial Sequence: Synthetic oligonucleotide
  Target: SCNA; (+) strand; PAM type: YTN; PAM sequence: TTC
tcttgccttcagaatggtgt

SEQ ID NO: 72513 - DNA, 20 bp, Artificial Sequence
  Description of Artificial Sequence: Synthetic oligonucleotide
  Target: SCNA; (+) strand; PAM type: YTN; PAM sequence: CTC
ttgccttcagaatggtgttg

SEQ ID NO: 72514 - DNA, 20 bp, Artificial Sequence
  Description of Artificial Sequence: Synthetic oligonucleotide
  Target: SCNA; (+) strand; PAM type: YTN; PAM sequence: CTT
gccttcagaatggtgttgag

SEQ ID NO: 72515 - DNA, 20 bp, Artificial Sequence
  Description of Artificial Sequence: Synthetic oligonucleotide
  Target: SCNA; (+) strand; PAM type: YTN; PAM sequence: TTG
ccttcagaatggtgttgagg

SEQ ID NO: 72516 - DNA, 20 bp, Artificial Sequence
  Description of Artificial Sequence: Synthetic oligonucleotide
  Target: SCNA; (+) strand; PAM type: YTN; PAM sequence: CTT
cagaatggtgttgaggatat

SEQ ID NO: 72517 - DNA, 20 bp, Artificial Sequence
  Description of Artificial Sequence: Synthetic oligonucleotide
  Target: SCNA; (+) strand; PAM type: YTN; PAM sequence: TTC
agaatggtgttgaggatata

SEQ ID NO: 72518 - DNA, 20 bp, Artificial Sequence
  Description of Artificial Sequence: Synthetic oligonucleotide
  Target: SCNA; (+) strand; PAM type: YTN; PAM sequence: TTG
aggatataaggtgaatgcaa

SEQ ID NO: 72519 - DNA, 20 bp, Artificial Sequence
  Description of Artificial Sequence: Synthetic oligonucleotide
  Target: SCNA; (+) strand; PAM type: YTN; PAM sequence: TTG
ctctcagtgagctcatagtc

SEQ ID NO: 72520 - DNA, 20 bp, Artificial Sequence
  Description of Artificial Sequence: Synthetic oligonucleotide
  Target: SCNA; (+) strand; PAM type: YTN; PAM sequence: CTC
tcagtgagctcatagtctaa

SEQ ID NO: 72521 - DNA, 20 bp, Artificial Sequence
  Description of Artificial Sequence: Synthetic oligonucleotide
  Target: SCNA; (+) strand; PAM type: YTN; PAM sequence: CTC
agtgagctcatagtctaagt

SEQ ID NO: 72522 - DNA, 20 bp, Artificial Sequence
  Description of Artificial Sequence: Synthetic oligonucleotide
  Target: SCNA; (+) strand; PAM type: YTN; PAM sequence: CTC
atagtctaagtgaggagaca

SEQ ID NO: 72523 - DNA, 20 bp, Artificial Sequence
  Description of Artificial Sequence: Synthetic oligonucleotide
  Target: SCNA; (+) strand; PAM type: YTN; PAM sequence: CTA
agtgaggagacagatgagca

SEQ ID NO: 72524 - DNA, 20 bp, Artificial Sequence
  Description of Artificial Sequence: Synthetic oligonucleotide
  Target: SCNA; (+) strand; PAM type: YTN; PAM sequence: TTA
taaaacaaattggcaagtgc

SEQ ID NO: 72525 - DNA, 20 bp, Artificial Sequence
  Description of Artificial Sequence: Synthetic oligonucleotide
  Target: SCNA; (+) strand; PAM type: YTN; PAM sequence: TTG
gcaagtgcaatgacagaagt

SEQ ID NO: 72526 - DNA, 20 bp, Artificial Sequence
  Description of Artificial Sequence: Synthetic oligonucleotide
  Target: SCNA; (+) strand; PAM type: YTN; PAM sequence: CTA
tgggaaccaagaggaaggat

SEQ ID NO: 72527 - DNA, 20 bp, Artificial Sequence
  Description of Artificial Sequence: Synthetic oligonucleotide
  Target: SCNA; (+) strand; PAM type: YTN; PAM sequence: TTC
agggagacttactggaggat

SEQ ID NO: 72528 - DNA, 20 bp, Artificial Sequence
  Description of Artificial Sequence: Synthetic oligonucleotide
  Target: SCNA; (+) strand; PAM type: YTN; PAM sequence: CTT
actggaggatgaattgccct

SEQ ID NO: 72529 - DNA, 20 bp, Artificial Sequence
  Description of Artificial Sequence: Synthetic oligonucleotide
  Target: SCNA; (+) strand; PAM type: YTN; PAM sequence: TTA
ctggaggatgaattgccctc

SEQ ID NO: 72530 - DNA, 20 bp, Artificial Sequence
  Description of Artificial Sequence: Synthetic oligonucleotide
  Target: SCNA; (+) strand; PAM type: YTN; PAM sequence: CTG
gaggatgaattgccctcaga

SEQ ID NO: 72531 - DNA, 20 bp, Artificial Sequence
  Description of Artificial Sequence: Synthetic oligonucleotide
  Target: SCNA; (+) strand; PAM type: YTN; PAM sequence: TTG
ccctcagaaagtattgaagt

SEQ ID NO: 72532 - DNA, 20 bp, Artificial Sequence
  Description of Artificial Sequence: Synthetic oligonucleotide
  Target: SCNA; (+) strand; PAM type: YTN; PAM sequence: CTC
agaaagtattgaagtgtagg

SEQ ID NO: 72533 - DNA, 20 bp, Artificial Sequence
  Description of Artificial Sequence: Synthetic oligonucleotide
  Target: SCNA; (+) strand; PAM type: YTN; PAM sequence: TTG
aagtgtaggtaacagttggt

SEQ ID NO: 72534 - DNA, 20 bp, Artificial Sequence
  Description of Artificial Sequence: Synthetic oligonucleotide
  Target: SCNA; (+) strand; PAM type: YTN; PAM sequence: TTG
gttaagagaagcagaaagaa

SEQ ID NO: 72535 - DNA, 20 bp, Artificial Sequence
  Description of Artificial Sequence: Synthetic oligonucleotide
  Target: SCNA; (+) strand; PAM type: YTN; PAM sequence: TTA
agagaagcagaaagaaggaa

SEQ ID NO: 72536 - DNA, 20 bp, Artificial Sequence
  Description of Artificial Sequence: Synthetic oligonucleotide
  Target: SCNA; (+) strand; PAM type: YTN; PAM sequence: CTG
ggtaatactgccaagagaaa

SEQ ID NO: 72537 - DNA, 20 bp, Artificial Sequence
  Description of Artificial Sequence: Synthetic oligonucleotide
  Target: SCNA; (+) strand; PAM type: YTN; PAM sequence: CTG
ccaagagaaatctacaatta

SEQ ID NO: 72538 - DNA, 20 bp, Artificial Sequence
  Description of Artificial Sequence: Synthetic oligonucleotide
  Target: SCNA; (+) strand; PAM type: YTN; PAM sequence: CTA
caattaaatgcaattcccat

SEQ ID NO: 72539 - DNA, 20 bp, Artificial Sequence
  Description of Artificial Sequence: Synthetic oligonucleotide
  Target: SCNA; (+) strand; PAM type: YTN; PAM sequence: TTA
aatgcaattcccatcaaaat

SEQ ID NO: 72540 - DNA, 20 bp, Artificial Sequence
  Description of Artificial Sequence: Synthetic oligonucleotide
  Target: SCNA; (+) strand; PAM type: YTN; PAM sequence: TTC
ccatcaaaataccaccatca

SEQ ID NO: 72541 - DNA, 20 bp, Artificial Sequence
  Description of Artificial Sequence: Synthetic oligonucleotide
  Target: SCNA; (+) strand; PAM type: YTN; PAM sequence: TTC
ttcacagaactagaaaaaac

SEQ ID NO: 72542 - DNA, 20 bp, Artificial Sequence
  Description of Artificial Sequence: Synthetic oligonucleotide
  Target: SCNA; (+) strand; PAM type: YTN; PAM sequence: CTT
cacagaactagaaaaaacaa

SEQ ID NO: 72543 - DNA, 20 bp, Artificial Sequence
  Description of Artificial Sequence: Synthetic oligonucleotide
  Target: SCNA; (+) strand; PAM type: YTN; PAM sequence: TTC
acagaactagaaaaaacaat

SEQ ID NO: 72544 - DNA, 20 bp, Artificial Sequence
  Description of Artificial Sequence: Synthetic oligonucleotide
  Target: SCNA; (+) strand; PAM type: YTN; PAM sequence: CTA
gaaaaaacaatcctaaaatt

SEQ ID NO: 72545 - DNA, 20 bp, Artificial Sequence
  Description of Artificial Sequence: Synthetic oligonucleotide
  Target: SCNA; (+) strand; PAM type: YTN; PAM sequence: CTA
aaattcatatggaaccaaaa

SEQ ID NO: 72546 - DNA, 20 bp, Artificial Sequence
  Description of Artificial Sequence: Synthetic oligonucleotide
  Target: SCNA; (+) strand; PAM type: YTN; PAM sequence: TTC
atatggaaccaaaaaagagc

SEQ ID NO: 72547 - DNA, 20 bp, Artificial Sequence
  Description of Artificial Sequence: Synthetic oligonucleotide
  Target: SCNA; (+) strand; PAM type: YTN; PAM sequence: TTA
agcaaaaagaaaaatctgga

SEQ ID NO: 72548 - DNA, 20 bp, Artificial Sequence
  Description of Artificial Sequence: Synthetic oligonucleotide
  Target: SCNA; (+) strand; PAM type: YTN; PAM sequence: CTG
gaggcatcacattacctgct

SEQ ID NO: 72549 - DNA, 20 bp, Artificial Sequence
  Description of Artificial Sequence: Synthetic oligonucleotide
  Target: SCNA; (+) strand; PAM type: YTN; PAM sequence: TTA
cctgctttcaaactatacta

SEQ ID NO: 72550 - DNA, 20 bp, Artificial Sequence
  Description of Artificial Sequence: Synthetic oligonucleotide
  Target: SCNA; (+) strand; PAM type: YTN; PAM sequence: CTG
ctttcaaactatactataag

SEQ ID NO: 72551 - DNA, 20 bp, Artificial Sequence
  Description of Artificial Sequence: Synthetic oligonucleotide
  Target: SCNA; (+) strand; PAM type: YTN; PAM sequence: CTT
tcaaactatactataaggcc

SEQ ID NO: 72552 - DNA, 20 bp, Artificial Sequence
  Description of Artificial Sequence: Synthetic oligonucleotide
  Target: SCNA; (+) strand; PAM type: YTN; PAM sequence: TTT
caaactatactataaggcca

SEQ ID NO: 72553 - DNA, 20 bp, Artificial Sequence
  Description of Artificial Sequence: Synthetic oligonucleotide
  Target: SCNA; (+) strand; PAM type: YTN; PAM sequence: TTC
aaactatactataaggccat

SEQ ID NO: 72554 - DNA, 20 bp, Artificial Sequence
  Description of Artificial Sequence: Synthetic oligonucleotide
  Target: SCNA; (+) strand; PAM type: YTN; PAM sequence: CTA
tactataaggccatagtcac

SEQ ID NO: 72555 - DNA, 20 bp, Artificial Sequence
  Description of Artificial Sequence: Synthetic oligonucleotide
  Target: SCNA; (+) strand; PAM type: YTN; PAM sequence: CTA
taaggccatagtcaccaaaa

SEQ ID NO: 72556 - DNA, 20 bp, Artificial Sequence
  Description of Artificial Sequence: Synthetic oligonucleotide
  Target: SCNA; (+) strand; PAM type: YTN; PAM sequence: CTG
gtataaaaataggcacacag

SEQ ID NO: 72557 - DNA, 20 bp, Artificial Sequence
  Description of Artificial Sequence: Synthetic oligonucleotide
  Target: SCNA; (+) strand; PAM type: YTN; PAM sequence: CTA
gaaataaacccaaatgctaa

SEQ ID NO: 72558 - DNA, 20 bp, Artificial Sequence
  Description of Artificial Sequence: Synthetic oligonucleotide
  Target: SCNA; (+) strand; PAM type: YTN; PAM sequence: CTA
acagccaagtgatctttgac

SEQ ID NO: 72559 - DNA, 20 bp, Artificial Sequence
  Description of Artificial Sequence: Synthetic oligonucleotide
  Target: SCNA; (+) strand; PAM type: YTN; PAM sequence: CTT
tgacaaagcaaataaaaaca

SEQ ID NO: 72560 - DNA, 20 bp, Artificial Sequence
  Description of Artificial Sequence: Synthetic oligonucleotide
  Target: SCNA; (+) strand; PAM type: YTN; PAM sequence: TTT
gacaaagcaaataaaaacat

SEQ ID NO: 72561 - DNA, 20 bp, Artificial Sequence
  Description of Artificial Sequence: Synthetic oligonucleotide
  Target: SCNA; (+) strand; PAM type: YTN; PAM sequence: TTG
acaaagcaaataaaaacata

SEQ ID NO: 72562 - DNA, 20 bp, Artificial Sequence
  Description of Artificial Sequence: Synthetic oligonucleotide
  Target: SCNA; (+) strand; PAM type: YTN; PAM sequence: TTT
gatgtattgtatgggttaca

SEQ ID NO: 72563 - DNA, 20 bp, Artificial Sequence
  Description of Artificial Sequence: Synthetic oligonucleotide
  Target: SCNA; (+) strand; PAM type: YTN; PAM sequence: TTG
atgtattgtatgggttacat

SEQ ID NO: 72564 - DNA, 20 bp, Artificial Sequence
  Description of Artificial Sequence: Synthetic oligonucleotide
  Target: SCNA; (+) strand; PAM type: YTN; PAM sequence: TTG
tatgggttacataagatcga

SEQ ID NO: 72565 - DNA, 20 bp, Artificial Sequence
  Description of Artificial Sequence: Synthetic oligonucleotide
  Target: SCNA; (+) strand; PAM type: YTN; PAM sequence: TTA
cataagatcgattaagtgga

SEQ ID NO: 72566 - DNA, 20 bp, Artificial Sequence
  Description of Artificial Sequence: Synthetic oligonucleotide
  Target: SCNA; (+) strand; PAM type: YTN; PAM sequence: TTA
agtggagatggaaattttac

SEQ ID NO: 72567 - DNA, 20 bp, Artificial Sequence
  Description of Artificial Sequence: Synthetic oligonucleotide
  Target: SCNA; (+) strand; PAM type: YTN; PAM sequence: TTT
tacaactttttgttgtatat

SEQ ID NO: 72568 - DNA, 20 bp, Artificial Sequence
  Description of Artificial Sequence: Synthetic oligonucleotide
  Target: SCNA; (+) strand; PAM type: YTN; PAM sequence: TTT
acaactttttgttgtatatt

SEQ ID NO: 72569 - DNA, 20 bp, Artificial Sequence
  Description of Artificial Sequence: Synthetic oligonucleotide
  Target: SCNA; (+) strand; PAM type: YTN; PAM sequence: TTA
caactttttgttgtatattg

SEQ ID NO: 72570 - DNA, 20 bp, Artificial Sequence
  Description of Artificial Sequence: Synthetic oligonucleotide
  Target: SCNA; (+) strand; PAM type: YTN; PAM sequence: CTT
tttgttgtatattgtaaact

SEQ ID NO: 72571 - DNA, 20 bp, Artificial Sequence
  Description of Artificial Sequence: Synthetic oligonucleotide
  Target: SCNA; (+) strand; PAM type: YTN; PAM sequence: TTT
ttgttgtatattgtaaacta

SEQ ID NO: 72572 - DNA, 20 bp, Artificial Sequence
  Description of Artificial Sequence: Synthetic oligonucleotide
  Target: SCNA; (+) strand; PAM type: YTN; PAM sequence: TTT
tgttgtatattgtaaactat

SEQ ID NO: 72573 - DNA, 20 bp, Artificial Sequence
  Description of Artificial Sequence: Synthetic oligonucleotide
  Target: SCNA; (+) strand; PAM type: YTN; PAM sequence: TTT
gttgtatattgtaaactatt

SEQ ID NO: 72574 - DNA, 20 bp, Artificial Sequence
  Description of Artificial Sequence: Synthetic oligonucleotide
  Target: SCNA; (+) strand; PAM type: YTN; PAM sequence: TTG
ttgtatattgtaaactattt

SEQ ID NO: 72575 - DNA, 20 bp, Artificial Sequence
  Description of Artificial Sequence: Synthetic oligonucleotide
  Target: SCNA; (+) strand; PAM type: YTN; PAM sequence: TTG
tatattgtaaactattttta

SEQ ID NO: 72576 - DNA, 20 bp, Artificial Sequence
  Description of Artificial Sequence: Synthetic oligonucleotide
  Target: SCNA; (+) strand; PAM type: YTN; PAM sequence: TTG
taaactatttttaaatatta

SEQ ID NO: 72577 - DNA, 20 bp, Artificial Sequence
  Description of Artificial Sequence: Synthetic oligonucleotide
  Target: SCNA; (+) strand; PAM type: YTN; PAM sequence: CTA
tttttaaatattagtggcaa

SEQ ID NO: 72578 - DNA, 20 bp, Artificial Sequence
  Description of Artificial Sequence: Synthetic oligonucleotide
  Target: SCNA; (+) strand; PAM type: YTN; PAM sequence: TTT
ttaaatattagtggcaaaaa

SEQ ID NO: 72579 - DNA, 20 bp, Artificial Sequence
  Description of Artificial Sequence: Synthetic oligonucleotide
  Target: SCNA; (+) strand; PAM type: YTN; PAM sequence: TTT
taaatattagtggcaaaaag

SEQ ID NO: 72580 - DNA, 20 bp, Artificial Sequence
  Description of Artificial Sequence: Synthetic oligonucleotide
  Target: SCNA; (+) strand; PAM type: YTN; PAM sequence: TTT
aaatattagtggcaaaaaga

SEQ ID NO: 72581 - DNA, 20 bp, Artificial Sequence
  Description of Artificial Sequence: Synthetic oligonucleotide
  Target: SCNA; (+) strand; PAM type: YTN; PAM sequence: TTA
aatattagtggcaaaaagac

SEQ ID NO: 72582 - DNA, 20 bp, Artificial Sequence
  Description of Artificial Sequence: Synthetic oligonucleotide
  Target: SCNA; (+) strand; PAM type: YTN; PAM sequence: TTA
gtggcaaaaagactaatatg

SEQ ID NO: 72583 - DNA, 20 bp, Artificial Sequence
  Description of Artificial Sequence: Synthetic oligonucleotide
  Target: SCNA; (+) strand; PAM type: YTN; PAM sequence: CTA
atatggataaatattcccaa

SEQ ID NO: 72584 - DNA, 20 bp, Artificial Sequence
  Description of Artificial Sequence: Synthetic oligonucleotide
  Target: SCNA; (+) strand; PAM type: YTN; PAM sequence: TTC
ccaacaatttgatatttgat

SEQ ID NO: 72585 - DNA, 20 bp, Artificial Sequence
  Description of Artificial Sequence: Synthetic oligonucleotide
  Target: SCNA; (+) strand; PAM type: YTN; PAM sequence: TTT
gatatttgatgtcccaaact

SEQ ID NO: 72586 - DNA, 20 bp, Artificial Sequence
  Description of Artificial Sequence: Synthetic oligonucleotide
  Target: SCNA; (+) strand; PAM type: YTN; PAM sequence: TTG
atatttgatgtcccaaacta

SEQ ID NO: 72587 - DNA, 20 bp, Artificial Sequence
  Description of Artificial Sequence: Synthetic oligonucleotide
  Target: SCNA; (+) strand; PAM type: YTN; PAM sequence: TTT
gatgtcccaaactattgtga

SEQ ID NO: 72588 - DNA, 20 bp, Artificial Sequence
  Description of Artificial Sequence: Synthetic oligonucleotide
  Target: SCNA; (+) strand; PAM type: YTN; PAM sequence: TTG
atgtcccaaactattgtgag

SEQ ID NO: 72589 - DNA, 20 bp, Artificial Sequence
  Description of Artificial Sequence: Synthetic oligonucleotide
  Target: SCNA; (+) strand; PAM type: YTN; PAM sequence: CTA
ttgtgagattggttataata

SEQ ID NO: 72590 - DNA, 20 bp, Artificial Sequence
  Description of Artificial Sequence: Synthetic oligonucleotide
  Target: SCNA; (+) strand; PAM type: YTN; PAM sequence: TTG
tgagattggttataataaaa

SEQ ID NO: 72591 - DNA, 20 bp, Artificial Sequence
  Description of Artificial Sequence: Synthetic oligonucleotide
  Target: SCNA; (+) strand; PAM type: YTN; PAM sequence: TTG
gttataataaaaaatagcaa

SEQ ID NO: 72592 - DNA, 20 bp, Artificial Sequence
  Description of Artificial Sequence: Synthetic oligonucleotide
  Target: SCNA; (+) strand; PAM type: YTN; PAM sequence: TTA
taataaaaaatagcaaacta

SEQ ID NO: 72593 - DNA, 20 bp, Artificial Sequence
  Description of Artificial Sequence: Synthetic oligonucleotide
  Target: SCNA; (+) strand; PAM type: YTN; PAM sequence: CTA
ccctgctgatttcccatgaa

SEQ ID NO: 72594 - DNA, 20 bp, Artificial Sequence
  Description of Artificial Sequence: Synthetic oligonucleotide
  Target: SCNA; (+) strand; PAM type: YTN; PAM sequence: CTG
ctgatttcccatgaagctta

SEQ ID NO: 72595 - DNA, 20 bp, Artificial Sequence
  Description of Artificial Sequence: Synthetic oligonucleotide
  Target: SCNA; (+) strand; PAM type: YTN; PAM sequence: CTG
atttcccatgaagcttaacc

SEQ ID NO: 72596 - DNA, 20 bp, Artificial Sequence
  Description of Artificial Sequence: Synthetic oligonucleotide
  Target: SCNA; (+) strand; PAM type: YTN; PAM sequence: TTT
cccatgaagcttaaccctct

SEQ ID NO: 72597 - DNA, 20 bp, Artificial Sequence
  Description of Artificial Sequence: Synthetic oligonucleotide
  Target: SCNA; (+) strand; PAM type: YTN; PAM sequence: TTC
ccatgaagcttaaccctctc

SEQ ID NO: 72598 - DNA, 20 bp, Artificial Sequence
  Description of Artificial Sequence: Synthetic oligonucleotide
  Target: SCNA; (+) strand; PAM type: YTN; PAM sequence: CTT
aaccctctctcacatttcag

SEQ ID NO: 72599 - DNA, 20 bp, Artificial Sequence
  Description of Artificial Sequence: Synthetic oligonucleotide
  Target: SCNA; (+) strand; PAM type: YTN; PAM sequence: TTA
accctctctcacatttcaga

SEQ ID NO: 72600 - DNA, 20 bp, Artificial Sequence
  Description of Artificial Sequence: Synthetic oligonucleotide
  Target: SCNA; (+) strand; PAM type: YTN; PAM sequence: CTC
tctcacatttcagaaccagc

SEQ ID NO: 72601 - DNA, 20 bp, Artificial Sequence
  Description of Artificial Sequence: Synthetic oligonucleotide
  Target: SCNA; (+) strand; PAM type: YTN; PAM sequence: CTC
tcacatttcagaaccagcct

SEQ ID NO: 72602 - DNA, 20 bp, Artificial Sequence
  Description of Artificial Sequence: Synthetic oligonucleotide
  Target: SCNA; (+) strand; PAM type: YTN; PAM sequence: CTC
acatttcagaaccagcctga

SEQ ID NO: 72603 - DNA, 20 bp, Artificial Sequence
  Description of Artificial Sequence: Synthetic oligonucleotide
  Target: SCNA; (+) strand; PAM type: YTN; PAM sequence: TTT
cagaaccagcctgacttaag

SEQ ID NO: 72604 - DNA, 20 bp, Artificial Sequence
  Description of Artificial Sequence: Synthetic oligonucleotide
  Target: SCNA; (+) strand; PAM type: YTN; PAM sequence: TTC
agaaccagcctgacttaagc

SEQ ID NO: 72605 - DNA, 20 bp, Artificial Sequence
  Description of Artificial Sequence: Synthetic oligonucleotide
  Target: SCNA; (+) strand; PAM type: YTN; PAM sequence: CTG
acttaagcctctacatactt

SEQ ID NO: 72606 - DNA, 20 bp, Artificial Sequence
  Description of Artificial Sequence: Synthetic oligonucleotide
  Target: SCNA; (+) strand; PAM type: YTN; PAM sequence: CTT
aagcctctacatacttaaac

SEQ ID NO: 72607 - DNA, 20 bp, Artificial Sequence
  Description of Artificial Sequence: Synthetic oligonucleotide
  Target: SCNA; (+) strand; PAM type: YTN; PAM sequence: TTA
agcctctacatacttaaaca

SEQ ID NO: 72608 - DNA, 20 bp, Artificial Sequence
  Description of Artificial Sequence: Synthetic oligonucleotide
  Target: SCNA; (+) strand; PAM type: YTN; PAM sequence: CTC
tacatacttaaacagcttca

SEQ ID NO: 72609 - DNA, 20 bp, Artificial Sequence
  Description of Artificial Sequence: Synthetic oligonucleotide
  Target: SCNA; (+) strand; PAM type: YTN; PAM sequence: CTA
catacttaaacagcttcaaa

SEQ ID NO: 72610 - DNA, 20 bp, Artificial Sequence
  Description of Artificial Sequence: Synthetic oligonucleotide
  Target: SCNA; (+) strand; PAM type: YTN; PAM sequence: CTT
aaacagcttcaaatgcctat

SEQ ID NO: 72611 - DNA, 20 bp, Artificial Sequence
  Description of Artificial Sequence: Synthetic oligonucleotide
  Target: SCNA; (+) strand; PAM type: YTN; PAM sequence: TTA
aacagcttcaaatgcctatc

SEQ ID NO: 72612 - DNA, 20 bp, Artificial Sequence
  Description of Artificial Sequence: Synthetic oligonucleotide
  Target: SCNA; (+) strand; PAM type: YTN; PAM sequence: CTT
caaatgcctatctgagacag

SEQ ID NO: 72613 - DNA, 20 bp, Artificial Sequence
  Description of Artificial Sequence: Synthetic oligonucleotide
  Target: SCNA; (+) strand; PAM type: YTN; PAM sequence: TTC
aaatgcctatctgagacagc

SEQ ID NO: 72614 - DNA, 20 bp, Artificial Sequence
  Description of Artificial Sequence: Synthetic oligonucleotide
  Target: SCNA; (+) strand; PAM type: YTN; PAM sequence: CTA
tctgagacagctttgtaatg

SEQ ID NO: 72615 - DNA, 20 bp, Artificial Sequence
  Description of Artificial Sequence: Synthetic oligonucleotide
  Target: SCNA; (+) strand; PAM type: YTN; PAM sequence: CTG
agacagctttgtaatgggtc

SEQ ID NO: 72616 - DNA, 20 bp, Artificial Sequence
  Description of Artificial Sequence: Synthetic oligonucleotide
  Target: SCNA; (+) strand; PAM type: YTN; PAM sequence: CTT
tgtaatgggtctctgcccct

SEQ ID NO: 72617 - DNA, 20 bp, Artificial Sequence
  Description of Artificial Sequence: Synthetic oligonucleotide
  Target: SCNA; (+) strand; PAM type: YTN; PAM sequence: TTT
gtaatgggtctctgcccctg

SEQ ID NO: 72618 - DNA, 20 bp, Artificial Sequence
  Description of Artificial Sequence: Synthetic oligonucleotide
  Target: SCNA; (+) strand; PAM type: YTN; PAM sequence: TTG
taatgggtctctgcccctgt

SEQ ID NO: 72619 - DNA, 20 bp, Artificial Sequence
  Description of Artificial Sequence: Synthetic oligonucleotide
  Target: SCNA; (+) strand; PAM type: YTN; PAM sequence: CTC
tgcccctgtttctctgtcca

SEQ ID NO: 72620 - DNA, 20 bp, Artificial Sequence
  Description of Artificial Sequence: Synthetic oligonucleotide
  Target: SCNA; (+) strand; PAM type: YTN; PAM sequence: CTG
cccctgtttctctgtccaca

SEQ ID NO: 72621 - DNA, 20 bp, Artificial Sequence
  Description of Artificial Sequence: Synthetic oligonucleotide
  Target: SCNA; (+) strand; PAM type: YTN; PAM sequence: CTG
tttctctgtccacaagaggt

SEQ ID NO: 72622 - DNA, 20 bp, Artificial Sequence
  Description of Artificial Sequence: Synthetic oligonucleotide
  Target: SCNA; (+) strand; PAM type: YTN; PAM sequence: TTT
ctctgtccacaagaggtact

SEQ ID NO: 72623 - DNA, 20 bp, Artificial Sequence
  Description of Artificial Sequence: Synthetic oligonucleotide
  Target: SCNA; (+) strand; PAM type: YTN; PAM sequence: TTC
tctgtccacaagaggtacta

SEQ ID NO: 72624 - DNA, 20 bp, Artificial Sequence
  Description of Artificial Sequence: Synthetic oligonucleotide
  Target: SCNA; (+) strand; PAM type: YTN; PAM sequence: CTC
tgtccacaagaggtactaat

SEQ ID NO: 72625 - DNA, 20 bp, Artificial Sequence
  Description of Artificial Sequence: Synthetic oligonucleotide
  Target: SCNA; (+) strand; PAM type: YTN; PAM sequence: CTG
tccacaagaggtactaattc

SEQ ID NO: 72626 - DNA, 20 bp, Artificial Sequence
  Description of Artificial Sequence: Synthetic oligonucleotide
  Target: SCNA; (+) strand; PAM type: YTN; PAM sequence: CTA
attcacttctcttcagttgt

SEQ ID NO: 72627 - DNA, 20 bp, Artificial Sequence
  Description of Artificial Sequence: Synthetic oligonucleotide
  Target: SCNA; (+) strand; PAM type: YTN; PAM sequence: TTC
acttctcttcagttgttaga

SEQ ID NO: 72628 - DNA, 20 bp, Artificial Sequence
  Description of Artificial Sequence: Synthetic oligonucleotide
  Target: SCNA; (+) strand; PAM type: YTN; PAM sequence: CTT
ctcttcagttgttagaccta

SEQ ID NO: 72629 - DNA, 20 bp, Artificial Sequence
  Description of Artificial Sequence: Synthetic oligonucleotide
  Target: SCNA; (+) strand; PAM type: YTN; PAM sequence: TTC
tcttcagttgttagacctag

SEQ ID NO: 72630 - DNA, 20 bp, Artificial Sequence
  Description of Artificial Sequence: Synthetic oligonucleotide
  Target: SCNA; (+) strand; PAM type: YTN; PAM sequence: CTC
ttcagttgttagacctagga

SEQ ID NO: 72631 - DNA, 20 bp, Artificial Sequence
  Description of Artificial Sequence: Synthetic oligonucleotide
  Target: SCNA; (+) strand; PAM type: YTN; PAM sequence: CTT
cagttgttagacctaggaca

SEQ ID NO: 72632 - DNA, 20 bp, Artificial Sequence
  Description of Artificial Sequence: Synthetic oligonucleotide
  Target: SCNA; (+) strand; PAM type: YTN; PAM sequence: TTC
agttgttagacctaggacac

SEQ ID NO: 72633 - DNA, 20 bp, Artificial Sequence
  Description of Artificial Sequence: Synthetic oligonucleotide
  Target: SCNA; (+) strand; PAM type: YTN; PAM sequence: TTG
ttagacctaggacacaatag

SEQ ID NO: 72634 - DNA, 20 bp, Artificial Sequence
  Description of Artificial Sequence: Synthetic oligonucleotide
  Target: SCNA; (+) strand; PAM type: YTN; PAM sequence: TTA
gacctaggacacaatagaca

SEQ ID NO: 72635 - DNA, 20 bp, Artificial Sequence
  Description of Artificial Sequence: Synthetic oligonucleotide
  Target: SCNA; (+) strand; PAM type: YTN; PAM sequence: CTA
ggacacaatagacaccaagt

SEQ ID NO: 72636 - DNA, 20 bp, Artificial Sequence
  Description of Artificial Sequence: Synthetic oligonucleotide
  Target: SCNA; (+) strand; PAM type: YTN; PAM sequence: TTA
catttctgttaggtgcatct

SEQ ID NO: 72637 - DNA, 20 bp, Artificial Sequence
  Description of Artificial Sequence: Synthetic oligonucleotide
  Target: SCNA; (+) strand; PAM type: YTN; PAM sequence: TTT
ctgttaggtgcatcttggaa

SEQ ID NO: 72638 - DNA, 20 bp, Artificial Sequence
  Description of Artificial Sequence: Synthetic oligonucleotide
  Target: SCNA; (+) strand; PAM type: YTN; PAM sequence: TTC
tgttaggtgcatcttggaag

SEQ ID NO: 72639 - DNA, 20 bp, Artificial Sequence
  Description of Artificial Sequence: Synthetic oligonucleotide
  Target: SCNA; (+) strand; PAM type: YTN; PAM sequence: CTG
ttaggtgcatcttggaagtg

SEQ ID NO: 72640 - DNA, 20 bp, Artificial Sequence
  Description of Artificial Sequence: Synthetic oligonucleotide
  Target: SCNA; (+) strand; PAM type: YTN; PAM sequence: TTA
ggtgcatcttggaagtgcct

SEQ ID NO: 72641 - DNA, 20 bp, Artificial Sequence
  Description of Artificial Sequence: Synthetic oligonucleotide
  Target: SCNA; (+) strand; PAM type: YTN; PAM sequence: CTT
ggaagtgcctgagaactgac

SEQ ID NO: 72642 - DNA, 20 bp, Artificial Sequence
  Description of Artificial Sequence: Synthetic oligonucleotide
  Target: SCNA; (+) strand; PAM type: YTN; PAM sequence: TTG
gaagtgcctgagaactgacc

SEQ ID NO: 72643 - DNA, 20 bp, Artificial Sequence
  Description of Artificial Sequence: Synthetic oligonucleotide
  Target: SCNA; (+) strand; PAM type: YTN; PAM sequence: CTG
agaactgaccactgggcacc

SEQ ID NO: 72644 - DNA, 20 bp, Artificial Sequence
  Description of Artificial Sequence: Synthetic oligonucleotide
  Target: SCNA; (+) strand; PAM type: YTN; PAM sequence: CTG
accactgggcacctaccttt

SEQ ID NO: 72645 - DNA, 20 bp, Artificial Sequence
  Description of Artificial Sequence: Synthetic oligonucleotide
  Target: SCNA; (+) strand; PAM type: YTN; PAM sequence: CTG
ggcacctacctttttaccta

SEQ ID NO: 72646 - DNA, 20 bp, Artificial Sequence
  Description of Artificial Sequence: Synthetic oligonucleotide
  Target: SCNA; (+) strand; PAM type: YTN; PAM sequence: CTA
cctttttacctaagtctctg

SEQ ID NO: 72647 - DNA, 20 bp, Artificial Sequence
  Description of Artificial Sequence: Synthetic oligonucleotide
  Target: SCNA; (+) strand; PAM type: YTN; PAM sequence: CTT
tttacctaagtctctgttaa

SEQ ID NO: 72648 - DNA, 20 bp, Artificial Sequence
  Description of Artificial Sequence: Synthetic oligonucleotide
  Target: SCNA; (+) strand; PAM type: YTN; PAM sequence: TTT
ttacctaagtctctgttaat

SEQ ID NO: 72649 - DNA, 20 bp, Artificial Sequence
  Description of Artificial Sequence: Synthetic oligonucleotide
  Target: SCNA; (+) strand; PAM type: YTN; PAM sequence: TTT
tacctaagtctctgttaatg

SEQ ID NO: 72650 - DNA, 20 bp, Artificial Sequence
  Description of Artificial Sequence: Synthetic oligonucleotide
  Target: SCNA; (+) strand; PAM type: YTN; PAM sequence: TTT
acctaagtctctgttaatgt

SEQ ID NO: 72651 - DNA, 20 bp, Artificial Sequence
  Description of Artificial Sequence: Synthetic oligonucleotide
  Target: SCNA; (+) strand; PAM type: YTN; PAM sequence: TTA
cctaagtctctgttaatgtt

SEQ ID NO: 72652 - DNA, 20 bp, Artificial Sequence
  Description of Artificial Sequence: Synthetic oligonucleotide
  Target: SCNA; (+) strand; PAM type: YTN; PAM sequence: CTA
agtctctgttaatgttggtc

SEQ ID NO: 72653 - DNA, 20 bp, Artificial Sequence
  Description of Artificial Sequence: Synthetic oligonucleotide
  Target: SCNA; (+) strand; PAM type: YTN; PAM sequence: CTC
tgttaatgttggtctgttta

SEQ ID NO: 72654 - DNA, 20 bp, Artificial Sequence
  Description of Artificial Sequence: Synthetic oligonucleotide
  Target: SCNA; (+) strand; PAM type: YTN; PAM sequence: CTG
ttaatgttggtctgtttacc

SEQ ID NO: 72655 - DNA, 20 bp, Artificial Sequence
  Description of Artificial Sequence: Synthetic oligonucleotide
  Target: SCNA; (+) strand; PAM type: YTN; PAM sequence: TTA
atgttggtctgtttacctgt

SEQ ID NO: 72656 - DNA, 20 bp, Artificial Sequence
  Description of Artificial Sequence: Synthetic oligonucleotide
  Target: SCNA; (+) strand; PAM type: YTN; PAM sequence: TTG
gtctgtttacctgttagtag

SEQ ID NO: 72657 - DNA, 20 bp, Artificial Sequence
  Description of Artificial Sequence: Synthetic oligonucleotide
  Target: SCNA; (+) strand; PAM type: YTN; PAM sequence: CTG
tttacctgttagtagtggag

SEQ ID NO: 72658 - DNA, 20 bp, Artificial Sequence
  Description of Artificial Sequence: Synthetic oligonucleotide
  Target: SCNA; (+) strand; PAM type: YTN; PAM sequence: TTT
acctgttagtagtggagcct

SEQ ID NO: 72659 - DNA, 20 bp, Artificial Sequence
  Description of Artificial Sequence: Synthetic oligonucleotide
  Target: SCNA; (+) strand; PAM type: YTN; PAM sequence: TTA
cctgttagtagtggagcctg

SEQ ID NO: 72660 - DNA, 20 bp, Artificial Sequence
  Description of Artificial Sequence: Synthetic oligonucleotide
  Target: SCNA; (+) strand; PAM type: YTN; PAM sequence: CTG
ttagtagtggagcctggtgc

SEQ ID NO: 72661 - DNA, 20 bp, Artificial Sequence
  Description of Artificial Sequence: Synthetic oligonucleotide
  Target: SCNA; (+) strand; PAM type: YTN; PAM sequence: TTA
gtagtggagcctggtgcata

SEQ ID NO: 72662 - DNA, 20 bp, Artificial Sequence
  Description of Artificial Sequence: Synthetic oligonucleotide
  Target: SCNA; (+) strand; PAM type: YTN; PAM sequence: CTG
gtgcatagaattatctcctt

SEQ ID NO: 72663 - DNA, 20 bp, Artificial Sequence
  Description of Artificial Sequence: Synthetic oligonucleotide
  Target: SCNA; (+) strand; PAM type: YTN; PAM sequence: TTA
tctccttgccatctgtgtcc

SEQ ID NO: 72664 - DNA, 20 bp, Artificial Sequence
  Description of Artificial Sequence: Synthetic oligonucleotide
  Target: SCNA; (+) strand; PAM type: YTN; PAM sequence: CTC
cttgccatctgtgtcccaca

SEQ ID NO: 72665 - DNA, 20 bp, Artificial Sequence
  Description of Artificial Sequence: Synthetic oligonucleotide
  Target: SCNA; (+) strand; PAM type: YTN; PAM sequence: CTT
gccatctgtgtcccacaaca

SEQ ID NO: 72666 - DNA, 20 bp, Artificial Sequence
  Description of Artificial Sequence: Synthetic oligonucleotide
  Target: SCNA; (+) strand; PAM type: YTN; PAM sequence: TTG
ccatctgtgtcccacaacac

SEQ ID NO: 72667 - DNA, 20 bp, Artificial Sequence
  Description of Artificial Sequence: Synthetic oligonucleotide
  Target: SCNA; (+) strand; PAM type: YTN; PAM sequence: CTG
tgtcccacaacacatatata

SEQ ID NO: 72668 - DNA, 20 bp, Artificial Sequence
  Description of Artificial Sequence: Synthetic oligonucleotide
  Target: SCNA; (+) strand; PAM type: YTN; PAM sequence: CTG
catggcatatgaggcctttc

SEQ ID NO: 72669 - DNA, 20 bp, Artificial Sequence
  Description of Artificial Sequence: Synthetic oligonucleotide
  Target: SCNA; (+) strand; PAM type: YTN; PAM sequence: CTT
tcctgagaggggtgctttta

SEQ ID NO: 72670 - DNA, 20 bp, Artificial Sequence
  Description of Artificial Sequence: Synthetic oligonucleotide
  Target: SCNA; (+) strand; PAM type: YTN; PAM sequence: TTT
cctgagaggggtgcttttaa

SEQ ID NO: 72671 - DNA, 20 bp, Artificial Sequence
  Description of Artificial Sequence: Synthetic oligonucleotide
  Target: SCNA; (+) strand; PAM type: YTN; PAM sequence: TTC
ctgagaggggtgcttttaag

SEQ ID NO: 72672 - DNA, 20 bp, Artificial Sequence
  Description of Artificial Sequence: Synthetic oligonucleotide
  Target: SCNA; (+) strand; PAM type: YTN; PAM sequence: CTG
agaggggtgcttttaagcca

SEQ ID NO: 72673 - DNA, 20 bp, Artificial Sequence
  Description of Artificial Sequence: Synthetic oligonucleotide
  Target: SCNA; (+) strand; PAM type: YTN; PAM sequence: CTT
ttaagccaacattccagaga

SEQ ID NO: 72674 - DNA, 20 bp, Artificial Sequence
  Description of Artificial Sequence: Synthetic oligonucleotide
  Target: SCNA; (+) strand; PAM type: YTN; PAM sequence: TTT
taagccaacattccagagac

SEQ ID NO: 72675 - DNA, 20 bp, Artificial Sequence
  Description of Artificial Sequence: Synthetic oligonucleotide
  Target: SCNA; (+) strand; PAM type: YTN; PAM sequence: TTT
aagccaacattccagagacc

SEQ ID NO: 72676 - DNA, 20 bp, Artificial Sequence
  Description of Artificial Sequence: Synthetic oligonucleotide
  Target: SCNA; (+) strand; PAM type: YTN; PAM sequence: TTA
agccaacattccagagacct

SEQ ID NO: 72677 - DNA, 20 bp, Artificial Sequence
  Description of Artificial Sequence: Synthetic oligonucleotide
  Target: SCNA; (+) strand; PAM type: YTN; PAM sequence: TTC
cagagacctagttcccctgc

SEQ ID NO: 72678 - DNA, 20 bp, Artificial Sequence
  Description of Artificial Sequence: Synthetic oligonucleotide
  Target: SCNA; (+) strand; PAM type: YTN; PAM sequence: CTA
gttcccctgccccaggtgcc

SEQ ID NO: 72679 - DNA, 20 bp, Artificial Sequence
  Description of Artificial Sequence: Synthetic oligonucleotide
  Target: SCNA; (+) strand; PAM type: YTN; PAM sequence: TTC
ccctgccccaggtgcctcag

SEQ ID NO: 72680 - DNA, 20 bp, Artificial Sequence
  Description of Artificial Sequence: Synthetic oligonucleotide
  Target: SCNA; (+) strand; PAM type: YTN; PAM sequence: CTG
ccccaggtgcctcagttttt

SEQ ID NO: 72681 - DNA, 20 bp, Artificial Sequence
  Description of Artificial Sequence: Synthetic oligonucleotide
  Target: SCNA; (+) strand; PAM type: YTN; PAM sequence: CTC
agtttttacacctaggatgc

SEQ ID NO: 72682 - DNA, 20 bp, Artificial Sequence
  Description of Artificial Sequence: Synthetic oligonucleotide
  Target: SCNA; (+) strand; PAM type: YTN; PAM sequence: TTT
ttacacctaggatgctattt

SEQ ID NO: 72683 - DNA, 20 bp, Artificial Sequence
  Description of Artificial Sequence: Synthetic oligonucleotide
  Target: SCNA; (+) strand; PAM type: YTN; PAM sequence: TTT
tacacctaggatgctatttt

SEQ ID NO: 72684 - DNA, 20 bp, Artificial Sequence
  Description of Artificial Sequence: Synthetic oligonucleotide
  Target: SCNA; (+) strand; PAM type: YTN; PAM sequence: TTT
acacctaggatgctattttg

SEQ ID NO: 72685 - DNA, 20 bp, Artificial Sequence
  Description of Artificial Sequence: Synthetic oligonucleotide
  Target: SCNA; (+) strand; PAM type: YTN; PAM sequence: TTA
cacctaggatgctattttga

SEQ ID NO: 72686 - DNA, 20 bp, Artificial Sequence
  Description of Artificial Sequence: Synthetic oligonucleotide
  Target: SCNA; (+) strand; PAM type: YTN; PAM sequence: CTA
ggatgctattttgaatcttc

SEQ ID NO: 72687 - DNA, 20 bp, Artificial Sequence
  Description of Artificial Sequence: Synthetic oligonucleotide
  Target: SCNA; (+) strand; PAM type: YTN; PAM sequence: CTA
ttttgaatcttctcctcaat

SEQ ID NO: 72688 - DNA, 20 bp, Artificial Sequence
  Description of Artificial Sequence: Synthetic oligonucleotide
  Target: SCNA; (+) strand; PAM type: YTN; PAM sequence: TTT
tgaatcttctcctcaatgac

SEQ ID NO: 72689 - DNA, 20 bp, Artificial Sequence
  Description of Artificial Sequence: Synthetic oligonucleotide
  Target: SCNA; (+) strand; PAM type: YTN; PAM sequence: TTT
gaatcttctcctcaatgaca

SEQ ID NO: 72690 - DNA, 20 bp, Artificial Sequence
  Description of Artificial Sequence: Synthetic oligonucleotide
  Target: SCNA; (+) strand; PAM type: YTN; PAM sequence: TTG
aatcttctcctcaatgacaa

SEQ ID NO: 72691 - DNA, 20 bp, Artificial Sequence
  Description of Artificial Sequence: Synthetic oligonucleotide
  Target: SCNA; (+) strand; PAM type: YTN; PAM sequence: CTT
ctcctcaatgacaagtatct

SEQ ID NO: 72692 - DNA, 20 bp, Artificial Sequence
  Description of Artificial Sequence: Synthetic oligonucleotide
  Target: SCNA; (+) strand; PAM type: YTN; PAM sequence: TTC
tcctcaatgacaagtatctg

SEQ ID NO: 72693 - DNA, 20 bp, Artificial Sequence
  Description of Artificial Sequence: Synthetic oligonucleotide
  Target: SCNA; (+) strand; PAM type: YTN; PAM sequence: CTC
ctcaatgacaagtatctgta

SEQ ID NO: 72694 - DNA, 20 bp, Artificial Sequence
  Description of Artificial Sequence: Synthetic oligonucleotide
  Target: SCNA; (+) strand; PAM type: YTN; PAM sequence: CTC
aatgacaagtatctgtactc

SEQ ID NO: 72695 - DNA, 20 bp, Artificial Sequence
  Description of Artificial Sequence: Synthetic oligonucleotide
  Target: SCNA; (+) strand; PAM type: YTN; PAM sequence: CTG
tactcacttagtttgggtcc

SEQ ID NO: 72696 - DNA, 20 bp, Artificial Sequence
  Description of Artificial Sequence: Synthetic oligonucleotide
  Target: SCNA; (+) strand; PAM type: YTN; PAM sequence: CTC
acttagtttgggtccatgcc

SEQ ID NO: 72697 - DNA, 20 bp, Artificial Sequence
  Description of Artificial Sequence: Synthetic oligonucleotide
  Target: SCNA; (+) strand; PAM type: YTN; PAM sequence: CTT
agtttgggtccatgccacat

SEQ ID NO: 72698 - DNA, 20 bp, Artificial Sequence
  Description of Artificial Sequence: Synthetic oligonucleotide
  Target: SCNA; (+) strand; PAM type: YTN; PAM sequence: TTA
gtttgggtccatgccacatt

SEQ ID NO: 72699 - DNA, 20 bp, Artificial Sequence
  Description of Artificial Sequence: Synthetic oligonucleotide
  Target: SCNA; (+) strand; PAM type: YTN; PAM sequence: TTT
gggtccatgccacattcctg

SEQ ID NO: 72700 - DNA, 20 bp, Artificial Sequence
  Description of Artificial Sequence: Synthetic oligonucleotide
  Target: SCNA; (+) strand; PAM type: YTN; PAM sequence: TTG
ggtccatgccacattcctga

SEQ ID NO: 72701 - DNA, 20 bp, Artificial Sequence
  Description of Artificial Sequence: Synthetic oligonucleotide
  Target: SCNA; (+) strand; PAM type: YTN; PAM sequence: TTC
ctgaggcaactgaaacccac

SEQ ID NO: 72702 - DNA, 20 bp, Artificial Sequence
  Description of Artificial Sequence: Synthetic oligonucleotide
  Target: SCNA; (+) strand; PAM type: YTN; PAM sequence: CTG
aggcaactgaaacccaccta

SEQ ID NO: 72703 - DNA, 20 bp, Artificial Sequence
  Description of Artificial Sequence: Synthetic oligonucleotide
  Target: SCNA; (+) strand; PAM type: YTN; PAM sequence: CTG
aaacccacctactccttgat

SEQ ID NO: 72704 - DNA, 20 bp, Artificial Sequence
  Description of Artificial Sequence: Synthetic oligonucleotide
  Target: SCNA; (+) strand; PAM type: YTN; PAM sequence: CTA
ctccttgatggccttccagg

SEQ ID NO: 72705 - DNA, 20 bp, Artificial Sequence
  Description of Artificial Sequence: Synthetic oligonucleotide
  Target: SCNA; (+) strand; PAM type: YTN; PAM sequence: CTC
cttgatggccttccaggatg

SEQ ID NO: 72706 - DNA, 20 bp, Artificial Sequence
  Description of Artificial Sequence: Synthetic oligonucleotide
  Target: SCNA; (+) strand; PAM type: YTN; PAM sequence: CTT
gatggccttccaggatgctt

SEQ ID NO: 72707 - DNA, 20 bp, Artificial Sequence
  Description of Artificial Sequence: Synthetic oligonucleotide
  Target: SCNA; (+) strand; PAM type: YTN; PAM sequence: TTG
atggccttccaggatgcttg

SEQ ID NO: 72708 - DNA, 20 bp, Artificial Sequence
  Description of Artificial Sequence: Synthetic oligonucleotide
  Target: SCNA; (+) strand; PAM type: YTN; PAM sequence: CTT
ccaggatgcttgtctgtact

SEQ ID NO: 72709 - DNA, 20 bp, Artificial Sequence
  Description of Artificial Sequence: Synthetic oligonucleotide
  Target: SCNA; (+) strand; PAM type: YTN; PAM sequence: TTC
caggatgcttgtctgtacta

SEQ ID NO: 72710 - DNA, 20 bp, Artificial Sequence
  Description of Artificial Sequence: Synthetic oligonucleotide
  Target: SCNA; (+) strand; PAM type: YTN; PAM sequence: CTT
gtctgtactatagtggacat

SEQ ID NO: 72711 - DNA, 20 bp, Artificial Sequence
  Description of Artificial Sequence: Synthetic oligonucleotide
  Target: SCNA; (+) strand; PAM type: YTN; PAM sequence: TTG
tctgtactatagtggacatc

SEQ ID NO: 72712 - DNA, 20 bp, Artificial Sequence
  Description of Artificial Sequence: Synthetic oligonucleotide
  Target: SCNA; (+) strand; PAM type: YTN; PAM sequence: CTG
tactatagtggacatccctt

SEQ ID NO: 72713 - DNA, 20 bp, Artificial Sequence
  Description of Artificial Sequence: Synthetic oligonucleotide
  Target: SCNA; (+) strand; PAM type: YTN; PAM sequence: CTA
tagtggacatcccttcctgc

SEQ ID NO: 72714 - DNA, 20 bp, Artificial Sequence
  Description of Artificial Sequence: Synthetic oligonucleotide
  Target: SCNA; (+) strand; PAM type: YTN; PAM sequence: CTT
cctgcctcacggatgtccgt

SEQ ID NO: 72715 - DNA, 20 bp, Artificial Sequence
  Description of Artificial Sequence: Synthetic oligonucleotide
  Target: SCNA; (+) strand; PAM type: YTN; PAM sequence: TTC
ctgcctcacggatgtccgtg

SEQ ID NO: 72716 - DNA, 20 bp, Artificial Sequence
  Description of Artificial Sequence: Synthetic oligonucleotide
  Target: SCNA; (+) strand; PAM type: YTN; PAM sequence: CTG
cctcacggatgtccgtgtgt

SEQ ID NO: 72717 - DNA, 20 bp, Artificial Sequence
  Description of Artificial Sequence: Synthetic oligonucleotide
  Target: SCNA; (+) strand; PAM type: YTN; PAM sequence: CTC
acggatgtccgtgtgtgtgt

SEQ ID NO: 72718 - DNA, 20 bp, Artificial Sequence
  Description of Artificial Sequence: Synthetic oligonucleotide
  Target: SCNA; (+) strand; PAM type: YTN; PAM sequence: TTT
ggtttttactggattcctga

SEQ ID NO: 72719 - DNA, 20 bp, Artificial Sequence
  Description of Artificial Sequence: Synthetic oligonucleotide
  Target: SCNA; (+) strand; PAM type: YTN; PAM sequence: TTG
gtttttactggattcctgag

SEQ ID NO: 72720 - DNA, 20 bp, Artificial Sequence
  Description of Artificial Sequence: Synthetic oligonucleotide
  Target: SCNA; (+) strand; PAM type: YTN; PAM sequence: TTT
ttactggattcctgaggaag

SEQ ID NO: 72721 - DNA, 20 bp, Artificial Sequence
  Description of Artificial Sequence: Synthetic oligonucleotide
  Target: SCNA; (+) strand; PAM type: YTN; PAM sequence: TTT
tactggattcctgaggaagg

SEQ ID NO: 72722 - DNA, 20 bp, Artificial Sequence
  Description of Artificial Sequence: Synthetic oligonucleotide
  Target: SCNA; (+) strand; PAM type: YTN; PAM sequence: TTT
actggattcctgaggaaggc

SEQ ID NO: 72723 - DNA, 20 bp, Artificial Sequence
  Description of Artificial Sequence: Synthetic oligonucleotide
  Target: SCNA; (+) strand; PAM type: YTN; PAM sequence: TTA
ctggattcctgaggaaggcc

SEQ ID NO: 72724 - DNA, 20 bp, Artificial Sequence
  Description of Artificial Sequence: Synthetic oligonucleotide
  Target: SCNA; (+) strand; PAM type: YTN; PAM sequence: CTG
gattcctgaggaaggccttc

SEQ ID NO: 72725 - DNA, 20 bp, Artificial Sequence
  Description of Artificial Sequence: Synthetic oligonucleotide
  Target: SCNA; (+) strand; PAM type: YTN; PAM sequence: TTC
ctgaggaaggccttccactg

SEQ ID NO: 72726 - DNA, 20 bp, Artificial Sequence
  Description of Artificial Sequence: Synthetic oligonucleotide
  Target: SCNA; (+) strand; PAM type: YTN; PAM sequence: CTG
aggaaggccttccactgaac

SEQ ID NO: 72727 - DNA, 20 bp, Artificial Sequence
  Description of Artificial Sequence: Synthetic oligonucleotide
  Target: SCNA; (+) strand; PAM type: YTN; PAM sequence: CTT
ccactgaacttcattcatgt

SEQ ID NO: 72728 - DNA, 20 bp, Artificial Sequence
  Description of Artificial Sequence: Synthetic oligonucleotide
  Target: SCNA; (+) strand; PAM type: YTN; PAM sequence: TTC
cactgaacttcattcatgtg

SEQ ID NO: 72729 - DNA, 20 bp, Artificial Sequence
  Description of Artificial Sequence: Synthetic oligonucleotide
  Target: SCNA; (+) strand; PAM type: YTN; PAM sequence: CTG
aacttcattcatgtgctttg

SEQ ID NO: 72730 - DNA, 20 bp, Artificial Sequence
  Description of Artificial Sequence: Synthetic oligonucleotide
  Target: SCNA; (+) strand; PAM type: YTN; PAM sequence: CTT
cattcatgtgctttgctacc

SEQ ID NO: 72731 - DNA, 20 bp, Artificial Sequence
  Description of Artificial Sequence: Synthetic oligonucleotide
  Target: SCNA; (+) strand; PAM type: YTN; PAM sequence: TTC
attcatgtgctttgctacct

SEQ ID NO: 72732 - DNA, 20 bp, Artificial Sequence
  Description of Artificial Sequence: Synthetic oligonucleotide
  Target: SCNA; (+) strand; PAM type: YTN; PAM sequence: TTC
atgtgctttgctacctgtta

SEQ ID NO: 72733 - DNA, 20 bp, Artificial Sequence
  Description of Artificial Sequence: Synthetic oligonucleotide
  Target: SCNA; (+) strand; PAM type: YTN; PAM sequence: CTT
tgctacctgttagaaaatgt

SEQ ID NO: 72734 - DNA, 20 bp, Artificial Sequence
  Description of Artificial Sequence: Synthetic oligonucleotide
  Target: SCNA; (+) strand; PAM type: YTN; PAM sequence: TTT
gctacctgttagaaaatgta

SEQ ID NO: 72735 - DNA, 20 bp, Artificial Sequence
  Description of Artificial Sequence: Synthetic oligonucleotide
  Target: SCNA; (+) strand; PAM type: YTN; PAM sequence: TTG
ctacctgttagaaaatgtaa

SEQ ID NO: 72736 - DNA, 20 bp, Artificial Sequence
  Description of Artificial Sequence: Synthetic oligonucleotide
  Target: SCNA; (+) strand; PAM type: YTN; PAM sequence: CTA
cctgttagaaaatgtaacct

SEQ ID NO: 72737 - DNA, 20 bp, Artificial Sequence
  Description of Artificial Sequence: Synthetic oligonucleotide
  Target: SCNA; (+) strand; PAM type: YTN; PAM sequence: CTG
ttagaaaatgtaacctaatg

SEQ ID NO: 72738 - DNA, 20 bp, Artificial Sequence
  Description of Artificial Sequence: Synthetic oligonucleotide
  Target: SCNA; (+) strand; PAM type: YTN; PAM sequence: TTA
gaaaatgtaacctaatgtaa

SEQ ID NO: 72739 - DNA, 20 bp, Artificial Sequence
  Description of Artificial Sequence: Synthetic oligonucleotide
  Target: SCNA; (+) strand; PAM type: YTN; PAM sequence: CTA
atgtaaatgtaaacctctgg

SEQ ID NO: 72740 - DNA, 20 bp, Artificial Sequence
  Description of Artificial Sequence: Synthetic oligonucleotide
  Target: SCNA; (+) strand; PAM type: YTN; PAM sequence: CTC
tggtgcctctagttttactg

SEQ ID NO: 72741 - DNA, 20 bp, Artificial Sequence
  Description of Artificial Sequence: Synthetic oligonucleotide
  Target: SCNA; (+) strand; PAM type: YTN; PAM sequence: CTG
gtgcctctagttttactgac

SEQ ID NO: 72742 - DNA, 20 bp, Artificial Sequence
  Description of Artificial Sequence: Synthetic oligonucleotide
  Target: SCNA; (+) strand; PAM type: YTN; PAM sequence: CTC
tagttttactgacttatgtt

SEQ ID NO: 72743 - DNA, 20 bp, Artificial Sequence
  Description of Artificial Sequence: Synthetic oligonucleotide
  Target: SCNA; (+) strand; PAM type: YTN; PAM sequence: CTA
gttttactgacttatgttat

SEQ ID NO: 72744 - DNA, 20 bp, Artificial Sequence
  Description of Artificial Sequence: Synthetic oligonucleotide
  Target: SCNA; (+) strand; PAM type: YTN; PAM sequence: TTT
tactgacttatgttatataa

SEQ ID NO: 72745 - DNA, 20 bp, Artificial Sequence
  Description of Artificial Sequence: Synthetic oligonucleotide
  Target: SCNA; (+) strand; PAM type: YTN; PAM sequence: TTT
actgacttatgttatataaa

SEQ ID NO: 72746 - DNA, 20 bp, Artificial Sequence
  Description of Artificial Sequence: Synthetic oligonucleotide
  Target: SCNA; (+) strand; PAM type: YTN; PAM sequence: TTA
ctgacttatgttatataaat

SEQ ID NO: 72747 - DNA, 20 bp, Artificial Sequence
  Description of Artificial Sequence: Synthetic oligonucleotide
  Target: SCNA; (+) strand; PAM type: YTN; PAM sequence: CTG
acttatgttatataaatctt

SEQ ID NO: 72748 - DNA, 20 bp, Artificial Sequence
  Description of Artificial Sequence: Synthetic oligonucleotide
  Target: SCNA; (+) strand; PAM type: YTN; PAM sequence: CTT
atgttatataaatcttggtt

SEQ ID NO: 72749 - DNA, 20 bp, Artificial Sequence
  Description of Artificial Sequence: Synthetic oligonucleotide
  Target: SCNA; (+) strand; PAM type: YTN; PAM sequence: TTA
tgttatataaatcttggttc

SEQ ID NO: 72750 - DNA, 20 bp, Artificial Sequence
  Description of Artificial Sequence: Synthetic oligonucleotide
  Target: SCNA; (+) strand; PAM type: YTN; PAM sequence: TTA
tataaatcttggttcctggt

SEQ ID NO: 72751 - DNA, 20 bp, Artificial Sequence
  Description of Artificial Sequence: Synthetic oligonucleotide
  Target: SCNA; (+) strand; PAM type: YTN; PAM sequence: CTT
ggttcctggttctttctgtt

SEQ ID NO: 72752 - DNA, 20 bp, Artificial Sequence
  Description of Artificial Sequence: Synthetic oligonucleotide
  Target: SCNA; (+) strand; PAM type: YTN; PAM sequence: TTG
gttcctggttctttctgttg

SEQ ID NO: 72753 - DNA, 20 bp, Artificial Sequence
  Description of Artificial Sequence: Synthetic oligonucleotide
  Target: SCNA; (+) strand; PAM type: YTN; PAM sequence: TTC
ctggttctttctgttgccct

SEQ ID NO: 72754 - DNA, 20 bp, Artificial Sequence
  Description of Artificial Sequence: Synthetic oligonucleotide
  Target: SCNA; (+) strand; PAM type: YTN; PAM sequence: CTG
gttctttctgttgccctgtt

SEQ ID NO: 72755 - DNA, 20 bp, Artificial Sequence
  Description of Artificial Sequence: Synthetic oligonucleotide
  Target: SCNA; (+) strand; PAM type: YTN; PAM sequence: TTC
tttctgttgccctgttatga

SEQ ID NO: 72756 - DNA, 20 bp, Artificial Sequence
  Description of Artificial Sequence: Synthetic oligonucleotide
  Target: SCNA; (+) strand; PAM type: YTN; PAM sequence: CTT
tctgttgccctgttatgaga

SEQ ID NO: 72757 - DNA, 20 bp, Artificial Sequence
  Description of Artificial Sequence: Synthetic oligonucleotide
  Target: SCNA; (+) strand; PAM type: YTN; PAM sequence: TTT
ctgttgccctgttatgagat

SEQ ID NO: 72758 - DNA, 20 bp, Artificial Sequence
  Description of Artificial Sequence: Synthetic oligonucleotide
  Target: SCNA; (+) strand; PAM type: YTN; PAM sequence: TTC
tgttgccctgttatgagatg

SEQ ID NO: 72759 - DNA, 20 bp, Artificial Sequence
  Description of Artificial Sequence: Synthetic oligonucleotide
  Target: SCNA; (+) strand; PAM type: YTN; PAM sequence: CTG
ttgccctgttatgagatgta

SEQ ID NO: 72760 - DNA, 20 bp, Artificial Sequence
  Description of Artificial Sequence: Synthetic oligonucleotide
  Target: SCNA; (+) strand; PAM type: YTN; PAM sequence: TTG
ccctgttatgagatgtatca

SEQ ID NO: 72761 - DNA, 20 bp, Artificial Sequence
  Description of Artificial Sequence: Synthetic oligonucleotide
  Target: SCNA; (+) strand; PAM type: YTN; PAM sequence: CTG
ttatgagatgtatcactcta

SEQ ID NO: 72762 - DNA, 20 bp, Artificial Sequence
  Description of Artificial Sequence: Synthetic oligonucleotide
  Target: SCNA; (+) strand; PAM type: YTN; PAM sequence: TTA
tgagatgtatcactctaagc

SEQ ID NO: 72763 - DNA, 20 bp, Artificial Sequence
  Description of Artificial Sequence: Synthetic oligonucleotide
  Target: SCNA; (+) strand; PAM type: YTN; PAM sequence: CTC
taagccaagcccaaacacta

SEQ ID NO: 72764 - DNA, 20 bp, Artificial Sequence
  Description of Artificial Sequence: Synthetic oligonucleotide
  Target: SCNA; (+) strand; PAM type: YTN; PAM sequence: CTA
agccaagcccaaacactaag

SEQ ID NO: 72765 - DNA, 20 bp, Artificial Sequence
  Description of Artificial Sequence: Synthetic oligonucleotide
  Target: SCNA; (+) strand; PAM type: YTN; PAM sequence: CTA
agataacaagtgctaaagat

SEQ ID NO: 72766 - DNA, 20 bp, Artificial Sequence
  Description of Artificial Sequence: Synthetic oligonucleotide
  Target: SCNA; (+) strand; PAM type: YTN; PAM sequence: CTA
aagatgacgaatattctgaa

SEQ ID NO: 72767 - DNA, 20 bp, Artificial Sequence
  Description of Artificial Sequence: Synthetic oligonucleotide
  Target: SCNA; (+) strand; PAM type: YTN; PAM sequence: TTC
tgaagagttttcaggacaca

SEQ ID NO: 72768 - DNA, 20 bp, Artificial Sequence
  Description of Artificial Sequence: Synthetic oligonucleotide
  Target: SCNA; (+) strand; PAM type: YTN; PAM sequence: CTG
aagagttttcaggacacaca

SEQ ID NO: 72769 - DNA, 20 bp, Artificial Sequence
  Description of Artificial Sequence: Synthetic oligonucleotide
  Target: SCNA; (+) strand; PAM type: YTN; PAM sequence: TTT
tcaggacacacagaattgtt

SEQ ID NO: 72770 - DNA, 20 bp, Artificial Sequence
  Description of Artificial Sequence: Synthetic oligonucleotide
  Target: SCNA; (+) strand; PAM type: YTN; PAM sequence: TTT
caggacacacagaattgttt

SEQ ID NO: 72771 - DNA, 20 bp, Artificial Sequence
  Description of Artificial Sequence: Synthetic oligonucleotide
  Target: SCNA; (+) strand; PAM type: YTN; PAM sequence: TTC
aggacacacagaattgtttg

SEQ ID NO: 72772 - DNA, 20 bp, Artificial Sequence
  Description of Artificial Sequence: Synthetic oligonucleotide
  Target: SCNA; (+) strand; PAM type: YTN; PAM sequence: TTG
tttgtggccagcacctcagt

SEQ ID NO: 72773 - DNA, 20 bp, Artificial Sequence
  Description of Artificial Sequence: Synthetic oligonucleotide
  Target: SCNA; (+) strand; PAM type: YTN; PAM sequence: TTT
gtggccagcacctcagtacc

SEQ ID NO: 72774 - DNA, 20 bp, Artificial Sequence
  Description of Artificial Sequence: Synthetic oligonucleotide
  Target: SCNA; (+) strand; PAM type: YTN; PAM sequence: TTG
tggccagcacctcagtacca

SEQ ID NO: 72775 - DNA, 20 bp, Artificial Sequence
  Description of Artificial Sequence: Synthetic oligonucleotide
  Target: SCNA; (+) strand; PAM type: YTN; PAM sequence: CTC
agtaccaataacagatattt

SEQ ID NO: 72776 - DNA, 20 bp, Artificial Sequence
  Description of Artificial Sequence: Synthetic oligonucleotide
  Target: SCNA; (+) strand; PAM type: YTN; PAM sequence: TTT
catgttatatagtggggtca

SEQ ID NO: 72777 - DNA, 20 bp, Artificial Sequence
  Description of Artificial Sequence: Synthetic oligonucleotide
  Target: SCNA; (+) strand; PAM type: YTN; PAM sequence: TTC
atgttatatagtggggtcat

SEQ ID NO: 72778 - DNA, 20 bp, Artificial Sequence
  Description of Artificial Sequence: Synthetic oligonucleotide
  Target: SCNA; (+) strand; PAM type: YTN; PAM sequence: TTA
tatagtggggtcattaagga

SEQ ID NO: 72779 - DNA, 20 bp, Artificial Sequence
  Description of Artificial Sequence: Synthetic oligonucleotide
  Target: SCNA; (+) strand; PAM type: YTN; PAM sequence: TTA
aggacttatttgagggaata

SEQ ID NO: 72780 - DNA, 20 bp, Artificial Sequence
  Description of Artificial Sequence: Synthetic oligonucleotide
  Target: SCNA; (+) strand; PAM type: YTN; PAM sequence: CTT
atttgagggaataatcaaga

SEQ ID NO: 72781 - DNA, 20 bp, Artificial Sequence
  Description of Artificial Sequence: Synthetic oligonucleotide
  Target: SCNA; (+) strand; PAM type: YTN; PAM sequence: TTA
tttgagggaataatcaagaa

SEQ ID NO: 72782 - DNA, 20 bp, Artificial Sequence
  Description of Artificial Sequence: Synthetic oligonucleotide
  Target: SCNA; (+) strand; PAM type: YTN; PAM sequence: TTT
gagggaataatcaagaaaaa

SEQ ID NO: 72783 - DNA, 20 bp, Artificial Sequence
  Description of Artificial Sequence: Synthetic oligonucleotide
  Target: SCNA; (+) strand; PAM type: YTN; PAM sequence: TTG
agggaataatcaagaaaaac

SEQ ID NO: 72784 - DNA, 20 bp, Artificial Sequence
  Description of Artificial Sequence: Synthetic oligonucleotide
  Target: SCNA; (+) strand; PAM type: YTN; PAM sequence: CTT
cctagtcttgctagagatct

SEQ ID NO: 72785 - DNA, 20 bp, Artificial Sequence
  Description of Artificial Sequence: Synthetic oligonucleotide
  Target: SCNA; (+) strand; PAM type: YTN; PAM sequence: TTC
ctagtcttgctagagatcta

SEQ ID NO: 72786 - DNA, 20 bp, Artificial Sequence
  Description of Artificial Sequence: Synthetic oligonucleotide
  Target: SCNA; (+) strand; PAM type: YTN; PAM sequence: CTA
gtcttgctagagatctagat

SEQ ID NO: 72787 - DNA, 20 bp, Artificial Sequence
  Description of Artificial Sequence: Synthetic oligonucleotide
  Target: SCNA; (+) strand; PAM type: YTN; PAM sequence: CTT
gctagagatctagatatcca

SEQ ID NO: 72788 - DNA, 20 bp, Artificial Sequence
  Description of Artificial Sequence: Synthetic oligonucleotide
  Target: SCNA; (+) strand; PAM type: YTN; PAM sequence: TTG
ctagagatctagatatccaa

SEQ ID NO: 72789 - DNA, 20 bp, Artificial Sequence
  Description of Artificial Sequence: Synthetic oligonucleotide
  Target: SCNA; (+) strand; PAM type: YTN; PAM sequence: CTA
gagatctagatatccaaata

SEQ ID NO: 72790 - DNA, 20 bp, Artificial Sequence
  Description of Artificial Sequence: Synthetic oligonucleotide
  Target: SCNA; (+) strand; PAM type: YTN; PAM sequence: CTA
gatatccaaatataagaagc

SEQ ID NO: 72791 - DNA, 20 bp, Artificial Sequence
  Description of Artificial Sequence: Synthetic oligonucleotide
  Target: SCNA; (+) strand; PAM type: YTN; PAM sequence: CTG
ggaaattcaatgcaaaaaga

SEQ ID NO: 72792 - DNA, 20 bp, Artificial Sequence
  Description of Artificial Sequence: Synthetic oligonucleotide
  Target: SCNA; (+) strand; PAM type: YTN; PAM sequence: TTC
aatgcaaaaagattaccacc

SEQ ID NO: 72793 - DNA, 20 bp, Artificial Sequence
  Description of Artificial Sequence: Synthetic oligonucleotide
  Target: SCNA; (+) strand; PAM type: YTN; PAM sequence: TTA
ccacctgggcacacagccat

SEQ ID NO: 72794 - DNA, 20 bp, Artificial Sequence
  Description of Artificial Sequence: Synthetic oligonucleotide
  Target: SCNA; (+) strand; PAM type: YTN; PAM sequence: CTG
ggcacacagccatcaggttg

SEQ ID NO: 72795 - DNA, 20 bp, Artificial Sequence
  Description of Artificial Sequence: Synthetic oligonucleotide
  Target: SCNA; (+) strand; PAM type: YTN; PAM sequence: TTG
tctaaagtcaagatgaagga

SEQ ID NO: 72796 - DNA, 20 bp, Artificial Sequence
  Description of Artificial Sequence: Synthetic oligonucleotide
  Target: SCNA; (+) strand; PAM type: YTN; PAM sequence: CTA
aagtcaagatgaaggaaaga

SEQ ID NO: 72797 - DNA, 20 bp, Artificial Sequence
  Description of Artificial Sequence: Synthetic oligonucleotide
  Target: SCNA; (+) strand; PAM type: YTN; PAM sequence: CTT
aagagctgtgaggcaaaagc

SEQ ID NO: 72798 - DNA, 20 bp, Artificial Sequence
  Description of Artificial Sequence: Synthetic oligonucleotide
  Target: SCNA; (+) strand; PAM type: YTN; PAM sequence: TTA
agagctgtgaggcaaaagca

SEQ ID NO: 72799 - DNA, 20 bp, Artificial Sequence
  Description of Artificial Sequence: Synthetic oligonucleotide
  Target: SCNA; (+) strand; PAM type: YTN; PAM sequence: CTG
tgaggcaaaagcatcaggta

SEQ ID NO: 72800 - DNA, 20 bp, Artificial Sequence
  Description of Artificial Sequence: Synthetic oligonucleotide
  Target: SCNA; (+) strand; PAM type: YTN; PAM sequence: CTA
taaaagaaaacatagcagat

SEQ ID NO: 72801 - DNA, 20 bp, Artificial Sequence
  Description of Artificial Sequence: Synthetic oligonucleotide
  Target: SCNA; (+) strand; PAM type: YTN; PAM sequence: TTA
atagcagatttctcagcata

SEQ ID NO: 72802 - DNA, 20 bp, Artificial Sequence
  Description of Artificial Sequence: Synthetic oligonucleotide
  Target: SCNA; (+) strand; PAM type: YTN; PAM sequence: TTT
ctcagcataaaccctgctag

SEQ ID NO: 72803 - DNA, 20 bp, Artificial Sequence
  Description of Artificial Sequence: Synthetic oligonucleotide
  Target: SCNA; (+) strand; PAM type: YTN; PAM sequence: TTC
tcagcataaaccctgctagc

SEQ ID NO: 72804 - DNA, 20 bp, Artificial Sequence
  Description of Artificial Sequence: Synthetic oligonucleotide
  Target: SCNA; (+) strand; PAM type: YTN; PAM sequence: CTC
agcataaaccctgctagcca

SEQ ID NO: 72805 - DNA, 20 bp, Artificial Sequence
  Description of Artificial Sequence: Synthetic oligonucleotide
  Target: SCNA; (+) strand; PAM type: YTN; PAM sequence: CTG
ctagccagaagagattgggc

SEQ ID NO: 72806 - DNA, 20 bp, Artificial Sequence
  Description of Artificial Sequence: Synthetic oligonucleotide
  Target: SCNA; (+) strand; PAM type: YTN; PAM sequence: CTA
gccagaagagattgggccct

SEQ ID NO: 72807 - DNA, 20 bp, Artificial Sequence
  Description of Artificial Sequence: Synthetic oligonucleotide
  Target: SCNA; (+) strand; PAM type: YTN; PAM sequence: TTG
ggccctatatttagcctctt

SEQ ID NO: 72808 - DNA, 20 bp, Artificial Sequence
  Description of Artificial Sequence: Synthetic oligonucleotide
  Target: SCNA; (+) strand; PAM type: YTN; PAM sequence: CTA
tatttagcctcttaaacaaa

SEQ ID NO: 72809 - DNA, 20 bp, Artificial Sequence
  Description of Artificial Sequence: Synthetic oligonucleotide
  Target: SCNA; (+) strand; PAM type: YTN; PAM sequence: TTT
agcctcttaaacaaaataat

SEQ ID NO: 72810 - DNA, 20 bp, Artificial Sequence
  Description of Artificial Sequence: Synthetic oligonucleotide
  Target: SCNA; (+) strand; PAM type: YTN; PAM sequence: TTA
gcctcttaaacaaaataatt

SEQ ID NO: 72811 - DNA, 20 bp, Artificial Sequence
  Description of Artificial Sequence: Synthetic oligonucleotide
  Target: SCNA; (+) strand; PAM type: YTN; PAM sequence: CTC
ttaaacaaaataattatcag

SEQ ID NO: 72812 - DNA, 20 bp, Artificial Sequence
  Description of Artificial Sequence: Synthetic oligonucleotide
  Target: SCNA; (+) strand; PAM type: YTN; PAM sequence: CTT
aaacaaaataattatcagcc

SEQ ID NO: 72813 - DNA, 20 bp, Artificial Sequence
  Description of Artificial Sequence: Synthetic oligonucleotide
  Target: SCNA; (+) strand; PAM type: YTN; PAM sequence: TTA
aacaaaataattatcagcca

SEQ ID NO: 72814 - DNA, 20 bp, Artificial Sequence
  Description of Artificial Sequence: Synthetic oligonucleotide
  Target: SCNA; (+) strand; PAM type: YTN; PAM sequence: TTA
tcagccaagaattttgtatc

SEQ ID NO: 72815 - DNA, 20 bp, Artificial Sequence
  Description of Artificial Sequence: Synthetic oligonucleotide
  Target: SCNA; (+) strand; PAM type: YTN; PAM sequence: TTT
tgtatccagtgaaactaagc

SEQ ID NO: 72816 - DNA, 20 bp, Artificial Sequence
  Description of Artificial Sequence: Synthetic oligonucleotide
  Target: SCNA; (+) strand; PAM type: YTN; PAM sequence: TTT
gtatccagtgaaactaagct

SEQ ID NO: 72817 - DNA, 20 bp, Artificial Sequence
  Description of Artificial Sequence: Synthetic oligonucleotide
  Target: SCNA; (+) strand; PAM type: YTN; PAM sequence: TTG
tatccagtgaaactaagctt

SEQ ID NO: 72818 - DNA, 20 bp, Artificial Sequence
  Description of Artificial Sequence: Synthetic oligonucleotide
  Target: SCNA; (+) strand; PAM type: YTN; PAM sequence: CTA
agcttcataaatgaaagaga

SEQ ID NO: 72819 - DNA, 20 bp, Artificial Sequence
  Description of Artificial Sequence: Synthetic oligonucleotide
  Target: SCNA; (+) strand; PAM type: YTN; PAM sequence: CTT
cataaatgaaagagagataa

SEQ ID NO: 72820 - DNA, 20 bp, Artificial Sequence
  Description of Artificial Sequence: Synthetic oligonucleotide
  Target: SCNA; (+) strand; PAM type: YTN; PAM sequence: TTC
ataaatgaaagagagataaa

SEQ ID NO: 72821 - DNA, 20 bp, Artificial Sequence
  Description of Artificial Sequence: Synthetic oligonucleotide
  Target: SCNA; (+) strand; PAM type: YTN; PAM sequence: CTT
tttcagacaaacaaatgctg

SEQ ID NO: 72822 - DNA, 20 bp, Artificial Sequence
  Description of Artificial Sequence: Synthetic oligonucleotide
  Target: SCNA; (+) strand; PAM type: YTN; PAM sequence: TTT
ttcagacaaacaaatgctga

SEQ ID NO: 72823 - DNA, 20 bp, Artificial Sequence
  Description of Artificial Sequence: Synthetic oligonucleotide
  Target: SCNA; (+) strand; PAM type: YTN; PAM sequence: TTT
tcagacaaacaaatgctgaa

SEQ ID NO: 72824 - DNA, 20 bp, Artificial Sequence
  Description of Artificial Sequence: Synthetic oligonucleotide
  Target: SCNA; (+) strand; PAM type: YTN; PAM sequence: TTT
cagacaaacaaatgctgaat

SEQ ID NO: 72825 - DNA, 20 bp, Artificial Sequence
  Description of Artificial Sequence: Synthetic oligonucleotide
  Target: SCNA; (+) strand; PAM type: YTN; PAM sequence: TTC
agacaaacaaatgctgaatt

SEQ ID NO: 72826 - DNA, 20 bp, Artificial Sequence
  Description of Artificial Sequence: Synthetic oligonucleotide
  Target: SCNA; (+) strand; PAM type: YTN; PAM sequence: CTG
aatttgccactaccaagcca

SEQ ID NO: 72827 - DNA, 20 bp, Artificial Sequence
  Description of Artificial Sequence: Synthetic oligonucleotide
  Target: SCNA; (+) strand; PAM type: YTN; PAM sequence: TTT
gccactaccaagccagcact

SEQ ID NO: 72828 - DNA, 20 bp, Artificial Sequence
  Description of Artificial Sequence: Synthetic oligonucleotide
  Target: SCNA; (+) strand; PAM type: YTN; PAM sequence: TTG
ccactaccaagccagcactg

SEQ ID NO: 72829 - DNA, 20 bp, Artificial Sequence
  Description of Artificial Sequence: Synthetic oligonucleotide
  Target: SCNA; (+) strand; PAM type: YTN; PAM sequence: CTA
ccaagccagcactgagaaat

SEQ ID NO: 72830 - DNA, 20 bp, Artificial Sequence
  Description of Artificial Sequence: Synthetic oligonucleotide
  Target: SCNA; (+) strand; PAM type: YTN; PAM sequence: CTG
agaaatgctaaaaggagctc

SEQ ID NO: 72831 - DNA, 20 bp, Artificial Sequence
  Description of Artificial Sequence: Synthetic oligonucleotide
  Target: SCNA; (+) strand; PAM type: YTN; PAM sequence: CTA
aaaggagctctaaatcttga

SEQ ID NO: 72832 - DNA, 20 bp, Artificial Sequence
  Description of Artificial Sequence: Synthetic oligonucleotide
  Target: SCNA; (+) strand; PAM type: YTN; PAM sequence: CTC
taaatcttgaaacagtaact

SEQ ID NO: 72833 - DNA, 20 bp, Artificial Sequence
  Description of Artificial Sequence: Synthetic oligonucleotide
  Target: SCNA; (+) strand; PAM type: YTN; PAM sequence: CTA
aatcttgaaacagtaacttg

SEQ ID NO: 72834 - DNA, 20 bp, Artificial Sequence
  Description of Artificial Sequence: Synthetic oligonucleotide
  Target: SCNA; (+) strand; PAM type: YTN; PAM sequence: CTT
gaaacagtaacttgaataca

SEQ ID NO: 72835 - DNA, 20 bp, Artificial Sequence
  Description of Artificial Sequence: Synthetic oligonucleotide
  Target: SCNA; (+) strand; PAM type: YTN; PAM sequence: TTG
aaacagtaacttgaatacat

SEQ ID NO: 72836 - DNA, 20 bp, Artificial Sequence
  Description of Artificial Sequence: Synthetic oligonucleotide
  Target: SCNA; (+) strand; PAM type: YTN; PAM sequence: CTT
gaatacatcaaaatagaacc

SEQ ID NO: 72837 - DNA, 20 bp, Artificial Sequence
  Description of Artificial Sequence: Synthetic oligonucleotide
  Target: SCNA; (+) strand; PAM type: YTN; PAM sequence: TTG
aatacatcaaaatagaacct

SEQ ID NO: 72838 - DNA, 20 bp, Artificial Sequence
  Description of Artificial Sequence: Synthetic oligonucleotide
  Target: SCNA; (+) strand; PAM type: YTN; PAM sequence: CTC
cttaaagcataaatttaaca

SEQ ID NO: 72839 - DNA, 20 bp, Artificial Sequence
  Description of Artificial Sequence: Synthetic oligonucleotide
  Target: SCNA; (+) strand; PAM type: YTN; PAM sequence: CTT
aaagcataaatttaacagga

SEQ ID NO: 72840 - DNA, 20 bp, Artificial Sequence
  Description of Artificial Sequence: Synthetic oligonucleotide
  Target: SCNA; (+) strand; PAM type: YTN; PAM sequence: TTA
aagcataaatttaacaggac

SEQ ID NO: 72841 - DNA, 20 bp, Artificial Sequence
  Description of Artificial Sequence: Synthetic oligonucleotide
  Target: SCNA; (+) strand; PAM type: YTN; PAM sequence: TTT
aacaggacccataaaataat

SEQ ID NO: 72842 - DNA, 20 bp, Artificial Sequence
  Description of Artificial Sequence: Synthetic oligonucleotide
  Target: SCNA; (+) strand; PAM type: YTN; PAM sequence: TTA
acaggacccataaaataata

SEQ ID NO: 72843 - DNA, 20 bp, Artificial Sequence
  Description of Artificial Sequence: Synthetic oligonucleotide
  Target: SCNA; (+) strand; PAM type: YTN; PAM sequence: TTA
acaacagcaacaacaagaag

SEQ ID NO: 72844 - DNA, 20 bp, Artificial Sequence
  Description of Artificial Sequence: Synthetic oligonucleotide
  Target: SCNA; (+) strand; PAM type: YTN; PAM sequence: TTG
aggcaacaactatcatgatg

SEQ ID NO: 72845 - DNA, 20 bp, Artificial Sequence
  Description of Artificial Sequence: Synthetic oligonucleotide
  Target: SCNA; (+) strand; PAM type: YTN; PAM sequence: CTA
tcatgatgaatagaacagta

SEQ ID NO: 72846 - DNA, 20 bp, Artificial Sequence
  Description of Artificial Sequence: Synthetic oligonucleotide
  Target: SCNA; (+) strand; PAM type: YTN; PAM sequence: CTC
atacctcaatactaatgttg

SEQ ID NO: 72847 - DNA, 20 bp, Artificial Sequence
  Description of Artificial Sequence: Synthetic oligonucleotide
  Target: SCNA; (+) strand; PAM type: YTN; PAM sequence: CTC
aatactaatgttgaatgtaa

SEQ ID NO: 72848 - DNA, 20 bp, Artificial Sequence
  Description of Artificial Sequence: Synthetic oligonucleotide
  Target: SCNA; (+) strand; PAM type: YTN; PAM sequence: CTA
atgttgaatgtaaatggcct

SEQ ID NO: 72849 - DNA, 20 bp, Artificial Sequence
  Description of Artificial Sequence: Synthetic oligonucleotide
  Target: SCNA; (+) strand; PAM type: YTN; PAM sequence: TTG
aatgtaaatggcctaaatgc

SEQ ID NO: 72850 - DNA, 20 bp, Artificial Sequence
  Description of Artificial Sequence: Synthetic oligonucleotide
  Target: SCNA; (+) strand; PAM type: YTN; PAM sequence: CTA
aatgctccacttaaaagata

SEQ ID NO: 72851 - DNA, 20 bp, Artificial Sequence
  Description of Artificial Sequence: Synthetic oligonucleotide
  Target: SCNA; (+) strand; PAM type: YTN; PAM sequence: CTC
cacttaaaagatacagaatg

SEQ ID NO: 72852 - DNA, 20 bp, Artificial Sequence
  Description of Artificial Sequence: Synthetic oligonucleotide
  Target: SCNA; (+) strand; PAM type: YTN; PAM sequence: CTT
aaaagatacagaatggcaga

SEQ ID NO: 72853 - DNA, 20 bp, Artificial Sequence
  Description of Artificial Sequence: Synthetic oligonucleotide
  Target: SCNA; (+) strand; PAM type: YTN; PAM sequence: TTA
aaagatacagaatggcagaa

SEQ ID NO: 72854 - DNA, 20 bp, Artificial Sequence
  Description of Artificial Sequence: Synthetic oligonucleotide
  Target: SCNA; (+) strand; PAM type: YTN; PAM sequence: CTG
ctgtcttcaagagactcacc

SEQ ID NO: 72855 - DNA, 20 bp, Artificial Sequence
  Description of Artificial Sequence: Synthetic oligonucleotide
  Target: SCNA; (+) strand; PAM type: YTN; PAM sequence: CTG
tcttcaagagactcacctaa

SEQ ID NO: 72856 - DNA, 20 bp, Artificial Sequence
  Description of Artificial Sequence: Synthetic oligonucleotide
  Target: SCNA; (+) strand; PAM type: YTN; PAM sequence: CTT
caagagactcacctaacacg

SEQ ID NO: 72857 - DNA, 20 bp, Artificial Sequence
  Description of Artificial Sequence: Synthetic oligonucleotide
  Target: SCNA; (+) strand; PAM type: YTN; PAM sequence: TTC
aagagactcacctaacacgt

SEQ ID NO: 72858 - DNA, 20 bp, Artificial Sequence
  Description of Artificial Sequence: Synthetic oligonucleotide
  Target: SCNA; (+) strand; PAM type: YTN; PAM sequence: CTC
acctaacacgtaaggactca

SEQ ID NO: 72859 - DNA, 20 bp, Artificial Sequence
  Description of Artificial Sequence: Synthetic oligonucleotide
  Target: SCNA; (+) strand; PAM type: YTN; PAM sequence: CTA
acacgtaaggactcacataa

SEQ ID NO: 72860 - DNA, 20 bp, Artificial Sequence
  Description of Artificial Sequence: Synthetic oligonucleotide
  Target: SCNA; (+) strand; PAM type: YTN; PAM sequence: CTC
acataaacttaaggtaaagg

SEQ ID NO: 72861 - DNA, 20 bp, Artificial Sequence
  Description of Artificial Sequence: Synthetic oligonucleotide
  Target: SCNA; (+) strand; PAM type: YTN; PAM sequence: CTT
aaggtaaaggggtggaaaaa

SEQ ID NO: 72862 - DNA, 20 bp, Artificial Sequence
  Description of Artificial Sequence: Synthetic oligonucleotide
  Target: SCNA; (+) strand; PAM type: YTN; PAM sequence: TTA
aggtaaaggggtggaaaaag

SEQ ID NO: 72863 - DNA, 20 bp, Artificial Sequence
  Description of Artificial Sequence: Synthetic oligonucleotide
  Target: SCNA; (+) strand; PAM type: YTN; PAM sequence: TTC
catgcaaatggaaactcaaa

SEQ ID NO: 72864 - DNA, 20 bp, Artificial Sequence
  Description of Artificial Sequence: Synthetic oligonucleotide
  Target: SCNA; (+) strand; PAM type: YTN; PAM sequence: CTC
aaagtgagaaagaatagcaa

SEQ ID NO: 72865 - DNA, 20 bp, Artificial Sequence
  Description of Artificial Sequence: Synthetic oligonucleotide
  Target: SCNA; (+) strand; PAM type: YTN; PAM sequence: TTC
ttatatcagacaaaaaagat

SEQ ID NO: 72866 - DNA, 20 bp, Artificial Sequence
  Description of Artificial Sequence: Synthetic oligonucleotide
  Target: SCNA; (+) strand; PAM type: YTN; PAM sequence: CTT
atatcagacaaaaaagattt

SEQ ID NO: 72867 - DNA, 20 bp, Artificial Sequence
  Description of Artificial Sequence: Synthetic oligonucleotide
  Target: SCNA; (+) strand; PAM type: YTN; PAM sequence: TTA
tatcagacaaaaaagatttt

SEQ ID NO: 72868 - DNA, 20 bp, Artificial Sequence
  Description of Artificial Sequence: Synthetic oligonucleotide
  Target: SCNA; (+) strand; PAM type: YTN; PAM sequence: TTT
taaagcaacaacaattaaaa

SEQ ID NO: 72869 - DNA, 20 bp, Artificial Sequence
  Description of Artificial Sequence: Synthetic oligonucleotide
  Target: SCNA; (+) strand; PAM type: YTN; PAM sequence: TTT
aaagcaacaacaattaaaaa

SEQ ID NO: 72870 - DNA, 20 bp, Artificial Sequence
  Description of Artificial Sequence: Synthetic oligonucleotide
  Target: SCNA; (+) strand; PAM type: YTN; PAM sequence: TTA
aagcaacaacaattaaaaaa

SEQ ID NO: 72871 - DNA, 20 bp, Artificial Sequence
  Description of Artificial Sequence: Synthetic oligonucleotide
  Target: SCNA; (+) strand; PAM type: YTN; PAM sequence: TTA
aaaaagacaaagagagacat

SEQ ID NO: 72872 - DNA, 20 bp, Artificial Sequence
  Description of Artificial Sequence: Synthetic oligonucleotide
  Target: SCNA; (+) strand; PAM type: YTN; PAM sequence: TTA
tataatgataaaataattag

SEQ ID NO: 72873 - DNA, 20 bp, Artificial Sequence
  Description of Artificial Sequence: Synthetic oligonucleotide
  Target: SCNA; (+) strand; PAM type: YTN; PAM sequence: TTA
gttcaacaggaaaaatttac

SEQ ID NO: 72874 - DNA, 20 bp, Artificial Sequence
  Description of Artificial Sequence: Synthetic oligonucleotide
  Target: SCNA; (+) strand; PAM type: YTN; PAM sequence: TTC
aacaggaaaaatttacaatc

SEQ ID NO: 72875 - DNA, 20 bp, Artificial Sequence
  Description of Artificial Sequence: Synthetic oligonucleotide
  Target: SCNA; (+) strand; PAM type: YTN; PAM sequence: TTT
acaatcttaagtgtatatgc

SEQ ID NO: 72876 - DNA, 20 bp, Artificial Sequence
  Description of Artificial Sequence: Synthetic oligonucleotide
  Target: SCNA; (+) strand; PAM type: YTN; PAM sequence: TTA
caatcttaagtgtatatgca

SEQ ID NO: 72877 - DNA, 20 bp, Artificial Sequence
  Description of Artificial Sequence: Synthetic oligonucleotide
  Target: SCNA; (+) strand; PAM type: YTN; PAM sequence: CTT
aagtgtatatgcatctaaca

SEQ ID NO: 72878 - DNA, 20 bp, Artificial Sequence
  Description of Artificial Sequence: Synthetic oligonucleotide
  Target: SCNA; (+) strand; PAM type: YTN; PAM sequence: TTA
agtgtatatgcatctaacac

SEQ ID NO: 72879 - DNA, 20 bp, Artificial Sequence
  Description of Artificial Sequence: Synthetic oligonucleotide
  Target: SCNA; (+) strand; PAM type: YTN; PAM sequence: CTA
acacttgggctcccaaattt

SEQ ID NO: 72880 - DNA, 20 bp, Artificial Sequence
  Description of Artificial Sequence: Synthetic oligonucleotide
  Target: SCNA; (+) strand; PAM type: YTN; PAM sequence: CTT
gggctcccaaatttataaag

SEQ ID NO: 72881 - DNA, 20 bp, Artificial Sequence
  Description of Artificial Sequence: Synthetic oligonucleotide
  Target: SCNA; (+) strand; PAM type: YTN; PAM sequence: TTG
ggctcccaaatttataaagc

SEQ ID NO: 72882 - DNA, 20 bp, Artificial Sequence
  Description of Artificial Sequence: Synthetic oligonucleotide
  Target: SCNA; (+) strand; PAM type: YTN; PAM sequence: CTC
ccaaatttataaagcaatca

SEQ ID NO: 72883 - DNA, 20 bp, Artificial Sequence
  Description of Artificial Sequence: Synthetic oligonucleotide
  Target: SCNA; (+) strand; PAM type: YTN; PAM sequence: TTT
ataaagcaatcactactaga

SEQ ID NO: 72884 - DNA, 20 bp, Artificial Sequence
  Description of Artificial Sequence: Synthetic oligonucleotide
  Target: SCNA; (+) strand; PAM type: YTN; PAM sequence: TTA
taaagcaatcactactagac

SEQ ID NO: 72885 - DNA, 20 bp, Artificial Sequence
  Description of Artificial Sequence: Synthetic oligonucleotide
  Target: SCNA; (+) strand; PAM type: YTN; PAM sequence: CTA
ctagacctaagacatgagat

SEQ ID NO: 72886 - DNA, 20 bp, Artificial Sequence
  Description of Artificial Sequence: Synthetic oligonucleotide
  Target: SCNA; (+) strand; PAM type: YTN; PAM sequence: CTA
gacctaagacatgagataga

SEQ ID NO: 72887 - DNA, 20 bp, Artificial Sequence
  Description of Artificial Sequence: Synthetic oligonucleotide
  Target: SCNA; (+) strand; PAM type: YTN; PAM sequence: CTA
agacatgagatagacagcaa

SEQ ID NO: 72888 - DNA, 20 bp, Artificial Sequence
  Description of Artificial Sequence: Synthetic oligonucleotide
  Target: SCNA; (+) strand; PAM type: YTN; PAM sequence: CTT
cagtactccactgacagcac

SEQ ID NO: 72889 - DNA, 20 bp, Artificial Sequence
  Description of Artificial Sequence: Synthetic oligonucleotide
  Target: SCNA; (+) strand; PAM type: YTN; PAM sequence: TTC
agtactccactgacagcact

SEQ ID NO: 72890 - DNA, 20 bp, Artificial Sequence
  Description of Artificial Sequence: Synthetic oligonucleotide
  Target: SCNA; (+) strand; PAM type: YTN; PAM sequence: CTC
cactgacagcactagacagg

SEQ ID NO: 72891 - DNA, 20 bp, Artificial Sequence
  Description of Artificial Sequence: Synthetic oligonucleotide
  Target: SCNA; (+) strand; PAM type: YTN; PAM sequence: CTG
acagcactagacaggtcatc

SEQ ID NO: 72892 - DNA, 20 bp, Artificial Sequence
  Description of Artificial Sequence: Synthetic oligonucleotide
  Target: SCNA; (+) strand; PAM type: YTN; PAM sequence: CTA
gacaggtcatcaagacagaa

SEQ ID NO: 72893 - DNA, 20 bp, Artificial Sequence
  Description of Artificial Sequence: Synthetic oligonucleotide
  Target: SCNA; (+) strand; PAM type: YTN; PAM sequence: CTT
aaactataccctagaacaaa

SEQ ID NO: 72894 - DNA, 20 bp, Artificial Sequence
  Description of Artificial Sequence: Synthetic oligonucleotide
  Target: SCNA; (+) strand; PAM type: YTN; PAM sequence: TTA
aactataccctagaacaaat

SEQ ID NO: 72895 - DNA, 20 bp, Artificial Sequence
  Description of Artificial Sequence: Synthetic oligonucleotide
  Target: SCNA; (+) strand; PAM type: YTN; PAM sequence: CTA
taccctagaacaaatggact

SEQ ID NO: 72896 - DNA, 20 bp, Artificial Sequence
  Description of Artificial Sequence: Synthetic oligonucleotide
  Target: SCNA; (+) strand; PAM type: YTN; PAM sequence: CTA
gaacaaatggacttaacaga

SEQ ID NO: 72897 - DNA, 20 bp, Artificial Sequence
  Description of Artificial Sequence: Synthetic oligonucleotide
  Target: SCNA; (+) strand; PAM type: YTN; PAM sequence: CTT
aacagatatttacaaaaaat

SEQ ID NO: 72898 - DNA, 20 bp, Artificial Sequence
  Description of Artificial Sequence: Synthetic oligonucleotide
  Target: SCNA; (+) strand; PAM type: YTN; PAM sequence: TTA
acagatatttacaaaaaatc

SEQ ID NO: 72899 - DNA, 20 bp, Artificial Sequence
  Description of Artificial Sequence: Synthetic oligonucleotide
  Target: SCNA; (+) strand; PAM type: YTN; PAM sequence: TTT
acaaaaaatcctacccaaca

SEQ ID NO: 72900 - DNA, 20 bp, Artificial Sequence
  Description of Artificial Sequence: Synthetic oligonucleotide
  Target: SCNA; (+) strand; PAM type: YTN; PAM sequence: TTA
caaaaaatcctacccaacaa

SEQ ID NO: 72901 - DNA, 20 bp, Artificial Sequence
  Description of Artificial Sequence: Synthetic oligonucleotide
  Target: SCNA; (+) strand; PAM type: YTN; PAM sequence: CTA
cccaacaactacatcctttt

SEQ ID NO: 72902 - DNA, 20 bp, Artificial Sequence
  Description of Artificial Sequence: Synthetic oligonucleotide
  Target: SCNA; (+) strand; PAM type: YTN; PAM sequence: CTA
catccttttcatcaacacat

SEQ ID NO: 72903 - DNA, 20 bp, Artificial Sequence
  Description of Artificial Sequence: Synthetic oligonucleotide
  Target: SCNA; (+) strand; PAM type: YTN; PAM sequence: CTT
ttcatcaacacatggaatat

SEQ ID NO: 72904 - DNA, 20 bp, Artificial Sequence
  Description of Artificial Sequence: Synthetic oligonucleotide
  Target: SCNA; (+) strand; PAM type: YTN; PAM sequence: TTT
tcatcaacacatggaatatt

SEQ ID NO: 72905 - DNA, 20 bp, Artificial Sequence
  Description of Artificial Sequence: Synthetic oligonucleotide
  Target: SCNA; (+) strand; PAM type: YTN; PAM sequence: TTT
catcaacacatggaatattc

SEQ ID NO: 72906 - DNA, 20 bp, Artificial Sequence
  Description of Artificial Sequence: Synthetic oligonucleotide
  Target: SCNA; (+) strand; PAM type: YTN; PAM sequence: TTC
atcaacacatggaatattct

SEQ ID NO: 72907 - DNA, 20 bp, Artificial Sequence
  Description of Artificial Sequence: Synthetic oligonucleotide
  Target: SCNA; (+) strand; PAM type: YTN; PAM sequence: TTC
tccaagacagaccatatgaa

SEQ ID NO: 72908 - DNA, 20 bp, Artificial Sequence
  Description of Artificial Sequence: Synthetic oligonucleotide
  Target: SCNA; (+) strand; PAM type: YTN; PAM sequence: CTC
caagacagaccatatgaaca

SEQ ID NO: 72909 - DNA, 20 bp, Artificial Sequence
  Description of Artificial Sequence: Synthetic oligonucleotide
  Target: SCNA; (+) strand; PAM type: YTN; PAM sequence: CTC
aataaatttaagaaaatcaa

SEQ ID NO: 72910 - DNA, 20 bp, Artificial Sequence
  Description of Artificial Sequence: Synthetic oligonucleotide
  Target: SCNA; (+) strand; PAM type: YTN; PAM sequence: TTT
aagaaaatcaaaattatatc

SEQ ID NO: 72911 - DNA, 20 bp, Artificial Sequence
  Description of Artificial Sequence: Synthetic oligonucleotide
  Target: SCNA; (+) strand; PAM type: YTN; PAM sequence: TTA
agaaaatcaaaattatatca

SEQ ID NO: 72912 - DNA, 20 bp, Artificial Sequence
  Description of Artificial Sequence: Synthetic oligonucleotide
  Target: SCNA; (+) strand; PAM type: YTN; PAM sequence: TTA
tatcaagtattctctcagac

SEQ ID NO: 72913 - DNA, 20 bp, Artificial Sequence
  Description of Artificial Sequence: Synthetic oligonucleotide
  Target: SCNA; (+) strand; PAM type: YTN; PAM sequence: TTC
tctcagaccacagtggaata

SEQ ID NO: 72914 - DNA, 20 bp, Artificial Sequence
  Description of Artificial Sequence: Synthetic oligonucleotide
  Target: SCNA; (+) strand; PAM type: YTN; PAM sequence: CTC
tcagaccacagtggaataaa

SEQ ID NO: 72915 - DNA, 20 bp, Artificial Sequence
  Description of Artificial Sequence: Synthetic oligonucleotide
  Target: SCNA; (+) strand; PAM type: YTN; PAM sequence: CTC
agaccacagtggaataaaat

SEQ ID NO: 72916 - DNA, 20 bp, Artificial Sequence
  Description of Artificial Sequence: Synthetic oligonucleotide
  Target: SCNA; (+) strand; PAM type: YTN; PAM sequence: TTA
aaaattaactccaaaagaaa

SEQ ID NO: 72917 - DNA, 20 bp, Artificial Sequence
  Description of Artificial Sequence: Synthetic oligonucleotide
  Target: SCNA; (+) strand; PAM type: YTN; PAM sequence: TTA
actccaaaagaaaccctcaa

SEQ ID NO: 72918 - DNA, 20 bp, Artificial Sequence
  Description of Artificial Sequence: Synthetic oligonucleotide
  Target: SCNA; (+) strand; PAM type: YTN; PAM sequence: CTC
caaaagaaaccctcaaaact

SEQ ID NO: 72919 - DNA, 20 bp, Artificial Sequence
  Description of Artificial Sequence: Synthetic oligonucleotide
  Target: SCNA; (+) strand; PAM type: YTN; PAM sequence: CTC
aaaactatacaaatacatgg

SEQ ID NO: 72920 - DNA, 20 bp, Artificial Sequence
  Description of Artificial Sequence: Synthetic oligonucleotide
  Target: SCNA; (+) strand; PAM type: YTN; PAM sequence: CTA
tacaaatacatggaaatcga

SEQ ID NO: 72921 - DNA, 20 bp, Artificial Sequence
  Description of Artificial Sequence: Synthetic oligonucleotide
  Target: SCNA; (+) strand; PAM type: YTN; PAM sequence: CTG
ctcctgaatgatctttgggt

SEQ ID NO: 72922 - DNA, 20 bp, Artificial Sequence
  Description of Artificial Sequence: Synthetic oligonucleotide
  Target: SCNA; (+) strand; PAM type: YTN; PAM sequence: CTC
ctgaatgatctttgggtcaa

SEQ ID NO: 72923 - DNA, 20 bp, Artificial Sequence
  Description of Artificial Sequence: Synthetic oligonucleotide
  Target: SCNA; (+) strand; PAM type: YTN; PAM sequence: CTG
aatgatctttgggtcaacaa

SEQ ID NO: 72924 - DNA, 20 bp, Artificial Sequence
  Description of Artificial Sequence: Synthetic oligonucleotide
  Target: SCNA; (+) strand; PAM type: YTN; PAM sequence: CTT
tgggtcaacaatgaaatcaa

SEQ ID NO: 72925 - DNA, 20 bp, Artificial Sequence
  Description of Artificial Sequence: Synthetic oligonucleotide
  Target: SCNA; (+) strand; PAM type: YTN; PAM sequence: TTT
gggtcaacaatgaaatcaag

SEQ ID NO: 72926 - DNA, 20 bp, Artificial Sequence
  Description of Artificial Sequence: Synthetic oligonucleotide
  Target: SCNA; (+) strand; PAM type: YTN; PAM sequence: TTG
ggtcaacaatgaaatcaaga

SEQ ID NO: 72927 - DNA, 20 bp, Artificial Sequence
  Description of Artificial Sequence: Synthetic oligonucleotide
  Target: SCNA; (+) strand; PAM type: YTN; PAM sequence: TTT
taaaaatatttgaattcaac

SEQ ID NO: 72928 - DNA, 20 bp, Artificial Sequence
  Description of Artificial Sequence: Synthetic oligonucleotide
  Target: SCNA; (+) strand; PAM type: YTN; PAM sequence: TTT
aaaaatatttgaattcaaca

SEQ ID NO: 72929 - DNA, 20 bp, Artificial Sequence
  Description of Artificial Sequence: Synthetic oligonucleotide
  Target: SCNA; (+) strand; PAM type: YTN; PAM sequence: TTA
aaaatatttgaattcaacaa

SEQ ID NO: 72930 - DNA, 20 bp, Artificial Sequence
  Description of Artificial Sequence: Synthetic oligonucleotide
  Target: SCNA; (+) strand; PAM type: YTN; PAM sequence: TTT
gaattcaacaataataatga

SEQ ID NO: 72931 - DNA, 20 bp, Artificial Sequence
  Description of Artificial Sequence: Synthetic oligonucleotide
  Target: SCNA; (+) strand; PAM type: YTN; PAM sequence: TTG
aattcaacaataataatgac

SEQ ID NO: 72932 - DNA, 20 bp, Artificial Sequence
  Description of Artificial Sequence: Synthetic oligonucleotide
  Target: SCNA; (+) strand; PAM type: YTN; PAM sequence: TTC
aacaataataatgacaaaac

SEQ ID NO: 72933 - DNA, 20 bp, Artificial Sequence
  Description of Artificial Sequence: Synthetic oligonucleotide
  Target: SCNA; (+) strand; PAM type: YTN; PAM sequence: CTA
tcacaacctctgggatacag

SEQ ID NO: 72934 - DNA, 20 bp, Artificial Sequence
  Description of Artificial Sequence: Synthetic oligonucleotide
  Target: SCNA; (+) strand; PAM type: YTN; PAM sequence: CTC
tgggatacagcaaaagccat

SEQ ID NO: 72935 - DNA, 20 bp, Artificial Sequence
  Description of Artificial Sequence: Synthetic oligonucleotide
  Target: SCNA; (+) strand; PAM type: YTN; PAM sequence: CTG
ggatacagcaaaagccatgt

SEQ ID NO: 72936 - DNA, 20 bp, Artificial Sequence
  Description of Artificial Sequence: Synthetic oligonucleotide
  Target: SCNA; (+) strand; PAM type: YTN; PAM sequence: TTA
agagcaaagttcatagcatt

SEQ ID NO: 72937 - DNA, 20 bp, Artificial Sequence
  Description of Artificial Sequence: Synthetic oligonucleotide
  Target: SCNA; (+) strand; PAM type: YTN; PAM sequence: TTC
atagcattaaatatctacat

SEQ ID NO: 72938 - DNA, 20 bp, Artificial Sequence
  Description of Artificial Sequence: Synthetic oligonucleotide
  Target: SCNA; (+) strand; PAM type: YTN; PAM sequence: TTA
aatatctacatcaaaaagtc

SEQ ID NO: 72939 - DNA, 20 bp, Artificial Sequence
  Description of Artificial Sequence: Synthetic oligonucleotide
  Target: SCNA; (+) strand; PAM type: YTN; PAM sequence: CTA
catcaaaaagtctgaaagag

SEQ ID NO: 72940 - DNA, 20 bp, Artificial Sequence
  Description of Artificial Sequence: Synthetic oligonucleotide
  Target: SCNA; (+) strand; PAM type: YTN; PAM sequence: CTG
aaagagcacaaatagacaat

SEQ ID NO: 72941 - DNA, 20 bp, Artificial Sequence
  Description of Artificial Sequence: Synthetic oligonucleotide
  Target: SCNA; (+) strand; PAM type: YTN; PAM sequence: CTG
agcttacacctctaggaact

SEQ ID NO: 72942 - DNA, 20 bp, Artificial Sequence
  Description of Artificial Sequence: Synthetic oligonucleotide
  Target: SCNA; (+) strand; PAM type: YTN; PAM sequence: CTT
acacctctaggaactggaaa

SEQ ID NO: 72943 - DNA, 20 bp, Artificial Sequence
  Description of Artificial Sequence: Synthetic oligonucleotide
  Target: SCNA; (+) strand; PAM type: YTN; PAM sequence: TTA
cacctctaggaactggaaaa

SEQ ID NO: 72944 - DNA, 20 bp, Artificial Sequence
  Description of Artificial Sequence: Synthetic oligonucleotide
  Target: SCNA; (+) strand; PAM type: YTN; PAM sequence: CTC
taggaactggaaaaacaaga

SEQ ID NO: 72945 - DNA, 20 bp, Artificial Sequence
  Description of Artificial Sequence: Synthetic oligonucleotide
  Target: SCNA; (+) strand; PAM type: YTN; PAM sequence: CTA
ggaactggaaaaacaagaca

SEQ ID NO: 72946 - DNA, 20 bp, Artificial Sequence
  Description of Artificial Sequence: Synthetic oligonucleotide
  Target: SCNA; (+) strand; PAM type: YTN; PAM sequence: CTG
gaaaaacaagacaaagcaaa

SEQ ID NO: 72947 - DNA, 20 bp, Artificial Sequence
  Description of Artificial Sequence: Synthetic oligonucleotide
  Target: SCNA; (+) strand; PAM type: YTN; PAM sequence: TTG
agtcttagtgtggtggctca

SEQ ID NO: 72948 - DNA, 20 bp, Artificial Sequence
  Description of Artificial Sequence: Synthetic oligonucleotide
  Target: SCNA; (+) strand; PAM type: YTN; PAM sequence: CTT
agtgtggtggctcacacctg

SEQ ID NO: 72949 - DNA, 20 bp, Artificial Sequence
  Description of Artificial Sequence: Synthetic oligonucleotide
  Target: SCNA; (+) strand; PAM type: YTN; PAM sequence: TTA
gtgtggtggctcacacctgt

SEQ ID NO: 72950 - DNA, 20 bp, Artificial Sequence
  Description of Artificial Sequence: Synthetic oligonucleotide
  Target: SCNA; (+) strand; PAM type: YTN; PAM sequence: CTC
acacctgtaatcgcagcact

SEQ ID NO: 72951 - DNA, 20 bp, Artificial Sequence
  Description of Artificial Sequence: Synthetic oligonucleotide
  Target: SCNA; (+) strand; PAM type: YTN; PAM sequence: CTG
taatcgcagcactttgggag

SEQ ID NO: 72952 - DNA, 20 bp, Artificial Sequence
  Description of Artificial Sequence: Synthetic oligonucleotide
  Target: SCNA; (+) strand; PAM type: YTN; PAM sequence: CTT
tgggaggccaaggcaggcgg

SEQ ID NO: 72953 - DNA, 20 bp, Artificial Sequence
  Description of Artificial Sequence: Synthetic oligonucleotide
  Target: SCNA; (+) strand; PAM type: YTN; PAM sequence: TTT
gggaggccaaggcaggcgga

SEQ ID NO: 72954 - DNA, 20 bp, Artificial Sequence
  Description of Artificial Sequence: Synthetic oligonucleotide
  Target: SCNA; (+) strand; PAM type: YTN; PAM sequence: TTG
ggaggccaaggcaggcggat

SEQ ID NO: 72955 - DNA, 20 bp, Artificial Sequence
  Description of Artificial Sequence: Synthetic oligonucleotide
  Target: SCNA; (+) strand; PAM type: YTN; PAM sequence: TTT
gagacctgcctggccaacat

SEQ ID NO: 72956 - DNA, 20 bp, Artificial Sequence
  Description of Artificial Sequence: Synthetic oligonucleotide
  Target: SCNA; (+) strand; PAM type: YTN; PAM sequence: TTG
agacctgcctggccaacatg

SEQ ID NO: 72957 - DNA, 20 bp, Artificial Sequence
  Description of Artificial Sequence: Synthetic oligonucleotide
  Target: SCNA; (+) strand; PAM type: YTN; PAM sequence: CTG
cctggccaacatggtgaaac

SEQ ID NO: 72958 - DNA, 20 bp, Artificial Sequence
  Description of Artificial Sequence: Synthetic oligonucleotide
  Target: SCNA; (+) strand; PAM type: YTN; PAM sequence: CTG
gccaacatggtgaaaccccg

SEQ ID NO: 72959 - DNA, 20 bp, Artificial Sequence
  Description of Artificial Sequence: Synthetic oligonucleotide
  Target: SCNA; (+) strand; PAM type: YTN; PAM sequence: CTC
tactaaaaatacaaaaatta

SEQ ID NO: 72960 - DNA, 20 bp, Artificial Sequence
  Description of Artificial Sequence: Synthetic oligonucleotide
  Target: SCNA; (+) strand; PAM type: YTN; PAM sequence: CTA
ctaaaaatacaaaaattagc

SEQ ID NO: 72961 - DNA, 20 bp, Artificial Sequence
  Description of Artificial Sequence: Synthetic oligonucleotide
  Target: SCNA; (+) strand; PAM type: YTN; PAM sequence: CTA
aaaatacaaaaattagccag

SEQ ID NO: 72962 - DNA, 20 bp, Artificial Sequence
  Description of Artificial Sequence: Synthetic oligonucleotide
  Target: SCNA; (+) strand; PAM type: YTN; PAM sequence: TTA
gccaggtgtggtggcaggca

SEQ ID NO: 72963 - DNA, 20 bp, Artificial Sequence
  Description of Artificial Sequence: Synthetic oligonucleotide
  Target: SCNA; (+) strand; PAM type: YTN; PAM sequence: CTG
tagtcccagctactcgggca

SEQ ID NO: 72964 - DNA, 20 bp, Artificial Sequence
  Description of Artificial Sequence: Synthetic oligonucleotide
  Target: SCNA; (+) strand; PAM type: YTN; PAM sequence: CTA
ctcgggcagctgaggcaaga

SEQ ID NO: 72965 - DNA, 20 bp, Artificial Sequence
  Description of Artificial Sequence: Synthetic oligonucleotide
  Target: SCNA; (+) strand; PAM type: YTN; PAM sequence: CTC
gggcagctgaggcaagagaa

SEQ ID NO: 72966 - DNA, 20 bp, Artificial Sequence
  Description of Artificial Sequence: Synthetic oligonucleotide
  Target: SCNA; (+) strand; PAM type: YTN; PAM sequence: CTG
aggcaagagaatcacttgaa

SEQ ID NO: 72967 - DNA, 20 bp, Artificial Sequence
  Description of Artificial Sequence: Synthetic oligonucleotide
  Target: SCNA; (+) strand; PAM type: YTN; PAM sequence: CTT
gaacctggaaggcagatgtt

SEQ ID NO: 72968 - DNA, 20 bp, Artificial Sequence
  Description of Artificial Sequence: Synthetic oligonucleotide
  Target: SCNA; (+) strand; PAM type: YTN; PAM sequence: TTG
aacctggaaggcagatgttg

SEQ ID NO: 72969 - DNA, 20 bp, Artificial Sequence
  Description of Artificial Sequence: Synthetic oligonucleotide
  Target: SCNA; (+) strand; PAM type: YTN; PAM sequence: CTG
gaaggcagatgttgcagtga

SEQ ID NO: 72970 - DNA, 20 bp, Artificial Sequence
  Description of Artificial Sequence: Synthetic oligonucleotide
  Target: SCNA; (+) strand; PAM type: YTN; PAM sequence: TTG
cagtgagccaagatcatact

SEQ ID NO: 72971 - DNA, 20 bp, Artificial Sequence
  Description of Artificial Sequence: Synthetic oligonucleotide
  Target: SCNA; (+) strand; PAM type: YTN; PAM sequence: CTG
ttgcattccagcctgggtaa

SEQ ID NO: 72972 - DNA, 20 bp, Artificial Sequence
  Description of Artificial Sequence: Synthetic oligonucleotide
  Target: SCNA; (+) strand; PAM type: YTN; PAM sequence: TTG
cattccagcctgggtaacaa

SEQ ID NO: 72973 - DNA, 20 bp, Artificial Sequence
  Description of Artificial Sequence: Synthetic oligonucleotide
  Target: SCNA; (+) strand; PAM type: YTN; PAM sequence: TTC
cagcctgggtaacaagagtg

SEQ ID NO: 72974 - DNA, 20 bp, Artificial Sequence
  Description of Artificial Sequence: Synthetic oligonucleotide
  Target: SCNA; (+) strand; PAM type: YTN; PAM sequence: CTG
ggtaacaagagtgagactcc

SEQ ID NO: 72975 - DNA, 20 bp, Artificial Sequence
  Description of Artificial Sequence: Synthetic oligonucleotide
  Target: SCNA; (+) strand; PAM type: YTN; PAM sequence: CTC
catctcaaaaaataaaaata

SEQ ID NO: 72976 - DNA, 20 bp, Artificial Sequence
  Description of Artificial Sequence: Synthetic oligonucleotide
  Target: SCNA; (+) strand; PAM type: YTN; PAM sequence: CTC
aaaaaataaaaataaaaata

SEQ ID NO: 72977 - DNA, 20 bp, Artificial Sequence
  Description of Artificial Sequence: Synthetic oligonucleotide
  Target: SCNA; (+) strand; PAM type: YTN; PAM sequence: TTG
aaacacaaaatacaatacaa

SEQ ID NO: 72978 - DNA, 20 bp, Artificial Sequence
  Description of Artificial Sequence: Synthetic oligonucleotide
  Target: SCNA; (+) strand; PAM type: YTN; PAM sequence: CTG
cttctttgaaaagataaaca

SEQ ID NO: 72979 - DNA, 20 bp, Artificial Sequence
  Description of Artificial Sequence: Synthetic oligonucleotide
  Target: SCNA; (+) strand; PAM type: YTN; PAM sequence: CTT
ctttgaaaagataaacaaaa

SEQ ID NO: 72980 - DNA, 20 bp, Artificial Sequence
  Description of Artificial Sequence: Synthetic oligonucleotide
  Target: SCNA; (+) strand; PAM type: YTN; PAM sequence: TTC
tttgaaaagataaacaaaat

SEQ ID NO: 72981 - DNA, 20 bp, Artificial Sequence
  Description of Artificial Sequence: Synthetic oligonucleotide
  Target: SCNA; (+) strand; PAM type: YTN; PAM sequence: CTT
tgaaaagataaacaaaatca

SEQ ID NO: 72982 - DNA, 20 bp, Artificial Sequence
  Description of Artificial Sequence: Synthetic oligonucleotide
  Target: SCNA; (+) strand; PAM type: YTN; PAM sequence: TTT
gaaaagataaacaaaatcaa

SEQ ID NO: 72983 - DNA, 20 bp, Artificial Sequence
  Description of Artificial Sequence: Synthetic oligonucleotide
  Target: SCNA; (+) strand; PAM type: YTN; PAM sequence: TTG
aaaagataaacaaaatcaat

SEQ ID NO: 72984 - DNA, 20 bp, Artificial Sequence
  Description of Artificial Sequence: Synthetic oligonucleotide
  Target: SCNA; (+) strand; PAM type: YTN; PAM sequence: TTG
gcaagattaaccaagaaaac

SEQ ID NO: 72985 - DNA, 20 bp, Artificial Sequence
  Description of Artificial Sequence: Synthetic oligonucleotide
  Target: SCNA; (+) strand; PAM type: YTN; PAM sequence: TTA
accaagaaaacaagaaaaaa

SEQ ID NO: 72986 - DNA, 20 bp, Artificial Sequence
  Description of Artificial Sequence: Synthetic oligonucleotide
  Target: SCNA; (+) strand; PAM type: YTN; PAM sequence: CTA
aacaagctcaattagaaatg

SEQ ID NO: 72987 - DNA, 20 bp, Artificial Sequence
  Description of Artificial Sequence: Synthetic oligonucleotide
  Target: SCNA; (+) strand; PAM type: YTN; PAM sequence: CTC
aattagaaatgaaatgggag

SEQ ID NO: 72988 - DNA, 20 bp, Artificial Sequence
  Description of Artificial Sequence: Synthetic oligonucleotide
  Target: SCNA; (+) strand; PAM type: YTN; PAM sequence: TTA
gaaatgaaatgggagatact

SEQ ID NO: 72989 - DNA, 20 bp, Artificial Sequence
  Description of Artificial Sequence: Synthetic oligonucleotide
  Target: SCNA; (+) strand; PAM type: YTN; PAM sequence: CTA
caactgataccacagaaata

SEQ ID NO: 72990 - DNA, 20 bp, Artificial Sequence
  Description of Artificial Sequence: Synthetic oligonucleotide
  Target: SCNA; (+) strand; PAM type: YTN; PAM sequence: CTG
ataccacagaaataaaaaag

SEQ ID NO: 72991 - DNA, 20 bp, Artificial Sequence
  Description of Artificial Sequence: Synthetic oligonucleotide
  Target: SCNA; (+) strand; PAM type: YTN; PAM sequence: TTA
ttcaagactactgtgaacac

SEQ ID NO: 72992 - DNA, 20 bp, Artificial Sequence
  Description of Artificial Sequence: Synthetic oligonucleotide
  Target: SCNA; (+) strand; PAM type: YTN; PAM sequence: TTC
aagactactgtgaacacatt

SEQ ID NO: 72993 - DNA, 20 bp, Artificial Sequence
  Description of Artificial Sequence: Synthetic oligonucleotide
  Target: SCNA; (+) strand; PAM type: YTN; PAM sequence: CTA
ctgtgaacacatttacgtac

SEQ ID NO: 72994 - DNA, 20 bp, Artificial Sequence
  Description of Artificial Sequence: Synthetic oligonucleotide
  Target: SCNA; (+) strand; PAM type: YTN; PAM sequence: CTG
tgaacacatttacgtacaca

SEQ ID NO: 72995 - DNA, 20 bp, Artificial Sequence
  Description of Artificial Sequence: Synthetic oligonucleotide
  Target: SCNA; (+) strand; PAM type: YTN; PAM sequence: TTT
acgtacacaaactagaaaac

SEQ ID NO: 72996 - DNA, 20 bp, Artificial Sequence
  Description of Artificial Sequence: Synthetic oligonucleotide
  Target: SCNA; (+) strand; PAM type: YTN; PAM sequence: TTA
cgtacacaaactagaaaacc

SEQ ID NO: 72997 - DNA, 20 bp, Artificial Sequence
  Description of Artificial Sequence: Synthetic oligonucleotide
  Target: SCNA; (+) strand; PAM type: YTN; PAM sequence: CTA
gaaaaccaagaagagatgga

SEQ ID NO: 72998 - DNA, 20 bp, Artificial Sequence
  Description of Artificial Sequence: Synthetic oligonucleotide
  Target: SCNA; (+) strand; PAM type: YTN; PAM sequence: TTC
ctgcatatatacaaacctcc

SEQ ID NO: 72999 - DNA, 20 bp, Artificial Sequence
  Description of Artificial Sequence: Synthetic oligonucleotide
  Target: SCNA; (+) strand; PAM type: YTN; PAM sequence: CTG
catatatacaaacctcctag

SEQ ID NO: 73000 - DNA, 20 bp, Artificial Sequence
  Description of Artificial Sequence: Synthetic oligonucleotide
  Target: SCNA; (+) strand; PAM type: YTN; PAM sequence: CTC
ctagattaaaacaggaagaa

SEQ ID NO: 73001 - DNA, 20 bp, Artificial Sequence
  Description of Artificial Sequence: Synthetic oligonucleotide
  Target: SCNA; (+) strand; PAM type: YTN; PAM sequence: CTA
gattaaaacaggaagaaata

SEQ ID NO: 73002 - DNA, 20 bp, Artificial Sequence
  Description of Artificial Sequence: Synthetic oligonucleotide
  Target: SCNA; (+) strand; PAM type: YTN; PAM sequence: TTA
aaacaggaagaaatagaaat

SEQ ID NO: 73003 - DNA, 20 bp, Artificial Sequence
  Description of Artificial Sequence: Synthetic oligonucleotide
  Target: SCNA; (+) strand; PAM type: YTN; PAM sequence: TTA
ttaacagaccaataatgcat

SEQ ID NO: 73004 - DNA, 20 bp, Artificial Sequence
  Description of Artificial Sequence: Synthetic oligonucleotide
  Target: SCNA; (+) strand; PAM type: YTN; PAM sequence: TTA
acagaccaataatgcatagt

SEQ ID NO: 73005 - DNA, 20 bp, Artificial Sequence
  Description of Artificial Sequence: Synthetic oligonucleotide
  Target: SCNA; (+) strand; PAM type: YTN; PAM sequence: CTA
ggaccagatggattcacagg

SEQ ID NO: 73006 - DNA, 20 bp, Artificial Sequence
  Description of Artificial Sequence: Synthetic oligonucleotide
  Target: SCNA; (+) strand; PAM type: YTN; PAM sequence: TTC
acaggtgaatgctatcagaa

SEQ ID NO: 73007 - DNA, 20 bp, Artificial Sequence
  Description of Artificial Sequence: Synthetic oligonucleotide
  Target: SCNA; (+) strand; PAM type: YTN; PAM sequence: CTA
tcagaaattcaaagaaaaat

SEQ ID NO: 73008 - DNA, 20 bp, Artificial Sequence
  Description of Artificial Sequence: Synthetic oligonucleotide
  Target: SCNA; (+) strand; PAM type: YTN; PAM sequence: TTC
aaagaaaaattggtacaaat

SEQ ID NO: 73009 - DNA, 20 bp, Artificial Sequence
  Description of Artificial Sequence: Synthetic oligonucleotide
  Target: SCNA; (+) strand; PAM type: YTN; PAM sequence: TTG
gtacaaattctattgaaact

SEQ ID NO: 73010 - DNA, 20 bp, Artificial Sequence
  Description of Artificial Sequence: Synthetic oligonucleotide
  Target: SCNA; (+) strand; PAM type: YTN; PAM sequence: TTC
tattgaaactgttccaaaag

SEQ ID NO: 73011 - DNA, 20 bp, Artificial Sequence
  Description of Artificial Sequence: Synthetic oligonucleotide
  Target: SCNA; (+) strand; PAM type: YTN; PAM sequence: CTA
ttgaaactgttccaaaagat

SEQ ID NO: 73012 - DNA, 20 bp, Artificial Sequence
  Description of Artificial Sequence: Synthetic oligonucleotide
  Target: SCNA; (+) strand; PAM type: YTN; PAM sequence: TTG
aaactgttccaaaagataga

SEQ ID NO: 73013 - DNA, 20 bp, Artificial Sequence
  Description of Artificial Sequence: Synthetic oligonucleotide
  Target: SCNA; (+) strand; PAM type: YTN; PAM sequence: CTG
ttccaaaagatagagacaga

SEQ ID NO: 73014 - DNA, 20 bp, Artificial Sequence
  Description of Artificial Sequence: Synthetic oligonucleotide
  Target: SCNA; (+) strand; PAM type: YTN; PAM sequence: TTC
caaaagatagagacagaggg

SEQ ID NO: 73015 - DNA, 20 bp, Artificial Sequence
  Description of Artificial Sequence: Synthetic oligonucleotide
  Target: SCNA; (+) strand; PAM type: YTN; PAM sequence: CTC
cctaaatcattctatgaagc

SEQ ID NO: 73016 - DNA, 20 bp, Artificial Sequence
  Description of Artificial Sequence: Synthetic oligonucleotide
  Target: SCNA; (+) strand; PAM type: YTN; PAM sequence: CTA
aatcattctatgaagccagt

SEQ ID NO: 73017 - DNA, 20 bp, Artificial Sequence
  Description of Artificial Sequence: Synthetic oligonucleotide
  Target: SCNA; (+) strand; PAM type: YTN; PAM sequence: TTC
tatgaagccagtattaccct

SEQ ID NO: 73018 - DNA, 20 bp, Artificial Sequence
  Description of Artificial Sequence: Synthetic oligonucleotide
  Target: SCNA; (+) strand; PAM type: YTN; PAM sequence: CTA
tgaagccagtattaccctaa

SEQ ID NO: 73019 - DNA, 20 bp, Artificial Sequence
  Description of Artificial Sequence: Synthetic oligonucleotide
  Target: SCNA; (+) strand; PAM type: YTN; PAM sequence: TTA
ccctaatatcaaaaccagaa

SEQ ID NO: 73020 - DNA, 20 bp, Artificial Sequence
  Description of Artificial Sequence: Synthetic oligonucleotide
  Target: SCNA; (+) strand; PAM type: YTN; PAM sequence: CTA
atatcaaaaccagaaaagga

SEQ ID NO: 73021 - DNA, 20 bp, Artificial Sequence
  Description of Artificial Sequence: Synthetic oligonucleotide
  Target: SCNA; (+) strand; PAM type: YTN; PAM sequence: CTA
cagaccaatatccctgatga

SEQ ID NO: 73022 - DNA, 20 bp, Artificial Sequence
  Description of Artificial Sequence: Synthetic oligonucleotide
  Target: SCNA; (+) strand; PAM type: YTN; PAM sequence: CTG
atgaacagagatgtaaaaat

SEQ ID NO: 73023 - DNA, 20 bp, Artificial Sequence
  Description of Artificial Sequence: Synthetic oligonucleotide
  Target: SCNA; (+) strand; PAM type: YTN; PAM sequence: CTC
aataaaatactagctaaatg

SEQ ID NO: 73024 - DNA, 20 bp, Artificial Sequence
  Description of Artificial Sequence: Synthetic oligonucleotide
  Target: SCNA; (+) strand; PAM type: YTN; PAM sequence: CTA
gctaaatgaatccagcagca

SEQ ID NO: 73025 - DNA, 20 bp, Artificial Sequence
  Description of Artificial Sequence: Synthetic oligonucleotide
  Target: SCNA; (+) strand; PAM type: YTN; PAM sequence: CTA
aatgaatccagcagcatatc

SEQ ID NO: 73026 - DNA, 20 bp, Artificial Sequence
  Description of Artificial Sequence: Synthetic oligonucleotide
  Target: SCNA; (+) strand; PAM type: YTN; PAM sequence: TTT
cataccggggatgcagggtt

SEQ ID NO: 73027 - DNA, 20 bp, Artificial Sequence
  Description of Artificial Sequence: Synthetic oligonucleotide
  Target: SCNA; (+) strand; PAM type: YTN; PAM sequence: TTC
ataccggggatgcagggttg

SEQ ID NO: 73028 - DNA, 20 bp, Artificial Sequence
  Description of Artificial Sequence: Synthetic oligonucleotide
  Target: SCNA; (+) strand; PAM type: YTN; PAM sequence: TTG
ctttaacatatgcaagtcaa

SEQ ID NO: 73029 - DNA, 20 bp, Artificial Sequence
  Description of Artificial Sequence: Synthetic oligonucleotide
  Target: SCNA; (+) strand; PAM type: YTN; PAM sequence: CTT
taacatatgcaagtcaataa

SEQ ID NO: 73030 - DNA, 20 bp, Artificial Sequence
  Description of Artificial Sequence: Synthetic oligonucleotide
  Target: SCNA; (+) strand; PAM type: YTN; PAM sequence: TTT
aacatatgcaagtcaataaa

SEQ ID NO: 73031 - DNA, 20 bp, Artificial Sequence
  Description of Artificial Sequence: Synthetic oligonucleotide
  Target: SCNA; (+) strand; PAM type: YTN; PAM sequence: TTA
acatatgcaagtcaataaat

SEQ ID NO: 73032 - DNA, 20 bp, Artificial Sequence
  Description of Artificial Sequence: Synthetic oligonucleotide
  Target: SCNA; (+) strand; PAM type: YTN; PAM sequence: CTC
aatagatgcagaaaaagcat

SEQ ID NO: 73033 - DNA, 20 bp, Artificial Sequence
  Description of Artificial Sequence: Synthetic oligonucleotide
  Target: SCNA; (+) strand; PAM type: YTN; PAM sequence: TTT
gacaaaattcagtattgctt

SEQ ID NO: 73034 - DNA, 20 bp, Artificial Sequence
  Description of Artificial Sequence: Synthetic oligonucleotide
  Target: SCNA; (+) strand; PAM type: YTN; PAM sequence: TTG
acaaaattcagtattgcttt

SEQ ID NO: 73035 - DNA, 20 bp, Artificial Sequence
  Description of Artificial Sequence: Synthetic oligonucleotide
  Target: SCNA; (+) strand; PAM type: YTN; PAM sequence: TTC
agtattgctttatgattaaa

SEQ ID NO: 73036 - DNA, 20 bp, Artificial Sequence
  Description of Artificial Sequence: Synthetic oligonucleotide
  Target: SCNA; (+) strand; PAM type: YTN; PAM sequence: TTG
ctttatgattaaaaccctca

SEQ ID NO: 73037 - DNA, 20 bp, Artificial Sequence
  Description of Artificial Sequence: Synthetic oligonucleotide
  Target: SCNA; (+) strand; PAM type: YTN; PAM sequence: CTT
tatgattaaaaccctcagca

SEQ ID NO: 73038 - DNA, 20 bp, Artificial Sequence
  Description of Artificial Sequence: Synthetic oligonucleotide
  Target: SCNA; (+) strand; PAM type: YTN; PAM sequence: TTT
atgattaaaaccctcagcaa

SEQ ID NO: 73039 - DNA, 20 bp, Artificial Sequence
  Description of Artificial Sequence: Synthetic oligonucleotide
  Target: SCNA; (+) strand; PAM type: YTN; PAM sequence: TTA
tgattaaaaccctcagcaaa

SEQ ID NO: 73040 - DNA, 20 bp, Artificial Sequence
  Description of Artificial Sequence: Synthetic oligonucleotide
  Target: SCNA; (+) strand; PAM type: YTN; PAM sequence: TTA
aaaccctcagcaaaactggc

SEQ ID NO: 73041 - DNA, 20 bp, Artificial Sequence
  Description of Artificial Sequence: Synthetic oligonucleotide
  Target: SCNA; (+) strand; PAM type: YTN; PAM sequence: CTC
agcaaaactggcatataaga

SEQ ID NO: 73042 - DNA, 20 bp, Artificial Sequence
  Description of Artificial Sequence: Synthetic oligonucleotide
  Target: SCNA; (+) strand; PAM type: YTN; PAM sequence: CTG
gcatataagatacacacctt

SEQ ID NO: 73043 - DNA, 20 bp, Artificial Sequence
  Description of Artificial Sequence: Synthetic oligonucleotide
  Target: SCNA; (+) strand; PAM type: YTN; PAM sequence: CTT
aaggtaataaaagccactta

SEQ ID NO: 73044 - DNA, 20 bp, Artificial Sequence
  Description of Artificial Sequence: Synthetic oligonucleotide
  Target: SCNA; (+) strand; PAM type: YTN; PAM sequence: TTA
aggtaataaaagccacttat

SEQ ID NO: 73045 - DNA, 20 bp, Artificial Sequence
  Description of Artificial Sequence: Synthetic oligonucleotide
  Target: SCNA; (+) strand; PAM type: YTN; PAM sequence: CTT
atgacaaacccacagccaac

SEQ ID NO: 73046 - DNA, 20 bp, Artificial Sequence
  Description of Artificial Sequence: Synthetic oligonucleotide
  Target: SCNA; (+) strand; PAM type: YTN; PAM sequence: TTA
tgacaaacccacagccaaca

SEQ ID NO: 73047 - DNA, 20 bp, Artificial Sequence
  Description of Artificial Sequence: Synthetic oligonucleotide
  Target: SCNA; (+) strand; PAM type: YTN; PAM sequence: TTA
tattgaacgggggaaaattt

SEQ ID NO: 73048 - DNA, 20 bp, Artificial Sequence
  Description of Artificial Sequence: Synthetic oligonucleotide
  Target: SCNA; (+) strand; PAM type: YTN; PAM sequence: TTG
aacgggggaaaatttgaaag

SEQ ID NO: 73049 - DNA, 20 bp, Artificial Sequence
  Description of Artificial Sequence: Synthetic oligonucleotide
  Target: SCNA; (+) strand; PAM type: YTN; PAM sequence: TTT
gaaagcatttcccccgagaa

SEQ ID NO: 73050 - DNA, 20 bp, Artificial Sequence
  Description of Artificial Sequence: Synthetic oligonucleotide
  Target: SCNA; (+) strand; PAM type: YTN; PAM sequence: TTG
aaagcatttcccccgagaac

SEQ ID NO: 73051 - DNA, 20 bp, Artificial Sequence
  Description of Artificial Sequence: Synthetic oligonucleotide
  Target: SCNA; (+) strand; PAM type: YTN; PAM sequence: TTT
cccccgagaactggaataag

SEQ ID NO: 73052 - DNA, 20 bp, Artificial Sequence
  Description of Artificial Sequence: Synthetic oligonucleotide
  Target: SCNA; (+) strand; PAM type: YTN; PAM sequence: TTC
ccccgagaactggaataaga

SEQ ID NO: 73053 - DNA, 20 bp, Artificial Sequence
  Description of Artificial Sequence: Synthetic oligonucleotide
  Target: SCNA; (+) strand; PAM type: YTN; PAM sequence: CTG
gaataagacaagaatgcctg

SEQ ID NO: 73054 - DNA, 20 bp, Artificial Sequence
  Description of Artificial Sequence: Synthetic oligonucleotide
  Target: SCNA; (+) strand; PAM type: YTN; PAM sequence: CTG
ctttcaccacttctattcaa

SEQ ID NO: 73055 - DNA, 20 bp, Artificial Sequence
  Description of Artificial Sequence: Synthetic oligonucleotide
  Target: SCNA; (+) strand; PAM type: YTN; PAM sequence: CTT
tcaccacttctattcaacat

SEQ ID NO: 73056 - DNA, 20 bp, Artificial Sequence
  Description of Artificial Sequence: Synthetic oligonucleotide
  Target: SCNA; (+) strand; PAM type: YTN; PAM sequence: TTT
caccacttctattcaacata

SEQ ID NO: 73057 - DNA, 20 bp, Artificial Sequence
  Description of Artificial Sequence: Synthetic oligonucleotide
  Target: SCNA; (+) strand; PAM type: YTN; PAM sequence: TTC
accacttctattcaacatag

SEQ ID NO: 73058 - DNA, 20 bp, Artificial Sequence
  Description of Artificial Sequence: Synthetic oligonucleotide
  Target: SCNA; (+) strand; PAM type: YTN; PAM sequence: CTT
ctattcaacatagtactgga

SEQ ID NO: 73059 - DNA, 20 bp, Artificial Sequence
  Description of Artificial Sequence: Synthetic oligonucleotide
  Target: SCNA; (+) strand; PAM type: YTN; PAM sequence: TTC
tattcaacatagtactggaa

SEQ ID NO: 73060 - DNA, 20 bp, Artificial Sequence
  Description of Artificial Sequence: Synthetic oligonucleotide
  Target: SCNA; (+) strand; PAM type: YTN; PAM sequence: CTA
ttcaacatagtactggaaat

SEQ ID NO: 73061 - DNA, 20 bp, Artificial Sequence
  Description of Artificial Sequence: Synthetic oligonucleotide
  Target: SCNA; (+) strand; PAM type: YTN; PAM sequence: TTC
aacatagtactggaaatcct

SEQ ID NO: 73062 - DNA, 20 bp, Artificial Sequence
  Description of Artificial Sequence: Synthetic oligonucleotide
  Target: SCNA; (+) strand; PAM type: YTN; PAM sequence: CTG
gaaatcctagccagagcaat

SEQ ID NO: 73063 - DNA, 20 bp, Artificial Sequence
  Description of Artificial Sequence: Synthetic oligonucleotide
  Target: SCNA; (+) strand; PAM type: YTN; PAM sequence: CTA
gccagagcaatcagacaaga

SEQ ID NO: 73064 - DNA, 20 bp, Artificial Sequence
  Description of Artificial Sequence: Synthetic oligonucleotide
  Target: SCNA; (+) strand; PAM type: YTN; PAM sequence: CTG
ctaaagaggaagtcaaactg

SEQ ID NO: 73065 - DNA, 20 bp, Artificial Sequence
  Description of Artificial Sequence: Synthetic oligonucleotide
  Target: SCNA; (+) strand; PAM type: YTN; PAM sequence: CTA
aagaggaagtcaaactgttg

SEQ ID NO: 73066 - DNA, 20 bp, Artificial Sequence
  Description of Artificial Sequence: Synthetic oligonucleotide
  Target: SCNA; (+) strand; PAM type: YTN; PAM sequence: CTG
ttgctctttgccgatgatat

SEQ ID NO: 73067 - DNA, 20 bp, Artificial Sequence
  Description of Artificial Sequence: Synthetic oligonucleotide
  Target: SCNA; (+) strand; PAM type: YTN; PAM sequence: TTG
ctctttgccgatgatatgtt

SEQ ID NO: 73068 - DNA, 20 bp, Artificial Sequence
  Description of Artificial Sequence: Synthetic oligonucleotide
  Target: SCNA; (+) strand; PAM type: YTN; PAM sequence: CTC
tttgccgatgatatgtttgt

SEQ ID NO: 73069 - DNA, 20 bp, Artificial Sequence
  Description of Artificial Sequence: Synthetic oligonucleotide
  Target: SCNA; (+) strand; PAM type: YTN; PAM sequence: CTT
tgccgatgatatgtttgtat

SEQ ID NO: 73070 - DNA, 20 bp, Artificial Sequence
  Description of Artificial Sequence: Synthetic oligonucleotide
  Target: SCNA; (+) strand; PAM type: YTN; PAM sequence: TTT
gccgatgatatgtttgtata

SEQ ID NO: 73071 - DNA, 20 bp, Artificial Sequence
  Description of Artificial Sequence: Synthetic oligonucleotide
  Target: SCNA; (+) strand; PAM type: YTN; PAM sequence: TTG
ccgatgatatgtttgtatac

SEQ ID NO: 73072 - DNA, 20 bp, Artificial Sequence
  Description of Artificial Sequence: Synthetic oligonucleotide
  Target: SCNA; (+) strand; PAM type: YTN; PAM sequence: TTT
gtatacctagaaaacctaaa

SEQ ID NO: 73073 - DNA, 20 bp, Artificial Sequence
  Description of Artificial Sequence: Synthetic oligonucleotide
  Target: SCNA; (+) strand; PAM type: YTN; PAM sequence: TTG
tatacctagaaaacctaaag

SEQ ID NO: 73074 - DNA, 20 bp, Artificial Sequence
  Description of Artificial Sequence: Synthetic oligonucleotide
  Target: SCNA; (+) strand; PAM type: YTN; PAM sequence: CTA
gaaaacctaaagactcatcc

SEQ ID NO: 73075 - DNA, 20 bp, Artificial Sequence
  Description of Artificial Sequence: Synthetic oligonucleotide
  Target: SCNA; (+) strand; PAM type: YTN; PAM sequence: CTA
aagactcatccaaaaagctc

SEQ ID NO: 73076 - DNA, 20 bp, Artificial Sequence
  Description of Artificial Sequence: Synthetic oligonucleotide
  Target: SCNA; (+) strand; PAM type: YTN; PAM sequence: CTC
atccaaaaagctcctagatc

SEQ ID NO: 73077 - DNA, 20 bp, Artificial Sequence
  Description of Artificial Sequence: Synthetic oligonucleotide
  Target: SCNA; (+) strand; PAM type: YTN; PAM sequence: CTC
ctagatctgataagttaatt

SEQ ID NO: 73078 - DNA, 20 bp, Artificial Sequence
  Description of Artificial Sequence: Synthetic oligonucleotide
  Target: SCNA; (+) strand; PAM type: YTN; PAM sequence: CTA
gatctgataagttaattcag

SEQ ID NO: 73079 - DNA, 20 bp, Artificial Sequence
  Description of Artificial Sequence: Synthetic oligonucleotide
  Target: SCNA; (+) strand; PAM type: YTN; PAM sequence: CTG
ataagttaattcagtaaagt

SEQ ID NO: 73080 - DNA, 20 bp, Artificial Sequence
  Description of Artificial Sequence: Synthetic oligonucleotide
  Target: SCNA; (+) strand; PAM type: YTN; PAM sequence: TTA
attcagtaaagtttccagat

SEQ ID NO: 73081 - DNA, 20 bp, Artificial Sequence
  Description of Artificial Sequence: Synthetic oligonucleotide
  Target: SCNA; (+) strand; PAM type: YTN; PAM sequence: TTC
agtaaagtttccagatacaa

SEQ ID NO: 73082 - DNA, 20 bp, Artificial Sequence
  Description of Artificial Sequence: Synthetic oligonucleotide
  Target: SCNA; (+) strand; PAM type: YTN; PAM sequence: TTT
ccagatacaaaatcaatgta

SEQ ID NO: 73083 - DNA, 20 bp, Artificial Sequence
  Description of Artificial Sequence: Synthetic oligonucleotide
  Target: SCNA; (+) strand; PAM type: YTN; PAM sequence: TTC
cagatacaaaatcaatgtac

SEQ ID NO: 73084 - DNA, 20 bp, Artificial Sequence
  Description of Artificial Sequence: Synthetic oligonucleotide
  Target: SCNA; (+) strand; PAM type: YTN; PAM sequence: CTA
tacaccaacagcaacaaaac

SEQ ID NO: 73085 - DNA, 20 bp, Artificial Sequence
  Description of Artificial Sequence: Synthetic oligonucleotide
  Target: SCNA; (+) strand; PAM type: YTN; PAM sequence: CTG
agaatcaaattaagaacttg

SEQ ID NO: 73086 - DNA, 20 bp, Artificial Sequence
  Description of Artificial Sequence: Synthetic oligonucleotide
  Target: SCNA; (+) strand; PAM type: YTN; PAM sequence: TTA
agaacttgagcctttttaca

SEQ ID NO: 73087 - DNA, 20 bp, Artificial Sequence
  Description of Artificial Sequence: Synthetic oligonucleotide
  Target: SCNA; (+) strand; PAM type: YTN; PAM sequence: CTT
gagcctttttacaacagctg

SEQ ID NO: 73088 - DNA, 20 bp, Artificial Sequence
  Description of Artificial Sequence: Synthetic oligonucleotide
  Target: SCNA; (+) strand; PAM type: YTN; PAM sequence: TTG
agcctttttacaacagctgc

SEQ ID NO: 73089 - DNA, 20 bp, Artificial Sequence
  Description of Artificial Sequence: Synthetic oligonucleotide
  Target: SCNA; (+) strand; PAM type: YTN; PAM sequence: CTT
tttacaacagctgcaaaaaa

SEQ ID NO: 73090 - DNA, 20 bp, Artificial Sequence
  Description of Artificial Sequence: Synthetic oligonucleotide
  Target: SCNA; (+) strand; PAM type: YTN; PAM sequence: TTT
ttacaacagctgcaaaaaaa

SEQ ID NO: 73091 - DNA, 20 bp, Artificial Sequence
  Description of Artificial Sequence: Synthetic oligonucleotide
  Target: SCNA; (+) strand; PAM type: YTN; PAM sequence: TTT
tacaacagctgcaaaaaaaa

SEQ ID NO: 73092 - DNA, 20 bp, Artificial Sequence
  Description of Artificial Sequence: Synthetic oligonucleotide
  Target: SCNA; (+) strand; PAM type: YTN; PAM sequence: TTT
acaacagctgcaaaaaaaaa

SEQ ID NO: 73093 - DNA, 20 bp, Artificial Sequence
  Description of Artificial Sequence: Synthetic oligonucleotide
  Target: SCNA; (+) strand; PAM type: YTN; PAM sequence: TTA
caacagctgcaaaaaaaaaa

SEQ ID NO: 73094 - DNA, 20 bp, Artificial Sequence
  Description of Artificial Sequence: Synthetic oligonucleotide
  Target: SCNA; (+) strand; PAM type: YTN; PAM sequence: CTG
caaaaaaaaaaaatgcttag

SEQ ID NO: 73095 - DNA, 20 bp, Artificial Sequence
  Description of Artificial Sequence: Synthetic oligonucleotide
  Target: SCNA; (+) strand; PAM type: YTN; PAM sequence: CTT
aggaatatacctaaccaaag

SEQ ID NO: 73096 - DNA, 20 bp, Artificial Sequence
  Description of Artificial Sequence: Synthetic oligonucleotide
  Target: SCNA; (+) strand; PAM type: YTN; PAM sequence: TTA
ggaatatacctaaccaaaga

SEQ ID NO: 73097 - DNA, 20 bp, Artificial Sequence
  Description of Artificial Sequence: Synthetic oligonucleotide
  Target: SCNA; (+) strand; PAM type: YTN; PAM sequence: CTA
accaaagaggtggaagatct

SEQ ID NO: 73098 - DNA, 20 bp, Artificial Sequence
  Description of Artificial Sequence: Synthetic oligonucleotide
  Target: SCNA; (+) strand; PAM type: YTN; PAM sequence: CTC
tacaggaaaactacaaaata

SEQ ID NO: 73099 - DNA, 20 bp, Artificial Sequence
  Description of Artificial Sequence: Synthetic oligonucleotide
  Target: SCNA; (+) strand; PAM type: YTN; PAM sequence: CTA
caggaaaactacaaaatatt

SEQ ID NO: 73100 - DNA, 20 bp, Artificial Sequence
  Description of Artificial Sequence: Synthetic oligonucleotide
  Target: SCNA; (+) strand; PAM type: YTN; PAM sequence: CTA
caaaatattgctgaaagaaa

SEQ ID NO: 73101 - DNA, 20 bp, Artificial Sequence
  Description of Artificial Sequence: Synthetic oligonucleotide
  Target: SCNA; (+) strand; PAM type: YTN; PAM sequence: TTG
ctgaaagaaatcacagacaa

SEQ ID NO: 73102 - DNA, 20 bp, Artificial Sequence
  Description of Artificial Sequence: Synthetic oligonucleotide
  Target: SCNA; (+) strand; PAM type: YTN; PAM sequence: CTG
aaagaaatcacagacaacag

SEQ ID NO: 73103 - DNA, 20 bp, Artificial Sequence
  Description of Artificial Sequence: Synthetic oligonucleotide
  Target: SCNA; (+) strand; PAM type: YTN; PAM sequence: CTA
atgaaaacacatcccttatt

SEQ ID NO: 73104 - DNA, 20 bp, Artificial Sequence
  Description of Artificial Sequence: Synthetic oligonucleotide
  Target: SCNA; (+) strand; PAM type: YTN; PAM sequence: CTT
attcatggattggcagaatc

SEQ ID NO: 73105 - DNA, 20 bp, Artificial Sequence
  Description of Artificial Sequence: Synthetic oligonucleotide
  Target: SCNA; (+) strand; PAM type: YTN; PAM sequence: TTA
ttcatggattggcagaatca

SEQ ID NO: 73106 - DNA, 20 bp, Artificial Sequence
  Description of Artificial Sequence: Synthetic oligonucleotide
  Target: SCNA; (+) strand; PAM type: YTN; PAM sequence: TTC
atggattggcagaatcaata

SEQ ID NO: 73107 - DNA, 20 bp, Artificial Sequence
  Description of Artificial Sequence: Synthetic oligonucleotide
  Target: SCNA; (+) strand; PAM type: YTN; PAM sequence: TTG
gcagaatcaatattgtgaaa

SEQ ID NO: 73108 - DNA, 20 bp, Artificial Sequence
  Description of Artificial Sequence: Synthetic oligonucleotide
  Target: SCNA; (+) strand; PAM type: YTN; PAM sequence: TTG
tgaaaatgagcacactgcca

SEQ ID NO: 73109 - DNA, 20 bp, Artificial Sequence
  Description of Artificial Sequence: Synthetic oligonucleotide
  Target: SCNA; (+) strand; PAM type: YTN; PAM sequence: CTG
ccaaaaacaatctataaatt

SEQ ID NO: 73110 - DNA, 20 bp, Artificial Sequence
  Description of Artificial Sequence: Synthetic oligonucleotide
  Target: SCNA; (+) strand; PAM type: YTN; PAM sequence: CTA
taaattcaatgcgactccca

SEQ ID NO: 73111 - DNA, 20 bp, Artificial Sequence
  Description of Artificial Sequence: Synthetic oligonucleotide
  Target: SCNA; (+) strand; PAM type: YTN; PAM sequence: TTC
aatgcgactcccatcaaaat

SEQ ID NO: 73112 - DNA, 20 bp, Artificial Sequence
  Description of Artificial Sequence: Synthetic oligonucleotide
  Target: SCNA; (+) strand; PAM type: YTN; PAM sequence: CTC
ccatcaaaatgccaccatca

SEQ ID NO: 73113 - DNA, 20 bp, Artificial Sequence
  Description of Artificial Sequence: Synthetic oligonucleotide
  Target: SCNA; (+) strand; PAM type: YTN; PAM sequence: TTC
ttcaaagaacaagaaaaaaa

SEQ ID NO: 73114 - DNA, 20 bp, Artificial Sequence
  Description of Artificial Sequence: Synthetic oligonucleotide
  Target: SCNA; (+) strand; PAM type: YTN; PAM sequence: CTT
caaagaacaagaaaaaaaat

SEQ ID NO: 73115 - DNA, 20 bp, Artificial Sequence
  Description of Artificial Sequence: Synthetic oligonucleotide
  Target: SCNA; (+) strand; PAM type: YTN; PAM sequence: TTC
aaagaacaagaaaaaaaatc

SEQ ID NO: 73116 - DNA, 20 bp, Artificial Sequence
  Description of Artificial Sequence: Synthetic oligonucleotide
  Target: SCNA; (+) strand; PAM type: YTN; PAM sequence: CTT
aaaattcacatggaacaaaa

SEQ ID NO: 73117 - DNA, 20 bp, Artificial Sequence
  Description of Artificial Sequence: Synthetic oligonucleotide
  Target: SCNA; (+) strand; PAM type: YTN; PAM sequence: TTA
aaattcacatggaacaaaac

SEQ ID NO: 73118 - DNA, 20 bp, Artificial Sequence
  Description of Artificial Sequence: Synthetic oligonucleotide
  Target: SCNA; (+) strand; PAM type: YTN; PAM sequence: TTC
acatggaacaaaacaacagc

SEQ ID NO: 73119 - DNA, 20 bp, Artificial Sequence
  Description of Artificial Sequence: Synthetic oligonucleotide
  Target: SCNA; (+) strand; PAM type: YTN; PAM sequence: CTA
agcaaaaaataacaaatctg

SEQ ID NO: 73120 - DNA, 20 bp, Artificial Sequence
  Description of Artificial Sequence: Synthetic oligonucleotide
  Target: SCNA; (+) strand; PAM type: YTN; PAM sequence: CTG
gaggcactagattacccaac

SEQ ID NO: 73121 - DNA, 20 bp, Artificial Sequence
  Description of Artificial Sequence: Synthetic oligonucleotide
  Target: SCNA; (+) strand; PAM type: YTN; PAM sequence: CTA
gattacccaacttcaaacta

SEQ ID NO: 73122 - DNA, 20 bp, Artificial Sequence
  Description of Artificial Sequence: Synthetic oligonucleotide
  Target: SCNA; (+) strand; PAM type: YTN; PAM sequence: TTA
cccaacttcaaactatacta

SEQ ID NO: 73123 - DNA, 20 bp, Artificial Sequence
  Description of Artificial Sequence: Synthetic oligonucleotide
  Target: SCNA; (+) strand; PAM type: YTN; PAM sequence: CTT
caaactatactacaagacta

SEQ ID NO: 73124 - DNA, 20 bp, Artificial Sequence
  Description of Artificial Sequence: Synthetic oligonucleotide
  Target: SCNA; (+) strand; PAM type: YTN; PAM sequence: TTC
aaactatactacaagactat

SEQ ID NO: 73125 - DNA, 20 bp, Artificial Sequence
  Description of Artificial Sequence: Synthetic oligonucleotide
  Target: SCNA; (+) strand; PAM type: YTN; PAM sequence: CTA
tactacaagactatagttag

SEQ ID NO: 73126 - DNA, 20 bp, Artificial Sequence
  Description of Artificial Sequence: Synthetic oligonucleotide
  Target: SCNA; (+) strand; PAM type: YTN; PAM sequence: CTA
caagactatagttaggaaaa

SEQ ID NO: 73127 - DNA, 20 bp, Artificial Sequence
  Description of Artificial Sequence: Synthetic oligonucleotide
  Target: SCNA; (+) strand; PAM type: YTN; PAM sequence: CTA
tagttaggaaaacagcatgg

SEQ ID NO: 73128 - DNA, 20 bp, Artificial Sequence
  Description of Artificial Sequence: Synthetic oligonucleotide
  Target: SCNA; (+) strand; PAM type: YTN; PAM sequence: TTA
ggaaaacagcatggtactac

SEQ ID NO: 73129 - DNA, 20 bp, Artificial Sequence
  Description of Artificial Sequence: Synthetic oligonucleotide
  Target: SCNA; (+) strand; PAM type: YTN; PAM sequence: CTA
ctataaaaatagacatgtag

SEQ ID NO: 73130 - DNA, 20 bp, Artificial Sequence
  Description of Artificial Sequence: Synthetic oligonucleotide
  Target: SCNA; (+) strand; PAM type: YTN; PAM sequence: CTA
taaaaatagacatgtagatc

SEQ ID NO: 73131 - DNA, 20 bp, Artificial Sequence
  Description of Artificial Sequence: Synthetic oligonucleotide
  Target: SCNA; (+) strand; PAM type: YTN; PAM sequence: CTA
aatacttacagccaactgat

SEQ ID NO: 73132 - DNA, 20 bp, Artificial Sequence
  Description of Artificial Sequence: Synthetic oligonucleotide
  Target: SCNA; (+) strand; PAM type: YTN; PAM sequence: CTT
acagccaactgatcttcaac

SEQ ID NO: 73133 - DNA, 20 bp, Artificial Sequence
  Description of Artificial Sequence: Synthetic oligonucleotide
  Target: SCNA; (+) strand; PAM type: YTN; PAM sequence: TTA
cagccaactgatcttcaaca

SEQ ID NO: 73134 - DNA, 20 bp, Artificial Sequence
  Description of Artificial Sequence: Synthetic oligonucleotide
  Target: SCNA; (+) strand; PAM type: YTN; PAM sequence: CTG
atcttcaacaaagcaaacaa

SEQ ID NO: 73135 - DNA, 20 bp, Artificial Sequence
  Description of Artificial Sequence: Synthetic oligonucleotide
  Target: SCNA; (+) strand; PAM type: YTN; PAM sequence: CTT
caacaaagcaaacaaaaaca

SEQ ID NO: 73136 - DNA, 20 bp, Artificial Sequence
  Description of Artificial Sequence: Synthetic oligonucleotide
  Target: SCNA; (+) strand; PAM type: YTN; PAM sequence: TTC
aacaaagcaaacaaaaacat

SEQ ID NO: 73137 - DNA, 20 bp, Artificial Sequence
  Description of Artificial Sequence: Synthetic oligonucleotide
  Target: SCNA; (+) strand; PAM type: YTN; PAM sequence: CTA
ttcaacaaatggtgttggga

SEQ ID NO: 73138 - DNA, 20 bp, Artificial Sequence
  Description of Artificial Sequence: Synthetic oligonucleotide
  Target: SCNA; (+) strand; PAM type: YTN; PAM sequence: TTC
aacaaatggtgttgggataa

SEQ ID NO: 73139 - DNA, 20 bp, Artificial Sequence
  Description of Artificial Sequence: Synthetic oligonucleotide
  Target: SCNA; (+) strand; PAM type: YTN; PAM sequence: TTG
ggataattggcaagccacat

SEQ ID NO: 73140 - DNA, 20 bp, Artificial Sequence
  Description of Artificial Sequence: Synthetic oligonucleotide
  Target: SCNA; (+) strand; PAM type: YTN; PAM sequence: TTG
gcaagccacatgtagaagaa

SEQ ID NO: 73141 - DNA, 20 bp, Artificial Sequence
  Description of Artificial Sequence: Synthetic oligonucleotide
  Target: SCNA; (+) strand; PAM type: YTN; PAM sequence: CTG
gatcctcatctctcaactta

SEQ ID NO: 73142 - DNA, 20 bp, Artificial Sequence
  Description of Artificial Sequence: Synthetic oligonucleotide
  Target: SCNA; (+) strand; PAM type: YTN; PAM sequence: CTC
atctctcaacttatacaaaa

SEQ ID NO: 73143 - DNA, 20 bp, Artificial Sequence
  Description of Artificial Sequence: Synthetic oligonucleotide
  Target: SCNA; (+) strand; PAM type: YTN; PAM sequence: CTC
tcaacttatacaaaaatcca

SEQ ID NO: 73144 - DNA, 20 bp, Artificial Sequence
  Description of Artificial Sequence: Synthetic oligonucleotide
  Target: SCNA; (+) strand; PAM type: YTN; PAM sequence: CTC
aacttatacaaaaatccact

SEQ ID NO: 73145 - DNA, 20 bp, Artificial Sequence
  Description of Artificial Sequence: Synthetic oligonucleotide
  Target: SCNA; (+) strand; PAM type: YTN; PAM sequence: CTT
atacaaaaatccactcaaga

SEQ ID NO: 73146 - DNA, 20 bp, Artificial Sequence
  Description of Artificial Sequence: Synthetic oligonucleotide
  Target: SCNA; (+) strand; PAM type: YTN; PAM sequence: TTA
tacaaaaatccactcaagat

SEQ ID NO: 73147 - DNA, 20 bp, Artificial Sequence
  Description of Artificial Sequence: Synthetic oligonucleotide
  Target: SCNA; (+) strand; PAM type: YTN; PAM sequence: CTC
aagatggatcaaagacttaa

SEQ ID NO: 73148 - DNA, 20 bp, Artificial Sequence
  Description of Artificial Sequence: Synthetic oligonucleotide
  Target: SCNA; (+) strand; PAM type: YTN; PAM sequence: CTT
aaatctaagacccaaaacct

SEQ ID NO: 73149 - DNA, 20 bp, Artificial Sequence
  Description of Artificial Sequence: Synthetic oligonucleotide
  Target: SCNA; (+) strand; PAM type: YTN; PAM sequence: TTA
aatctaagacccaaaacctt

SEQ ID NO: 73150 - DNA, 20 bp, Artificial Sequence
  Description of Artificial Sequence: Synthetic oligonucleotide
  Target: SCNA; (+) strand; PAM type: YTN; PAM sequence: CTA
agacccaaaaccttaaaaat

SEQ ID NO: 73151 - DNA, 20 bp, Artificial Sequence
  Description of Artificial Sequence: Synthetic oligonucleotide
  Target: SCNA; (+) strand; PAM type: YTN; PAM sequence: CTT
aaaaattatagaagataaca

SEQ ID NO: 73152 - DNA, 20 bp, Artificial Sequence
  Description of Artificial Sequence: Synthetic oligonucleotide
  Target: SCNA; (+) strand; PAM type: YTN; PAM sequence: TTA
aaaattatagaagataacat

SEQ ID NO: 73153 - DNA, 20 bp, Artificial Sequence
  Description of Artificial Sequence: Synthetic oligonucleotide
  Target: SCNA; (+) strand; PAM type: YTN; PAM sequence: TTA
tagaagataacattggtaaa

SEQ ID NO: 73154 - DNA, 20 bp, Artificial Sequence
  Description of Artificial Sequence: Synthetic oligonucleotide
  Target: SCNA; (+) strand; PAM type: YTN; PAM sequence: TTG
gtaaaactcttctagacact

SEQ ID NO: 73155 - DNA, 20 bp, Artificial Sequence
  Description of Artificial Sequence: Synthetic oligonucleotide
  Target: SCNA; (+) strand; PAM type: YTN; PAM sequence: CTC
ttctagacactggcttaagc

SEQ ID NO: 73156 - DNA, 20 bp, Artificial Sequence
  Description of Artificial Sequence: Synthetic oligonucleotide
  Target: SCNA; (+) strand; PAM type: YTN; PAM sequence: CTT
ctagacactggcttaagcaa

SEQ ID NO: 73157 - DNA, 20 bp, Artificial Sequence
  Description of Artificial Sequence: Synthetic oligonucleotide
  Target: SCNA; (+) strand; PAM type: YTN; PAM sequence: TTC
tagacactggcttaagcaaa

SEQ ID NO: 73158 - DNA, 20 bp, Artificial Sequence
  Description of Artificial Sequence: Synthetic oligonucleotide
  Target: SCNA; (+) strand; PAM type: YTN; PAM sequence: CTA
gacactggcttaagcaaaga

SEQ ID NO: 73159 - DNA, 20 bp, Artificial Sequence
  Description of Artificial Sequence: Synthetic oligonucleotide
  Target: SCNA; (+) strand; PAM type: YTN; PAM sequence: CTG
gcttaagcaaagagttcatg

SEQ ID NO: 73160 - DNA, 20 bp, Artificial Sequence
  Description of Artificial Sequence: Synthetic oligonucleotide
  Target: SCNA; (+) strand; PAM type: YTN; PAM sequence: CTT
aagcaaagagttcatgacca

SEQ ID NO: 73161 - DNA, 20 bp, Artificial Sequence
  Description of Artificial Sequence: Synthetic oligonucleotide
  Target: SCNA; (+) strand; PAM type: YTN; PAM sequence: TTA
agcaaagagttcatgaccaa

SEQ ID NO: 73162 - DNA, 20 bp, Artificial Sequence
  Description of Artificial Sequence: Synthetic oligonucleotide
  Target: SCNA; (+) strand; PAM type: YTN; PAM sequence: TTC
atgaccaagaaaccaaaagc

SEQ ID NO: 73163 - DNA, 20 bp, Artificial Sequence
  Description of Artificial Sequence: Synthetic oligonucleotide
  Target: SCNA; (+) strand; PAM type: YTN; PAM sequence: CTA
aaactataaagcttctgcac

SEQ ID NO: 73164 - DNA, 20 bp, Artificial Sequence
  Description of Artificial Sequence: Synthetic oligonucleotide
  Target: SCNA; (+) strand; PAM type: YTN; PAM sequence: CTA
taaagcttctgcacagcaaa

SEQ ID NO: 73165 - DNA, 20 bp, Artificial Sequence
  Description of Artificial Sequence: Synthetic oligonucleotide
  Target: SCNA; (+) strand; PAM type: YTN; PAM sequence: CTT
ctgcacagcaaaagaaataa

SEQ ID NO: 73166 - DNA, 20 bp, Artificial Sequence
  Description of Artificial Sequence: Synthetic oligonucleotide
  Target: SCNA; (+) strand; PAM type: YTN; PAM sequence: TTC
tgcacagcaaaagaaataat

SEQ ID NO: 73167 - DNA, 20 bp, Artificial Sequence
  Description of Artificial Sequence: Synthetic oligonucleotide
  Target: SCNA; (+) strand; PAM type: YTN; PAM sequence: CTG
cacagcaaaagaaataatca

SEQ ID NO: 73168 - DNA, 20 bp, Artificial Sequence
  Description of Artificial Sequence: Synthetic oligonucleotide
  Target: SCNA; (+) strand; PAM type: YTN; PAM sequence: CTG
caaactatccatctgacaaa

SEQ ID NO: 73169 - DNA, 20 bp, Artificial Sequence
  Description of Artificial Sequence: Synthetic oligonucleotide
  Target: SCNA; (+) strand; PAM type: YTN; PAM sequence: CTA
tccatctgacaaaggactaa

SEQ ID NO: 73170 - DNA, 20 bp, Artificial Sequence
  Description of Artificial Sequence: Synthetic oligonucleotide
  Target: SCNA; (+) strand; PAM type: YTN; PAM sequence: CTG
acaaaggactaatatccaga

SEQ ID NO: 73171 - DNA, 20 bp, Artificial Sequence
  Description of Artificial Sequence: Synthetic oligonucleotide
  Target: SCNA; (+) strand; PAM type: YTN; PAM sequence: CTA
atatccagaatctacaagga

SEQ ID NO: 73172 - DNA, 20 bp, Artificial Sequence
  Description of Artificial Sequence: Synthetic oligonucleotide
  Target: SCNA; (+) strand; PAM type: YTN; PAM sequence: CTA
caaggaactcaaacaaatca

SEQ ID NO: 73173 - DNA, 20 bp, Artificial Sequence
  Description of Artificial Sequence: Synthetic oligonucleotide
  Target: SCNA; (+) strand; PAM type: YTN; PAM sequence: CTC
aaacaaatcagtaagaaaaa

SEQ ID NO: 73174 - DNA, 20 bp, Artificial Sequence
  Description of Artificial Sequence: Synthetic oligonucleotide
  Target: SCNA; (+) strand; PAM type: YTN; PAM sequence: CTA
tcaaaaagtgggctaaggac

SEQ ID NO: 73175 - DNA, 20 bp, Artificial Sequence
  Description of Artificial Sequence: Synthetic oligonucleotide
  Target: SCNA; (+) strand; PAM type: YTN; PAM sequence: CTA
aggacatgaatagacaattc

SEQ ID NO: 73176 - DNA, 20 bp, Artificial Sequence
  Description of Artificial Sequence: Synthetic oligonucleotide
  Target: SCNA; (+) strand; PAM type: YTN; PAM sequence: TTC
tcaaaagaagatagacaaac

SEQ ID NO: 73177 - DNA, 20 bp, Artificial Sequence
  Description of Artificial Sequence: Synthetic oligonucleotide
  Target: SCNA; (+) strand; PAM type: YTN; PAM sequence: CTC
aaaagaagatagacaaacag

SEQ ID NO: 73178 - DNA, 20 bp, Artificial Sequence
  Description of Artificial Sequence: Synthetic oligonucleotide
  Target: SCNA; (+) strand; PAM type: YTN; PAM sequence: CTC
aacatctttaatgaccaggg

SEQ ID NO: 73179 - DNA, 20 bp, Artificial Sequence
  Description of Artificial Sequence: Synthetic oligonucleotide
  Target: SCNA; (+) strand; PAM type: YTN; PAM sequence: CTT
taatgaccagggaaatgcaa

SEQ ID NO: 73180 - DNA, 20 bp, Artificial Sequence
  Description of Artificial Sequence: Synthetic oligonucleotide
  Target: SCNA; (+) strand; PAM type: YTN; PAM sequence: TTT
aatgaccagggaaatgcaaa

SEQ ID NO: 73181 - DNA, 20 bp, Artificial Sequence
  Description of Artificial Sequence: Synthetic oligonucleotide
  Target: SCNA; (+) strand; PAM type: YTN; PAM sequence: TTA
atgaccagggaaatgcaaat

SEQ ID NO: 73182 - DNA, 20 bp, Artificial Sequence
  Description of Artificial Sequence: Synthetic oligonucleotide
  Target: SCNA; (+) strand; PAM type: YTN; PAM sequence: CTT
actcctgcaagaattgccat

SEQ ID NO: 73183 - DNA, 20 bp, Artificial Sequence
  Description of Artificial Sequence: Synthetic oligonucleotide
  Target: SCNA; (+) strand; PAM type: YTN; PAM sequence: TTA
ctcctgcaagaattgccata

SEQ ID NO: 73184 - DNA, 20 bp, Artificial Sequence
  Description of Artificial Sequence: Synthetic oligonucleotide
  Target: SCNA; (+) strand; PAM type: YTN; PAM sequence: CTC
ctgcaagaattgccataatt

SEQ ID NO: 73185 - DNA, 20 bp, Artificial Sequence
  Description of Artificial Sequence: Synthetic oligonucleotide
  Target: SCNA; (+) strand; PAM type: YTN; PAM sequence: CTG
caagaattgccataattaaa

SEQ ID NO: 73186 - DNA, 20 bp, Artificial Sequence
  Description of Artificial Sequence: Synthetic oligonucleotide
  Target: SCNA; (+) strand; PAM type: YTN; PAM sequence: TTG
ccataattaaaaaataaaaa

SEQ ID NO: 73187 - DNA, 20 bp, Artificial Sequence
  Description of Artificial Sequence: Synthetic oligonucleotide
  Target: SCNA; (+) strand; PAM type: YTN; PAM sequence: TTA
aaaaataaaaaaataaacgt

SEQ ID NO: 73188 - DNA, 20 bp, Artificial Sequence
  Description of Artificial Sequence: Synthetic oligonucleotide
  Target: SCNA; (+) strand; PAM type: YTN; PAM sequence: TTG
gcatggaagtggtaaaaagg

SEQ ID NO: 73189 - DNA, 20 bp, Artificial Sequence
  Description of Artificial Sequence: Synthetic oligonucleotide
  Target: SCNA; (+) strand; PAM type: YTN; PAM sequence: TTT
ttttacactgctggtaggaa

SEQ ID NO: 73190 - DNA, 20 bp, Artificial Sequence
  Description of Artificial Sequence: Synthetic oligonucleotide
  Target: SCNA; (+) strand; PAM type: YTN; PAM sequence: TTT
tttacactgctggtaggaat

SEQ ID NO: 73191 - DNA, 20 bp, Artificial Sequence
  Description of Artificial Sequence: Synthetic oligonucleotide
  Target: SCNA; (+) strand; PAM type: YTN; PAM sequence: TTT
ttacactgctggtaggaatg

SEQ ID NO: 73192 - DNA, 20 bp, Artificial Sequence
  Description of Artificial Sequence: Synthetic oligonucleotide
  Target: SCNA; (+) strand; PAM type: YTN; PAM sequence: TTT
tacactgctggtaggaatgt

SEQ ID NO: 73193 - DNA, 20 bp, Artificial Sequence
  Description of Artificial Sequence: Synthetic oligonucleotide
  Target: SCNA; (+) strand; PAM type: YTN; PAM sequence: TTT
acactgctggtaggaatgta

SEQ ID NO: 73194 - DNA, 20 bp, Artificial Sequence
  Description of Artificial Sequence: Synthetic oligonucleotide
  Target: SCNA; (+) strand; PAM type: YTN; PAM sequence: TTA
cactgctggtaggaatgtaa

SEQ ID NO: 73195 - DNA, 20 bp, Artificial Sequence
  Description of Artificial Sequence: Synthetic oligonucleotide
  Target: SCNA; (+) strand; PAM type: YTN; PAM sequence: CTG
ctggtaggaatgtaaactag

SEQ ID NO: 73196 - DNA, 20 bp, Artificial Sequence
  Description of Artificial Sequence: Synthetic oligonucleotide
  Target: SCNA; (+) strand; PAM type: YTN; PAM sequence: CTG
gtaggaatgtaaactagtac

SEQ ID NO: 73197 - DNA, 20 bp, Artificial Sequence
  Description of Artificial Sequence: Synthetic oligonucleotide
  Target: SCNA; (+) strand; PAM type: YTN; PAM sequence: CTA
gtacaaccaccatggaaaag

SEQ ID NO: 73198 - DNA, 20 bp, Artificial Sequence
  Description of Artificial Sequence: Synthetic oligonucleotide
  Target: SCNA; (+) strand; PAM type: YTN; PAM sequence: TTA
tggagattccttaaagaact

SEQ ID NO: 73199 - DNA, 20 bp, Artificial Sequence
  Description of Artificial Sequence: Synthetic oligonucleotide
  Target: SCNA; (+) strand; PAM type: YTN; PAM sequence: TTC
cttaaagaactaaaagtaga

SEQ ID NO: 73200 - DNA, 20 bp, Artificial Sequence
  Description of Artificial Sequence: Synthetic oligonucleotide
  Target: SCNA; (+) strand; PAM type: YTN; PAM sequence: CTT
aaagaactaaaagtagaaca

SEQ ID NO: 73201 - DNA, 20 bp, Artificial Sequence
  Description of Artificial Sequence: Synthetic oligonucleotide
  Target: SCNA; (+) strand; PAM type: YTN; PAM sequence: TTA
aagaactaaaagtagaacaa

SEQ ID NO: 73202 - DNA, 20 bp, Artificial Sequence
  Description of Artificial Sequence: Synthetic oligonucleotide
  Target: SCNA; (+) strand; PAM type: YTN; PAM sequence: CTA
aaagtagaacaatcatttgt

SEQ ID NO: 73203 - DNA, 20 bp, Artificial Sequence
  Description of Artificial Sequence: Synthetic oligonucleotide
  Target: SCNA; (+) strand; PAM type: YTN; PAM sequence: TTT
gttccagcgatcccactcct

SEQ ID NO: 73204 - DNA, 20 bp, Artificial Sequence
  Description of Artificial Sequence: Synthetic oligonucleotide
  Target: SCNA; (+) strand; PAM type: YTN; PAM sequence: TTG
ttccagcgatcccactccta

SEQ ID NO: 73205 - DNA, 20 bp, Artificial Sequence
  Description of Artificial Sequence: Synthetic oligonucleotide
  Target: SCNA; (+) strand; PAM type: YTN; PAM sequence: TTC
cagcgatcccactcctaggt

SEQ ID NO: 73206 - DNA, 20 bp, Artificial Sequence
  Description of Artificial Sequence: Synthetic oligonucleotide
  Target: SCNA; (+) strand; PAM type: YTN; PAM sequence: CTC
ctaggtatctacccagagga

SEQ ID NO: 73207 - DNA, 20 bp, Artificial Sequence
  Description of Artificial Sequence: Synthetic oligonucleotide
  Target: SCNA; (+) strand; PAM type: YTN; PAM sequence: CTA
ggtatctacccagaggaaaa

SEQ ID NO: 73208 - DNA, 20 bp, Artificial Sequence
  Description of Artificial Sequence: Synthetic oligonucleotide
  Target: SCNA; (+) strand; PAM type: YTN; PAM sequence: CTA
cccagaggaaaagaagtcat

SEQ ID NO: 73209 - DNA, 20 bp, Artificial Sequence
  Description of Artificial Sequence: Synthetic oligonucleotide
  Target: SCNA; (+) strand; PAM type: YTN; PAM sequence: TTA
tatgaaaaagacacttgcac

SEQ ID NO: 73210 - DNA, 20 bp, Artificial Sequence
  Description of Artificial Sequence: Synthetic oligonucleotide
  Target: SCNA; (+) strand; PAM type: YTN; PAM sequence: CTT
gcacatgcatgtttatagct

SEQ ID NO: 73211 - DNA, 20 bp, Artificial Sequence
  Description of Artificial Sequence: Synthetic oligonucleotide
  Target: SCNA; (+) strand; PAM type: YTN; PAM sequence: TTG
cacatgcatgtttatagctg

SEQ ID NO: 73212 - DNA, 20 bp, Artificial Sequence
  Description of Artificial Sequence: Synthetic oligonucleotide
  Target: SCNA; (+) strand; PAM type: YTN; PAM sequence: TTT
atagctgcacaattcacaat

SEQ ID NO: 73213 - DNA, 20 bp, Artificial Sequence
  Description of Artificial Sequence: Synthetic oligonucleotide
  Target: SCNA; (+) strand; PAM type: YTN; PAM sequence: TTA
tagctgcacaattcacaatt

SEQ ID NO: 73214 - DNA, 20 bp, Artificial Sequence
  Description of Artificial Sequence: Synthetic oligonucleotide
  Target: SCNA; (+) strand; PAM type: YTN; PAM sequence: CTG
cacaattcacaattgcaaaa

SEQ ID NO: 73215 - DNA, 20 bp, Artificial Sequence
  Description of Artificial Sequence: Synthetic oligonucleotide
  Target: SCNA; (+) strand; PAM type: YTN; PAM sequence: TTC
acaattgcaaaaatatggaa

SEQ ID NO: 73216 - DNA, 20 bp, Artificial Sequence
  Description of Artificial Sequence: Synthetic oligonucleotide
  Target: SCNA; (+) strand; PAM type: YTN; PAM sequence: TTG
caaaaatatggaaccagcct

SEQ ID NO: 73217 - DNA, 20 bp, Artificial Sequence
  Description of Artificial Sequence: Synthetic oligonucleotide
  Target: SCNA; (+) strand; PAM type: YTN; PAM sequence: CTA
aatacccatcaaccaatgag

SEQ ID NO: 73218 - DNA, 20 bp, Artificial Sequence
  Description of Artificial Sequence: Synthetic oligonucleotide
  Target: SCNA; (+) strand; PAM type: YTN; PAM sequence: TTT
acatatatatataaagcata

SEQ ID NO: 73219 - DNA, 20 bp, Artificial Sequence
  Description of Artificial Sequence: Synthetic oligonucleotide
  Target: SCNA; (+) strand; PAM type: YTN; PAM sequence: TTA
catatatatataaagcatag

SEQ ID NO: 73220 - DNA, 20 bp, Artificial Sequence
  Description of Artificial Sequence: Synthetic oligonucleotide
  Target: SCNA; (+) strand; PAM type: YTN; PAM sequence: CTA
tggaatactactcagccata

SEQ ID NO: 73221 - DNA, 20 bp, Artificial Sequence
  Description of Artificial Sequence: Synthetic oligonucleotide
  Target: SCNA; (+) strand; PAM type: YTN; PAM sequence: CTA
ctcagccataaaaaggaaca

SEQ ID NO: 73222 - DNA, 20 bp, Artificial Sequence
  Description of Artificial Sequence: Synthetic oligonucleotide
  Target: SCNA; (+) strand; PAM type: YTN; PAM sequence: CTC
agccataaaaaggaacaaaa

SEQ ID NO: 73223 - DNA, 20 bp, Artificial Sequence
  Description of Artificial Sequence: Synthetic oligonucleotide
  Target: SCNA; (+) strand; PAM type: YTN; PAM sequence: TTT
gtagctacgtagatagagtt

SEQ ID NO: 73224 - DNA, 20 bp, Artificial Sequence
  Description of Artificial Sequence: Synthetic oligonucleotide
  Target: SCNA; (+) strand; PAM type: YTN; PAM sequence: TTG
tagctacgtagatagagttg

SEQ ID NO: 73225 - DNA, 20 bp, Artificial Sequence
  Description of Artificial Sequence: Synthetic oligonucleotide
  Target: SCNA; (+) strand; PAM type: YTN; PAM sequence: CTA
cgtagatagagttggagacc

SEQ ID NO: 73226 - DNA, 20 bp, Artificial Sequence
  Description of Artificial Sequence: Synthetic oligonucleotide
  Target: SCNA; (+) strand; PAM type: YTN; PAM sequence: TTG
gagaccattattctaagtga

SEQ ID NO: 73227 - DNA, 20 bp, Artificial Sequence
  Description of Artificial Sequence: Synthetic oligonucleotide
  Target: SCNA; (+) strand; PAM type: YTN; PAM sequence: TTA
ttctaagtgaagtaactcag

SEQ ID NO: 73228 - DNA, 20 bp, Artificial Sequence
  Description of Artificial Sequence: Synthetic oligonucleotide
  Target: SCNA; (+) strand; PAM type: YTN; PAM sequence: TTC
taagtgaagtaactcaggag

SEQ ID NO: 73229 - DNA, 20 bp, Artificial Sequence
  Description of Artificial Sequence: Synthetic oligonucleotide
  Target: SCNA; (+) strand; PAM type: YTN; PAM sequence: CTA
agtgaagtaactcaggagtg

SEQ ID NO: 73230 - DNA, 20 bp, Artificial Sequence
  Description of Artificial Sequence: Synthetic oligonucleotide
  Target: SCNA; (+) strand; PAM type: YTN; PAM sequence: CTC
aggagtggaaaaccaaacat

SEQ ID NO: 73231 - DNA, 20 bp, Artificial Sequence
  Description of Artificial Sequence: Synthetic oligonucleotide
  Target: SCNA; (+) strand; PAM type: YTN; PAM sequence: TTA
catgttctcatttataactg

SEQ ID NO: 73232 - DNA, 20 bp, Artificial Sequence
  Description of Artificial Sequence: Synthetic oligonucleotide
  Target: SCNA; (+) strand; PAM type: YTN; PAM sequence: TTC
tcatttataactgccaccta

SEQ ID NO: 73233 - DNA, 20 bp, Artificial Sequence
  Description of Artificial Sequence: Synthetic oligonucleotide
  Target: SCNA; (+) strand; PAM type: YTN; PAM sequence: CTC
atttataactgccacctaaa

SEQ ID NO: 73234 - DNA, 20 bp, Artificial Sequence
  Description of Artificial Sequence: Synthetic oligonucleotide
  Target: SCNA; (+) strand; PAM type: YTN; PAM sequence: TTT
ataactgccacctaaactaa

SEQ ID NO: 73235 - DNA, 20 bp, Artificial Sequence
  Description of Artificial Sequence: Synthetic oligonucleotide
  Target: SCNA; (+) strand; PAM type: YTN; PAM sequence: TTA
taactgccacctaaactaaa

SEQ ID NO: 73236 - DNA, 20 bp, Artificial Sequence
  Description of Artificial Sequence: Synthetic oligonucleotide
  Target: SCNA; (+) strand; PAM type: YTN; PAM sequence: CTG
ccacctaaactaaaggatgc

SEQ ID NO: 73237 - DNA, 20 bp, Artificial Sequence
  Description of Artificial Sequence: Synthetic oligonucleotide
  Target: SCNA; (+) strand; PAM type: YTN; PAM sequence: CTA
aactaaaggatgcaaaggca

SEQ ID NO: 73238 - DNA, 20 bp, Artificial Sequence
  Description of Artificial Sequence: Synthetic oligonucleotide
  Target: SCNA; (+) strand; PAM type: YTN; PAM sequence: CTA
aaggatgcaaaggcataaga

SEQ ID NO: 73239 - DNA, 20 bp, Artificial Sequence
  Description of Artificial Sequence: Synthetic oligonucleotide
  Target: SCNA; (+) strand; PAM type: YTN; PAM sequence: CTC
tggagacttgaggggaaggg

SEQ ID NO: 73240 - DNA, 20 bp, Artificial Sequence
  Description of Artificial Sequence: Synthetic oligonucleotide
  Target: SCNA; (+) strand; PAM type: YTN; PAM sequence: CTG
gagacttgaggggaagggtg

SEQ ID NO: 73241 - DNA, 20 bp, Artificial Sequence
  Description of Artificial Sequence: Synthetic oligonucleotide
  Target: SCNA; (+) strand; PAM type: YTN; PAM sequence: CTT
gaggggaagggtgggaggaa

SEQ ID NO: 73242 - DNA, 20 bp, Artificial Sequence
  Description of Artificial Sequence: Synthetic oligonucleotide
  Target: SCNA; (+) strand; PAM type: YTN; PAM sequence: TTG
aggggaagggtgggaggaag

SEQ ID NO: 73243 - DNA, 20 bp, Artificial Sequence
  Description of Artificial Sequence: Synthetic oligonucleotide
  Target: SCNA; (+) strand; PAM type: YTN; PAM sequence: CTA
cacattgggtgcagtgtatg

SEQ ID NO: 73244 - DNA, 20 bp, Artificial Sequence
  Description of Artificial Sequence: Synthetic oligonucleotide
  Target: SCNA; (+) strand; PAM type: YTN; PAM sequence: TTG
ggtgcagtgtatgctgctca

SEQ ID NO: 73245 - DNA, 20 bp, Artificial Sequence
  Description of Artificial Sequence: Synthetic oligonucleotide
  Target: SCNA; (+) strand; PAM type: YTN; PAM sequence: CTG
ctcaggttatgagtgtacca

SEQ ID NO: 73246 - DNA, 20 bp, Artificial Sequence
  Description of Artificial Sequence: Synthetic oligonucleotide
  Target: SCNA; (+) strand; PAM type: YTN; PAM sequence: CTC
aggttatgagtgtaccaaaa

SEQ ID NO: 73247 - DNA, 20 bp, Artificial Sequence
  Description of Artificial Sequence: Synthetic oligonucleotide
  Target: SCNA; (+) strand; PAM type: YTN; PAM sequence: TTA
tgagtgtaccaaaatctcag

SEQ ID NO: 73248 - DNA, 20 bp, Artificial Sequence
  Description of Artificial Sequence: Synthetic oligonucleotide
  Target: SCNA; (+) strand; PAM type: YTN; PAM sequence: CTC
agaaatcatacctaaacaac

SEQ ID NO: 73249 - DNA, 20 bp, Artificial Sequence
  Description of Artificial Sequence: Synthetic oligonucleotide
  Target: SCNA; (+) strand; PAM type: YTN; PAM sequence: CTA
aacaacttctccatataacc

SEQ ID NO: 73250 - DNA, 20 bp, Artificial Sequence
  Description of Artificial Sequence: Synthetic oligonucleotide
  Target: SCNA; (+) strand; PAM type: YTN; PAM sequence: CTT
ctccatataaccaaaaacca

SEQ ID NO: 73251 - DNA, 20 bp, Artificial Sequence
  Description of Artificial Sequence: Synthetic oligonucleotide
  Target: SCNA; (+) strand; PAM type: YTN; PAM sequence: TTC
tccatataaccaaaaaccac

SEQ ID NO: 73252 - DNA, 20 bp, Artificial Sequence
  Description of Artificial Sequence: Synthetic oligonucleotide
  Target: SCNA; (+) strand; PAM type: YTN; PAM sequence: CTC
catataaccaaaaaccacct

SEQ ID NO: 73253 - DNA, 20 bp, Artificial Sequence
  Description of Artificial Sequence: Synthetic oligonucleotide
  Target: SCNA; (+) strand; PAM type: YTN; PAM sequence: CTG
ctccccaaaagctattgaaa

SEQ ID NO: 73254 - DNA, 20 bp, Artificial Sequence
  Description of Artificial Sequence: Synthetic oligonucleotide
  Target: SCNA; (+) strand; PAM type: YTN; PAM sequence: CTC
cccaaaagctattgaaataa

SEQ ID NO: 73255 - DNA, 20 bp, Artificial Sequence
  Description of Artificial Sequence: Synthetic oligonucleotide
  Target: SCNA; (+) strand; PAM type: YTN; PAM sequence: CTA
ttgaaataataataataaag

SEQ ID NO: 73256 - DNA, 20 bp, Artificial Sequence
  Description of Artificial Sequence: Synthetic oligonucleotide
  Target: SCNA; (+) strand; PAM type: YTN; PAM sequence: TTG
aaataataataataaagtta

SEQ ID NO: 73257 - DNA, 20 bp, Artificial Sequence
  Description of Artificial Sequence: Synthetic oligonucleotide
  Target: SCNA; (+) strand; PAM type: YTN; PAM sequence: TTA
atcagaaaattattgtctat

SEQ ID NO: 73258 - DNA, 20 bp, Artificial Sequence
  Description of Artificial Sequence: Synthetic oligonucleotide
  Target: SCNA; (+) strand; PAM type: YTN; PAM sequence: TTA
ttgtctataacaccaatata

SEQ ID NO: 73259 - DNA, 20 bp, Artificial Sequence
  Description of Artificial Sequence: Synthetic oligonucleotide
  Target: SCNA; (+) strand; PAM type: YTN; PAM sequence: TTG
tctataacaccaatatatta

SEQ ID NO: 73260 - DNA, 20 bp, Artificial Sequence
  Description of Artificial Sequence: Synthetic oligonucleotide
  Target: SCNA; (+) strand; PAM type: YTN; PAM sequence: CTA
taacaccaatatattatttt

SEQ ID NO: 73261 - DNA, 20 bp, Artificial Sequence
  Description of Artificial Sequence: Synthetic oligonucleotide
  Target: SCNA; (+) strand; PAM type: YTN; PAM sequence: TTA
tttttattaatgcatttctt

SEQ ID NO: 73262 - DNA, 20 bp, Artificial Sequence
  Description of Artificial Sequence: Synthetic oligonucleotide
  Target: SCNA; (+) strand; PAM type: YTN; PAM sequence: TTT
ttattaatgcatttctttta

SEQ ID NO: 73263 - DNA, 20 bp, Artificial Sequence
  Description of Artificial Sequence: Synthetic oligonucleotide
  Target: SCNA; (+) strand; PAM type: YTN; PAM sequence: TTT
tattaatgcatttcttttaa

SEQ ID NO: 73264 - DNA, 20 bp, Artificial Sequence
  Description of Artificial Sequence: Synthetic oligonucleotide
  Target: SCNA; (+) strand; PAM type: YTN; PAM sequence: TTT
attaatgcatttcttttaat

SEQ ID NO: 73265 - DNA, 20 bp, Artificial Sequence
  Description of Artificial Sequence: Synthetic oligonucleotide
  Target: SCNA; (+) strand; PAM type: YTN; PAM sequence: TTA
ttaatgcatttcttttaatg

SEQ ID NO: 73266 - DNA, 20 bp, Artificial Sequence
  Description of Artificial Sequence: Synthetic oligonucleotide
  Target: SCNA; (+) strand; PAM type: YTN; PAM sequence: TTA
atgcatttcttttaatgtat

SEQ ID NO: 73267 - DNA, 20 bp, Artificial Sequence
  Description of Artificial Sequence: Synthetic oligonucleotide
  Target: SCNA; (+) strand; PAM type: YTN; PAM sequence: TTT
cttttaatgtattgttattt

SEQ ID NO: 73268 - DNA, 20 bp, Artificial Sequence
  Description of Artificial Sequence: Synthetic oligonucleotide
  Target: SCNA; (+) strand; PAM type: YTN; PAM sequence: TTC
ttttaatgtattgttatttg

SEQ ID NO: 73269 - DNA, 20 bp, Artificial Sequence
  Description of Artificial Sequence: Synthetic oligonucleotide
  Target: SCNA; (+) strand; PAM type: YTN; PAM sequence: CTT
ttaatgtattgttatttgtc

SEQ ID NO: 73270 - DNA, 20 bp, Artificial Sequence
  Description of Artificial Sequence: Synthetic oligonucleotide
  Target: SCNA; (+) strand; PAM type: YTN; PAM sequence: TTT
taatgtattgttatttgtca

SEQ ID NO: 73271 - DNA, 20 bp, Artificial Sequence
  Description of Artificial Sequence: Synthetic oligonucleotide
  Target: SCNA; (+) strand; PAM type: YTN; PAM sequence: TTT
aatgtattgttatttgtcat

SEQ ID NO: 73272 - DNA, 20 bp, Artificial Sequence
  Description of Artificial Sequence: Synthetic oligonucleotide
  Target: SCNA; (+) strand; PAM type: YTN; PAM sequence: TTA
atgtattgttatttgtcatt

SEQ ID NO: 73273 - DNA, 20 bp, Artificial Sequence
  Description of Artificial Sequence: Synthetic oligonucleotide
  Target: SCNA; (+) strand; PAM type: YTN; PAM sequence: TTG
ttatttgtcattaattaaat

SEQ ID NO: 73274 - DNA, 20 bp, Artificial Sequence
  Description of Artificial Sequence: Synthetic oligonucleotide
  Target: SCNA; (+) strand; PAM type: YTN; PAM sequence: TTA
tttgtcattaattaaattag

SEQ ID NO: 73275 - DNA, 20 bp, Artificial Sequence
  Description of Artificial Sequence: Synthetic oligonucleotide
  Target: SCNA; (+) strand; PAM type: YTN; PAM sequence: TTT
gtcattaattaaattagtag

SEQ ID NO: 73276 - DNA, 20 bp, Artificial Sequence
  Description of Artificial Sequence: Synthetic oligonucleotide
  Target: SCNA; (+) strand; PAM type: YTN; PAM sequence: TTG
tcattaattaaattagtagt

SEQ ID NO: 73277 - DNA, 20 bp, Artificial Sequence
  Description of Artificial Sequence: Synthetic oligonucleotide
  Target: SCNA; (+) strand; PAM type: YTN; PAM sequence: TTA
attaaattagtagttacact

SEQ ID NO: 73278 - DNA, 20 bp, Artificial Sequence
  Description of Artificial Sequence: Synthetic oligonucleotide
  Target: SCNA; (+) strand; PAM type: YTN; PAM sequence: TTA
aattagtagttacactatta

SEQ ID NO: 73279 - DNA, 20 bp, Artificial Sequence
  Description of Artificial Sequence: Synthetic oligonucleotide
  Target: SCNA; (+) strand; PAM type: YTN; PAM sequence: TTA
gtagttacactattaagcga

SEQ ID NO: 73280 - DNA, 20 bp, Artificial Sequence
  Description of Artificial Sequence: Synthetic oligonucleotide
  Target: SCNA; (+) strand; PAM type: YTN; PAM sequence: TTA
cactattaagcgatctgttg

SEQ ID NO: 73281 - DNA, 20 bp, Artificial Sequence
  Description of Artificial Sequence: Synthetic oligonucleotide
  Target: SCNA; (+) strand; PAM type: YTN; PAM sequence: CTA
ttaagcgatctgttgttata

SEQ ID NO: 73282 - DNA, 20 bp, Artificial Sequence
  Description of Artificial Sequence: Synthetic oligonucleotide
  Target: SCNA; (+) strand; PAM type: YTN; PAM sequence: TTA
agcgatctgttgttataatt

SEQ ID NO: 73283 - DNA, 20 bp, Artificial Sequence
  Description of Artificial Sequence: Synthetic oligonucleotide
  Target: SCNA; (+) strand; PAM type: YTN; PAM sequence: CTG
ttgttataattaattaatta

SEQ ID NO: 73284 - DNA, 20 bp, Artificial Sequence
  Description of Artificial Sequence: Synthetic oligonucleotide
  Target: SCNA; (+) strand; PAM type: YTN; PAM sequence: TTG
ttataattaattaattaacc

SEQ ID NO: 73285 - DNA, 20 bp, Artificial Sequence
  Description of Artificial Sequence: Synthetic oligonucleotide
  Target: SCNA; (+) strand; PAM type: YTN; PAM sequence: TTA
taattaattaattaacctcc

SEQ ID NO: 73286 - DNA, 20 bp, Artificial Sequence
  Description of Artificial Sequence: Synthetic oligonucleotide
  Target: SCNA; (+) strand; PAM type: YTN; PAM sequence: TTA
attaattaacctccctttat

SEQ ID NO: 73287 - DNA, 20 bp, Artificial Sequence
  Description of Artificial Sequence: Synthetic oligonucleotide
  Target: SCNA; (+) strand; PAM type: YTN; PAM sequence: TTA
attaacctccctttatcaat

SEQ ID NO: 73288 - DNA, 20 bp, Artificial Sequence
  Description of Artificial Sequence: Synthetic oligonucleotide
  Target: SCNA; (+) strand; PAM type: YTN; PAM sequence: TTA
acctccctttatcaattaaa

SEQ ID NO: 73289 - DNA, 20 bp, Artificial Sequence
  Description of Artificial Sequence: Synthetic oligonucleotide
  Target: SCNA; (+) strand; PAM type: YTN; PAM sequence: CTC
cctttatcaattaaattata

SEQ ID NO: 73290 - DNA, 20 bp, Artificial Sequence
  Description of Artificial Sequence: Synthetic oligonucleotide
  Target: SCNA; (+) strand; PAM type: YTN; PAM sequence: CTT
tatcaattaaattataaagc

SEQ ID NO: 73291 - DNA, 20 bp, Artificial Sequence
  Description of Artificial Sequence: Synthetic oligonucleotide
  Target: SCNA; (+) strand; PAM type: YTN; PAM sequence: TTT
atcaattaaattataaagcc

SEQ ID NO: 73292 - DNA, 20 bp, Artificial Sequence
  Description of Artificial Sequence: Synthetic oligonucleotide
  Target: SCNA; (+) strand; PAM type: YTN; PAM sequence: TTA
tcaattaaattataaagccc

SEQ ID NO: 73293 - DNA, 20 bp, Artificial Sequence
  Description of Artificial Sequence: Synthetic oligonucleotide
  Target: SCNA; (+) strand; PAM type: YTN; PAM sequence: TTA
aattataaagccctgaaggc

SEQ ID NO: 73294 - DNA, 20 bp, Artificial Sequence
  Description of Artificial Sequence: Synthetic oligonucleotide
  Target: SCNA; (+) strand; PAM type: YTN; PAM sequence: TTA
taaagccctgaaggcaactg

SEQ ID NO: 73295 - DNA, 20 bp, Artificial Sequence
  Description of Artificial Sequence: Synthetic oligonucleotide
  Target: SCNA; (+) strand; PAM type: YTN; PAM sequence: CTG
aaggcaactgagtagaggcc

SEQ ID NO: 73296 - DNA, 20 bp, Artificial Sequence
  Description of Artificial Sequence: Synthetic oligonucleotide
  Target: SCNA; (+) strand; PAM type: YTN; PAM sequence: CTG
agtagaggcccaataagtga

SEQ ID NO: 73297 - DNA, 20 bp, Artificial Sequence
  Description of Artificial Sequence: Synthetic oligonucleotide
  Target: SCNA; (+) strand; PAM type: YTN; PAM sequence: TTG
ctgaattgaaatgctgaact

SEQ ID NO: 73298 - DNA, 20 bp, Artificial Sequence
  Description of Artificial Sequence: Synthetic oligonucleotide
  Target: SCNA; (+) strand; PAM type: YTN; PAM sequence: CTG
aattgaaatgctgaactgaa

SEQ ID NO: 73299 - DNA, 20 bp, Artificial Sequence
  Description of Artificial Sequence: Synthetic oligonucleotide
  Target: SCNA; (+) strand; PAM type: YTN; PAM sequence: TTG
aaatgctgaactgaattata

SEQ ID NO: 73300 - DNA, 20 bp, Artificial Sequence
  Description of Artificial Sequence: Synthetic oligonucleotide
  Target: SCNA; (+) strand; PAM type: YTN; PAM sequence: CTG
aactgaattatacttcatta

SEQ ID NO: 73301 - DNA, 20 bp, Artificial Sequence
  Description of Artificial Sequence: Synthetic oligonucleotide
  Target: SCNA; (+) strand; PAM type: YTN; PAM sequence: CTG
aattatacttcattatatag

SEQ ID NO: 73302 - DNA, 20 bp, Artificial Sequence
  Description of Artificial Sequence: Synthetic oligonucleotide
  Target: SCNA; (+) strand; PAM type: YTN; PAM sequence: TTA
tacttcattatatagaaagc

SEQ ID NO: 73303 - DNA, 20 bp, Artificial Sequence
  Description of Artificial Sequence: Synthetic oligonucleotide
  Target: SCNA; (+) strand; PAM type: YTN; PAM sequence: CTT
cattatatagaaagcctcat

SEQ ID NO: 73304 - DNA, 20 bp, Artificial Sequence
  Description of Artificial Sequence: Synthetic oligonucleotide
  Target: SCNA; (+) strand; PAM type: YTN; PAM sequence: TTC
attatatagaaagcctcata

SEQ ID NO: 73305 - DNA, 20 bp, Artificial Sequence
  Description of Artificial Sequence: Synthetic oligonucleotide
  Target: SCNA; (+) strand; PAM type: YTN; PAM sequence: TTA
tatagaaagcctcatatata

SEQ ID NO: 73306 - DNA, 20 bp, Artificial Sequence
  Description of Artificial Sequence: Synthetic oligonucleotide
  Target: SCNA; (+) strand; PAM type: YTN; PAM sequence: CTC
atatatagggcctcacatat

SEQ ID NO: 73307 - DNA, 20 bp, Artificial Sequence
  Description of Artificial Sequence: Synthetic oligonucleotide
  Target: SCNA; (+) strand; PAM type: YTN; PAM sequence: CTC
acatatacccttacacaaaa

SEQ ID NO: 73308 - DNA, 20 bp, Artificial Sequence
  Description of Artificial Sequence: Synthetic oligonucleotide
  Target: SCNA; (+) strand; PAM type: YTN; PAM sequence: CTT
acacaaaatataagaatcca

SEQ ID NO: 73309 - DNA, 20 bp, Artificial Sequence
  Description of Artificial Sequence: Synthetic oligonucleotide
  Target: SCNA; (+) strand; PAM type: YTN; PAM sequence: TTA
cacaaaatataagaatccac

SEQ ID NO: 73310 - DNA, 20 bp, Artificial Sequence
  Description of Artificial Sequence: Synthetic oligonucleotide
  Target: SCNA; (+) strand; PAM type: YTN; PAM sequence: CTA
caaatcacttcatcgattaa

SEQ ID NO: 73311 - DNA, 20 bp, Artificial Sequence
  Description of Artificial Sequence: Synthetic oligonucleotide
  Target: SCNA; (+) strand; PAM type: YTN; PAM sequence: CTT
catcgattaatcaactggct

SEQ ID NO: 73312 - DNA, 20 bp, Artificial Sequence
  Description of Artificial Sequence: Synthetic oligonucleotide
  Target: SCNA; (+) strand; PAM type: YTN; PAM sequence: TTC
atcgattaatcaactggctg

SEQ ID NO: 73313 - DNA, 20 bp, Artificial Sequence
  Description of Artificial Sequence: Synthetic oligonucleotide
  Target: SCNA; (+) strand; PAM type: YTN; PAM sequence: TTA
atcaactggctgtactttgt

SEQ ID NO: 73314 - DNA, 20 bp, Artificial Sequence
  Description of Artificial Sequence: Synthetic oligonucleotide
  Target: SCNA; (+) strand; PAM type: YTN; PAM sequence: CTG
gctgtactttgtaacaaggt

SEQ ID NO: 73315 - DNA, 20 bp, Artificial Sequence
  Description of Artificial Sequence: Synthetic oligonucleotide
  Target: SCNA; (+) strand; PAM type: YTN; PAM sequence: CTG
tactttgtaacaaggtttgc

SEQ ID NO: 73316 - DNA, 20 bp, Artificial Sequence
  Description of Artificial Sequence: Synthetic oligonucleotide
  Target: SCNA; (+) strand; PAM type: YTN; PAM sequence: CTT
tgtaacaaggtttgcacaaa

SEQ ID NO: 73317 - DNA, 20 bp, Artificial Sequence
  Description of Artificial Sequence: Synthetic oligonucleotide
  Target: SCNA; (+) strand; PAM type: YTN; PAM sequence: TTT
gtaacaaggtttgcacaaat

SEQ ID NO: 73318 - DNA, 20 bp, Artificial Sequence
  Description of Artificial Sequence: Synthetic oligonucleotide
  Target: SCNA; (+) strand; PAM type: YTN; PAM sequence: TTG
taacaaggtttgcacaaata

SEQ ID NO: 73319 - DNA, 20 bp, Artificial Sequence
  Description of Artificial Sequence: Synthetic oligonucleotide
  Target: SCNA; (+) strand; PAM type: YTN; PAM sequence: TTT
gcacaaataaaatatctttc

SEQ ID NO: 73320 - DNA, 20 bp, Artificial Sequence
  Description of Artificial Sequence: Synthetic oligonucleotide
  Target: SCNA; (+) strand; PAM type: YTN; PAM sequence: TTG
cacaaataaaatatctttca

SEQ ID NO: 73321 - DNA, 20 bp, Artificial Sequence
  Description of Artificial Sequence: Synthetic oligonucleotide
  Target: SCNA; (+) strand; PAM type: YTN; PAM sequence: CTT
tcaggaaaagtgtaaaatat

SEQ ID NO: 73322 - DNA, 20 bp, Artificial Sequence
  Description of Artificial Sequence: Synthetic oligonucleotide
  Target: SCNA; (+) strand; PAM type: YTN; PAM sequence: TTT
caggaaaagtgtaaaatata

SEQ ID NO: 73323 - DNA, 20 bp, Artificial Sequence
  Description of Artificial Sequence: Synthetic oligonucleotide
  Target: SCNA; (+) strand; PAM type: YTN; PAM sequence: TTC
aggaaaagtgtaaaatatat

SEQ ID NO: 73324 - DNA, 20 bp, Artificial Sequence
  Description of Artificial Sequence: Synthetic oligonucleotide
  Target: SCNA; (+) strand; PAM type: YTN; PAM sequence: TTT
cattaatctgtgaaaatgca

SEQ ID NO: 73325 - DNA, 20 bp, Artificial Sequence
  Description of Artificial Sequence: Synthetic oligonucleotide
  Target: SCNA; (+) strand; PAM type: YTN; PAM sequence: TTC
attaatctgtgaaaatgcaa

SEQ ID NO: 73326 - DNA, 20 bp, Artificial Sequence
  Description of Artificial Sequence: Synthetic oligonucleotide
  Target: SCNA; (+) strand; PAM type: YTN; PAM sequence: TTA
atctgtgaaaatgcaactgg

SEQ ID NO: 73327 - DNA, 20 bp, Artificial Sequence
  Description of Artificial Sequence: Synthetic oligonucleotide
  Target: SCNA; (+) strand; PAM type: YTN; PAM sequence: CTG
tgaaaatgcaactggaagtt

SEQ ID NO: 73328 - DNA, 20 bp, Artificial Sequence
  Description of Artificial Sequence: Synthetic oligonucleotide
  Target: SCNA; (+) strand; PAM type: YTN; PAM sequence: CTG
gaagttttgtggcttcctag

SEQ ID NO: 73329 - DNA, 20 bp, Artificial Sequence
  Description of Artificial Sequence: Synthetic oligonucleotide
  Target: SCNA; (+) strand; PAM type: YTN; PAM sequence: TTT
tgtggcttcctagtttgaac

SEQ ID NO: 73330 - DNA, 20 bp, Artificial Sequence
  Description of Artificial Sequence: Synthetic oligonucleotide
  Target: SCNA; (+) strand; PAM type: YTN; PAM sequence: TTT
gtggcttcctagtttgaact

SEQ ID NO: 73331 - DNA, 20 bp, Artificial Sequence
  Description of Artificial Sequence: Synthetic oligonucleotide
  Target: SCNA; (+) strand; PAM type: YTN; PAM sequence: TTG
tggcttcctagtttgaactc

SEQ ID NO: 73332 - DNA, 20 bp, Artificial Sequence
  Description of Artificial Sequence: Synthetic oligonucleotide
  Target: SCNA; (+) strand; PAM type: YTN; PAM sequence: CTT
cctagtttgaactccgccca

SEQ ID NO: 73333 - DNA, 20 bp, Artificial Sequence
  Description of Artificial Sequence: Synthetic oligonucleotide
  Target: SCNA; (+) strand; PAM type: YTN; PAM sequence: TTC
ctagtttgaactccgcccaa

SEQ ID NO: 73334 - DNA, 20 bp, Artificial Sequence
  Description of Artificial Sequence: Synthetic oligonucleotide
  Target: SCNA; (+) strand; PAM type: YTN; PAM sequence: CTA
gtttgaactccgcccaagaa

SEQ ID NO: 73335 - DNA, 20 bp, Artificial Sequence
  Description of Artificial Sequence: Synthetic oligonucleotide
  Target: SCNA; (+) strand; PAM type: YTN; PAM sequence: TTT
gaactccgcccaagaaggca

SEQ ID NO: 73336 - DNA, 20 bp, Artificial Sequence
  Description of Artificial Sequence: Synthetic oligonucleotide
  Target: SCNA; (+) strand; PAM type: YTN; PAM sequence: TTG
aactccgcccaagaaggcaa

SEQ ID NO: 73337 - DNA, 20 bp, Artificial Sequence
  Description of Artificial Sequence: Synthetic oligonucleotide
  Target: SCNA; (+) strand; PAM type: YTN; PAM sequence: CTC
cgcccaagaaggcaaaacct

SEQ ID NO: 73338 - DNA, 20 bp, Artificial Sequence
  Description of Artificial Sequence: Synthetic oligonucleotide
  Target: SCNA; (+) strand; PAM type: YTN; PAM sequence: CTT
tatagacccatagtttcccg

SEQ ID NO: 73339 - DNA, 20 bp, Artificial Sequence
  Description of Artificial Sequence: Synthetic oligonucleotide
  Target: SCNA; (+) strand; PAM type: YTN; PAM sequence: TTT
atagacccatagtttcccgt

SEQ ID NO: 73340 - DNA, 20 bp, Artificial Sequence
  Description of Artificial Sequence: Synthetic oligonucleotide
  Target: SCNA; (+) strand; PAM type: YTN; PAM sequence: TTA
tagacccatagtttcccgtc

SEQ ID NO: 73341 - DNA, 20 bp, Artificial Sequence
  Description of Artificial Sequence: Synthetic oligonucleotide
  Target: SCNA; (+) strand; PAM type: YTN; PAM sequence: TTT
cccgtctaggtactgctctt

SEQ ID NO: 73342 - DNA, 20 bp, Artificial Sequence
  Description of Artificial Sequence: Synthetic oligonucleotide
  Target: SCNA; (+) strand; PAM type: YTN; PAM sequence: TTC
ccgtctaggtactgctcttt

SEQ ID NO: 73343 - DNA, 20 bp, Artificial Sequence
  Description of Artificial Sequence: Synthetic oligonucleotide
  Target: SCNA; (+) strand; PAM type: YTN; PAM sequence: CTA
ggtactgctctttcacacat

SEQ ID NO: 73344 - DNA, 20 bp, Artificial Sequence
  Description of Artificial Sequence: Synthetic oligonucleotide
  Target: SCNA; (+) strand; PAM type: YTN; PAM sequence: CTG
ctctttcacacatctctaag

SEQ ID NO: 73345 - DNA, 20 bp, Artificial Sequence
  Description of Artificial Sequence: Synthetic oligonucleotide
  Target: SCNA; (+) strand; PAM type: YTN; PAM sequence: CTC
tttcacacatctctaagtct

SEQ ID NO: 73346 - DNA, 20 bp, Artificial Sequence
  Description of Artificial Sequence: Synthetic oligonucleotide
  Target: SCNA; (+) strand; PAM type: YTN; PAM sequence: CTT
tcacacatctctaagtctga

SEQ ID NO: 73347 - DNA, 20 bp, Artificial Sequence
  Description of Artificial Sequence: Synthetic oligonucleotide
  Target: SCNA; (+) strand; PAM type: YTN; PAM sequence: TTT
cacacatctctaagtctgac

SEQ ID NO: 73348 - DNA, 20 bp, Artificial Sequence
  Description of Artificial Sequence: Synthetic oligonucleotide
  Target: SCNA; (+) strand; PAM type: YTN; PAM sequence: TTC
acacatctctaagtctgact

SEQ ID NO: 73349 - DNA, 20 bp, Artificial Sequence
  Description of Artificial Sequence: Synthetic oligonucleotide
  Target: SCNA; (+) strand; PAM type: YTN; PAM sequence: CTC
taagtctgactagacacatt

SEQ ID NO: 73350 - DNA, 20 bp, Artificial Sequence
  Description of Artificial Sequence: Synthetic oligonucleotide
  Target: SCNA; (+) strand; PAM type: YTN; PAM sequence: CTA
agtctgactagacacattgt

SEQ ID NO: 73351 - DNA, 20 bp, Artificial Sequence
  Description of Artificial Sequence: Synthetic oligonucleotide
  Target: SCNA; (+) strand; PAM type: YTN; PAM sequence: CTG
actagacacattgtaacata

SEQ ID NO: 73352 - DNA, 20 bp, Artificial Sequence
  Description of Artificial Sequence: Synthetic oligonucleotide
  Target: SCNA; (+) strand; PAM type: YTN; PAM sequence: CTA
gacacattgtaacataagct

SEQ ID NO: 73353 - DNA, 20 bp, Artificial Sequence
  Description of Artificial Sequence: Synthetic oligonucleotide
  Target: SCNA; (+) strand; PAM type: YTN; PAM sequence: TTG
taacataagctgtggtcaca

SEQ ID NO: 73354 - DNA, 20 bp, Artificial Sequence
  Description of Artificial Sequence: Synthetic oligonucleotide
  Target: SCNA; (+) strand; PAM type: YTN; PAM sequence: CTG
tggtcacatgacaggtaggt

SEQ ID NO: 73355 - DNA, 20 bp, Artificial Sequence
  Description of Artificial Sequence: Synthetic oligonucleotide
  Target: SCNA; (+) strand; PAM type: YTN; PAM sequence: CTC
agtaacaggcaacaccagtc

SEQ ID NO: 73356 - DNA, 20 bp, Artificial Sequence
  Description of Artificial Sequence: Synthetic oligonucleotide
  Target: SCNA; (+) strand; PAM type: YTN; PAM sequence: CTA
agtgtccaaatgagtgcaga

SEQ ID NO: 73357 - DNA, 20 bp, Artificial Sequence
  Description of Artificial Sequence: Synthetic oligonucleotide
  Target: SCNA; (+) strand; PAM type: YTN; PAM sequence: CTG
attgcagctcacatttactc

SEQ ID NO: 73358 - DNA, 20 bp, Artificial Sequence
  Description of Artificial Sequence: Synthetic oligonucleotide
  Target: SCNA; (+) strand; PAM type: YTN; PAM sequence: TTG
cagctcacatttactcttaa

SEQ ID NO: 73359 - DNA, 20 bp, Artificial Sequence
  Description of Artificial Sequence: Synthetic oligonucleotide
  Target: SCNA; (+) strand; PAM type: YTN; PAM sequence: CTC
acatttactcttaaacaaga

SEQ ID NO: 73360 - DNA, 20 bp, Artificial Sequence
  Description of Artificial Sequence: Synthetic oligonucleotide
  Target: SCNA; (+) strand; PAM type: YTN; PAM sequence: TTT
actcttaaacaagaggccct

SEQ ID NO: 73361 - DNA, 20 bp, Artificial Sequence
  Description of Artificial Sequence: Synthetic oligonucleotide
  Target: SCNA; (+) strand; PAM type: YTN; PAM sequence: TTA
ctcttaaacaagaggccctc

SEQ ID NO: 73362 - DNA, 20 bp, Artificial Sequence
  Description of Artificial Sequence: Synthetic oligonucleotide
  Target: SCNA; (+) strand; PAM type: YTN; PAM sequence: CTC
ttaaacaagaggccctcttc

SEQ ID NO: 73363 - DNA, 20 bp, Artificial Sequence
  Description of Artificial Sequence: Synthetic oligonucleotide
  Target: SCNA; (+) strand; PAM type: YTN; PAM sequence: CTT
aaacaagaggccctcttctt

SEQ ID NO: 73364 - DNA, 20 bp, Artificial Sequence
  Description of Artificial Sequence: Synthetic oligonucleotide
  Target: SCNA; (+) strand; PAM type: YTN; PAM sequence: TTA
aacaagaggccctcttctta

SEQ ID NO: 73365 - DNA, 20 bp, Artificial Sequence
  Description of Artificial Sequence: Synthetic oligonucleotide
  Target: SCNA; (+) strand; PAM type: YTN; PAM sequence: CTC
ttcttatattctcaggtaag

SEQ ID NO: 73366 - DNA, 20 bp, Artificial Sequence
  Description of Artificial Sequence: Synthetic oligonucleotide
  Target: SCNA; (+) strand; PAM type: YTN; PAM sequence: CTT
cttatattctcaggtaagtg

SEQ ID NO: 73367 - DNA, 20 bp, Artificial Sequence
  Description of Artificial Sequence: Synthetic oligonucleotide
  Target: SCNA; (+) strand; PAM type: YTN; PAM sequence: TTC
ttatattctcaggtaagtga

SEQ ID NO: 73368 - DNA, 20 bp, Artificial Sequence
  Description of Artificial Sequence: Synthetic oligonucleotide
  Target: SCNA; (+) strand; PAM type: YTN; PAM sequence: CTT
atattctcaggtaagtgact

SEQ ID NO: 73369 - DNA, 20 bp, Artificial Sequence
  Description of Artificial Sequence: Synthetic oligonucleotide
  Target: SCNA; (+) strand; PAM type: YTN; PAM sequence: TTA
tattctcaggtaagtgactc

SEQ ID NO: 73370 - DNA, 20 bp, Artificial Sequence
  Description of Artificial Sequence: Synthetic oligonucleotide
  Target: SCNA; (+) strand; PAM type: YTN; PAM sequence: TTC
tcaggtaagtgactctgtaa

SEQ ID NO: 73371 - DNA, 20 bp, Artificial Sequence
  Description of Artificial Sequence: Synthetic oligonucleotide
  Target: SCNA; (+) strand; PAM type: YTN; PAM sequence: CTC
aggtaagtgactctgtaata

SEQ ID NO: 73372 - DNA, 20 bp, Artificial Sequence
  Description of Artificial Sequence: Synthetic oligonucleotide
  Target: SCNA; (+) strand; PAM type: YTN; PAM sequence: CTC
tgtaataagaggattgtgta

SEQ ID NO: 73373 - DNA, 20 bp, Artificial Sequence
  Description of Artificial Sequence: Synthetic oligonucleotide
  Target: SCNA; (+) strand; PAM type: YTN; PAM sequence: CTG
taataagaggattgtgtagc

SEQ ID NO: 73374 - DNA, 20 bp, Artificial Sequence
  Description of Artificial Sequence: Synthetic oligonucleotide
  Target: SCNA; (+) strand; PAM type: YTN; PAM sequence: TTG
tgtagcatttacctaacagc

SEQ ID NO: 73375 - DNA, 20 bp, Artificial Sequence
  Description of Artificial Sequence: Synthetic oligonucleotide
  Target: SCNA; (+) strand; PAM type: YTN; PAM sequence: TTT
acctaacagctttactttag

SEQ ID NO: 73376 - DNA, 20 bp, Artificial Sequence
  Description of Artificial Sequence: Synthetic oligonucleotide
  Target: SCNA; (+) strand; PAM type: YTN; PAM sequence: TTA
cctaacagctttactttagg

SEQ ID NO: 73377 - DNA, 20 bp, Artificial Sequence
  Description of Artificial Sequence: Synthetic oligonucleotide
  Target: SCNA; (+) strand; PAM type: YTN; PAM sequence: CTA
acagctttactttaggactg

SEQ ID NO: 73378 - DNA, 20 bp, Artificial Sequence
  Description of Artificial Sequence: Synthetic oligonucleotide
  Target: SCNA; (+) strand; PAM type: YTN; PAM sequence: CTT
tactttaggactgtatactg

SEQ ID NO: 73379 - DNA, 20 bp, Artificial Sequence
  Description of Artificial Sequence: Synthetic oligonucleotide
  Target: SCNA; (+) strand; PAM type: YTN; PAM sequence: TTT
actttaggactgtatactgt

SEQ ID NO: 73380 - DNA, 20 bp, Artificial Sequence
  Description of Artificial Sequence: Synthetic oligonucleotide
  Target: SCNA; (+) strand; PAM type: YTN; PAM sequence: TTA
ctttaggactgtatactgtc

SEQ ID NO: 73381 - DNA, 20 bp, Artificial Sequence
  Description of Artificial Sequence: Synthetic oligonucleotide
  Target: SCNA; (+) strand; PAM type: YTN; PAM sequence: CTT
taggactgtatactgtcctt

SEQ ID NO: 73382 - DNA, 20 bp, Artificial Sequence
  Description of Artificial Sequence: Synthetic oligonucleotide
  Target: SCNA; (+) strand; PAM type: YTN; PAM sequence: TTT
aggactgtatactgtcctta

SEQ ID NO: 73383 - DNA, 20 bp, Artificial Sequence
  Description of Artificial Sequence: Synthetic oligonucleotide
  Target: SCNA; (+) strand; PAM type: YTN; PAM sequence: TTA
ggactgtatactgtccttag

SEQ ID NO: 73384 - DNA, 20 bp, Artificial Sequence
  Description of Artificial Sequence: Synthetic oligonucleotide
  Target: SCNA; (+) strand; PAM type: YTN; PAM sequence: CTG
tatactgtccttagatattt

SEQ ID NO: 73385 - DNA, 20 bp, Artificial Sequence
  Description of Artificial Sequence: Synthetic oligonucleotide
  Target: SCNA; (+) strand; PAM type: YTN; PAM sequence: CTG
tccttagatatttttaaaac

SEQ ID NO: 73386 - DNA, 20 bp, Artificial Sequence
  Description of Artificial Sequence: Synthetic oligonucleotide
  Target: SCNA; (+) strand; PAM type: YTN; PAM sequence: CTT
agatatttttaaaacttttt

SEQ ID NO: 73387 - DNA, 20 bp, Artificial Sequence
  Description of Artificial Sequence: Synthetic oligonucleotide
  Target: SCNA; (+) strand; PAM type: YTN; PAM sequence: TTA
gatatttttaaaacttttta

SEQ ID NO: 73388 - DNA, 20 bp, Artificial Sequence
  Description of Artificial Sequence: Synthetic oligonucleotide
  Target: SCNA; (+) strand; PAM type: YTN; PAM sequence: TTT
ttaaaactttttatatttca

SEQ ID NO: 73389 - DNA, 20 bp, Artificial Sequence
  Description of Artificial Sequence: Synthetic oligonucleotide
  Target: SCNA; (+) strand; PAM type: YTN; PAM sequence: TTT
taaaactttttatatttcat

SEQ ID NO: 73390 - DNA, 20 bp, Artificial Sequence
  Description of Artificial Sequence: Synthetic oligonucleotide
  Target: SCNA; (+) strand; PAM type: YTN; PAM sequence: TTT
aaaactttttatatttcatt

SEQ ID NO: 73391 - DNA, 20 bp, Artificial Sequence
  Description of Artificial Sequence: Synthetic oligonucleotide
  Target: SCNA; (+) strand; PAM type: YTN; PAM sequence: TTA
aaactttttatatttcattt

SEQ ID NO: 73392 - DNA, 20 bp, Artificial Sequence
  Description of Artificial Sequence: Synthetic oligonucleotide
  Target: SCNA; (+) strand; PAM type: YTN; PAM sequence: CTT
tttatatttcatttctaaat

SEQ ID NO: 73393 - DNA, 20 bp, Artificial Sequence
  Description of Artificial Sequence: Synthetic oligonucleotide
  Target: SCNA; (+) strand; PAM type: YTN; PAM sequence: TTT
ttatatttcatttctaaata

SEQ ID NO: 73394 - DNA, 20 bp, Artificial Sequence
  Description of Artificial Sequence: Synthetic oligonucleotide
  Target: SCNA; (+) strand; PAM type: YTN; PAM sequence: TTT
tatatttcatttctaaataa

SEQ ID NO: 73395 - DNA, 20 bp, Artificial Sequence
  Description of Artificial Sequence: Synthetic oligonucleotide
  Target: SCNA; (+) strand; PAM type: YTN; PAM sequence: TTT
atatttcatttctaaataag

SEQ ID NO: 73396 - DNA, 20 bp, Artificial Sequence
  Description of Artificial Sequence: Synthetic oligonucleotide
  Target: SCNA; (+) strand; PAM type: YTN; PAM sequence: TTA
tatttcatttctaaataaga

SEQ ID NO: 73397 - DNA, 20 bp, Artificial Sequence
  Description of Artificial Sequence: Synthetic oligonucleotide
  Target: SCNA; (+) strand; PAM type: YTN; PAM sequence: TTT
catttctaaataagaatatt

SEQ ID NO: 73398 - DNA, 20 bp, Artificial Sequence
  Description of Artificial Sequence: Synthetic oligonucleotide
  Target: SCNA; (+) strand; PAM type: YTN; PAM sequence: TTC
atttctaaataagaatatta

SEQ ID NO: 73399 - DNA, 20 bp, Artificial Sequence
  Description of Artificial Sequence: Synthetic oligonucleotide
  Target: SCNA; (+) strand; PAM type: YTN; PAM sequence: TTT
ctaaataagaatattacaaa

SEQ ID NO: 73400 - DNA, 20 bp, Artificial Sequence
  Description of Artificial Sequence: Synthetic oligonucleotide
  Target: SCNA; (+) strand; PAM type: YTN; PAM sequence: TTC
taaataagaatattacaaaa

SEQ ID NO: 73401 - DNA, 20 bp, Artificial Sequence
  Description of Artificial Sequence: Synthetic oligonucleotide
  Target: SCNA; (+) strand; PAM type: YTN; PAM sequence: CTA
aataagaatattacaaaaaa

SEQ ID NO: 73402 - DNA, 20 bp, Artificial Sequence
  Description of Artificial Sequence: Synthetic oligonucleotide
  Target: SCNA; (+) strand; PAM type: YTN; PAM sequence: TTA
caaaaaatttcctaacattt

SEQ ID NO: 73403 - DNA, 20 bp, Artificial Sequence
  Description of Artificial Sequence: Synthetic oligonucleotide
  Target: SCNA; (+) strand; PAM type: YTN; PAM sequence: TTT
cctaacatttatataacata

SEQ ID NO: 73404 - DNA, 20 bp, Artificial Sequence
  Description of Artificial Sequence: Synthetic oligonucleotide
  Target: SCNA; (+) strand; PAM type: YTN; PAM sequence: TTC
ctaacatttatataacataa

SEQ ID NO: 73405 - DNA, 20 bp, Artificial Sequence
  Description of Artificial Sequence: Synthetic oligonucleotide
  Target: SCNA; (+) strand; PAM type: YTN; PAM sequence: CTA
acatttatataacataattc

SEQ ID NO: 73406 - DNA, 20 bp, Artificial Sequence
  Description of Artificial Sequence: Synthetic oligonucleotide
  Target: SCNA; (+) strand; PAM type: YTN; PAM sequence: TTT
atataacataattctcaaag

SEQ ID NO: 73407 - DNA, 20 bp, Artificial Sequence
  Description of Artificial Sequence: Synthetic oligonucleotide
  Target: SCNA; (+) strand; PAM type: YTN; PAM sequence: TTA
tataacataattctcaaagt

SEQ ID NO: 73408 - DNA, 20 bp, Artificial Sequence
  Description of Artificial Sequence: Synthetic oligonucleotide
  Target: SCNA; (+) strand; PAM type: YTN; PAM sequence: TTC
tcaaagtagatagagccaaa

SEQ ID NO: 73409 - DNA, 20 bp, Artificial Sequence
  Description of Artificial Sequence: Synthetic oligonucleotide
  Target: SCNA; (+) strand; PAM type: YTN; PAM sequence: CTC
aaagtagatagagccaaata

SEQ ID NO: 73410 - DNA, 20 bp, Artificial Sequence
  Description of Artificial Sequence: Synthetic oligonucleotide
  Target: SCNA; (+) strand; PAM type: YTN; PAM sequence: CTG
acttctgctagttttttttc

SEQ ID NO: 73411 - DNA, 20 bp, Artificial Sequence
  Description of Artificial Sequence: Synthetic oligonucleotide
  Target: SCNA; (+) strand; PAM type: YTN; PAM sequence: CTT
ctgctagttttttttccaga

SEQ ID NO: 73412 - DNA, 20 bp, Artificial Sequence
  Description of Artificial Sequence: Synthetic oligonucleotide
  Target: SCNA; (+) strand; PAM type: YTN; PAM sequence: TTC
tgctagttttttttccagat

SEQ ID NO: 73413 - DNA, 20 bp, Artificial Sequence
  Description of Artificial Sequence: Synthetic oligonucleotide
  Target: SCNA; (+) strand; PAM type: YTN; PAM sequence: CTG
ctagttttttttccagatat

SEQ ID NO: 73414 - DNA, 20 bp, Artificial Sequence
  Description of Artificial Sequence: Synthetic oligonucleotide
  Target: SCNA; (+) strand; PAM type: YTN; PAM sequence: CTA
gttttttttccagatatttg

SEQ ID NO: 73415 - DNA, 20 bp, Artificial Sequence
  Description of Artificial Sequence: Synthetic oligonucleotide
  Target: SCNA; (+) strand; PAM type: YTN; PAM sequence: TTT
tttttccagatatttgtctt

SEQ ID NO: 73416 - DNA, 20 bp, Artificial Sequence
  Description of Artificial Sequence: Synthetic oligonucleotide
  Target: SCNA; (+) strand; PAM type: YTN; PAM sequence: TTT
ttttccagatatttgtcttt

SEQ ID NO: 73417 - DNA, 20 bp, Artificial Sequence
  Description of Artificial Sequence: Synthetic oligonucleotide
  Target: SCNA; (+) strand; PAM type: YTN; PAM sequence: TTT
tttccagatatttgtctttt

SEQ ID NO: 73418 - DNA, 20 bp, Artificial Sequence
  Description of Artificial Sequence: Synthetic oligonucleotide
  Target: SCNA; (+) strand; PAM type: YTN; PAM sequence: TTT
ttccagatatttgtctttta

SEQ ID NO: 73419 - DNA, 20 bp, Artificial Sequence
  Description of Artificial Sequence: Synthetic oligonucleotide
  Target: SCNA; (+) strand; PAM type: YTN; PAM sequence: TTT
tccagatatttgtcttttat

SEQ ID NO: 73420 - DNA, 20 bp, Artificial Sequence
  Description of Artificial Sequence: Synthetic oligonucleotide
  Target: SCNA; (+) strand; PAM type: YTN; PAM sequence: TTT
ccagatatttgtcttttatg

SEQ ID NO: 73421 - DNA, 20 bp, Artificial Sequence
  Description of Artificial Sequence: Synthetic oligonucleotide
  Target: SCNA; (+) strand; PAM type: YTN; PAM sequence: TTC
cagatatttgtcttttatgt

SEQ ID NO: 73422 - DNA, 20 bp, Artificial Sequence
  Description of Artificial Sequence: Synthetic oligonucleotide
  Target: SCNA; (+) strand; PAM type: YTN; PAM sequence: TTT
gtcttttatgtacatggcca

SEQ ID NO: 73423 - DNA, 20 bp, Artificial Sequence
  Description of Artificial Sequence: Synthetic oligonucleotide
  Target: SCNA; (+) strand; PAM type: YTN; PAM sequence: TTG
tcttttatgtacatggccag

SEQ ID NO: 73424 - DNA, 20 bp, Artificial Sequence
  Description of Artificial Sequence: Synthetic oligonucleotide
  Target: SCNA; (+) strand; PAM type: YTN; PAM sequence: CTT
ttatgtacatggccagaaac

SEQ ID NO: 73425 - DNA, 20 bp, Artificial Sequence
  Description of Artificial Sequence: Synthetic oligonucleotide
  Target: SCNA; (+) strand; PAM type: YTN; PAM sequence: TTT
tatgtacatggccagaaacc

SEQ ID NO: 73426 - DNA, 20 bp, Artificial Sequence
  Description of Artificial Sequence: Synthetic oligonucleotide
  Target: SCNA; (+) strand; PAM type: YTN; PAM sequence: TTT
atgtacatggccagaaacca

SEQ ID NO: 73427 - DNA, 20 bp, Artificial Sequence
  Description of Artificial Sequence: Synthetic oligonucleotide
  Target: SCNA; (+) strand; PAM type: YTN; PAM sequence: TTA
tgtacatggccagaaaccac

SEQ ID NO: 73428 - DNA, 20 bp, Artificial Sequence
  Description of Artificial Sequence: Synthetic oligonucleotide
  Target: SCNA; (+) strand; PAM type: YTN; PAM sequence: CTT
agaacttgcataaaaacaag

SEQ ID NO: 73429 - DNA, 20 bp, Artificial Sequence
  Description of Artificial Sequence: Synthetic oligonucleotide
  Target: SCNA; (+) strand; PAM type: YTN; PAM sequence: TTA
gaacttgcataaaaacaagt

SEQ ID NO: 73430 - DNA, 20 bp, Artificial Sequence
  Description of Artificial Sequence: Synthetic oligonucleotide
  Target: SCNA; (+) strand; PAM type: YTN; PAM sequence: CTT
gcataaaaacaagttaagaa

SEQ ID NO: 73431 - DNA, 20 bp, Artificial Sequence
  Description of Artificial Sequence: Synthetic oligonucleotide
  Target: SCNA; (+) strand; PAM type: YTN; PAM sequence: TTG
cataaaaacaagttaagaag

SEQ ID NO: 73432 - DNA, 20 bp, Artificial Sequence
  Description of Artificial Sequence: Synthetic oligonucleotide
  Target: SCNA; (+) strand; PAM type: YTN; PAM sequence: TTA
agaagcaaaatgtcagttag

SEQ ID NO: 73433 - DNA, 20 bp, Artificial Sequence
  Description of Artificial Sequence: Synthetic oligonucleotide
  Target: SCNA; (+) strand; PAM type: YTN; PAM sequence: TTA
gttcctttctctatcccaga

SEQ ID NO: 73434 - DNA, 20 bp, Artificial Sequence
  Description of Artificial Sequence: Synthetic oligonucleotide
  Target: SCNA; (+) strand; PAM type: YTN; PAM sequence: TTC
ctttctctatcccagagcgc

SEQ ID NO: 73435 - DNA, 20 bp, Artificial Sequence
  Description of Artificial Sequence: Synthetic oligonucleotide
  Target: SCNA; (+) strand; PAM type: YTN; PAM sequence: CTT
tctctatcccagagcgcact

SEQ ID NO: 73436 - DNA, 20 bp, Artificial Sequence
  Description of Artificial Sequence: Synthetic oligonucleotide
  Target: SCNA; (+) strand; PAM type: YTN; PAM sequence: TTT
ctctatcccagagcgcactg

SEQ ID NO: 73437 - DNA, 20 bp, Artificial Sequence
  Description of Artificial Sequence: Synthetic oligonucleotide
  Target: SCNA; (+) strand; PAM type: YTN; PAM sequence: TTC
tctatcccagagcgcactgt

SEQ ID NO: 73438 - DNA, 20 bp, Artificial Sequence
  Description of Artificial Sequence: Synthetic oligonucleotide
  Target: SCNA; (+) strand; PAM type: YTN; PAM sequence: CTC
tatcccagagcgcactgttt

SEQ ID NO: 73439 - DNA, 20 bp, Artificial Sequence
  Description of Artificial Sequence: Synthetic oligonucleotide
  Target: SCNA; (+) strand; PAM type: YTN; PAM sequence: CTA
tcccagagcgcactgtttca

SEQ ID NO: 73440 - DNA, 20 bp, Artificial Sequence
  Description of Artificial Sequence: Synthetic oligonucleotide
  Target: SCNA; (+) strand; PAM type: YTN; PAM sequence: CTG
tttcattaggaatttttcaa

SEQ ID NO: 73441 - DNA, 20 bp, Artificial Sequence
  Description of Artificial Sequence: Synthetic oligonucleotide
  Target: SCNA; (+) strand; PAM type: YTN; PAM sequence: TTT
cattaggaatttttcaataa

SEQ ID NO: 73442 - DNA, 20 bp, Artificial Sequence
  Description of Artificial Sequence: Synthetic oligonucleotide
  Target: SCNA; (+) strand; PAM type: YTN; PAM sequence: TTC
attaggaatttttcaataaa

SEQ ID NO: 73443 - DNA, 20 bp, Artificial Sequence
  Description of Artificial Sequence: Synthetic oligonucleotide
  Target: SCNA; (+) strand; PAM type: YTN; PAM sequence: TTA
ggaatttttcaataaaaata

SEQ ID NO: 73444 - DNA, 20 bp, Artificial Sequence
  Description of Artificial Sequence: Synthetic oligonucleotide
  Target: SCNA; (+) strand; PAM type: YTN; PAM sequence: TTT
ttcaataaaaataataatgt

SEQ ID NO: 73445 - DNA, 20 bp, Artificial Sequence
  Description of Artificial Sequence: Synthetic oligonucleotide
  Target: SCNA; (+) strand; PAM type: YTN; PAM sequence: TTT
tcaataaaaataataatgta

SEQ ID NO: 73446 - DNA, 20 bp, Artificial Sequence
  Description of Artificial Sequence: Synthetic oligonucleotide
  Target: SCNA; (+) strand; PAM type: YTN; PAM sequence: TTT
caataaaaataataatgtag

SEQ ID NO: 73447 - DNA, 20 bp, Artificial Sequence
  Description of Artificial Sequence: Synthetic oligonucleotide
  Target: SCNA; (+) strand; PAM type: YTN; PAM sequence: TTC
aataaaaataataatgtaga

SEQ ID NO: 73448 - DNA, 20 bp, Artificial Sequence
  Description of Artificial Sequence: Synthetic oligonucleotide
  Target: SCNA; (+) strand; PAM type: YTN; PAM sequence: TTT
ttacagttttcatgtcttga

SEQ ID NO: 73449 - DNA, 20 bp, Artificial Sequence
  Description of Artificial Sequence: Synthetic oligonucleotide
  Target: SCNA; (+) strand; PAM type: YTN; PAM sequence: TTT
tacagttttcatgtcttgat

SEQ ID NO: 73450 - DNA, 20 bp, Artificial Sequence
  Description of Artificial Sequence: Synthetic oligonucleotide
  Target: SCNA; (+) strand; PAM type: YTN; PAM sequence: TTT
acagttttcatgtcttgata

SEQ ID NO: 73451 - DNA, 20 bp, Artificial Sequence
  Description of Artificial Sequence: Synthetic oligonucleotide
  Target: SCNA; (+) strand; PAM type: YTN; PAM sequence: TTA
cagttttcatgtcttgatat

SEQ ID NO: 73452 - DNA, 20 bp, Artificial Sequence
  Description of Artificial Sequence: Synthetic oligonucleotide
  Target: SCNA; (+) strand; PAM type: YTN; PAM sequence: TTT
tcatgtcttgatatatagtg

SEQ ID NO: 73453 - DNA, 20 bp, Artificial Sequence
  Description of Artificial Sequence: Synthetic oligonucleotide
  Target: SCNA; (+) strand; PAM type: YTN; PAM sequence: TTT
catgtcttgatatatagtga

SEQ ID NO: 73454 - DNA, 20 bp, Artificial Sequence
  Description of Artificial Sequence: Synthetic oligonucleotide
  Target: SCNA; (+) strand; PAM type: YTN; PAM sequence: TTC
atgtcttgatatatagtgaa

SEQ ID NO: 73455 - DNA, 20 bp, Artificial Sequence
  Description of Artificial Sequence: Synthetic oligonucleotide
  Target: SCNA; (+) strand; PAM type: YTN; PAM sequence: CTT
gatatatagtgaaattgagc

SEQ ID NO: 73456 - DNA, 20 bp, Artificial Sequence
  Description of Artificial Sequence: Synthetic oligonucleotide
  Target: SCNA; (+) strand; PAM type: YTN; PAM sequence: TTG
atatatagtgaaattgagca

SEQ ID NO: 73457 - DNA, 20 bp, Artificial Sequence
  Description of Artificial Sequence: Synthetic oligonucleotide
  Target: SCNA; (+) strand; PAM type: YTN; PAM sequence: TTG
agcaatgtgagaataaatgt

SEQ ID NO: 73458 - DNA, 20 bp, Artificial Sequence
  Description of Artificial Sequence: Synthetic oligonucleotide
  Target: SCNA; (+) strand; PAM type: YTN; PAM sequence: CTA
gaaaagaaaaatatctttcg

SEQ ID NO: 73459 - DNA, 20 bp, Artificial Sequence
  Description of Artificial Sequence: Synthetic oligonucleotide
  Target: SCNA; (+) strand; PAM type: YTN; PAM sequence: CTT
tcgatttgagaacagatggt

SEQ ID NO: 73460 - DNA, 20 bp, Artificial Sequence
  Description of Artificial Sequence: Synthetic oligonucleotide
  Target: SCNA; (+) strand; PAM type: YTN; PAM sequence: TTT
cgatttgagaacagatggtt

SEQ ID NO: 73461 - DNA, 20 bp, Artificial Sequence
  Description of Artificial Sequence: Synthetic oligonucleotide
  Target: SCNA; (+) strand; PAM type: YTN; PAM sequence: TTC
gatttgagaacagatggtta

SEQ ID NO: 73462 - DNA, 20 bp, Artificial Sequence
  Description of Artificial Sequence: Synthetic oligonucleotide
  Target: SCNA; (+) strand; PAM type: YTN; PAM sequence: TTT
gagaacagatggttaataat

SEQ ID NO: 73463 - DNA, 20 bp, Artificial Sequence
  Description of Artificial Sequence: Synthetic oligonucleotide
  Target: SCNA; (+) strand; PAM type: YTN; PAM sequence: TTG
agaacagatggttaataata

SEQ ID NO: 73464 - DNA, 20 bp, Artificial Sequence
  Description of Artificial Sequence: Synthetic oligonucleotide
  Target: SCNA; (+) strand; PAM type: YTN; PAM sequence: TTA
ataataatcatgacagtgat

SEQ ID NO: 73465 - DNA, 20 bp, Artificial Sequence
  Description of Artificial Sequence: Synthetic oligonucleotide
  Target: SCNA; (+) strand; PAM type: YTN; PAM sequence: TTC
aaggttaatgacctacatgc

SEQ ID NO: 73466 - DNA, 20 bp, Artificial Sequence
  Description of Artificial Sequence: Synthetic oligonucleotide
  Target: SCNA; (+) strand; PAM type: YTN; PAM sequence: TTA
atgacctacatgctaaactt

SEQ ID NO: 73467 - DNA, 20 bp, Artificial Sequence
  Description of Artificial Sequence: Synthetic oligonucleotide
  Target: SCNA; (+) strand; PAM type: YTN; PAM sequence: CTA
catgctaaacttgttttaat

SEQ ID NO: 73468 - DNA, 20 bp, Artificial Sequence
  Description of Artificial Sequence: Synthetic oligonucleotide
  Target: SCNA; (+) strand; PAM type: YTN; PAM sequence: CTA
aacttgttttaatttttaaa

SEQ ID NO: 73469 - DNA, 20 bp, Artificial Sequence
  Description of Artificial Sequence: Synthetic oligonucleotide
  Target: SCNA; (+) strand; PAM type: YTN; PAM sequence: CTT
gttttaatttttaaaagcca

SEQ ID NO: 73470 - DNA, 20 bp, Artificial Sequence
  Description of Artificial Sequence: Synthetic oligonucleotide
  Target: SCNA; (+) strand; PAM type: YTN; PAM sequence: TTG
ttttaatttttaaaagccat

SEQ ID NO: 73471 - DNA, 20 bp, Artificial Sequence
  Description of Artificial Sequence: Synthetic oligonucleotide
  Target: SCNA; (+) strand; PAM type: YTN; PAM sequence: TTT
taatttttaaaagccattac

SEQ ID NO: 73472 - DNA, 20 bp, Artificial Sequence
  Description of Artificial Sequence: Synthetic oligonucleotide
  Target: SCNA; (+) strand; PAM type: YTN; PAM sequence: TTT
aatttttaaaagccattact

SEQ ID NO: 73473 - DNA, 20 bp, Artificial Sequence
  Description of Artificial Sequence: Synthetic oligonucleotide
  Target: SCNA; (+) strand; PAM type: YTN; PAM sequence: TTA
atttttaaaagccattacta

SEQ ID NO: 73474 - DNA, 20 bp, Artificial Sequence
  Description of Artificial Sequence: Synthetic oligonucleotide
  Target: SCNA; (+) strand; PAM type: YTN; PAM sequence: TTT
ttaaaagccattactaactg

SEQ ID NO: 73475 - DNA, 20 bp, Artificial Sequence
  Description of Artificial Sequence: Synthetic oligonucleotide
  Target: SCNA; (+) strand; PAM type: YTN; PAM sequence: TTT
taaaagccattactaactga

SEQ ID NO: 73476 - DNA, 20 bp, Artificial Sequence
  Description of Artificial Sequence: Synthetic oligonucleotide
  Target: SCNA; (+) strand; PAM type: YTN; PAM sequence: TTT
aaaagccattactaactgaa

SEQ ID NO: 73477 - DNA, 20 bp, Artificial Sequence
  Description of Artificial Sequence: Synthetic oligonucleotide
  Target: SCNA; (+) strand; PAM type: YTN; PAM sequence: TTA
aaagccattactaactgaaa

SEQ ID NO: 73478 - DNA, 20 bp, Artificial Sequence
  Description of Artificial Sequence: Synthetic oligonucleotide
  Target: SCNA; (+) strand; PAM type: YTN; PAM sequence: TTA
ctaactgaaaactccctgct

SEQ ID NO: 73479 - DNA, 20 bp, Artificial Sequence
  Description of Artificial Sequence: Synthetic oligonucleotide
  Target: SCNA; (+) strand; PAM type: YTN; PAM sequence: CTA
actgaaaactccctgcttta

SEQ ID NO: 73480 - DNA, 20 bp, Artificial Sequence
  Description of Artificial Sequence: Synthetic oligonucleotide
  Target: SCNA; (+) strand; PAM type: YTN; PAM sequence: CTG
aaaactccctgctttagctg

SEQ ID NO: 73481 - DNA, 20 bp, Artificial Sequence
  Description of Artificial Sequence: Synthetic oligonucleotide
  Target: SCNA; (+) strand; PAM type: YTN; PAM sequence: CTC
cctgctttagctgaaccaac

SEQ ID NO: 73482 - DNA, 20 bp, Artificial Sequence
  Description of Artificial Sequence: Synthetic oligonucleotide
  Target: SCNA; (+) strand; PAM type: YTN; PAM sequence: CTG
ctttagctgaaccaacactt

SEQ ID NO: 73483 - DNA, 20 bp, Artificial Sequence
  Description of Artificial Sequence: Synthetic oligonucleotide
  Target: SCNA; (+) strand; PAM type: YTN; PAM sequence: CTT
tagctgaaccaacacttaac

SEQ ID NO: 73484 - DNA, 20 bp, Artificial Sequence
  Description of Artificial Sequence: Synthetic oligonucleotide
  Target: SCNA; (+) strand; PAM type: YTN; PAM sequence: TTT
agctgaaccaacacttaaca

SEQ ID NO: 73485 - DNA, 20 bp, Artificial Sequence
  Description of Artificial Sequence: Synthetic oligonucleotide
  Target: SCNA; (+) strand; PAM type: YTN; PAM sequence: TTA
gctgaaccaacacttaacaa

SEQ ID NO: 73486 - DNA, 20 bp, Artificial Sequence
  Description of Artificial Sequence: Synthetic oligonucleotide
  Target: SCNA; (+) strand; PAM type: YTN; PAM sequence: CTG
aaccaacacttaacaagtgt

SEQ ID NO: 73487 - DNA, 20 bp, Artificial Sequence
  Description of Artificial Sequence: Synthetic oligonucleotide
  Target: SCNA; (+) strand; PAM type: YTN; PAM sequence: CTT
aacaagtgttttttaaagat

SEQ ID NO: 73488 - DNA, 20 bp, Artificial Sequence
  Description of Artificial Sequence: Synthetic oligonucleotide
  Target: SCNA; (+) strand; PAM type: YTN; PAM sequence: TTA
acaagtgttttttaaagatg

SEQ ID NO: 73489 - DNA, 20 bp, Artificial Sequence
  Description of Artificial Sequence: Synthetic oligonucleotide
  Target: SCNA; (+) strand; PAM type: YTN; PAM sequence: TTT
tttaaagatgtcttgatacc

SEQ ID NO: 73490 - DNA, 20 bp, Artificial Sequence
  Description of Artificial Sequence: Synthetic oligonucleotide
  Target: SCNA; (+) strand; PAM type: YTN; PAM sequence: TTT
ttaaagatgtcttgatacct

SEQ ID NO: 73491 - DNA, 20 bp, Artificial Sequence
  Description of Artificial Sequence: Synthetic oligonucleotide
  Target: SCNA; (+) strand; PAM type: YTN; PAM sequence: TTT
taaagatgtcttgatacctt

SEQ ID NO: 73492 - DNA, 20 bp, Artificial Sequence
  Description of Artificial Sequence: Synthetic oligonucleotide
  Target: SCNA; (+) strand; PAM type: YTN; PAM sequence: TTT
aaagatgtcttgataccttc

SEQ ID NO: 73493 - DNA, 20 bp, Artificial Sequence
  Description of Artificial Sequence: Synthetic oligonucleotide
  Target: SCNA; (+) strand; PAM type: YTN; PAM sequence: TTA
aagatgtcttgataccttca

SEQ ID NO: 73494 - DNA, 20 bp, Artificial Sequence
  Description of Artificial Sequence: Synthetic oligonucleotide
  Target: SCNA; (+) strand; PAM type: YTN; PAM sequence: CTT
gataccttcagagaagttct

SEQ ID NO: 73495 - DNA, 20 bp, Artificial Sequence
  Description of Artificial Sequence: Synthetic oligonucleotide
  Target: SCNA; (+) strand; PAM type: YTN; PAM sequence: TTG
ataccttcagagaagttctc

SEQ ID NO: 73496 - DNA, 20 bp, Artificial Sequence
  Description of Artificial Sequence: Synthetic oligonucleotide
  Target: SCNA; (+) strand; PAM type: YTN; PAM sequence: CTT
cagagaagttctcctgctgc

SEQ ID NO: 73497 - DNA, 20 bp, Artificial Sequence
  Description of Artificial Sequence: Synthetic oligonucleotide
  Target: SCNA; (+) strand; PAM type: YTN; PAM sequence: TTC
agagaagttctcctgctgct

SEQ ID NO: 73498 - DNA, 20 bp, Artificial Sequence
  Description of Artificial Sequence: Synthetic oligonucleotide
  Target: SCNA; (+) strand; PAM type: YTN; PAM sequence: TTC
tcctgctgctagttttctct

SEQ ID NO: 73499 - DNA, 20 bp, Artificial Sequence
  Description of Artificial Sequence: Synthetic oligonucleotide
  Target: SCNA; (+) strand; PAM type: YTN; PAM sequence: CTC
ctgctgctagttttctctgg

SEQ ID NO: 73500 - DNA, 20 bp, Artificial Sequence
  Description of Artificial Sequence: Synthetic oligonucleotide
  Target: SCNA; (+) strand; PAM type: YTN; PAM sequence: CTG
ctgctagttttctctggagc

SEQ ID NO: 73501 - DNA, 20 bp, Artificial Sequence
  Description of Artificial Sequence: Synthetic oligonucleotide
  Target: SCNA; (+) strand; PAM type: YTN; PAM sequence: CTG
ctagttttctctggagcaac

SEQ ID NO: 73502 - DNA, 20 bp, Artificial Sequence
  Description of Artificial Sequence: Synthetic oligonucleotide
  Target: SCNA; (+) strand; PAM type: YTN; PAM sequence: CTA
gttttctctggagcaacagt

SEQ ID NO: 73503 - DNA, 20 bp, Artificial Sequence
  Description of Artificial Sequence: Synthetic oligonucleotide
  Target: SCNA; (+) strand; PAM type: YTN; PAM sequence: TTT
tctctggagcaacagtggga

SEQ ID NO: 73504 - DNA, 20 bp, Artificial Sequence
  Description of Artificial Sequence: Synthetic oligonucleotide
  Target: SCNA; (+) strand; PAM type: YTN; PAM sequence: TTT
ctctggagcaacagtgggaa

SEQ ID NO: 73505 - DNA, 20 bp, Artificial Sequence
  Description of Artificial Sequence: Synthetic oligonucleotide
  Target: SCNA; (+) strand; PAM type: YTN; PAM sequence: TTC
tctggagcaacagtgggaaa

SEQ ID NO: 73506 - DNA, 20 bp, Artificial Sequence
  Description of Artificial Sequence: Synthetic oligonucleotide
  Target: SCNA; (+) strand; PAM type: YTN; PAM sequence: CTC
tggagcaacagtgggaaacc

SEQ ID NO: 73507 - DNA, 20 bp, Artificial Sequence
  Description of Artificial Sequence: Synthetic oligonucleotide
  Target: SCNA; (+) strand; PAM type: YTN; PAM sequence: CTG
gagcaacagtgggaaacccc

SEQ ID NO: 73508 - DNA, 20 bp, Artificial Sequence
  Description of Artificial Sequence: Synthetic oligonucleotide
  Target: SCNA; (+) strand; PAM type: YTN; PAM sequence: TTA
ctcctttgtgaatataagca

SEQ ID NO: 73509 - DNA, 20 bp, Artificial Sequence
  Description of Artificial Sequence: Synthetic oligonucleotide
  Target: SCNA; (+) strand; PAM type: YTN; PAM sequence: CTC
ctttgtgaatataagcatcc

SEQ ID NO: 73510 - DNA, 20 bp, Artificial Sequence
  Description of Artificial Sequence: Synthetic oligonucleotide
  Target: SCNA; (+) strand; PAM type: YTN; PAM sequence: CTT
tgtgaatataagcatccaca

SEQ ID NO: 73511 - DNA, 20 bp, Artificial Sequence
  Description of Artificial Sequence: Synthetic oligonucleotide
  Target: SCNA; (+) strand; PAM type: YTN; PAM sequence: TTT
gtgaatataagcatccacat

SEQ ID NO: 73512 - DNA, 20 bp, Artificial Sequence
  Description of Artificial Sequence: Synthetic oligonucleotide
  Target: SCNA; (+) strand; PAM type: YTN; PAM sequence: TTG
tgaatataagcatccacatg

SEQ ID NO: 73513 - DNA, 20 bp, Artificial Sequence
  Description of Artificial Sequence: Synthetic oligonucleotide
  Target: SCNA; (+) strand; PAM type: YTN; PAM sequence: TTG
gttgtttccgcatgcacggg

SEQ ID NO: 73514 - DNA, 20 bp, Artificial Sequence
  Description of Artificial Sequence: Synthetic oligonucleotide
  Target: SCNA; (+) strand; PAM type: YTN; PAM sequence: TTG
tttccgcatgcacgggcaaa

SEQ ID NO: 73515 - DNA, 20 bp, Artificial Sequence
  Description of Artificial Sequence: Synthetic oligonucleotide
  Target: SCNA; (+) strand; PAM type: YTN; PAM sequence: TTT
ccgcatgcacgggcaaacat

SEQ ID NO: 73516 - DNA, 20 bp, Artificial Sequence
  Description of Artificial Sequence: Synthetic oligonucleotide
  Target: SCNA; (+) strand; PAM type: YTN; PAM sequence: TTC
cgcatgcacgggcaaacatg

SEQ ID NO: 73517 - DNA, 20 bp, Artificial Sequence
  Description of Artificial Sequence: Synthetic oligonucleotide
  Target: SCNA; (+) strand; PAM type: YTN; PAM sequence: TTT
tgttatactaatgtctgaag

SEQ ID NO: 73518 - DNA, 20 bp, Artificial Sequence
  Description of Artificial Sequence: Synthetic oligonucleotide
  Target: SCNA; (+) strand; PAM type: YTN; PAM sequence: TTT
gttatactaatgtctgaagt

SEQ ID NO: 73519 - DNA, 20 bp, Artificial Sequence
  Description of Artificial Sequence: Synthetic oligonucleotide
  Target: SCNA; (+) strand; PAM type: YTN; PAM sequence: TTG
ttatactaatgtctgaagta

SEQ ID NO: 73520 - DNA, 20 bp, Artificial Sequence
  Description of Artificial Sequence: Synthetic oligonucleotide
  Target: SCNA; (+) strand; PAM type: YTN; PAM sequence: TTA
tactaatgtctgaagtacaa

SEQ ID NO: 73521 - DNA, 20 bp, Artificial Sequence
  Description of Artificial Sequence: Synthetic oligonucleotide
  Target: SCNA; (+) strand; PAM type: YTN; PAM sequence: CTA
atgtctgaagtacaaattgt

SEQ ID NO: 73522 - DNA, 20 bp, Artificial Sequence
  Description of Artificial Sequence: Synthetic oligonucleotide
  Target: SCNA; (+) strand; PAM type: YTN; PAM sequence: CTG
aagtacaaattgttgtagaa

SEQ ID NO: 73523 - DNA, 20 bp, Artificial Sequence
  Description of Artificial Sequence: Synthetic oligonucleotide
  Target: SCNA; (+) strand; PAM type: YTN; PAM sequence: TTG
ttgtagaatcattttattcc

SEQ ID NO: 73524 - DNA, 20 bp, Artificial Sequence
  Description of Artificial Sequence: Synthetic oligonucleotide
  Target: SCNA; (+) strand; PAM type: YTN; PAM sequence: TTG
tagaatcattttattccata

SEQ ID NO: 73525 - DNA, 20 bp, Artificial Sequence
  Description of Artificial Sequence: Synthetic oligonucleotide
  Target: SCNA; (+) strand; PAM type: YTN; PAM sequence: TTT
tattccatagacttccaagt

SEQ ID NO: 73526 - DNA, 20 bp, Artificial Sequence
  Description of Artificial Sequence: Synthetic oligonucleotide
  Target: SCNA; (+) strand; PAM type: YTN; PAM sequence: TTT
attccatagacttccaagtc

SEQ ID NO: 73527 - DNA, 20 bp, Artificial Sequence
  Description of Artificial Sequence: Synthetic oligonucleotide
  Target: SCNA; (+) strand; PAM type: YTN; PAM sequence: TTA
ttccatagacttccaagtct

SEQ ID NO: 73528 - DNA, 20 bp, Artificial Sequence
  Description of Artificial Sequence: Synthetic oligonucleotide
  Target: SCNA; (+) strand; PAM type: YTN; PAM sequence: TTC
catagacttccaagtctaat

SEQ ID NO: 73529 - DNA, 20 bp, Artificial Sequence
  Description of Artificial Sequence: Synthetic oligonucleotide
  Target: SCNA; (+) strand; PAM type: YTN; PAM sequence: CTT
ccaagtctaattctaatact

SEQ ID NO: 73530 - DNA, 20 bp, Artificial Sequence
  Description of Artificial Sequence: Synthetic oligonucleotide
  Target: SCNA; (+) strand; PAM type: YTN; PAM sequence: TTC
caagtctaattctaatacta

SEQ ID NO: 73531 - DNA, 20 bp, Artificial Sequence
  Description of Artificial Sequence: Synthetic oligonucleotide
  Target: SCNA; (+) strand; PAM type: YTN; PAM sequence: CTA
attctaatactaacttccat

SEQ ID NO: 73532 - DNA, 20 bp, Artificial Sequence
  Description of Artificial Sequence: Synthetic oligonucleotide
  Target: SCNA; (+) strand; PAM type: YTN; PAM sequence: TTC
taatactaacttccatcaat

SEQ ID NO: 73533 - DNA, 20 bp, Artificial Sequence
  Description of Artificial Sequence: Synthetic oligonucleotide
  Target: SCNA; (+) strand; PAM type: YTN; PAM sequence: CTA
atactaacttccatcaatag

SEQ ID NO: 73534 - DNA, 20 bp, Artificial Sequence
  Description of Artificial Sequence: Synthetic oligonucleotide
  Target: SCNA; (+) strand; PAM type: YTN; PAM sequence: CTA
acttccatcaatagttaaat

SEQ ID NO: 73535 - DNA, 20 bp, Artificial Sequence
  Description of Artificial Sequence: Synthetic oligonucleotide
  Target: SCNA; (+) strand; PAM type: YTN; PAM sequence: CTT
ccatcaatagttaaattatt

SEQ ID NO: 73536 - DNA, 20 bp, Artificial Sequence
  Description of Artificial Sequence: Synthetic oligonucleotide
  Target: SCNA; (+) strand; PAM type: YTN; PAM sequence: TTC
catcaatagttaaattatta

SEQ ID NO: 73537 - DNA, 20 bp, Artificial Sequence
  Description of Artificial Sequence: Synthetic oligonucleotide
  Target: SCNA; (+) strand; PAM type: YTN; PAM sequence: TTA
aattattatttatcttctat

SEQ ID NO: 73538 - DNA, 20 bp, Artificial Sequence
  Description of Artificial Sequence: Synthetic oligonucleotide
  Target: SCNA; (+) strand; PAM type: YTN; PAM sequence: TTA
ttatttatcttctatccaaa

SEQ ID NO: 73539 - DNA, 20 bp, Artificial Sequence
  Description of Artificial Sequence: Synthetic oligonucleotide
  Target: SCNA; (+) strand; PAM type: YTN; PAM sequence: TTA
tttatcttctatccaaaggc

SEQ ID NO: 73540 - DNA, 20 bp, Artificial Sequence
  Description of Artificial Sequence: Synthetic oligonucleotide
  Target: SCNA; (+) strand; PAM type: YTN; PAM sequence: TTT
atcttctatccaaaggctac

SEQ ID NO: 73541 - DNA, 20 bp, Artificial Sequence
  Description of Artificial Sequence: Synthetic oligonucleotide
  Target: SCNA; (+) strand; PAM type: YTN; PAM sequence: TTA
tcttctatccaaaggctacc

SEQ ID NO: 73542 - DNA, 20 bp, Artificial Sequence
  Description of Artificial Sequence: Synthetic oligonucleotide
  Target: SCNA; (+) strand; PAM type: YTN; PAM sequence: CTT
ctatccaaaggctacctgaa

SEQ ID NO: 73543 - DNA, 20 bp, Artificial Sequence
  Description of Artificial Sequence: Synthetic oligonucleotide
  Target: SCNA; (+) strand; PAM type: YTN; PAM sequence: TTC
tatccaaaggctacctgaag

SEQ ID NO: 73544 - DNA, 20 bp, Artificial Sequence
  Description of Artificial Sequence: Synthetic oligonucleotide
  Target: SCNA; (+) strand; PAM type: YTN; PAM sequence: CTA
tccaaaggctacctgaaggt

SEQ ID NO: 73545 - DNA, 20 bp, Artificial Sequence
  Description of Artificial Sequence: Synthetic oligonucleotide
  Target: SCNA; (+) strand; PAM type: YTN; PAM sequence: CTA
cctgaaggtcctatcacttt

SEQ ID NO: 73546 - DNA, 20 bp, Artificial Sequence
  Description of Artificial Sequence: Synthetic oligonucleotide
  Target: SCNA; (+) strand; PAM type: YTN; PAM sequence: CTG
aaggtcctatcactttggtg

SEQ ID NO: 73547 - DNA, 20 bp, Artificial Sequence
  Description of Artificial Sequence: Synthetic oligonucleotide
  Target: SCNA; (+) strand; PAM type: YTN; PAM sequence: CTA
tcactttggtgtgagaagaa

SEQ ID NO: 73548 - DNA, 20 bp, Artificial Sequence
  Description of Artificial Sequence: Synthetic oligonucleotide
  Target: SCNA; (+) strand; PAM type: YTN; PAM sequence: CTT
tggtgtgagaagaatcgggt

SEQ ID NO: 73549 - DNA, 20 bp, Artificial Sequence
  Description of Artificial Sequence: Synthetic oligonucleotide
  Target: SCNA; (+) strand; PAM type: YTN; PAM sequence: TTT
ggtgtgagaagaatcgggta

SEQ ID NO: 73550 - DNA, 20 bp, Artificial Sequence
  Description of Artificial Sequence: Synthetic oligonucleotide
  Target: SCNA; (+) strand; PAM type: YTN; PAM sequence: TTG
gtgtgagaagaatcgggtaa

SEQ ID NO: 73551 - DNA, 20 bp, Artificial Sequence
  Description of Artificial Sequence: Synthetic oligonucleotide
  Target: SCNA; (+) strand; PAM type: YTN; PAM sequence: TTA
ggcttgcaccagttatcaat

SEQ ID NO: 73552 - DNA, 20 bp, Artificial Sequence
  Description of Artificial Sequence: Synthetic oligonucleotide
  Target: SCNA; (+) strand; PAM type: YTN; PAM sequence: CTT
gcaccagttatcaatagaat

SEQ ID NO: 73553 - DNA, 20 bp, Artificial Sequence
  Description of Artificial Sequence: Synthetic oligonucleotide
  Target: SCNA; (+) strand; PAM type: YTN; PAM sequence: TTG
caccagttatcaatagaata

SEQ ID NO: 73554 - DNA, 20 bp, Artificial Sequence
  Description of Artificial Sequence: Synthetic oligonucleotide
  Target: SCNA; (+) strand; PAM type: YTN; PAM sequence: TTA
tcaatagaatattaagaaag

SEQ ID NO: 73555 - DNA, 20 bp, Artificial Sequence
  Description of Artificial Sequence: Synthetic oligonucleotide
  Target: SCNA; (+) strand; PAM type: YTN; PAM sequence: TTA
agaaagatttttaagaagga

SEQ ID NO: 73556 - DNA, 20 bp, Artificial Sequence
  Description of Artificial Sequence: Synthetic oligonucleotide
  Target: SCNA; (+) strand; PAM type: YTN; PAM sequence: TTT
ttaagaaggagaatagcagt

SEQ ID NO: 73557 - DNA, 20 bp, Artificial Sequence
  Description of Artificial Sequence: Synthetic oligonucleotide
  Target: SCNA; (+) strand; PAM type: YTN; PAM sequence: TTT
taagaaggagaatagcagtt

SEQ ID NO: 73558 - DNA, 20 bp, Artificial Sequence
  Description of Artificial Sequence: Synthetic oligonucleotide
  Target: SCNA; (+) strand; PAM type: YTN; PAM sequence: TTT
aagaaggagaatagcagttc

SEQ ID NO: 73559 - DNA, 20 bp, Artificial Sequence
  Description of Artificial Sequence: Synthetic oligonucleotide
  Target: SCNA; (+) strand; PAM type: YTN; PAM sequence: TTA
agaaggagaatagcagttcc

SEQ ID NO: 73560 - DNA, 20 bp, Artificial Sequence
  Description of Artificial Sequence: Synthetic oligonucleotide
  Target: SCNA; (+) strand; PAM type: YTN; PAM sequence: TTC
caggttccacatatttgata

SEQ ID NO: 73561 - DNA, 20 bp, Artificial Sequence
  Description of Artificial Sequence: Synthetic oligonucleotide
  Target: SCNA; (+) strand; PAM type: YTN; PAM sequence: TTC
cacatatttgatacttttca

SEQ ID NO: 73562 - DNA, 20 bp, Artificial Sequence
  Description of Artificial Sequence: Synthetic oligonucleotide
  Target: SCNA; (+) strand; PAM type: YTN; PAM sequence: TTT
gatacttttcaccagaaaat

SEQ ID NO: 73563 - DNA, 20 bp, Artificial Sequence
  Description of Artificial Sequence: Synthetic oligonucleotide
  Target: SCNA; (+) strand; PAM type: YTN; PAM sequence: TTG
atacttttcaccagaaaata

SEQ ID NO: 73564 - DNA, 20 bp, Artificial Sequence
  Description of Artificial Sequence: Synthetic oligonucleotide
  Target: SCNA; (+) strand; PAM type: YTN; PAM sequence: CTT
ttcaccagaaaataggaaag

SEQ ID NO: 73565 - DNA, 20 bp, Artificial Sequence
  Description of Artificial Sequence: Synthetic oligonucleotide
  Target: SCNA; (+) strand; PAM type: YTN; PAM sequence: TTT
tcaccagaaaataggaaaga

SEQ ID NO: 73566 - DNA, 20 bp, Artificial Sequence
  Description of Artificial Sequence: Synthetic oligonucleotide
  Target: SCNA; (+) strand; PAM type: YTN; PAM sequence: TTT
caccagaaaataggaaagac

SEQ ID NO: 73567 - DNA, 20 bp, Artificial Sequence
  Description of Artificial Sequence: Synthetic oligonucleotide
  Target: SCNA; (+) strand; PAM type: YTN; PAM sequence: TTC
accagaaaataggaaagacg

SEQ ID NO: 73568 - DNA, 20 bp, Artificial Sequence
  Description of Artificial Sequence: Synthetic oligonucleotide
  Target: SCNA; (+) strand; PAM type: YTN; PAM sequence: TTG
ggtctgcaatgtattttcaa

SEQ ID NO: 73569 - DNA, 20 bp, Artificial Sequence
  Description of Artificial Sequence: Synthetic oligonucleotide
  Target: SCNA; (+) strand; PAM type: YTN; PAM sequence: CTG
caatgtattttcaaagtcaa

SEQ ID NO: 73570 - DNA, 20 bp, Artificial Sequence
  Description of Artificial Sequence: Synthetic oligonucleotide
  Target: SCNA; (+) strand; PAM type: YTN; PAM sequence: TTT
tcaaagtcaaacttctattc

SEQ ID NO: 73571 - DNA, 20 bp, Artificial Sequence
  Description of Artificial Sequence: Synthetic oligonucleotide
  Target: SCNA; (+) strand; PAM type: YTN; PAM sequence: TTT
caaagtcaaacttctattcc

SEQ ID NO: 73572 - DNA, 20 bp, Artificial Sequence
  Description of Artificial Sequence: Synthetic oligonucleotide
  Target: SCNA; (+) strand; PAM type: YTN; PAM sequence: TTC
aaagtcaaacttctattcct

SEQ ID NO: 73573 - DNA, 20 bp, Artificial Sequence
  Description of Artificial Sequence: Synthetic oligonucleotide
  Target: SCNA; (+) strand; PAM type: YTN; PAM sequence: CTT
ctattcctctatttaatgta

SEQ ID NO: 73574 - DNA, 20 bp, Artificial Sequence
  Description of Artificial Sequence: Synthetic oligonucleotide
  Target: SCNA; (+) strand; PAM type: YTN; PAM sequence: TTC
tattcctctatttaatgtat

SEQ ID NO: 73575 - DNA, 20 bp, Artificial Sequence
  Description of Artificial Sequence: Synthetic oligonucleotide
  Target: SCNA; (+) strand; PAM type: YTN; PAM sequence: CTA
ttcctctatttaatgtattt

SEQ ID NO: 73576 - DNA, 20 bp, Artificial Sequence
  Description of Artificial Sequence: Synthetic oligonucleotide
  Target: SCNA; (+) strand; PAM type: YTN; PAM sequence: TTC
ctctatttaatgtattttta

SEQ ID NO: 73577 - DNA, 20 bp, Artificial Sequence
  Description of Artificial Sequence: Synthetic oligonucleotide
  Target: SCNA; (+) strand; PAM type: YTN; PAM sequence: CTC
tatttaatgtatttttacag

SEQ ID NO: 73578 - DNA, 20 bp, Artificial Sequence
  Description of Artificial Sequence: Synthetic oligonucleotide
  Target: SCNA; (+) strand; PAM type: YTN; PAM sequence: CTA
tttaatgtatttttacagag

SEQ ID NO: 73579 - DNA, 20 bp, Artificial Sequence
  Description of Artificial Sequence: Synthetic oligonucleotide
  Target: SCNA; (+) strand; PAM type: YTN; PAM sequence: TTT
aatgtatttttacagagatg

SEQ ID NO: 73580 - DNA, 20 bp, Artificial Sequence
  Description of Artificial Sequence: Synthetic oligonucleotide
  Target: SCNA; (+) strand; PAM type: YTN; PAM sequence: TTA
atgtatttttacagagatga

SEQ ID NO: 73581 - DNA, 20 bp, Artificial Sequence
  Description of Artificial Sequence: Synthetic oligonucleotide
  Target: SCNA; (+) strand; PAM type: YTN; PAM sequence: TTT
ttacagagatgacttgagaa

SEQ ID NO: 73582 - DNA, 20 bp, Artificial Sequence
  Description of Artificial Sequence: Synthetic oligonucleotide
  Target: SCNA; (+) strand; PAM type: YTN; PAM sequence: TTT
tacagagatgacttgagaaa

SEQ ID NO: 73583 - DNA, 20 bp, Artificial Sequence
  Description of Artificial Sequence: Synthetic oligonucleotide
  Target: SCNA; (+) strand; PAM type: YTN; PAM sequence: TTT
acagagatgacttgagaaaa

SEQ ID NO: 73584 - DNA, 20 bp, Artificial Sequence
  Description of Artificial Sequence: Synthetic oligonucleotide
  Target: SCNA; (+) strand; PAM type: YTN; PAM sequence: TTA
cagagatgacttgagaaaac

SEQ ID NO: 73585 - DNA, 20 bp, Artificial Sequence
  Description of Artificial Sequence: Synthetic oligonucleotide
  Target: SCNA; (+) strand; PAM type: YTN; PAM sequence: CTT
gagaaaacacacatttcttt

SEQ ID NO: 73586 - DNA, 20 bp, Artificial Sequence
  Description of Artificial Sequence: Synthetic oligonucleotide
  Target: SCNA; (+) strand; PAM type: YTN; PAM sequence: TTG
agaaaacacacatttctttt

SEQ ID NO: 73587 - DNA, 20 bp, Artificial Sequence
  Description of Artificial Sequence: Synthetic oligonucleotide
  Target: SCNA; (+) strand; PAM type: YTN; PAM sequence: TTT
cttttgaatcttgatgtata

SEQ ID NO: 73588 - DNA, 20 bp, Artificial Sequence
  Description of Artificial Sequence: Synthetic oligonucleotide
  Target: SCNA; (+) strand; PAM type: YTN; PAM sequence: TTC
ttttgaatcttgatgtatat

SEQ ID NO: 73589 - DNA, 20 bp, Artificial Sequence
  Description of Artificial Sequence: Synthetic oligonucleotide
  Target: SCNA; (+) strand; PAM type: YTN; PAM sequence: CTT
ttgaatcttgatgtatatat

SEQ ID NO: 73590 - DNA, 20 bp, Artificial Sequence
  Description of Artificial Sequence: Synthetic oligonucleotide
  Target: SCNA; (+) strand; PAM type: YTN; PAM sequence: TTT
tgaatcttgatgtatatatt

SEQ ID NO: 73591 - DNA, 20 bp, Artificial Sequence
  Description of Artificial Sequence: Synthetic oligonucleotide
  Target: SCNA; (+) strand; PAM type: YTN; PAM sequence: TTT
gaatcttgatgtatatattt

SEQ ID NO: 73592 - DNA, 20 bp, Artificial Sequence
  Description of Artificial Sequence: Synthetic oligonucleotide
  Target: SCNA; (+) strand; PAM type: YTN; PAM sequence: TTG
aatcttgatgtatatatttt

SEQ ID NO: 73593 - DNA, 20 bp, Artificial Sequence
  Description of Artificial Sequence: Synthetic oligonucleotide
  Target: SCNA; (+) strand; PAM type: YTN; PAM sequence: CTT
gatgtatatatttttgacgg

SEQ ID NO: 73594 - DNA, 20 bp, Artificial Sequence
  Description of Artificial Sequence: Synthetic oligonucleotide
  Target: SCNA; (+) strand; PAM type: YTN; PAM sequence: TTG
atgtatatatttttgacgga

SEQ ID NO: 73595 - DNA, 20 bp, Artificial Sequence
  Description of Artificial Sequence: Synthetic oligonucleotide
  Target: SCNA; (+) strand; PAM type: YTN; PAM sequence: TTT
ttgacggatcagacactctt

SEQ ID NO: 73596 - DNA, 20 bp, Artificial Sequence
  Description of Artificial Sequence: Synthetic oligonucleotide
  Target: SCNA; (+) strand; PAM type: YTN; PAM sequence: TTT
tgacggatcagacactctta

SEQ ID NO: 73597 - DNA, 20 bp, Artificial Sequence
  Description of Artificial Sequence: Synthetic oligonucleotide
  Target: SCNA; (+) strand; PAM type: YTN; PAM sequence: TTT
gacggatcagacactcttac

SEQ ID NO: 73598 - DNA, 20 bp, Artificial Sequence
  Description of Artificial Sequence: Synthetic oligonucleotide
  Target: SCNA; (+) strand; PAM type: YTN; PAM sequence: TTG
acggatcagacactcttact

SEQ ID NO: 73599 - DNA, 20 bp, Artificial Sequence
  Description of Artificial Sequence: Synthetic oligonucleotide
  Target: SCNA; (+) strand; PAM type: YTN; PAM sequence: CTC
ttacttgagctaggtgatct

SEQ ID NO: 73600 - DNA, 20 bp, Artificial Sequence
  Description of Artificial Sequence: Synthetic oligonucleotide
  Target: SCNA; (+) strand; PAM type: YTN; PAM sequence: CTT
acttgagctaggtgatctca

SEQ ID NO: 73601 - DNA, 20 bp, Artificial Sequence
  Description of Artificial Sequence: Synthetic oligonucleotide
  Target: SCNA; (+) strand; PAM type: YTN; PAM sequence: TTA
cttgagctaggtgatctcac

SEQ ID NO: 73602 - DNA, 20 bp, Artificial Sequence
  Description of Artificial Sequence: Synthetic oligonucleotide
  Target: SCNA; (+) strand; PAM type: YTN; PAM sequence: CTT
gagctaggtgatctcacatc

SEQ ID NO: 73603 - DNA, 20 bp, Artificial Sequence
  Description of Artificial Sequence: Synthetic oligonucleotide
  Target: SCNA; (+) strand; PAM type: YTN; PAM sequence: TTG
agctaggtgatctcacatca

SEQ ID NO: 73604 - DNA, 20 bp, Artificial Sequence
  Description of Artificial Sequence: Synthetic oligonucleotide
  Target: SCNA; (+) strand; PAM type: YTN; PAM sequence: CTA
ggtgatctcacatcattatc

SEQ ID NO: 73605 - DNA, 20 bp, Artificial Sequence
  Description of Artificial Sequence: Synthetic oligonucleotide
  Target: SCNA; (+) strand; PAM type: YTN; PAM sequence: CTC
acatcattatctgttgctat

SEQ ID NO: 73606 - DNA, 20 bp, Artificial Sequence
  Description of Artificial Sequence: Synthetic oligonucleotide
  Target: SCNA; (+) strand; PAM type: YTN; PAM sequence: TTA
tctgttgctatgtgctattg

SEQ ID NO: 73607 - DNA, 20 bp, Artificial Sequence
  Description of Artificial Sequence: Synthetic oligonucleotide
  Target: SCNA; (+) strand; PAM type: YTN; PAM sequence: CTG
ttgctatgtgctattgtttc

SEQ ID NO: 73608 - DNA, 20 bp, Artificial Sequence
  Description of Artificial Sequence: Synthetic oligonucleotide
  Target: SCNA; (+) strand; PAM type: YTN; PAM sequence: TTG
ctatgtgctattgtttctgt

SEQ ID NO: 73609 - DNA, 20 bp, Artificial Sequence
  Description of Artificial Sequence: Synthetic oligonucleotide
  Target: SCNA; (+) strand; PAM type: YTN; PAM sequence: CTA
tgtgctattgtttctgtagc

SEQ ID NO: 73610 - DNA, 20 bp, Artificial Sequence
  Description of Artificial Sequence: Synthetic oligonucleotide
  Target: SCNA; (+) strand; PAM type: YTN; PAM sequence: CTA
ttgtttctgtagccaaatga

SEQ ID NO: 73611 - DNA, 20 bp, Artificial Sequence
  Description of Artificial Sequence: Synthetic oligonucleotide
  Target: SCNA; (+) strand; PAM type: YTN; PAM sequence: TTG
tttctgtagccaaatgaatg

SEQ ID NO: 73612 - DNA, 20 bp, Artificial Sequence
  Description of Artificial Sequence: Synthetic oligonucleotide
  Target: SCNA; (+) strand; PAM type: YTN; PAM sequence: TTT
ctgtagccaaatgaatgggc

SEQ ID NO: 73613 - DNA, 20 bp, Artificial Sequence
  Description of Artificial Sequence: Synthetic oligonucleotide
  Target: SCNA; (+) strand; PAM type: YTN; PAM sequence: TTC
tgtagccaaatgaatgggcc

SEQ ID NO: 73614 - DNA, 20 bp, Artificial Sequence
  Description of Artificial Sequence: Synthetic oligonucleotide
  Target: SCNA; (+) strand; PAM type: YTN; PAM sequence: CTG
tagccaaatgaatgggccat

SEQ ID NO: 73615 - DNA, 20 bp, Artificial Sequence
  Description of Artificial Sequence: Synthetic oligonucleotide
  Target: SCNA; (+) strand; PAM type: YTN; PAM sequence: TTG
gcaatcaagccaaacaaatt

SEQ ID NO: 73616 - DNA, 20 bp, Artificial Sequence
  Description of Artificial Sequence: Synthetic oligonucleotide
  Target: SCNA; (+) strand; PAM type: YTN; PAM sequence: TTT
tgcttttacacccgatttta

SEQ ID NO: 73617 - DNA, 20 bp, Artificial Sequence
  Description of Artificial Sequence: Synthetic oligonucleotide
  Target: SCNA; (+) strand; PAM type: YTN; PAM sequence: TTT
gcttttacacccgattttag

SEQ ID NO: 73618 - DNA, 20 bp, Artificial Sequence
  Description of Artificial Sequence: Synthetic oligonucleotide
  Target: SCNA; (+) strand; PAM type: YTN; PAM sequence: TTG
cttttacacccgattttagc

SEQ ID NO: 73619 - DNA, 20 bp, Artificial Sequence
  Description of Artificial Sequence: Synthetic oligonucleotide
  Target: SCNA; (+) strand; PAM type: YTN; PAM sequence: CTT
ttacacccgattttagcatt

SEQ ID NO: 73620 - DNA, 20 bp, Artificial Sequence
  Description of Artificial Sequence: Synthetic oligonucleotide
  Target: SCNA; (+) strand; PAM type: YTN; PAM sequence: TTT
tacacccgattttagcatta

SEQ ID NO: 73621 - DNA, 20 bp, Artificial Sequence
  Description of Artificial Sequence: Synthetic oligonucleotide
  Target: SCNA; (+) strand; PAM type: YTN; PAM sequence: TTT
acacccgattttagcattaa

SEQ ID NO: 73622 - DNA, 20 bp, Artificial Sequence
  Description of Artificial Sequence: Synthetic oligonucleotide
  Target: SCNA; (+) strand; PAM type: YTN; PAM sequence: TTA
cacccgattttagcattaat

SEQ ID NO: 73623 - DNA, 20 bp, Artificial Sequence
  Description of Artificial Sequence: Synthetic oligonucleotide
  Target: SCNA; (+) strand; PAM type: YTN; PAM sequence: TTT
tagcattaatctacagacac

SEQ ID NO: 73624 - DNA, 20 bp, Artificial Sequence
  Description of Artificial Sequence: Synthetic oligonucleotide
  Target: SCNA; (+) strand; PAM type: YTN; PAM sequence: TTT
agcattaatctacagacacg

SEQ ID NO: 73625 - DNA, 20 bp, Artificial Sequence
  Description of Artificial Sequence: Synthetic oligonucleotide
  Target: SCNA; (+) strand; PAM type: YTN; PAM sequence: TTA
gcattaatctacagacacgg

SEQ ID NO: 73626 - DNA, 20 bp, Artificial Sequence
  Description of Artificial Sequence: Synthetic oligonucleotide
  Target: SCNA; (+) strand; PAM type: YTN; PAM sequence: TTA
atctacagacacggcttttc

SEQ ID NO: 73627 - DNA, 20 bp, Artificial Sequence
  Description of Artificial Sequence: Synthetic oligonucleotide
  Target: SCNA; (+) strand; PAM type: YTN; PAM sequence: CTA
cagacacggcttttcaatag

SEQ ID NO: 73628 - DNA, 20 bp, Artificial Sequence
  Description of Artificial Sequence: Synthetic oligonucleotide
  Target: SCNA; (+) strand; PAM type: YTN; PAM sequence: CTT
ttcaatagtagaaaagatat

SEQ ID NO: 73629 - DNA, 20 bp, Artificial Sequence
  Description of Artificial Sequence: Synthetic oligonucleotide
  Target: SCNA; (+) strand; PAM type: YTN; PAM sequence: TTT
tcaatagtagaaaagatatc

SEQ ID NO: 73630 - DNA, 20 bp, Artificial Sequence
  Description of Artificial Sequence: Synthetic oligonucleotide
  Target: SCNA; (+) strand; PAM type: YTN; PAM sequence: TTT
caatagtagaaaagatatct

SEQ ID NO: 73631 - DNA, 20 bp, Artificial Sequence
  Description of Artificial Sequence: Synthetic oligonucleotide
  Target: SCNA; (+) strand; PAM type: YTN; PAM sequence: TTC
aatagtagaaaagatatctc

SEQ ID NO: 73632 - DNA, 20 bp, Artificial Sequence
  Description of Artificial Sequence: Synthetic oligonucleotide
  Target: SCNA; (+) strand; PAM type: YTN; PAM sequence: CTC
ccattttagtccaaatttaa

SEQ ID NO: 73633 - DNA, 20 bp, Artificial Sequence
  Description of Artificial Sequence: Synthetic oligonucleotide
  Target: SCNA; (+) strand; PAM type: YTN; PAM sequence: TTT
tagtccaaatttaagtatag

SEQ ID NO: 73634 - DNA, 20 bp, Artificial Sequence
  Description of Artificial Sequence: Synthetic oligonucleotide
  Target: SCNA; (+) strand; PAM type: YTN; PAM sequence: TTT
agtccaaatttaagtatagt

SEQ ID NO: 73635 - DNA, 20 bp, Artificial Sequence
  Description of Artificial Sequence: Synthetic oligonucleotide
  Target: SCNA; (+) strand; PAM type: YTN; PAM sequence: TTA
gtccaaatttaagtatagtt

SEQ ID NO: 73636 - DNA, 20 bp, Artificial Sequence
  Description of Artificial Sequence: Synthetic oligonucleotide
  Target: SCNA; (+) strand; PAM type: YTN; PAM sequence: TTT
aagtatagttaaagctacat

SEQ ID NO: 73637 - DNA, 20 bp, Artificial Sequence
  Description of Artificial Sequence: Synthetic oligonucleotide
  Target: SCNA; (+) strand; PAM type: YTN; PAM sequence: TTA
agtatagttaaagctacatt

SEQ ID NO: 73638 - DNA, 20 bp, Artificial Sequence
  Description of Artificial Sequence: Synthetic oligonucleotide
  Target: SCNA; (+) strand; PAM type: YTN; PAM sequence: TTA
aagctacattttgggaaaaa

SEQ ID NO: 73639 - DNA, 20 bp, Artificial Sequence
  Description of Artificial Sequence: Synthetic oligonucleotide
  Target: SCNA; (+) strand; PAM type: YTN; PAM sequence: CTA
cattttgggaaaaatgtttt

SEQ ID NO: 73640 - DNA, 20 bp, Artificial Sequence
  Description of Artificial Sequence: Synthetic oligonucleotide
  Target: SCNA; (+) strand; PAM type: YTN; PAM sequence: TTT
tgggaaaaatgttttatcat

SEQ ID NO: 73641 - DNA, 20 bp, Artificial Sequence
  Description of Artificial Sequence: Synthetic oligonucleotide
  Target: SCNA; (+) strand; PAM type: YTN; PAM sequence: TTT
gggaaaaatgttttatcatt

SEQ ID NO: 73642 - DNA, 20 bp, Artificial Sequence
  Description of Artificial Sequence: Synthetic oligonucleotide
  Target: SCNA; (+) strand; PAM type: YTN; PAM sequence: TTG
ggaaaaatgttttatcattt

SEQ ID NO: 73643 - DNA, 20 bp, Artificial Sequence
  Description of Artificial Sequence: Synthetic oligonucleotide
  Target: SCNA; (+) strand; PAM type: YTN; PAM sequence: TTT
tatcatttttttgttcactt

SEQ ID NO: 73644 - DNA, 20 bp, Artificial Sequence
  Description of Artificial Sequence: Synthetic oligonucleotide
  Target: SCNA; (+) strand; PAM type: YTN; PAM sequence: TTT
atcatttttttgttcacttg

SEQ ID NO: 73645 - DNA, 20 bp, Artificial Sequence
  Description of Artificial Sequence: Synthetic oligonucleotide
  Target: SCNA; (+) strand; PAM type: YTN; PAM sequence: TTA
tcatttttttgttcacttgt

SEQ ID NO: 73646 - DNA, 20 bp, Artificial Sequence
  Description of Artificial Sequence: Synthetic oligonucleotide
  Target: SCNA; (+) strand; PAM type: YTN; PAM sequence: TTT
ttttgttcacttgtgggatg

SEQ ID NO: 73647 - DNA, 20 bp, Artificial Sequence
  Description of Artificial Sequence: Synthetic oligonucleotide
  Target: SCNA; (+) strand; PAM type: YTN; PAM sequence: TTT
tttgttcacttgtgggatga

SEQ ID NO: 73648 - DNA, 20 bp, Artificial Sequence
  Description of Artificial Sequence: Synthetic oligonucleotide
  Target: SCNA; (+) strand; PAM type: YTN; PAM sequence: TTT
ttgttcacttgtgggatgaa

SEQ ID NO: 73649 - DNA, 20 bp, Artificial Sequence
  Description of Artificial Sequence: Synthetic oligonucleotide
  Target: SCNA; (+) strand; PAM type: YTN; PAM sequence: TTT
tgttcacttgtgggatgaaa

SEQ ID NO: 73650 - DNA, 20 bp, Artificial Sequence
  Description of Artificial Sequence: Synthetic oligonucleotide
  Target: SCNA; (+) strand; PAM type: YTN; PAM sequence: TTT
gttcacttgtgggatgaaaa

SEQ ID NO: 73651 - DNA, 20 bp, Artificial Sequence
  Description of Artificial Sequence: Synthetic oligonucleotide
  Target: SCNA; (+) strand; PAM type: YTN; PAM sequence: TTG
ttcacttgtgggatgaaaag

SEQ ID NO: 73652 - DNA, 20 bp, Artificial Sequence
  Description of Artificial Sequence: Synthetic oligonucleotide
  Target: SCNA; (+) strand; PAM type: YTN; PAM sequence: TTC
acttgtgggatgaaaagtag

SEQ ID NO: 73653 - DNA, 20 bp, Artificial Sequence
  Description of Artificial Sequence: Synthetic oligonucleotide
  Target: SCNA; (+) strand; PAM type: YTN; PAM sequence: CTT
gtgggatgaaaagtaggatt

SEQ ID NO: 73654 - DNA, 20 bp, Artificial Sequence
  Description of Artificial Sequence: Synthetic oligonucleotide
  Target: SCNA; (+) strand; PAM type: YTN; PAM sequence: TTG
tgggatgaaaagtaggatta

SEQ ID NO: 73655 - DNA, 20 bp, Artificial Sequence
  Description of Artificial Sequence: Synthetic oligonucleotide
  Target: SCNA; (+) strand; PAM type: YTN; PAM sequence: TTA
aacagtccattatctctacc

SEQ ID NO: 73656 - DNA, 20 bp, Artificial Sequence
  Description of Artificial Sequence: Synthetic oligonucleotide
  Target: SCNA; (+) strand; PAM type: YTN; PAM sequence: TTA
tctctaccttctctaactgc

SEQ ID NO: 73657 - DNA, 20 bp, Artificial Sequence
  Description of Artificial Sequence: Synthetic oligonucleotide
  Target: SCNA; (+) strand; PAM type: YTN; PAM sequence: CTC
taccttctctaactgccttt

SEQ ID NO: 73658 - DNA, 20 bp, Artificial Sequence
  Description of Artificial Sequence: Synthetic oligonucleotide
  Target: SCNA; (+) strand; PAM type: YTN; PAM sequence: CTA
ccttctctaactgcctttac

SEQ ID NO: 73659 - DNA, 20 bp, Artificial Sequence
  Description of Artificial Sequence: Synthetic oligonucleotide
  Target: SCNA; (+) strand; PAM type: YTN; PAM sequence: CTT
ctctaactgcctttactaaa

SEQ ID NO: 73660 - DNA, 20 bp, Artificial Sequence
  Description of Artificial Sequence: Synthetic oligonucleotide
  Target: SCNA; (+) strand; PAM type: YTN; PAM sequence: TTC
tctaactgcctttactaaaa

SEQ ID NO: 73661 - DNA, 20 bp, Artificial Sequence
  Description of Artificial Sequence: Synthetic oligonucleotide
  Target: SCNA; (+) strand; PAM type: YTN; PAM sequence: CTC
taactgcctttactaaaatt

SEQ ID NO: 73662 - DNA, 20 bp, Artificial Sequence
  Description of Artificial Sequence: Synthetic oligonucleotide
  Target: SCNA; (+) strand; PAM type: YTN; PAM sequence: CTA
actgcctttactaaaatttt

SEQ ID NO: 73663 - DNA, 20 bp, Artificial Sequence
  Description of Artificial Sequence: Synthetic oligonucleotide
  Target: SCNA; (+) strand; PAM type: YTN; PAM sequence: CTG
cctttactaaaattttaaaa

SEQ ID NO: 73664 - DNA, 20 bp, Artificial Sequence
  Description of Artificial Sequence: Synthetic oligonucleotide
  Target: SCNA; (+) strand; PAM type: YTN; PAM sequence: CTT
tactaaaattttaaaatatt

SEQ ID NO: 73665 - DNA, 20 bp, Artificial Sequence
  Description of Artificial Sequence: Synthetic oligonucleotide
  Target: SCNA; (+) strand; PAM type: YTN; PAM sequence: TTT
actaaaattttaaaatattt

SEQ ID NO: 73666 - DNA, 20 bp, Artificial Sequence
  Description of Artificial Sequence: Synthetic oligonucleotide
  Target: SCNA; (+) strand; PAM type: YTN; PAM sequence: TTA
ctaaaattttaaaatatttc

SEQ ID NO: 73667 - DNA, 20 bp, Artificial Sequence
  Description of Artificial Sequence: Synthetic oligonucleotide
  Target: SCNA; (+) strand; PAM type: YTN; PAM sequence: CTA
aaattttaaaatatttcttt

SEQ ID NO: 73668 - DNA, 20 bp, Artificial Sequence
  Description of Artificial Sequence: Synthetic oligonucleotide
  Target: SCNA; (+) strand; PAM type: YTN; PAM sequence: TTT
taaaatatttcttttgaaga

SEQ ID NO: 73669 - DNA, 20 bp, Artificial Sequence
  Description of Artificial Sequence: Synthetic oligonucleotide
  Target: SCNA; (+) strand; PAM type: YTN; PAM sequence: TTT
aaaatatttcttttgaagaa

SEQ ID NO: 73670 - DNA, 20 bp, Artificial Sequence
  Description of Artificial Sequence: Synthetic oligonucleotide
  Target: SCNA; (+) strand; PAM type: YTN; PAM sequence: TTA
aaatatttcttttgaagaaa

SEQ ID NO: 73671 - DNA, 20 bp, Artificial Sequence
  Description of Artificial Sequence: Synthetic oligonucleotide
  Target: SCNA; (+) strand; PAM type: YTN; PAM sequence: TTT
cttttgaagaaacaaaacat

SEQ ID NO: 73672 - DNA, 20 bp, Artificial Sequence
  Description of Artificial Sequence: Synthetic oligonucleotide
  Target: SCNA; (+) strand; PAM type: YTN; PAM sequence: TTC
ttttgaagaaacaaaacata

SEQ ID NO: 73673 - DNA, 20 bp, Artificial Sequence
  Description of Artificial Sequence: Synthetic oligonucleotide
  Target: SCNA; (+) strand; PAM type: YTN; PAM sequence: CTT
ttgaagaaacaaaacataat

SEQ ID NO: 73674 - DNA, 20 bp, Artificial Sequence
  Description of Artificial Sequence: Synthetic oligonucleotide
  Target: SCNA; (+) strand; PAM type: YTN; PAM sequence: TTT
tgaagaaacaaaacataata

SEQ ID NO: 73675 - DNA, 20 bp, Artificial Sequence
  Description of Artificial Sequence: Synthetic oligonucleotide
  Target: SCNA; (+) strand; PAM type: YTN; PAM sequence: TTT
gaagaaacaaaacataatat

SEQ ID NO: 73676 - DNA, 20 bp, Artificial Sequence
  Description of Artificial Sequence: Synthetic oligonucleotide
  Target: SCNA; (+) strand; PAM type: YTN; PAM sequence: TTG
aagaaacaaaacataatatt

SEQ ID NO: 73677 - DNA, 20 bp, Artificial Sequence
  Description of Artificial Sequence: Synthetic oligonucleotide
  Target: SCNA; (+) strand; PAM type: YTN; PAM sequence: TTT
gccattaaatcttaaaagta

SEQ ID NO: 73678 - DNA, 20 bp, Artificial Sequence
  Description of Artificial Sequence: Synthetic oligonucleotide
  Target: SCNA; (+) strand; PAM type: YTN; PAM sequence: TTG
ccattaaatcttaaaagtat

SEQ ID NO: 73679 - DNA, 20 bp, Artificial Sequence
  Description of Artificial Sequence: Synthetic oligonucleotide
  Target: SCNA; (+) strand; PAM type: YTN; PAM sequence: TTA
aatcttaaaagtatgacaac

SEQ ID NO: 73680 - DNA, 20 bp, Artificial Sequence
  Description of Artificial Sequence: Synthetic oligonucleotide
  Target: SCNA; (+) strand; PAM type: YTN; PAM sequence: CTT
aaaagtatgacaactaaatg

SEQ ID NO: 73681 - DNA, 20 bp, Artificial Sequence
  Description of Artificial Sequence: Synthetic oligonucleotide
  Target: SCNA; (+) strand; PAM type: YTN; PAM sequence: TTA
aaagtatgacaactaaatgg

SEQ ID NO: 73682 - DNA, 20 bp, Artificial Sequence
  Description of Artificial Sequence: Synthetic oligonucleotide
  Target: SCNA; (+) strand; PAM type: YTN; PAM sequence: CTA
aatggatgctaagacaattg

SEQ ID NO: 73683 - DNA, 20 bp, Artificial Sequence
  Description of Artificial Sequence: Synthetic oligonucleotide
  Target: SCNA; (+) strand; PAM type: YTN; PAM sequence: CTA
agacaattgtgtttcaactg

SEQ ID NO: 73684 - DNA, 20 bp, Artificial Sequence
  Description of Artificial Sequence: Synthetic oligonucleotide
  Target: SCNA; (+) strand; PAM type: YTN; PAM sequence: TTG
tgtttcaactgtgggcttat

SEQ ID NO: 73685 - DNA, 20 bp, Artificial Sequence
  Description of Artificial Sequence: Synthetic oligonucleotide
  Target: SCNA; (+) strand; PAM type: YTN; PAM sequence: TTT
caactgtgggcttataaact

SEQ ID NO: 73686 - DNA, 20 bp, Artificial Sequence
  Description of Artificial Sequence: Synthetic oligonucleotide
  Target: SCNA; (+) strand; PAM type: YTN; PAM sequence: TTC
aactgtgggcttataaactc

SEQ ID NO: 73687 - DNA, 20 bp, Artificial Sequence
  Description of Artificial Sequence: Synthetic oligonucleotide
  Target: SCNA; (+) strand; PAM type: YTN; PAM sequence: CTG
tgggcttataaactctattg

SEQ ID NO: 73688 - DNA, 20 bp, Artificial Sequence
  Description of Artificial Sequence: Synthetic oligonucleotide
  Target: SCNA; (+) strand; PAM type: YTN; PAM sequence: CTT
ataaactctattgagaaact

SEQ ID NO: 73689 - DNA, 20 bp, Artificial Sequence
  Description of Artificial Sequence: Synthetic oligonucleotide
  Target: SCNA; (+) strand; PAM type: YTN; PAM sequence: TTA
taaactctattgagaaactc

SEQ ID NO: 73690 - DNA, 20 bp, Artificial Sequence
  Description of Artificial Sequence: Synthetic oligonucleotide
  Target: SCNA; (+) strand; PAM type: YTN; PAM sequence: CTC
tattgagaaactcatttatg

SEQ ID NO: 73691 - DNA, 20 bp, Artificial Sequence
  Description of Artificial Sequence: Synthetic oligonucleotide
  Target: SCNA; (+) strand; PAM type: YTN; PAM sequence: CTA
ttgagaaactcatttatgat

SEQ ID NO: 73692 - DNA, 20 bp, Artificial Sequence
  Description of Artificial Sequence: Synthetic oligonucleotide
  Target: SCNA; (+) strand; PAM type: YTN; PAM sequence: TTG
agaaactcatttatgatcat

SEQ ID NO: 73693 - DNA, 20 bp, Artificial Sequence
  Description of Artificial Sequence: Synthetic oligonucleotide
  Target: SCNA; (+) strand; PAM type: YTN; PAM sequence: CTC
atttatgatcatgagttttt

SEQ ID NO: 73694 - DNA, 20 bp, Artificial Sequence
  Description of Artificial Sequence: Synthetic oligonucleotide
  Target: SCNA; (+) strand; PAM type: YTN; PAM sequence: TTT
atgatcatgagttttttcca

SEQ ID NO: 73695 - DNA, 20 bp, Artificial Sequence
  Description of Artificial Sequence: Synthetic oligonucleotide
  Target: SCNA; (+) strand; PAM type: YTN; PAM sequence: TTA
tgatcatgagttttttccag

SEQ ID NO: 73696 - DNA, 20 bp, Artificial Sequence
  Description of Artificial Sequence: Synthetic oligonucleotide
  Target: SCNA; (+) strand; PAM type: YTN; PAM sequence: TTT
tttccaggatggacatataa

SEQ ID NO: 73697 - DNA, 20 bp, Artificial Sequence
  Description of Artificial Sequence: Synthetic oligonucleotide
  Target: SCNA; (+) strand; PAM type: YTN; PAM sequence: TTT
ttccaggatggacatataaa

SEQ ID NO: 73698 - DNA, 20 bp, Artificial Sequence
  Description of Artificial Sequence: Synthetic oligonucleotide
  Target: SCNA; (+) strand; PAM type: YTN; PAM sequence: TTT
tccaggatggacatataaag

SEQ ID NO: 73699 - DNA, 20 bp, Artificial Sequence
  Description of Artificial Sequence: Synthetic oligonucleotide
  Target: SCNA; (+) strand; PAM type: YTN; PAM sequence: TTT
ccaggatggacatataaaga

SEQ ID NO: 73700 - DNA, 20 bp, Artificial Sequence
  Description of Artificial Sequence: Synthetic oligonucleotide
  Target: SCNA; (+) strand; PAM type: YTN; PAM sequence: TTC
caggatggacatataaagat

SEQ ID NO: 73701 - DNA, 20 bp, Artificial Sequence
  Description of Artificial Sequence: Synthetic oligonucleotide
  Target: SCNA; (+) strand; PAM type: YTN; PAM sequence: TTT
ttaaaacactggcctggaga

SEQ ID NO: 73702 - DNA, 20 bp, Artificial Sequence
  Description of Artificial Sequence: Synthetic oligonucleotide
  Target: SCNA; (+) strand; PAM type: YTN; PAM sequence: TTT
taaaacactggcctggagaa

SEQ ID NO: 73703 - DNA, 20 bp, Artificial Sequence
  Description of Artificial Sequence: Synthetic oligonucleotide
  Target: SCNA; (+) strand; PAM type: YTN; PAM sequence: TTT
aaaacactggcctggagaat

SEQ ID NO: 73704 - DNA, 20 bp, Artificial Sequence
  Description of Artificial Sequence: Synthetic oligonucleotide
  Target: SCNA; (+) strand; PAM type: YTN; PAM sequence: TTA
aaacactggcctggagaata

SEQ ID NO: 73705 - DNA, 20 bp, Artificial Sequence
  Description of Artificial Sequence: Synthetic oligonucleotide
  Target: SCNA; (+) strand; PAM type: YTN; PAM sequence: CTG
gcctggagaatagggagaga

SEQ ID NO: 73706 - DNA, 20 bp, Artificial Sequence
  Description of Artificial Sequence: Synthetic oligonucleotide
  Target: SCNA; (+) strand; PAM type: YTN; PAM sequence: CTG
gagaatagggagagaagagg

SEQ ID NO: 73707 - DNA, 20 bp, Artificial Sequence
  Description of Artificial Sequence: Synthetic oligonucleotide
  Target: SCNA; (+) strand; PAM type: YTN; PAM sequence: TTT
atattacttatatgagacat

SEQ ID NO: 73708 - DNA, 20 bp, Artificial Sequence
  Description of Artificial Sequence: Synthetic oligonucleotide
  Target: SCNA; (+) strand; PAM type: YTN; PAM sequence: TTA
tattacttatatgagacata

SEQ ID NO: 73709 - DNA, 20 bp, Artificial Sequence
  Description of Artificial Sequence: Synthetic oligonucleotide
  Target: SCNA; (+) strand; PAM type: YTN; PAM sequence: TTA
cttatatgagacatatcttt

SEQ ID NO: 73710 - DNA, 20 bp, Artificial Sequence
  Description of Artificial Sequence: Synthetic oligonucleotide
  Target: SCNA; (+) strand; PAM type: YTN; PAM sequence: CTT
atatgagacatatcttttta

SEQ ID NO: 73711 - DNA, 20 bp, Artificial Sequence
  Description of Artificial Sequence: Synthetic oligonucleotide
  Target: SCNA; (+) strand; PAM type: YTN; PAM sequence: TTA
tatgagacatatctttttat

SEQ ID NO: 73712 - DNA, 20 bp, Artificial Sequence
  Description of Artificial Sequence: Synthetic oligonucleotide
  Target: SCNA; (+) strand; PAM type: YTN; PAM sequence: CTT
tttataatatctatatttaa

SEQ ID NO: 73713 - DNA, 20 bp, Artificial Sequence
  Description of Artificial Sequence: Synthetic oligonucleotide
  Target: SCNA; (+) strand; PAM type: YTN; PAM sequence: TTT
ttataatatctatatttaaa

SEQ ID NO: 73714 - DNA, 20 bp, Artificial Sequence
  Description of Artificial Sequence: Synthetic oligonucleotide
  Target: SCNA; (+) strand; PAM type: YTN; PAM sequence: TTT
tataatatctatatttaaaa

SEQ ID NO: 73715 - DNA, 20 bp, Artificial Sequence
  Description of Artificial Sequence: Synthetic oligonucleotide
  Target: SCNA; (+) strand; PAM type: YTN; PAM sequence: TTT
ataatatctatatttaaaac

SEQ ID NO: 73716 - DNA, 20 bp, Artificial Sequence
  Description of Artificial Sequence: Synthetic oligonucleotide
  Target: SCNA; (+) strand; PAM type: YTN; PAM sequence: TTA
taatatctatatttaaaaca

SEQ ID NO: 73717 - DNA, 20 bp, Artificial Sequence
  Description of Artificial Sequence: Synthetic oligonucleotide
  Target: SCNA; (+) strand; PAM type: YTN; PAM sequence: CTA
tatttaaaacattttaaagt

SEQ ID NO: 73718 - DNA, 20 bp, Artificial Sequence
  Description of Artificial Sequence: Synthetic oligonucleotide
  Target: SCNA; (+) strand; PAM type: YTN; PAM sequence: TTT
aaaacattttaaagtataaa

SEQ ID NO: 73719 - DNA, 20 bp, Artificial Sequence
  Description of Artificial Sequence: Synthetic oligonucleotide
  Target: SCNA; (+) strand; PAM type: YTN; PAM sequence: TTA
aaacattttaaagtataaat

SEQ ID NO: 73720 - DNA, 20 bp, Artificial Sequence
  Description of Artificial Sequence: Synthetic oligonucleotide
  Target: SCNA; (+) strand; PAM type: YTN; PAM sequence: TTT
taaagtataaatatttctgt

SEQ ID NO: 73721 - DNA, 20 bp, Artificial Sequence
  Description of Artificial Sequence: Synthetic oligonucleotide
  Target: SCNA; (+) strand; PAM type: YTN; PAM sequence: TTT
aaagtataaatatttctgta

SEQ ID NO: 73722 - DNA, 20 bp, Artificial Sequence
  Description of Artificial Sequence: Synthetic oligonucleotide
  Target: SCNA; (+) strand; PAM type: YTN; PAM sequence: TTA
aagtataaatatttctgtac

SEQ ID NO: 73723 - DNA, 20 bp, Artificial Sequence
  Description of Artificial Sequence: Synthetic oligonucleotide
  Target: SCNA; (+) strand; PAM type: YTN; PAM sequence: TTT
ctgtactataatacaatata

SEQ ID NO: 73724 - DNA, 20 bp, Artificial Sequence
  Description of Artificial Sequence: Synthetic oligonucleotide
  Target: SCNA; (+) strand; PAM type: YTN; PAM sequence: TTC
tgtactataatacaatatac

SEQ ID NO: 73725 - DNA, 20 bp, Artificial Sequence
  Description of Artificial Sequence: Synthetic oligonucleotide
  Target: SCNA; (+) strand; PAM type: YTN; PAM sequence: CTG
tactataatacaatatacag

SEQ ID NO: 73726 - DNA, 20 bp, Artificial Sequence
  Description of Artificial Sequence: Synthetic oligonucleotide
  Target: SCNA; (+) strand; PAM type: YTN; PAM sequence: CTA
taatacaatatacagtatta

SEQ ID NO: 73727 - DNA, 20 bp, Artificial Sequence
  Description of Artificial Sequence: Synthetic oligonucleotide
  Target: SCNA; (+) strand; PAM type: YTN; PAM sequence: TTA
tagtttatggtctgtgattt

SEQ ID NO: 73728 - DNA, 20 bp, Artificial Sequence
  Description of Artificial Sequence: Synthetic oligonucleotide
  Target: SCNA; (+) strand; PAM type: YTN; PAM sequence: TTT
atggtctgtgatttacggta

SEQ ID NO: 73729 - DNA, 20 bp, Artificial Sequence
  Description of Artificial Sequence: Synthetic oligonucleotide
  Target: SCNA; (+) strand; PAM type: YTN; PAM sequence: TTA
tggtctgtgatttacggtaa

SEQ ID NO: 73730 - DNA, 20 bp, Artificial Sequence
  Description of Artificial Sequence: Synthetic oligonucleotide
  Target: SCNA; (+) strand; PAM type: YTN; PAM sequence: CTG
tgatttacggtaattactgt

SEQ ID NO: 73731 - DNA, 20 bp, Artificial Sequence
  Description of Artificial Sequence: Synthetic oligonucleotide
  Target: SCNA; (+) strand; PAM type: YTN; PAM sequence: TTT
acggtaattactgtgggtca

SEQ ID NO: 73732 - DNA, 20 bp, Artificial Sequence
  Description of Artificial Sequence: Synthetic oligonucleotide
  Target: SCNA; (+) strand; PAM type: YTN; PAM sequence: TTA
cggtaattactgtgggtcat

SEQ ID NO: 73733 - DNA, 20 bp, Artificial Sequence
  Description of Artificial Sequence: Synthetic oligonucleotide
  Target: SCNA; (+) strand; PAM type: YTN; PAM sequence: TTA
ctgtgggtcattttttctga

SEQ ID NO: 73734 - DNA, 20 bp, Artificial Sequence
  Description of Artificial Sequence: Synthetic oligonucleotide
  Target: SCNA; (+) strand; PAM type: YTN; PAM sequence: CTG
tgggtcattttttctgaatt

SEQ ID NO: 73735 - DNA, 20 bp, Artificial Sequence
  Description of Artificial Sequence: Synthetic oligonucleotide
  Target: SCNA; (+) strand; PAM type: YTN; PAM sequence: TTT
tttctgaattaattttataa

SEQ ID NO: 73736 - DNA, 20 bp, Artificial Sequence
  Description of Artificial Sequence: Synthetic oligonucleotide
  Target: SCNA; (+) strand; PAM type: YTN; PAM sequence: TTT
ttctgaattaattttataag

SEQ ID NO: 73737 - DNA, 20 bp, Artificial Sequence
  Description of Artificial Sequence: Synthetic oligonucleotide
  Target: SCNA; (+) strand; PAM type: YTN; PAM sequence: TTT
tctgaattaattttataagt

SEQ ID NO: 73738 - DNA, 20 bp, Artificial Sequence
  Description of Artificial Sequence: Synthetic oligonucleotide
  Target: SCNA; (+) strand; PAM type: YTN; PAM sequence: TTT
ctgaattaattttataagtg

SEQ ID NO: 73739 - DNA, 20 bp, Artificial Sequence
  Description of Artificial Sequence: Synthetic oligonucleotide
  Target: SCNA; (+) strand; PAM type: YTN; PAM sequence: TTC
tgaattaattttataagtga

SEQ ID NO: 73740 - DNA, 20 bp, Artificial Sequence
  Description of Artificial Sequence: Synthetic oligonucleotide
  Target: SCNA; (+) strand; PAM type: YTN; PAM sequence: CTG
aattaattttataagtgaac

SEQ ID NO: 73741 - DNA, 20 bp, Artificial Sequence
  Description of Artificial Sequence: Synthetic oligonucleotide
  Target: SCNA; (+) strand; PAM type: YTN; PAM sequence: TTA
attttataagtgaacaagca

SEQ ID NO: 73742 - DNA, 20 bp, Artificial Sequence
  Description of Artificial Sequence: Synthetic oligonucleotide
  Target: SCNA; (+) strand; PAM type: YTN; PAM sequence: TTT
tataagtgaacaagcaaagt

SEQ ID NO: 73743 - DNA, 20 bp, Artificial Sequence
  Description of Artificial Sequence: Synthetic oligonucleotide
  Target: SCNA; (+) strand; PAM type: YTN; PAM sequence: TTT
ataagtgaacaagcaaagtg

SEQ ID NO: 73744 - DNA, 20 bp, Artificial Sequence
  Description of Artificial Sequence: Synthetic oligonucleotide
  Target: SCNA; (+) strand; PAM type: YTN; PAM sequence: TTA
taagtgaacaagcaaagtga

SEQ ID NO: 73745 - DNA, 20 bp, Artificial Sequence
  Description of Artificial Sequence: Synthetic oligonucleotide
  Target: SCNA; (+) strand; PAM type: YTN; PAM sequence: CTA
tgatccagaaataactttca

SEQ ID NO: 73746 - DNA, 20 bp, Artificial Sequence
  Description of Artificial Sequence: Synthetic oligonucleotide
  Target: SCNA; (+) strand; PAM type: YTN; PAM sequence: CTT
tcaatgataaaaaacctgaa

SEQ ID NO: 73747 - DNA, 20 bp, Artificial Sequence
  Description of Artificial Sequence: Synthetic oligonucleotide
  Target: SCNA; (+) strand; PAM type: YTN; PAM sequence: TTT
caatgataaaaaacctgaag

SEQ ID NO: 73748 - DNA, 20 bp, Artificial Sequence
  Description of Artificial Sequence: Synthetic oligonucleotide
  Target: SCNA; (+) strand; PAM type: YTN; PAM sequence: TTC
aatgataaaaaacctgaagt

SEQ ID NO: 73749 - DNA, 20 bp, Artificial Sequence
  Description of Artificial Sequence: Synthetic oligonucleotide
  Target: SCNA; (+) strand; PAM type: YTN; PAM sequence: CTG
aagtacaacaaagaagtcag

SEQ ID NO: 73750 - DNA, 20 bp, Artificial Sequence
  Description of Artificial Sequence: Synthetic oligonucleotide
  Target: SCNA; (+) strand; PAM type: YTN; PAM sequence: CTA
gacaaaatggaactaaatat

SEQ ID NO: 73751 - DNA, 20 bp, Artificial Sequence
  Description of Artificial Sequence: Synthetic oligonucleotide
  Target: SCNA; (+) strand; PAM type: YTN; PAM sequence: CTA
aatatactaagaaggtgcag

SEQ ID NO: 73752 - DNA, 20 bp, Artificial Sequence
  Description of Artificial Sequence: Synthetic oligonucleotide
  Target: SCNA; (+) strand; PAM type: YTN; PAM sequence: CTA
agaaggtgcagaaaaagaag

SEQ ID NO: 73753 - DNA, 20 bp, Artificial Sequence
  Description of Artificial Sequence: Synthetic oligonucleotide
  Target: SCNA; (+) strand; PAM type: YTN; PAM sequence: TTG
tggcttaaccccatatttcc

SEQ ID NO: 73754 - DNA, 20 bp, Artificial Sequence
  Description of Artificial Sequence: Synthetic oligonucleotide
  Target: SCNA; (+) strand; PAM type: YTN; PAM sequence: CTT
aaccccatatttccccatgg

SEQ ID NO: 73755 - DNA, 20 bp, Artificial Sequence
  Description of Artificial Sequence: Synthetic oligonucleotide
  Target: SCNA; (+) strand; PAM type: YTN; PAM sequence: TTA
accccatatttccccatggc

SEQ ID NO: 73756 - DNA, 20 bp, Artificial Sequence
  Description of Artificial Sequence: Synthetic oligonucleotide
  Target: SCNA; (+) strand; PAM type: YTN; PAM sequence: TTT
ccccatggcagaaggacaga

SEQ ID NO: 73757 - DNA, 20 bp, Artificial Sequence
  Description of Artificial Sequence: Synthetic oligonucleotide
  Target: SCNA; (+) strand; PAM type: YTN; PAM sequence: TTC
cccatggcagaaggacagaa

SEQ ID NO: 73758 - DNA, 20 bp, Artificial Sequence
  Description of Artificial Sequence: Synthetic oligonucleotide
  Target: SCNA; (+) strand; PAM type: YTN; PAM sequence: CTA
aatctgagggcaactcaaca

SEQ ID NO: 73759 - DNA, 20 bp, Artificial Sequence
  Description of Artificial Sequence: Synthetic oligonucleotide
  Target: SCNA; (+) strand; PAM type: YTN; PAM sequence: CTG
agggcaactcaacagtagtc

SEQ ID NO: 73760 - DNA, 20 bp, Artificial Sequence
  Description of Artificial Sequence: Synthetic oligonucleotide
  Target: SCNA; (+) strand; PAM type: YTN; PAM sequence: CTC
aacagtagtcaataattatc

SEQ ID NO: 73761 - DNA, 20 bp, Artificial Sequence
  Description of Artificial Sequence: Synthetic oligonucleotide
  Target: SCNA; (+) strand; PAM type: YTN; PAM sequence: TTA
tcagccaaatcaatggatga

SEQ ID NO: 73762 - DNA, 20 bp, Artificial Sequence
  Description of Artificial Sequence: Synthetic oligonucleotide
  Target: SCNA; (+) strand; PAM type: YTN; PAM sequence: TTT
gtgcctgggaacccttctgt

SEQ ID NO: 73763 - DNA, 20 bp, Artificial Sequence
  Description of Artificial Sequence: Synthetic oligonucleotide
  Target: SCNA; (+) strand; PAM type: YTN; PAM sequence: TTG
tgcctgggaacccttctgtc

SEQ ID NO: 73764 - DNA, 20 bp, Artificial Sequence
  Description of Artificial Sequence: Synthetic oligonucleotide
  Target: SCNA; (+) strand; PAM type: YTN; PAM sequence: CTG
ggaacccttctgtcatcatg

SEQ ID NO: 73765 - DNA, 20 bp, Artificial Sequence
  Description of Artificial Sequence: Synthetic oligonucleotide
  Target: SCNA; (+) strand; PAM type: YTN; PAM sequence: CTT
ctgtcatcatgcataagcag

SEQ ID NO: 73766 - DNA, 20 bp, Artificial Sequence
  Description of Artificial Sequence: Synthetic oligonucleotide
  Target: SCNA; (+) strand; PAM type: YTN; PAM sequence: TTC
tgtcatcatgcataagcagc

SEQ ID NO: 73767 - DNA, 20 bp, Artificial Sequence
  Description of Artificial Sequence: Synthetic oligonucleotide
  Target: SCNA; (+) strand; PAM type: YTN; PAM sequence: CTG
tcatcatgcataagcagcct

SEQ ID NO: 73768 - DNA, 20 bp, Artificial Sequence
  Description of Artificial Sequence: Synthetic oligonucleotide
  Target: SCNA; (+) strand; PAM type: YTN; PAM sequence: CTG
agtcttagataatactatat

SEQ ID NO: 73769 - DNA, 20 bp, Artificial Sequence
  Description of Artificial Sequence: Synthetic oligonucleotide
  Target: SCNA; (+) strand; PAM type: YTN; PAM sequence: CTT
agataatactatatgacatg

SEQ ID NO: 73770 - DNA, 20 bp, Artificial Sequence
  Description of Artificial Sequence: Synthetic oligonucleotide
  Target: SCNA; (+) strand; PAM type: YTN; PAM sequence: TTA
gataatactatatgacatgc

SEQ ID NO: 73771 - DNA, 20 bp, Artificial Sequence
  Description of Artificial Sequence: Synthetic oligonucleotide
  Target: SCNA; (+) strand; PAM type: YTN; PAM sequence: CTA
tatgacatgctttcttcatg

SEQ ID NO: 73772 - DNA, 20 bp, Artificial Sequence
  Description of Artificial Sequence: Synthetic oligonucleotide
  Target: SCNA; (+) strand; PAM type: YTN; PAM sequence: CTT
tcttcatgtgaataaacaga

SEQ ID NO: 73773 - DNA, 20 bp, Artificial Sequence
  Description of Artificial Sequence: Synthetic oligonucleotide
  Target: SCNA; (+) strand; PAM type: YTN; PAM sequence: TTT
cttcatgtgaataaacagac

SEQ ID NO: 73774 - DNA, 20 bp, Artificial Sequence
  Description of Artificial Sequence: Synthetic oligonucleotide
  Target: SCNA; (+) strand; PAM type: YTN; PAM sequence: TTC
ttcatgtgaataaacagacc

SEQ ID NO: 73775 - DNA, 20 bp, Artificial Sequence
  Description of Artificial Sequence: Synthetic oligonucleotide
  Target: SCNA; (+) strand; PAM type: YTN; PAM sequence: CTT
catgtgaataaacagaccta

SEQ ID NO: 73776 - DNA, 20 bp, Artificial Sequence
  Description of Artificial Sequence: Synthetic oligonucleotide
  Target: SCNA; (+) strand; PAM type: YTN; PAM sequence: TTC
atgtgaataaacagacctaa

SEQ ID NO: 73777 - DNA, 20 bp, Artificial Sequence
  Description of Artificial Sequence: Synthetic oligonucleotide
  Target: SCNA; (+) strand; PAM type: YTN; PAM sequence: CTA
aagacaggcactaggagacc

SEQ ID NO: 73778 - DNA, 20 bp, Artificial Sequence
  Description of Artificial Sequence: Synthetic oligonucleotide
  Target: SCNA; (+) strand; PAM type: YTN; PAM sequence: CTA
ggagaccctgggaccacaaa

SEQ ID NO: 73779 - DNA, 20 bp, Artificial Sequence
  Description of Artificial Sequence: Synthetic oligonucleotide
  Target: SCNA; (+) strand; PAM type: YTN; PAM sequence: CTG
ggaccacaaagctcagattg

SEQ ID NO: 73780 - DNA, 20 bp, Artificial Sequence
  Description of Artificial Sequence: Synthetic oligonucleotide
  Target: SCNA; (+) strand; PAM type: YTN; PAM sequence: CTC
agattgttataataaaagga

SEQ ID NO: 73781 - DNA, 20 bp, Artificial Sequence
  Description of Artificial Sequence: Synthetic oligonucleotide
  Target: SCNA; (+) strand; PAM type: YTN; PAM sequence: TTG
ttataataaaaggagggaaa

SEQ ID NO: 73782 - DNA, 20 bp, Artificial Sequence
  Description of Artificial Sequence: Synthetic oligonucleotide
  Target: SCNA; (+) strand; PAM type: YTN; PAM sequence: TTA
taataaaaggagggaaacaa

SEQ ID NO: 73783 - DNA, 20 bp, Artificial Sequence
  Description of Artificial Sequence: Synthetic oligonucleotide
  Target: SCNA; (+) strand; PAM type: YTN; PAM sequence: CTC
cctgttgaagaaaatttttg

SEQ ID NO: 73784 - DNA, 20 bp, Artificial Sequence
  Description of Artificial Sequence: Synthetic oligonucleotide
  Target: SCNA; (+) strand; PAM type: YTN; PAM sequence: CTG
ttgaagaaaatttttgcaca

SEQ ID NO: 73785 - DNA, 20 bp, Artificial Sequence
  Description of Artificial Sequence: Synthetic oligonucleotide
  Target: SCNA; (+) strand; PAM type: YTN; PAM sequence: TTG
aagaaaatttttgcacactt

SEQ ID NO: 73786 - DNA, 20 bp, Artificial Sequence
  Description of Artificial Sequence: Synthetic oligonucleotide
  Target: SCNA; (+) strand; PAM type: YTN; PAM sequence: TTT
ttgcacacttgatatacaat

SEQ ID NO: 73787 - DNA, 20 bp, Artificial Sequence
  Description of Artificial Sequence: Synthetic oligonucleotide
  Target: SCNA; (+) strand; PAM type: YTN; PAM sequence: TTT
tgcacacttgatatacaata

SEQ ID NO: 73788 - DNA, 20 bp, Artificial Sequence
  Description of Artificial Sequence: Synthetic oligonucleotide
  Target: SCNA; (+) strand; PAM type: YTN; PAM sequence: TTT
gcacacttgatatacaatat

SEQ ID NO: 73789 - DNA, 20 bp, Artificial Sequence
  Description of Artificial Sequence: Synthetic oligonucleotide
  Target: SCNA; (+) strand; PAM type: YTN; PAM sequence: TTG
cacacttgatatacaatatt

SEQ ID NO: 73790 - DNA, 20 bp, Artificial Sequence
  Description of Artificial Sequence: Synthetic oligonucleotide
  Target: SCNA; (+) strand; PAM type: YTN; PAM sequence: CTT
gatatacaatatttctacta

SEQ ID NO: 73791 - DNA, 20 bp, Artificial Sequence
  Description of Artificial Sequence: Synthetic oligonucleotide
  Target: SCNA; (+) strand; PAM type: YTN; PAM sequence: TTG
atatacaatatttctactaa

SEQ ID NO: 73792 - DNA, 20 bp, Artificial Sequence
  Description of Artificial Sequence: Synthetic oligonucleotide
  Target: SCNA; (+) strand; PAM type: YTN; PAM sequence: TTT
ctactaatgaacagagaaag

SEQ ID NO: 73793 - DNA, 20 bp, Artificial Sequence
  Description of Artificial Sequence: Synthetic oligonucleotide
  Target: SCNA; (+) strand; PAM type: YTN; PAM sequence: TTC
tactaatgaacagagaaagc

SEQ ID NO: 73794 - DNA, 20 bp, Artificial Sequence
  Description of Artificial Sequence: Synthetic oligonucleotide
  Target: SCNA; (+) strand; PAM type: YTN; PAM sequence: CTA
ctaatgaacagagaaagctt

SEQ ID NO: 73795 - DNA, 20 bp, Artificial Sequence
  Description of Artificial Sequence: Synthetic oligonucleotide
  Target: SCNA; (+) strand; PAM type: YTN; PAM sequence: CTA
atgaacagagaaagcttgac

SEQ ID NO: 73796 - DNA, 20 bp, Artificial Sequence
  Description of Artificial Sequence: Synthetic oligonucleotide
  Target: SCNA; (+) strand; PAM type: YTN; PAM sequence: CTT
gacttgaaaggacacattta

SEQ ID NO: 73797 - DNA, 20 bp, Artificial Sequence
  Description of Artificial Sequence: Synthetic oligonucleotide
  Target: SCNA; (+) strand; PAM type: YTN; PAM sequence: TTG
acttgaaaggacacatttat

SEQ ID NO: 73798 - DNA, 20 bp, Artificial Sequence
  Description of Artificial Sequence: Synthetic oligonucleotide
  Target: SCNA; (+) strand; PAM type: YTN; PAM sequence: CTT
gaaaggacacatttatatta

SEQ ID NO: 73799 - DNA, 20 bp, Artificial Sequence
  Description of Artificial Sequence: Synthetic oligonucleotide
  Target: SCNA; (+) strand; PAM type: YTN; PAM sequence: TTG
aaaggacacatttatattag

SEQ ID NO: 73800 - DNA, 20 bp, Artificial Sequence
  Description of Artificial Sequence: Synthetic oligonucleotide
  Target: SCNA; (+) strand; PAM type: YTN; PAM sequence: TTT
atattagatgtcatccctat

SEQ ID NO: 73801 - DNA, 20 bp, Artificial Sequence
  Description of Artificial Sequence: Synthetic oligonucleotide
  Target: SCNA; (+) strand; PAM type: YTN; PAM sequence: TTA
tattagatgtcatccctatc

SEQ ID NO: 73802 - DNA, 20 bp, Artificial Sequence
  Description of Artificial Sequence: Synthetic oligonucleotide
  Target: SCNA; (+) strand; PAM type: YTN; PAM sequence: TTA
gatgtcatccctatctagag

SEQ ID NO: 73803 - DNA, 20 bp, Artificial Sequence
  Description of Artificial Sequence: Synthetic oligonucleotide
  Target: SCNA; (+) strand; PAM type: YTN; PAM sequence: CTA
tctagaggccattactatca

SEQ ID NO: 73804 - DNA, 20 bp, Artificial Sequence
  Description of Artificial Sequence: Synthetic oligonucleotide
  Target: SCNA; (+) strand; PAM type: YTN; PAM sequence: CTA
gaggccattactatcaagca

SEQ ID NO: 73805 - DNA, 20 bp, Artificial Sequence
  Description of Artificial Sequence: Synthetic oligonucleotide
  Target: SCNA; (+) strand; PAM type: YTN; PAM sequence: TTA
ctatcaagcatctgtcaggt

SEQ ID NO: 73806 - DNA, 20 bp, Artificial Sequence
  Description of Artificial Sequence: Synthetic oligonucleotide
  Target: SCNA; (+) strand; PAM type: YTN; PAM sequence: CTA
tcaagcatctgtcaggtaaa

SEQ ID NO: 73807 - DNA, 20 bp, Artificial Sequence
  Description of Artificial Sequence: Synthetic oligonucleotide
  Target: SCNA; (+) strand; PAM type: YTN; PAM sequence: CTG
tcaggtaaaggagatgagat

SEQ ID NO: 73808 - DNA, 20 bp, Artificial Sequence
  Description of Artificial Sequence: Synthetic oligonucleotide
  Target: SCNA; (+) strand; PAM type: YTN; PAM sequence: CTG
taattttttctttaaatatt

SEQ ID NO: 73809 - DNA, 20 bp, Artificial Sequence
  Description of Artificial Sequence: Synthetic oligonucleotide
  Target: SCNA; (+) strand; PAM type: YTN; PAM sequence: TTT
tttctttaaatattgttttt

SEQ ID NO: 73810 - DNA, 20 bp, Artificial Sequence
  Description of Artificial Sequence: Synthetic oligonucleotide
  Target: SCNA; (+) strand; PAM type: YTN; PAM sequence: TTT
ttctttaaatattgtttttt

SEQ ID NO: 73811 - DNA, 20 bp, Artificial Sequence
  Description of Artificial Sequence: Synthetic oligonucleotide
  Target: SCNA; (+) strand; PAM type: YTN; PAM sequence: TTT
tctttaaatattgttttttc

SEQ ID NO: 73812 - DNA, 20 bp, Artificial Sequence
  Description of Artificial Sequence: Synthetic oligonucleotide
  Target: SCNA; (+) strand; PAM type: YTN; PAM sequence: TTT
ctttaaatattgttttttct

SEQ ID NO: 73813 - DNA, 20 bp, Artificial Sequence
  Description of Artificial Sequence: Synthetic oligonucleotide
  Target: SCNA; (+) strand; PAM type: YTN; PAM sequence: TTC
tttaaatattgttttttcta

SEQ ID NO: 73814 - DNA, 20 bp, Artificial Sequence
  Description of Artificial Sequence: Synthetic oligonucleotide
  Target: SCNA; (+) strand; PAM type: YTN; PAM sequence: CTT
taaatattgttttttctaag

SEQ ID NO: 73815 - DNA, 20 bp, Artificial Sequence
  Description of Artificial Sequence: Synthetic oligonucleotide
  Target: SCNA; (+) strand; PAM type: YTN; PAM sequence: TTT
aaatattgttttttctaagt

SEQ ID NO: 73816 - DNA, 20 bp, Artificial Sequence
  Description of Artificial Sequence: Synthetic oligonucleotide
  Target: SCNA; (+) strand; PAM type: YTN; PAM sequence: TTA
aatattgttttttctaagtt

SEQ ID NO: 73817 - DNA, 20 bp, Artificial Sequence
  Description of Artificial Sequence: Synthetic oligonucleotide
  Target: SCNA; (+) strand; PAM type: YTN; PAM sequence: TTG
ttttttctaagttgtgttgg

SEQ ID NO: 73818 - DNA, 20 bp, Artificial Sequence
  Description of Artificial Sequence: Synthetic oligonucleotide
  Target: SCNA; (+) strand; PAM type: YTN; PAM sequence: TTT
tttctaagttgtgttggaaa

SEQ ID NO: 73819 - DNA, 20 bp, Artificial Sequence
  Description of Artificial Sequence: Synthetic oligonucleotide
  Target: SCNA; (+) strand; PAM type: YTN; PAM sequence: TTT
ttctaagttgtgttggaaat

SEQ ID NO: 73820 - DNA, 20 bp, Artificial Sequence
  Description of Artificial Sequence: Synthetic oligonucleotide
  Target: SCNA; (+) strand; PAM type: YTN; PAM sequence: TTT
tctaagttgtgttggaaatg

SEQ ID NO: 73821 - DNA, 20 bp, Artificial Sequence
  Description of Artificial Sequence: Synthetic oligonucleotide
  Target: SCNA; (+) strand; PAM type: YTN; PAM sequence: TTT
ctaagttgtgttggaaatgg

SEQ ID NO: 73822 - DNA, 20 bp, Artificial Sequence
  Description of Artificial Sequence: Synthetic oligonucleotide
  Target: SCNA; (+) strand; PAM type: YTN; PAM sequence: TTC
taagttgtgttggaaatggg

SEQ ID NO: 73823 - DNA, 20 bp, Artificial Sequence
  Description of Artificial Sequence: Synthetic oligonucleotide
  Target: SCNA; (+) strand; PAM type: YTN; PAM sequence: CTA
agttgtgttggaaatgggga

SEQ ID NO: 73824 - DNA, 20 bp, Artificial Sequence
  Description of Artificial Sequence: Synthetic oligonucleotide
  Target: SCNA; (+) strand; PAM type: YTN; PAM sequence: TTG
tgttggaaatggggagttgc

SEQ ID NO: 73825 - DNA, 20 bp, Artificial Sequence
  Description of Artificial Sequence: Synthetic oligonucleotide
  Target: SCNA; (+) strand; PAM type: YTN; PAM sequence: TTG
gaaatggggagttgcaagtt

SEQ ID NO: 73826 - DNA, 20 bp, Artificial Sequence
  Description of Artificial Sequence: Synthetic oligonucleotide
  Target: SCNA; (+) strand; PAM type: YTN; PAM sequence: TTG
caagtttgtatttccattgc

SEQ ID NO: 73827 - DNA, 20 bp, Artificial Sequence
  Description of Artificial Sequence: Synthetic oligonucleotide
  Target: SCNA; (+) strand; PAM type: YTN; PAM sequence: TTT
gtatttccattgcttaaaaa

SEQ ID NO: 73828 - DNA, 20 bp, Artificial Sequence
  Description of Artificial Sequence: Synthetic oligonucleotide
  Target: SCNA; (+) strand; PAM type: YTN; PAM sequence: TTG
tatttccattgcttaaaaat

SEQ ID NO: 73829 - DNA, 20 bp, Artificial Sequence
  Description of Artificial Sequence: Synthetic oligonucleotide
  Target: SCNA; (+) strand; PAM type: YTN; PAM sequence: TTT
ccattgcttaaaaatagaaa

SEQ ID NO: 73830 - DNA, 20 bp, Artificial Sequence
  Description of Artificial Sequence: Synthetic oligonucleotide
  Target: SCNA; (+) strand; PAM type: YTN; PAM sequence: TTC
cattgcttaaaaatagaaaa

SEQ ID NO: 73831 - DNA, 20 bp, Artificial Sequence
  Description of Artificial Sequence: Synthetic oligonucleotide
  Target: SCNA; (+) strand; PAM type: YTN; PAM sequence: TTG
cttaaaaatagaaaacagat

SEQ ID NO: 73832 - DNA, 20 bp, Artificial Sequence
  Description of Artificial Sequence: Synthetic oligonucleotide
  Target: SCNA; (+) strand; PAM type: YTN; PAM sequence: CTT
aaaaatagaaaacagatgaa

SEQ ID NO: 73833 - DNA, 20 bp, Artificial Sequence
  Description of Artificial Sequence: Synthetic oligonucleotide
  Target: SCNA; (+) strand; PAM type: YTN; PAM sequence: TTA
aaaatagaaaacagatgaag

SEQ ID NO: 73834 - DNA, 20 bp, Artificial Sequence
  Description of Artificial Sequence: Synthetic oligonucleotide
  Target: SCNA; (+) strand; PAM type: YTN; PAM sequence: TTT
cataatacggaggctaaaac

SEQ ID NO: 73835 - DNA, 20 bp, Artificial Sequence
  Description of Artificial Sequence: Synthetic oligonucleotide
  Target: SCNA; (+) strand; PAM type: YTN; PAM sequence: TTC
ataatacggaggctaaaact

SEQ ID NO: 73836 - DNA, 20 bp, Artificial Sequence
  Description of Artificial Sequence: Synthetic oligonucleotide
  Target: SCNA; (+) strand; PAM type: YTN; PAM sequence: CTA
aaactcttaagaaaaagcaa

SEQ ID NO: 73837 - DNA, 20 bp, Artificial Sequence
  Description of Artificial Sequence: Synthetic oligonucleotide
  Target: SCNA; (+) strand; PAM type: YTN; PAM sequence: CTC
ttaagaaaaagcaatattta

SEQ ID NO: 73838 - DNA, 20 bp, Artificial Sequence
  Description of Artificial Sequence: Synthetic oligonucleotide
  Target: SCNA; (+) strand; PAM type: YTN; PAM sequence: CTT
aagaaaaagcaatatttatt

SEQ ID NO: 73839 - DNA, 20 bp, Artificial Sequence
  Description of Artificial Sequence: Synthetic oligonucleotide
  Target: SCNA; (+) strand; PAM type: YTN; PAM sequence: TTA
agaaaaagcaatatttattc

SEQ ID NO: 73840 - DNA, 20 bp, Artificial Sequence
  Description of Artificial Sequence: Synthetic oligonucleotide
  Target: SCNA; (+) strand; PAM type: YTN; PAM sequence: TTT
attctagtgcccaacctacc

SEQ ID NO: 73841 - DNA, 20 bp, Artificial Sequence
  Description of Artificial Sequence: Synthetic oligonucleotide
  Target: SCNA; (+) strand; PAM type: YTN; PAM sequence: TTA
ttctagtgcccaacctacca

SEQ ID NO: 73842 - DNA, 20 bp, Artificial Sequence
  Description of Artificial Sequence: Synthetic oligonucleotide
  Target: SCNA; (+) strand; PAM type: YTN; PAM sequence: TTC
tagtgcccaacctaccatga

SEQ ID NO: 73843 - DNA, 20 bp, Artificial Sequence
  Description of Artificial Sequence: Synthetic oligonucleotide
  Target: SCNA; (+) strand; PAM type: YTN; PAM sequence: CTA
gtgcccaacctaccatgaga

SEQ ID NO: 73844 - DNA, 20 bp, Artificial Sequence
  Description of Artificial Sequence: Synthetic oligonucleotide
  Target: SCNA; (+) strand; PAM type: YTN; PAM sequence: CTA
ccatgagaaagttgtgcgac

SEQ ID NO: 73845 - DNA, 20 bp, Artificial Sequence
  Description of Artificial Sequence: Synthetic oligonucleotide
  Target: SCNA; (+) strand; PAM type: YTN; PAM sequence: TTG
tgcgactttgggcaagttat

SEQ ID NO: 73846 - DNA, 20 bp, Artificial Sequence
  Description of Artificial Sequence: Synthetic oligonucleotide
  Target: SCNA; (+) strand; PAM type: YTN; PAM sequence: CTT
tgggcaagttatttaattcc

SEQ ID NO: 73847 - DNA, 20 bp, Artificial Sequence
  Description of Artificial Sequence: Synthetic oligonucleotide
  Target: SCNA; (+) strand; PAM type: YTN; PAM sequence: TTT
gggcaagttatttaattcct

SEQ ID NO: 73848 - DNA, 20 bp, Artificial Sequence
  Description of Artificial Sequence: Synthetic oligonucleotide
  Target: SCNA; (+) strand; PAM type: YTN; PAM sequence: TTG
ggcaagttatttaattcctc

SEQ ID NO: 73849 - DNA, 20 bp, Artificial Sequence
  Description of Artificial Sequence: Synthetic oligonucleotide
  Target: SCNA; (+) strand; PAM type: YTN; PAM sequence: TTA
tttaattcctctgggtctga

SEQ ID NO: 73850 - DNA, 20 bp, Artificial Sequence
  Description of Artificial Sequence: Synthetic oligonucleotide
  Target: SCNA; (+) strand; PAM type: YTN; PAM sequence: TTT
aattcctctgggtctgaaga

SEQ ID NO: 73851 - DNA, 20 bp, Artificial Sequence
  Description of Artificial Sequence: Synthetic oligonucleotide
  Target: SCNA; (+) strand; PAM type: YTN; PAM sequence: TTA
attcctctgggtctgaagat

SEQ ID NO: 73852 - DNA, 20 bp, Artificial Sequence
  Description of Artificial Sequence: Synthetic oligonucleotide
  Target: SCNA; (+) strand; PAM type: YTN; PAM sequence: TTC
ctctgggtctgaagatgagt

SEQ ID NO: 73853 - DNA, 20 bp, Artificial Sequence
  Description of Artificial Sequence: Synthetic oligonucleotide
  Target: SCNA; (+) strand; PAM type: YTN; PAM sequence: CTC
tgggtctgaagatgagtctg

SEQ ID NO: 73854 - DNA, 20 bp, Artificial Sequence
  Description of Artificial Sequence: Synthetic oligonucleotide
  Target: SCNA; (+) strand; PAM type: YTN; PAM sequence: CTG
ggtctgaagatgagtctgca

SEQ ID NO: 73855 - DNA, 20 bp, Artificial Sequence
  Description of Artificial Sequence: Synthetic oligonucleotide
  Target: SCNA; (+) strand; PAM type: YTN; PAM sequence: CTG
aagatgagtctgcacacaag

SEQ ID NO: 73856 - DNA, 20 bp, Artificial Sequence
  Description of Artificial Sequence: Synthetic oligonucleotide
  Target: SCNA; (+) strand; PAM type: YTN; PAM sequence: CTG
cacacaagagcctataatga

SEQ ID NO: 73857 - DNA, 20 bp, Artificial Sequence
  Description of Artificial Sequence: Synthetic oligonucleotide
  Target: SCNA; (+) strand; PAM type: YTN; PAM sequence: CTA
taatgatcccttccaacacc

SEQ ID NO: 73858 - DNA, 20 bp, Artificial Sequence
  Description of Artificial Sequence: Synthetic oligonucleotide
  Target: SCNA; (+) strand; PAM type: YTN; PAM sequence: CTT
ccaacaccgggactggcggg

SEQ ID NO: 73859 - DNA, 20 bp, Artificial Sequence
  Description of Artificial Sequence: Synthetic oligonucleotide
  Target: SCNA; (+) strand; PAM type: YTN; PAM sequence: TTC
caacaccgggactggcgggt

SEQ ID NO: 73860 - DNA, 20 bp, Artificial Sequence
  Description of Artificial Sequence: Synthetic oligonucleotide
  Target: SCNA; (+) strand; PAM type: YTN; PAM sequence: CTG
gcgggtctgcagccacagtt

SEQ ID NO: 73861 - DNA, 20 bp, Artificial Sequence
  Description of Artificial Sequence: Synthetic oligonucleotide
  Target: SCNA; (+) strand; PAM type: YTN; PAM sequence: CTG
cagccacagttacatctgga

SEQ ID NO: 73862 - DNA, 20 bp, Artificial Sequence
  Description of Artificial Sequence: Synthetic oligonucleotide
  Target: SCNA; (+) strand; PAM type: YTN; PAM sequence: TTA
catctggaaactccactggt

SEQ ID NO: 73863 - DNA, 20 bp, Artificial Sequence
  Description of Artificial Sequence: Synthetic oligonucleotide
  Target: SCNA; (+) strand; PAM type: YTN; PAM sequence: CTG
gaaactccactggtgctttt

SEQ ID NO: 73864 - DNA, 20 bp, Artificial Sequence
  Description of Artificial Sequence: Synthetic oligonucleotide
  Target: SCNA; (+) strand; PAM type: YTN; PAM sequence: CTC
cactggtgcttttggagctt

SEQ ID NO: 73865 - DNA, 20 bp, Artificial Sequence
  Description of Artificial Sequence: Synthetic oligonucleotide
  Target: SCNA; (+) strand; PAM type: YTN; PAM sequence: CTG
gtgcttttggagcttcccaa

SEQ ID NO: 73866 - DNA, 20 bp, Artificial Sequence
  Description of Artificial Sequence: Synthetic oligonucleotide
  Target: SCNA; (+) strand; PAM type: YTN; PAM sequence: CTT
ttggagcttcccaagagtat

SEQ ID NO: 73867 - DNA, 20 bp, Artificial Sequence
  Description of Artificial Sequence: Synthetic oligonucleotide
  Target: SCNA; (+) strand; PAM type: YTN; PAM sequence: TTT
tggagcttcccaagagtatc

SEQ ID NO: 73868 - DNA, 20 bp, Artificial Sequence
  Description of Artificial Sequence: Synthetic oligonucleotide
  Target: SCNA; (+) strand; PAM type: YTN; PAM sequence: TTT
ggagcttcccaagagtatca

SEQ ID NO: 73869 - DNA, 20 bp, Artificial Sequence
  Description of Artificial Sequence: Synthetic oligonucleotide
  Target: SCNA; (+) strand; PAM type: YTN; PAM sequence: TTG
gagcttcccaagagtatcag

SEQ ID NO: 73870 - DNA, 20 bp, Artificial Sequence
  Description of Artificial Sequence: Synthetic oligonucleotide
  Target: SCNA; (+) strand; PAM type: YTN; PAM sequence: CTT
cccaagagtatcaggaattc

SEQ ID NO: 73871 - DNA, 20 bp, Artificial Sequence
  Description of Artificial Sequence: Synthetic oligonucleotide
  Target: SCNA; (+) strand; PAM type: YTN; PAM sequence: TTC
ccaagagtatcaggaattca

SEQ ID NO: 73872 - DNA, 20 bp, Artificial Sequence
  Description of Artificial Sequence: Synthetic oligonucleotide
  Target: SCNA; (+) strand; PAM type: YTN; PAM sequence: TTC
aatatgcagtcataaaaaat

SEQ ID NO: 73873 - DNA, 20 bp, Artificial Sequence
  Description of Artificial Sequence: Synthetic oligonucleotide
  Target: SCNA; (+) strand; PAM type: YTN; PAM sequence: TTT
tgggtcatgttctctaagta

SEQ ID NO: 73874 - DNA, 20 bp, Artificial Sequence
  Description of Artificial Sequence: Synthetic oligonucleotide
  Target: SCNA; (+) strand; PAM type: YTN; PAM sequence: TTT
gggtcatgttctctaagtac

SEQ ID NO: 73875 - DNA, 20 bp, Artificial Sequence
  Description of Artificial Sequence: Synthetic oligonucleotide
  Target: SCNA; (+) strand; PAM type: YTN; PAM sequence: TTG
ggtcatgttctctaagtaca

SEQ ID NO: 73876 - DNA, 20 bp, Artificial Sequence
  Description of Artificial Sequence: Synthetic oligonucleotide
  Target: SCNA; (+) strand; PAM type: YTN; PAM sequence: TTC
tctaagtacaacactgccat

SEQ ID NO: 73877 - DNA, 20 bp, Artificial Sequence
  Description of Artificial Sequence: Synthetic oligonucleotide
  Target: SCNA; (+) strand; PAM type: YTN; PAM sequence: CTC
taagtacaacactgccatgt

SEQ ID NO: 73878 - DNA, 20 bp, Artificial Sequence
  Description of Artificial Sequence: Synthetic oligonucleotide
  Target: SCNA; (+) strand; PAM type: YTN; PAM sequence: CTA
agtacaacactgccatgtgt

SEQ ID NO: 73879 - DNA, 20 bp, Artificial Sequence
  Description of Artificial Sequence: Synthetic oligonucleotide
  Target: SCNA; (+) strand; PAM type: YTN; PAM sequence: CTG
ccatgtgtgtgaagagatat

SEQ ID NO: 73880 - DNA, 20 bp, Artificial Sequence
  Description of Artificial Sequence: Synthetic oligonucleotide
  Target: SCNA; (+) strand; PAM type: YTN; PAM sequence: CTT
tattaaaatttttcttaagt

SEQ ID NO: 73881 - DNA, 20 bp, Artificial Sequence
  Description of Artificial Sequence: Synthetic oligonucleotide
  Target: SCNA; (+) strand; PAM type: YTN; PAM sequence: TTT
attaaaatttttcttaagtt

SEQ ID NO: 73882 - DNA, 20 bp, Artificial Sequence
  Description of Artificial Sequence: Synthetic oligonucleotide
  Target: SCNA; (+) strand; PAM type: YTN; PAM sequence: TTA
ttaaaatttttcttaagttg

SEQ ID NO: 73883 - DNA, 20 bp, Artificial Sequence
  Description of Artificial Sequence: Synthetic oligonucleotide
  Target: SCNA; (+) strand; PAM type: YTN; PAM sequence: TTA
aaatttttcttaagttgttc

SEQ ID NO: 73884 - DNA, 20 bp, Artificial Sequence
  Description of Artificial Sequence: Synthetic oligonucleotide
  Target: SCNA; (+) strand; PAM type: YTN; PAM sequence: TTT
ttcttaagttgttccttcct

SEQ ID NO: 73885 - DNA, 20 bp, Artificial Sequence
  Description of Artificial Sequence: Synthetic oligonucleotide
  Target: SCNA; (+) strand; PAM type: YTN; PAM sequence: TTT
tcttaagttgttccttccta

SEQ ID NO: 73886 - DNA, 20 bp, Artificial Sequence
  Description of Artificial Sequence: Synthetic oligonucleotide
  Target: SCNA; (+) strand; PAM type: YTN; PAM sequence: TTT
cttaagttgttccttcctaa

SEQ ID NO: 73887 - DNA, 20 bp, Artificial Sequence
  Description of Artificial Sequence: Synthetic oligonucleotide
  Target: SCNA; (+) strand; PAM type: YTN; PAM sequence: TTC
ttaagttgttccttcctaaa

SEQ ID NO: 73888 - DNA, 20 bp, Artificial Sequence
  Description of Artificial Sequence: Synthetic oligonucleotide
  Target: SCNA; (+) strand; PAM type: YTN; PAM sequence: CTT
aagttgttccttcctaaagt

SEQ ID NO: 73889 - DNA, 20 bp, Artificial Sequence
  Description of Artificial Sequence: Synthetic oligonucleotide
  Target: SCNA; (+) strand; PAM type: YTN; PAM sequence: TTA
agttgttccttcctaaagta

SEQ ID NO: 73890 - DNA, 20 bp, Artificial Sequence
  Description of Artificial Sequence: Synthetic oligonucleotide
  Target: SCNA; (+) strand; PAM type: YTN; PAM sequence: TTG
ttccttcctaaagtagtgaa

SEQ ID NO: 73891 - DNA, 20 bp, Artificial Sequence
  Description of Artificial Sequence: Synthetic oligonucleotide
  Target: SCNA; (+) strand; PAM type: YTN; PAM sequence: TTC
cttcctaaagtagtgaaagc

SEQ ID NO: 73892 - DNA, 20 bp, Artificial Sequence
  Description of Artificial Sequence: Synthetic oligonucleotide
  Target: SCNA; (+) strand; PAM type: YTN; PAM sequence: CTT
cctaaagtagtgaaagctga

SEQ ID NO: 73893 - DNA, 20 bp, Artificial Sequence
  Description of Artificial Sequence: Synthetic oligonucleotide
  Target: SCNA; (+) strand; PAM type: YTN; PAM sequence: TTC
ctaaagtagtgaaagctgag

SEQ ID NO: 73894 - DNA, 20 bp, Artificial Sequence
  Description of Artificial Sequence: Synthetic oligonucleotide
  Target: SCNA; (+) strand; PAM type: YTN; PAM sequence: CTA
aagtagtgaaagctgagcag

SEQ ID NO: 73895 - DNA, 20 bp, Artificial Sequence
  Description of Artificial Sequence: Synthetic oligonucleotide
  Target: SCNA; (+) strand; PAM type: YTN; PAM sequence: CTG
agcagatcttagaaattcat

SEQ ID NO: 73896 - DNA, 20 bp, Artificial Sequence
  Description of Artificial Sequence: Synthetic oligonucleotide
  Target: SCNA; (+) strand; PAM type: YTN; PAM sequence: CTT
agaaattcatttagaattca

SEQ ID NO: 73897 - DNA, 20 bp, Artificial Sequence
  Description of Artificial Sequence: Synthetic oligonucleotide
  Target: SCNA; (+) strand; PAM type: YTN; PAM sequence: TTA
gaaattcatttagaattcat

SEQ ID NO: 73898 - DNA, 20 bp, Artificial Sequence
  Description of Artificial Sequence: Synthetic oligonucleotide
  Target: SCNA; (+) strand; PAM type: YTN; PAM sequence: TTC
atttagaattcatattactc

SEQ ID NO: 73899 - DNA, 20 bp, Artificial Sequence
  Description of Artificial Sequence: Synthetic oligonucleotide
  Target: SCNA; (+) strand; PAM type: YTN; PAM sequence: TTT
agaattcatattactcaatt

SEQ ID NO: 73900 - DNA, 20 bp, Artificial Sequence
  Description of Artificial Sequence: Synthetic oligonucleotide
  Target: SCNA; (+) strand; PAM type: YTN; PAM sequence: TTA
gaattcatattactcaatta

SEQ ID NO: 73901 - DNA, 20 bp, Artificial Sequence
  Description of Artificial Sequence: Synthetic oligonucleotide
  Target: SCNA; (+) strand; PAM type: YTN; PAM sequence: TTC
atattactcaattacacttg

SEQ ID NO: 73902 - DNA, 20 bp, Artificial Sequence
  Description of Artificial Sequence: Synthetic oligonucleotide
  Target: SCNA; (+) strand; PAM type: YTN; PAM sequence: TTA
ctcaattacacttgactata

SEQ ID NO: 73903 - DNA, 20 bp, Artificial Sequence
  Description of Artificial Sequence: Synthetic oligonucleotide
  Target: SCNA; (+) strand; PAM type: YTN; PAM sequence: CTC
aattacacttgactataaca

SEQ ID NO: 73904 - DNA, 20 bp, Artificial Sequence
  Description of Artificial Sequence: Synthetic oligonucleotide
  Target: SCNA; (+) strand; PAM type: YTN; PAM sequence: TTA
cacttgactataacacttaa

SEQ ID NO: 73905 - DNA, 20 bp, Artificial Sequence
  Description of Artificial Sequence: Synthetic oligonucleotide
  Target: SCNA; (+) strand; PAM type: YTN; PAM sequence: CTT
gactataacacttaagaatc

SEQ ID NO: 73906 - DNA, 20 bp, Artificial Sequence
  Description of Artificial Sequence: Synthetic oligonucleotide
  Target: SCNA; (+) strand; PAM type: YTN; PAM sequence: TTG
actataacacttaagaatct

SEQ ID NO: 73907 - DNA, 20 bp, Artificial Sequence
  Description of Artificial Sequence: Synthetic oligonucleotide
  Target: SCNA; (+) strand; PAM type: YTN; PAM sequence: CTA
taacacttaagaatctagtt

SEQ ID NO: 73908 - DNA, 20 bp, Artificial Sequence
  Description of Artificial Sequence: Synthetic oligonucleotide
  Target: SCNA; (+) strand; PAM type: YTN; PAM sequence: CTT
aagaatctagttattttcct

SEQ ID NO: 73909 - DNA, 20 bp, Artificial Sequence
  Description of Artificial Sequence: Synthetic oligonucleotide
  Target: SCNA; (+) strand; PAM type: YTN; PAM sequence: TTA
agaatctagttattttcctt

SEQ ID NO: 73910 - DNA, 20 bp, Artificial Sequence
  Description of Artificial Sequence: Synthetic oligonucleotide
  Target: SCNA; (+) strand; PAM type: YTN; PAM sequence: CTA
gttattttccttttgtagta

SEQ ID NO: 73911 - DNA, 20 bp, Artificial Sequence
  Description of Artificial Sequence: Synthetic oligonucleotide
  Target: SCNA; (+) strand; PAM type: YTN; PAM sequence: TTA
ttttccttttgtagtaaaaa

SEQ ID NO: 73912 - DNA, 20 bp, Artificial Sequence
  Description of Artificial Sequence: Synthetic oligonucleotide
  Target: SCNA; (+) strand; PAM type: YTN; PAM sequence: TTT
tccttttgtagtaaaaatat

SEQ ID NO: 73913 - DNA, 20 bp, Artificial Sequence
  Description of Artificial Sequence: Synthetic oligonucleotide
  Target: SCNA; (+) strand; PAM type: YTN; PAM sequence: TTT
ccttttgtagtaaaaatata

SEQ ID NO: 73914 - DNA, 20 bp, Artificial Sequence
  Description of Artificial Sequence: Synthetic oligonucleotide
  Target: SCNA; (+) strand; PAM type: YTN; PAM sequence: TTC
cttttgtagtaaaaatatat

SEQ ID NO: 73915 - DNA, 20 bp, Artificial Sequence
  Description of Artificial Sequence: Synthetic oligonucleotide
  Target: SCNA; (+) strand; PAM type: YTN; PAM sequence: CTT
ttgtagtaaaaatatatttt

SEQ ID NO: 73916 - DNA, 20 bp, Artificial Sequence
  Description of Artificial Sequence: Synthetic oligonucleotide
  Target: SCNA; (+) strand; PAM type: YTN; PAM sequence: TTT
tgtagtaaaaatatatttta

SEQ ID NO: 73917 - DNA, 20 bp, Artificial Sequence
  Description of Artificial Sequence: Synthetic oligonucleotide
  Target: SCNA; (+) strand; PAM type: YTN; PAM sequence: TTT
gtagtaaaaatatattttat

SEQ ID NO: 73918 - DNA, 20 bp, Artificial Sequence
  Description of Artificial Sequence: Synthetic oligonucleotide
  Target: SCNA; (+) strand; PAM type: YTN; PAM sequence: TTG
tagtaaaaatatattttatt

SEQ ID NO: 73919 - DNA, 20 bp, Artificial Sequence
  Description of Artificial Sequence: Synthetic oligonucleotide
  Target: SCNA; (+) strand; PAM type: YTN; PAM sequence: TTT
tatttgaaatatgtgaatgg

SEQ ID NO: 73920 - DNA, 20 bp, Artificial Sequence
  Description of Artificial Sequence: Synthetic oligonucleotide
  Target: SCNA; (+) strand; PAM type: YTN; PAM sequence: TTT
atttgaaatatgtgaatggt

SEQ ID NO: 73921 - DNA, 20 bp, Artificial Sequence
  Description of Artificial Sequence: Synthetic oligonucleotide
  Target: SCNA; (+) strand; PAM type: YTN; PAM sequence: TTA
tttgaaatatgtgaatggtt

SEQ ID NO: 73922 - DNA, 20 bp, Artificial Sequence
  Description of Artificial Sequence: Synthetic oligonucleotide
  Target: SCNA; (+) strand; PAM type: YTN; PAM sequence: TTT
gaaatatgtgaatggttact

SEQ ID NO: 73923 - DNA, 20 bp, Artificial Sequence
  Description of Artificial Sequence: Synthetic oligonucleotide
  Target: SCNA; (+) strand; PAM type: YTN; PAM sequence: TTG
aaatatgtgaatggttactt

SEQ ID NO: 73924 - DNA, 20 bp, Artificial Sequence
  Description of Artificial Sequence: Synthetic oligonucleotide
  Target: SCNA; (+) strand; PAM type: YTN; PAM sequence: TTA
cttagtcattttaatctaca

SEQ ID NO: 73925 - DNA, 20 bp, Artificial Sequence
  Description of Artificial Sequence: Synthetic oligonucleotide
  Target: SCNA; (+) strand; PAM type: YTN; PAM sequence: CTT
agtcattttaatctacatga

SEQ ID NO: 73926 - DNA, 20 bp, Artificial Sequence
  Description of Artificial Sequence: Synthetic oligonucleotide
  Target: SCNA; (+) strand; PAM type: YTN; PAM sequence: TTA
gtcattttaatctacatgaa

SEQ ID NO: 73927 - DNA, 20 bp, Artificial Sequence
  Description of Artificial Sequence: Synthetic oligonucleotide
  Target: SCNA; (+) strand; PAM type: YTN; PAM sequence: TTT
taatctacatgaaaaattta

SEQ ID NO: 73928 - DNA, 20 bp, Artificial Sequence
  Description of Artificial Sequence: Synthetic oligonucleotide
  Target: SCNA; (+) strand; PAM type: YTN; PAM sequence: TTT
aatctacatgaaaaatttaa

SEQ ID NO: 73929 - DNA, 20 bp, Artificial Sequence
  Description of Artificial Sequence: Synthetic oligonucleotide
  Target: SCNA; (+) strand; PAM type: YTN; PAM sequence: TTA
atctacatgaaaaatttaac

SEQ ID NO: 73930 - DNA, 20 bp, Artificial Sequence
  Description of Artificial Sequence: Synthetic oligonucleotide
  Target: SCNA; (+) strand; PAM type: YTN; PAM sequence: CTA
catgaaaaatttaaccttaa

SEQ ID NO: 73931 - DNA, 20 bp, Artificial Sequence
  Description of Artificial Sequence: Synthetic oligonucleotide
  Target: SCNA; (+) strand; PAM type: YTN; PAM sequence: TTT
aaccttaaagtaactctatt

SEQ ID NO: 73932 - DNA, 20 bp, Artificial Sequence
  Description of Artificial Sequence: Synthetic oligonucleotide
  Target: SCNA; (+) strand; PAM type: YTN; PAM sequence: TTA
accttaaagtaactctattt

SEQ ID NO: 73933 - DNA, 20 bp, Artificial Sequence
  Description of Artificial Sequence: Synthetic oligonucleotide
  Target: SCNA; (+) strand; PAM type: YTN; PAM sequence: CTT
aaagtaactctattttaaaa

SEQ ID NO: 73934 - DNA, 20 bp, Artificial Sequence
  Description of Artificial Sequence: Synthetic oligonucleotide
  Target: SCNA; (+) strand; PAM type: YTN; PAM sequence: TTA
aagtaactctattttaaaaa

SEQ ID NO: 73935 - DNA, 20 bp, Artificial Sequence
  Description of Artificial Sequence: Synthetic oligonucleotide
  Target: SCNA; (+) strand; PAM type: YTN; PAM sequence: CTC
tattttaaaaatatgaaatg

SEQ ID NO: 73936 - DNA, 20 bp, Artificial Sequence
  Description of Artificial Sequence: Synthetic oligonucleotide
  Target: SCNA; (+) strand; PAM type: YTN; PAM sequence: CTA
ttttaaaaatatgaaatgag

SEQ ID NO: 73937 - DNA, 20 bp, Artificial Sequence
  Description of Artificial Sequence: Synthetic oligonucleotide
  Target: SCNA; (+) strand; PAM type: YTN; PAM sequence: TTT
taaaaatatgaaatgagact

SEQ ID NO: 73938 - DNA, 20 bp, Artificial Sequence
  Description of Artificial Sequence: Synthetic oligonucleotide
  Target: SCNA; (+) strand; PAM type: YTN; PAM sequence: TTT
aaaaatatgaaatgagacta

SEQ ID NO: 73939 - DNA, 20 bp, Artificial Sequence
  Description of Artificial Sequence: Synthetic oligonucleotide
  Target: SCNA; (+) strand; PAM type: YTN; PAM sequence: TTA
aaaatatgaaatgagactat

SEQ ID NO: 73940 - DNA, 20 bp, Artificial Sequence
  Description of Artificial Sequence: Synthetic oligonucleotide
  Target: SCNA; (+) strand; PAM type: YTN; PAM sequence: CTA
tcaatcggtacttatgaagc

SEQ ID NO: 73941 - DNA, 20 bp, Artificial Sequence
  Description of Artificial Sequence: Synthetic oligonucleotide
  Target: SCNA; (+) strand; PAM type: YTN; PAM sequence: CTT
atgaagcaatgtttattctt

SEQ ID NO: 73942 - DNA, 20 bp, Artificial Sequence
  Description of Artificial Sequence: Synthetic oligonucleotide
  Target: SCNA; (+) strand; PAM type: YTN; PAM sequence: TTA
tgaagcaatgtttattcttc

SEQ ID NO: 73943 - DNA, 20 bp, Artificial Sequence
  Description of Artificial Sequence: Synthetic oligonucleotide
  Target: SCNA; (+) strand; PAM type: YTN; PAM sequence: TTT
attcttctaatatagtgtgg

SEQ ID NO: 73944 - DNA, 20 bp, Artificial Sequence
  Description of Artificial Sequence: Synthetic oligonucleotide
  Target: SCNA; (+) strand; PAM type: YTN; PAM sequence: TTA
ttcttctaatatagtgtggg

SEQ ID NO: 73945 - DNA, 20 bp, Artificial Sequence
  Description of Artificial Sequence: Synthetic oligonucleotide
  Target: SCNA; (+) strand; PAM type: YTN; PAM sequence: TTC
ttctaatatagtgtgggaag

SEQ ID NO: 73946 - DNA, 20 bp, Artificial Sequence
  Description of Artificial Sequence: Synthetic oligonucleotide
  Target: SCNA; (+) strand; PAM type: YTN; PAM sequence: CTT
ctaatatagtgtgggaagag

SEQ ID NO: 73947 - DNA, 20 bp, Artificial Sequence
  Description of Artificial Sequence: Synthetic oligonucleotide
  Target: SCNA; (+) strand; PAM type: YTN; PAM sequence: TTC
taatatagtgtgggaagaga

SEQ ID NO: 73948 - DNA, 20 bp, Artificial Sequence
  Description of Artificial Sequence: Synthetic oligonucleotide
  Target: SCNA; (+) strand; PAM type: YTN; PAM sequence: CTA
atatagtgtgggaagagaaa

SEQ ID NO: 73949 - DNA, 20 bp, Artificial Sequence
  Description of Artificial Sequence: Synthetic oligonucleotide
  Target: SCNA; (+) strand; PAM type: YTN; PAM sequence: CTT
gcaacacaaaagggattgtt

SEQ ID NO: 73950 - DNA, 20 bp, Artificial Sequence
  Description of Artificial Sequence: Synthetic oligonucleotide
  Target: SCNA; (+) strand; PAM type: YTN; PAM sequence: TTG
caacacaaaagggattgttc

SEQ ID NO: 73951 - DNA, 20 bp, Artificial Sequence
  Description of Artificial Sequence: Synthetic oligonucleotide
  Target: SCNA; (+) strand; PAM type: YTN; PAM sequence: TTG
ttctcacaaatcataggttt

SEQ ID NO: 73952 - DNA, 20 bp, Artificial Sequence
  Description of Artificial Sequence: Synthetic oligonucleotide
  Target: SCNA; (+) strand; PAM type: YTN; PAM sequence: TTC
tcacaaatcataggtttgtg

SEQ ID NO: 73953 - DNA, 20 bp, Artificial Sequence
  Description of Artificial Sequence: Synthetic oligonucleotide
  Target: SCNA; (+) strand; PAM type: YTN; PAM sequence: CTC
acaaatcataggtttgtgag

SEQ ID NO: 73954 - DNA, 20 bp, Artificial Sequence
  Description of Artificial Sequence: Synthetic oligonucleotide
  Target: SCNA; (+) strand; PAM type: YTN; PAM sequence: TTT
gtgagatggggtggcaaaat

SEQ ID NO: 73955 - DNA, 20 bp, Artificial Sequence
  Description of Artificial Sequence: Synthetic oligonucleotide
  Target: SCNA; (+) strand; PAM type: YTN; PAM sequence: TTG
tgagatggggtggcaaaatc

SEQ ID NO: 73956 - DNA, 20 bp, Artificial Sequence
  Description of Artificial Sequence: Synthetic oligonucleotide
  Target: SCNA; (+) strand; PAM type: YTN; PAM sequence: CTC
attgtttttaaagaaccaag

SEQ ID NO: 73957 - DNA, 20 bp, Artificial Sequence
  Description of Artificial Sequence: Synthetic oligonucleotide
  Target: SCNA; (+) strand; PAM type: YTN; PAM sequence: TTG
tttttaaagaaccaagctgt

SEQ ID NO: 73958 - DNA, 20 bp, Artificial Sequence
  Description of Artificial Sequence: Synthetic oligonucleotide
  Target: SCNA; (+) strand; PAM type: YTN; PAM sequence: TTT
ttaaagaaccaagctgttct

SEQ ID NO: 73959 - DNA, 20 bp, Artificial Sequence
  Description of Artificial Sequence: Synthetic oligonucleotide
  Target: SCNA; (+) strand; PAM type: YTN; PAM sequence: TTT
taaagaaccaagctgttctt

SEQ ID NO: 73960 - DNA, 20 bp, Artificial Sequence
  Description of Artificial Sequence: Synthetic oligonucleotide
  Target: SCNA; (+) strand; PAM type: YTN; PAM sequence: TTT
aaagaaccaagctgttcttc

SEQ ID NO: 73961 - DNA, 20 bp, Artificial Sequence
  Description of Artificial Sequence: Synthetic oligonucleotide
  Target: SCNA; (+) strand; PAM type: YTN; PAM sequence: TTA
aagaaccaagctgttcttca

SEQ ID NO: 73962 - DNA, 20 bp, Artificial Sequence
  Description of Artificial Sequence: Synthetic oligonucleotide
  Target: SCNA; (+) strand; PAM type: YTN; PAM sequence: CTG
ttcttcatgagcaagaacac

SEQ ID NO: 73963 - DNA, 20 bp, Artificial Sequence
  Description of Artificial Sequence: Synthetic oligonucleotide
  Target: SCNA; (+) strand; PAM type: YTN; PAM sequence: TTC
ttcatgagcaagaacactga

SEQ ID NO: 73964 - DNA, 20 bp, Artificial Sequence
  Description of Artificial Sequence: Synthetic oligonucleotide
  Target: SCNA; (+) strand; PAM type: YTN; PAM sequence: CTT
catgagcaagaacactgaat

SEQ ID NO: 73965 - DNA, 20 bp, Artificial Sequence
  Description of Artificial Sequence: Synthetic oligonucleotide
  Target: SCNA; (+) strand; PAM type: YTN; PAM sequence: TTC
atgagcaagaacactgaatt

SEQ ID NO: 73966 - DNA, 20 bp, Artificial Sequence
  Description of Artificial Sequence: Synthetic oligonucleotide
  Target: SCNA; (+) strand; PAM type: YTN; PAM sequence: CTG
aattccctggttttcttttt

SEQ ID NO: 73967 - DNA, 20 bp, Artificial Sequence
  Description of Artificial Sequence: Synthetic oligonucleotide
  Target: SCNA; (+) strand; PAM type: YTN; PAM sequence: TTC
cctggttttctttttctagt

SEQ ID NO: 73968 - DNA, 20 bp, Artificial Sequence
  Description of Artificial Sequence: Synthetic oligonucleotide
  Target: SCNA; (+) strand; PAM type: YTN; PAM sequence: CTG
gttttctttttctagtcact

SEQ ID NO: 73969 - DNA, 20 bp, Artificial Sequence
  Description of Artificial Sequence: Synthetic oligonucleotide
  Target: SCNA; (+) strand; PAM type: YTN; PAM sequence: TTT
tctttttctagtcactatac

SEQ ID NO: 73970 - DNA, 20 bp, Artificial Sequence
  Description of Artificial Sequence: Synthetic oligonucleotide
  Target: SCNA; (+) strand; PAM type: YTN; PAM sequence: TTT
ctttttctagtcactatacc

SEQ ID NO: 73971 - DNA, 20 bp, Artificial Sequence
  Description of Artificial Sequence: Synthetic oligonucleotide
  Target: SCNA; (+) strand; PAM type: YTN; PAM sequence: TTC
tttttctagtcactataccc

SEQ ID NO: 73972 - DNA, 20 bp, Artificial Sequence
  Description of Artificial Sequence: Synthetic oligonucleotide
  Target: SCNA; (+) strand; PAM type: YTN; PAM sequence: CTT
tttctagtcactatacccct

SEQ ID NO: 73973 - DNA, 20 bp, Artificial Sequence
  Description of Artificial Sequence: Synthetic oligonucleotide
  Target: SCNA; (+) strand; PAM type: YTN; PAM sequence: TTT
ttctagtcactatacccctg

SEQ ID NO: 73974 - DNA, 20 bp, Artificial Sequence
  Description of Artificial Sequence: Synthetic oligonucleotide
  Target: SCNA; (+) strand; PAM type: YTN; PAM sequence: TTT
tctagtcactatacccctgg

SEQ ID NO: 73975 - DNA, 20 bp, Artificial Sequence
  Description of Artificial Sequence: Synthetic oligonucleotide
  Target: SCNA; (+) strand; PAM type: YTN; PAM sequence: TTT
ctagtcactatacccctggc

SEQ ID NO: 73976 - DNA, 20 bp, Artificial Sequence
  Description of Artificial Sequence: Synthetic oligonucleotide
  Target: SCNA; (+) strand; PAM type: YTN; PAM sequence: TTC
tagtcactatacccctggca

SEQ ID NO: 73977 - DNA, 20 bp, Artificial Sequence
  Description of Artificial Sequence: Synthetic oligonucleotide
  Target: SCNA; (+) strand; PAM type: YTN; PAM sequence: CTA
gtcactatacccctggcatc

SEQ ID NO: 73978 - DNA, 20 bp, Artificial Sequence
  Description of Artificial Sequence: Synthetic oligonucleotide
  Target: SCNA; (+) strand; PAM type: YTN; PAM sequence: CTA
tacccctggcatcataacac

SEQ ID NO: 73979 - DNA, 20 bp, Artificial Sequence
  Description of Artificial Sequence: Synthetic oligonucleotide
  Target: SCNA; (+) strand; PAM type: YTN; PAM sequence: CTG
gcatcataacactactgtca

SEQ ID NO: 73980 - DNA, 20 bp, Artificial Sequence
  Description of Artificial Sequence: Synthetic oligonucleotide
  Target: SCNA; (+) strand; PAM type: YTN; PAM sequence: CTA
ctgtcaatcaactgcatcca

SEQ ID NO: 73981 - DNA, 20 bp, Artificial Sequence
  Description of Artificial Sequence: Synthetic oligonucleotide
  Target: SCNA; (+) strand; PAM type: YTN; PAM sequence: CTG
tcaatcaactgcatccagaa

SEQ ID NO: 73982 - DNA, 20 bp, Artificial Sequence
  Description of Artificial Sequence: Synthetic oligonucleotide
  Target: SCNA; (+) strand; PAM type: YTN; PAM sequence: CTG
catccagaaggtagaataaa

SEQ ID NO: 73983 - DNA, 20 bp, Artificial Sequence
  Description of Artificial Sequence: Synthetic oligonucleotide
  Target: SCNA; (+) strand; PAM type: YTN; PAM sequence: CTT
tcggcagaattccagagatt

SEQ ID NO: 73984 - DNA, 20 bp, Artificial Sequence
  Description of Artificial Sequence: Synthetic oligonucleotide
  Target: SCNA; (+) strand; PAM type: YTN; PAM sequence: TTT
cggcagaattccagagattc

SEQ ID NO: 73985 - DNA, 20 bp, Artificial Sequence
  Description of Artificial Sequence: Synthetic oligonucleotide
  Target: SCNA; (+) strand; PAM type: YTN; PAM sequence: TTC
ggcagaattccagagattct

SEQ ID NO: 73986 - DNA, 20 bp, Artificial Sequence
  Description of Artificial Sequence: Synthetic oligonucleotide
  Target: SCNA; (+) strand; PAM type: YTN; PAM sequence: TTC
cagagattctcagatggttt

SEQ ID NO: 73987 - DNA, 20 bp, Artificial Sequence
  Description of Artificial Sequence: Synthetic oligonucleotide
  Target: SCNA; (+) strand; PAM type: YTN; PAM sequence: TTC
tcagatggttttttcttttc

SEQ ID NO: 73988 - DNA, 20 bp, Artificial Sequence
  Description of Artificial Sequence: Synthetic oligonucleotide
  Target: SCNA; (+) strand; PAM type: YTN; PAM sequence: CTC
agatggttttttcttttccc

SEQ ID NO: 73989 - DNA, 20 bp, Artificial Sequence
  Description of Artificial Sequence: Synthetic oligonucleotide
  Target: SCNA; (+) strand; PAM type: YTN; PAM sequence: TTT
tttcttttccctcttaaaaa

SEQ ID NO: 73990 - DNA, 20 bp, Artificial Sequence
  Description of Artificial Sequence: Synthetic oligonucleotide
  Target: SCNA; (+) strand; PAM type: YTN; PAM sequence: TTT
ttcttttccctcttaaaaac

SEQ ID NO: 73991 - DNA, 20 bp, Artificial Sequence
  Description of Artificial Sequence: Synthetic oligonucleotide
  Target: SCNA; (+) strand; PAM type: YTN; PAM sequence: TTT
tcttttccctcttaaaaact

SEQ ID NO: 73992 - DNA, 20 bp, Artificial Sequence
  Description of Artificial Sequence: Synthetic oligonucleotide
  Target: SCNA; (+) strand; PAM type: YTN; PAM sequence: TTT
cttttccctcttaaaaactg

SEQ ID NO: 73993 - DNA, 20 bp, Artificial Sequence
  Description of Artificial Sequence: Synthetic oligonucleotide
  Target: SCNA; (+) strand; PAM type: YTN; PAM sequence: TTC
ttttccctcttaaaaactgt

SEQ ID NO: 73994 - DNA, 20 bp, Artificial Sequence
  Description of Artificial Sequence: Synthetic oligonucleotide
  Target: SCNA; (+) strand; PAM type: YTN; PAM sequence: CTT
ttccctcttaaaaactgtac

SEQ ID NO: 73995 - DNA, 20 bp, Artificial Sequence
  Description of Artificial Sequence: Synthetic oligonucleotide
  Target: SCNA; (+) strand; PAM type: YTN; PAM sequence: TTT
tccctcttaaaaactgtacc

SEQ ID NO: 73996 - DNA, 20 bp, Artificial Sequence
  Description of Artificial Sequence: Synthetic oligonucleotide
  Target: SCNA; (+) strand; PAM type: YTN; PAM sequence: TTT
ccctcttaaaaactgtacca

SEQ ID NO: 73997 - DNA, 20 bp, Artificial Sequence
  Description of Artificial Sequence: Synthetic oligonucleotide
  Target: SCNA; (+) strand; PAM type: YTN; PAM sequence: TTC
cctcttaaaaactgtaccat

SEQ ID NO: 73998 - DNA, 20 bp, Artificial Sequence
  Description of Artificial Sequence: Synthetic oligonucleotide
  Target: SCNA; (+) strand; PAM type: YTN; PAM sequence: CTC
ttaaaaactgtaccatatga

SEQ ID NO: 73999 - DNA, 20 bp, Artificial Sequence
  Description of Artificial Sequence: Synthetic oligonucleotide
  Target: SCNA; (+) strand; PAM type: YTN; PAM sequence: CTT
aaaaactgtaccatatgagt

SEQ ID NO: 74000 - DNA, 20 bp, Artificial Sequence
  Description of Artificial Sequence: Synthetic oligonucleotide
  Target: SCNA; (+) strand; PAM type: YTN; PAM sequence: TTA
aaaactgtaccatatgagtt

SEQ ID NO: 74001 - DNA, 20 bp, Artificial Sequence
  Description of Artificial Sequence: Synthetic oligonucleotide
  Target: SCNA; (+) strand; PAM type: YTN; PAM sequence: CTG
taccatatgagttaggttta

SEQ ID NO: 74002 - DNA, 20 bp, Artificial Sequence
  Description of Artificial Sequence: Synthetic oligonucleotide
  Target: SCNA; (+) strand; PAM type: YTN; PAM sequence: TTA
ggtttattttgaaatgtcca

SEQ ID NO: 74003 - DNA, 20 bp, Artificial Sequence
  Description of Artificial Sequence: Synthetic oligonucleotide
  Target: SCNA; (+) strand; PAM type: YTN; PAM sequence: TTT
attttgaaatgtccatgaaa

SEQ ID NO: 74004 - DNA, 20 bp, Artificial Sequence
  Description of Artificial Sequence: Synthetic oligonucleotide
  Target: SCNA; (+) strand; PAM type: YTN; PAM sequence: TTA
ttttgaaatgtccatgaaaa

SEQ ID NO: 74005 - DNA, 20 bp, Artificial Sequence
  Description of Artificial Sequence: Synthetic oligonucleotide
  Target: SCNA; (+) strand; PAM type: YTN; PAM sequence: TTT
tgaaatgtccatgaaaaaga

SEQ ID NO: 74006 - DNA, 20 bp, Artificial Sequence
  Description of Artificial Sequence: Synthetic oligonucleotide
  Target: SCNA; (+) strand; PAM type: YTN; PAM sequence: TTT
gaaatgtccatgaaaaagaa

SEQ ID NO: 74007 - DNA, 20 bp, Artificial Sequence
  Description of Artificial Sequence: Synthetic oligonucleotide
  Target: SCNA; (+) strand; PAM type: YTN; PAM sequence: TTG
aaatgtccatgaaaaagaag

SEQ ID NO: 74008 - DNA, 20 bp, Artificial Sequence
  Description of Artificial Sequence: Synthetic oligonucleotide
  Target: SCNA; (+) strand; PAM type: YTN; PAM sequence: TTT
cttaaaattggcccctctta

SEQ ID NO: 74009 - DNA, 20 bp, Artificial Sequence
  Description of Artificial Sequence: Synthetic oligonucleotide
  Target: SCNA; (+) strand; PAM type: YTN; PAM sequence: TTC
ttaaaattggcccctcttag

SEQ ID NO: 74010 - DNA, 20 bp, Artificial Sequence
  Description of Artificial Sequence: Synthetic oligonucleotide
  Target: SCNA; (+) strand; PAM type: YTN; PAM sequence: CTT
aaaattggcccctcttagat

SEQ ID NO: 74011 - DNA, 20 bp, Artificial Sequence
  Description of Artificial Sequence: Synthetic oligonucleotide
  Target: SCNA; (+) strand; PAM type: YTN; PAM sequence: TTA
aaattggcccctcttagata

SEQ ID NO: 74012 - DNA, 20 bp, Artificial Sequence
  Description of Artificial Sequence: Synthetic oligonucleotide
  Target: SCNA; (+) strand; PAM type: YTN; PAM sequence: TTG
gcccctcttagatatttctg

SEQ ID NO: 74013 - DNA, 20 bp, Artificial Sequence
  Description of Artificial Sequence: Synthetic oligonucleotide
  Target: SCNA; (+) strand; PAM type: YTN; PAM sequence: CTC
ttagatatttctggggaagc

SEQ ID NO: 74014 - DNA, 20 bp, Artificial Sequence
  Description of Artificial Sequence: Synthetic oligonucleotide
  Target: SCNA; (+) strand; PAM type: YTN; PAM sequence: CTT
agatatttctggggaagctt

SEQ ID NO: 74015 - DNA, 20 bp, Artificial Sequence
  Description of Artificial Sequence: Synthetic oligonucleotide
  Target: SCNA; (+) strand; PAM type: YTN; PAM sequence: TTA
gatatttctggggaagcttc

SEQ ID NO: 74016 - DNA, 20 bp, Artificial Sequence
  Description of Artificial Sequence: Synthetic oligonucleotide
  Target: SCNA; (+) strand; PAM type: YTN; PAM sequence: TTT
ctggggaagcttcatataat

SEQ ID NO: 74017 - DNA, 20 bp, Artificial Sequence
  Description of Artificial Sequence: Synthetic oligonucleotide
  Target: SCNA; (+) strand; PAM type: YTN; PAM sequence: TTC
tggggaagcttcatataatt

SEQ ID NO: 74018 - DNA, 20 bp, Artificial Sequence
  Description of Artificial Sequence: Synthetic oligonucleotide
  Target: SCNA; (+) strand; PAM type: YTN; PAM sequence: CTG
gggaagcttcatataattcc

SEQ ID NO: 74019 - DNA, 20 bp, Artificial Sequence
  Description of Artificial Sequence: Synthetic oligonucleotide
  Target: SCNA; (+) strand; PAM type: YTN; PAM sequence: CTT
catataattccatttgttca

SEQ ID NO: 74020 - DNA, 20 bp, Artificial Sequence
  Description of Artificial Sequence: Synthetic oligonucleotide
  Target: SCNA; (+) strand; PAM type: YTN; PAM sequence: TTC
atataattccatttgttcat

SEQ ID NO: 74021 - DNA, 20 bp, Artificial Sequence
  Description of Artificial Sequence: Synthetic oligonucleotide
  Target: SCNA; (+) strand; PAM type: YTN; PAM sequence: TTC
catttgttcatgttattcct

SEQ ID NO: 74022 - DNA, 20 bp, Artificial Sequence
  Description of Artificial Sequence: Synthetic oligonucleotide
  Target: SCNA; (+) strand; PAM type: YTN; PAM sequence: TTT
gttcatgttattccttttca

SEQ ID NO: 74023 - DNA, 20 bp, Artificial Sequence
  Description of Artificial Sequence: Synthetic oligonucleotide
  Target: SCNA; (+) strand; PAM type: YTN; PAM sequence: TTG
ttcatgttattccttttcat

SEQ ID NO: 74024 - DNA, 20 bp, Artificial Sequence
  Description of Artificial Sequence: Synthetic oligonucleotide
  Target: SCNA; (+) strand; PAM type: YTN; PAM sequence: TTC
atgttattccttttcatcat

SEQ ID NO: 74025 - DNA, 20 bp, Artificial Sequence
  Description of Artificial Sequence: Synthetic oligonucleotide
  Target: SCNA; (+) strand; PAM type: YTN; PAM sequence: TTA
ttccttttcatcataaatca

SEQ ID NO: 74026 - DNA, 20 bp, Artificial Sequence
  Description of Artificial Sequence: Synthetic oligonucleotide
  Target: SCNA; (+) strand; PAM type: YTN; PAM sequence: TTC
cttttcatcataaatcagtc

SEQ ID NO: 74027 - DNA, 20 bp, Artificial Sequence
  Description of Artificial Sequence: Synthetic oligonucleotide
  Target: SCNA; (+) strand; PAM type: YTN; PAM sequence: CTT
ttcatcataaatcagtcctc

SEQ ID NO: 74028 - DNA, 20 bp, Artificial Sequence
  Description of Artificial Sequence: Synthetic oligonucleotide
  Target: SCNA; (+) strand; PAM type: YTN; PAM sequence: TTT
tcatcataaatcagtcctct

SEQ ID NO: 74029 - DNA, 20 bp, Artificial Sequence
  Description of Artificial Sequence: Synthetic oligonucleotide
  Target: SCNA; (+) strand; PAM type: YTN; PAM sequence: TTT
catcataaatcagtcctcta

SEQ ID NO: 74030 - DNA, 20 bp, Artificial Sequence
  Description of Artificial Sequence: Synthetic oligonucleotide
  Target: SCNA; (+) strand; PAM type: YTN; PAM sequence: TTC
atcataaatcagtcctctat

SEQ ID NO: 74031 - DNA, 20 bp, Artificial Sequence
  Description of Artificial Sequence: Synthetic oligonucleotide
  Target: SCNA; (+) strand; PAM type: YTN; PAM sequence: CTC
tataaagagcttcaaatttt

SEQ ID NO: 74032 - DNA, 20 bp, Artificial Sequence
  Description of Artificial Sequence: Synthetic oligonucleotide
  Target: SCNA; (+) strand; PAM type: YTN; PAM sequence: CTA
taaagagcttcaaattttca

SEQ ID NO: 74033 - DNA, 20 bp, Artificial Sequence
  Description of Artificial Sequence: Synthetic oligonucleotide
  Target: SCNA; (+) strand; PAM type: YTN; PAM sequence: CTT
caaattttcactgcctgatg

SEQ ID NO: 74034 - DNA, 20 bp, Artificial Sequence
  Description of Artificial Sequence: Synthetic oligonucleotide
  Target: SCNA; (+) strand; PAM type: YTN; PAM sequence: TTC
aaattttcactgcctgatgc

SEQ ID NO: 74035 - DNA, 20 bp, Artificial Sequence
  Description of Artificial Sequence: Synthetic oligonucleotide
  Target: SCNA; (+) strand; PAM type: YTN; PAM sequence: TTT
tcactgcctgatgctactgt

SEQ ID NO: 74036 - DNA, 20 bp, Artificial Sequence
  Description of Artificial Sequence: Synthetic oligonucleotide
  Target: SCNA; (+) strand; PAM type: YTN; PAM sequence: TTT
cactgcctgatgctactgta

SEQ ID NO: 74037 - DNA, 20 bp, Artificial Sequence
  Description of Artificial Sequence: Synthetic oligonucleotide
  Target: SCNA; (+) strand; PAM type: YTN; PAM sequence: TTC
actgcctgatgctactgtaa

SEQ ID NO: 74038 - DNA, 20 bp, Artificial Sequence
  Description of Artificial Sequence: Synthetic oligonucleotide
  Target: SCNA; (+) strand; PAM type: YTN; PAM sequence: CTG
cctgatgctactgtaaaaat

SEQ ID NO: 74039 - DNA, 20 bp, Artificial Sequence
  Description of Artificial Sequence: Synthetic oligonucleotide
  Target: SCNA; (+) strand; PAM type: YTN; PAM sequence: CTG
atgctactgtaaaaatatac

SEQ ID NO: 74040 - DNA, 20 bp, Artificial Sequence
  Description of Artificial Sequence: Synthetic oligonucleotide
  Target: SCNA; (+) strand; PAM type: YTN; PAM sequence: CTA
ctgtaaaaatatacctaata

SEQ ID NO: 74041 - DNA, 20 bp, Artificial Sequence
  Description of Artificial Sequence: Synthetic oligonucleotide
  Target: SCNA; (+) strand; PAM type: YTN; PAM sequence: CTG
taaaaatatacctaatatgt

SEQ ID NO: 74042 - DNA, 20 bp, Artificial Sequence
  Description of Artificial Sequence: Synthetic oligonucleotide
  Target: SCNA; (+) strand; PAM type: YTN; PAM sequence: CTA
atatgtttgatcgaaagaca

SEQ ID NO: 74043 - DNA, 20 bp, Artificial Sequence
  Description of Artificial Sequence: Synthetic oligonucleotide
  Target: SCNA; (+) strand; PAM type: YTN; PAM sequence: TTT
gatcgaaagacagtagtcaa

SEQ ID NO: 74044 - DNA, 20 bp, Artificial Sequence
  Description of Artificial Sequence: Synthetic oligonucleotide
  Target: SCNA; (+) strand; PAM type: YTN; PAM sequence: TTG
atcgaaagacagtagtcaat

SEQ ID NO: 74045 - DNA, 20 bp, Artificial Sequence
  Description of Artificial Sequence: Synthetic oligonucleotide
  Target: SCNA; (+) strand; PAM type: YTN; PAM sequence: TTT
attaggagaaatactttatt

SEQ ID NO: 74046 - DNA, 20 bp, Artificial Sequence
  Description of Artificial Sequence: Synthetic oligonucleotide
  Target: SCNA; (+) strand; PAM type: YTN; PAM sequence: TTA
ttaggagaaatactttattc

SEQ ID NO: 74047 - DNA, 20 bp, Artificial Sequence
  Description of Artificial Sequence: Synthetic oligonucleotide
  Target: SCNA; (+) strand; PAM type: YTN; PAM sequence: TTA
ggagaaatactttattcact

SEQ ID NO: 74048 - DNA, 20 bp, Artificial Sequence
  Description of Artificial Sequence: Synthetic oligonucleotide
  Target: SCNA; (+) strand; PAM type: YTN; PAM sequence: CTT
tattcactaatcttaagaaa

SEQ ID NO: 74049 - DNA, 20 bp, Artificial Sequence
  Description of Artificial Sequence: Synthetic oligonucleotide
  Target: SCNA; (+) strand; PAM type: YTN; PAM sequence: TTT
attcactaatcttaagaaat

SEQ ID NO: 74050 - DNA, 20 bp, Artificial Sequence
  Description of Artificial Sequence: Synthetic oligonucleotide
  Target: SCNA; (+) strand; PAM type: YTN; PAM sequence: TTA
ttcactaatcttaagaaata

SEQ ID NO: 74051 - DNA, 20 bp, Artificial Sequence
  Description of Artificial Sequence: Synthetic oligonucleotide
  Target: SCNA; (+) strand; PAM type: YTN; PAM sequence: TTC
actaatcttaagaaatacta

SEQ ID NO: 74052 - DNA, 20 bp, Artificial Sequence
  Description of Artificial Sequence: Synthetic oligonucleotide
  Target: SCNA; (+) strand; PAM type: YTN; PAM sequence: CTA
atcttaagaaatactagagg

SEQ ID NO: 74053 - DNA, 20 bp, Artificial Sequence
  Description of Artificial Sequence: Synthetic oligonucleotide
  Target: SCNA; (+) strand; PAM type: YTN; PAM sequence: CTT
aagaaatactagaggaaatc

SEQ ID NO: 74054 - DNA, 20 bp, Artificial Sequence
  Description of Artificial Sequence: Synthetic oligonucleotide
  Target: SCNA; (+) strand; PAM type: YTN; PAM sequence: TTA
agaaatactagaggaaatcc

SEQ ID NO: 74055 - DNA, 20 bp, Artificial Sequence
  Description of Artificial Sequence: Synthetic oligonucleotide
  Target: SCNA; (+) strand; PAM type: YTN; PAM sequence: CTA
gaggaaatccagtacaatct

SEQ ID NO: 74056 - DNA, 20 bp, Artificial Sequence
  Description of Artificial Sequence: Synthetic oligonucleotide
  Target: SCNA; (+) strand; PAM type: YTN; PAM sequence: CTG
aagttaaaactaatgattat

SEQ ID NO: 74057 - DNA, 20 bp, Artificial Sequence
  Description of Artificial Sequence: Synthetic oligonucleotide
  Target: SCNA; (+) strand; PAM type: YTN; PAM sequence: TTA
aaactaatgattattaaatg

SEQ ID NO: 74058 - DNA, 20 bp, Artificial Sequence
  Description of Artificial Sequence: Synthetic oligonucleotide
  Target: SCNA; (+) strand; PAM type: YTN; PAM sequence: CTA
atgattattaaatgaatgtt

SEQ ID NO: 74059 - DNA, 20 bp, Artificial Sequence
  Description of Artificial Sequence: Synthetic oligonucleotide
  Target: SCNA; (+) strand; PAM type: YTN; PAM sequence: TTA
ttaaatgaatgttaccattt

SEQ ID NO: 74060 - DNA, 20 bp, Artificial Sequence
  Description of Artificial Sequence: Synthetic oligonucleotide
  Target: SCNA; (+) strand; PAM type: YTN; PAM sequence: TTA
aatgaatgttaccattttat

SEQ ID NO: 74061 - DNA, 20 bp, Artificial Sequence
  Description of Artificial Sequence: Synthetic oligonucleotide
  Target: SCNA; (+) strand; PAM type: YTN; PAM sequence: TTA
ccattttattaaaaattaat

SEQ ID NO: 74062 - DNA, 20 bp, Artificial Sequence
  Description of Artificial Sequence: Synthetic oligonucleotide
  Target: SCNA; (+) strand; PAM type: YTN; PAM sequence: TTT
tattaaaaattaataatagt

SEQ ID NO: 74063 - DNA, 20 bp, Artificial Sequence
  Description of Artificial Sequence: Synthetic oligonucleotide
  Target: SCNA; (+) strand; PAM type: YTN; PAM sequence: TTT
attaaaaattaataatagta

SEQ ID NO: 74064 - DNA, 20 bp, Artificial Sequence
  Description of Artificial Sequence: Synthetic oligonucleotide
  Target: SCNA; (+) strand; PAM type: YTN; PAM sequence: TTA
ttaaaaattaataatagtaa

SEQ ID NO: 74065 - DNA, 20 bp, Artificial Sequence
  Description of Artificial Sequence: Synthetic oligonucleotide
  Target: SCNA; (+) strand; PAM type: YTN; PAM sequence: TTA
aaaattaataatagtaataa

SEQ ID NO: 74066 - DNA, 20 bp, Artificial Sequence
  Description of Artificial Sequence: Synthetic oligonucleotide
  Target: SCNA; (+) strand; PAM type: YTN; PAM sequence: TTA
ataatagtaataaaaaacta

SEQ ID NO: 74067 - DNA, 20 bp, Artificial Sequence
  Description of Artificial Sequence: Synthetic oligonucleotide
  Target: SCNA; (+) strand; PAM type: YTN; PAM sequence: CTA
caaagtactttcacatttcc

SEQ ID NO: 74068 - DNA, 20 bp, Artificial Sequence
  Description of Artificial Sequence: Synthetic oligonucleotide
  Target: SCNA; (+) strand; PAM type: YTN; PAM sequence: CTT
tcacatttccatttgactct

SEQ ID NO: 74069 - DNA, 20 bp, Artificial Sequence
  Description of Artificial Sequence: Synthetic oligonucleotide
  Target: SCNA; (+) strand; PAM type: YTN; PAM sequence: TTT
cacatttccatttgactctc

SEQ ID NO: 74070 - DNA, 20 bp, Artificial Sequence
  Description of Artificial Sequence: Synthetic oligonucleotide
  Target: SCNA; (+) strand; PAM type: YTN; PAM sequence: TTC
acatttccatttgactctca

SEQ ID NO: 74071 - DNA, 20 bp, Artificial Sequence
  Description of Artificial Sequence: Synthetic oligonucleotide
  Target: SCNA; (+) strand; PAM type: YTN; PAM sequence: TTT
ccatttgactctcacaataa

SEQ ID NO: 74072 - DNA, 20 bp, Artificial Sequence
  Description of Artificial Sequence: Synthetic oligonucleotide
  Target: SCNA; (+) strand; PAM type: YTN; PAM sequence: TTC
catttgactctcacaataac

SEQ ID NO: 74073 - DNA, 20 bp, Artificial Sequence
  Description of Artificial Sequence: Synthetic oligonucleotide
  Target: SCNA; (+) strand; PAM type: YTN; PAM sequence: TTT
gactctcacaataactctgc

SEQ ID NO: 74074 - DNA, 20 bp, Artificial Sequence
  Description of Artificial Sequence: Synthetic oligonucleotide
  Target: SCNA; (+) strand; PAM type: YTN; PAM sequence: TTG
actctcacaataactctgct

SEQ ID NO: 74075 - DNA, 20 bp, Artificial Sequence
  Description of Artificial Sequence: Synthetic oligonucleotide
  Target: SCNA; (+) strand; PAM type: YTN; PAM sequence: CTC
tcacaataactctgctttta

SEQ ID NO: 74076 - DNA, 20 bp, Artificial Sequence
  Description of Artificial Sequence: Synthetic oligonucleotide
  Target: SCNA; (+) strand; PAM type: YTN; PAM sequence: CTC
acaataactctgcttttaca

SEQ ID NO: 74077 - DNA, 20 bp, Artificial Sequence
  Description of Artificial Sequence: Synthetic oligonucleotide
  Target: SCNA; (+) strand; PAM type: YTN; PAM sequence: CTC
tgcttttacacataagcata

SEQ ID NO: 74078 - DNA, 20 bp, Artificial Sequence
  Description of Artificial Sequence: Synthetic oligonucleotide
  Target: SCNA; (+) strand; PAM type: YTN; PAM sequence: CTG
cttttacacataagcatata

SEQ ID NO: 74079 - DNA, 20 bp, Artificial Sequence
  Description of Artificial Sequence: Synthetic oligonucleotide
  Target: SCNA; (+) strand; PAM type: YTN; PAM sequence: CTT
ttacacataagcatatatac

SEQ ID NO: 74080 - DNA, 20 bp, Artificial Sequence
  Description of Artificial Sequence: Synthetic oligonucleotide
  Target: SCNA; (+) strand; PAM type: YTN; PAM sequence: TTT
tacacataagcatatatact

SEQ ID NO: 74081 - DNA, 20 bp, Artificial Sequence
  Description of Artificial Sequence: Synthetic oligonucleotide
  Target: SCNA; (+) strand; PAM type: YTN; PAM sequence: TTT
acacataagcatatatactt

SEQ ID NO: 74082 - DNA, 20 bp, Artificial Sequence
  Description of Artificial Sequence: Synthetic oligonucleotide
  Target: SCNA; (+) strand; PAM type: YTN; PAM sequence: TTA
cacataagcatatatactta

SEQ ID NO: 74083 - DNA, 20 bp, Artificial Sequence
  Description of Artificial Sequence: Synthetic oligonucleotide
  Target: SCNA; (+) strand; PAM type: YTN; PAM sequence: CTT
acttacctgtatacatgtac

SEQ ID NO: 74084 - DNA, 20 bp, Artificial Sequence
  Description of Artificial Sequence: Synthetic oligonucleotide
  Target: SCNA; (+) strand; PAM type: YTN; PAM sequence: TTA
cttacctgtatacatgtaca

SEQ ID NO: 74085 - DNA, 20 bp, Artificial Sequence
  Description of Artificial Sequence: Synthetic oligonucleotide
  Target: SCNA; (+) strand; PAM type: YTN; PAM sequence: CTT
acctgtatacatgtacacat

SEQ ID NO: 74086 - DNA, 20 bp, Artificial Sequence
  Description of Artificial Sequence: Synthetic oligonucleotide
  Target: SCNA; (+) strand; PAM type: YTN; PAM sequence: TTA
cctgtatacatgtacacata

SEQ ID NO: 74087 - DNA, 20 bp, Artificial Sequence
  Description of Artificial Sequence: Synthetic oligonucleotide
  Target: SCNA; (+) strand; PAM type: YTN; PAM sequence: CTG
tatacatgtacacatattat

SEQ ID NO: 74088 - DNA, 20 bp, Artificial Sequence
  Description of Artificial Sequence: Synthetic oligonucleotide
  Target: SCNA; (+) strand; PAM type: YTN; PAM sequence: TTA
tgtataataaccctcttact

SEQ ID NO: 74089 - DNA, 20 bp, Artificial Sequence
  Description of Artificial Sequence: Synthetic oligonucleotide
  Target: SCNA; (+) strand; PAM type: YTN; PAM sequence: CTC
ttactatatgtaagattcag

SEQ ID NO: 74090 - DNA, 20 bp, Artificial Sequence
  Description of Artificial Sequence: Synthetic oligonucleotide
  Target: SCNA; (+) strand; PAM type: YTN; PAM sequence: CTT
actatatgtaagattcagag

SEQ ID NO: 74091 - DNA, 20 bp, Artificial Sequence
  Description of Artificial Sequence: Synthetic oligonucleotide
  Target: SCNA; (+) strand; PAM type: YTN; PAM sequence: TTA
ctatatgtaagattcagaga

SEQ ID NO: 74092 - DNA, 20 bp, Artificial Sequence
  Description of Artificial Sequence: Synthetic oligonucleotide
  Target: SCNA; (+) strand; PAM type: YTN; PAM sequence: CTA
tatgtaagattcagagaggg

SEQ ID NO: 74093 - DNA, 20 bp, Artificial Sequence
  Description of Artificial Sequence: Synthetic oligonucleotide
  Target: SCNA; (+) strand; PAM type: YTN; PAM sequence: TTC
agagagggtaaataacatga

SEQ ID NO: 74094 - DNA, 20 bp, Artificial Sequence
  Description of Artificial Sequence: Synthetic oligonucleotide
  Target: SCNA; (+) strand; PAM type: YTN; PAM sequence: CTC
ttaaattatgtgctagtgat

SEQ ID NO: 74095 - DNA, 20 bp, Artificial Sequence
  Description of Artificial Sequence: Synthetic oligonucleotide
  Target: SCNA; (+) strand; PAM type: YTN; PAM sequence: CTT
aaattatgtgctagtgatta

SEQ ID NO: 74096 - DNA, 20 bp, Artificial Sequence
  Description of Artificial Sequence: Synthetic oligonucleotide
  Target: SCNA; (+) strand; PAM type: YTN; PAM sequence: TTA
aattatgtgctagtgattat

SEQ ID NO: 74097 - DNA, 20 bp, Artificial Sequence
  Description of Artificial Sequence: Synthetic oligonucleotide
  Target: SCNA; (+) strand; PAM type: YTN; PAM sequence: TTA
tgtgctagtgattataattc

SEQ ID NO: 74098 - DNA, 20 bp, Artificial Sequence
  Description of Artificial Sequence: Synthetic oligonucleotide
  Target: SCNA; (+) strand; PAM type: YTN; PAM sequence: CTA
gtgattataattcctacatt

SEQ ID NO: 74099 - DNA, 20 bp, Artificial Sequence
  Description of Artificial Sequence: Synthetic oligonucleotide
  Target: SCNA; (+) strand; PAM type: YTN; PAM sequence: TTA
taattcctacattatttcta

SEQ ID NO: 74100 - DNA, 20 bp, Artificial Sequence
  Description of Artificial Sequence: Synthetic oligonucleotide
  Target: SCNA; (+) strand; PAM type: YTN; PAM sequence: TTC
ctacattatttctataggat

SEQ ID NO: 74101 - DNA, 20 bp, Artificial Sequence
  Description of Artificial Sequence: Synthetic oligonucleotide
  Target: SCNA; (+) strand; PAM type: YTN; PAM sequence: CTA
cattatttctataggatcag

SEQ ID NO: 74102 - DNA, 20 bp, Artificial Sequence
  Description of Artificial Sequence: Synthetic oligonucleotide
  Target: SCNA; (+) strand; PAM type: YTN; PAM sequence: TTA
tttctataggatcagctggc

SEQ ID NO: 74103 - DNA, 20 bp, Artificial Sequence
  Description of Artificial Sequence: Synthetic oligonucleotide
  Target: SCNA; (+) strand; PAM type: YTN; PAM sequence: TTT
ctataggatcagctggcttc

SEQ ID NO: 74104 - DNA, 20 bp, Artificial Sequence
  Description of Artificial Sequence: Synthetic oligonucleotide
  Target: SCNA; (+) strand; PAM type: YTN; PAM sequence: TTC
tataggatcagctggcttca

SEQ ID NO: 74105 - DNA, 20 bp, Artificial Sequence
  Description of Artificial Sequence: Synthetic oligonucleotide
  Target: SCNA; (+) strand; PAM type: YTN; PAM sequence: CTA
taggatcagctggcttcact

SEQ ID NO: 74106 - DNA, 20 bp, Artificial Sequence
  Description of Artificial Sequence: Synthetic oligonucleotide
  Target: SCNA; (+) strand; PAM type: YTN; PAM sequence: CTG
gcttcactgatatcaaaaga

SEQ ID NO: 74107 - DNA, 20 bp, Artificial Sequence
  Description of Artificial Sequence: Synthetic oligonucleotide
  Target: SCNA; (+) strand; PAM type: YTN; PAM sequence: CTT
cactgatatcaaaagattat

SEQ ID NO: 74108 - DNA, 20 bp, Artificial Sequence
  Description of Artificial Sequence: Synthetic oligonucleotide
  Target: SCNA; (+) strand; PAM type: YTN; PAM sequence: TTC
actgatatcaaaagattata

SEQ ID NO: 74109 - DNA, 20 bp, Artificial Sequence
  Description of Artificial Sequence: Synthetic oligonucleotide
  Target: SCNA; (+) strand; PAM type: YTN; PAM sequence: CTG
atatcaaaagattatatata

SEQ ID NO: 74110 - DNA, 20 bp, Artificial Sequence
  Description of Artificial Sequence: Synthetic oligonucleotide
  Target: SCNA; (+) strand; PAM type: YTN; PAM sequence: TTA
tatatagttatataatttta

SEQ ID NO: 74111 - DNA, 20 bp, Artificial Sequence
  Description of Artificial Sequence: Synthetic oligonucleotide
  Target: SCNA; (+) strand; PAM type: YTN; PAM sequence: TTA
tataattttataaagttctg

SEQ ID NO: 74112 - DNA, 20 bp, Artificial Sequence
  Description of Artificial Sequence: Synthetic oligonucleotide
  Target: SCNA; (+) strand; PAM type: YTN; PAM sequence: TTT
tataaagttctgctaactta

SEQ ID NO: 74113 - DNA, 20 bp, Artificial Sequence
  Description of Artificial Sequence: Synthetic oligonucleotide
  Target: SCNA; (+) strand; PAM type: YTN; PAM sequence: TTT
ataaagttctgctaacttag

SEQ ID NO: 74114 - DNA, 20 bp, Artificial Sequence
  Description of Artificial Sequence: Synthetic oligonucleotide
  Target: SCNA; (+) strand; PAM type: YTN; PAM sequence: TTA
taaagttctgctaacttagt

SEQ ID NO: 74115 - DNA, 20 bp, Artificial Sequence
  Description of Artificial Sequence: Synthetic oligonucleotide
  Target: SCNA; (+) strand; PAM type: YTN; PAM sequence: TTC
tgctaacttagtgactttat

SEQ ID NO: 74116 - DNA, 20 bp, Artificial Sequence
  Description of Artificial Sequence: Synthetic oligonucleotide
  Target: SCNA; (+) strand; PAM type: YTN; PAM sequence: CTG
ctaacttagtgactttatat

SEQ ID NO: 74117 - DNA, 20 bp, Artificial Sequence
  Description of Artificial Sequence: Synthetic oligonucleotide
  Target: SCNA; (+) strand; PAM type: YTN; PAM sequence: CTA
acttagtgactttatatgca

SEQ ID NO: 74118 - DNA, 20 bp, Artificial Sequence
  Description of Artificial Sequence: Synthetic oligonucleotide
  Target: SCNA; (+) strand; PAM type: YTN; PAM sequence: CTT
agtgactttatatgcatttt

SEQ ID NO: 74119 - DNA, 20 bp, Artificial Sequence
  Description of Artificial Sequence: Synthetic oligonucleotide
  Target: SCNA; (+) strand; PAM type: YTN; PAM sequence: TTA
gtgactttatatgcattttt

SEQ ID NO: 74120 - DNA, 20 bp, Artificial Sequence
  Description of Artificial Sequence: Synthetic oligonucleotide
  Target: SCNA; (+) strand; PAM type: YTN; PAM sequence: CTT
tatatgcatttttcaggaaa

SEQ ID NO: 74121 - DNA, 20 bp, Artificial Sequence
  Description of Artificial Sequence: Synthetic oligonucleotide
  Target: SCNA; (+) strand; PAM type: YTN; PAM sequence: TTT
atatgcatttttcaggaaac

SEQ ID NO: 74122 - DNA, 20 bp, Artificial Sequence
  Description of Artificial Sequence: Synthetic oligonucleotide
  Target: SCNA; (+) strand; PAM type: YTN; PAM sequence: TTA
tatgcatttttcaggaaact

SEQ ID NO: 74123 - DNA, 20 bp, Artificial Sequence
  Description of Artificial Sequence: Synthetic oligonucleotide
  Target: SCNA; (+) strand; PAM type: YTN; PAM sequence: TTT
ttcaggaaacttgcaaaaac

SEQ ID NO: 74124 - DNA, 20 bp, Artificial Sequence
  Description of Artificial Sequence: Synthetic oligonucleotide
  Target: SCNA; (+) strand; PAM type: YTN; PAM sequence: TTT
tcaggaaacttgcaaaaaca

SEQ ID NO: 74125 - DNA, 20 bp, Artificial Sequence
  Description of Artificial Sequence: Synthetic oligonucleotide
  Target: SCNA; (+) strand; PAM type: YTN; PAM sequence: TTT
caggaaacttgcaaaaacaa

SEQ ID NO: 74126 - DNA, 20 bp, Artificial Sequence
  Description of Artificial Sequence: Synthetic oligonucleotide
  Target: SCNA; (+) strand; PAM type: YTN; PAM sequence: TTC
aggaaacttgcaaaaacaag

SEQ ID NO: 74127 - DNA, 20 bp, Artificial Sequence
  Description of Artificial Sequence: Synthetic oligonucleotide
  Target: SCNA; (+) strand; PAM type: YTN; PAM sequence: CTT
gcaaaaacaagaaggtgaat

SEQ ID NO: 74128 - DNA, 20 bp, Artificial Sequence
  Description of Artificial Sequence: Synthetic oligonucleotide
  Target: SCNA; (+) strand; PAM type: YTN; PAM sequence: TTG
caaaaacaagaaggtgaata

SEQ ID NO: 74129 - DNA, 20 bp, Artificial Sequence
  Description of Artificial Sequence: Synthetic oligonucleotide
  Target: SCNA; (+) strand; PAM type: YTN; PAM sequence: CTT
cgaaatgagaagagttcact

SEQ ID NO: 74130 - DNA, 20 bp, Artificial Sequence
  Description of Artificial Sequence: Synthetic oligonucleotide
  Target: SCNA; (+) strand; PAM type: YTN; PAM sequence: TTC
gaaatgagaagagttcacta

SEQ ID NO: 74131 - DNA, 20 bp, Artificial Sequence
  Description of Artificial Sequence: Synthetic oligonucleotide
  Target: SCNA; (+) strand; PAM type: YTN; PAM sequence: TTC
actaagcataatgcatttat

SEQ ID NO: 74132 - DNA, 20 bp, Artificial Sequence
  Description of Artificial Sequence: Synthetic oligonucleotide
  Target: SCNA; (+) strand; PAM type: YTN; PAM sequence: CTA
agcataatgcatttattttg

SEQ ID NO: 74133 - DNA, 20 bp, Artificial Sequence
  Description of Artificial Sequence: Synthetic oligonucleotide
  Target: SCNA; (+) strand; PAM type: YTN; PAM sequence: TTT
attttgcatcaggatttttc

SEQ ID NO: 74134 - DNA, 20 bp, Artificial Sequence
  Description of Artificial Sequence: Synthetic oligonucleotide
  Target: SCNA; (+) strand; PAM type: YTN; PAM sequence: TTA
ttttgcatcaggatttttca

SEQ ID NO: 74135 - DNA, 20 bp, Artificial Sequence
  Description of Artificial Sequence: Synthetic oligonucleotide
  Target: SCNA; (+) strand; PAM type: YTN; PAM sequence: TTT
tgcatcaggatttttcaacg

SEQ ID NO: 74136 - DNA, 20 bp, Artificial Sequence
  Description of Artificial Sequence: Synthetic oligonucleotide
  Target: SCNA; (+) strand; PAM type: YTN; PAM sequence: TTT
gcatcaggatttttcaacgt

SEQ ID NO: 74137 - DNA, 20 bp, Artificial Sequence
  Description of Artificial Sequence: Synthetic oligonucleotide
  Target: SCNA; (+) strand; PAM type: YTN; PAM sequence: TTG
catcaggatttttcaacgtt

SEQ ID NO: 74138 - DNA, 20 bp, Artificial Sequence
  Description of Artificial Sequence: Synthetic oligonucleotide
  Target: SCNA; (+) strand; PAM type: YTN; PAM sequence: TTT
ttcaacgttttaatttttaa

SEQ ID NO: 74139 - DNA, 20 bp, Artificial Sequence
  Description of Artificial Sequence: Synthetic oligonucleotide
  Target: SCNA; (+) strand; PAM type: YTN; PAM sequence: TTT
tcaacgttttaatttttaat

SEQ ID NO: 74140 - DNA, 20 bp, Artificial Sequence
  Description of Artificial Sequence: Synthetic oligonucleotide
  Target: SCNA; (+) strand; PAM type: YTN; PAM sequence: TTT
caacgttttaatttttaatt

SEQ ID NO: 74141 - DNA, 20 bp, Artificial Sequence
  Description of Artificial Sequence: Synthetic oligonucleotide
  Target: SCNA; (+) strand; PAM type: YTN; PAM sequence: TTC
aacgttttaatttttaatta

SEQ ID NO: 74142 - DNA, 20 bp, Artificial Sequence
  Description of Artificial Sequence: Synthetic oligonucleotide
  Target: SCNA; (+) strand; PAM type: YTN; PAM sequence: TTT
taatttttaattaaaaaatt

SEQ ID NO: 74143 - DNA, 20 bp, Artificial Sequence
  Description of Artificial Sequence: Synthetic oligonucleotide
  Target: SCNA; (+) strand; PAM type: YTN; PAM sequence: TTT
aatttttaattaaaaaatta

SEQ ID NO: 74144 - DNA, 20 bp, Artificial Sequence
  Description of Artificial Sequence: Synthetic oligonucleotide
  Target: SCNA; (+) strand; PAM type: YTN; PAM sequence: TTA
atttttaattaaaaaattaa

SEQ ID NO: 74145 - DNA, 20 bp, Artificial Sequence
  Description of Artificial Sequence: Synthetic oligonucleotide
  Target: SCNA; (+) strand; PAM type: YTN; PAM sequence: TTT
ttaattaaaaaattaaacat

SEQ ID NO: 74146 - DNA, 20 bp, Artificial Sequence
  Description of Artificial Sequence: Synthetic oligonucleotide
  Target: SCNA; (+) strand; PAM type: YTN; PAM sequence: TTT
taattaaaaaattaaacatt

SEQ ID NO: 74147 - DNA, 20 bp, Artificial Sequence
  Description of Artificial Sequence: Synthetic oligonucleotide
  Target: SCNA; (+) strand; PAM type: YTN; PAM sequence: TTT
aattaaaaaattaaacattt

SEQ ID NO: 74148 - DNA, 20 bp, Artificial Sequence
  Description of Artificial Sequence: Synthetic oligonucleotide
  Target: SCNA; (+) strand; PAM type: YTN; PAM sequence: TTA
attaaaaaattaaacatttt

SEQ ID NO: 74149 - DNA, 20 bp, Artificial Sequence
  Description of Artificial Sequence: Synthetic oligonucleotide
  Target: SCNA; (+) strand; PAM type: YTN; PAM sequence: TTA
aaaaattaaacatttttaat

SEQ ID NO: 74150 - DNA, 20 bp, Artificial Sequence
  Description of Artificial Sequence: Synthetic oligonucleotide
  Target: SCNA; (+) strand; PAM type: YTN; PAM sequence: TTA
aacatttttaatagccgaca

SEQ ID NO: 74151 - DNA, 20 bp, Artificial Sequence
  Description of Artificial Sequence: Synthetic oligonucleotide
  Target: SCNA; (+) strand; PAM type: YTN; PAM sequence: TTT
ttaatagccgacatacatct

SEQ ID NO: 74152 - DNA, 20 bp, Artificial Sequence
  Description of Artificial Sequence: Synthetic oligonucleotide
  Target: SCNA; (+) strand; PAM type: YTN; PAM sequence: TTT
taatagccgacatacatctc

SEQ ID NO: 74153 - DNA, 20 bp, Artificial Sequence
  Description of Artificial Sequence: Synthetic oligonucleotide
  Target: SCNA; (+) strand; PAM type: YTN; PAM sequence: TTT
aatagccgacatacatctcc

SEQ ID NO: 74154 - DNA, 20 bp, Artificial Sequence
  Description of Artificial Sequence: Synthetic oligonucleotide
  Target: SCNA; (+) strand; PAM type: YTN; PAM sequence: TTA
atagccgacatacatctcca

SEQ ID NO: 74155 - DNA, 20 bp, Artificial Sequence
  Description of Artificial Sequence: Synthetic oligonucleotide
  Target: SCNA; (+) strand; PAM type: YTN; PAM sequence: CTC
caaaatttacttctccaatc

SEQ ID NO: 74156 - DNA, 20 bp, Artificial Sequence
  Description of Artificial Sequence: Synthetic oligonucleotide
  Target: SCNA; (+) strand; PAM type: YTN; PAM sequence: TTT
acttctccaatctttccaaa

SEQ ID NO: 74157 - DNA, 20 bp, Artificial Sequence
  Description of Artificial Sequence: Synthetic oligonucleotide
  Target: SCNA; (+) strand; PAM type: YTN; PAM sequence: TTA
cttctccaatctttccaaaa

SEQ ID NO: 74158 - DNA, 20 bp, Artificial Sequence
  Description of Artificial Sequence: Synthetic oligonucleotide
  Target: SCNA; (+) strand; PAM type: YTN; PAM sequence: CTT
ctccaatctttccaaaagaa

SEQ ID NO: 74159 - DNA, 20 bp, Artificial Sequence
  Description of Artificial Sequence: Synthetic oligonucleotide
  Target: SCNA; (+) strand; PAM type: YTN; PAM sequence: TTC
tccaatctttccaaaagaat

SEQ ID NO: 74160 - DNA, 20 bp, Artificial Sequence
  Description of Artificial Sequence: Synthetic oligonucleotide
  Target: SCNA; (+) strand; PAM type: YTN; PAM sequence: CTC
caatctttccaaaagaattg

SEQ ID NO: 74161 - DNA, 20 bp, Artificial Sequence
  Description of Artificial Sequence: Synthetic oligonucleotide
  Target: SCNA; (+) strand; PAM type: YTN; PAM sequence: CTT
tccaaaagaattgatgaaaa

SEQ ID NO: 74162 - DNA, 20 bp, Artificial Sequence
  Description of Artificial Sequence: Synthetic oligonucleotide
  Target: SCNA; (+) strand; PAM type: YTN; PAM sequence: TTT
ccaaaagaattgatgaaaat

SEQ ID NO: 74163 - DNA, 20 bp, Artificial Sequence
  Description of Artificial Sequence: Synthetic oligonucleotide
  Target: SCNA; (+) strand; PAM type: YTN; PAM sequence: TTC
caaaagaattgatgaaaatg

SEQ ID NO: 74164 - DNA, 20 bp, Artificial Sequence
  Description of Artificial Sequence: Synthetic oligonucleotide
  Target: SCNA; (+) strand; PAM type: YTN; PAM sequence: TTG
atgaaaatgtaaaccaagat

SEQ ID NO: 74165 - DNA, 20 bp, Artificial Sequence
  Description of Artificial Sequence: Synthetic oligonucleotide
  Target: SCNA; (+) strand; PAM type: YTN; PAM sequence: TTT
agatgtaaggatgatcatta

SEQ ID NO: 74166 - DNA, 20 bp, Artificial Sequence
  Description of Artificial Sequence: Synthetic oligonucleotide
  Target: SCNA; (+) strand; PAM type: YTN; PAM sequence: TTA
gatgtaaggatgatcattat

SEQ ID NO: 74167 - DNA, 20 bp, Artificial Sequence
  Description of Artificial Sequence: Synthetic oligonucleotide
  Target: SCNA; (+) strand; PAM type: YTN; PAM sequence: TTA
taacattataagaagcaaaa

SEQ ID NO: 74168 - DNA, 20 bp, Artificial Sequence
  Description of Artificial Sequence: Synthetic oligonucleotide
  Target: SCNA; (+) strand; PAM type: YTN; PAM sequence: TTA
taagaagcaaaaattacaga

SEQ ID NO: 74169 - DNA, 20 bp, Artificial Sequence
  Description of Artificial Sequence: Synthetic oligonucleotide
  Target: SCNA; (+) strand; PAM type: YTN; PAM sequence: TTA
cagaaaaacattgtattcaa

SEQ ID NO: 74170 - DNA, 20 bp, Artificial Sequence
  Description of Artificial Sequence: Synthetic oligonucleotide
  Target: SCNA; (+) strand; PAM type: YTN; PAM sequence: TTG
tattcaaaaacaggtgttga

SEQ ID NO: 74171 - DNA, 20 bp, Artificial Sequence
  Description of Artificial Sequence: Synthetic oligonucleotide
  Target: SCNA; (+) strand; PAM type: YTN; PAM sequence: TTC
aaaaacaggtgttgatgaag

SEQ ID NO: 74172 - DNA, 20 bp, Artificial Sequence
  Description of Artificial Sequence: Synthetic oligonucleotide
  Target: SCNA; (+) strand; PAM type: YTN; PAM sequence: TTG
atgaaggtatttactttatt

SEQ ID NO: 74173 - DNA, 20 bp, Artificial Sequence
  Description of Artificial Sequence: Synthetic oligonucleotide
  Target: SCNA; (+) strand; PAM type: YTN; PAM sequence: TTT
actttattcacaagtaaact

SEQ ID NO: 74174 - DNA, 20 bp, Artificial Sequence
  Description of Artificial Sequence: Synthetic oligonucleotide
  Target: SCNA; (+) strand; PAM type: YTN; PAM sequence: TTA
ctttattcacaagtaaactg

SEQ ID NO: 74175 - DNA, 20 bp, Artificial Sequence
  Description of Artificial Sequence: Synthetic oligonucleotide
  Target: SCNA; (+) strand; PAM type: YTN; PAM sequence: CTT
tattcacaagtaaactgaaa

SEQ ID NO: 74176 - DNA, 20 bp, Artificial Sequence
  Description of Artificial Sequence: Synthetic oligonucleotide
  Target: SCNA; (+) strand; PAM type: YTN; PAM sequence: TTT
attcacaagtaaactgaaac

SEQ ID NO: 74177 - DNA, 20 bp, Artificial Sequence
  Description of Artificial Sequence: Synthetic oligonucleotide
  Target: SCNA; (+) strand; PAM type: YTN; PAM sequence: TTA
ttcacaagtaaactgaaacc

SEQ ID NO: 74178 - DNA, 20 bp, Artificial Sequence
  Description of Artificial Sequence: Synthetic oligonucleotide
  Target: SCNA; (+) strand; PAM type: YTN; PAM sequence: TTC
acaagtaaactgaaaccaga

SEQ ID NO: 74179 - DNA, 20 bp, Artificial Sequence
  Description of Artificial Sequence: Synthetic oligonucleotide
  Target: SCNA; (+) strand; PAM type: YTN; PAM sequence: CTG
aaaccagagagatcacatga

SEQ ID NO: 74180 - DNA, 20 bp, Artificial Sequence
  Description of Artificial Sequence: Synthetic oligonucleotide
  Target: SCNA; (+) strand; PAM type: YTN; PAM sequence: TTT
ggtcacaggcacagcaacag

SEQ ID NO: 74181 - DNA, 20 bp, Artificial Sequence
  Description of Artificial Sequence: Synthetic oligonucleotide
  Target: SCNA; (+) strand; PAM type: YTN; PAM sequence: TTG
gtcacaggcacagcaacagg

SEQ ID NO: 74182 - DNA, 20 bp, Artificial Sequence
  Description of Artificial Sequence: Synthetic oligonucleotide
  Target: SCNA; (+) strand; PAM type: YTN; PAM sequence: CTG
ggatccaaatccatgttagc

SEQ ID NO: 74183 - DNA, 20 bp, Artificial Sequence
  Description of Artificial Sequence: Synthetic oligonucleotide
  Target: SCNA; (+) strand; PAM type: YTN; PAM sequence: TTA
gctatctccagacatagatc

SEQ ID NO: 74184 - DNA, 20 bp, Artificial Sequence
  Description of Artificial Sequence: Synthetic oligonucleotide
  Target: SCNA; (+) strand; PAM type: YTN; PAM sequence: CTA
tctccagacatagatctctc

SEQ ID NO: 74185 - DNA, 20 bp, Artificial Sequence
  Description of Artificial Sequence: Synthetic oligonucleotide
  Target: SCNA; (+) strand; PAM type: YTN; PAM sequence: CTC
cagacatagatctctctcca

SEQ ID NO: 74186 - DNA, 20 bp, Artificial Sequence
  Description of Artificial Sequence: Synthetic oligonucleotide
  Target: SCNA; (+) strand; PAM type: YTN; PAM sequence: CTC
tctccaccaaaacacacttc

SEQ ID NO: 74187 - DNA, 20 bp, Artificial Sequence
  Description of Artificial Sequence: Synthetic oligonucleotide
  Target: SCNA; (+) strand; PAM type: YTN; PAM sequence: CTC
tccaccaaaacacacttcag

SEQ ID NO: 74188 - DNA, 20 bp, Artificial Sequence
  Description of Artificial Sequence: Synthetic oligonucleotide
  Target: SCNA; (+) strand; PAM type: YTN; PAM sequence: CTC
caccaaaacacacttcagac

SEQ ID NO: 74189 - DNA, 20 bp, Artificial Sequence
  Description of Artificial Sequence: Synthetic oligonucleotide
  Target: SCNA; (+) strand; PAM type: YTN; PAM sequence: CTT
cagaccacactccaactatg

SEQ ID NO: 74190 - DNA, 20 bp, Artificial Sequence
  Description of Artificial Sequence: Synthetic oligonucleotide
  Target: SCNA; (+) strand; PAM type: YTN; PAM sequence: TTC
agaccacactccaactatgg

SEQ ID NO: 74191 - DNA, 20 bp, Artificial Sequence
  Description of Artificial Sequence: Synthetic oligonucleotide
  Target: SCNA; (+) strand; PAM type: YTN; PAM sequence: CTC
caactatgggaccaatggtt

SEQ ID NO: 74192 - DNA, 20 bp, Artificial Sequence
  Description of Artificial Sequence: Synthetic oligonucleotide
  Target: SCNA; (+) strand; PAM type: YTN; PAM sequence: CTA
tgggaccaatggtttgcccc

SEQ ID NO: 74193 - DNA, 20 bp, Artificial Sequence
  Description of Artificial Sequence: Synthetic oligonucleotide
  Target: SCNA; (+) strand; PAM type: YTN; PAM sequence: TTT
gccccattgtttattgccta

SEQ ID NO: 74194 - DNA, 20 bp, Artificial Sequence
  Description of Artificial Sequence: Synthetic oligonucleotide
  Target: SCNA; (+) strand; PAM type: YTN; PAM sequence: TTG
ccccattgtttattgcctat

SEQ ID NO: 74195 - DNA, 20 bp, Artificial Sequence
  Description of Artificial Sequence: Synthetic oligonucleotide
  Target: SCNA; (+) strand; PAM type: YTN; PAM sequence: TTG
tttattgcctatggtaatgg

SEQ ID NO: 74196 - DNA, 20 bp, Artificial Sequence
  Description of Artificial Sequence: Synthetic oligonucleotide
  Target: SCNA; (+) strand; PAM type: YTN; PAM sequence: TTT
attgcctatggtaatgggtt

SEQ ID NO: 74197 - DNA, 20 bp, Artificial Sequence
  Description of Artificial Sequence: Synthetic oligonucleotide
  Target: SCNA; (+) strand; PAM type: YTN; PAM sequence: TTA
ttgcctatggtaatgggttt

SEQ ID NO: 74198 - DNA, 20 bp, Artificial Sequence
  Description of Artificial Sequence: Synthetic oligonucleotide
  Target: SCNA; (+) strand; PAM type: YTN; PAM sequence: TTG
cctatggtaatgggtttatg

SEQ ID NO: 74199 - DNA, 20 bp, Artificial Sequence
  Description of Artificial Sequence: Synthetic oligonucleotide
  Target: SCNA; (+) strand; PAM type: YTN; PAM sequence: CTA
tggtaatgggtttatgtata

SEQ ID NO: 74200 - DNA, 20 bp, Artificial Sequence
  Description of Artificial Sequence: Synthetic oligonucleotide
  Target: SCNA; (+) strand; PAM type: YTN; PAM sequence: TTT
atgtataatcgtgactaaaa

SEQ ID NO: 74201 - DNA, 20 bp, Artificial Sequence
  Description of Artificial Sequence: Synthetic oligonucleotide
  Target: SCNA; (+) strand; PAM type: YTN; PAM sequence: TTA
tgtataatcgtgactaaaat

SEQ ID NO: 74202 - DNA, 20 bp, Artificial Sequence
  Description of Artificial Sequence: Synthetic oligonucleotide
  Target: SCNA; (+) strand; PAM type: YTN; PAM sequence: CTA
aaatcattatccttttaaat

SEQ ID NO: 74203 - DNA, 20 bp, Artificial Sequence
  Description of Artificial Sequence: Synthetic oligonucleotide
  Target: SCNA; (+) strand; PAM type: YTN; PAM sequence: TTA
tccttttaaattgaaagaaa

SEQ ID NO: 74204 - DNA, 20 bp, Artificial Sequence
  Description of Artificial Sequence: Synthetic oligonucleotide
  Target: SCNA; (+) strand; PAM type: YTN; PAM sequence: CTT
ttaaattgaaagaaagatgg

SEQ ID NO: 74205 - DNA, 20 bp, Artificial Sequence
  Description of Artificial Sequence: Synthetic oligonucleotide
  Target: SCNA; (+) strand; PAM type: YTN; PAM sequence: TTT
taaattgaaagaaagatggg

SEQ ID NO: 74206 - DNA, 20 bp, Artificial Sequence
  Description of Artificial Sequence: Synthetic oligonucleotide
  Target: SCNA; (+) strand; PAM type: YTN; PAM sequence: TTT
aaattgaaagaaagatggga

SEQ ID NO: 74207 - DNA, 20 bp, Artificial Sequence
  Description of Artificial Sequence: Synthetic oligonucleotide
  Target: SCNA; (+) strand; PAM type: YTN; PAM sequence: TTA
aattgaaagaaagatgggat

SEQ ID NO: 74208 - DNA, 20 bp, Artificial Sequence
  Description of Artificial Sequence: Synthetic oligonucleotide
  Target: SCNA; (+) strand; PAM type: YTN; PAM sequence: TTG
aaagaaagatgggatgggtg

SEQ ID NO: 74209 - DNA, 20 bp, Artificial Sequence
  Description of Artificial Sequence: Synthetic oligonucleotide
  Target: SCNA; (+) strand; PAM type: YTN; PAM sequence: TTA
cagcagaaccaagcagtaga

SEQ ID NO: 74210 - DNA, 20 bp, Artificial Sequence
  Description of Artificial Sequence: Synthetic oligonucleotide
  Target: SCNA; (+) strand; PAM type: YTN; PAM sequence: TTG
ctattttgccacacatacca

SEQ ID NO: 74211 - DNA, 20 bp, Artificial Sequence
  Description of Artificial Sequence: Synthetic oligonucleotide
  Target: SCNA; (+) strand; PAM type: YTN; PAM sequence: CTA
ttttgccacacataccaaat

SEQ ID NO: 74212 - DNA, 20 bp, Artificial Sequence
  Description of Artificial Sequence: Synthetic oligonucleotide
  Target: SCNA; (+) strand; PAM type: YTN; PAM sequence: TTT
tgccacacataccaaatatt

SEQ ID NO: 74213 - DNA, 20 bp, Artificial Sequence
  Description of Artificial Sequence: Synthetic oligonucleotide
  Target: SCNA; (+) strand; PAM type: YTN; PAM sequence: TTT
gccacacataccaaatatta

SEQ ID NO: 74214 - DNA, 20 bp, Artificial Sequence
  Description of Artificial Sequence: Synthetic oligonucleotide
  Target: SCNA; (+) strand; PAM type: YTN; PAM sequence: TTG
ccacacataccaaatattag

SEQ ID NO: 74215 - DNA, 20 bp, Artificial Sequence
  Description of Artificial Sequence: Synthetic oligonucleotide
  Target: SCNA; (+) strand; PAM type: YTN; PAM sequence: TTA
gataatgaacttcatattaa

SEQ ID NO: 74216 - DNA, 20 bp, Artificial Sequence
  Description of Artificial Sequence: Synthetic oligonucleotide
  Target: SCNA; (+) strand; PAM type: YTN; PAM sequence: CTT
catattaaatatcttctcta

SEQ ID NO: 74217 - DNA, 20 bp, Artificial Sequence
  Description of Artificial Sequence: Synthetic oligonucleotide
  Target: SCNA; (+) strand; PAM type: YTN; PAM sequence: TTC
atattaaatatcttctctag

SEQ ID NO: 74218 - DNA, 20 bp, Artificial Sequence
  Description of Artificial Sequence: Synthetic oligonucleotide
  Target: SCNA; (+) strand; PAM type: YTN; PAM sequence: TTA
aatatcttctctaggtcttt

SEQ ID NO: 74219 - DNA, 20 bp, Artificial Sequence
  Description of Artificial Sequence: Synthetic oligonucleotide
  Target: SCNA; (+) strand; PAM type: YTN; PAM sequence: CTT
ctctaggtctttatcttcat

SEQ ID NO: 74220 - DNA, 20 bp, Artificial Sequence
  Description of Artificial Sequence: Synthetic oligonucleotide
  Target: SCNA; (+) strand; PAM type: YTN; PAM sequence: TTC
tctaggtctttatcttcatc

SEQ ID NO: 74221 - DNA, 20 bp, Artificial Sequence
  Description of Artificial Sequence: Synthetic oligonucleotide
  Target: SCNA; (+) strand; PAM type: YTN; PAM sequence: CTC
taggtctttatcttcatcat

SEQ ID NO: 74222 - DNA, 20 bp, Artificial Sequence
  Description of Artificial Sequence: Synthetic oligonucleotide
  Target: SCNA; (+) strand; PAM type: YTN; PAM sequence: CTA
ggtctttatcttcatcatag

SEQ ID NO: 74223 - DNA, 20 bp, Artificial Sequence
  Description of Artificial Sequence: Synthetic oligonucleotide
  Target: SCNA; (+) strand; PAM type: YTN; PAM sequence: CTT
tatcttcatcatagctcaca

SEQ ID NO: 74224 - DNA, 20 bp, Artificial Sequence
  Description of Artificial Sequence: Synthetic oligonucleotide
  Target: SCNA; (+) strand; PAM type: YTN; PAM sequence: TTT
atcttcatcatagctcacaa

SEQ ID NO: 74225 - DNA, 20 bp, Artificial Sequence
  Description of Artificial Sequence: Synthetic oligonucleotide
  Target: SCNA; (+) strand; PAM type: YTN; PAM sequence: TTA
tcttcatcatagctcacaat

SEQ ID NO: 74226 - DNA, 20 bp, Artificial Sequence
  Description of Artificial Sequence: Synthetic oligonucleotide
  Target: SCNA; (+) strand; PAM type: YTN; PAM sequence: CTT
catcatagctcacaatgttg

SEQ ID NO: 74227 - DNA, 20 bp, Artificial Sequence
  Description of Artificial Sequence: Synthetic oligonucleotide
  Target: SCNA; (+) strand; PAM type: YTN; PAM sequence: TTC
atcatagctcacaatgttgt

SEQ ID NO: 74228 - DNA, 20 bp, Artificial Sequence
  Description of Artificial Sequence: Synthetic oligonucleotide
  Target: SCNA; (+) strand; PAM type: YTN; PAM sequence: CTC
acaatgttgtatgatgctct

SEQ ID NO: 74229 - DNA, 20 bp, Artificial Sequence
  Description of Artificial Sequence: Synthetic oligonucleotide
  Target: SCNA; (+) strand; PAM type: YTN; PAM sequence: TTG
tatgatgctctggcagaaac

SEQ ID NO: 74230 - DNA, 20 bp, Artificial Sequence
  Description of Artificial Sequence: Synthetic oligonucleotide
  Target: SCNA; (+) strand; PAM type: YTN; PAM sequence: CTC
tggcagaaactaaaaactat

SEQ ID NO: 74231 - DNA, 20 bp, Artificial Sequence
  Description of Artificial Sequence: Synthetic oligonucleotide
  Target: SCNA; (+) strand; PAM type: YTN; PAM sequence: CTG
gcagaaactaaaaactatgc

SEQ ID NO: 74232 - DNA, 20 bp, Artificial Sequence
  Description of Artificial Sequence: Synthetic oligonucleotide
  Target: SCNA; (+) strand; PAM type: YTN; PAM sequence: CTA
aaaactatgcttgtagaatg

SEQ ID NO: 74233 - DNA, 20 bp, Artificial Sequence
  Description of Artificial Sequence: Synthetic oligonucleotide
  Target: SCNA; (+) strand; PAM type: YTN; PAM sequence: CTA
tgcttgtagaatgtctcatt

SEQ ID NO: 74234 - DNA, 20 bp, Artificial Sequence
  Description of Artificial Sequence: Synthetic oligonucleotide
  Target: SCNA; (+) strand; PAM type: YTN; PAM sequence: CTT
gtagaatgtctcatttatat

SEQ ID NO: 74235 - DNA, 20 bp, Artificial Sequence
  Description of Artificial Sequence: Synthetic oligonucleotide
  Target: SCNA; (+) strand; PAM type: YTN; PAM sequence: TTG
tagaatgtctcatttatatg

SEQ ID NO: 74236 - DNA, 20 bp, Artificial Sequence
  Description of Artificial Sequence: Synthetic oligonucleotide
  Target: SCNA; (+) strand; PAM type: YTN; PAM sequence: CTC
atttatatgacaacagaacg

SEQ ID NO: 74237 - DNA, 20 bp, Artificial Sequence
  Description of Artificial Sequence: Synthetic oligonucleotide
  Target: SCNA; (+) strand; PAM type: YTN; PAM sequence: TTT
atatgacaacagaacgactg

SEQ ID NO: 74238 - DNA, 20 bp, Artificial Sequence
  Description of Artificial Sequence: Synthetic oligonucleotide
  Target: SCNA; (+) strand; PAM type: YTN; PAM sequence: TTA
tatgacaacagaacgactga

SEQ ID NO: 74239 - DNA, 20 bp, Artificial Sequence
  Description of Artificial Sequence: Synthetic oligonucleotide
  Target: SCNA; (+) strand; PAM type: YTN; PAM sequence: CTG
agtgaaatggagcttaatat

SEQ ID NO: 74240 - DNA, 20 bp, Artificial Sequence
  Description of Artificial Sequence: Synthetic oligonucleotide
  Target: SCNA; (+) strand; PAM type: YTN; PAM sequence: CTT
aatattaagtctgttaagag

SEQ ID NO: 74241 - DNA, 20 bp, Artificial Sequence
  Description of Artificial Sequence: Synthetic oligonucleotide
  Target: SCNA; (+) strand; PAM type: YTN; PAM sequence: TTA
atattaagtctgttaagagg

SEQ ID NO: 74242 - DNA, 20 bp, Artificial Sequence
  Description of Artificial Sequence: Synthetic oligonucleotide
  Target: SCNA; (+) strand; PAM type: YTN; PAM sequence: TTA
agtctgttaagaggttaggg

SEQ ID NO: 74243 - DNA, 20 bp, Artificial Sequence
  Description of Artificial Sequence: Synthetic oligonucleotide
  Target: SCNA; (+) strand; PAM type: YTN; PAM sequence: CTG
ttaagaggttagggacaagc

SEQ ID NO: 74244 - DNA, 20 bp, Artificial Sequence
  Description of Artificial Sequence: Synthetic oligonucleotide
  Target: SCNA; (+) strand; PAM type: YTN; PAM sequence: TTA
agaggttagggacaagccaa

SEQ ID NO: 74245 - DNA, 20 bp, Artificial Sequence
  Description of Artificial Sequence: Synthetic oligonucleotide
  Target: SCNA; (+) strand; PAM type: YTN; PAM sequence: TTA
gggacaagccaaagacagag

SEQ ID NO: 74246 - DNA, 20 bp, Artificial Sequence
  Description of Artificial Sequence: Synthetic oligonucleotide
  Target: SCNA; (+) strand; PAM type: YTN; PAM sequence: CTC
tgtctcaaaaaaaaaaaaaa

SEQ ID NO: 74247 - DNA, 20 bp, Artificial Sequence
  Description of Artificial Sequence: Synthetic oligonucleotide
  Target: SCNA; (+) strand; PAM type: YTN; PAM sequence: CTG
tctcaaaaaaaaaaaaaaaa

SEQ ID NO: 74248 - DNA, 20 bp, Artificial Sequence
  Description of Artificial Sequence: Synthetic oligonucleotide
  Target: SCNA; (+) strand; PAM type: YTN; PAM sequence: CTC
aaaaaaaaaaaaaaaaaagt

SEQ ID NO: 74249 - DNA, 20 bp, Artificial Sequence
  Description of Artificial Sequence: Synthetic oligonucleotide
  Target: SCNA; (+) strand; PAM type: YTN; PAM sequence: CTC
agagataaataaaagtaagt

SEQ ID NO: 74250 - DNA, 20 bp, Artificial Sequence
  Description of Artificial Sequence: Synthetic oligonucleotide
  Target: SCNA; (+) strand; PAM type: YTN; PAM sequence: TTC
tgagctgacatccataaatg

SEQ ID NO: 74251 - DNA, 20 bp, Artificial Sequence
  Description of Artificial Sequence: Synthetic oligonucleotide
  Target: SCNA; (+) strand; PAM type: YTN; PAM sequence: CTG
agctgacatccataaatgct

SEQ ID NO: 74252 - DNA, 20 bp, Artificial Sequence
  Description of Artificial Sequence: Synthetic oligonucleotide
  Target: SCNA; (+) strand; PAM type: YTN; PAM sequence: CTG
acatccataaatgctttgtg

SEQ ID NO: 74253 - DNA, 20 bp, Artificial Sequence
  Description of Artificial Sequence: Synthetic oligonucleotide
  Target: SCNA; (+) strand; PAM type: YTN; PAM sequence: CTT
tgtggcattagatgctgcta

SEQ ID NO: 74254 - DNA, 20 bp, Artificial Sequence
  Description of Artificial Sequence: Synthetic oligonucleotide
  Target: SCNA; (+) strand; PAM type: YTN; PAM sequence: TTT
gtggcattagatgctgctaa

SEQ ID NO: 74255 - DNA, 20 bp, Artificial Sequence
  Description of Artificial Sequence: Synthetic oligonucleotide
  Target: SCNA; (+) strand; PAM type: YTN; PAM sequence: TTG
tggcattagatgctgctaag

SEQ ID NO: 74256 - DNA, 20 bp, Artificial Sequence
  Description of Artificial Sequence: Synthetic oligonucleotide
  Target: SCNA; (+) strand; PAM type: YTN; PAM sequence: TTA
gatgctgctaagagtgaatt

SEQ ID NO: 74257 - DNA, 20 bp, Artificial Sequence
  Description of Artificial Sequence: Synthetic oligonucleotide
  Target: SCNA; (+) strand; PAM type: YTN; PAM sequence: CTG
ctaagagtgaattatttcca

SEQ ID NO: 74258 - DNA, 20 bp, Artificial Sequence
  Description of Artificial Sequence: Synthetic oligonucleotide
  Target: SCNA; (+) strand; PAM type: YTN; PAM sequence: CTA
agagtgaattatttccatga

SEQ ID NO: 74259 - DNA, 20 bp, Artificial Sequence
  Description of Artificial Sequence: Synthetic oligonucleotide
  Target: SCNA; (+) strand; PAM type: YTN; PAM sequence: TTA
tttccatgaagccaagatca

SEQ ID NO: 74260 - DNA, 20 bp, Artificial Sequence
  Description of Artificial Sequence: Synthetic oligonucleotide
  Target: SCNA; (+) strand; PAM type: YTN; PAM sequence: TTT
ccatgaagccaagatcaagc

SEQ ID NO: 74261 - DNA, 20 bp, Artificial Sequence
  Description of Artificial Sequence: Synthetic oligonucleotide
  Target: SCNA; (+) strand; PAM type: YTN; PAM sequence: TTC
catgaagccaagatcaagct

SEQ ID NO: 74262 - DNA, 20 bp, Artificial Sequence
  Description of Artificial Sequence: Synthetic oligonucleotide
  Target: SCNA; (+) strand; PAM type: YTN; PAM sequence: CTG
ttgcacaagctgtacattaa

SEQ ID NO: 74263 - DNA, 20 bp, Artificial Sequence
  Description of Artificial Sequence: Synthetic oligonucleotide
  Target: SCNA; (+) strand; PAM type: YTN; PAM sequence: TTG
cacaagctgtacattaatta

SEQ ID NO: 74264 - DNA, 20 bp, Artificial Sequence
  Description of Artificial Sequence: Synthetic oligonucleotide
  Target: SCNA; (+) strand; PAM type: YTN; PAM sequence: CTG
tacattaattacttgaaaaa

SEQ ID NO: 74265 - DNA, 20 bp, Artificial Sequence
  Description of Artificial Sequence: Synthetic oligonucleotide
  Target: SCNA; (+) strand; PAM type: YTN; PAM sequence: TTA
attacttgaaaaaaattccc

SEQ ID NO: 74266 - DNA, 20 bp, Artificial Sequence
  Description of Artificial Sequence: Synthetic oligonucleotide
  Target: SCNA; (+) strand; PAM type: YTN; PAM sequence: TTA
cttgaaaaaaattcccagta

SEQ ID NO: 74267 - DNA, 20 bp, Artificial Sequence
  Description of Artificial Sequence: Synthetic oligonucleotide
  Target: SCNA; (+) strand; PAM type: YTN; PAM sequence: CTT
gaaaaaaattcccagtaggg

SEQ ID NO: 74268 - DNA, 20 bp, Artificial Sequence
  Description of Artificial Sequence: Synthetic oligonucleotide
  Target: SCNA; (+) strand; PAM type: YTN; PAM sequence: TTG
aaaaaaattcccagtagggc

SEQ ID NO: 74269 - DNA, 20 bp, Artificial Sequence
  Description of Artificial Sequence: Synthetic oligonucleotide
  Target: SCNA; (+) strand; PAM type: YTN; PAM sequence: TTC
ccagtagggcaatgtctaaa

SEQ ID NO: 74270 - DNA, 20 bp, Artificial Sequence
  Description of Artificial Sequence: Synthetic oligonucleotide
  Target: SCNA; (+) strand; PAM type: YTN; PAM sequence: CTA
aatatatttccatgagaata

SEQ ID NO: 74271 - DNA, 20 bp, Artificial Sequence
  Description of Artificial Sequence: Synthetic oligonucleotide
  Target: SCNA; (+) strand; PAM type: YTN; PAM sequence: TTT
ccatgagaatagtatatata

SEQ ID NO: 74272 - DNA, 20 bp, Artificial Sequence
  Description of Artificial Sequence: Synthetic oligonucleotide
  Target: SCNA; (+) strand; PAM type: YTN; PAM sequence: TTC
catgagaatagtatatatat

SEQ ID NO: 74273 - DNA, 20 bp, Artificial Sequence
  Description of Artificial Sequence: Synthetic oligonucleotide
  Target: SCNA; (+) strand; PAM type: YTN; PAM sequence: TTT
gttataaaggtgatgatcta

SEQ ID NO: 74274 - DNA, 20 bp, Artificial Sequence
  Description of Artificial Sequence: Synthetic oligonucleotide
  Target: SCNA; (+) strand; PAM type: YTN; PAM sequence: TTG
ttataaaggtgatgatctag

SEQ ID NO: 74275 - DNA, 20 bp, Artificial Sequence
  Description of Artificial Sequence: Synthetic oligonucleotide
  Target: SCNA; (+) strand; PAM type: YTN; PAM sequence: TTA
taaaggtgatgatctagcca

SEQ ID NO: 74276 - DNA, 20 bp, Artificial Sequence
  Description of Artificial Sequence: Synthetic oligonucleotide
  Target: SCNA; (+) strand; PAM type: YTN; PAM sequence: CTA
gccaagagggtgtctgacct

SEQ ID NO: 74277 - DNA, 20 bp, Artificial Sequence
  Description of Artificial Sequence: Synthetic oligonucleotide
  Target: SCNA; (+) strand; PAM type: YTN; PAM sequence: CTG
acctccaaaatatatccact

SEQ ID NO: 74278 - DNA, 20 bp, Artificial Sequence
  Description of Artificial Sequence: Synthetic oligonucleotide
  Target: SCNA; (+) strand; PAM type: YTN; PAM sequence: CTC
caaaatatatccactaataa

SEQ ID NO: 74279 - DNA, 20 bp, Artificial Sequence
  Description of Artificial Sequence: Synthetic oligonucleotide
  Target: SCNA; (+) strand; PAM type: YTN; PAM sequence: CTA
ataaaaaaaatccaaggagc

SEQ ID NO: 74280 - DNA, 20 bp, Artificial Sequence
  Description of Artificial Sequence: Synthetic oligonucleotide
  Target: SCNA; (+) strand; PAM type: YTN; PAM sequence: TTT
ggataacagtggttaaaaaa

SEQ ID NO: 74281 - DNA, 20 bp, Artificial Sequence
  Description of Artificial Sequence: Synthetic oligonucleotide
  Target: SCNA; (+) strand; PAM type: YTN; PAM sequence: TTG
gataacagtggttaaaaaaa

SEQ ID NO: 74282 - DNA, 20 bp, Artificial Sequence
  Description of Artificial Sequence: Synthetic oligonucleotide
  Target: SCNA; (+) strand; PAM type: YTN; PAM sequence: TTA
aaaaaaattgcaaaacagat

SEQ ID NO: 74283 - DNA, 20 bp, Artificial Sequence
  Description of Artificial Sequence: Synthetic oligonucleotide
  Target: SCNA; (+) strand; PAM type: YTN; PAM sequence: TTG
caaaacagatggacttcaca

SEQ ID NO: 74284 - DNA, 20 bp, Artificial Sequence
  Description of Artificial Sequence: Synthetic oligonucleotide
  Target: SCNA; (+) strand; PAM type: YTN; PAM sequence: CTT
cacattttgggcatgactac

SEQ ID NO: 74285 - DNA, 20 bp, Artificial Sequence
  Description of Artificial Sequence: Synthetic oligonucleotide
  Target: SCNA; (+) strand; PAM type: YTN; PAM sequence: TTC
acattttgggcatgactaca

SEQ ID NO: 74286 - DNA, 20 bp, Artificial Sequence
  Description of Artificial Sequence: Synthetic oligonucleotide
  Target: SCNA; (+) strand; PAM type: YTN; PAM sequence: TTT
tgggcatgactacacacgtg

SEQ ID NO: 74287 - DNA, 20 bp, Artificial Sequence
  Description of Artificial Sequence: Synthetic oligonucleotide
  Target: SCNA; (+) strand; PAM type: YTN; PAM sequence: TTT
gggcatgactacacacgtgg

SEQ ID NO: 74288 - DNA, 20 bp, Artificial Sequence
  Description of Artificial Sequence: Synthetic oligonucleotide
  Target: SCNA; (+) strand; PAM type: YTN; PAM sequence: TTG
ggcatgactacacacgtggc

SEQ ID NO: 74289 - DNA, 20 bp, Artificial Sequence
  Description of Artificial Sequence: Synthetic oligonucleotide
  Target: SCNA; (+) strand; PAM type: YTN; PAM sequence: CTA
cacacgtggccagatcaatc

SEQ ID NO: 74290 - DNA, 20 bp, Artificial Sequence
  Description of Artificial Sequence: Synthetic oligonucleotide
  Target: SCNA; (+) strand; PAM type: YTN; PAM sequence: TTC
ttccatgcaaatatgttagt

SEQ ID NO: 74291 - DNA, 20 bp, Artificial Sequence
  Description of Artificial Sequence: Synthetic oligonucleotide
  Target: SCNA; (+) strand; PAM type: YTN; PAM sequence: CTT
ccatgcaaatatgttagtgt

SEQ ID NO: 74292 - DNA, 20 bp, Artificial Sequence
  Description of Artificial Sequence: Synthetic oligonucleotide
  Target: SCNA; (+) strand; PAM type: YTN; PAM sequence: TTC
catgcaaatatgttagtgtg

SEQ ID NO: 74293 - DNA, 20 bp, Artificial Sequence
  Description of Artificial Sequence: Synthetic oligonucleotide
  Target: SCNA; (+) strand; PAM type: YTN; PAM sequence: TTA
gtgtgattagttgattgtag

SEQ ID NO: 74294 - DNA, 20 bp, Artificial Sequence
  Description of Artificial Sequence: Synthetic oligonucleotide
  Target: SCNA; (+) strand; PAM type: YTN; PAM sequence: TTA
gttgattgtaggaaatgtgg

SEQ ID NO: 74295 - DNA, 20 bp, Artificial Sequence
  Description of Artificial Sequence: Synthetic oligonucleotide
  Target: SCNA; (+) strand; PAM type: YTN; PAM sequence: TTG
attgtaggaaatgtggcatt

SEQ ID NO: 74296 - DNA, 20 bp, Artificial Sequence
  Description of Artificial Sequence: Synthetic oligonucleotide
  Target: SCNA; (+) strand; PAM type: YTN; PAM sequence: TTG
taggaaatgtggcatttgca

SEQ ID NO: 74297 - DNA, 20 bp, Artificial Sequence
  Description of Artificial Sequence: Synthetic oligonucleotide
  Target: SCNA; (+) strand; PAM type: YTN; PAM sequence: TTT
gcattactaatatgttttgt

SEQ ID NO: 74298 - DNA, 20 bp, Artificial Sequence
  Description of Artificial Sequence: Synthetic oligonucleotide
  Target: SCNA; (+) strand; PAM type: YTN; PAM sequence: TTG
cattactaatatgttttgtt

SEQ ID NO: 74299 - DNA, 20 bp, Artificial Sequence
  Description of Artificial Sequence: Synthetic oligonucleotide
  Target: SCNA; (+) strand; PAM type: YTN; PAM sequence: TTA
ctaatatgttttgttcttgt

SEQ ID NO: 74300 - DNA, 20 bp, Artificial Sequence
  Description of Artificial Sequence: Synthetic oligonucleotide
  Target: SCNA; (+) strand; PAM type: YTN; PAM sequence: CTA
atatgttttgttcttgtcat

SEQ ID NO: 74301 - DNA, 20 bp, Artificial Sequence
  Description of Artificial Sequence: Synthetic oligonucleotide
  Target: SCNA; (+) strand; PAM type: YTN; PAM sequence: TTT
tgttcttgtcatggttgtaa

SEQ ID NO: 74302 - DNA, 20 bp, Artificial Sequence
  Description of Artificial Sequence: Synthetic oligonucleotide
  Target: SCNA; (+) strand; PAM type: YTN; PAM sequence: TTT
gttcttgtcatggttgtaaa

SEQ ID NO: 74303 - DNA, 20 bp, Artificial Sequence
  Description of Artificial Sequence: Synthetic oligonucleotide
  Target: SCNA; (+) strand; PAM type: YTN; PAM sequence: TTG
ttcttgtcatggttgtaaaa

SEQ ID NO: 74304 - DNA, 20 bp, Artificial Sequence
  Description of Artificial Sequence: Synthetic oligonucleotide
  Target: SCNA; (+) strand; PAM type: YTN; PAM sequence: TTC
ttgtcatggttgtaaaaaca

SEQ ID NO: 74305 - DNA, 20 bp, Artificial Sequence
  Description of Artificial Sequence: Synthetic oligonucleotide
  Target: SCNA; (+) strand; PAM type: YTN; PAM sequence: CTT
gtcatggttgtaaaaacagt

SEQ ID NO: 74306 - DNA, 20 bp, Artificial Sequence
  Description of Artificial Sequence: Synthetic oligonucleotide
  Target: SCNA; (+) strand; PAM type: YTN; PAM sequence: TTG
tcatggttgtaaaaacagtc

SEQ ID NO: 74307 - DNA, 20 bp, Artificial Sequence
  Description of Artificial Sequence: Synthetic oligonucleotide
  Target: SCNA; (+) strand; PAM type: YTN; PAM sequence: TTG
taaaaacagtctttacttag

SEQ ID NO: 74308 - DNA, 20 bp, Artificial Sequence
  Description of Artificial Sequence: Synthetic oligonucleotide
  Target: SCNA; (+) strand; PAM type: YTN; PAM sequence: CTT
tacttagcaagtataaatgt

SEQ ID NO: 74309 - DNA, 20 bp, Artificial Sequence
  Description of Artificial Sequence: Synthetic oligonucleotide
  Target: SCNA; (+) strand; PAM type: YTN; PAM sequence: TTT
acttagcaagtataaatgtt

SEQ ID NO: 74310 - DNA, 20 bp, Artificial Sequence
  Description of Artificial Sequence: Synthetic oligonucleotide
  Target: SCNA; (+) strand; PAM type: YTN; PAM sequence: TTA
cttagcaagtataaatgtta

SEQ ID NO: 74311 - DNA, 20 bp, Artificial Sequence
  Description of Artificial Sequence: Synthetic oligonucleotide
  Target: SCNA; (+) strand; PAM type: YTN; PAM sequence: CTT
agcaagtataaatgttagca

SEQ ID NO: 74312 - DNA, 20 bp, Artificial Sequence
  Description of Artificial Sequence: Synthetic oligonucleotide
  Target: SCNA; (+) strand; PAM type: YTN; PAM sequence: TTA
gcaagtataaatgttagcaa

SEQ ID NO: 74313 - DNA, 20 bp, Artificial Sequence
  Description of Artificial Sequence: Synthetic oligonucleotide
  Target: SCNA; (+) strand; PAM type: YTN; PAM sequence: TTA
gcaagtataaatatgtttaa

SEQ ID NO: 74314 - DNA, 20 bp, Artificial Sequence
  Description of Artificial Sequence: Synthetic oligonucleotide
  Target: SCNA; (+) strand; PAM type: YTN; PAM sequence: TTT
aaacataaaaaataagacta

SEQ ID NO: 74315 - DNA, 20 bp, Artificial Sequence
  Description of Artificial Sequence: Synthetic oligonucleotide
  Target: SCNA; (+) strand; PAM type: YTN; PAM sequence: TTA
aacataaaaaataagactaa

SEQ ID NO: 74316 - DNA, 20 bp, Artificial Sequence
  Description of Artificial Sequence: Synthetic oligonucleotide
  Target: SCNA; (+) strand; PAM type: YTN; PAM sequence: CTA
aacaagaataaaaactgttt

SEQ ID NO: 74317 - DNA, 20 bp, Artificial Sequence
  Description of Artificial Sequence: Synthetic oligonucleotide
  Target: SCNA; (+) strand; PAM type: YTN; PAM sequence: CTG
tttttaactataattatcaa

SEQ ID NO: 74318 - DNA, 20 bp, Artificial Sequence
  Description of Artificial Sequence: Synthetic oligonucleotide
  Target: SCNA; (+) strand; PAM type: YTN; PAM sequence: TTT
ttaactataattatcaagtc

SEQ ID NO: 74319 - DNA, 20 bp, Artificial Sequence
  Description of Artificial Sequence: Synthetic oligonucleotide
  Target: SCNA; (+) strand; PAM type: YTN; PAM sequence: TTT
taactataattatcaagtct

SEQ ID NO: 74320 - DNA, 20 bp, Artificial Sequence
  Description of Artificial Sequence: Synthetic oligonucleotide
  Target: SCNA; (+) strand; PAM type: YTN; PAM sequence: TTT
aactataattatcaagtcta

SEQ ID NO: 74321 - DNA, 20 bp, Artificial Sequence
  Description of Artificial Sequence: Synthetic oligonucleotide
  Target: SCNA; (+) strand; PAM type: YTN; PAM sequence: TTA
actataattatcaagtctac

SEQ ID NO: 74322 - DNA, 20 bp, Artificial Sequence
  Description of Artificial Sequence: Synthetic oligonucleotide
  Target: SCNA; (+) strand; PAM type: YTN; PAM sequence: CTA
taattatcaagtctacaacc

SEQ ID NO: 74323 - DNA, 20 bp, Artificial Sequence
  Description of Artificial Sequence: Synthetic oligonucleotide
  Target: SCNA; (+) strand; PAM type: YTN; PAM sequence: TTA
tcaagtctacaacccaaaag

SEQ ID NO: 74324 - DNA, 20 bp, Artificial Sequence
  Description of Artificial Sequence: Synthetic oligonucleotide
  Target: SCNA; (+) strand; PAM type: YTN; PAM sequence: CTA
caacccaaaagtctttttcc

SEQ ID NO: 74325 - DNA, 20 bp, Artificial Sequence
  Description of Artificial Sequence: Synthetic oligonucleotide
  Target: SCNA; (+) strand; PAM type: YTN; PAM sequence: CTT
tttcccatccttgacacaat

SEQ ID NO: 74326 - DNA, 20 bp, Artificial Sequence
  Description of Artificial Sequence: Synthetic oligonucleotide
  Target: SCNA; (+) strand; PAM type: YTN; PAM sequence: TTT
ttcccatccttgacacaata

SEQ ID NO: 74327 - DNA, 20 bp, Artificial Sequence
  Description of Artificial Sequence: Synthetic oligonucleotide
  Target: SCNA; (+) strand; PAM type: YTN; PAM sequence: TTT
tcccatccttgacacaataa

SEQ ID NO: 74328 - DNA, 20 bp, Artificial Sequence
  Description of Artificial Sequence: Synthetic oligonucleotide
  Target: SCNA; (+) strand; PAM type: YTN; PAM sequence: TTT
cccatccttgacacaataac

SEQ ID NO: 74329 - DNA, 20 bp, Artificial Sequence
  Description of Artificial Sequence: Synthetic oligonucleotide
  Target: SCNA; (+) strand; PAM type: YTN; PAM sequence: TTC
ccatccttgacacaataaca

SEQ ID NO: 74330 - DNA, 20 bp, Artificial Sequence
  Description of Artificial Sequence: Synthetic oligonucleotide
  Target: SCNA; (+) strand; PAM type: YTN; PAM sequence: CTT
gacacaataacattcaaaca

SEQ ID NO: 74331 - DNA, 20 bp, Artificial Sequence
  Description of Artificial Sequence: Synthetic oligonucleotide
  Target: SCNA; (+) strand; PAM type: YTN; PAM sequence: TTG
acacaataacattcaaacat

SEQ ID NO: 74332 - DNA, 20 bp, Artificial Sequence
  Description of Artificial Sequence: Synthetic oligonucleotide
  Target: SCNA; (+) strand; PAM type: YTN; PAM sequence: TTC
aaacatgatttttaatgatc

SEQ ID NO: 74333 - DNA, 20 bp, Artificial Sequence
  Description of Artificial Sequence: Synthetic oligonucleotide
  Target: SCNA; (+) strand; PAM type: YTN; PAM sequence: TTT
ttaatgatctcgtagtacat

SEQ ID NO: 74334 - DNA, 20 bp, Artificial Sequence
  Description of Artificial Sequence: Synthetic oligonucleotide
  Target: SCNA; (+) strand; PAM type: YTN; PAM sequence: TTT
taatgatctcgtagtacatt

SEQ ID NO: 74335 - DNA, 20 bp, Artificial Sequence
  Description of Artificial Sequence: Synthetic oligonucleotide
  Target: SCNA; (+) strand; PAM type: YTN; PAM sequence: TTT
aatgatctcgtagtacattt

SEQ ID NO: 74336 - DNA, 20 bp, Artificial Sequence
  Description of Artificial Sequence: Synthetic oligonucleotide
  Target: SCNA; (+) strand; PAM type: YTN; PAM sequence: TTA
atgatctcgtagtacattta

SEQ ID NO: 74337 - DNA, 20 bp, Artificial Sequence
  Description of Artificial Sequence: Synthetic oligonucleotide
  Target: SCNA; (+) strand; PAM type: YTN; PAM sequence: CTC
gtagtacatttattgctaaa

SEQ ID NO: 74338 - DNA, 20 bp, Artificial Sequence
  Description of Artificial Sequence: Synthetic oligonucleotide
  Target: SCNA; (+) strand; PAM type: YTN; PAM sequence: TTT
attgctaaattgtactcaaa

SEQ ID NO: 74339 - DNA, 20 bp, Artificial Sequence
  Description of Artificial Sequence: Synthetic oligonucleotide
  Target: SCNA; (+) strand; PAM type: YTN; PAM sequence: TTA
ttgctaaattgtactcaaaa

SEQ ID NO: 74340 - DNA, 20 bp, Artificial Sequence
  Description of Artificial Sequence: Synthetic oligonucleotide
  Target: SCNA; (+) strand; PAM type: YTN; PAM sequence: TTG
ctaaattgtactcaaaataa

SEQ ID NO: 74341 - DNA, 20 bp, Artificial Sequence
  Description of Artificial Sequence: Synthetic oligonucleotide
  Target: SCNA; (+) strand; PAM type: YTN; PAM sequence: CTA
aattgtactcaaaataatgt

SEQ ID NO: 74342 - DNA, 20 bp, Artificial Sequence
  Description of Artificial Sequence: Synthetic oligonucleotide
  Target: SCNA; (+) strand; PAM type: YTN; PAM sequence: TTG
tactcaaaataatgtttcat

SEQ ID NO: 74343 - DNA, 20 bp, Artificial Sequence
  Description of Artificial Sequence: Synthetic oligonucleotide
  Target: SCNA; (+) strand; PAM type: YTN; PAM sequence: CTC
aaaataatgtttcattttac

SEQ ID NO: 74344 - DNA, 20 bp, Artificial Sequence
  Description of Artificial Sequence: Synthetic oligonucleotide
  Target: SCNA; (+) strand; PAM type: YTN; PAM sequence: TTT
cattttacttaagtggcaca

SEQ ID NO: 74345 - DNA, 20 bp, Artificial Sequence
  Description of Artificial Sequence: Synthetic oligonucleotide
  Target: SCNA; (+) strand; PAM type: YTN; PAM sequence: TTC
attttacttaagtggcacaa

SEQ ID NO: 74346 - DNA, 20 bp, Artificial Sequence
  Description of Artificial Sequence: Synthetic oligonucleotide
  Target: SCNA; (+) strand; PAM type: YTN; PAM sequence: TTT
tacttaagtggcacaagccc

SEQ ID NO: 74347 - DNA, 20 bp, Artificial Sequence
  Description of Artificial Sequence: Synthetic oligonucleotide
  Target: SCNA; (+) strand; PAM type: YTN; PAM sequence: TTT
acttaagtggcacaagcccc

SEQ ID NO: 74348 - DNA, 20 bp, Artificial Sequence
  Description of Artificial Sequence: Synthetic oligonucleotide
  Target: SCNA; (+) strand; PAM type: YTN; PAM sequence: TTA
cttaagtggcacaagccccc

SEQ ID NO: 74349 - DNA, 20 bp, Artificial Sequence
  Description of Artificial Sequence: Synthetic oligonucleotide
  Target: SCNA; (+) strand; PAM type: YTN; PAM sequence: CTT
aagtggcacaagccccctgt

SEQ ID NO: 74350 - DNA, 20 bp, Artificial Sequence
  Description of Artificial Sequence: Synthetic oligonucleotide
  Target: SCNA; (+) strand; PAM type: YTN; PAM sequence: TTA
agtggcacaagccccctgta

SEQ ID NO: 74351 - DNA, 20 bp, Artificial Sequence
  Description of Artificial Sequence: Synthetic oligonucleotide
  Target: SCNA; (+) strand; PAM type: YTN; PAM sequence: CTG
taggtatgattacattccgc

SEQ ID NO: 74352 - DNA, 20 bp, Artificial Sequence
  Description of Artificial Sequence: Synthetic oligonucleotide
  Target: SCNA; (+) strand; PAM type: YTN; PAM sequence: TTA
cattccgcatactaattctt

SEQ ID NO: 74353 - DNA, 20 bp, Artificial Sequence
  Description of Artificial Sequence: Synthetic oligonucleotide
  Target: SCNA; (+) strand; PAM type: YTN; PAM sequence: TTC
cgcatactaattcttcttga

SEQ ID NO: 74354 - DNA, 20 bp, Artificial Sequence
  Description of Artificial Sequence: Synthetic oligonucleotide
  Target: SCNA; (+) strand; PAM type: YTN; PAM sequence: CTA
attcttcttgagctcactga

SEQ ID NO: 74355 - DNA, 20 bp, Artificial Sequence
  Description of Artificial Sequence: Synthetic oligonucleotide
  Target: SCNA; (+) strand; PAM type: YTN; PAM sequence: TTC
ttcttgagctcactgacaga

SEQ ID NO: 74356 - DNA, 20 bp, Artificial Sequence
  Description of Artificial Sequence: Synthetic oligonucleotide
  Target: SCNA; (+) strand; PAM type: YTN; PAM sequence: CTT
cttgagctcactgacagaag

SEQ ID NO: 74357 - DNA, 20 bp, Artificial Sequence
  Description of Artificial Sequence: Synthetic oligonucleotide
  Target: SCNA; (+) strand; PAM type: YTN; PAM sequence: TTC
ttgagctcactgacagaagt

SEQ ID NO: 74358 - DNA, 20 bp, Artificial Sequence
  Description of Artificial Sequence: Synthetic oligonucleotide
  Target: SCNA; (+) strand; PAM type: YTN; PAM sequence: CTT
gagctcactgacagaagtga

SEQ ID NO: 74359 - DNA, 20 bp, Artificial Sequence
  Description of Artificial Sequence: Synthetic oligonucleotide
  Target: SCNA; (+) strand; PAM type: YTN; PAM sequence: TTG
agctcactgacagaagtgac

SEQ ID NO: 74360 - DNA, 20 bp, Artificial Sequence
  Description of Artificial Sequence: Synthetic oligonucleotide
  Target: SCNA; (+) strand; PAM type: YTN; PAM sequence: CTC
actgacagaagtgactatgt

SEQ ID NO: 74361 - DNA, 20 bp, Artificial Sequence
  Description of Artificial Sequence: Synthetic oligonucleotide
  Target: SCNA; (+) strand; PAM type: YTN; PAM sequence: CTG
acagaagtgactatgtcttc

SEQ ID NO: 74362 - DNA, 20 bp, Artificial Sequence
  Description of Artificial Sequence: Synthetic oligonucleotide
  Target: SCNA; (+) strand; PAM type: YTN; PAM sequence: CTA
tgtcttcttataaaatttct

SEQ ID NO: 74363 - DNA, 20 bp, Artificial Sequence
  Description of Artificial Sequence: Synthetic oligonucleotide
  Target: SCNA; (+) strand; PAM type: YTN; PAM sequence: CTT
cttataaaatttctatactc

SEQ ID NO: 74364 - DNA, 20 bp, Artificial Sequence
  Description of Artificial Sequence: Synthetic oligonucleotide
  Target: SCNA; (+) strand; PAM type: YTN; PAM sequence: TTC
ttataaaatttctatactcc

SEQ ID NO: 74365 - DNA, 20 bp, Artificial Sequence
  Description of Artificial Sequence: Synthetic oligonucleotide
  Target: SCNA; (+) strand; PAM type: YTN; PAM sequence: CTT
ataaaatttctatactccca

SEQ ID NO: 74366 - DNA, 20 bp, Artificial Sequence
  Description of Artificial Sequence: Synthetic oligonucleotide
  Target: SCNA; (+) strand; PAM type: YTN; PAM sequence: TTA
taaaatttctatactcccat

SEQ ID NO: 74367 - DNA, 20 bp, Artificial Sequence
  Description of Artificial Sequence: Synthetic oligonucleotide
  Target: SCNA; (+) strand; PAM type: YTN; PAM sequence: TTT
ctatactcccatgatctagc

SEQ ID NO: 74368 - DNA, 20 bp, Artificial Sequence
  Description of Artificial Sequence: Synthetic oligonucleotide
  Target: SCNA; (+) strand; PAM type: YTN; PAM sequence: TTC
tatactcccatgatctagct

SEQ ID NO: 74369 - DNA, 20 bp, Artificial Sequence
  Description of Artificial Sequence: Synthetic oligonucleotide
  Target: SCNA; (+) strand; PAM type: YTN; PAM sequence: CTA
tactcccatgatctagctta

SEQ ID NO: 74370 - DNA, 20 bp, Artificial Sequence
  Description of Artificial Sequence: Synthetic oligonucleotide
  Target: SCNA; (+) strand; PAM type: YTN; PAM sequence: CTC
ccatgatctagcttagtttc

SEQ ID NO: 74371 - DNA, 20 bp, Artificial Sequence
  Description of Artificial Sequence: Synthetic oligonucleotide
  Target: SCNA; (+) strand; PAM type: YTN; PAM sequence: CTA
gcttagtttcaaccaaataa

SEQ ID NO: 74372 - DNA, 20 bp, Artificial Sequence
  Description of Artificial Sequence: Synthetic oligonucleotide
  Target: SCNA; (+) strand; PAM type: YTN; PAM sequence: CTT
agtttcaaccaaataaacgg

SEQ ID NO: 74373 - DNA, 20 bp, Artificial Sequence
  Description of Artificial Sequence: Synthetic oligonucleotide
  Target: SCNA; (+) strand; PAM type: YTN; PAM sequence: TTA
gtttcaaccaaataaacggc

SEQ ID NO: 74374 - DNA, 20 bp, Artificial Sequence
  Description of Artificial Sequence: Synthetic oligonucleotide
  Target: SCNA; (+) strand; PAM type: YTN; PAM sequence: TTT
caaccaaataaacggcattc

SEQ ID NO: 74375 - DNA, 20 bp, Artificial Sequence
  Description of Artificial Sequence: Synthetic oligonucleotide
  Target: SCNA; (+) strand; PAM type: YTN; PAM sequence: TTC
aaccaaataaacggcattca

SEQ ID NO: 74376 - DNA, 20 bp, Artificial Sequence
  Description of Artificial Sequence: Synthetic oligonucleotide
  Target: SCNA; (+) strand; PAM type: YTN; PAM sequence: TTC
agtttatatttgctgaaggg

SEQ ID NO: 74377 - DNA, 20 bp, Artificial Sequence
  Description of Artificial Sequence: Synthetic oligonucleotide
  Target: SCNA; (+) strand; PAM type: YTN; PAM sequence: TTT
atatttgctgaagggaagat

SEQ ID NO: 74378 - DNA, 20 bp, Artificial Sequence
  Description of Artificial Sequence: Synthetic oligonucleotide
  Target: SCNA; (+) strand; PAM type: YTN; PAM sequence: TTA
tatttgctgaagggaagata

SEQ ID NO: 74379 - DNA, 20 bp, Artificial Sequence
  Description of Artificial Sequence: Synthetic oligonucleotide
  Target: SCNA; (+) strand; PAM type: YTN; PAM sequence: TTT
gctgaagggaagataatctc

SEQ ID NO: 74380 - DNA, 20 bp, Artificial Sequence
  Description of Artificial Sequence: Synthetic oligonucleotide
  Target: SCNA; (+) strand; PAM type: YTN; PAM sequence: TTG
ctgaagggaagataatctcc

SEQ ID NO: 74381 - DNA, 20 bp, Artificial Sequence
  Description of Artificial Sequence: Synthetic oligonucleotide
  Target: SCNA; (+) strand; PAM type: YTN; PAM sequence: CTG
aagggaagataatctccttc

SEQ ID NO: 74382 - DNA, 20 bp, Artificial Sequence
  Description of Artificial Sequence: Synthetic oligonucleotide
  Target: SCNA; (+) strand; PAM type: YTN; PAM sequence: CTC
cttctagttagcatctatcc

SEQ ID NO: 74383 - DNA, 20 bp, Artificial Sequence
  Description of Artificial Sequence: Synthetic oligonucleotide
  Target: SCNA; (+) strand; PAM type: YTN; PAM sequence: CTT
ctagttagcatctatccaca

SEQ ID NO: 74384 - DNA, 20 bp, Artificial Sequence
  Description of Artificial Sequence: Synthetic oligonucleotide
  Target: SCNA; (+) strand; PAM type: YTN; PAM sequence: TTC
tagttagcatctatccacac

SEQ ID NO: 74385 - DNA, 20 bp, Artificial Sequence
  Description of Artificial Sequence: Synthetic oligonucleotide
  Target: SCNA; (+) strand; PAM type: YTN; PAM sequence: CTA
gttagcatctatccacacac

SEQ ID NO: 74386 - DNA, 20 bp, Artificial Sequence
  Description of Artificial Sequence: Synthetic oligonucleotide
  Target: SCNA; (+) strand; PAM type: YTN; PAM sequence: TTA
gcatctatccacacacagtg

SEQ ID NO: 74387 - DNA, 20 bp, Artificial Sequence
  Description of Artificial Sequence: Synthetic oligonucleotide
  Target: SCNA; (+) strand; PAM type: YTN; PAM sequence: CTA
tccacacacagtgcttaata

SEQ ID NO: 74388 - DNA, 20 bp, Artificial Sequence
  Description of Artificial Sequence: Synthetic oligonucleotide
  Target: SCNA; (+) strand; PAM type: YTN; PAM sequence: CTT
aataacagattgtatcagag

SEQ ID NO: 74389 - DNA, 20 bp, Artificial Sequence
  Description of Artificial Sequence: Synthetic oligonucleotide
  Target: SCNA; (+) strand; PAM type: YTN; PAM sequence: TTA
ataacagattgtatcagagt

SEQ ID NO: 74390 - DNA, 20 bp, Artificial Sequence
  Description of Artificial Sequence: Synthetic oligonucleotide
  Target: SCNA; (+) strand; PAM type: YTN; PAM sequence: TTG
tatcagagtttgctagttgt

SEQ ID NO: 74391 - DNA, 20 bp, Artificial Sequence
  Description of Artificial Sequence: Synthetic oligonucleotide
  Target: SCNA; (+) strand; PAM type: YTN; PAM sequence: TTT
gctagttgtccaccaaaatc

SEQ ID NO: 74392 - DNA, 20 bp, Artificial Sequence
  Description of Artificial Sequence: Synthetic oligonucleotide
  Target: SCNA; (+) strand; PAM type: YTN; PAM sequence: TTG
ctagttgtccaccaaaatct

SEQ ID NO: 74393 - DNA, 20 bp, Artificial Sequence
  Description of Artificial Sequence: Synthetic oligonucleotide
  Target: SCNA; (+) strand; PAM type: YTN; PAM sequence: CTA
gttgtccaccaaaatctgtt

SEQ ID NO: 74394 - DNA, 20 bp, Artificial Sequence
  Description of Artificial Sequence: Synthetic oligonucleotide
  Target: SCNA; (+) strand; PAM type: YTN; PAM sequence: TTG
tccaccaaaatctgttctcc

SEQ ID NO: 74395 - DNA, 20 bp, Artificial Sequence
  Description of Artificial Sequence: Synthetic oligonucleotide
  Target: SCNA; (+) strand; PAM type: YTN; PAM sequence: CTG
ttctcccttctttgtcaggg

SEQ ID NO: 74396 - DNA, 20 bp, Artificial Sequence
  Description of Artificial Sequence: Synthetic oligonucleotide
  Target: SCNA; (+) strand; PAM type: YTN; PAM sequence: TTC
tcccttctttgtcagggcat

SEQ ID NO: 74397 - DNA, 20 bp, Artificial Sequence
  Description of Artificial Sequence: Synthetic oligonucleotide
  Target: SCNA; (+) strand; PAM type: YTN; PAM sequence: CTC
ccttctttgtcagggcatat

SEQ ID NO: 74398 - DNA, 20 bp, Artificial Sequence
  Description of Artificial Sequence: Synthetic oligonucleotide
  Target: SCNA; (+) strand; PAM type: YTN; PAM sequence: CTT
ctttgtcagggcatatggct

SEQ ID NO: 74399 - DNA, 20 bp, Artificial Sequence
  Description of Artificial Sequence: Synthetic oligonucleotide
  Target: SCNA; (+) strand; PAM type: YTN; PAM sequence: TTC
tttgtcagggcatatggcta

SEQ ID NO: 74400 - DNA, 20 bp, Artificial Sequence
  Description of Artificial Sequence: Synthetic oligonucleotide
  Target: SCNA; (+) strand; PAM type: YTN; PAM sequence: CTT
tgtcagggcatatggctata

SEQ ID NO: 74401 - DNA, 20 bp, Artificial Sequence
  Description of Artificial Sequence: Synthetic oligonucleotide
  Target: SCNA; (+) strand; PAM type: YTN; PAM sequence: TTT
gtcagggcatatggctatat

SEQ ID NO: 74402 - DNA, 20 bp, Artificial Sequence
  Description of Artificial Sequence: Synthetic oligonucleotide
  Target: SCNA; (+) strand; PAM type: YTN; PAM sequence: TTG
tcagggcatatggctatata

SEQ ID NO: 74403 - DNA, 20 bp, Artificial Sequence
  Description of Artificial Sequence: Synthetic oligonucleotide
  Target: SCNA; (+) strand; PAM type: YTN; PAM sequence: CTA
tatactacaattttctgtct

SEQ ID NO: 74404 - DNA, 20 bp, Artificial Sequence
  Description of Artificial Sequence: Synthetic oligonucleotide
  Target: SCNA; (+) strand; PAM type: YTN; PAM sequence: CTA
caattttctgtctaccttga

SEQ ID NO: 74405 - DNA, 20 bp, Artificial Sequence
  Description of Artificial Sequence: Synthetic oligonucleotide
  Target: SCNA; (+) strand; PAM type: YTN; PAM sequence: TTT
tctgtctaccttgaataaat

SEQ ID NO: 74406 - DNA, 20 bp, Artificial Sequence
  Description of Artificial Sequence: Synthetic oligonucleotide
  Target: SCNA; (+) strand; PAM type: YTN; PAM sequence: TTT
ctgtctaccttgaataaatt

SEQ ID NO: 74407 - DNA, 20 bp, Artificial Sequence
  Description of Artificial Sequence: Synthetic oligonucleotide
  Target: SCNA; (+) strand; PAM type: YTN; PAM sequence: TTC
tgtctaccttgaataaattg

SEQ ID NO: 74408 - DNA, 20 bp, Artificial Sequence
  Description of Artificial Sequence: Synthetic oligonucleotide
  Target: SCNA; (+) strand; PAM type: YTN; PAM sequence: CTG
tctaccttgaataaattgtg

SEQ ID NO: 74409 - DNA, 20 bp, Artificial Sequence
  Description of Artificial Sequence: Synthetic oligonucleotide
  Target: SCNA; (+) strand; PAM type: YTN; PAM sequence: CTA
ccttgaataaattgtggctg

SEQ ID NO: 74410 - DNA, 20 bp, Artificial Sequence
  Description of Artificial Sequence: Synthetic oligonucleotide
  Target: SCNA; (+) strand; PAM type: YTN; PAM sequence: CTT
gaataaattgtggctggtat

SEQ ID NO: 74411 - DNA, 20 bp, Artificial Sequence
  Description of Artificial Sequence: Synthetic oligonucleotide
  Target: SCNA; (+) strand; PAM type: YTN; PAM sequence: TTG
aataaattgtggctggtatc

SEQ ID NO: 74412 - DNA, 20 bp, Artificial Sequence
  Description of Artificial Sequence: Synthetic oligonucleotide
  Target: SCNA; (+) strand; PAM type: YTN; PAM sequence: TTG
tggctggtatccaaaggaat

SEQ ID NO: 74413 - DNA, 20 bp, Artificial Sequence
  Description of Artificial Sequence: Synthetic oligonucleotide
  Target: SCNA; (+) strand; PAM type: YTN; PAM sequence: CTG
gtatccaaaggaatgagaaa

SEQ ID NO: 74414 - DNA, 20 bp, Artificial Sequence
  Description of Artificial Sequence: Synthetic oligonucleotide
  Target: SCNA; (+) strand; PAM type: YTN; PAM sequence: CTA
cttcgaagtgggtatggatg

SEQ ID NO: 74415 - DNA, 20 bp, Artificial Sequence
  Description of Artificial Sequence: Synthetic oligonucleotide
  Target: SCNA; (+) strand; PAM type: YTN; PAM sequence: CTT
cgaagtgggtatggatgcat

SEQ ID NO: 74416 - DNA, 20 bp, Artificial Sequence
  Description of Artificial Sequence: Synthetic oligonucleotide
  Target: SCNA; (+) strand; PAM type: YTN; PAM sequence: TTC
gaagtgggtatggatgcatc

SEQ ID NO: 74417 - DNA, 20 bp, Artificial Sequence
  Description of Artificial Sequence: Synthetic oligonucleotide
  Target: SCNA; (+) strand; PAM type: YTN; PAM sequence: CTC
agaagacggtggggctgcaa

SEQ ID NO: 74418 - DNA, 20 bp, Artificial Sequence
  Description of Artificial Sequence: Synthetic oligonucleotide
  Target: SCNA; (+) strand; PAM type: YTN; PAM sequence: CTG
caacttgggaggagtctggg

SEQ ID NO: 74419 - DNA, 20 bp, Artificial Sequence
  Description of Artificial Sequence: Synthetic oligonucleotide
  Target: SCNA; (+) strand; PAM type: YTN; PAM sequence: CTT
gggaggagtctgggttcctc

SEQ ID NO: 74420 - DNA, 20 bp, Artificial Sequence
  Description of Artificial Sequence: Synthetic oligonucleotide
  Target: SCNA; (+) strand; PAM type: YTN; PAM sequence: TTG
ggaggagtctgggttcctca

SEQ ID NO: 74421 - DNA, 20 bp, Artificial Sequence
  Description of Artificial Sequence: Synthetic oligonucleotide
  Target: SCNA; (+) strand; PAM type: YTN; PAM sequence: CTG
ggttcctcaatctccctaag

SEQ ID NO: 74422 - DNA, 20 bp, Artificial Sequence
  Description of Artificial Sequence: Synthetic oligonucleotide
  Target: SCNA; (+) strand; PAM type: YTN; PAM sequence: TTC
ctcaatctccctaagggaga

SEQ ID NO: 74423 - DNA, 20 bp, Artificial Sequence
  Description of Artificial Sequence: Synthetic oligonucleotide
  Target: SCNA; (+) strand; PAM type: YTN; PAM sequence: CTC
aatctccctaagggagaaac

SEQ ID NO: 74424 - DNA, 20 bp, Artificial Sequence
  Description of Artificial Sequence: Synthetic oligonucleotide
  Target: SCNA; (+) strand; PAM type: YTN; PAM sequence: CTC
cctaagggagaaactcaccc

SEQ ID NO: 74425 - DNA, 20 bp, Artificial Sequence
  Description of Artificial Sequence: Synthetic oligonucleotide
  Target: SCNA; (+) strand; PAM type: YTN; PAM sequence: CTA
agggagaaactcacccacct

SEQ ID NO: 74426 - DNA, 20 bp, Artificial Sequence
  Description of Artificial Sequence: Synthetic oligonucleotide
  Target: SCNA; (+) strand; PAM type: YTN; PAM sequence: CTC
acccacctgccaaaaacacc

SEQ ID NO: 74427 - DNA, 20 bp, Artificial Sequence
  Description of Artificial Sequence: Synthetic oligonucleotide
  Target: SCNA; (+) strand; PAM type: YTN; PAM sequence: CTG
ccaaaaacacctaccatgga

SEQ ID NO: 74428 - DNA, 20 bp, Artificial Sequence
  Description of Artificial Sequence: Synthetic oligonucleotide
  Target: SCNA; (+) strand; PAM type: YTN; PAM sequence: CTA
ccatggacttatgtgaatga

SEQ ID NO: 74429 - DNA, 20 bp, Artificial Sequence
  Description of Artificial Sequence: Synthetic oligonucleotide
  Target: SCNA; (+) strand; PAM type: YTN; PAM sequence: CTT
atgtgaatgagaatcaacct

SEQ ID NO: 74430 - DNA, 20 bp, Artificial Sequence
  Description of Artificial Sequence: Synthetic oligonucleotide
  Target: SCNA; (+) strand; PAM type: YTN; PAM sequence: TTA
tgtgaatgagaatcaacctc

SEQ ID NO: 74431 - DNA, 20 bp, Artificial Sequence
  Description of Artificial Sequence: Synthetic oligonucleotide
  Target: SCNA; (+) strand; PAM type: YTN; PAM sequence: CTC
tactgtgtttgagcatttta

SEQ ID NO: 74432 - DNA, 20 bp, Artificial Sequence
  Description of Artificial Sequence: Synthetic oligonucleotide
  Target: SCNA; (+) strand; PAM type: YTN; PAM sequence: CTA
ctgtgtttgagcattttaat

SEQ ID NO: 74433 - DNA, 20 bp, Artificial Sequence
  Description of Artificial Sequence: Synthetic oligonucleotide
  Target: SCNA; (+) strand; PAM type: YTN; PAM sequence: CTG
tgtttgagcattttaattga

SEQ ID NO: 74434 - DNA, 20 bp, Artificial Sequence
  Description of Artificial Sequence: Synthetic oligonucleotide
  Target: SCNA; (+) strand; PAM type: YTN; PAM sequence: TTT
gagcattttaattgacattc

SEQ ID NO: 74435 - DNA, 20 bp, Artificial Sequence
  Description of Artificial Sequence: Synthetic oligonucleotide
  Target: SCNA; (+) strand; PAM type: YTN; PAM sequence: TTG
agcattttaattgacattca

SEQ ID NO: 74436 - DNA, 20 bp, Artificial Sequence
  Description of Artificial Sequence: Synthetic oligonucleotide
  Target: SCNA; (+) strand; PAM type: YTN; PAM sequence: TTT
taattgacattcatttaaca

SEQ ID NO: 74437 - DNA, 20 bp, Artificial Sequence
  Description of Artificial Sequence: Synthetic oligonucleotide
  Target: SCNA; (+) strand; PAM type: YTN; PAM sequence: TTT
aattgacattcatttaacac

SEQ ID NO: 74438 - DNA, 20 bp, Artificial Sequence
  Description of Artificial Sequence: Synthetic oligonucleotide
  Target: SCNA; (+) strand; PAM type: YTN; PAM sequence: TTA
attgacattcatttaacact

SEQ ID NO: 74439 - DNA, 20 bp, Artificial Sequence
  Description of Artificial Sequence: Synthetic oligonucleotide
  Target: SCNA; (+) strand; PAM type: YTN; PAM sequence: TTG
acattcatttaacactattt

SEQ ID NO: 74440 - DNA, 20 bp, Artificial Sequence
  Description of Artificial Sequence: Synthetic oligonucleotide
  Target: SCNA; (+) strand; PAM type: YTN; PAM sequence: TTC
atttaacactatttaatata

SEQ ID NO: 74441 - DNA, 20 bp, Artificial Sequence
  Description of Artificial Sequence: Synthetic oligonucleotide
  Target: SCNA; (+) strand; PAM type: YTN; PAM sequence: TTT
aacactatttaatatacaga

SEQ ID NO: 74442 - DNA, 20 bp, Artificial Sequence
  Description of Artificial Sequence: Synthetic oligonucleotide
  Target: SCNA; (+) strand; PAM type: YTN; PAM sequence: TTA
acactatttaatatacagat

SEQ ID NO: 74443 - DNA, 20 bp, Artificial Sequence
  Description of Artificial Sequence: Synthetic oligonucleotide
  Target: SCNA; (+) strand; PAM type: YTN; PAM sequence: CTA
tttaatatacagatgttcag

SEQ ID NO: 74444 - DNA, 20 bp, Artificial Sequence
  Description of Artificial Sequence: Synthetic oligonucleotide
  Target: SCNA; (+) strand; PAM type: YTN; PAM sequence: TTT
aatatacagatgttcagtag

SEQ ID NO: 74445 - DNA, 20 bp, Artificial Sequence
  Description of Artificial Sequence: Synthetic oligonucleotide
  Target: SCNA; (+) strand; PAM type: YTN; PAM sequence: TTA
atatacagatgttcagtaga

SEQ ID NO: 74446 - DNA, 20 bp, Artificial Sequence
  Description of Artificial Sequence: Synthetic oligonucleotide
  Target: SCNA; (+) strand; PAM type: YTN; PAM sequence: TTC
agtagatgttcactaaatga

SEQ ID NO: 74447 - DNA, 20 bp, Artificial Sequence
  Description of Artificial Sequence: Synthetic oligonucleotide
  Target: SCNA; (+) strand; PAM type: YTN; PAM sequence: TTC
actaaatgaattaagttttt

SEQ ID NO: 74448 - DNA, 20 bp, Artificial Sequence
  Description of Artificial Sequence: Synthetic oligonucleotide
  Target: SCNA; (+) strand; PAM type: YTN; PAM sequence: CTA
aatgaattaagtttttgtag

SEQ ID NO: 74449 - DNA, 20 bp, Artificial Sequence
  Description of Artificial Sequence: Synthetic oligonucleotide
  Target: SCNA; (+) strand; PAM type: YTN; PAM sequence: TTA
agtttttgtagtttgatttt

SEQ ID NO: 74450 - DNA, 20 bp, Artificial Sequence
  Description of Artificial Sequence: Synthetic oligonucleotide
  Target: SCNA; (+) strand; PAM type: YTN; PAM sequence: TTT
ttgtagtttgattttctgaa

SEQ ID NO: 74451 - DNA, 20 bp, Artificial Sequence
  Description of Artificial Sequence: Synthetic oligonucleotide
  Target: SCNA; (+) strand; PAM type: YTN; PAM sequence: TTT
tgtagtttgattttctgaag

SEQ ID NO: 74452 - DNA, 20 bp, Artificial Sequence
  Description of Artificial Sequence: Synthetic oligonucleotide
  Target: SCNA; (+) strand; PAM type: YTN; PAM sequence: TTT
gtagtttgattttctgaaga

SEQ ID NO: 74453 - DNA, 20 bp, Artificial Sequence
  Description of Artificial Sequence: Synthetic oligonucleotide
  Target: SCNA; (+) strand; PAM type: YTN; PAM sequence: TTG
tagtttgattttctgaagaa

SEQ ID NO: 74454 - DNA, 20 bp, Artificial Sequence
  Description of Artificial Sequence: Synthetic oligonucleotide
  Target: SCNA; (+) strand; PAM type: YTN; PAM sequence: TTT
gattttctgaagaatttgaa

SEQ ID NO: 74455 - DNA, 20 bp, Artificial Sequence
  Description of Artificial Sequence: Synthetic oligonucleotide
  Target: SCNA; (+) strand; PAM type: YTN; PAM sequence: TTG
attttctgaagaatttgaaa

SEQ ID NO: 74456 - DNA, 20 bp, Artificial Sequence
  Description of Artificial Sequence: Synthetic oligonucleotide
  Target: SCNA; (+) strand; PAM type: YTN; PAM sequence: TTT
tctgaagaatttgaaacaga

SEQ ID NO: 74457 - DNA, 20 bp, Artificial Sequence
  Description of Artificial Sequence: Synthetic oligonucleotide
  Target: SCNA; (+) strand; PAM type: YTN; PAM sequence: TTT
ctgaagaatttgaaacagat

SEQ ID NO: 74458 - DNA, 20 bp, Artificial Sequence
  Description of Artificial Sequence: Synthetic oligonucleotide
  Target: SCNA; (+) strand; PAM type: YTN; PAM sequence: TTC
tgaagaatttgaaacagatc

SEQ ID NO: 74459 - DNA, 20 bp, Artificial Sequence
  Description of Artificial Sequence: Synthetic oligonucleotide
  Target: SCNA; (+) strand; PAM type: YTN; PAM sequence: CTG
aagaatttgaaacagatcaa

SEQ ID NO: 74460 - DNA, 20 bp, Artificial Sequence
  Description of Artificial Sequence: Synthetic oligonucleotide
  Target: SCNA; (+) strand; PAM type: YTN; PAM sequence: TTT
gaaacagatcaaatgtatag

SEQ ID NO: 74461 - DNA, 20 bp, Artificial Sequence
  Description of Artificial Sequence: Synthetic oligonucleotide
  Target: SCNA; (+) strand; PAM type: YTN; PAM sequence: TTG
aaacagatcaaatgtataga

SEQ ID NO: 74462 - DNA, 20 bp, Artificial Sequence
  Description of Artificial Sequence: Synthetic oligonucleotide
  Target: SCNA; (+) strand; PAM type: YTN; PAM sequence: TTT
caagaacagtcaaagagtcc

SEQ ID NO: 74463 - DNA, 20 bp, Artificial Sequence
  Description of Artificial Sequence: Synthetic oligonucleotide
  Target: SCNA; (+) strand; PAM type: YTN; PAM sequence: TTC
aagaacagtcaaagagtccc

SEQ ID NO: 74464 - DNA, 20 bp, Artificial Sequence
  Description of Artificial Sequence: Synthetic oligonucleotide
  Target: SCNA; (+) strand; PAM type: YTN; PAM sequence: CTC
tatccacttcacccagaatt

SEQ ID NO: 74465 - DNA, 20 bp, Artificial Sequence
  Description of Artificial Sequence: Synthetic oligonucleotide
  Target: SCNA; (+) strand; PAM type: YTN; PAM sequence: CTA
tccacttcacccagaattcc

SEQ ID NO: 74466 - DNA, 20 bp, Artificial Sequence
  Description of Artificial Sequence: Synthetic oligonucleotide
  Target: SCNA; (+) strand; PAM type: YTN; PAM sequence: CTT
cacccagaattcctaattgt

SEQ ID NO: 74467 - DNA, 20 bp, Artificial Sequence
  Description of Artificial Sequence: Synthetic oligonucleotide
  Target: SCNA; (+) strand; PAM type: YTN; PAM sequence: TTC
acccagaattcctaattgtt

SEQ ID NO: 74468 - DNA, 20 bp, Artificial Sequence
  Description of Artificial Sequence: Synthetic oligonucleotide
  Target: SCNA; (+) strand; PAM type: YTN; PAM sequence: TTC
ctaattgttaacattttacc

SEQ ID NO: 74469 - DNA, 20 bp, Artificial Sequence
  Description of Artificial Sequence: Synthetic oligonucleotide
  Target: SCNA; (+) strand; PAM type: YTN; PAM sequence: CTA
attgttaacattttacctca

SEQ ID NO: 74470 - DNA, 20 bp, Artificial Sequence
  Description of Artificial Sequence: Synthetic oligonucleotide
  Target: SCNA; (+) strand; PAM type: YTN; PAM sequence: TTG
ttaacattttacctcatttg

SEQ ID NO: 74471 - DNA, 20 bp, Artificial Sequence
  Description of Artificial Sequence: Synthetic oligonucleotide
  Target: SCNA; (+) strand; PAM type: YTN; PAM sequence: TTA
acattttacctcatttgctc

SEQ ID NO: 74472 - DNA, 20 bp, Artificial Sequence
  Description of Artificial Sequence: Synthetic oligonucleotide
  Target: SCNA; (+) strand; PAM type: YTN; PAM sequence: TTT
tacctcatttgctccctctg

SEQ ID NO: 74473 - DNA, 20 bp, Artificial Sequence
  Description of Artificial Sequence: Synthetic oligonucleotide
  Target: SCNA; (+) strand; PAM type: YTN; PAM sequence: TTT
acctcatttgctccctctgc

SEQ ID NO: 74474 - DNA, 20 bp, Artificial Sequence
  Description of Artificial Sequence: Synthetic oligonucleotide
  Target: SCNA; (+) strand; PAM type: YTN; PAM sequence: TTA
cctcatttgctccctctgcc

SEQ ID NO: 74475 - DNA, 20 bp, Artificial Sequence
  Description of Artificial Sequence: Synthetic oligonucleotide
  Target: SCNA; (+) strand; PAM type: YTN; PAM sequence: CTC
atttgctccctctgcctaac

SEQ ID NO: 74476 - DNA, 20 bp, Artificial Sequence
  Description of Artificial Sequence: Synthetic oligonucleotide
  Target: SCNA; (+) strand; PAM type: YTN; PAM sequence: TTT
gctccctctgcctaacacat

SEQ ID NO: 74477 - DNA, 20 bp, Artificial Sequence
  Description of Artificial Sequence: Synthetic oligonucleotide
  Target: SCNA; (+) strand; PAM type: YTN; PAM sequence: TTG
ctccctctgcctaacacatg

SEQ ID NO: 74478 - DNA, 20 bp, Artificial Sequence
  Description of Artificial Sequence: Synthetic oligonucleotide
  Target: SCNA; (+) strand; PAM type: YTN; PAM sequence: CTC
cctctgcctaacacatggat

SEQ ID NO: 74479 - DNA, 20 bp, Artificial Sequence
  Description of Artificial Sequence: Synthetic oligonucleotide
  Target: SCNA; (+) strand; PAM type: YTN; PAM sequence: CTC
tgcctaacacatggatgtat

SEQ ID NO: 74480 - DNA, 20 bp, Artificial Sequence
  Description of Artificial Sequence: Synthetic oligonucleotide
  Target: SCNA; (+) strand; PAM type: YTN; PAM sequence: CTG
cctaacacatggatgtattt

SEQ ID NO: 74481 - DNA, 20 bp, Artificial Sequence
  Description of Artificial Sequence: Synthetic oligonucleotide
  Target: SCNA; (+) strand; PAM type: YTN; PAM sequence: CTA
acacatggatgtatttgtgc

SEQ ID NO: 74482 - DNA, 20 bp, Artificial Sequence
  Description of Artificial Sequence: Synthetic oligonucleotide
  Target: SCNA; (+) strand; PAM type: YTN; PAM sequence: TTT
gtgcgtgtgtgtgagagtgt

SEQ ID NO: 74483 - DNA, 20 bp, Artificial Sequence
  Description of Artificial Sequence: Synthetic oligonucleotide
  Target: SCNA; (+) strand; PAM type: YTN; PAM sequence: TTG
tgcgtgtgtgtgagagtgtg

SEQ ID NO: 74484 - DNA, 20 bp, Artificial Sequence
  Description of Artificial Sequence: Synthetic oligonucleotide
  Target: SCNA; (+) strand; PAM type: YTN; PAM sequence: CTT
tttccagcacaatggtgcat

SEQ ID NO: 74485 - DNA, 20 bp, Artificial Sequence
  Description of Artificial Sequence: Synthetic oligonucleotide
  Target: SCNA; (+) strand; PAM type: YTN; PAM sequence: TTT
ttccagcacaatggtgcatt

SEQ ID NO: 74486 - DNA, 20 bp, Artificial Sequence
  Description of Artificial Sequence: Synthetic oligonucleotide
  Target: SCNA; (+) strand; PAM type: YTN; PAM sequence: TTT
tccagcacaatggtgcatta

SEQ ID NO: 74487 - DNA, 20 bp, Artificial Sequence
  Description of Artificial Sequence: Synthetic oligonucleotide
  Target: SCNA; (+) strand; PAM type: YTN; PAM sequence: TTT
ccagcacaatggtgcattaa

SEQ ID NO: 74488 - DNA, 20 bp, Artificial Sequence
  Description of Artificial Sequence: Synthetic oligonucleotide
  Target: SCNA; (+) strand; PAM type: YTN; PAM sequence: TTC
cagcacaatggtgcattaac

SEQ ID NO: 74489 - DNA, 20 bp, Artificial Sequence
  Description of Artificial Sequence: Synthetic oligonucleotide
  Target: SCNA; (+) strand; PAM type: YTN; PAM sequence: TTA
accctaagtacttcagtaag

SEQ ID NO: 74490 - DNA, 20 bp, Artificial Sequence
  Description of Artificial Sequence: Synthetic oligonucleotide
  Target: SCNA; (+) strand; PAM type: YTN; PAM sequence: CTA
agtacttcagtaagtacctc

SEQ ID NO: 74491 - DNA, 20 bp, Artificial Sequence
  Description of Artificial Sequence: Synthetic oligonucleotide
  Target: SCNA; (+) strand; PAM type: YTN; PAM sequence: CTT
cagtaagtacctctctaaag

SEQ ID NO: 74492 - DNA, 20 bp, Artificial Sequence
  Description of Artificial Sequence: Synthetic oligonucleotide
  Target: SCNA; (+) strand; PAM type: YTN; PAM sequence: TTC
agtaagtacctctctaaagc

SEQ ID NO: 74493 - DNA, 20 bp, Artificial Sequence
  Description of Artificial Sequence: Synthetic oligonucleotide
  Target: SCNA; (+) strand; PAM type: YTN; PAM sequence: CTC
tctaaagcaaggattctctt

SEQ ID NO: 74494 - DNA, 20 bp, Artificial Sequence
  Description of Artificial Sequence: Synthetic oligonucleotide
  Target: SCNA; (+) strand; PAM type: YTN; PAM sequence: CTC
taaagcaaggattctcttct

SEQ ID NO: 74495 - DNA, 20 bp, Artificial Sequence
  Description of Artificial Sequence: Synthetic oligonucleotide
  Target: SCNA; (+) strand; PAM type: YTN; PAM sequence: CTA
aagcaaggattctcttctac

SEQ ID NO: 74496 - DNA, 20 bp, Artificial Sequence
  Description of Artificial Sequence: Synthetic oligonucleotide
  Target: SCNA; (+) strand; PAM type: YTN; PAM sequence: TTC
tcttctacactaacactgta

SEQ ID NO: 74497 - DNA, 20 bp, Artificial Sequence
  Description of Artificial Sequence: Synthetic oligonucleotide
  Target: SCNA; (+) strand; PAM type: YTN; PAM sequence: CTC
ttctacactaacactgtaaa

SEQ ID NO: 74498 - DNA, 20 bp, Artificial Sequence
  Description of Artificial Sequence: Synthetic oligonucleotide
  Target: SCNA; (+) strand; PAM type: YTN; PAM sequence: CTT
ctacactaacactgtaaaac

SEQ ID NO: 74499 - DNA, 20 bp, Artificial Sequence
  Description of Artificial Sequence: Synthetic oligonucleotide
  Target: SCNA; (+) strand; PAM type: YTN; PAM sequence: TTC
tacactaacactgtaaaact

SEQ ID NO: 74500 - DNA, 20 bp, Artificial Sequence
  Description of Artificial Sequence: Synthetic oligonucleotide
  Target: SCNA; (+) strand; PAM type: YTN; PAM sequence: CTA
cactaacactgtaaaactgt

SEQ ID NO: 74501 - DNA, 20 bp, Artificial Sequence
  Description of Artificial Sequence: Synthetic oligonucleotide
  Target: SCNA; (+) strand; PAM type: YTN; PAM sequence: CTA
acactgtaaaactgtcacaa

SEQ ID NO: 74502 - DNA, 20 bp, Artificial Sequence
  Description of Artificial Sequence: Synthetic oligonucleotide
  Target: SCNA; (+) strand; PAM type: YTN; PAM sequence: CTG
taaaactgtcacaaccagga

SEQ ID NO: 74503 - DNA, 20 bp, Artificial Sequence
  Description of Artificial Sequence: Synthetic oligonucleotide
  Target: SCNA; (+) strand; PAM type: YTN; PAM sequence: CTG
tcacaaccaggaagtcaaca

SEQ ID NO: 74504 - DNA, 20 bp, Artificial Sequence
  Description of Artificial Sequence: Synthetic oligonucleotide
  Target: SCNA; (+) strand; PAM type: YTN; PAM sequence: CTG
atagaacactgccatccaag

SEQ ID NO: 74505 - DNA, 20 bp, Artificial Sequence
  Description of Artificial Sequence: Synthetic oligonucleotide
  Target: SCNA; (+) strand; PAM type: YTN; PAM sequence: CTG
ccatccaagccagaggatga

SEQ ID NO: 74506 - DNA, 20 bp, Artificial Sequence
  Description of Artificial Sequence: Synthetic oligonucleotide
  Target: SCNA; (+) strand; PAM type: YTN; PAM sequence: TTA
aattattatgtgcttattgg

SEQ ID NO: 74507 - DNA, 20 bp, Artificial Sequence
  Description of Artificial Sequence: Synthetic oligonucleotide
  Target: SCNA; (+) strand; PAM type: YTN; PAM sequence: TTA
ttatgtgcttattgggtgct

SEQ ID NO: 74508 - DNA, 20 bp, Artificial Sequence
  Description of Artificial Sequence: Synthetic oligonucleotide
  Target: SCNA; (+) strand; PAM type: YTN; PAM sequence: TTA
tgtgcttattgggtgctcaa

SEQ ID NO: 74509 - DNA, 20 bp, Artificial Sequence
  Description of Artificial Sequence: Synthetic oligonucleotide
  Target: SCNA; (+) strand; PAM type: YTN; PAM sequence: CTT
attgggtgctcaattgggtg

SEQ ID NO: 74510 - DNA, 20 bp, Artificial Sequence
  Description of Artificial Sequence: Synthetic oligonucleotide
  Target: SCNA; (+) strand; PAM type: YTN; PAM sequence: TTA
ttgggtgctcaattgggtgt

SEQ ID NO: 74511 - DNA, 20 bp, Artificial Sequence
  Description of Artificial Sequence: Synthetic oligonucleotide
  Target: SCNA; (+) strand; PAM type: YTN; PAM sequence: TTG
ggtgctcaattgggtgttca

SEQ ID NO: 74512 - DNA, 20 bp, Artificial Sequence
  Description of Artificial Sequence: Synthetic oligonucleotide
  Target: SCNA; (+) strand; PAM type: YTN; PAM sequence: CTC
aattgggtgttcagcatgac

SEQ ID NO: 74513 - DNA, 20 bp, Artificial Sequence
  Description of Artificial Sequence: Synthetic oligonucleotide
  Target: SCNA; (+) strand; PAM type: YTN; PAM sequence: TTG
ggtgttcagcatgacaagta

SEQ ID NO: 74514 - DNA, 20 bp, Artificial Sequence
  Description of Artificial Sequence: Synthetic oligonucleotide
  Target: SCNA; (+) strand; PAM type: YTN; PAM sequence: TTC
agcatgacaagtatcataac

SEQ ID NO: 74515 - DNA, 20 bp, Artificial Sequence
  Description of Artificial Sequence: Synthetic oligonucleotide
  Target: SCNA; (+) strand; PAM type: YTN; PAM sequence: CTG
gctttctctttcatccacca

SEQ ID NO: 74516 - DNA, 20 bp, Artificial Sequence
  Description of Artificial Sequence: Synthetic oligonucleotide
  Target: SCNA; (+) strand; PAM type: YTN; PAM sequence: CTT
tctctttcatccaccatctc

SEQ ID NO: 74517 - DNA, 20 bp, Artificial Sequence
  Description of Artificial Sequence: Synthetic oligonucleotide
  Target: SCNA; (+) strand; PAM type: YTN; PAM sequence: TTT
ctctttcatccaccatctct

SEQ ID NO: 74518 - DNA, 20 bp, Artificial Sequence
  Description of Artificial Sequence: Synthetic oligonucleotide
  Target: SCNA; (+) strand; PAM type: YTN; PAM sequence: TTC
tctttcatccaccatctctg

SEQ ID NO: 74519 - DNA, 20 bp, Artificial Sequence
  Description of Artificial Sequence: Synthetic oligonucleotide
  Target: SCNA; (+) strand; PAM type: YTN; PAM sequence: CTC
tttcatccaccatctctgtc

SEQ ID NO: 74520 - DNA, 20 bp, Artificial Sequence
  Description of Artificial Sequence: Synthetic oligonucleotide
  Target: SCNA; (+) strand; PAM type: YTN; PAM sequence: CTT
tcatccaccatctctgtctc

SEQ ID NO: 74521 - DNA, 20 bp, Artificial Sequence
  Description of Artificial Sequence: Synthetic oligonucleotide
  Target: SCNA; (+) strand; PAM type: YTN; PAM sequence: TTT
catccaccatctctgtctct

SEQ ID NO: 74522 - DNA, 20 bp, Artificial Sequence
  Description of Artificial Sequence: Synthetic oligonucleotide
  Target: SCNA; (+) strand; PAM type: YTN; PAM sequence: TTC
atccaccatctctgtctctc

SEQ ID NO: 74523 - DNA, 20 bp, Artificial Sequence
  Description of Artificial Sequence: Synthetic oligonucleotide
  Target: SCNA; (+) strand; PAM type: YTN; PAM sequence: CTC
tgtctctctctcttttccct

SEQ ID NO: 74524 - DNA, 20 bp, Artificial Sequence
  Description of Artificial Sequence: Synthetic oligonucleotide
  Target: SCNA; (+) strand; PAM type: YTN; PAM sequence: CTG
tctctctctcttttccctcc

SEQ ID NO: 74525 - DNA, 20 bp, Artificial Sequence
  Description of Artificial Sequence: Synthetic oligonucleotide
  Target: SCNA; (+) strand; PAM type: YTN; PAM sequence: CTC
tctctcttttccctcctact

SEQ ID NO: 74526 - DNA, 20 bp, Artificial Sequence
  Description of Artificial Sequence: Synthetic oligonucleotide
  Target: SCNA; (+) strand; PAM type: YTN; PAM sequence: CTC
tctcttttccctcctacttc

SEQ ID NO: 74527 - DNA, 20 bp, Artificial Sequence
  Description of Artificial Sequence: Synthetic oligonucleotide
  Target: SCNA; (+) strand; PAM type: YTN; PAM sequence: CTC
tcttttccctcctacttcct

SEQ ID NO: 74528 - DNA, 20 bp, Artificial Sequence
  Description of Artificial Sequence: Synthetic oligonucleotide
  Target: SCNA; (+) strand; PAM type: YTN; PAM sequence: CTC
ttttccctcctacttcctag

SEQ ID NO: 74529 - DNA, 20 bp, Artificial Sequence
  Description of Artificial Sequence: Synthetic oligonucleotide
  Target: SCNA; (+) strand; PAM type: YTN; PAM sequence: CTT
ttccctcctacttcctaggc

SEQ ID NO: 74530 - DNA, 20 bp, Artificial Sequence
  Description of Artificial Sequence: Synthetic oligonucleotide
  Target: SCNA; (+) strand; PAM type: YTN; PAM sequence: TTT
tccctcctacttcctaggct

SEQ ID NO: 74531 - DNA, 20 bp, Artificial Sequence
  Description of Artificial Sequence: Synthetic oligonucleotide
  Target: SCNA; (+) strand; PAM type: YTN; PAM sequence: TTT
ccctcctacttcctaggctg

SEQ ID NO: 74532 - DNA, 20 bp, Artificial Sequence
  Description of Artificial Sequence: Synthetic oligonucleotide
  Target: SCNA; (+) strand; PAM type: YTN; PAM sequence: TTC
cctcctacttcctaggctgc

SEQ ID NO: 74533 - DNA, 20 bp, Artificial Sequence
  Description of Artificial Sequence: Synthetic oligonucleotide
  Target: SCNA; (+) strand; PAM type: YTN; PAM sequence: CTC
ctacttcctaggctgctggg

SEQ ID NO: 74534 - DNA, 20 bp, Artificial Sequence
  Description of Artificial Sequence: Synthetic oligonucleotide
  Target: SCNA; (+) strand; PAM type: YTN; PAM sequence: CTA
cttcctaggctgctgggcac

SEQ ID NO: 74535 - DNA, 20 bp, Artificial Sequence
  Description of Artificial Sequence: Synthetic oligonucleotide
  Target: SCNA; (+) strand; PAM type: YTN; PAM sequence: CTT
cctaggctgctgggcacact

SEQ ID NO: 74536 - DNA, 20 bp, Artificial Sequence
  Description of Artificial Sequence: Synthetic oligonucleotide
  Target: SCNA; (+) strand; PAM type: YTN; PAM sequence: TTC
ctaggctgctgggcacactg

SEQ ID NO: 74537 - DNA, 20 bp, Artificial Sequence
  Description of Artificial Sequence: Synthetic oligonucleotide
  Target: SCNA; (+) strand; PAM type: YTN; PAM sequence: CTA
ggctgctgggcacactgcca

SEQ ID NO: 74538 - DNA, 20 bp, Artificial Sequence
  Description of Artificial Sequence: Synthetic oligonucleotide
  Target: SCNA; (+) strand; PAM type: YTN; PAM sequence: CTG
ctgggcacactgccattgac

SEQ ID NO: 74539 - DNA, 20 bp, Artificial Sequence
  Description of Artificial Sequence: Synthetic oligonucleotide
  Target: SCNA; (+) strand; PAM type: YTN; PAM sequence: CTG
ggcacactgccattgacctc

SEQ ID NO: 74540 - DNA, 20 bp, Artificial Sequence
  Description of Artificial Sequence: Synthetic oligonucleotide
  Target: SCNA; (+) strand; PAM type: YTN; PAM sequence: CTG
ccattgacctctgcttgaca

SEQ ID NO: 74541 - DNA, 20 bp, Artificial Sequence
  Description of Artificial Sequence: Synthetic oligonucleotide
  Target: SCNA; (+) strand; PAM type: YTN; PAM sequence: TTG
acctctgcttgacatctcct

SEQ ID NO: 74542 - DNA, 20 bp, Artificial Sequence
  Description of Artificial Sequence: Synthetic oligonucleotide
  Target: SCNA; (+) strand; PAM type: YTN; PAM sequence: CTC
tgcttgacatctccttcctc

SEQ ID NO: 74543 - DNA, 20 bp, Artificial Sequence
  Description of Artificial Sequence: Synthetic oligonucleotide
  Target: SCNA; (+) strand; PAM type: YTN; PAM sequence: CTG
cttgacatctccttcctccc

SEQ ID NO: 74544 - DNA, 20 bp, Artificial Sequence
  Description of Artificial Sequence: Synthetic oligonucleotide
  Target: SCNA; (+) strand; PAM type: YTN; PAM sequence: CTT
gacatctccttcctccccct

SEQ ID NO: 74545 - DNA, 20 bp, Artificial Sequence
  Description of Artificial Sequence: Synthetic oligonucleotide
  Target: SCNA; (+) strand; PAM type: YTN; PAM sequence: TTG
acatctccttcctccccctg

SEQ ID NO: 74546 - DNA, 20 bp, Artificial Sequence
  Description of Artificial Sequence: Synthetic oligonucleotide
  Target: SCNA; (+) strand; PAM type: YTN; PAM sequence: CTC
cttcctccccctgtcagcag

SEQ ID NO: 74547 - DNA, 20 bp, Artificial Sequence
  Description of Artificial Sequence: Synthetic oligonucleotide
  Target: SCNA; (+) strand; PAM type: YTN; PAM sequence: CTT
cctccccctgtcagcagcct

SEQ ID NO: 74548 - DNA, 20 bp, Artificial Sequence
  Description of Artificial Sequence: Synthetic oligonucleotide
  Target: SCNA; (+) strand; PAM type: YTN; PAM sequence: TTC
ctccccctgtcagcagcctt

SEQ ID NO: 74549 - DNA, 20 bp, Artificial Sequence
  Description of Artificial Sequence: Synthetic oligonucleotide
  Target: SCNA; (+) strand; PAM type: YTN; PAM sequence: CTC
cccctgtcagcagccttgct

SEQ ID NO: 74550 - DNA, 20 bp, Artificial Sequence
  Description of Artificial Sequence: Synthetic oligonucleotide
  Target: SCNA; (+) strand; PAM type: YTN; PAM sequence: CTG
tcagcagccttgctcagaca

SEQ ID NO: 74551 - DNA, 20 bp, Artificial Sequence
  Description of Artificial Sequence: Synthetic oligonucleotide
  Target: SCNA; (+) strand; PAM type: YTN; PAM sequence: CTT
gctcagacatcaaccaccag

SEQ ID NO: 74552 - DNA, 20 bp, Artificial Sequence
  Description of Artificial Sequence: Synthetic oligonucleotide
  Target: SCNA; (+) strand; PAM type: YTN; PAM sequence: TTG
ctcagacatcaaccaccagt

SEQ ID NO: 74553 - DNA, 20 bp, Artificial Sequence
  Description of Artificial Sequence: Synthetic oligonucleotide
  Target: SCNA; (+) strand; PAM type: YTN; PAM sequence: CTC
agacatcaaccaccagtgtt

SEQ ID NO: 74554 - DNA, 20 bp, Artificial Sequence
  Description of Artificial Sequence: Synthetic oligonucleotide
  Target: SCNA; (+) strand; PAM type: YTN; PAM sequence: TTT
gcatgtccccatggcaagaa

SEQ ID NO: 74555 - DNA, 20 bp, Artificial Sequence
  Description of Artificial Sequence: Synthetic oligonucleotide
  Target: SCNA; (+) strand; PAM type: YTN; PAM sequence: TTG
catgtccccatggcaagaac

SEQ ID NO: 74556 - DNA, 20 bp, Artificial Sequence
  Description of Artificial Sequence: Synthetic oligonucleotide
  Target: SCNA; (+) strand; PAM type: YTN; PAM sequence: TTA
gtaaggacaagggaaggtgg

SEQ ID NO: 74557 - DNA, 20 bp, Artificial Sequence
  Description of Artificial Sequence: Synthetic oligonucleotide
  Target: SCNA; (+) strand; PAM type: YTN; PAM sequence: TTC
atttttaatataatgctacg

SEQ ID NO: 74558 - DNA, 20 bp, Artificial Sequence
  Description of Artificial Sequence: Synthetic oligonucleotide
  Target: SCNA; (+) strand; PAM type: YTN; PAM sequence: TTT
ttaatataatgctacgtgaa

SEQ ID NO: 74559 - DNA, 20 bp, Artificial Sequence
  Description of Artificial Sequence: Synthetic oligonucleotide
  Target: SCNA; (+) strand; PAM type: YTN; PAM sequence: TTT
taatataatgctacgtgaaa

SEQ ID NO: 74560 - DNA, 20 bp, Artificial Sequence
  Description of Artificial Sequence: Synthetic oligonucleotide
  Target: SCNA; (+) strand; PAM type: YTN; PAM sequence: TTT
aatataatgctacgtgaaaa

SEQ ID NO: 74561 - DNA, 20 bp, Artificial Sequence
  Description of Artificial Sequence: Synthetic oligonucleotide
  Target: SCNA; (+) strand; PAM type: YTN; PAM sequence: TTA
atataatgctacgtgaaaag

SEQ ID NO: 74562 - DNA, 20 bp, Artificial Sequence
  Description of Artificial Sequence: Synthetic oligonucleotide
  Target: SCNA; (+) strand; PAM type: YTN; PAM sequence: CTA
cgtgaaaagaaatgccagaa

SEQ ID NO: 74563 - DNA, 20 bp, Artificial Sequence
  Description of Artificial Sequence: Synthetic oligonucleotide
  Target: SCNA; (+) strand; PAM type: YTN; PAM sequence: TTC
tgaaaatcactggtaaaagc

SEQ ID NO: 74564 - DNA, 20 bp, Artificial Sequence
  Description of Artificial Sequence: Synthetic oligonucleotide
  Target: SCNA; (+) strand; PAM type: YTN; PAM sequence: CTG
aaaatcactggtaaaagcat

SEQ ID NO: 74565 - DNA, 20 bp, Artificial Sequence
  Description of Artificial Sequence: Synthetic oligonucleotide
  Target: SCNA; (+) strand; PAM type: YTN; PAM sequence: CTG
gtaaaagcatccccaaagtc

SEQ ID NO: 74566 - DNA, 20 bp, Artificial Sequence
  Description of Artificial Sequence: Synthetic oligonucleotide
  Target: SCNA; (+) strand; PAM type: YTN; PAM sequence: CTA
cctgatatggacatttaaat

SEQ ID NO: 74567 - DNA, 20 bp, Artificial Sequence
  Description of Artificial Sequence: Synthetic oligonucleotide
  Target: SCNA; (+) strand; PAM type: YTN; PAM sequence: CTG
atatggacatttaaattcat

SEQ ID NO: 74568 - DNA, 20 bp, Artificial Sequence
  Description of Artificial Sequence: Synthetic oligonucleotide
  Target: SCNA; (+) strand; PAM type: YTN; PAM sequence: TTT
aaattcattaaaaattctga

SEQ ID NO: 74569 - DNA, 20 bp, Artificial Sequence
  Description of Artificial Sequence: Synthetic oligonucleotide
  Target: SCNA; (+) strand; PAM type: YTN; PAM sequence: TTA
aattcattaaaaattctgag

SEQ ID NO: 74570 - DNA, 20 bp, Artificial Sequence
  Description of Artificial Sequence: Synthetic oligonucleotide
  Target: SCNA; (+) strand; PAM type: YTN; PAM sequence: TTC
attaaaaattctgagtttaa

SEQ ID NO: 74571 - DNA, 20 bp, Artificial Sequence
  Description of Artificial Sequence: Synthetic oligonucleotide
  Target: SCNA; (+) strand; PAM type: YTN; PAM sequence: TTA
aaaattctgagtttaagaaa

SEQ ID NO: 74572 - DNA, 20 bp, Artificial Sequence
  Description of Artificial Sequence: Synthetic oligonucleotide
  Target: SCNA; (+) strand; PAM type: YTN; PAM sequence: TTC
tgagtttaagaaaacagcta

SEQ ID NO: 74573 - DNA, 20 bp, Artificial Sequence
  Description of Artificial Sequence: Synthetic oligonucleotide
  Target: SCNA; (+) strand; PAM type: YTN; PAM sequence: CTG
agtttaagaaaacagctaag

SEQ ID NO: 74574 - DNA, 20 bp, Artificial Sequence
  Description of Artificial Sequence: Synthetic oligonucleotide
  Target: SCNA; (+) strand; PAM type: YTN; PAM sequence: TTT
aagaaaacagctaagaggtt

SEQ ID NO: 74575 - DNA, 20 bp, Artificial Sequence
  Description of Artificial Sequence: Synthetic oligonucleotide
  Target: SCNA; (+) strand; PAM type: YTN; PAM sequence: TTA
agaaaacagctaagaggttg

SEQ ID NO: 74576 - DNA, 20 bp, Artificial Sequence
  Description of Artificial Sequence: Synthetic oligonucleotide
  Target: SCNA; (+) strand; PAM type: YTN; PAM sequence: CTA
agaggttgagaaatcagagt

SEQ ID NO: 74577 - DNA, 20 bp, Artificial Sequence
  Description of Artificial Sequence: Synthetic oligonucleotide
  Target: SCNA; (+) strand; PAM type: YTN; PAM sequence: TTG
agaaatcagagttggctgcc

SEQ ID NO: 74578 - DNA, 20 bp, Artificial Sequence
  Description of Artificial Sequence: Synthetic oligonucleotide
  Target: SCNA; (+) strand; PAM type: YTN; PAM sequence: TTG
gctgcccaacttacaattct

SEQ ID NO: 74579 - DNA, 20 bp, Artificial Sequence
  Description of Artificial Sequence: Synthetic oligonucleotide
  Target: SCNA; (+) strand; PAM type: YTN; PAM sequence: CTG
cccaacttacaattctcctt

SEQ ID NO: 74580 - DNA, 20 bp, Artificial Sequence
  Description of Artificial Sequence: Synthetic oligonucleotide
  Target: SCNA; (+) strand; PAM type: YTN; PAM sequence: CTT
acaattctccttgctgacca

SEQ ID NO: 74581 - DNA, 20 bp, Artificial Sequence
  Description of Artificial Sequence: Synthetic oligonucleotide
  Target: SCNA; (+) strand; PAM type: YTN; PAM sequence: TTA
caattctccttgctgaccag

SEQ ID NO: 74582 - DNA, 20 bp, Artificial Sequence
  Description of Artificial Sequence: Synthetic oligonucleotide
  Target: SCNA; (+) strand; PAM type: YTN; PAM sequence: TTC
tccttgctgaccagcatctt

SEQ ID NO: 74583 - DNA, 20 bp, Artificial Sequence
  Description of Artificial Sequence: Synthetic oligonucleotide
  Target: SCNA; (+) strand; PAM type: YTN; PAM sequence: CTC
cttgctgaccagcatctttt

SEQ ID NO: 74584 - DNA, 20 bp, Artificial Sequence
  Description of Artificial Sequence: Synthetic oligonucleotide
  Target: SCNA; (+) strand; PAM type: YTN; PAM sequence: CTT
gctgaccagcatcttttggc

SEQ ID NO: 74585 - DNA, 20 bp, Artificial Sequence
  Description of Artificial Sequence: Synthetic oligonucleotide
  Target: SCNA; (+) strand; PAM type: YTN; PAM sequence: TTG
ctgaccagcatcttttggct

SEQ ID NO: 74586 - DNA, 20 bp, Artificial Sequence
  Description of Artificial Sequence: Synthetic oligonucleotide
  Target: SCNA; (+) strand; PAM type: YTN; PAM sequence: CTG
accagcatcttttggctgcc

SEQ ID NO: 74587 - DNA, 20 bp, Artificial Sequence
  Description of Artificial Sequence: Synthetic oligonucleotide
  Target: SCNA; (+) strand; PAM type: YTN; PAM sequence: CTT
ttggctgcctctcaaaataa

SEQ ID NO: 74588 - DNA, 20 bp, Artificial Sequence
  Description of Artificial Sequence: Synthetic oligonucleotide
  Target: SCNA; (+) strand; PAM type: YTN; PAM sequence: TTT
tggctgcctctcaaaataac

SEQ ID NO: 74589 - DNA, 20 bp, Artificial Sequence
  Description of Artificial Sequence: Synthetic oligonucleotide
  Target: SCNA; (+) strand; PAM type: YTN; PAM sequence: TTT
ggctgcctctcaaaataaca

SEQ ID NO: 74590 - DNA, 20 bp, Artificial Sequence
  Description of Artificial Sequence: Synthetic oligonucleotide
  Target: SCNA; (+) strand; PAM type: YTN; PAM sequence: TTG
gctgcctctcaaaataacag

SEQ ID NO: 74591 - DNA, 20 bp, Artificial Sequence
  Description of Artificial Sequence: Synthetic oligonucleotide
  Target: SCNA; (+) strand; PAM type: YTN; PAM sequence: CTG
cctctcaaaataacaggata

SEQ ID NO: 74592 - DNA, 20 bp, Artificial Sequence
  Description of Artificial Sequence: Synthetic oligonucleotide
  Target: SCNA; (+) strand; PAM type: YTN; PAM sequence: CTC
tcaaaataacaggataaggc

SEQ ID NO: 74593 - DNA, 20 bp, Artificial Sequence
  Description of Artificial Sequence: Synthetic oligonucleotide
  Target: SCNA; (+) strand; PAM type: YTN; PAM sequence: CTC
aaaataacaggataaggcac

SEQ ID NO: 74594 - DNA, 20 bp, Artificial Sequence
  Description of Artificial Sequence: Synthetic oligonucleotide
  Target: SCNA; (+) strand; PAM type: YTN; PAM sequence: CTG
aattcttcacttggattaaa

SEQ ID NO: 74595 - DNA, 20 bp, Artificial Sequence
  Description of Artificial Sequence: Synthetic oligonucleotide
  Target: SCNA; (+) strand; PAM type: YTN; PAM sequence: TTC
ttcacttggattaaatctga

SEQ ID NO: 74596 - DNA, 20 bp, Artificial Sequence
  Description of Artificial Sequence: Synthetic oligonucleotide
  Target: SCNA; (+) strand; PAM type: YTN; PAM sequence: CTT
cacttggattaaatctgaat

SEQ ID NO: 74597 - DNA, 20 bp, Artificial Sequence
  Description of Artificial Sequence: Synthetic oligonucleotide
  Target: SCNA; (+) strand; PAM type: YTN; PAM sequence: TTC
acttggattaaatctgaatc

SEQ ID NO: 74598 - DNA, 20 bp, Artificial Sequence
  Description of Artificial Sequence: Synthetic oligonucleotide
  Target: SCNA; (+) strand; PAM type: YTN; PAM sequence: CTT
ggattaaatctgaatcttcc

SEQ ID NO: 74599 - DNA, 20 bp, Artificial Sequence
  Description of Artificial Sequence: Synthetic oligonucleotide
  Target: SCNA; (+) strand; PAM type: YTN; PAM sequence: TTG
gattaaatctgaatcttcct

SEQ ID NO: 74600 - DNA, 20 bp, Artificial Sequence
  Description of Artificial Sequence: Synthetic oligonucleotide
  Target: SCNA; (+) strand; PAM type: YTN; PAM sequence: TTA
aatctgaatcttccttctct

SEQ ID NO: 74601 - DNA, 20 bp, Artificial Sequence
  Description of Artificial Sequence: Synthetic oligonucleotide
  Target: SCNA; (+) strand; PAM type: YTN; PAM sequence: CTG
aatcttccttctcttattcc

SEQ ID NO: 74602 - DNA, 20 bp, Artificial Sequence
  Description of Artificial Sequence: Synthetic oligonucleotide
  Target: SCNA; (+) strand; PAM type: YTN; PAM sequence: CTT
ccttctcttattcctttgct

SEQ ID NO: 74603 - DNA, 20 bp, Artificial Sequence
  Description of Artificial Sequence: Synthetic oligonucleotide
  Target: SCNA; (+) strand; PAM type: YTN; PAM sequence: TTC
cttctcttattcctttgctt

SEQ ID NO: 74604 - DNA, 20 bp, Artificial Sequence
  Description of Artificial Sequence: Synthetic oligonucleotide
  Target: SCNA; (+) strand; PAM type: YTN; PAM sequence: CTT
ctcttattcctttgcttata

SEQ ID NO: 74605 - DNA, 20 bp, Artificial Sequence
  Description of Artificial Sequence: Synthetic oligonucleotide
  Target: SCNA; (+) strand; PAM type: YTN; PAM sequence: TTC
tcttattcctttgcttataa

SEQ ID NO: 74606 - DNA, 20 bp, Artificial Sequence
  Description of Artificial Sequence: Synthetic oligonucleotide
  Target: SCNA; (+) strand; PAM type: YTN; PAM sequence: CTC
ttattcctttgcttataaaa

SEQ ID NO: 74607 - DNA, 20 bp, Artificial Sequence
  Description of Artificial Sequence: Synthetic oligonucleotide
  Target: SCNA; (+) strand; PAM type: YTN; PAM sequence: CTT
attcctttgcttataaaata

SEQ ID NO: 74608 - DNA, 20 bp, Artificial Sequence
  Description of Artificial Sequence: Synthetic oligonucleotide
  Target: SCNA; (+) strand; PAM type: YTN; PAM sequence: TTA
ttcctttgcttataaaatat

SEQ ID NO: 74609 - DNA, 20 bp, Artificial Sequence
  Description of Artificial Sequence: Synthetic oligonucleotide
  Target: SCNA; (+) strand; PAM type: YTN; PAM sequence: TTC
ctttgcttataaaatatctt

SEQ ID NO: 74610 - DNA, 20 bp, Artificial Sequence
  Description of Artificial Sequence: Synthetic oligonucleotide
  Target: SCNA; (+) strand; PAM type: YTN; PAM sequence: CTT
tgcttataaaatatcttcct

SEQ ID NO: 74611 - DNA, 20 bp, Artificial Sequence
  Description of Artificial Sequence: Synthetic oligonucleotide
  Target: SCNA; (+) strand; PAM type: YTN; PAM sequence: TTT
gcttataaaatatcttccta

SEQ ID NO: 74612 - DNA, 20 bp, Artificial Sequence
  Description of Artificial Sequence: Synthetic oligonucleotide
  Target: SCNA; (+) strand; PAM type: YTN; PAM sequence: TTG
cttataaaatatcttcctag

SEQ ID NO: 74613 - DNA, 20 bp, Artificial Sequence
  Description of Artificial Sequence: Synthetic oligonucleotide
  Target: SCNA; (+) strand; PAM type: YTN; PAM sequence: CTT
ataaaatatcttcctaggct

SEQ ID NO: 74614 - DNA, 20 bp, Artificial Sequence
  Description of Artificial Sequence: Synthetic oligonucleotide
  Target: SCNA; (+) strand; PAM type: YTN; PAM sequence: TTA
taaaatatcttcctaggctt

SEQ ID NO: 74615 - DNA, 20 bp, Artificial Sequence
  Description of Artificial Sequence: Synthetic oligonucleotide
  Target: SCNA; (+) strand; PAM type: YTN; PAM sequence: CTT
cctaggcttgagacagtcta

SEQ ID NO: 74616 - DNA, 20 bp, Artificial Sequence
  Description of Artificial Sequence: Synthetic oligonucleotide
  Target: SCNA; (+) strand; PAM type: YTN; PAM sequence: TTC
ctaggcttgagacagtctag

SEQ ID NO: 74617 - DNA, 20 bp, Artificial Sequence
  Description of Artificial Sequence: Synthetic oligonucleotide
  Target: SCNA; (+) strand; PAM type: YTN; PAM sequence: CTA
ggcttgagacagtctagaga

SEQ ID NO: 74618 - DNA, 20 bp, Artificial Sequence
  Description of Artificial Sequence: Synthetic oligonucleotide
  Target: SCNA; (+) strand; PAM type: YTN; PAM sequence: CTT
gagacagtctagagaccacc

SEQ ID NO: 74619 - DNA, 20 bp, Artificial Sequence
  Description of Artificial Sequence: Synthetic oligonucleotide
  Target: SCNA; (+) strand; PAM type: YTN; PAM sequence: TTG
agacagtctagagaccacct

SEQ ID NO: 74620 - DNA, 20 bp, Artificial Sequence
  Description of Artificial Sequence: Synthetic oligonucleotide
  Target: SCNA; (+) strand; PAM type: YTN; PAM sequence: CTA
gagaccacctgagaacactg

SEQ ID NO: 74621 - DNA, 20 bp, Artificial Sequence
  Description of Artificial Sequence: Synthetic oligonucleotide
  Target: SCNA; (+) strand; PAM type: YTN; PAM sequence: CTG
agaacactgaatgttccttt

SEQ ID NO: 74622 - DNA, 20 bp, Artificial Sequence
  Description of Artificial Sequence: Synthetic oligonucleotide
  Target: SCNA; (+) strand; PAM type: YTN; PAM sequence: CTG
aatgttccttttgagtatcc

SEQ ID NO: 74623 - DNA, 20 bp, Artificial Sequence
  Description of Artificial Sequence: Synthetic oligonucleotide
  Target: SCNA; (+) strand; PAM type: YTN; PAM sequence: TTC
cttttgagtatccagtagca

SEQ ID NO: 74624 - DNA, 20 bp, Artificial Sequence
  Description of Artificial Sequence: Synthetic oligonucleotide
  Target: SCNA; (+) strand; PAM type: YTN; PAM sequence: CTT
ttgagtatccagtagcataa

SEQ ID NO: 74625 - DNA, 20 bp, Artificial Sequence
  Description of Artificial Sequence: Synthetic oligonucleotide
  Target: SCNA; (+) strand; PAM type: YTN; PAM sequence: TTT
tgagtatccagtagcataac

SEQ ID NO: 74626 - DNA, 20 bp, Artificial Sequence
  Description of Artificial Sequence: Synthetic oligonucleotide
  Target: SCNA; (+) strand; PAM type: YTN; PAM sequence: TTT
gagtatccagtagcataact

SEQ ID NO: 74627 - DNA, 20 bp, Artificial Sequence
  Description of Artificial Sequence: Synthetic oligonucleotide
  Target: SCNA; (+) strand; PAM type: YTN; PAM sequence: TTG
agtatccagtagcataactc

SEQ ID NO: 74628 - DNA, 20 bp, Artificial Sequence
  Description of Artificial Sequence: Synthetic oligonucleotide
  Target: SCNA; (+) strand; PAM type: YTN; PAM sequence: CTC
acactgtcaacaaggcctta

SEQ ID NO: 74629 - DNA, 20 bp, Artificial Sequence
  Description of Artificial Sequence: Synthetic oligonucleotide
  Target: SCNA; (+) strand; PAM type: YTN; PAM sequence: CTG
tcaacaaggccttacttacg

SEQ ID NO: 74630 - DNA, 20 bp, Artificial Sequence
  Description of Artificial Sequence: Synthetic oligonucleotide
  Target: SCNA; (+) strand; PAM type: YTN; PAM sequence: CTT
acttacgtgtgctgaacatt

SEQ ID NO: 74631 - DNA, 20 bp, Artificial Sequence
  Description of Artificial Sequence: Synthetic oligonucleotide
  Target: SCNA; (+) strand; PAM type: YTN; PAM sequence: TTA
cttacgtgtgctgaacattt

SEQ ID NO: 74632 - DNA, 20 bp, Artificial Sequence
  Description of Artificial Sequence: Synthetic oligonucleotide
  Target: SCNA; (+) strand; PAM type: YTN; PAM sequence: CTT
acgtgtgctgaacattttta

SEQ ID NO: 74633 - DNA, 20 bp, Artificial Sequence
  Description of Artificial Sequence: Synthetic oligonucleotide
  Target: SCNA; (+) strand; PAM type: YTN; PAM sequence: TTA
cgtgtgctgaacatttttat

SEQ ID NO: 74634 - DNA, 20 bp, Artificial Sequence
  Description of Artificial Sequence: Synthetic oligonucleotide
  Target: SCNA; (+) strand; PAM type: YTN; PAM sequence: CTG
aacatttttatatttttgta

SEQ ID NO: 74635 - DNA, 20 bp, Artificial Sequence
  Description of Artificial Sequence: Synthetic oligonucleotide
  Target: SCNA; (+) strand; PAM type: YTN; PAM sequence: TTT
ttatatttttgtatccttta

SEQ ID NO: 74636 - DNA, 20 bp, Artificial Sequence
  Description of Artificial Sequence: Synthetic oligonucleotide
  Target: SCNA; (+) strand; PAM type: YTN; PAM sequence: TTT
tatatttttgtatcctttat

SEQ ID NO: 74637 - DNA, 20 bp, Artificial Sequence
  Description of Artificial Sequence: Synthetic oligonucleotide
  Target: SCNA; (+) strand; PAM type: YTN; PAM sequence: TTT
atatttttgtatcctttatc

SEQ ID NO: 74638 - DNA, 20 bp, Artificial Sequence
  Description of Artificial Sequence: Synthetic oligonucleotide
  Target: SCNA; (+) strand; PAM type: YTN; PAM sequence: TTA
tatttttgtatcctttatca

SEQ ID NO: 74639 - DNA, 20 bp, Artificial Sequence
  Description of Artificial Sequence: Synthetic oligonucleotide
  Target: SCNA; (+) strand; PAM type: YTN; PAM sequence: TTT
ttgtatcctttatcacaaac

SEQ ID NO: 74640 - DNA, 20 bp, Artificial Sequence
  Description of Artificial Sequence: Synthetic oligonucleotide
  Target: SCNA; (+) strand; PAM type: YTN; PAM sequence: TTT
tgtatcctttatcacaaacc

SEQ ID NO: 74641 - DNA, 20 bp, Artificial Sequence
  Description of Artificial Sequence: Synthetic oligonucleotide
  Target: SCNA; (+) strand; PAM type: YTN; PAM sequence: TTT
gtatcctttatcacaaacca

SEQ ID NO: 74642 - DNA, 20 bp, Artificial Sequence
  Description of Artificial Sequence: Synthetic oligonucleotide
  Target: SCNA; (+) strand; PAM type: YTN; PAM sequence: TTG
tatcctttatcacaaaccaa

SEQ ID NO: 74643 - DNA, 20 bp, Artificial Sequence
  Description of Artificial Sequence: Synthetic oligonucleotide
  Target: SCNA; (+) strand; PAM type: YTN; PAM sequence: CTT
tatcacaaaccaaacactgc

SEQ ID NO: 74644 - DNA, 20 bp, Artificial Sequence
  Description of Artificial Sequence: Synthetic oligonucleotide
  Target: SCNA; (+) strand; PAM type: YTN; PAM sequence: TTT
atcacaaaccaaacactgct

SEQ ID NO: 74645 - DNA, 20 bp, Artificial Sequence
  Description of Artificial Sequence: Synthetic oligonucleotide
  Target: SCNA; (+) strand; PAM type: YTN; PAM sequence: TTA
tcacaaaccaaacactgctt

SEQ ID NO: 74646 - DNA, 20 bp, Artificial Sequence
  Description of Artificial Sequence: Synthetic oligonucleotide
  Target: SCNA; (+) strand; PAM type: YTN; PAM sequence: CTG
cttagttataaaatatatgt

SEQ ID NO: 74647 - DNA, 20 bp, Artificial Sequence
  Description of Artificial Sequence: Synthetic oligonucleotide
  Target: SCNA; (+) strand; PAM type: YTN; PAM sequence: CTT
agttataaaatatatgtgta

SEQ ID NO: 74648 - DNA, 20 bp, Artificial Sequence
  Description of Artificial Sequence: Synthetic oligonucleotide
  Target: SCNA; (+) strand; PAM type: YTN; PAM sequence: TTA
gttataaaatatatgtgtaa

SEQ ID NO: 74649 - DNA, 20 bp, Artificial Sequence
  Description of Artificial Sequence: Synthetic oligonucleotide
  Target: SCNA; (+) strand; PAM type: YTN; PAM sequence: TTA
taaaatatatgtgtaagtca

SEQ ID NO: 74650 - DNA, 20 bp, Artificial Sequence
  Description of Artificial Sequence: Synthetic oligonucleotide
  Target: SCNA; (+) strand; PAM type: YTN; PAM sequence: TTT
tttttgtcaaagcaaagatt

SEQ ID NO: 74651 - DNA, 20 bp, Artificial Sequence
  Description of Artificial Sequence: Synthetic oligonucleotide
  Target: SCNA; (+) strand; PAM type: YTN; PAM sequence: TTT
ttttgtcaaagcaaagattt

SEQ ID NO: 74652 - DNA, 20 bp, Artificial Sequence
  Description of Artificial Sequence: Synthetic oligonucleotide
  Target: SCNA; (+) strand; PAM type: YTN; PAM sequence: TTT
tttgtcaaagcaaagatttt

SEQ ID NO: 74653 - DNA, 20 bp, Artificial Sequence
  Description of Artificial Sequence: Synthetic oligonucleotide
  Target: SCNA; (+) strand; PAM type: YTN; PAM sequence: TTT
ttgtcaaagcaaagattttt

SEQ ID NO: 74654 - DNA, 20 bp, Artificial Sequence
  Description of Artificial Sequence: Synthetic oligonucleotide
  Target: SCNA; (+) strand; PAM type: YTN; PAM sequence: TTT
tgtcaaagcaaagatttttc

SEQ ID NO: 74655 - DNA, 20 bp, Artificial Sequence
  Description of Artificial Sequence: Synthetic oligonucleotide
  Target: SCNA; (+) strand; PAM type: YTN; PAM sequence: TTT
gtcaaagcaaagatttttct

SEQ ID NO: 74656 - DNA, 20 bp, Artificial Sequence
  Description of Artificial Sequence: Synthetic oligonucleotide
  Target: SCNA; (+) strand; PAM type: YTN; PAM sequence: TTG
tcaaagcaaagatttttctc

SEQ ID NO: 74657 - DNA, 20 bp, Artificial Sequence
  Description of Artificial Sequence: Synthetic oligonucleotide
  Target: SCNA; (+) strand; PAM type: YTN; PAM sequence: TTT
ttctccaaaatatagctaca

SEQ ID NO: 74658 - DNA, 20 bp, Artificial Sequence
  Description of Artificial Sequence: Synthetic oligonucleotide
  Target: SCNA; (+) strand; PAM type: YTN; PAM sequence: TTT
tctccaaaatatagctacag

SEQ ID NO: 74659 - DNA, 20 bp, Artificial Sequence
  Description of Artificial Sequence: Synthetic oligonucleotide
  Target: SCNA; (+) strand; PAM type: YTN; PAM sequence: TTT
ctccaaaatatagctacaga

SEQ ID NO: 74660 - DNA, 20 bp, Artificial Sequence
  Description of Artificial Sequence: Synthetic oligonucleotide
  Target: SCNA; (+) strand; PAM type: YTN; PAM sequence: TTC
tccaaaatatagctacagaa

SEQ ID NO: 74661 - DNA, 20 bp, Artificial Sequence
  Description of Artificial Sequence: Synthetic oligonucleotide
  Target: SCNA; (+) strand; PAM type: YTN; PAM sequence: CTC
caaaatatagctacagaaga

SEQ ID NO: 74662 - DNA, 20 bp, Artificial Sequence
  Description of Artificial Sequence: Synthetic oligonucleotide
  Target: SCNA; (+) strand; PAM type: YTN; PAM sequence: CTA
cagaagaaaaggggcttata

SEQ ID NO: 74663 - DNA, 20 bp, Artificial Sequence
  Description of Artificial Sequence: Synthetic oligonucleotide
  Target: SCNA; (+) strand; PAM type: YTN; PAM sequence: CTT
ataacaagtgtatagtacac

SEQ ID NO: 74664 - DNA, 20 bp, Artificial Sequence
  Description of Artificial Sequence: Synthetic oligonucleotide
  Target: SCNA; (+) strand; PAM type: YTN; PAM sequence: TTA
taacaagtgtatagtacaca

SEQ ID NO: 74665 - DNA, 20 bp, Artificial Sequence
  Description of Artificial Sequence: Synthetic oligonucleotide
  Target: SCNA; (+) strand; PAM type: YTN; PAM sequence: TTC
agaaacattttgtttcatgg

SEQ ID NO: 74666 - DNA, 20 bp, Artificial Sequence
  Description of Artificial Sequence: Synthetic oligonucleotide
  Target: SCNA; (+) strand; PAM type: YTN; PAM sequence: TTT
tgtttcatggatgtttcagt

SEQ ID NO: 74667 - DNA, 20 bp, Artificial Sequence
  Description of Artificial Sequence: Synthetic oligonucleotide
  Target: SCNA; (+) strand; PAM type: YTN; PAM sequence: TTT
gtttcatggatgtttcagta

SEQ ID NO: 74668 - DNA, 20 bp, Artificial Sequence
  Description of Artificial Sequence: Synthetic oligonucleotide
  Target: SCNA; (+) strand; PAM type: YTN; PAM sequence: TTG
tttcatggatgtttcagtaa

SEQ ID NO: 74669 - DNA, 20 bp, Artificial Sequence
  Description of Artificial Sequence: Synthetic oligonucleotide
  Target: SCNA; (+) strand; PAM type: YTN; PAM sequence: TTT
catggatgtttcagtaaatg

SEQ ID NO: 74670 - DNA, 20 bp, Artificial Sequence
  Description of Artificial Sequence: Synthetic oligonucleotide
  Target: SCNA; (+) strand; PAM type: YTN; PAM sequence: TTC
atggatgtttcagtaaatgc

SEQ ID NO: 74671 - DNA, 20 bp, Artificial Sequence
  Description of Artificial Sequence: Synthetic oligonucleotide
  Target: SCNA; (+) strand; PAM type: YTN; PAM sequence: TTT
cagtaaatgcttcatttcta

SEQ ID NO: 74672 - DNA, 20 bp, Artificial Sequence
  Description of Artificial Sequence: Synthetic oligonucleotide
  Target: SCNA; (+) strand; PAM type: YTN; PAM sequence: TTC
agtaaatgcttcatttctat

SEQ ID NO: 74673 - DNA, 20 bp, Artificial Sequence
  Description of Artificial Sequence: Synthetic oligonucleotide
  Target: SCNA; (+) strand; PAM type: YTN; PAM sequence: CTT
catttctatgtaggaggtat

SEQ ID NO: 74674 - DNA, 20 bp, Artificial Sequence
  Description of Artificial Sequence: Synthetic oligonucleotide
  Target: SCNA; (+) strand; PAM type: YTN; PAM sequence: TTC
atttctatgtaggaggtata

SEQ ID NO: 74675 - DNA, 20 bp, Artificial Sequence
  Description of Artificial Sequence: Synthetic oligonucleotide
  Target: SCNA; (+) strand; PAM type: YTN; PAM sequence: TTT
ctatgtaggaggtataagat

SEQ ID NO: 74676 - DNA, 20 bp, Artificial Sequence
  Description of Artificial Sequence: Synthetic oligonucleotide
  Target: SCNA; (+) strand; PAM type: YTN; PAM sequence: TTC
tatgtaggaggtataagatt

SEQ ID NO: 74677 - DNA, 20 bp, Artificial Sequence
  Description of Artificial Sequence: Synthetic oligonucleotide
  Target: SCNA; (+) strand; PAM type: YTN; PAM sequence: CTA
tgtaggaggtataagattcc

SEQ ID NO: 74678 - DNA, 20 bp, Artificial Sequence
  Description of Artificial Sequence: Synthetic oligonucleotide
  Target: SCNA; (+) strand; PAM type: YTN; PAM sequence: TTC
ctgctaaaaatacattccct

SEQ ID NO: 74679 - DNA, 20 bp, Artificial Sequence
  Description of Artificial Sequence: Synthetic oligonucleotide
  Target: SCNA; (+) strand; PAM type: YTN; PAM sequence: CTG
ctaaaaatacattcccttcc

SEQ ID NO: 74680 - DNA, 20 bp, Artificial Sequence
  Description of Artificial Sequence: Synthetic oligonucleotide
  Target: SCNA; (+) strand; PAM type: YTN; PAM sequence: CTA
aaaatacattcccttccctg

SEQ ID NO: 74681 - DNA, 20 bp, Artificial Sequence
  Description of Artificial Sequence: Synthetic oligonucleotide
  Target: SCNA; (+) strand; PAM type: YTN; PAM sequence: TTC
ccttccctgaatattcacaa

SEQ ID NO: 74682 - DNA, 20 bp, Artificial Sequence
  Description of Artificial Sequence: Synthetic oligonucleotide
  Target: SCNA; (+) strand; PAM type: YTN; PAM sequence: CTT
ccctgaatattcacaatagc

SEQ ID NO: 74683 - DNA, 20 bp, Artificial Sequence
  Description of Artificial Sequence: Synthetic oligonucleotide
  Target: SCNA; (+) strand; PAM type: YTN; PAM sequence: TTC
cctgaatattcacaatagct

SEQ ID NO: 74684 - DNA, 20 bp, Artificial Sequence
  Description of Artificial Sequence: Synthetic oligonucleotide
  Target: SCNA; (+) strand; PAM type: YTN; PAM sequence: CTG
aatattcacaatagcttgcc

SEQ ID NO: 74685 - DNA, 20 bp, Artificial Sequence
  Description of Artificial Sequence: Synthetic oligonucleotide
  Target: SCNA; (+) strand; PAM type: YTN; PAM sequence: TTC
acaatagcttgccaaaaatt

SEQ ID NO: 74686 - DNA, 20 bp, Artificial Sequence
  Description of Artificial Sequence: Synthetic oligonucleotide
  Target: SCNA; (+) strand; PAM type: YTN; PAM sequence: CTT
gccaaaaattctcacaaatg

SEQ ID NO: 74687 - DNA, 20 bp, Artificial Sequence
  Description of Artificial Sequence: Synthetic oligonucleotide
  Target: SCNA; (+) strand; PAM type: YTN; PAM sequence: TTG
ccaaaaattctcacaaatga

SEQ ID NO: 74688 - DNA, 20 bp, Artificial Sequence
  Description of Artificial Sequence: Synthetic oligonucleotide
  Target: SCNA; (+) strand; PAM type: YTN; PAM sequence: TTC
tcacaaatgaataaagacag

SEQ ID NO: 74689 - DNA, 20 bp, Artificial Sequence
  Description of Artificial Sequence: Synthetic oligonucleotide
  Target: SCNA; (+) strand; PAM type: YTN; PAM sequence: CTC
acaaatgaataaagacagaa

SEQ ID NO: 74690 - DNA, 20 bp, Artificial Sequence
  Description of Artificial Sequence: Synthetic oligonucleotide
  Target: SCNA; (+) strand; PAM type: YTN; PAM sequence: CTG
attaactgtattaagtgtcc

SEQ ID NO: 74691 - DNA, 20 bp, Artificial Sequence
  Description of Artificial Sequence: Synthetic oligonucleotide
  Target: SCNA; (+) strand; PAM type: YTN; PAM sequence: TTA
actgtattaagtgtcctact

SEQ ID NO: 74692 - DNA, 20 bp, Artificial Sequence
  Description of Artificial Sequence: Synthetic oligonucleotide
  Target: SCNA; (+) strand; PAM type: YTN; PAM sequence: CTG
tattaagtgtcctacttaat

SEQ ID NO: 74693 - DNA, 20 bp, Artificial Sequence
  Description of Artificial Sequence: Synthetic oligonucleotide
  Target: SCNA; (+) strand; PAM type: YTN; PAM sequence: TTA
agtgtcctacttaatacaat

SEQ ID NO: 74694 - DNA, 20 bp, Artificial Sequence
  Description of Artificial Sequence: Synthetic oligonucleotide
  Target: SCNA; (+) strand; PAM type: YTN; PAM sequence: CTA
cttaatacaataataattca

SEQ ID NO: 74695 - DNA, 20 bp, Artificial Sequence
  Description of Artificial Sequence: Synthetic oligonucleotide
  Target: SCNA; (+) strand; PAM type: YTN; PAM sequence: CTT
aatacaataataattcaggt

SEQ ID NO: 74696 - DNA, 20 bp, Artificial Sequence
  Description of Artificial Sequence: Synthetic oligonucleotide
  Target: SCNA; (+) strand; PAM type: YTN; PAM sequence: TTA
atacaataataattcaggtt

SEQ ID NO: 74697 - DNA, 20 bp, Artificial Sequence
  Description of Artificial Sequence: Synthetic oligonucleotide
  Target: SCNA; (+) strand; PAM type: YTN; PAM sequence: TTC
aggttttaaataatttcaac

SEQ ID NO: 74698 - DNA, 20 bp, Artificial Sequence
  Description of Artificial Sequence: Synthetic oligonucleotide
  Target: SCNA; (+) strand; PAM type: YTN; PAM sequence: TTT
taaataatttcaacatcagt

SEQ ID NO: 74699 - DNA, 20 bp, Artificial Sequence
  Description of Artificial Sequence: Synthetic oligonucleotide
  Target: SCNA; (+) strand; PAM type: YTN; PAM sequence: TTT
aaataatttcaacatcagtt

SEQ ID NO: 74700 - DNA, 20 bp, Artificial Sequence
  Description of Artificial Sequence: Synthetic oligonucleotide
  Target: SCNA; (+) strand; PAM type: YTN; PAM sequence: TTA
aataatttcaacatcagttc

SEQ ID NO: 74701 - DNA, 20 bp, Artificial Sequence
  Description of Artificial Sequence: Synthetic oligonucleotide
  Target: SCNA; (+) strand; PAM type: YTN; PAM sequence: TTT
caacatcagttcattatatt

SEQ ID NO: 74702 - DNA, 20 bp, Artificial Sequence
  Description of Artificial Sequence: Synthetic oligonucleotide
  Target: SCNA; (+) strand; PAM type: YTN; PAM sequence: TTC
aacatcagttcattatatta

SEQ ID NO: 74703 - DNA, 20 bp, Artificial Sequence
  Description of Artificial Sequence: Synthetic oligonucleotide
  Target: SCNA; (+) strand; PAM type: YTN; PAM sequence: TTC
attatattaattaatctcat

SEQ ID NO: 74704 - DNA, 20 bp, Artificial Sequence
  Description of Artificial Sequence: Synthetic oligonucleotide
  Target: SCNA; (+) strand; PAM type: YTN; PAM sequence: TTA
tattaattaatctcataaaa

SEQ ID NO: 74705 - DNA, 20 bp, Artificial Sequence
  Description of Artificial Sequence: Synthetic oligonucleotide
  Target: SCNA; (+) strand; PAM type: YTN; PAM sequence: TTA
attaatctcataaaaacctc

SEQ ID NO: 74706 - DNA, 20 bp, Artificial Sequence
  Description of Artificial Sequence: Synthetic oligonucleotide
  Target: SCNA; (+) strand; PAM type: YTN; PAM sequence: TTA
atctcataaaaacctcccaa

SEQ ID NO: 74707 - DNA, 20 bp, Artificial Sequence
  Description of Artificial Sequence: Synthetic oligonucleotide
  Target: SCNA; (+) strand; PAM type: YTN; PAM sequence: CTC
ataaaaacctcccaattaat

SEQ ID NO: 74708 - DNA, 20 bp, Artificial Sequence
  Description of Artificial Sequence: Synthetic oligonucleotide
  Target: SCNA; (+) strand; PAM type: YTN; PAM sequence: CTC
ccaattaatgtactatgtat

SEQ ID NO: 74709 - DNA, 20 bp, Artificial Sequence
  Description of Artificial Sequence: Synthetic oligonucleotide
  Target: SCNA; (+) strand; PAM type: YTN; PAM sequence: TTA
atgtactatgtataaatttt

SEQ ID NO: 74710 - DNA, 20 bp, Artificial Sequence
  Description of Artificial Sequence: Synthetic oligonucleotide
  Target: SCNA; (+) strand; PAM type: YTN; PAM sequence: CTA
tgtataaattttatcaagta

SEQ ID NO: 74711 - DNA, 20 bp, Artificial Sequence
  Description of Artificial Sequence: Synthetic oligonucleotide
  Target: SCNA; (+) strand; PAM type: YTN; PAM sequence: TTT
tatcaagtactttgatgaat

SEQ ID NO: 74712 - DNA, 20 bp, Artificial Sequence
  Description of Artificial Sequence: Synthetic oligonucleotide
  Target: SCNA; (+) strand; PAM type: YTN; PAM sequence: TTT
atcaagtactttgatgaatt

SEQ ID NO: 74713 - DNA, 20 bp, Artificial Sequence
  Description of Artificial Sequence: Synthetic oligonucleotide
  Target: SCNA; (+) strand; PAM type: YTN; PAM sequence: TTA
tcaagtactttgatgaatta

SEQ ID NO: 74714 - DNA, 20 bp, Artificial Sequence
  Description of Artificial Sequence: Synthetic oligonucleotide
  Target: SCNA; (+) strand; PAM type: YTN; PAM sequence: CTT
tgatgaattaagaggaaggt

SEQ ID NO: 74715 - DNA, 20 bp, Artificial Sequence
  Description of Artificial Sequence: Synthetic oligonucleotide
  Target: SCNA; (+) strand; PAM type: YTN; PAM sequence: TTT
gatgaattaagaggaaggta

SEQ ID NO: 74716 - DNA, 20 bp, Artificial Sequence
  Description of Artificial Sequence: Synthetic oligonucleotide
  Target: SCNA; (+) strand; PAM type: YTN; PAM sequence: TTG
atgaattaagaggaaggtaa

SEQ ID NO: 74717 - DNA, 20 bp, Artificial Sequence
  Description of Artificial Sequence: Synthetic oligonucleotide
  Target: SCNA; (+) strand; PAM type: YTN; PAM sequence: TTA
agaggaaggtaaaggttttc

SEQ ID NO: 74718 - DNA, 20 bp, Artificial Sequence
  Description of Artificial Sequence: Synthetic oligonucleotide
  Target: SCNA; (+) strand; PAM type: YTN; PAM sequence: TTT
tcatcaatatctgcaataat

SEQ ID NO: 74719 - DNA, 20 bp, Artificial Sequence
  Description of Artificial Sequence: Synthetic oligonucleotide
  Target: SCNA; (+) strand; PAM type: YTN; PAM sequence: TTT
catcaatatctgcaataata

SEQ ID NO: 74720 - DNA, 20 bp, Artificial Sequence
  Description of Artificial Sequence: Synthetic oligonucleotide
  Target: SCNA; (+) strand; PAM type: YTN; PAM sequence: TTC
atcaatatctgcaataatat

SEQ ID NO: 74721 - DNA, 20 bp, Artificial Sequence
  Description of Artificial Sequence: Synthetic oligonucleotide
  Target: SCNA; (+) strand; PAM type: YTN; PAM sequence: CTG
caataatattattaaattgg

SEQ ID NO: 74722 - DNA, 20 bp, Artificial Sequence
  Description of Artificial Sequence: Synthetic oligonucleotide
  Target: SCNA; (+) strand; PAM type: YTN; PAM sequence: TTA
ttaaattgggctaaaaggaa

SEQ ID NO: 74723 - DNA, 20 bp, Artificial Sequence
  Description of Artificial Sequence: Synthetic oligonucleotide
  Target: SCNA; (+) strand; PAM type: YTN; PAM sequence: TTA
aattgggctaaaaggaacca

SEQ ID NO: 74724 - DNA, 20 bp, Artificial Sequence
  Description of Artificial Sequence: Synthetic oligonucleotide
  Target: SCNA; (+) strand; PAM type: YTN; PAM sequence: TTG
ggctaaaaggaaccaagaca

SEQ ID NO: 74725 - DNA, 20 bp, Artificial Sequence
  Description of Artificial Sequence: Synthetic oligonucleotide
  Target: SCNA; (+) strand; PAM type: YTN; PAM sequence: CTA
aaaggaaccaagacaaatga

SEQ ID NO: 74726 - DNA, 20 bp, Artificial Sequence
  Description of Artificial Sequence: Synthetic oligonucleotide
  Target: SCNA; (+) strand; PAM type: YTN; PAM sequence: CTA
atcattattttagactaaaa

SEQ ID NO: 74727 - DNA, 20 bp, Artificial Sequence
  Description of Artificial Sequence: Synthetic oligonucleotide
  Target: SCNA; (+) strand; PAM type: YTN; PAM sequence: TTA
ttttagactaaaacaggaaa

SEQ ID NO: 74728 - DNA, 20 bp, Artificial Sequence
  Description of Artificial Sequence: Synthetic oligonucleotide
  Target: SCNA; (+) strand; PAM type: YTN; PAM sequence: TTT
tagactaaaacaggaaaaga

SEQ ID NO: 74729 - DNA, 20 bp, Artificial Sequence
  Description of Artificial Sequence: Synthetic oligonucleotide
  Target: SCNA; (+) strand; PAM type: YTN; PAM sequence: TTT
agactaaaacaggaaaagaa

SEQ ID NO: 74730 - DNA, 20 bp, Artificial Sequence
  Description of Artificial Sequence: Synthetic oligonucleotide
  Target: SCNA; (+) strand; PAM type: YTN; PAM sequence: TTA
gactaaaacaggaaaagaac

SEQ ID NO: 74731 - DNA, 20 bp, Artificial Sequence
  Description of Artificial Sequence: Synthetic oligonucleotide
  Target: SCNA; (+) strand; PAM type: YTN; PAM sequence: CTA
aaacaggaaaagaacatagt

SEQ ID NO: 74732 - DNA, 20 bp, Artificial Sequence
  Description of Artificial Sequence: Synthetic oligonucleotide
  Target: SCNA; (+) strand; PAM type: YTN; PAM sequence: TTA
tctaggacactgtctcctta

SEQ ID NO: 74733 - DNA, 20 bp, Artificial Sequence
  Description of Artificial Sequence: Synthetic oligonucleotide
  Target: SCNA; (+) strand; PAM type: YTN; PAM sequence: CTA
ggacactgtctccttagttt

SEQ ID NO: 74734 - DNA, 20 bp, Artificial Sequence
  Description of Artificial Sequence: Synthetic oligonucleotide
  Target: SCNA; (+) strand; PAM type: YTN; PAM sequence: CTG
tctccttagtttttaatgtt

SEQ ID NO: 74735 - DNA, 20 bp, Artificial Sequence
  Description of Artificial Sequence: Synthetic oligonucleotide
  Target: SCNA; (+) strand; PAM type: YTN; PAM sequence: CTC
cttagtttttaatgtttctt

SEQ ID NO: 74736 - DNA, 20 bp, Artificial Sequence
  Description of Artificial Sequence: Synthetic oligonucleotide
  Target: SCNA; (+) strand; PAM type: YTN; PAM sequence: CTT
agtttttaatgtttcttccc

SEQ ID NO: 74737 - DNA, 20 bp, Artificial Sequence
  Description of Artificial Sequence: Synthetic oligonucleotide
  Target: SCNA; (+) strand; PAM type: YTN; PAM sequence: TTA
gtttttaatgtttcttcccc

SEQ ID NO: 74738 - DNA, 20 bp, Artificial Sequence
  Description of Artificial Sequence: Synthetic oligonucleotide
  Target: SCNA; (+) strand; PAM type: YTN; PAM sequence: TTT
ttaatgtttcttccccagat

SEQ ID NO: 74739 - DNA, 20 bp, Artificial Sequence
  Description of Artificial Sequence: Synthetic oligonucleotide
  Target: SCNA; (+) strand; PAM type: YTN; PAM sequence: TTT
taatgtttcttccccagatg

SEQ ID NO: 74740 - DNA, 20 bp, Artificial Sequence
  Description of Artificial Sequence: Synthetic oligonucleotide
  Target: SCNA; (+) strand; PAM type: YTN; PAM sequence: TTT
aatgtttcttccccagatgg

SEQ ID NO: 74741 - DNA, 20 bp, Artificial Sequence
  Description of Artificial Sequence: Synthetic oligonucleotide
  Target: SCNA; (+) strand; PAM type: YTN; PAM sequence: TTA
atgtttcttccccagatggg

SEQ ID NO: 74742 - DNA, 20 bp, Artificial Sequence
  Description of Artificial Sequence: Synthetic oligonucleotide
  Target: SCNA; (+) strand; PAM type: YTN; PAM sequence: TTT
cttccccagatgggtttgca

SEQ ID NO: 74743 - DNA, 20 bp, Artificial Sequence
  Description of Artificial Sequence: Synthetic oligonucleotide
  Target: SCNA; (+) strand; PAM type: YTN; PAM sequence: TTC
ttccccagatgggtttgcac

SEQ ID NO: 74744 - DNA, 20 bp, Artificial Sequence
  Description of Artificial Sequence: Synthetic oligonucleotide
  Target: SCNA; (+) strand; PAM type: YTN; PAM sequence: CTT
ccccagatgggtttgcacat

SEQ ID NO: 74745 - DNA, 20 bp, Artificial Sequence
  Description of Artificial Sequence: Synthetic oligonucleotide
  Target: SCNA; (+) strand; PAM type: YTN; PAM sequence: TTC
cccagatgggtttgcacatc

SEQ ID NO: 74746 - DNA, 20 bp, Artificial Sequence
  Description of Artificial Sequence: Synthetic oligonucleotide
  Target: SCNA; (+) strand; PAM type: YTN; PAM sequence: TTT
gcacatcttttgcctgaaaa

SEQ ID NO: 74747 - DNA, 20 bp, Artificial Sequence
  Description of Artificial Sequence: Synthetic oligonucleotide
  Target: SCNA; (+) strand; PAM type: YTN; PAM sequence: TTG
cacatcttttgcctgaaaaa

SEQ ID NO: 74748 - DNA, 20 bp, Artificial Sequence
  Description of Artificial Sequence: Synthetic oligonucleotide
  Target: SCNA; (+) strand; PAM type: YTN; PAM sequence: CTT
ttgcctgaaaaaagaactta

SEQ ID NO: 74749 - DNA, 20 bp, Artificial Sequence
  Description of Artificial Sequence: Synthetic oligonucleotide
  Target: SCNA; (+) strand; PAM type: YTN; PAM sequence: TTT
tgcctgaaaaaagaacttat

SEQ ID NO: 74750 - DNA, 20 bp, Artificial Sequence
  Description of Artificial Sequence: Synthetic oligonucleotide
  Target: SCNA; (+) strand; PAM type: YTN; PAM sequence: TTT
gcctgaaaaaagaacttatt

SEQ ID NO: 74751 - DNA, 20 bp, Artificial Sequence
  Description of Artificial Sequence: Synthetic oligonucleotide
  Target: SCNA; (+) strand; PAM type: YTN; PAM sequence: TTG
cctgaaaaaagaacttattt

SEQ ID NO: 74752 - DNA, 20 bp, Artificial Sequence
  Description of Artificial Sequence: Synthetic oligonucleotide
  Target: SCNA; (+) strand; PAM type: YTN; PAM sequence: CTG
aaaaaagaacttatttccac

SEQ ID NO: 74753 - DNA, 20 bp, Artificial Sequence
  Description of Artificial Sequence: Synthetic oligonucleotide
  Target: SCNA; (+) strand; PAM type: YTN; PAM sequence: CTT
atttccaccacacaagttac

SEQ ID NO: 74754 - DNA, 20 bp, Artificial Sequence
  Description of Artificial Sequence: Synthetic oligonucleotide
  Target: SCNA; (+) strand; PAM type: YTN; PAM sequence: TTA
tttccaccacacaagttaca

SEQ ID NO: 74755 - DNA, 20 bp, Artificial Sequence
  Description of Artificial Sequence: Synthetic oligonucleotide
  Target: SCNA; (+) strand; PAM type: YTN; PAM sequence: TTT
ccaccacacaagttacatta

SEQ ID NO: 74756 - DNA, 20 bp, Artificial Sequence
  Description of Artificial Sequence: Synthetic oligonucleotide
  Target: SCNA; (+) strand; PAM type: YTN; PAM sequence: TTC
caccacacaagttacattaa

SEQ ID NO: 74757 - DNA, 20 bp, Artificial Sequence
  Description of Artificial Sequence: Synthetic oligonucleotide
  Target: SCNA; (+) strand; PAM type: YTN; PAM sequence: TTA
cattaaatacgtcttttagc

SEQ ID NO: 74758 - DNA, 20 bp, Artificial Sequence
  Description of Artificial Sequence: Synthetic oligonucleotide
  Target: SCNA; (+) strand; PAM type: YTN; PAM sequence: TTA
aatacgtcttttagctccta

SEQ ID NO: 74759 - DNA, 20 bp, Artificial Sequence
  Description of Artificial Sequence: Synthetic oligonucleotide
  Target: SCNA; (+) strand; PAM type: YTN; PAM sequence: CTT
ttagctcctagggagctgaa

SEQ ID NO: 74760 - DNA, 20 bp, Artificial Sequence
  Description of Artificial Sequence: Synthetic oligonucleotide
  Target: SCNA; (+) strand; PAM type: YTN; PAM sequence: TTT
tagctcctagggagctgaaa

SEQ ID NO: 74761 - DNA, 20 bp, Artificial Sequence
  Description of Artificial Sequence: Synthetic oligonucleotide
  Target: SCNA; (+) strand; PAM type: YTN; PAM sequence: TTT
agctcctagggagctgaaag

SEQ ID NO: 74762 - DNA, 20 bp, Artificial Sequence
  Description of Artificial Sequence: Synthetic oligonucleotide
  Target: SCNA; (+) strand; PAM type: YTN; PAM sequence: TTA
gctcctagggagctgaaagg

SEQ ID NO: 74763 - DNA, 20 bp, Artificial Sequence
  Description of Artificial Sequence: Synthetic oligonucleotide
  Target: SCNA; (+) strand; PAM type: YTN; PAM sequence: CTC
ctagggagctgaaaggcaag

SEQ ID NO: 74764 - DNA, 20 bp, Artificial Sequence
  Description of Artificial Sequence: Synthetic oligonucleotide
  Target: SCNA; (+) strand; PAM type: YTN; PAM sequence: CTA
gggagctgaaaggcaagtcc

SEQ ID NO: 74765 - DNA, 20 bp, Artificial Sequence
  Description of Artificial Sequence: Synthetic oligonucleotide
  Target: SCNA; (+) strand; PAM type: YTN; PAM sequence: CTG
aaaggcaagtccaaaatgaa

SEQ ID NO: 74766 - DNA, 20 bp, Artificial Sequence
  Description of Artificial Sequence: Synthetic oligonucleotide
  Target: SCNA; (+) strand; PAM type: YTN; PAM sequence: CTT
ttttattcgttatgtcatga

SEQ ID NO: 74767 - DNA, 20 bp, Artificial Sequence
  Description of Artificial Sequence: Synthetic oligonucleotide
  Target: SCNA; (+) strand; PAM type: YTN; PAM sequence: TTT
tttattcgttatgtcatgaa

SEQ ID NO: 74768 - DNA, 20 bp, Artificial Sequence
  Description of Artificial Sequence: Synthetic oligonucleotide
  Target: SCNA; (+) strand; PAM type: YTN; PAM sequence: TTT
ttattcgttatgtcatgaaa

SEQ ID NO: 74769 - DNA, 20 bp, Artificial Sequence
  Description of Artificial Sequence: Synthetic oligonucleotide
  Target: SCNA; (+) strand; PAM type: YTN; PAM sequence: TTT
tattcgttatgtcatgaaac

SEQ ID NO: 74770 - DNA, 20 bp, Artificial Sequence
  Description of Artificial Sequence: Synthetic oligonucleotide
  Target: SCNA; (+) strand; PAM type: YTN; PAM sequence: TTT
attcgttatgtcatgaaact

SEQ ID NO: 74771 - DNA, 20 bp, Artificial Sequence
  Description of Artificial Sequence: Synthetic oligonucleotide
  Target: SCNA; (+) strand; PAM type: YTN; PAM sequence: TTA
ttcgttatgtcatgaaacta

SEQ ID NO: 74772 - DNA, 20 bp, Artificial Sequence
  Description of Artificial Sequence: Synthetic oligonucleotide
  Target: SCNA; (+) strand; PAM type: YTN; PAM sequence: TTC
gttatgtcatgaaactataa

SEQ ID NO: 74773 - DNA, 20 bp, Artificial Sequence
  Description of Artificial Sequence: Synthetic oligonucleotide
  Target: SCNA; (+) strand; PAM type: YTN; PAM sequence: TTA
tgtcatgaaactataacact

SEQ ID NO: 74774 - DNA, 20 bp, Artificial Sequence
  Description of Artificial Sequence: Synthetic oligonucleotide
  Target: SCNA; (+) strand; PAM type: YTN; PAM sequence: CTA
taacactgcattattaatac

SEQ ID NO: 74775 - DNA, 20 bp, Artificial Sequence
  Description of Artificial Sequence: Synthetic oligonucleotide
  Target: SCNA; (+) strand; PAM type: YTN; PAM sequence: CTG
cattattaatacacctctaa

SEQ ID NO: 74776 - DNA, 20 bp, Artificial Sequence
  Description of Artificial Sequence: Synthetic oligonucleotide
  Target: SCNA; (+) strand; PAM type: YTN; PAM sequence: TTA
ttaatacacctctaatcaat

SEQ ID NO: 74777 - DNA, 20 bp, Artificial Sequence
  Description of Artificial Sequence: Synthetic oligonucleotide
  Target: SCNA; (+) strand; PAM type: YTN; PAM sequence: TTA
atacacctctaatcaataaa

SEQ ID NO: 74778 - DNA, 20 bp, Artificial Sequence
  Description of Artificial Sequence: Synthetic oligonucleotide
  Target: SCNA; (+) strand; PAM type: YTN; PAM sequence: CTC
taatcaataaagcctaaaaa

SEQ ID NO: 74779 - DNA, 20 bp, Artificial Sequence
  Description of Artificial Sequence: Synthetic oligonucleotide
  Target: SCNA; (+) strand; PAM type: YTN; PAM sequence: CTA
atcaataaagcctaaaaatc

SEQ ID NO: 74780 - DNA, 20 bp, Artificial Sequence
  Description of Artificial Sequence: Synthetic oligonucleotide
  Target: SCNA; (+) strand; PAM type: YTN; PAM sequence: CTA
aaaatccattcccaagagac

SEQ ID NO: 74781 - DNA, 20 bp, Artificial Sequence
  Description of Artificial Sequence: Synthetic oligonucleotide
  Target: SCNA; (+) strand; PAM type: YTN; PAM sequence: TTC
ccaagagacccagatttctc

SEQ ID NO: 74782 - DNA, 20 bp, Artificial Sequence
  Description of Artificial Sequence: Synthetic oligonucleotide
  Target: SCNA; (+) strand; PAM type: YTN; PAM sequence: TTT
ctctaccagttctagttgta

SEQ ID NO: 74783 - DNA, 20 bp, Artificial Sequence
  Description of Artificial Sequence: Synthetic oligonucleotide
  Target: SCNA; (+) strand; PAM type: YTN; PAM sequence: TTC
tctaccagttctagttgtac

SEQ ID NO: 74784 - DNA, 20 bp, Artificial Sequence
  Description of Artificial Sequence: Synthetic oligonucleotide
  Target: SCNA; (+) strand; PAM type: YTN; PAM sequence: CTC
taccagttctagttgtacta

SEQ ID NO: 74785 - DNA, 20 bp, Artificial Sequence
  Description of Artificial Sequence: Synthetic oligonucleotide
  Target: SCNA; (+) strand; PAM type: YTN; PAM sequence: CTA
ccagttctagttgtactagt

SEQ ID NO: 74786 - DNA, 20 bp, Artificial Sequence
  Description of Artificial Sequence: Synthetic oligonucleotide
  Target: SCNA; (+) strand; PAM type: YTN; PAM sequence: TTC
tagttgtactagttattctc

SEQ ID NO: 74787 - DNA, 20 bp, Artificial Sequence
  Description of Artificial Sequence: Synthetic oligonucleotide
  Target: SCNA; (+) strand; PAM type: YTN; PAM sequence: CTA
gttgtactagttattctcag

SEQ ID NO: 74788 - DNA, 20 bp, Artificial Sequence
  Description of Artificial Sequence: Synthetic oligonucleotide
  Target: SCNA; (+) strand; PAM type: YTN; PAM sequence: TTG
tactagttattctcagcggt

SEQ ID NO: 74789 - DNA, 20 bp, Artificial Sequence
  Description of Artificial Sequence: Synthetic oligonucleotide
  Target: SCNA; (+) strand; PAM type: YTN; PAM sequence: CTA
gttattctcagcggtaagtt

SEQ ID NO: 74790 - DNA, 20 bp, Artificial Sequence
  Description of Artificial Sequence: Synthetic oligonucleotide
  Target: SCNA; (+) strand; PAM type: YTN; PAM sequence: TTA
ttctcagcggtaagttttcc

SEQ ID NO: 74791 - DNA, 20 bp, Artificial Sequence
  Description of Artificial Sequence: Synthetic oligonucleotide
  Target: SCNA; (+) strand; PAM type: YTN; PAM sequence: TTC
tcagcggtaagttttcctag

SEQ ID NO: 74792 - DNA, 20 bp, Artificial Sequence
  Description of Artificial Sequence: Synthetic oligonucleotide
  Target: SCNA; (+) strand; PAM type: YTN; PAM sequence: CTC
agcggtaagttttcctagtt

SEQ ID NO: 74793 - DNA, 20 bp, Artificial Sequence
  Description of Artificial Sequence: Synthetic oligonucleotide
  Target: SCNA; (+) strand; PAM type: YTN; PAM sequence: TTT
tcctagttcttaatattaaa

SEQ ID NO: 74794 - DNA, 20 bp, Artificial Sequence
  Description of Artificial Sequence: Synthetic oligonucleotide
  Target: SCNA; (+) strand; PAM type: YTN; PAM sequence: TTT
cctagttcttaatattaaaa

SEQ ID NO: 74795 - DNA, 20 bp, Artificial Sequence
  Description of Artificial Sequence: Synthetic oligonucleotide
  Target: SCNA; (+) strand; PAM type: YTN; PAM sequence: TTC
ctagttcttaatattaaaat

SEQ ID NO: 74796 - DNA, 20 bp, Artificial Sequence
  Description of Artificial Sequence: Synthetic oligonucleotide
  Target: SCNA; (+) strand; PAM type: YTN; PAM sequence: CTA
gttcttaatattaaaatgag

SEQ ID NO: 74797 - DNA, 20 bp, Artificial Sequence
  Description of Artificial Sequence: Synthetic oligonucleotide
  Target: SCNA; (+) strand; PAM type: YTN; PAM sequence: TTC
ttaatattaaaatgagaggt

SEQ ID NO: 74798 - DNA, 20 bp, Artificial Sequence
  Description of Artificial Sequence: Synthetic oligonucleotide
  Target: SCNA; (+) strand; PAM type: YTN; PAM sequence: CTT
aatattaaaatgagaggtcc

SEQ ID NO: 74799 - DNA, 20 bp, Artificial Sequence
  Description of Artificial Sequence: Synthetic oligonucleotide
  Target: SCNA; (+) strand; PAM type: YTN; PAM sequence: TTA
atattaaaatgagaggtcca

SEQ ID NO: 74800 - DNA, 20 bp, Artificial Sequence
  Description of Artificial Sequence: Synthetic oligonucleotide
  Target: SCNA; (+) strand; PAM type: YTN; PAM sequence: TTA
aaatgagaggtccagaggct

SEQ ID NO: 74801 - DNA, 20 bp, Artificial Sequence
  Description of Artificial Sequence: Synthetic oligonucleotide
  Target: SCNA; (+) strand; PAM type: YTN; PAM sequence: CTC
taggtggtggaggggttgct

SEQ ID NO: 74802 - DNA, 20 bp, Artificial Sequence
  Description of Artificial Sequence: Synthetic oligonucleotide
  Target: SCNA; (+) strand; PAM type: YTN; PAM sequence: CTA
ggtggtggaggggttgctag

SEQ ID NO: 74803 - DNA, 20 bp, Artificial Sequence
  Description of Artificial Sequence: Synthetic oligonucleotide
  Target: SCNA; (+) strand; PAM type: YTN; PAM sequence: TTG
ctagctaaaaggagggtgtc

SEQ ID NO: 74804 - DNA, 20 bp, Artificial Sequence
  Description of Artificial Sequence: Synthetic oligonucleotide
  Target: SCNA; (+) strand; PAM type: YTN; PAM sequence: CTA
gctaaaaggagggtgtccta

SEQ ID NO: 74805 - DNA, 20 bp, Artificial Sequence
  Description of Artificial Sequence: Synthetic oligonucleotide
  Target: SCNA; (+) strand; PAM type: YTN; PAM sequence: CTA
aaaggagggtgtcctacaga

SEQ ID NO: 74806 - DNA, 20 bp, Artificial Sequence
  Description of Artificial Sequence: Synthetic oligonucleotide
  Target: SCNA; (+) strand; PAM type: YTN; PAM sequence: CTA
cagaaagggacagagtctcc

SEQ ID NO: 74807 - DNA, 20 bp, Artificial Sequence
  Description of Artificial Sequence: Synthetic oligonucleotide
  Target: SCNA; (+) strand; PAM type: YTN; PAM sequence: CTC
catgagcaatgctggatggt

SEQ ID NO: 74808 - DNA, 20 bp, Artificial Sequence
  Description of Artificial Sequence: Synthetic oligonucleotide
  Target: SCNA; (+) strand; PAM type: YTN; PAM sequence: CTG
gatggtacctgtggtccagt

SEQ ID NO: 74809 - DNA, 20 bp, Artificial Sequence
  Description of Artificial Sequence: Synthetic oligonucleotide
  Target: SCNA; (+) strand; PAM type: YTN; PAM sequence: CTG
tggtccagttcttggcacat

SEQ ID NO: 74810 - DNA, 20 bp, Artificial Sequence
  Description of Artificial Sequence: Synthetic oligonucleotide
  Target: SCNA; (+) strand; PAM type: YTN; PAM sequence: TTC
ttggcacatggtgagtgctg

SEQ ID NO: 74811 - DNA, 20 bp, Artificial Sequence
  Description of Artificial Sequence: Synthetic oligonucleotide
  Target: SCNA; (+) strand; PAM type: YTN; PAM sequence: CTT
ggcacatggtgagtgctgcc

SEQ ID NO: 74812 - DNA, 20 bp, Artificial Sequence
  Description of Artificial Sequence: Synthetic oligonucleotide
  Target: SCNA; (+) strand; PAM type: YTN; PAM sequence: TTG
gcacatggtgagtgctgcct

SEQ ID NO: 74813 - DNA, 20 bp, Artificial Sequence
  Description of Artificial Sequence: Synthetic oligonucleotide
  Target: SCNA; (+) strand; PAM type: YTN; PAM sequence: CTG
cctaagtcttggtgccctag

SEQ ID NO: 74814 - DNA, 20 bp, Artificial Sequence
  Description of Artificial Sequence: Synthetic oligonucleotide
  Target: SCNA; (+) strand; PAM type: YTN; PAM sequence: CTA
agtcttggtgccctagacct

SEQ ID NO: 74815 - DNA, 20 bp, Artificial Sequence
  Description of Artificial Sequence: Synthetic oligonucleotide
  Target: SCNA; (+) strand; PAM type: YTN; PAM sequence: CTT
ggtgccctagacctgcagca

SEQ ID NO: 74816 - DNA, 20 bp, Artificial Sequence
  Description of Artificial Sequence: Synthetic oligonucleotide
  Target: SCNA; (+) strand; PAM type: YTN; PAM sequence: TTG
gtgccctagacctgcagcag

SEQ ID NO: 74817 - DNA, 20 bp, Artificial Sequence
  Description of Artificial Sequence: Synthetic oligonucleotide
  Target: SCNA; (+) strand; PAM type: YTN; PAM sequence: CTA
gacctgcagcagcaatcggc

SEQ ID NO: 74818 - DNA, 20 bp, Artificial Sequence
  Description of Artificial Sequence: Synthetic oligonucleotide
  Target: SCNA; (+) strand; PAM type: YTN; PAM sequence: CTG
cagcagcaatcggcggggaa

SEQ ID NO: 74819 - DNA, 20 bp, Artificial Sequence
  Description of Artificial Sequence: Synthetic oligonucleotide
  Target: SCNA; (+) strand; PAM type: YTN; PAM sequence: CTT
tggtgacaaaagtgatggca

SEQ ID NO: 74820 - DNA, 20 bp, Artificial Sequence
  Description of Artificial Sequence: Synthetic oligonucleotide
  Target: SCNA; (+) strand; PAM type: YTN; PAM sequence: TTT
ggtgacaaaagtgatggcag

SEQ ID NO: 74821 - DNA, 20 bp, Artificial Sequence
  Description of Artificial Sequence: Synthetic oligonucleotide
  Target: SCNA; (+) strand; PAM type: YTN; PAM sequence: TTG
gtgacaaaagtgatggcaga

SEQ ID NO: 74822 - DNA, 20 bp, Artificial Sequence
  Description of Artificial Sequence: Synthetic oligonucleotide
  Target: SCNA; (+) strand; PAM type: YTN; PAM sequence: CTA
aggacaaagaaacaagggta

SEQ ID NO: 74823 - DNA, 20 bp, Artificial Sequence
  Description of Artificial Sequence: Synthetic oligonucleotide
  Target: SCNA; (+) strand; PAM type: YTN; PAM sequence: TTC
cagcagcagcctatccgaat

SEQ ID NO: 74824 - DNA, 20 bp, Artificial Sequence
  Description of Artificial Sequence: Synthetic oligonucleotide
  Target: SCNA; (+) strand; PAM type: YTN; PAM sequence: CTA
tccgaataacaaaatcctta

SEQ ID NO: 74825 - DNA, 20 bp, Artificial Sequence
  Description of Artificial Sequence: Synthetic oligonucleotide
  Target: SCNA; (+) strand; PAM type: YTN; PAM sequence: CTT
atctcaggaaaaccatctct

SEQ ID NO: 74826 - DNA, 20 bp, Artificial Sequence
  Description of Artificial Sequence: Synthetic oligonucleotide
  Target: SCNA; (+) strand; PAM type: YTN; PAM sequence: TTA
tctcaggaaaaccatctctg

SEQ ID NO: 74827 - DNA, 20 bp, Artificial Sequence
  Description of Artificial Sequence: Synthetic oligonucleotide
  Target: SCNA; (+) strand; PAM type: YTN; PAM sequence: CTC
aggaaaaccatctctgctat

SEQ ID NO: 74828 - DNA, 20 bp, Artificial Sequence
  Description of Artificial Sequence: Synthetic oligonucleotide
  Target: SCNA; (+) strand; PAM type: YTN; PAM sequence: CTC
tgctatgaatacatacacac

SEQ ID NO: 74829 - DNA, 20 bp, Artificial Sequence
  Description of Artificial Sequence: Synthetic oligonucleotide
  Target: SCNA; (+) strand; PAM type: YTN; PAM sequence: CTG
ctatgaatacatacacacac

SEQ ID NO: 74830 - DNA, 20 bp, Artificial Sequence
  Description of Artificial Sequence: Synthetic oligonucleotide
  Target: SCNA; (+) strand; PAM type: YTN; PAM sequence: CTA
tgaatacatacacacacata

SEQ ID NO: 74831 - DNA, 20 bp, Artificial Sequence
  Description of Artificial Sequence: Synthetic oligonucleotide
  Target: SCNA; (+) strand; PAM type: YTN; PAM sequence: TTC
atcaggtatcaatttaatta

SEQ ID NO: 74832 - DNA, 20 bp, Artificial Sequence
  Description of Artificial Sequence: Synthetic oligonucleotide
  Target: SCNA; (+) strand; PAM type: YTN; PAM sequence: TTT
aattactgattggaacactg

SEQ ID NO: 74833 - DNA, 20 bp, Artificial Sequence
  Description of Artificial Sequence: Synthetic oligonucleotide
  Target: SCNA; (+) strand; PAM type: YTN; PAM sequence: TTA
attactgattggaacactgt

SEQ ID NO: 74834 - DNA, 20 bp, Artificial Sequence
  Description of Artificial Sequence: Synthetic oligonucleotide
  Target: SCNA; (+) strand; PAM type: YTN; PAM sequence: TTA
ctgattggaacactgtaaac

SEQ ID NO: 74835 - DNA, 20 bp, Artificial Sequence
  Description of Artificial Sequence: Synthetic oligonucleotide
  Target: SCNA; (+) strand; PAM type: YTN; PAM sequence: CTG
attggaacactgtaaacttg

SEQ ID NO: 74836 - DNA, 20 bp, Artificial Sequence
  Description of Artificial Sequence: Synthetic oligonucleotide
  Target: SCNA; (+) strand; PAM type: YTN; PAM sequence: TTG
gaacactgtaaacttgttca

SEQ ID NO: 74837 - DNA, 20 bp, Artificial Sequence
  Description of Artificial Sequence: Synthetic oligonucleotide
  Target: SCNA; (+) strand; PAM type: YTN; PAM sequence: CTG
taaacttgttcaaaatagag

SEQ ID NO: 74838 - DNA, 20 bp, Artificial Sequence
  Description of Artificial Sequence: Synthetic oligonucleotide
  Target: SCNA; (+) strand; PAM type: YTN; PAM sequence: CTT
gttcaaaatagaggttatta

SEQ ID NO: 74839 - DNA, 20 bp, Artificial Sequence
  Description of Artificial Sequence: Synthetic oligonucleotide
  Target: SCNA; (+) strand; PAM type: YTN; PAM sequence: TTG
ttcaaaatagaggttattat

SEQ ID NO: 74840 - DNA, 20 bp, Artificial Sequence
  Description of Artificial Sequence: Synthetic oligonucleotide
  Target: SCNA; (+) strand; PAM type: YTN; PAM sequence: TTC
aaaatagaggttattattca

SEQ ID NO: 74841 - DNA, 20 bp, Artificial Sequence
  Description of Artificial Sequence: Synthetic oligonucleotide
  Target: SCNA; (+) strand; PAM type: YTN; PAM sequence: TTA
ttattcagtatcttcagctg

SEQ ID NO: 74842 - DNA, 20 bp, Artificial Sequence
  Description of Artificial Sequence: Synthetic oligonucleotide
  Target: SCNA; (+) strand; PAM type: YTN; PAM sequence: TTA
ttcagtatcttcagctgtcc

SEQ ID NO: 74843 - DNA, 20 bp, Artificial Sequence
  Description of Artificial Sequence: Synthetic oligonucleotide
  Target: SCNA; (+) strand; PAM type: YTN; PAM sequence: TTC
agtatcttcagctgtccgga

SEQ ID NO: 74844 - DNA, 20 bp, Artificial Sequence
  Description of Artificial Sequence: Synthetic oligonucleotide
  Target: SCNA; (+) strand; PAM type: YTN; PAM sequence: CTT
cagctgtccggattcaccat

SEQ ID NO: 74845 - DNA, 20 bp, Artificial Sequence
  Description of Artificial Sequence: Synthetic oligonucleotide
  Target: SCNA; (+) strand; PAM type: YTN; PAM sequence: TTC
agctgtccggattcaccatt

SEQ ID NO: 74846 - DNA, 20 bp, Artificial Sequence
  Description of Artificial Sequence: Synthetic oligonucleotide
  Target: SCNA; (+) strand; PAM type: YTN; PAM sequence: CTG
tccggattcaccattttata

SEQ ID NO: 74847 - DNA, 20 bp, Artificial Sequence
  Description of Artificial Sequence: Synthetic oligonucleotide
  Target: SCNA; (+) strand; PAM type: YTN; PAM sequence: TTC
accattttatagcatgctct

SEQ ID NO: 74848 - DNA, 20 bp, Artificial Sequence
  Description of Artificial Sequence: Synthetic oligonucleotide
  Target: SCNA; (+) strand; PAM type: YTN; PAM sequence: TTT
tatagcatgctctctgacat

SEQ ID NO: 74849 - DNA, 20 bp, Artificial Sequence
  Description of Artificial Sequence: Synthetic oligonucleotide
  Target: SCNA; (+) strand; PAM type: YTN; PAM sequence: TTT
atagcatgctctctgacatt

SEQ ID NO: 74850 - DNA, 20 bp, Artificial Sequence
  Description of Artificial Sequence: Synthetic oligonucleotide
  Target: SCNA; (+) strand; PAM type: YTN; PAM sequence: TTA
tagcatgctctctgacatta

SEQ ID NO: 74851 - DNA, 20 bp, Artificial Sequence
  Description of Artificial Sequence: Synthetic oligonucleotide
  Target: SCNA; (+) strand; PAM type: YTN; PAM sequence: CTC
tctgacattagtgagaatga

SEQ ID NO: 74852 - DNA, 20 bp, Artificial Sequence
  Description of Artificial Sequence: Synthetic oligonucleotide
  Target: SCNA; (+) strand; PAM type: YTN; PAM sequence: CTC
tgacattagtgagaatgaat

SEQ ID NO: 74853 - DNA, 20 bp, Artificial Sequence
  Description of Artificial Sequence: Synthetic oligonucleotide
  Target: SCNA; (+) strand; PAM type: YTN; PAM sequence: CTG
acattagtgagaatgaattg

SEQ ID NO: 74854 - DNA, 20 bp, Artificial Sequence
  Description of Artificial Sequence: Synthetic oligonucleotide
  Target: SCNA; (+) strand; PAM type: YTN; PAM sequence: TTA
gtgagaatgaattgtactct

SEQ ID NO: 74855 - DNA, 20 bp, Artificial Sequence
  Description of Artificial Sequence: Synthetic oligonucleotide
  Target: SCNA; (+) strand; PAM type: YTN; PAM sequence: TTG
tactctacatatttaggtaa

SEQ ID NO: 74856 - DNA, 20 bp, Artificial Sequence
  Description of Artificial Sequence: Synthetic oligonucleotide
  Target: SCNA; (+) strand; PAM type: YTN; PAM sequence: CTC
tacatatttaggtaatggtt

SEQ ID NO: 74857 - DNA, 20 bp, Artificial Sequence
  Description of Artificial Sequence: Synthetic oligonucleotide
  Target: SCNA; (+) strand; PAM type: YTN; PAM sequence: CTA
catatttaggtaatggtttg

SEQ ID NO: 74858 - DNA, 20 bp, Artificial Sequence
  Description of Artificial Sequence: Synthetic oligonucleotide
  Target: SCNA; (+) strand; PAM type: YTN; PAM sequence: TTT
aggtaatggtttggtataca

SEQ ID NO: 74859 - DNA, 20 bp, Artificial Sequence
  Description of Artificial Sequence: Synthetic oligonucleotide
  Target: SCNA; (+) strand; PAM type: YTN; PAM sequence: TTA
ggtaatggtttggtatacag

SEQ ID NO: 74860 - DNA, 20 bp, Artificial Sequence
  Description of Artificial Sequence: Synthetic oligonucleotide
  Target: SCNA; (+) strand; PAM type: YTN; PAM sequence: TTT
ggtatacagctgctattaac

SEQ ID NO: 74861 - DNA, 20 bp, Artificial Sequence
  Description of Artificial Sequence: Synthetic oligonucleotide
  Target: SCNA; (+) strand; PAM type: YTN; PAM sequence: TTG
gtatacagctgctattaacg

SEQ ID NO: 74862 - DNA, 20 bp, Artificial Sequence
  Description of Artificial Sequence: Synthetic oligonucleotide
  Target: SCNA; (+) strand; PAM type: YTN; PAM sequence: CTG
ctattaacgatttgtgtgct

SEQ ID NO: 74863 - DNA, 20 bp, Artificial Sequence
  Description of Artificial Sequence: Synthetic oligonucleotide
  Target: SCNA; (+) strand; PAM type: YTN; PAM sequence: CTA
ttaacgatttgtgtgctatg

SEQ ID NO: 74864 - DNA, 20 bp, Artificial Sequence
  Description of Artificial Sequence: Synthetic oligonucleotide
  Target: SCNA; (+) strand; PAM type: YTN; PAM sequence: TTA
acgatttgtgtgctatgcaa

SEQ ID NO: 74865 - DNA, 20 bp, Artificial Sequence
  Description of Artificial Sequence: Synthetic oligonucleotide
  Target: SCNA; (+) strand; PAM type: YTN; PAM sequence: TTT
gtgtgctatgcaatatttgt

SEQ ID NO: 74866 - DNA, 20 bp, Artificial Sequence
  Description of Artificial Sequence: Synthetic oligonucleotide
  Target: SCNA; (+) strand; PAM type: YTN; PAM sequence: TTG
tgtgctatgcaatatttgtg

SEQ ID NO: 74867 - DNA, 20 bp, Artificial Sequence
  Description of Artificial Sequence: Synthetic oligonucleotide
  Target: SCNA; (+) strand; PAM type: YTN; PAM sequence: CTA
tgcaatatttgtggtctcct

SEQ ID NO: 74868 - DNA, 20 bp, Artificial Sequence
  Description of Artificial Sequence: Synthetic oligonucleotide
  Target: SCNA; (+) strand; PAM type: YTN; PAM sequence: TTT
gtggtctcctgtcacccacc

SEQ ID NO: 74869 - DNA, 20 bp, Artificial Sequence
  Description of Artificial Sequence: Synthetic oligonucleotide
  Target: SCNA; (+) strand; PAM type: YTN; PAM sequence: TTG
tggtctcctgtcacccacct

SEQ ID NO: 74870 - DNA, 20 bp, Artificial Sequence
  Description of Artificial Sequence: Synthetic oligonucleotide
  Target: SCNA; (+) strand; PAM type: YTN; PAM sequence: CTC
ctgtcacccacctcaggaga

SEQ ID NO: 74871 - DNA, 20 bp, Artificial Sequence
  Description of Artificial Sequence: Synthetic oligonucleotide
  Target: SCNA; (+) strand; PAM type: YTN; PAM sequence: CTG
tcacccacctcaggagacac

SEQ ID NO: 74872 - DNA, 20 bp, Artificial Sequence
  Description of Artificial Sequence: Synthetic oligonucleotide
  Target: SCNA; (+) strand; PAM type: YTN; PAM sequence: CTC
aggagacacaactgatgtaa

SEQ ID NO: 74873 - DNA, 20 bp, Artificial Sequence
  Description of Artificial Sequence: Synthetic oligonucleotide
  Target: SCNA; (+) strand; PAM type: YTN; PAM sequence: CTG
atgtaagtgagacagctcag

SEQ ID NO: 74874 - DNA, 20 bp, Artificial Sequence
  Description of Artificial Sequence: Synthetic oligonucleotide
  Target: SCNA; (+) strand; PAM type: YTN; PAM sequence: CTC
agcatatcctatggaaaaat

SEQ ID NO: 74875 - DNA, 20 bp, Artificial Sequence
  Description of Artificial Sequence: Synthetic oligonucleotide
  Target: SCNA; (+) strand; PAM type: YTN; PAM sequence: CTA
tggaaaaatctcttattaaa

SEQ ID NO: 74876 - DNA, 20 bp, Artificial Sequence
  Description of Artificial Sequence: Synthetic oligonucleotide
  Target: SCNA; (+) strand; PAM type: YTN; PAM sequence: CTC
ttattaaataaaggtcaatg

SEQ ID NO: 74877 - DNA, 20 bp, Artificial Sequence
  Description of Artificial Sequence: Synthetic oligonucleotide
  Target: SCNA; (+) strand; PAM type: YTN; PAM sequence: CTT
attaaataaaggtcaatgat

SEQ ID NO: 74878 - DNA, 20 bp, Artificial Sequence
  Description of Artificial Sequence: Synthetic oligonucleotide
  Target: SCNA; (+) strand; PAM type: YTN; PAM sequence: TTA
ttaaataaaggtcaatgatt

SEQ ID NO: 74879 - DNA, 20 bp, Artificial Sequence
  Description of Artificial Sequence: Synthetic oligonucleotide
  Target: SCNA; (+) strand; PAM type: YTN; PAM sequence: TTA
aataaaggtcaatgattaag

SEQ ID NO: 74880 - DNA, 20 bp, Artificial Sequence
  Description of Artificial Sequence: Synthetic oligonucleotide
  Target: SCNA; (+) strand; PAM type: YTN; PAM sequence: TTA
agtagtatagtcattgaatt

SEQ ID NO: 74881 - DNA, 20 bp, Artificial Sequence
  Description of Artificial Sequence: Synthetic oligonucleotide
  Target: SCNA; (+) strand; PAM type: YTN; PAM sequence: TTG
aattaatttgttttccttaa

SEQ ID NO: 74882 - DNA, 20 bp, Artificial Sequence
  Description of Artificial Sequence: Synthetic oligonucleotide
  Target: SCNA; (+) strand; PAM type: YTN; PAM sequence: TTA
atttgttttccttaagagga

SEQ ID NO: 74883 - DNA, 20 bp, Artificial Sequence
  Description of Artificial Sequence: Synthetic oligonucleotide
  Target: SCNA; (+) strand; PAM type: YTN; PAM sequence: TTT
gttttccttaagaggagctc

SEQ ID NO: 74884 - DNA, 20 bp, Artificial Sequence
  Description of Artificial Sequence: Synthetic oligonucleotide
  Target: SCNA; (+) strand; PAM type: YTN; PAM sequence: TTG
ttttccttaagaggagctct

SEQ ID NO: 74885 - DNA, 20 bp, Artificial Sequence
  Description of Artificial Sequence: Synthetic oligonucleotide
  Target: SCNA; (+) strand; PAM type: YTN; PAM sequence: TTT
tccttaagaggagctctcct

SEQ ID NO: 74886 - DNA, 20 bp, Artificial Sequence
  Description of Artificial Sequence: Synthetic oligonucleotide
  Target: SCNA; (+) strand; PAM type: YTN; PAM sequence: TTT
ccttaagaggagctctcctc

SEQ ID NO: 74887 - DNA, 20 bp, Artificial Sequence
  Description of Artificial Sequence: Synthetic oligonucleotide
  Target: SCNA; (+) strand; PAM type: YTN; PAM sequence: TTC
cttaagaggagctctcctca

SEQ ID NO: 74888 - DNA, 20 bp, Artificial Sequence
  Description of Artificial Sequence: Synthetic oligonucleotide
  Target: SCNA; (+) strand; PAM type: YTN; PAM sequence: CTT
aagaggagctctcctcaggt

SEQ ID NO: 74889 - DNA, 20 bp, Artificial Sequence
  Description of Artificial Sequence: Synthetic oligonucleotide
  Target: SCNA; (+) strand; PAM type: YTN; PAM sequence: TTA
agaggagctctcctcaggtc

SEQ ID NO: 74890 - DNA, 20 bp, Artificial Sequence
  Description of Artificial Sequence: Synthetic oligonucleotide
  Target: SCNA; (+) strand; PAM type: YTN; PAM sequence: CTC
tcctcaggtcaaaattaaag

SEQ ID NO: 74891 - DNA, 20 bp, Artificial Sequence
  Description of Artificial Sequence: Synthetic oligonucleotide
  Target: SCNA; (+) strand; PAM type: YTN; PAM sequence: CTC
ctcaggtcaaaattaaagtc

SEQ ID NO: 74892 - DNA, 20 bp, Artificial Sequence
  Description of Artificial Sequence: Synthetic oligonucleotide
  Target: SCNA; (+) strand; PAM type: YTN; PAM sequence: CTC
aggtcaaaattaaagtcagg

SEQ ID NO: 74893 - DNA, 20 bp, Artificial Sequence
  Description of Artificial Sequence: Synthetic oligonucleotide
  Target: SCNA; (+) strand; PAM type: YTN; PAM sequence: TTA
aagtcagggatagataagtc

SEQ ID NO: 74894 - DNA, 20 bp, Artificial Sequence
  Description of Artificial Sequence: Synthetic oligonucleotide
  Target: SCNA; (+) strand; PAM type: YTN; PAM sequence: CTC
tcatatggttcccccagtgt

SEQ ID NO: 74895 - DNA, 20 bp, Artificial Sequence
  Description of Artificial Sequence: Synthetic oligonucleotide
  Target: SCNA; (+) strand; PAM type: YTN; PAM sequence: CTC
atatggttcccccagtgtga

SEQ ID NO: 74896 - DNA, 20 bp, Artificial Sequence
  Description of Artificial Sequence: Synthetic oligonucleotide
  Target: SCNA; (+) strand; PAM type: YTN; PAM sequence: TTC
ccccagtgtgagaggagcaa

SEQ ID NO: 74897 - DNA, 20 bp, Artificial Sequence
  Description of Artificial Sequence: Synthetic oligonucleotide
  Target: SCNA; (+) strand; PAM type: YTN; PAM sequence: CTG
ttggtttcctttggtggctt

SEQ ID NO: 74898 - DNA, 20 bp, Artificial Sequence
  Description of Artificial Sequence: Synthetic oligonucleotide
  Target: SCNA; (+) strand; PAM type: YTN; PAM sequence: TTG
gtttcctttggtggcttttt

SEQ ID NO: 74899 - DNA, 20 bp, Artificial Sequence
  Description of Artificial Sequence: Synthetic oligonucleotide
  Target: SCNA; (+) strand; PAM type: YTN; PAM sequence: TTT
cctttggtggcttttttctt

SEQ ID NO: 74900 - DNA, 20 bp, Artificial Sequence
  Description of Artificial Sequence: Synthetic oligonucleotide
  Target: SCNA; (+) strand; PAM type: YTN; PAM sequence: TTC
ctttggtggcttttttcttg

SEQ ID NO: 74901 - DNA, 20 bp, Artificial Sequence
  Description of Artificial Sequence: Synthetic oligonucleotide
  Target: SCNA; (+) strand; PAM type: YTN; PAM sequence: CTT
tggtggcttttttcttgtct

SEQ ID NO: 74902 - DNA, 20 bp, Artificial Sequence
  Description of Artificial Sequence: Synthetic oligonucleotide
  Target: SCNA; (+) strand; PAM type: YTN; PAM sequence: TTT
ggtggcttttttcttgtctc

SEQ ID NO: 74903 - DNA, 20 bp, Artificial Sequence
  Description of Artificial Sequence: Synthetic oligonucleotide
  Target: SCNA; (+) strand; PAM type: YTN; PAM sequence: TTG
gtggcttttttcttgtctca

SEQ ID NO: 74904 - DNA, 20 bp, Artificial Sequence
  Description of Artificial Sequence: Synthetic oligonucleotide
  Target: SCNA; (+) strand; PAM type: YTN; PAM sequence: CTT
ttttcttgtctcagaagaat

SEQ ID NO: 74905 - DNA, 20 bp, Artificial Sequence
  Description of Artificial Sequence: Synthetic oligonucleotide
  Target: SCNA; (+) strand; PAM type: YTN; PAM sequence: TTT
tttcttgtctcagaagaata

SEQ ID NO: 74906 - DNA, 20 bp, Artificial Sequence
  Description of Artificial Sequence: Synthetic oligonucleotide
  Target: SCNA; (+) strand; PAM type: YTN; PAM sequence: TTT
ttcttgtctcagaagaataa

SEQ ID NO: 74907 - DNA, 20 bp, Artificial Sequence
  Description of Artificial Sequence: Synthetic oligonucleotide
  Target: SCNA; (+) strand; PAM type: YTN; PAM sequence: TTT
tcttgtctcagaagaataaa

SEQ ID NO: 74908 - DNA, 20 bp, Artificial Sequence
  Description of Artificial Sequence: Synthetic oligonucleotide
  Target: SCNA; (+) strand; PAM type: YTN; PAM sequence: TTT
cttgtctcagaagaataaat

SEQ ID NO: 74909 - DNA, 20 bp, Artificial Sequence
  Description of Artificial Sequence: Synthetic oligonucleotide
  Target: SCNA; (+) strand; PAM type: YTN; PAM sequence: TTC
ttgtctcagaagaataaatt

SEQ ID NO: 74910 - DNA, 20 bp, Artificial Sequence
  Description of Artificial Sequence: Synthetic oligonucleotide
  Target: SCNA; (+) strand; PAM type: YTN; PAM sequence: CTT
gtctcagaagaataaattaa

SEQ ID NO: 74911 - DNA, 20 bp, Artificial Sequence
  Description of Artificial Sequence: Synthetic oligonucleotide
  Target: SCNA; (+) strand; PAM type: YTN; PAM sequence: TTG
tctcagaagaataaattaat

SEQ ID NO: 74912 - DNA, 20 bp, Artificial Sequence
  Description of Artificial Sequence: Synthetic oligonucleotide
  Target: SCNA; (+) strand; PAM type: YTN; PAM sequence: CTC
agaagaataaattaataaat

SEQ ID NO: 74913 - DNA, 20 bp, Artificial Sequence
  Description of Artificial Sequence: Synthetic oligonucleotide
  Target: SCNA; (+) strand; PAM type: YTN; PAM sequence: TTA
ataaattctgcatagctgtg

SEQ ID NO: 74914 - DNA, 20 bp, Artificial Sequence
  Description of Artificial Sequence: Synthetic oligonucleotide
  Target: SCNA; (+) strand; PAM type: YTN; PAM sequence: TTC
tgcatagctgtgattttgtg

SEQ ID NO: 74915 - DNA, 20 bp, Artificial Sequence
  Description of Artificial Sequence: Synthetic oligonucleotide
  Target: SCNA; (+) strand; PAM type: YTN; PAM sequence: CTG
catagctgtgattttgtgtg

SEQ ID NO: 74916 - DNA, 20 bp, Artificial Sequence
  Description of Artificial Sequence: Synthetic oligonucleotide
  Target: SCNA; (+) strand; PAM type: YTN; PAM sequence: CTG
tgattttgtgtgacaaaaat

SEQ ID NO: 74917 - DNA, 20 bp, Artificial Sequence
  Description of Artificial Sequence: Synthetic oligonucleotide
  Target: SCNA; (+) strand; PAM type: YTN; PAM sequence: TTT
tgtgtgacaaaaatgaagaa

SEQ ID NO: 74918 - DNA, 20 bp, Artificial Sequence
  Description of Artificial Sequence: Synthetic oligonucleotide
  Target: SCNA; (+) strand; PAM type: YTN; PAM sequence: TTT
gtgtgacaaaaatgaagaac

SEQ ID NO: 74919 - DNA, 20 bp, Artificial Sequence
  Description of Artificial Sequence: Synthetic oligonucleotide
  Target: SCNA; (+) strand; PAM type: YTN; PAM sequence: TTG
tgtgacaaaaatgaagaacc

SEQ ID NO: 74920 - DNA, 20 bp, Artificial Sequence
  Description of Artificial Sequence: Synthetic oligonucleotide
  Target: SCNA; (+) strand; PAM type: YTN; PAM sequence: CTG
tgcctctgtttacaaagcaa

SEQ ID NO: 74921 - DNA, 20 bp, Artificial Sequence
  Description of Artificial Sequence: Synthetic oligonucleotide
  Target: SCNA; (+) strand; PAM type: YTN; PAM sequence: CTC
tgtttacaaagcaatgcaat

SEQ ID NO: 74922 - DNA, 20 bp, Artificial Sequence
  Description of Artificial Sequence: Synthetic oligonucleotide
  Target: SCNA; (+) strand; PAM type: YTN; PAM sequence: CTG
tttacaaagcaatgcaatgg

SEQ ID NO: 74923 - DNA, 20 bp, Artificial Sequence
  Description of Artificial Sequence: Synthetic oligonucleotide
  Target: SCNA; (+) strand; PAM type: YTN; PAM sequence: TTT
acaaagcaatgcaatgggaa

SEQ ID NO: 74924 - DNA, 20 bp, Artificial Sequence
  Description of Artificial Sequence: Synthetic oligonucleotide
  Target: SCNA; (+) strand; PAM type: YTN; PAM sequence: TTA
caaagcaatgcaatgggaat

SEQ ID NO: 74925 - DNA, 20 bp, Artificial Sequence
  Description of Artificial Sequence: Synthetic oligonucleotide
  Target: SCNA; (+) strand; PAM type: YTN; PAM sequence: CTC
ccctggtgtctcttccccat

SEQ ID NO: 74926 - DNA, 20 bp, Artificial Sequence
  Description of Artificial Sequence: Synthetic oligonucleotide
  Target: SCNA; (+) strand; PAM type: YTN; PAM sequence: CTG
gtgtctcttccccatcacca

SEQ ID NO: 74927 - DNA, 20 bp, Artificial Sequence
  Description of Artificial Sequence: Synthetic oligonucleotide
  Target: SCNA; (+) strand; PAM type: YTN; PAM sequence: CTC
ttccccatcaccaccacttt

SEQ ID NO: 74928 - DNA, 20 bp, Artificial Sequence
  Description of Artificial Sequence: Synthetic oligonucleotide
  Target: SCNA; (+) strand; PAM type: YTN; PAM sequence: CTT
ccccatcaccaccactttgc

SEQ ID NO: 74929 - DNA, 20 bp, Artificial Sequence
  Description of Artificial Sequence: Synthetic oligonucleotide
  Target: SCNA; (+) strand; PAM type: YTN; PAM sequence: TTC
cccatcaccaccactttgcc

SEQ ID NO: 74930 - DNA, 20 bp, Artificial Sequence
  Description of Artificial Sequence: Synthetic oligonucleotide
  Target: SCNA; (+) strand; PAM type: YTN; PAM sequence: CTT
tgcccgctgaaatgttctta

SEQ ID NO: 74931 - DNA, 20 bp, Artificial Sequence
  Description of Artificial Sequence: Synthetic oligonucleotide
  Target: SCNA; (+) strand; PAM type: YTN; PAM sequence: TTT
gcccgctgaaatgttcttaa

SEQ ID NO: 74932 - DNA, 20 bp, Artificial Sequence
  Description of Artificial Sequence: Synthetic oligonucleotide
  Target: SCNA; (+) strand; PAM type: YTN; PAM sequence: TTG
cccgctgaaatgttcttaac

SEQ ID NO: 74933 - DNA, 20 bp, Artificial Sequence
  Description of Artificial Sequence: Synthetic oligonucleotide
  Target: SCNA; (+) strand; PAM type: YTN; PAM sequence: CTG
aaatgttcttaaccccaccc

SEQ ID NO: 74934 - DNA, 20 bp, Artificial Sequence
  Description of Artificial Sequence: Synthetic oligonucleotide
  Target: SCNA; (+) strand; PAM type: YTN; PAM sequence: TTC
ttaaccccacccaccataaa

SEQ ID NO: 74935 - DNA, 20 bp, Artificial Sequence
  Description of Artificial Sequence: Synthetic oligonucleotide
  Target: SCNA; (+) strand; PAM type: YTN; PAM sequence: CTT
aaccccacccaccataaaag

SEQ ID NO: 74936 - DNA, 20 bp, Artificial Sequence
  Description of Artificial Sequence: Synthetic oligonucleotide
  Target: SCNA; (+) strand; PAM type: YTN; PAM sequence: TTA
accccacccaccataaaagg

SEQ ID NO: 74937 - DNA, 20 bp, Artificial Sequence
  Description of Artificial Sequence: Synthetic oligonucleotide
  Target: SCNA; (+) strand; PAM type: YTN; PAM sequence: TTG
ttgcttcaaactcatgctga

SEQ ID NO: 74938 - DNA, 20 bp, Artificial Sequence
  Description of Artificial Sequence: Synthetic oligonucleotide
  Target: SCNA; (+) strand; PAM type: YTN; PAM sequence: TTG
cttcaaactcatgctgattg

SEQ ID NO: 74939 - DNA, 20 bp, Artificial Sequence
  Description of Artificial Sequence: Synthetic oligonucleotide
  Target: SCNA; (+) strand; PAM type: YTN; PAM sequence: CTT
caaactcatgctgattgaaa

SEQ ID NO: 74940 - DNA, 20 bp, Artificial Sequence
  Description of Artificial Sequence: Synthetic oligonucleotide
  Target: SCNA; (+) strand; PAM type: YTN; PAM sequence: TTC
aaactcatgctgattgaaat

SEQ ID NO: 74941 - DNA, 20 bp, Artificial Sequence
  Description of Artificial Sequence: Synthetic oligonucleotide
  Target: SCNA; (+) strand; PAM type: YTN; PAM sequence: CTC
atgctgattgaaattttcca

SEQ ID NO: 74942 - DNA, 20 bp, Artificial Sequence
  Description of Artificial Sequence: Synthetic oligonucleotide
  Target: SCNA; (+) strand; PAM type: YTN; PAM sequence: CTG
attgaaattttccagctatt

SEQ ID NO: 74943 - DNA, 20 bp, Artificial Sequence
  Description of Artificial Sequence: Synthetic oligonucleotide
  Target: SCNA; (+) strand; PAM type: YTN; PAM sequence: TTG
aaattttccagctattttta

SEQ ID NO: 74944 - DNA, 20 bp, Artificial Sequence
  Description of Artificial Sequence: Synthetic oligonucleotide
  Target: SCNA; (+) strand; PAM type: YTN; PAM sequence: TTT
tccagctatttttaaataac

SEQ ID NO: 74945 - DNA, 20 bp, Artificial Sequence
  Description of Artificial Sequence: Synthetic oligonucleotide
  Target: SCNA; (+) strand; PAM type: YTN; PAM sequence: TTT
ccagctatttttaaataacc

SEQ ID NO: 74946 - DNA, 20 bp, Artificial Sequence
  Description of Artificial Sequence: Synthetic oligonucleotide
  Target: SCNA; (+) strand; PAM type: YTN; PAM sequence: TTC
cagctatttttaaataaccc

SEQ ID NO: 74947 - DNA, 20 bp, Artificial Sequence
  Description of Artificial Sequence: Synthetic oligonucleotide
  Target: SCNA; (+) strand; PAM type: YTN; PAM sequence: CTA
tttttaaataacccccacta

SEQ ID NO: 74948 - DNA, 20 bp, Artificial Sequence
  Description of Artificial Sequence: Synthetic oligonucleotide
  Target: SCNA; (+) strand; PAM type: YTN; PAM sequence: TTT
ttaaataacccccactactg

SEQ ID NO: 74949 - DNA, 20 bp, Artificial Sequence
  Description of Artificial Sequence: Synthetic oligonucleotide
  Target: SCNA; (+) strand; PAM type: YTN; PAM sequence: TTT
taaataacccccactactgg

SEQ ID NO: 74950 - DNA, 20 bp, Artificial Sequence
  Description of Artificial Sequence: Synthetic oligonucleotide
  Target: SCNA; (+) strand; PAM type: YTN; PAM sequence: TTT
aaataacccccactactgga

SEQ ID NO: 74951 - DNA, 20 bp, Artificial Sequence
  Description of Artificial Sequence: Synthetic oligonucleotide
  Target: SCNA; (+) strand; PAM type: YTN; PAM sequence: TTA
aataacccccactactggat

SEQ ID NO: 74952 - DNA, 20 bp, Artificial Sequence
  Description of Artificial Sequence: Synthetic oligonucleotide
  Target: SCNA; (+) strand; PAM type: YTN; PAM sequence: CTA
ctggatttcttgcttctatg

SEQ ID NO: 74953 - DNA, 20 bp, Artificial Sequence
  Description of Artificial Sequence: Synthetic oligonucleotide
  Target: SCNA; (+) strand; PAM type: YTN; PAM sequence: CTG
gatttcttgcttctatgtta

SEQ ID NO: 74954 - DNA, 20 bp, Artificial Sequence
  Description of Artificial Sequence: Synthetic oligonucleotide
  Target: SCNA; (+) strand; PAM type: YTN; PAM sequence: TTT
cttgcttctatgttatatga

SEQ ID NO: 74955 - DNA, 20 bp, Artificial Sequence
  Description of Artificial Sequence: Synthetic oligonucleotide
  Target: SCNA; (+) strand; PAM type: YTN; PAM sequence: TTC
ttgcttctatgttatatgac

SEQ ID NO: 74956 - DNA, 20 bp, Artificial Sequence
  Description of Artificial Sequence: Synthetic oligonucleotide
  Target: SCNA; (+) strand; PAM type: YTN; PAM sequence: CTT
gcttctatgttatatgacaa

SEQ ID NO: 74957 - DNA, 20 bp, Artificial Sequence
  Description of Artificial Sequence: Synthetic oligonucleotide
  Target: SCNA; (+) strand; PAM type: YTN; PAM sequence: TTG
cttctatgttatatgacaat

SEQ ID NO: 74958 - DNA, 20 bp, Artificial Sequence
  Description of Artificial Sequence: Synthetic oligonucleotide
  Target: SCNA; (+) strand; PAM type: YTN; PAM sequence: CTT
ctatgttatatgacaatgct

SEQ ID NO: 74959 - DNA, 20 bp, Artificial Sequence
  Description of Artificial Sequence: Synthetic oligonucleotide
  Target: SCNA; (+) strand; PAM type: YTN; PAM sequence: TTC
tatgttatatgacaatgctt

SEQ ID NO: 74960 - DNA, 20 bp, Artificial Sequence
  Description of Artificial Sequence: Synthetic oligonucleotide
  Target: SCNA; (+) strand; PAM type: YTN; PAM sequence: CTA
tgttatatgacaatgcttct

SEQ ID NO: 74961 - DNA, 20 bp, Artificial Sequence
  Description of Artificial Sequence: Synthetic oligonucleotide
  Target: SCNA; (+) strand; PAM type: YTN; PAM sequence: TTA
tatgacaatgcttctttcag

SEQ ID NO: 74962 - DNA, 20 bp, Artificial Sequence
  Description of Artificial Sequence: Synthetic oligonucleotide
  Target: SCNA; (+) strand; PAM type: YTN; PAM sequence: CTT
ctttcaggtgaaaatgtcct

SEQ ID NO: 74963 - DNA, 20 bp, Artificial Sequence
  Description of Artificial Sequence: Synthetic oligonucleotide
  Target: SCNA; (+) strand; PAM type: YTN; PAM sequence: TTC
tttcaggtgaaaatgtcctg

SEQ ID NO: 74964 - DNA, 20 bp, Artificial Sequence
  Description of Artificial Sequence: Synthetic oligonucleotide
  Target: SCNA; (+) strand; PAM type: YTN; PAM sequence: CTT
tcaggtgaaaatgtcctgga

SEQ ID NO: 74965 - DNA, 20 bp, Artificial Sequence
  Description of Artificial Sequence: Synthetic oligonucleotide
  Target: SCNA; (+) strand; PAM type: YTN; PAM sequence: TTT
caggtgaaaatgtcctggaa

SEQ ID NO: 74966 - DNA, 20 bp, Artificial Sequence
  Description of Artificial Sequence: Synthetic oligonucleotide
  Target: SCNA; (+) strand; PAM type: YTN; PAM sequence: TTC
aggtgaaaatgtcctggaaa

SEQ ID NO: 74967 - DNA, 20 bp, Artificial Sequence
  Description of Artificial Sequence: Synthetic oligonucleotide
  Target: SCNA; (+) strand; PAM type: YTN; PAM sequence: CTG
gaaacaagtaatttttacct

SEQ ID NO: 74968 - DNA, 20 bp, Artificial Sequence
  Description of Artificial Sequence: Synthetic oligonucleotide
  Target: SCNA; (+) strand; PAM type: YTN; PAM sequence: TTT
ttacctggctaccttttttt

SEQ ID NO: 74969 - DNA, 20 bp, Artificial Sequence
  Description of Artificial Sequence: Synthetic oligonucleotide
  Target: SCNA; (+) strand; PAM type: YTN; PAM sequence: TTT
tacctggctacctttttttt

SEQ ID NO: 74970 - DNA, 20 bp, Artificial Sequence
  Description of Artificial Sequence: Synthetic oligonucleotide
  Target: SCNA; (+) strand; PAM type: YTN; PAM sequence: TTT
acctggctaccttttttttt

SEQ ID NO: 74971 - DNA, 20 bp, Artificial Sequence
  Description of Artificial Sequence: Synthetic oligonucleotide
  Target: SCNA; (+) strand; PAM type: YTN; PAM sequence: TTA
cctggctacctttttttttt

SEQ ID NO: 74972 - DNA, 20 bp, Artificial Sequence
  Description of Artificial Sequence: Synthetic oligonucleotide
  Target: SCNA; (+) strand; PAM type: YTN; PAM sequence: CTG
gctacctttttttttttttt

SEQ ID NO: 74973 - DNA, 20 bp, Artificial Sequence
  Description of Artificial Sequence: Synthetic oligonucleotide
  Target: SCNA; (+) strand; PAM type: YTN; PAM sequence: CTA
cctttttttttttttttttt

SEQ ID NO: 74974 - DNA, 20 bp, Artificial Sequence
  Description of Artificial Sequence: Synthetic oligonucleotide
  Target: SCNA; (+) strand; PAM type: YTN; PAM sequence: CTT
ttttttttttttttttttta

SEQ ID NO: 74975 - DNA, 20 bp, Artificial Sequence
  Description of Artificial Sequence: Synthetic oligonucleotide
  Target: SCNA; (+) strand; PAM type: YTN; PAM sequence: TTT
ttttttttttttttttttat

SEQ ID NO: 74976 - DNA, 20 bp, Artificial Sequence
  Description of Artificial Sequence: Synthetic oligonucleotide
  Target: SCNA; (+) strand; PAM type: YTN; PAM sequence: TTT
tttttttttttttttttata

SEQ ID NO: 74977 - DNA, 20 bp, Artificial Sequence
  Description of Artificial Sequence: Synthetic oligonucleotide
  Target: SCNA; (+) strand; PAM type: YTN; PAM sequence: TTT
ttttttttttttttttataa

SEQ ID NO: 74978 - DNA, 20 bp, Artificial Sequence
  Description of Artificial Sequence: Synthetic oligonucleotide
  Target: SCNA; (+) strand; PAM type: YTN; PAM sequence: TTT
tttttttttttttttataaa

SEQ ID NO: 74979 - DNA, 20 bp, Artificial Sequence
  Description of Artificial Sequence: Synthetic oligonucleotide
  Target: SCNA; (+) strand; PAM type: YTN; PAM sequence: TTT
ttttttttttttttataaag

SEQ ID NO: 74980 - DNA, 20 bp, Artificial Sequence
  Description of Artificial Sequence: Synthetic oligonucleotide
  Target: SCNA; (+) strand; PAM type: YTN; PAM sequence: TTT
tttttttttttttataaaga

SEQ ID NO: 74981 - DNA, 20 bp, Artificial Sequence
  Description of Artificial Sequence: Synthetic oligonucleotide
  Target: SCNA; (+) strand; PAM type: YTN; PAM sequence: TTT
ttttttttttttataaagaa

SEQ ID NO: 74982 - DNA, 20 bp, Artificial Sequence
  Description of Artificial Sequence: Synthetic oligonucleotide
  Target: SCNA; (+) strand; PAM type: YTN; PAM sequence: TTT
tttttttttttataaagaaa

SEQ ID NO: 74983 - DNA, 20 bp, Artificial Sequence
  Description of Artificial Sequence: Synthetic oligonucleotide
  Target: SCNA; (+) strand; PAM type: YTN; PAM sequence: TTT
ttttttttttataaagaaag

SEQ ID NO: 74984 - DNA, 20 bp, Artificial Sequence
  Description of Artificial Sequence: Synthetic oligonucleotide
  Target: SCNA; (+) strand; PAM type: YTN; PAM sequence: TTT
tttttttttataaagaaaga

SEQ ID NO: 74985 - DNA, 20 bp, Artificial Sequence
  Description of Artificial Sequence: Synthetic oligonucleotide
  Target: SCNA; (+) strand; PAM type: YTN; PAM sequence: TTT
ttttttttataaagaaagaa

SEQ ID NO: 74986 - DNA, 20 bp, Artificial Sequence
  Description of Artificial Sequence: Synthetic oligonucleotide
  Target: SCNA; (+) strand; PAM type: YTN; PAM sequence: TTT
tttttttataaagaaagaag

SEQ ID NO: 74987 - DNA, 20 bp, Artificial Sequence
  Description of Artificial Sequence: Synthetic oligonucleotide
  Target: SCNA; (+) strand; PAM type: YTN; PAM sequence: TTT
ttttttataaagaaagaagt

SEQ ID NO: 74988 - DNA, 20 bp, Artificial Sequence
  Description of Artificial Sequence: Synthetic oligonucleotide
  Target: SCNA; (+) strand; PAM type: YTN; PAM sequence: TTT
tttttataaagaaagaagtt

SEQ ID NO: 74989 - DNA, 20 bp, Artificial Sequence
  Description of Artificial Sequence: Synthetic oligonucleotide
  Target: SCNA; (+) strand; PAM type: YTN; PAM sequence: TTT
ttttataaagaaagaagttt

SEQ ID NO: 74990 - DNA, 20 bp, Artificial Sequence
  Description of Artificial Sequence: Synthetic oligonucleotide
  Target: SCNA; (+) strand; PAM type: YTN; PAM sequence: TTT
tttataaagaaagaagttta

SEQ ID NO: 74991 - DNA, 20 bp, Artificial Sequence
  Description of Artificial Sequence: Synthetic oligonucleotide
  Target: SCNA; (+) strand; PAM type: YTN; PAM sequence: TTT
ttataaagaaagaagtttaa

SEQ ID NO: 74992 - DNA, 20 bp, Artificial Sequence
  Description of Artificial Sequence: Synthetic oligonucleotide
  Target: SCNA; (+) strand; PAM type: YTN; PAM sequence: TTT
tataaagaaagaagtttaat

SEQ ID NO: 74993 - DNA, 20 bp, Artificial Sequence
  Description of Artificial Sequence: Synthetic oligonucleotide
  Target: SCNA; (+) strand; PAM type: YTN; PAM sequence: TTT
ataaagaaagaagtttaatt

SEQ ID NO: 74994 - DNA, 20 bp, Artificial Sequence
  Description of Artificial Sequence: Synthetic oligonucleotide
  Target: SCNA; (+) strand; PAM type: YTN; PAM sequence: TTA
taaagaaagaagtttaattg

SEQ ID NO: 74995 - DNA, 20 bp, Artificial Sequence
  Description of Artificial Sequence: Synthetic oligonucleotide
  Target: SCNA; (+) strand; PAM type: YTN; PAM sequence: TTT
aattgactcaccgttctgca

SEQ ID NO: 74996 - DNA, 20 bp, Artificial Sequence
  Description of Artificial Sequence: Synthetic oligonucleotide
  Target: SCNA; (+) strand; PAM type: YTN; PAM sequence: TTA
attgactcaccgttctgcat

SEQ ID NO: 74997 - DNA, 20 bp, Artificial Sequence
  Description of Artificial Sequence: Synthetic oligonucleotide
  Target: SCNA; (+) strand; PAM type: YTN; PAM sequence: TTG
actcaccgttctgcatagct

SEQ ID NO: 74998 - DNA, 20 bp, Artificial Sequence
  Description of Artificial Sequence: Synthetic oligonucleotide
  Target: SCNA; (+) strand; PAM type: YTN; PAM sequence: CTC
accgttctgcatagctgagg

SEQ ID NO: 74999 - DNA, 20 bp, Artificial Sequence
  Description of Artificial Sequence: Synthetic oligonucleotide
  Target: SCNA; (+) strand; PAM type: YTN; PAM sequence: TTC
tgcatagctgaggaggcctc

SEQ ID NO: 75000 - DNA, 20 bp, Artificial Sequence
  Description of Artificial Sequence: Synthetic oligonucleotide
  Target: SCNA; (+) strand; PAM type: YTN; PAM sequence: CTG
catagctgaggaggcctcag

SEQ ID NO: 75001 - DNA, 20 bp, Artificial Sequence
  Description of Artificial Sequence: Synthetic oligonucleotide
  Target: SCNA; (+) strand; PAM type: YTN; PAM sequence: CTG
aggaggcctcaggaaactta

SEQ ID NO: 75002 - DNA, 20 bp, Artificial Sequence
  Description of Artificial Sequence: Synthetic oligonucleotide
  Target: SCNA; (+) strand; PAM type: YTN; PAM sequence: CTC
aggaaacttacaatcatagc

SEQ ID NO: 75003 - DNA, 20 bp, Artificial Sequence
  Description of Artificial Sequence: Synthetic oligonucleotide
  Target: SCNA; (+) strand; PAM type: YTN; PAM sequence: CTT
acaatcatagcagaagggga

SEQ ID NO: 75004 - DNA, 20 bp, Artificial Sequence
  Description of Artificial Sequence: Synthetic oligonucleotide
  Target: SCNA; (+) strand; PAM type: YTN; PAM sequence: TTA
caatcatagcagaaggggaa

SEQ ID NO: 75005 - DNA, 20 bp, Artificial Sequence
  Description of Artificial Sequence: Synthetic oligonucleotide
  Target: SCNA; (+) strand; PAM type: YTN; PAM sequence: CTC
acatggcaggagaaagagag

SEQ ID NO: 75006 - DNA, 20 bp, Artificial Sequence
  Description of Artificial Sequence: Synthetic oligonucleotide
  Target: SCNA; (+) strand; PAM type: YTN; PAM sequence: TTT
taaaccattagatcttatga

SEQ ID NO: 75007 - DNA, 20 bp, Artificial Sequence
  Description of Artificial Sequence: Synthetic oligonucleotide
  Target: SCNA; (+) strand; PAM type: YTN; PAM sequence: TTT
aaaccattagatcttatgag

SEQ ID NO: 75008 - DNA, 20 bp, Artificial Sequence
  Description of Artificial Sequence: Synthetic oligonucleotide
  Target: SCNA; (+) strand; PAM type: YTN; PAM sequence: TTA
aaccattagatcttatgaga

SEQ ID NO: 75009 - DNA, 20 bp, Artificial Sequence
  Description of Artificial Sequence: Synthetic oligonucleotide
  Target: SCNA; (+) strand; PAM type: YTN; PAM sequence: TTA
gatcttatgagaactcattc

SEQ ID NO: 75010 - DNA, 20 bp, Artificial Sequence
  Description of Artificial Sequence: Synthetic oligonucleotide
  Target: SCNA; (+) strand; PAM type: YTN; PAM sequence: CTT
atgagaactcattcactatc

SEQ ID NO: 75011 - DNA, 20 bp, Artificial Sequence
  Description of Artificial Sequence: Synthetic oligonucleotide
  Target: SCNA; (+) strand; PAM type: YTN; PAM sequence: TTA
tgagaactcattcactatca

SEQ ID NO: 75012 - DNA, 20 bp, Artificial Sequence
  Description of Artificial Sequence: Synthetic oligonucleotide
  Target: SCNA; (+) strand; PAM type: YTN; PAM sequence: CTC
attcactatcatgagaacag

SEQ ID NO: 75013 - DNA, 20 bp, Artificial Sequence
  Description of Artificial Sequence: Synthetic oligonucleotide
  Target: SCNA; (+) strand; PAM type: YTN; PAM sequence: TTC
actatcatgagaacagcatg

SEQ ID NO: 75014 - DNA, 20 bp, Artificial Sequence
  Description of Artificial Sequence: Synthetic oligonucleotide
  Target: SCNA; (+) strand; PAM type: YTN; PAM sequence: CTA
tcatgagaacagcatggaga

SEQ ID NO: 75015 - DNA, 20 bp, Artificial Sequence
  Description of Artificial Sequence: Synthetic oligonucleotide
  Target: SCNA; (+) strand; PAM type: YTN; PAM sequence: CTA
cccccatgatccaatcacct

SEQ ID NO: 75016 - DNA, 20 bp, Artificial Sequence
  Description of Artificial Sequence: Synthetic oligonucleotide
  Target: SCNA; (+) strand; PAM type: YTN; PAM sequence: CTC
ccataaggtccctccctcaa

SEQ ID NO: 75017 - DNA, 20 bp, Artificial Sequence
  Description of Artificial Sequence: Synthetic oligonucleotide
  Target: SCNA; (+) strand; PAM type: YTN; PAM sequence: CTC
cctcaacacatgggggttac

SEQ ID NO: 75018 - DNA, 20 bp, Artificial Sequence
  Description of Artificial Sequence: Synthetic oligonucleotide
  Target: SCNA; (+) strand; PAM type: YTN; PAM sequence: CTC
aacacatgggggttacaatt

SEQ ID NO: 75019 - DNA, 20 bp, Artificial Sequence
  Description of Artificial Sequence: Synthetic oligonucleotide
  Target: SCNA; (+) strand; PAM type: YTN; PAM sequence: TTA
caattcaagatgagatttgg

SEQ ID NO: 75020 - DNA, 20 bp, Artificial Sequence
  Description of Artificial Sequence: Synthetic oligonucleotide
  Target: SCNA; (+) strand; PAM type: YTN; PAM sequence: TTC
aagatgagatttgggtgggg

SEQ ID NO: 75021 - DNA, 20 bp, Artificial Sequence
  Description of Artificial Sequence: Synthetic oligonucleotide
  Target: SCNA; (+) strand; PAM type: YTN; PAM sequence: TTT
gggtggggacacaaagccaa

SEQ ID NO: 75022 - DNA, 20 bp, Artificial Sequence
  Description of Artificial Sequence: Synthetic oligonucleotide
  Target: SCNA; (+) strand; PAM type: YTN; PAM sequence: TTG
ggtggggacacaaagccaaa

SEQ ID NO: 75023 - DNA, 20 bp, Artificial Sequence
  Description of Artificial Sequence: Synthetic oligonucleotide
  Target: SCNA; (+) strand; PAM type: YTN; PAM sequence: CTA
tggatggtagtatcagggtg

SEQ ID NO: 75024 - DNA, 20 bp, Artificial Sequence
  Description of Artificial Sequence: Synthetic oligonucleotide
  Target: SCNA; (+) strand; PAM type: YTN; PAM sequence: CTT
tttttttttctctctgattt

SEQ ID NO: 75025 - DNA, 20 bp, Artificial Sequence
  Description of Artificial Sequence: Synthetic oligonucleotide
  Target: SCNA; (+) strand; PAM type: YTN; PAM sequence: TTT
ttttttttctctctgatttt

SEQ ID NO: 75026 - DNA, 20 bp, Artificial Sequence
  Description of Artificial Sequence: Synthetic oligonucleotide
  Target: SCNA; (+) strand; PAM type: YTN; PAM sequence: TTT
tttttttctctctgattttc

SEQ ID NO: 75027 - DNA, 20 bp, Artificial Sequence
  Description of Artificial Sequence: Synthetic oligonucleotide
  Target: SCNA; (+) strand; PAM type: YTN; PAM sequence: TTT
ttttttctctctgattttct

SEQ ID NO: 75028 - DNA, 20 bp, Artificial Sequence
  Description of Artificial Sequence: Synthetic oligonucleotide
  Target: SCNA; (+) strand; PAM type: YTN; PAM sequence: TTT
tttttctctctgattttctt

SEQ ID NO: 75029 - DNA, 20 bp, Artificial Sequence
  Description of Artificial Sequence: Synthetic oligonucleotide
  Target: SCNA; (+) strand; PAM type: YTN; PAM sequence: TTT
ttttctctctgattttcttt

SEQ ID NO: 75030 - DNA, 20 bp, Artificial Sequence
  Description of Artificial Sequence: Synthetic oligonucleotide
  Target: SCNA; (+) strand; PAM type: YTN; PAM sequence: TTT
tttctctctgattttctttt

SEQ ID NO: 75031 - DNA, 20 bp, Artificial Sequence
  Description of Artificial Sequence: Synthetic oligonucleotide
  Target: SCNA; (+) strand; PAM type: YTN; PAM sequence: TTT
ttctctctgattttcttttt

SEQ ID NO: 75032 - DNA, 20 bp, Artificial Sequence
  Description of Artificial Sequence: Synthetic oligonucleotide
  Target: SCNA; (+) strand; PAM type: YTN; PAM sequence: TTT
tctctctgattttctttttt

SEQ ID NO: 75033 - DNA, 20 bp, Artificial Sequence
  Description of Artificial Sequence: Synthetic oligonucleotide
  Target: SCNA; (+) strand; PAM type: YTN; PAM sequence: TTT
ctctctgattttcttttttt

SEQ ID NO: 75034 - DNA, 20 bp, Artificial Sequence
  Description of Artificial Sequence: Synthetic oligonucleotide
  Target: SCNA; (+) strand; PAM type: YTN; PAM sequence: TTC
tctctgattttcttttttta

SEQ ID NO: 75035 - DNA, 20 bp, Artificial Sequence
  Description of Artificial Sequence: Synthetic oligonucleotide
  Target: SCNA; (+) strand; PAM type: YTN; PAM sequence: CTC
tctgattttctttttttatt

SEQ ID NO: 75036 - DNA, 20 bp, Artificial Sequence
  Description of Artificial Sequence: Synthetic oligonucleotide
  Target: SCNA; (+) strand; PAM type: YTN; PAM sequence: CTC
tgattttctttttttattta

SEQ ID NO: 75037 - DNA, 20 bp, Artificial Sequence
  Description of Artificial Sequence: Synthetic oligonucleotide
  Target: SCNA; (+) strand; PAM type: YTN; PAM sequence: CTG
attttctttttttatttaaa

SEQ ID NO: 75038 - DNA, 20 bp, Artificial Sequence
  Description of Artificial Sequence: Synthetic oligonucleotide
  Target: SCNA; (+) strand; PAM type: YTN; PAM sequence: TTT
tctttttttatttaaattct

SEQ ID NO: 75039 - DNA, 20 bp, Artificial Sequence
  Description of Artificial Sequence: Synthetic oligonucleotide
  Target: SCNA; (+) strand; PAM type: YTN; PAM sequence: TTT
ctttttttatttaaattctt

SEQ ID NO: 75040 - DNA, 20 bp, Artificial Sequence
  Description of Artificial Sequence: Synthetic oligonucleotide
  Target: SCNA; (+) strand; PAM type: YTN; PAM sequence: TTC
tttttttatttaaattcttt

SEQ ID NO: 75041 - DNA, 20 bp, Artificial Sequence
  Description of Artificial Sequence: Synthetic oligonucleotide
  Target: SCNA; (+) strand; PAM type: YTN; PAM sequence: CTT
tttttatttaaattcttttt

SEQ ID NO: 75042 - DNA, 20 bp, Artificial Sequence
  Description of Artificial Sequence: Synthetic oligonucleotide
  Target: SCNA; (+) strand; PAM type: YTN; PAM sequence: TTT
ttttatttaaattctttttt

SEQ ID NO: 75043 - DNA, 20 bp, Artificial Sequence
  Description of Artificial Sequence: Synthetic oligonucleotide
  Target: SCNA; (+) strand; PAM type: YTN; PAM sequence: TTT
tttatttaaattcttttttt

SEQ ID NO: 75044 - DNA, 20 bp, Artificial Sequence
  Description of Artificial Sequence: Synthetic oligonucleotide
  Target: SCNA; (+) strand; PAM type: YTN; PAM sequence: TTT
ttatttaaattctttttttt

SEQ ID NO: 75045 - DNA, 20 bp, Artificial Sequence
  Description of Artificial Sequence: Synthetic oligonucleotide
  Target: SCNA; (+) strand; PAM type: YTN; PAM sequence: TTT
tatttaaattcttttttttt

SEQ ID NO: 75046 - DNA, 20 bp, Artificial Sequence
  Description of Artificial Sequence: Synthetic oligonucleotide
  Target: SCNA; (+) strand; PAM type: YTN; PAM sequence: TTT
atttaaattcttttttttta

SEQ ID NO: 75047 - DNA, 20 bp, Artificial Sequence
  Description of Artificial Sequence: Synthetic oligonucleotide
  Target: SCNA; (+) strand; PAM type: YTN; PAM sequence: TTA
tttaaattctttttttttaa

SEQ ID NO: 75048 - DNA, 20 bp, Artificial Sequence
  Description of Artificial Sequence: Synthetic oligonucleotide
  Target: SCNA; (+) strand; PAM type: YTN; PAM sequence: TTT
aaattctttttttttaaatt

SEQ ID NO: 75049 - DNA, 20 bp, Artificial Sequence
  Description of Artificial Sequence: Synthetic oligonucleotide
  Target: SCNA; (+) strand; PAM type: YTN; PAM sequence: TTA
aattctttttttttaaatta

SEQ ID NO: 75050 - DNA, 20 bp, Artificial Sequence
  Description of Artificial Sequence: Synthetic oligonucleotide
  Target: SCNA; (+) strand; PAM type: YTN; PAM sequence: TTC
tttttttttaaattatactt

SEQ ID NO: 75051 - DNA, 20 bp, Artificial Sequence
  Description of Artificial Sequence: Synthetic oligonucleotide
  Target: SCNA; (+) strand; PAM type: YTN; PAM sequence: CTT
tttttttaaattatacttta

SEQ ID NO: 75052 - DNA, 20 bp, Artificial Sequence
  Description of Artificial Sequence: Synthetic oligonucleotide
  Target: SCNA; (+) strand; PAM type: YTN; PAM sequence: TTT
ttttttaaattatactttaa

SEQ ID NO: 75053 - DNA, 20 bp, Artificial Sequence
  Description of Artificial Sequence: Synthetic oligonucleotide
  Target: SCNA; (+) strand; PAM type: YTN; PAM sequence: TTT
tttttaaattatactttaag

SEQ ID NO: 75054 - DNA, 20 bp, Artificial Sequence
  Description of Artificial Sequence: Synthetic oligonucleotide
  Target: SCNA; (+) strand; PAM type: YTN; PAM sequence: TTT
ttttaaattatactttaagt

SEQ ID NO: 75055 - DNA, 20 bp, Artificial Sequence
  Description of Artificial Sequence: Synthetic oligonucleotide
  Target: SCNA; (+) strand; PAM type: YTN; PAM sequence: TTT
tttaaattatactttaagtt

SEQ ID NO: 75056 - DNA, 20 bp, Artificial Sequence
  Description of Artificial Sequence: Synthetic oligonucleotide
  Target: SCNA; (+) strand; PAM type: YTN; PAM sequence: TTT
ttaaattatactttaagttt

SEQ ID NO: 75057 - DNA, 20 bp, Artificial Sequence
  Description of Artificial Sequence: Synthetic oligonucleotide
  Target: SCNA; (+) strand; PAM type: YTN; PAM sequence: TTT
taaattatactttaagtttt

SEQ ID NO: 75058 - DNA, 20 bp, Artificial Sequence
  Description of Artificial Sequence: Synthetic oligonucleotide
  Target: SCNA; (+) strand; PAM type: YTN; PAM sequence: TTT
aaattatactttaagtttta

SEQ ID NO: 75059 - DNA, 20 bp, Artificial Sequence
  Description of Artificial Sequence: Synthetic oligonucleotide
  Target: SCNA; (+) strand; PAM type: YTN; PAM sequence: TTA
aattatactttaagttttag

SEQ ID NO: 75060 - DNA, 20 bp, Artificial Sequence
  Description of Artificial Sequence: Synthetic oligonucleotide
  Target: SCNA; (+) strand; PAM type: YTN; PAM sequence: TTA
tactttaagttttagggtac

SEQ ID NO: 75061 - DNA, 20 bp, Artificial Sequence
  Description of Artificial Sequence: Synthetic oligonucleotide
  Target: SCNA; (+) strand; PAM type: YTN; PAM sequence: CTT
taagttttagggtacatgtg

SEQ ID NO: 75062 - DNA, 20 bp, Artificial Sequence
  Description of Artificial Sequence: Synthetic oligonucleotide
  Target: SCNA; (+) strand; PAM type: YTN; PAM sequence: TTT
aagttttagggtacatgtgc

SEQ ID NO: 75063 - DNA, 20 bp, Artificial Sequence
  Description of Artificial Sequence: Synthetic oligonucleotide
  Target: SCNA; (+) strand; PAM type: YTN; PAM sequence: TTA
agttttagggtacatgtgca

SEQ ID NO: 75064 - DNA, 20 bp, Artificial Sequence
  Description of Artificial Sequence: Synthetic oligonucleotide
  Target: SCNA; (+) strand; PAM type: YTN; PAM sequence: TTT
tagggtacatgtgcacattg

SEQ ID NO: 75065 - DNA, 20 bp, Artificial Sequence
  Description of Artificial Sequence: Synthetic oligonucleotide
  Target: SCNA; (+) strand; PAM type: YTN; PAM sequence: TTT
agggtacatgtgcacattgt

SEQ ID NO: 75066 - DNA, 20 bp, Artificial Sequence
  Description of Artificial Sequence: Synthetic oligonucleotide
  Target: SCNA; (+) strand; PAM type: YTN; PAM sequence: TTA
gggtacatgtgcacattgtg

SEQ ID NO: 75067 - DNA, 20 bp, Artificial Sequence
  Description of Artificial Sequence: Synthetic oligonucleotide
  Target: SCNA; (+) strand; PAM type: YTN; PAM sequence: TTG
tgcaggttagttacatatgt

SEQ ID NO: 75068 - DNA, 20 bp, Artificial Sequence
  Description of Artificial Sequence: Synthetic oligonucleotide
  Target: SCNA; (+) strand; PAM type: YTN; PAM sequence: TTA
gttacatatgtatacatgtg

SEQ ID NO: 75069 - DNA, 20 bp, Artificial Sequence
  Description of Artificial Sequence: Synthetic oligonucleotide
  Target: SCNA; (+) strand; PAM type: YTN; PAM sequence: TTA
catatgtatacatgtgacct

SEQ ID NO: 75070 - DNA, 20 bp, Artificial Sequence
  Description of Artificial Sequence: Synthetic oligonucleotide
  Target: SCNA; (+) strand; PAM type: YTN; PAM sequence: CTG
gctacctttaaagatggata

SEQ ID NO: 75071 - DNA, 20 bp, Artificial Sequence
  Description of Artificial Sequence: Synthetic oligonucleotide
  Target: SCNA; (+) strand; PAM type: YTN; PAM sequence: CTA
cctttaaagatggatattga

SEQ ID NO: 75072 - DNA, 20 bp, Artificial Sequence
  Description of Artificial Sequence: Synthetic oligonucleotide
  Target: SCNA; (+) strand; PAM type: YTN; PAM sequence: CTT
taaagatggatattgactcc

SEQ ID NO: 75073 - DNA, 20 bp, Artificial Sequence
  Description of Artificial Sequence: Synthetic oligonucleotide
  Target: SCNA; (+) strand; PAM type: YTN; PAM sequence: TTT
aaagatggatattgactcct

SEQ ID NO: 75074 - DNA, 20 bp, Artificial Sequence
  Description of Artificial Sequence: Synthetic oligonucleotide
  Target: SCNA; (+) strand; PAM type: YTN; PAM sequence: TTA
aagatggatattgactcctc

SEQ ID NO: 75075 - DNA, 20 bp, Artificial Sequence
  Description of Artificial Sequence: Synthetic oligonucleotide
  Target: SCNA; (+) strand; PAM type: YTN; PAM sequence: TTG
actcctccaaaatgctttca

SEQ ID NO: 75076 - DNA, 20 bp, Artificial Sequence
  Description of Artificial Sequence: Synthetic oligonucleotide
  Target: SCNA; (+) strand; PAM type: YTN; PAM sequence: CTC
ctccaaaatgctttcacttg

SEQ ID NO: 75077 - DNA, 20 bp, Artificial Sequence
  Description of Artificial Sequence: Synthetic oligonucleotide
  Target: SCNA; (+) strand; PAM type: YTN; PAM sequence: CTC
caaaatgctttcacttgaaa

SEQ ID NO: 75078 - DNA, 20 bp, Artificial Sequence
  Description of Artificial Sequence: Synthetic oligonucleotide
  Target: SCNA; (+) strand; PAM type: YTN; PAM sequence: CTT
tcacttgaaaaaaaaaagaa

SEQ ID NO: 75079 - DNA, 20 bp, Artificial Sequence
  Description of Artificial Sequence: Synthetic oligonucleotide
  Target: SCNA; (+) strand; PAM type: YTN; PAM sequence: TTT
cacttgaaaaaaaaaagaag

SEQ ID NO: 75080 - DNA, 20 bp, Artificial Sequence
  Description of Artificial Sequence: Synthetic oligonucleotide
  Target: SCNA; (+) strand; PAM type: YTN; PAM sequence: TTC
acttgaaaaaaaaaagaaga

SEQ ID NO: 75081 - DNA, 20 bp, Artificial Sequence
  Description of Artificial Sequence: Synthetic oligonucleotide
  Target: SCNA; (+) strand; PAM type: YTN; PAM sequence: CTT
gaaaaaaaaaagaagaaaaa

SEQ ID NO: 75082 - DNA, 20 bp, Artificial Sequence
  Description of Artificial Sequence: Synthetic oligonucleotide
  Target: SCNA; (+) strand; PAM type: YTN; PAM sequence: TTG
aaaaaaaaaagaagaaaaaa

SEQ ID NO: 75083 - DNA, 20 bp, Artificial Sequence
  Description of Artificial Sequence: Synthetic oligonucleotide
  Target: SCNA; (+) strand; PAM type: YTN; PAM sequence: CTC
aaaaatgagaagggctttcc

SEQ ID NO: 75084 - DNA, 20 bp, Artificial Sequence
  Description of Artificial Sequence: Synthetic oligonucleotide
  Target: SCNA; (+) strand; PAM type: YTN; PAM sequence: CTT
tccgacttgaggaaagcaaa

SEQ ID NO: 75085 - DNA, 20 bp, Artificial Sequence
  Description of Artificial Sequence: Synthetic oligonucleotide
  Target: SCNA; (+) strand; PAM type: YTN; PAM sequence: TTT
ccgacttgaggaaagcaaat

SEQ ID NO: 75086 - DNA, 20 bp, Artificial Sequence
  Description of Artificial Sequence: Synthetic oligonucleotide
  Target: SCNA; (+) strand; PAM type: YTN; PAM sequence: TTC
cgacttgaggaaagcaaatc

SEQ ID NO: 75087 - DNA, 20 bp, Artificial Sequence
  Description of Artificial Sequence: Synthetic oligonucleotide
  Target: SCNA; (+) strand; PAM type: YTN; PAM sequence: CTT
gaggaaagcaaatcttttta

SEQ ID NO: 75088 - DNA, 20 bp, Artificial Sequence
  Description of Artificial Sequence: Synthetic oligonucleotide
  Target: SCNA; (+) strand; PAM type: YTN; PAM sequence: TTG
aggaaagcaaatctttttaa

SEQ ID NO: 75089 - DNA, 20 bp, Artificial Sequence
  Description of Artificial Sequence: Synthetic oligonucleotide
  Target: SCNA; (+) strand; PAM type: YTN; PAM sequence: CTT
tttaacttgcactaggaaca

SEQ ID NO: 75090 - DNA, 20 bp, Artificial Sequence
  Description of Artificial Sequence: Synthetic oligonucleotide
  Target: SCNA; (+) strand; PAM type: YTN; PAM sequence: TTT
ttaacttgcactaggaacat

SEQ ID NO: 75091 - DNA, 20 bp, Artificial Sequence
  Description of Artificial Sequence: Synthetic oligonucleotide
  Target: SCNA; (+) strand; PAM type: YTN; PAM sequence: TTT
taacttgcactaggaacatc

SEQ ID NO: 75092 - DNA, 20 bp, Artificial Sequence
  Description of Artificial Sequence: Synthetic oligonucleotide
  Target: SCNA; (+) strand; PAM type: YTN; PAM sequence: TTT
aacttgcactaggaacatca

SEQ ID NO: 75093 - DNA, 20 bp, Artificial Sequence
  Description of Artificial Sequence: Synthetic oligonucleotide
  Target: SCNA; (+) strand; PAM type: YTN; PAM sequence: TTA
acttgcactaggaacatcac

SEQ ID NO: 75094 - DNA, 20 bp, Artificial Sequence
  Description of Artificial Sequence: Synthetic oligonucleotide
  Target: SCNA; (+) strand; PAM type: YTN; PAM sequence: CTT
gcactaggaacatcacgaca

SEQ ID NO: 75095 - DNA, 20 bp, Artificial Sequence
  Description of Artificial Sequence: Synthetic oligonucleotide
  Target: SCNA; (+) strand; PAM type: YTN; PAM sequence: TTG
cactaggaacatcacgacat

SEQ ID NO: 75096 - DNA, 20 bp, Artificial Sequence
  Description of Artificial Sequence: Synthetic oligonucleotide
  Target: SCNA; (+) strand; PAM type: YTN; PAM sequence: CTA
ggaacatcacgacattttct

SEQ ID NO: 75097 - DNA, 20 bp, Artificial Sequence
  Description of Artificial Sequence: Synthetic oligonucleotide
  Target: SCNA; (+) strand; PAM type: YTN; PAM sequence: TTT
tcttgcctcttagatggttt

SEQ ID NO: 75098 - DNA, 20 bp, Artificial Sequence
  Description of Artificial Sequence: Synthetic oligonucleotide
  Target: SCNA; (+) strand; PAM type: YTN; PAM sequence: TTT
cttgcctcttagatggtttg

SEQ ID NO: 75099 - DNA, 20 bp, Artificial Sequence
  Description of Artificial Sequence: Synthetic oligonucleotide
  Target: SCNA; (+) strand; PAM type: YTN; PAM sequence: TTC
ttgcctcttagatggtttgt

SEQ ID NO: 75100 - DNA, 20 bp, Artificial Sequence
  Description of Artificial Sequence: Synthetic oligonucleotide
  Target: SCNA; (+) strand; PAM type: YTN; PAM sequence: CTT
gcctcttagatggtttgtat

SEQ ID NO: 75101 - DNA, 20 bp, Artificial Sequence
  Description of Artificial Sequence: Synthetic oligonucleotide
  Target: SCNA; (+) strand; PAM type: YTN; PAM sequence: TTG
cctcttagatggtttgtatt

SEQ ID NO: 75102 - DNA, 20 bp, Artificial Sequence
  Description of Artificial Sequence: Synthetic oligonucleotide
  Target: SCNA; (+) strand; PAM type: YTN; PAM sequence: CTC
ttagatggtttgtattttgg

SEQ ID NO: 75103 - DNA, 20 bp, Artificial Sequence
  Description of Artificial Sequence: Synthetic oligonucleotide
  Target: SCNA; (+) strand; PAM type: YTN; PAM sequence: CTT
agatggtttgtattttggat

SEQ ID NO: 75104 - DNA, 20 bp, Artificial Sequence
  Description of Artificial Sequence: Synthetic oligonucleotide
  Target: SCNA; (+) strand; PAM type: YTN; PAM sequence: TTA
gatggtttgtattttggatg

SEQ ID NO: 75105 - DNA, 20 bp, Artificial Sequence
  Description of Artificial Sequence: Synthetic oligonucleotide
  Target: SCNA; (+) strand; PAM type: YTN; PAM sequence: TTT
gtattttggatgcttctgaa

SEQ ID NO: 75106 - DNA, 20 bp, Artificial Sequence
  Description of Artificial Sequence: Synthetic oligonucleotide
  Target: SCNA; (+) strand; PAM type: YTN; PAM sequence: TTG
tattttggatgcttctgaag

SEQ ID NO: 75107 - DNA, 20 bp, Artificial Sequence
  Description of Artificial Sequence: Synthetic oligonucleotide
  Target: SCNA; (+) strand; PAM type: YTN; PAM sequence: TTT
tggatgcttctgaagagaaa

SEQ ID NO: 75108 - DNA, 20 bp, Artificial Sequence
  Description of Artificial Sequence: Synthetic oligonucleotide
  Target: SCNA; (+) strand; PAM type: YTN; PAM sequence: TTT
ggatgcttctgaagagaaac

SEQ ID NO: 75109 - DNA, 20 bp, Artificial Sequence
  Description of Artificial Sequence: Synthetic oligonucleotide
  Target: SCNA; (+) strand; PAM type: YTN; PAM sequence: TTG
gatgcttctgaagagaaaca

SEQ ID NO: 75110 - DNA, 20 bp, Artificial Sequence
  Description of Artificial Sequence: Synthetic oligonucleotide
  Target: SCNA; (+) strand; PAM type: YTN; PAM sequence: CTT
ctgaagagaaacaaagacat

SEQ ID NO: 75111 - DNA, 20 bp, Artificial Sequence
  Description of Artificial Sequence: Synthetic oligonucleotide
  Target: SCNA; (+) strand; PAM type: YTN; PAM sequence: TTC
tgaagagaaacaaagacata

SEQ ID NO: 75112 - DNA, 20 bp, Artificial Sequence
  Description of Artificial Sequence: Synthetic oligonucleotide
  Target: SCNA; (+) strand; PAM type: YTN; PAM sequence: CTG
aagagaaacaaagacatata

SEQ ID NO: 75113 - DNA, 20 bp, Artificial Sequence
  Description of Artificial Sequence: Synthetic oligonucleotide
  Target: SCNA; (+) strand; PAM type: YTN; PAM sequence: TTT
aaacattatctgtgtttatt

SEQ ID NO: 75114 - DNA, 20 bp, Artificial Sequence
  Description of Artificial Sequence: Synthetic oligonucleotide
  Target: SCNA; (+) strand; PAM type: YTN; PAM sequence: TTA
aacattatctgtgtttattt

SEQ ID NO: 75115 - DNA, 20 bp, Artificial Sequence
  Description of Artificial Sequence: Synthetic oligonucleotide
  Target: SCNA; (+) strand; PAM type: YTN; PAM sequence: TTA
tctgtgtttatttgtagaat

SEQ ID NO: 75116 - DNA, 20 bp, Artificial Sequence
  Description of Artificial Sequence: Synthetic oligonucleotide
  Target: SCNA; (+) strand; PAM type: YTN; PAM sequence: CTG
tgtttatttgtagaatactt

SEQ ID NO: 75117 - DNA, 20 bp, Artificial Sequence
  Description of Artificial Sequence: Synthetic oligonucleotide
  Target: SCNA; (+) strand; PAM type: YTN; PAM sequence: TTT
atttgtagaatacttatttt

SEQ ID NO: 75118 - DNA, 20 bp, Artificial Sequence
  Description of Artificial Sequence: Synthetic oligonucleotide
  Target: SCNA; (+) strand; PAM type: YTN; PAM sequence: TTA
tttgtagaatacttattttt

SEQ ID NO: 75119 - DNA, 20 bp, Artificial Sequence
  Description of Artificial Sequence: Synthetic oligonucleotide
  Target: SCNA; (+) strand; PAM type: YTN; PAM sequence: TTT
gtagaatacttattttttgt

SEQ ID NO: 75120 - DNA, 20 bp, Artificial Sequence
  Description of Artificial Sequence: Synthetic oligonucleotide
  Target: SCNA; (+) strand; PAM type: YTN; PAM sequence: TTG
tagaatacttattttttgta

SEQ ID NO: 75121 - DNA, 20 bp, Artificial Sequence
  Description of Artificial Sequence: Synthetic oligonucleotide
  Target: SCNA; (+) strand; PAM type: YTN; PAM sequence: CTT
attttttgtattttgttttt

SEQ ID NO: 75122 - DNA, 20 bp, Artificial Sequence
  Description of Artificial Sequence: Synthetic oligonucleotide
  Target: SCNA; (+) strand; PAM type: YTN; PAM sequence: TTA
ttttttgtattttgtttttt

SEQ ID NO: 75123 - DNA, 20 bp, Artificial Sequence
  Description of Artificial Sequence: Synthetic oligonucleotide
  Target: SCNA; (+) strand; PAM type: YTN; PAM sequence: TTT
tttgtattttgttttttaaa

SEQ ID NO: 75124 - DNA, 20 bp, Artificial Sequence
  Description of Artificial Sequence: Synthetic oligonucleotide
  Target: SCNA; (+) strand; PAM type: YTN; PAM sequence: TTT
ttgtattttgttttttaaat

SEQ ID NO: 75125 - DNA, 20 bp, Artificial Sequence
  Description of Artificial Sequence: Synthetic oligonucleotide
  Target: SCNA; (+) strand; PAM type: YTN; PAM sequence: TTT
tgtattttgttttttaaatg

SEQ ID NO: 75126 - DNA, 20 bp, Artificial Sequence
  Description of Artificial Sequence: Synthetic oligonucleotide
  Target: SCNA; (+) strand; PAM type: YTN; PAM sequence: TTT
gtattttgttttttaaatga

SEQ ID NO: 75127 - DNA, 20 bp, Artificial Sequence
  Description of Artificial Sequence: Synthetic oligonucleotide
  Target: SCNA; (+) strand; PAM type: YTN; PAM sequence: TTG
tattttgttttttaaatgag

SEQ ID NO: 75128 - DNA, 20 bp, Artificial Sequence
  Description of Artificial Sequence: Synthetic oligonucleotide
  Target: SCNA; (+) strand; PAM type: YTN; PAM sequence: TTT
tgttttttaaatgagtatgt

SEQ ID NO: 75129 - DNA, 20 bp, Artificial Sequence
  Description of Artificial Sequence: Synthetic oligonucleotide
  Target: SCNA; (+) strand; PAM type: YTN; PAM sequence: TTT
gttttttaaatgagtatgtc

SEQ ID NO: 75130 - DNA, 20 bp, Artificial Sequence
  Description of Artificial Sequence: Synthetic oligonucleotide
  Target: SCNA; (+) strand; PAM type: YTN; PAM sequence: TTG
ttttttaaatgagtatgtct

SEQ ID NO: 75131 - DNA, 20 bp, Artificial Sequence
  Description of Artificial Sequence: Synthetic oligonucleotide
  Target: SCNA; (+) strand; PAM type: YTN; PAM sequence: TTT
tttaaatgagtatgtctgat

SEQ ID NO: 75132 - DNA, 20 bp, Artificial Sequence
  Description of Artificial Sequence: Synthetic oligonucleotide
  Target: SCNA; (+) strand; PAM type: YTN; PAM sequence: TTT
ttaaatgagtatgtctgata

SEQ ID NO: 75133 - DNA, 20 bp, Artificial Sequence
  Description of Artificial Sequence: Synthetic oligonucleotide
  Target: SCNA; (+) strand; PAM type: YTN; PAM sequence: TTT
taaatgagtatgtctgatat

SEQ ID NO: 75134 - DNA, 20 bp, Artificial Sequence
  Description of Artificial Sequence: Synthetic oligonucleotide
  Target: SCNA; (+) strand; PAM type: YTN; PAM sequence: TTT
aaatgagtatgtctgatatc

SEQ ID NO: 75135 - DNA, 20 bp, Artificial Sequence
  Description of Artificial Sequence: Synthetic oligonucleotide
  Target: SCNA; (+) strand; PAM type: YTN; PAM sequence: TTA
aatgagtatgtctgatatct

SEQ ID NO: 75136 - DNA, 20 bp, Artificial Sequence
  Description of Artificial Sequence: Synthetic oligonucleotide
  Target: SCNA; (+) strand; PAM type: YTN; PAM sequence: CTG
atatctcatacatttagaat

SEQ ID NO: 75137 - DNA, 20 bp, Artificial Sequence
  Description of Artificial Sequence: Synthetic oligonucleotide
  Target: SCNA; (+) strand; PAM type: YTN; PAM sequence: CTC
atacatttagaatatttgta

SEQ ID NO: 75138 - DNA, 20 bp, Artificial Sequence
  Description of Artificial Sequence: Synthetic oligonucleotide
  Target: SCNA; (+) strand; PAM type: YTN; PAM sequence: TTT
agaatatttgtaatagaata

SEQ ID NO: 75139 - DNA, 20 bp, Artificial Sequence
  Description of Artificial Sequence: Synthetic oligonucleotide
  Target: SCNA; (+) strand; PAM type: YTN; PAM sequence: TTA
gaatatttgtaatagaatag

SEQ ID NO: 75140 - DNA, 20 bp, Artificial Sequence
  Description of Artificial Sequence: Synthetic oligonucleotide
  Target: SCNA; (+) strand; PAM type: YTN; PAM sequence: TTT
gtaatagaatagcaaatttc

SEQ ID NO: 75141 - DNA, 20 bp, Artificial Sequence
  Description of Artificial Sequence: Synthetic oligonucleotide
  Target: SCNA; (+) strand; PAM type: YTN; PAM sequence: TTG
taatagaatagcaaatttcc

SEQ ID NO: 75142 - DNA, 20 bp, Artificial Sequence
  Description of Artificial Sequence: Synthetic oligonucleotide
  Target: SCNA; (+) strand; PAM type: YTN; PAM sequence: TTT
ccaccatggaatcagtggag

SEQ ID NO: 75143 - DNA, 20 bp, Artificial Sequence
  Description of Artificial Sequence: Synthetic oligonucleotide
  Target: SCNA; (+) strand; PAM type: YTN; PAM sequence: TTC
caccatggaatcagtggaga

SEQ ID NO: 75144 - DNA, 20 bp, Artificial Sequence
  Description of Artificial Sequence: Synthetic oligonucleotide
  Target: SCNA; (+) strand; PAM type: YTN; PAM sequence: CTA
tgcaatttaacaactgcaaa

SEQ ID NO: 75145 - DNA, 20 bp, Artificial Sequence
  Description of Artificial Sequence: Synthetic oligonucleotide
  Target: SCNA; (+) strand; PAM type: YTN; PAM sequence: TTT
aacaactgcaaagaatctta

SEQ ID NO: 75146 - DNA, 20 bp, Artificial Sequence
  Description of Artificial Sequence: Synthetic oligonucleotide
  Target: SCNA; (+) strand; PAM type: YTN; PAM sequence: TTA
acaactgcaaagaatcttag

SEQ ID NO: 75147 - DNA, 20 bp, Artificial Sequence
  Description of Artificial Sequence: Synthetic oligonucleotide
  Target: SCNA; (+) strand; PAM type: YTN; PAM sequence: CTG
caaagaatcttagagatcct

SEQ ID NO: 75148 - DNA, 20 bp, Artificial Sequence
  Description of Artificial Sequence: Synthetic oligonucleotide
  Target: SCNA; (+) strand; PAM type: YTN; PAM sequence: CTT
agagatccttagagtaacac

SEQ ID NO: 75149 - DNA, 20 bp, Artificial Sequence
  Description of Artificial Sequence: Synthetic oligonucleotide
  Target: SCNA; (+) strand; PAM type: YTN; PAM sequence: TTA
gagatccttagagtaacaca

SEQ ID NO: 75150 - DNA, 20 bp, Artificial Sequence
  Description of Artificial Sequence: Synthetic oligonucleotide
  Target: SCNA; (+) strand; PAM type: YTN; PAM sequence: CTT
agagtaacacatcctcttat

SEQ ID NO: 75151 - DNA, 20 bp, Artificial Sequence
  Description of Artificial Sequence: Synthetic oligonucleotide
  Target: SCNA; (+) strand; PAM type: YTN; PAM sequence: TTA
gagtaacacatcctcttatt

SEQ ID NO: 75152 - DNA, 20 bp, Artificial Sequence
  Description of Artificial Sequence: Synthetic oligonucleotide
  Target: SCNA; (+) strand; PAM type: YTN; PAM sequence: CTC
ttatttacaaatggggaaac

SEQ ID NO: 75153 - DNA, 20 bp, Artificial Sequence
  Description of Artificial Sequence: Synthetic oligonucleotide
  Target: SCNA; (+) strand; PAM type: YTN; PAM sequence: CTT
atttacaaatggggaaacag

SEQ ID NO: 75154 - DNA, 20 bp, Artificial Sequence
  Description of Artificial Sequence: Synthetic oligonucleotide
  Target: SCNA; (+) strand; PAM type: YTN; PAM sequence: TTA
tttacaaatggggaaacagg

SEQ ID NO: 75155 - DNA, 20 bp, Artificial Sequence
  Description of Artificial Sequence: Synthetic oligonucleotide
  Target: SCNA; (+) strand; PAM type: YTN; PAM sequence: TTT
acaaatggggaaacagggta

SEQ ID NO: 75156 - DNA, 20 bp, Artificial Sequence
  Description of Artificial Sequence: Synthetic oligonucleotide
  Target: SCNA; (+) strand; PAM type: YTN; PAM sequence: TTA
caaatggggaaacagggtat

SEQ ID NO: 75157 - DNA, 20 bp, Artificial Sequence
  Description of Artificial Sequence: Synthetic oligonucleotide
  Target: SCNA; (+) strand; PAM type: YTN; PAM sequence: CTT
gcctaatccataagctaggg

SEQ ID NO: 75158 - DNA, 20 bp, Artificial Sequence
  Description of Artificial Sequence: Synthetic oligonucleotide
  Target: SCNA; (+) strand; PAM type: YTN; PAM sequence: TTG
cctaatccataagctagggg

SEQ ID NO: 75159 - DNA, 20 bp, Artificial Sequence
  Description of Artificial Sequence: Synthetic oligonucleotide
  Target: SCNA; (+) strand; PAM type: YTN; PAM sequence: CTA
atccataagctaggggtaca

SEQ ID NO: 75160 - DNA, 20 bp, Artificial Sequence
  Description of Artificial Sequence: Synthetic oligonucleotide
  Target: SCNA; (+) strand; PAM type: YTN; PAM sequence: CTA
ggggtacaacagggtcatta

SEQ ID NO: 75161 - DNA, 20 bp, Artificial Sequence
  Description of Artificial Sequence: Synthetic oligonucleotide
  Target: SCNA; (+) strand; PAM type: YTN; PAM sequence: TTA
gggccatcctgttcaatttc

SEQ ID NO: 75162 - DNA, 20 bp, Artificial Sequence
  Description of Artificial Sequence: Synthetic oligonucleotide
  Target: SCNA; (+) strand; PAM type: YTN; PAM sequence: CTG
ttcaatttctccctgatatg

SEQ ID NO: 75163 - DNA, 20 bp, Artificial Sequence
  Description of Artificial Sequence: Synthetic oligonucleotide
  Target: SCNA; (+) strand; PAM type: YTN; PAM sequence: TTC
aatttctccctgatatgatc

SEQ ID NO: 75164 - DNA, 20 bp, Artificial Sequence
  Description of Artificial Sequence: Synthetic oligonucleotide
  Target: SCNA; (+) strand; PAM type: YTN; PAM sequence: TTT
ctccctgatatgatcctagc

SEQ ID NO: 75165 - DNA, 20 bp, Artificial Sequence
  Description of Artificial Sequence: Synthetic oligonucleotide
  Target: SCNA; (+) strand; PAM type: YTN; PAM sequence: TTC
tccctgatatgatcctagcg

SEQ ID NO: 75166 - DNA, 20 bp, Artificial Sequence
  Description of Artificial Sequence: Synthetic oligonucleotide
  Target: SCNA; (+) strand; PAM type: YTN; PAM sequence: CTC
cctgatatgatcctagcgat

SEQ ID NO: 75167 - DNA, 20 bp, Artificial Sequence
  Description of Artificial Sequence: Synthetic oligonucleotide
  Target: SCNA; (+) strand; PAM type: YTN; PAM sequence: CTG
atatgatcctagcgatggag

SEQ ID NO: 75168 - DNA, 20 bp, Artificial Sequence
  Description of Artificial Sequence: Synthetic oligonucleotide
  Target: SCNA; (+) strand; PAM type: YTN; PAM sequence: CTA
gcgatggagtacctaccaac

SEQ ID NO: 75169 - DNA, 20 bp, Artificial Sequence
  Description of Artificial Sequence: Synthetic oligonucleotide
  Target: SCNA; (+) strand; PAM type: YTN; PAM sequence: CTA
ccaactttctttacaatagc

SEQ ID NO: 75170 - DNA, 20 bp, Artificial Sequence
  Description of Artificial Sequence: Synthetic oligonucleotide
  Target: SCNA; (+) strand; PAM type: YTN; PAM sequence: CTT
tctttacaatagcccaacgt

SEQ ID NO: 75171 - DNA, 20 bp, Artificial Sequence
  Description of Artificial Sequence: Synthetic oligonucleotide
  Target: SCNA; (+) strand; PAM type: YTN; PAM sequence: TTT
ctttacaatagcccaacgtc

SEQ ID NO: 75172 - DNA, 20 bp, Artificial Sequence
  Description of Artificial Sequence: Synthetic oligonucleotide
  Target: SCNA; (+) strand; PAM type: YTN; PAM sequence: TTC
tttacaatagcccaacgtct

SEQ ID NO: 75173 - DNA, 20 bp, Artificial Sequence
  Description of Artificial Sequence: Synthetic oligonucleotide
  Target: SCNA; (+) strand; PAM type: YTN; PAM sequence: CTT
tacaatagcccaacgtctag

SEQ ID NO: 75174 - DNA, 20 bp, Artificial Sequence
  Description of Artificial Sequence: Synthetic oligonucleotide
  Target: SCNA; (+) strand; PAM type: YTN; PAM sequence: TTT
acaatagcccaacgtctagt

SEQ ID NO: 75175 - DNA, 20 bp, Artificial Sequence
  Description of Artificial Sequence: Synthetic oligonucleotide
  Target: SCNA; (+) strand; PAM type: YTN; PAM sequence: TTA
caatagcccaacgtctagta

SEQ ID NO: 75176 - DNA, 20 bp, Artificial Sequence
  Description of Artificial Sequence: Synthetic oligonucleotide
  Target: SCNA; (+) strand; PAM type: YTN; PAM sequence: CTA
gtatgagaatcattctgtgg

SEQ ID NO: 75177 - DNA, 20 bp, Artificial Sequence
  Description of Artificial Sequence: Synthetic oligonucleotide
  Target: SCNA; (+) strand; PAM type: YTN; PAM sequence: TTC
tgtggacactcttccaaatt

SEQ ID NO: 75178 - DNA, 20 bp, Artificial Sequence
  Description of Artificial Sequence: Synthetic oligonucleotide
  Target: SCNA; (+) strand; PAM type: YTN; PAM sequence: CTG
tggacactcttccaaattga

SEQ ID NO: 75179 - DNA, 20 bp, Artificial Sequence
  Description of Artificial Sequence: Synthetic oligonucleotide
  Target: SCNA; (+) strand; PAM type: YTN; PAM sequence: CTC
ttccaaattgaaacaatctc

SEQ ID NO: 75180 - DNA, 20 bp, Artificial Sequence
  Description of Artificial Sequence: Synthetic oligonucleotide
  Target: SCNA; (+) strand; PAM type: YTN; PAM sequence: CTT
ccaaattgaaacaatctcct

SEQ ID NO: 75181 - DNA, 20 bp, Artificial Sequence
  Description of Artificial Sequence: Synthetic oligonucleotide
  Target: SCNA; (+) strand; PAM type: YTN; PAM sequence: TTC
caaattgaaacaatctcctt

SEQ ID NO: 75182 - DNA, 20 bp, Artificial Sequence
  Description of Artificial Sequence: Synthetic oligonucleotide
  Target: SCNA; (+) strand; PAM type: YTN; PAM sequence: TTG
aaacaatctccttggattac

SEQ ID NO: 75183 - DNA, 20 bp, Artificial Sequence
  Description of Artificial Sequence: Synthetic oligonucleotide
  Target: SCNA; (+) strand; PAM type: YTN; PAM sequence: CTC
cttggattactcctggcaca

SEQ ID NO: 75184 - DNA, 20 bp, Artificial Sequence
  Description of Artificial Sequence: Synthetic oligonucleotide
  Target: SCNA; (+) strand; PAM type: YTN; PAM sequence: CTT
ggattactcctggcacagct

SEQ ID NO: 75185 - DNA, 20 bp, Artificial Sequence
  Description of Artificial Sequence: Synthetic oligonucleotide
  Target: SCNA; (+) strand; PAM type: YTN; PAM sequence: TTG
gattactcctggcacagctt

SEQ ID NO: 75186 - DNA, 20 bp, Artificial Sequence
  Description of Artificial Sequence: Synthetic oligonucleotide
  Target: SCNA; (+) strand; PAM type: YTN; PAM sequence: TTA
ctcctggcacagcttatgta

SEQ ID NO: 75187 - DNA, 20 bp, Artificial Sequence
  Description of Artificial Sequence: Synthetic oligonucleotide
  Target: SCNA; (+) strand; PAM type: YTN; PAM sequence: CTC
ctggcacagcttatgtattc

SEQ ID NO: 75188 - DNA, 20 bp, Artificial Sequence
  Description of Artificial Sequence: Synthetic oligonucleotide
  Target: SCNA; (+) strand; PAM type: YTN; PAM sequence: CTG
gcacagcttatgtattctca

SEQ ID NO: 75189 - DNA, 20 bp, Artificial Sequence
  Description of Artificial Sequence: Synthetic oligonucleotide
  Target: SCNA; (+) strand; PAM type: YTN; PAM sequence: CTT
atgtattctcatagccaatc

SEQ ID NO: 75190 - DNA, 20 bp, Artificial Sequence
  Description of Artificial Sequence: Synthetic oligonucleotide
  Target: SCNA; (+) strand; PAM type: YTN; PAM sequence: TTA
tgtattctcatagccaatcc

SEQ ID NO: 75191 - DNA, 20 bp, Artificial Sequence
  Description of Artificial Sequence: Synthetic oligonucleotide
  Target: SCNA; (+) strand; PAM type: YTN; PAM sequence: TTC
tcatagccaatcccctggtc

SEQ ID NO: 75192 - DNA, 20 bp, Artificial Sequence
  Description of Artificial Sequence: Synthetic oligonucleotide
  Target: SCNA; (+) strand; PAM type: YTN; PAM sequence: CTC
atagccaatcccctggtcat

SEQ ID NO: 75193 - DNA, 20 bp, Artificial Sequence
  Description of Artificial Sequence: Synthetic oligonucleotide
  Target: SCNA; (+) strand; PAM type: YTN; PAM sequence: CTG
gtcatgactctgacactagt

SEQ ID NO: 75194 - DNA, 20 bp, Artificial Sequence
  Description of Artificial Sequence: Synthetic oligonucleotide
  Target: SCNA; (+) strand; PAM type: YTN; PAM sequence: CTC
tgacactagtagataaaaag

SEQ ID NO: 75195 - DNA, 20 bp, Artificial Sequence
  Description of Artificial Sequence: Synthetic oligonucleotide
  Target: SCNA; (+) strand; PAM type: YTN; PAM sequence: CTG
acactagtagataaaaagta

SEQ ID NO: 75196 - DNA, 20 bp, Artificial Sequence
  Description of Artificial Sequence: Synthetic oligonucleotide
  Target: SCNA; (+) strand; PAM type: YTN; PAM sequence: CTA
gtagataaaaagtatcactc

SEQ ID NO: 75197 - DNA, 20 bp, Artificial Sequence
  Description of Artificial Sequence: Synthetic oligonucleotide
  Target: SCNA; (+) strand; PAM type: YTN; PAM sequence: CTC
taatctcttgatcttttcat

SEQ ID NO: 75198 - DNA, 20 bp, Artificial Sequence
  Description of Artificial Sequence: Synthetic oligonucleotide
  Target: SCNA; (+) strand; PAM type: YTN; PAM sequence: CTA
atctcttgatcttttcatca

SEQ ID NO: 75199 - DNA, 20 bp, Artificial Sequence
  Description of Artificial Sequence: Synthetic oligonucleotide
  Target: SCNA; (+) strand; PAM type: YTN; PAM sequence: CTC
ttgatcttttcatcatgcct

SEQ ID NO: 75200 - DNA, 20 bp, Artificial Sequence
  Description of Artificial Sequence: Synthetic oligonucleotide
  Target: SCNA; (+) strand; PAM type: YTN; PAM sequence: CTT
gatcttttcatcatgccttt

SEQ ID NO: 75201 - DNA, 20 bp, Artificial Sequence
  Description of Artificial Sequence: Synthetic oligonucleotide
  Target: SCNA; (+) strand; PAM type: YTN; PAM sequence: TTG
atcttttcatcatgccttta

SEQ ID NO: 75202 - DNA, 20 bp, Artificial Sequence
  Description of Artificial Sequence: Synthetic oligonucleotide
  Target: SCNA; (+) strand; PAM type: YTN; PAM sequence: CTT
ttcatcatgcctttattttt

SEQ ID NO: 75203 - DNA, 20 bp, Artificial Sequence
  Description of Artificial Sequence: Synthetic oligonucleotide
  Target: SCNA; (+) strand; PAM type: YTN; PAM sequence: TTT
tcatcatgcctttattttta

SEQ ID NO: 75204 - DNA, 20 bp, Artificial Sequence
  Description of Artificial Sequence: Synthetic oligonucleotide
  Target: SCNA; (+) strand; PAM type: YTN; PAM sequence: TTT
catcatgcctttatttttac

SEQ ID NO: 75205 - DNA, 20 bp, Artificial Sequence
  Description of Artificial Sequence: Synthetic oligonucleotide
  Target: SCNA; (+) strand; PAM type: YTN; PAM sequence: TTC
atcatgcctttatttttaca

SEQ ID NO: 75206 - DNA, 20 bp, Artificial Sequence
  Description of Artificial Sequence: Synthetic oligonucleotide
  Target: SCNA; (+) strand; PAM type: YTN; PAM sequence: CTT
tatttttacacatgcagtac

SEQ ID NO: 75207 - DNA, 20 bp, Artificial Sequence
  Description of Artificial Sequence: Synthetic oligonucleotide
  Target: SCNA; (+) strand; PAM type: YTN; PAM sequence: TTT
atttttacacatgcagtact

SEQ ID NO: 75208 - DNA, 20 bp, Artificial Sequence
  Description of Artificial Sequence: Synthetic oligonucleotide
  Target: SCNA; (+) strand; PAM type: YTN; PAM sequence: TTA
tttttacacatgcagtactc

SEQ ID NO: 75209 - DNA, 20 bp, Artificial Sequence
  Description of Artificial Sequence: Synthetic oligonucleotide
  Target: SCNA; (+) strand; PAM type: YTN; PAM sequence: TTT
ttacacatgcagtactcaga

SEQ ID NO: 75210 - DNA, 20 bp, Artificial Sequence
  Description of Artificial Sequence: Synthetic oligonucleotide
  Target: SCNA; (+) strand; PAM type: YTN; PAM sequence: TTT
tacacatgcagtactcagag

SEQ ID NO: 75211 - DNA, 20 bp, Artificial Sequence
  Description of Artificial Sequence: Synthetic oligonucleotide
  Target: SCNA; (+) strand; PAM type: YTN; PAM sequence: TTT
acacatgcagtactcagagt

SEQ ID NO: 75212 - DNA, 20 bp, Artificial Sequence
  Description of Artificial Sequence: Synthetic oligonucleotide
  Target: SCNA; (+) strand; PAM type: YTN; PAM sequence: TTA
cacatgcagtactcagagtc

SEQ ID NO: 75213 - DNA, 20 bp, Artificial Sequence
  Description of Artificial Sequence: Synthetic oligonucleotide
  Target: SCNA; (+) strand; PAM type: YTN; PAM sequence: CTC
agagtctaaacaaaccttag

SEQ ID NO: 75214 - DNA, 20 bp, Artificial Sequence
  Description of Artificial Sequence: Synthetic oligonucleotide
  Target: SCNA; (+) strand; PAM type: YTN; PAM sequence: CTA
aacaaaccttagcttgcatt

SEQ ID NO: 75215 - DNA, 20 bp, Artificial Sequence
  Description of Artificial Sequence: Synthetic oligonucleotide
  Target: SCNA; (+) strand; PAM type: YTN; PAM sequence: CTT
agcttgcattttcctcttaa

SEQ ID NO: 75216 - DNA, 20 bp, Artificial Sequence
  Description of Artificial Sequence: Synthetic oligonucleotide
  Target: SCNA; (+) strand; PAM type: YTN; PAM sequence: TTA
gcttgcattttcctcttaaa

SEQ ID NO: 75217 - DNA, 20 bp, Artificial Sequence
  Description of Artificial Sequence: Synthetic oligonucleotide
  Target: SCNA; (+) strand; PAM type: YTN; PAM sequence: CTT
gcattttcctcttaaaagcc

SEQ ID NO: 75218 - DNA, 20 bp, Artificial Sequence
  Description of Artificial Sequence: Synthetic oligonucleotide
  Target: SCNA; (+) strand; PAM type: YTN; PAM sequence: TTG
cattttcctcttaaaagccc

SEQ ID NO: 75219 - DNA, 20 bp, Artificial Sequence
  Description of Artificial Sequence: Synthetic oligonucleotide
  Target: SCNA; (+) strand; PAM type: YTN; PAM sequence: TTT
tcctcttaaaagcccaccat

SEQ ID NO: 75220 - DNA, 20 bp, Artificial Sequence
  Description of Artificial Sequence: Synthetic oligonucleotide
  Target: SCNA; (+) strand; PAM type: YTN; PAM sequence: TTT
cctcttaaaagcccaccatg

SEQ ID NO: 75221 - DNA, 20 bp, Artificial Sequence
  Description of Artificial Sequence: Synthetic oligonucleotide
  Target: SCNA; (+) strand; PAM type: YTN; PAM sequence: TTC
ctcttaaaagcccaccatgg

SEQ ID NO: 75222 - DNA, 20 bp, Artificial Sequence
  Description of Artificial Sequence: Synthetic oligonucleotide
  Target: SCNA; (+) strand; PAM type: YTN; PAM sequence: CTC
ttaaaagcccaccatggatc

SEQ ID NO: 75223 - DNA, 20 bp, Artificial Sequence
  Description of Artificial Sequence: Synthetic oligonucleotide
  Target: SCNA; (+) strand; PAM type: YTN; PAM sequence: CTT
aaaagcccaccatggatctc

SEQ ID NO: 75224 - DNA, 20 bp, Artificial Sequence
  Description of Artificial Sequence: Synthetic oligonucleotide
  Target: SCNA; (+) strand; PAM type: YTN; PAM sequence: TTA
aaagcccaccatggatctca

SEQ ID NO: 75225 - DNA, 20 bp, Artificial Sequence
  Description of Artificial Sequence: Synthetic oligonucleotide
  Target: SCNA; (+) strand; PAM type: YTN; PAM sequence: CTC
acagttttgttgttgttgtt

SEQ ID NO: 75226 - DNA, 20 bp, Artificial Sequence
  Description of Artificial Sequence: Synthetic oligonucleotide
  Target: SCNA; (+) strand; PAM type: YTN; PAM sequence: TTT
tgttgttgttgttgttgttg

SEQ ID NO: 75227 - DNA, 20 bp, Artificial Sequence
  Description of Artificial Sequence: Synthetic oligonucleotide
  Target: SCNA; (+) strand; PAM type: YTN; PAM sequence: TTT
gttgttgttgttgttgttgt

SEQ ID NO: 75228 - DNA, 20 bp, Artificial Sequence
  Description of Artificial Sequence: Synthetic oligonucleotide
  Target: SCNA; (+) strand; PAM type: YTN; PAM sequence: TTG
ttgttgttgttgttgttgtt

SEQ ID NO: 75229 - DNA, 20 bp, Artificial Sequence
  Description of Artificial Sequence: Synthetic oligonucleotide
  Target: SCNA; (+) strand; PAM type: YTN; PAM sequence: TTG
ttgttgttgttgttgttgtt

SEQ ID NO: 75230 - DNA, 20 bp, Artificial Sequence
  Description of Artificial Sequence: Synthetic oligonucleotide
  Target: SCNA; (+) strand; PAM type: YTN; PAM sequence: TTG
ttgttgttgttgttgttgtt

SEQ ID NO: 75231 - DNA, 20 bp, Artificial Sequence
  Description of Artificial Sequence: Synthetic oligonucleotide
  Target: SCNA; (+) strand; PAM type: YTN; PAM sequence: TTG
ttgttgttgttgttgttgtt

SEQ ID NO: 75232 - DNA, 20 bp, Artificial Sequence
  Description of Artificial Sequence: Synthetic oligonucleotide
  Target: SCNA; (+) strand; PAM type: YTN; PAM sequence: TTG
ttgttgttgttgttgttgtt

SEQ ID NO: 75233 - DNA, 20 bp, Artificial Sequence
  Description of Artificial Sequence: Synthetic oligonucleotide
  Target: SCNA; (+) strand; PAM type: YTN; PAM sequence: TTG
ttgttgttgttgttgttgtt

SEQ ID NO: 75234 - DNA, 20 bp, Artificial Sequence
  Description of Artificial Sequence: Synthetic oligonucleotide
  Target: SCNA; (+) strand; PAM type: YTN; PAM sequence: TTG
ttgttgttgttgttgttgtt

SEQ ID NO: 75235 - DNA, 20 bp, Artificial Sequence
  Description of Artificial Sequence: Synthetic oligonucleotide
  Target: SCNA; (+) strand; PAM type: YTN; PAM sequence: TTG
ttgttgttgttgttgttgtt

SEQ ID NO: 75236 - DNA, 20 bp, Artificial Sequence
  Description of Artificial Sequence: Synthetic oligonucleotide
  Target: SCNA; (+) strand; PAM type: YTN; PAM sequence: TTG
ttgttgttgttgttgttgtt

SEQ ID NO: 75237 - DNA, 20 bp, Artificial Sequence
  Description of Artificial Sequence: Synthetic oligonucleotide
  Target: SCNA; (+) strand; PAM type: YTN; PAM sequence: TTG
ttgttgttgttgttgttgag

SEQ ID NO: 75238 - DNA, 20 bp, Artificial Sequence
  Description of Artificial Sequence: Synthetic oligonucleotide
  Target: SCNA; (+) strand; PAM type: YTN; PAM sequence: TTG
ttgttgttgttgttgagacg

SEQ ID NO: 75239 - DNA, 20 bp, Artificial Sequence
  Description of Artificial Sequence: Synthetic oligonucleotide
  Target: SCNA; (+) strand; PAM type: YTN; PAM sequence: TTG
ttgttgttgttgagacggga

SEQ ID NO: 75240 - DNA, 20 bp, Artificial Sequence
  Description of Artificial Sequence: Synthetic oligonucleotide
  Target: SCNA; (+) strand; PAM type: YTN; PAM sequence: TTG
ttgttgttgagacgggatct

SEQ ID NO: 75241 - DNA, 20 bp, Artificial Sequence
  Description of Artificial Sequence: Synthetic oligonucleotide
  Target: SCNA; (+) strand; PAM type: YTN; PAM sequence: TTG
ttgttgagacgggatctcac

SEQ ID NO: 75242 - DNA, 20 bp, Artificial Sequence
  Description of Artificial Sequence: Synthetic oligonucleotide
  Target: SCNA; (+) strand; PAM type: YTN; PAM sequence: TTG
ttgagacgggatctcactct

SEQ ID NO: 75243 - DNA, 20 bp, Artificial Sequence
  Description of Artificial Sequence: Synthetic oligonucleotide
  Target: SCNA; (+) strand; PAM type: YTN; PAM sequence: TTG
agacgggatctcactctgtt

SEQ ID NO: 75244 - DNA, 20 bp, Artificial Sequence
  Description of Artificial Sequence: Synthetic oligonucleotide
  Target: SCNA; (+) strand; PAM type: YTN; PAM sequence: CTC
actctgttgccaggctggag

SEQ ID NO: 75245 - DNA, 20 bp, Artificial Sequence
  Description of Artificial Sequence: Synthetic oligonucleotide
  Target: SCNA; (+) strand; PAM type: YTN; PAM sequence: CTC
tgttgccaggctggagtgca

SEQ ID NO: 75246 - DNA, 20 bp, Artificial Sequence
  Description of Artificial Sequence: Synthetic oligonucleotide
  Target: SCNA; (+) strand; PAM type: YTN; PAM sequence: CTG
ttgccaggctggagtgcagt

SEQ ID NO: 75247 - DNA, 20 bp, Artificial Sequence
  Description of Artificial Sequence: Synthetic oligonucleotide
  Target: SCNA; (+) strand; PAM type: YTN; PAM sequence: TTG
ccaggctggagtgcagtggc

SEQ ID NO: 75248 - DNA, 20 bp, Artificial Sequence
  Description of Artificial Sequence: Synthetic oligonucleotide
  Target: SCNA; (+) strand; PAM type: YTN; PAM sequence: CTG
gagtgcagtggcacaatctt

SEQ ID NO: 75249 - DNA, 20 bp, Artificial Sequence
  Description of Artificial Sequence: Synthetic oligonucleotide
  Target: SCNA; (+) strand; PAM type: YTN; PAM sequence: CTT
ggctcactgcaacctccgac

SEQ ID NO: 75250 - DNA, 20 bp, Artificial Sequence
  Description of Artificial Sequence: Synthetic oligonucleotide
  Target: SCNA; (+) strand; PAM type: YTN; PAM sequence: TTG
gctcactgcaacctccgact

SEQ ID NO: 75251 - DNA, 20 bp, Artificial Sequence
  Description of Artificial Sequence: Synthetic oligonucleotide
  Target: SCNA; (+) strand; PAM type: YTN; PAM sequence: CTC
actgcaacctccgactcctt

SEQ ID NO: 75252 - DNA, 20 bp, Artificial Sequence
  Description of Artificial Sequence: Synthetic oligonucleotide
  Target: SCNA; (+) strand; PAM type: YTN; PAM sequence: CTG
caacctccgactccttggtt

SEQ ID NO: 75253 - DNA, 20 bp, Artificial Sequence
  Description of Artificial Sequence: Synthetic oligonucleotide
  Target: SCNA; (+) strand; PAM type: YTN; PAM sequence: CTC
cgactccttggttgttcaag

SEQ ID NO: 75254 - DNA, 20 bp, Artificial Sequence
  Description of Artificial Sequence: Synthetic oligonucleotide
  Target: SCNA; (+) strand; PAM type: YTN; PAM sequence: CTC
cttggttgttcaagtgattc

SEQ ID NO: 75255 - DNA, 20 bp, Artificial Sequence
  Description of Artificial Sequence: Synthetic oligonucleotide
  Target: SCNA; (+) strand; PAM type: YTN; PAM sequence: CTT
ggttgttcaagtgattctct

SEQ ID NO: 75256 - DNA, 20 bp, Artificial Sequence
  Description of Artificial Sequence: Synthetic oligonucleotide
  Target: SCNA; (+) strand; PAM type: YTN; PAM sequence: TTG
gttgttcaagtgattctctt

SEQ ID NO: 75257 - DNA, 20 bp, Artificial Sequence
  Description of Artificial Sequence: Synthetic oligonucleotide
  Target: SCNA; (+) strand; PAM type: YTN; PAM sequence: TTG
ttcaagtgattctcttgcct

SEQ ID NO: 75258 - DNA, 20 bp, Artificial Sequence
  Description of Artificial Sequence: Synthetic oligonucleotide
  Target: SCNA; (+) strand; PAM type: YTN; PAM sequence: TTC
aagtgattctcttgcctcag

SEQ ID NO: 75259 - DNA, 20 bp, Artificial Sequence
  Description of Artificial Sequence: Synthetic oligonucleotide
  Target: SCNA; (+) strand; PAM type: YTN; PAM sequence: TTC
tcttgcctcagcctcccaaa

SEQ ID NO: 75260 - DNA, 20 bp, Artificial Sequence
  Description of Artificial Sequence: Synthetic oligonucleotide
  Target: SCNA; (+) strand; PAM type: YTN; PAM sequence: CTC
ttgcctcagcctcccaaata

SEQ ID NO: 75261 - DNA, 20 bp, Artificial Sequence
  Description of Artificial Sequence: Synthetic oligonucleotide
  Target: SCNA; (+) strand; PAM type: YTN; PAM sequence: CTT
gcctcagcctcccaaatagc

SEQ ID NO: 75262 - DNA, 20 bp, Artificial Sequence
  Description of Artificial Sequence: Synthetic oligonucleotide
  Target: SCNA; (+) strand; PAM type: YTN; PAM sequence: TTG
cctcagcctcccaaatagct

SEQ ID NO: 75263 - DNA, 20 bp, Artificial Sequence
  Description of Artificial Sequence: Synthetic oligonucleotide
  Target: SCNA; (+) strand; PAM type: YTN; PAM sequence: CTC
agcctcccaaatagctgaga

SEQ ID NO: 75264 - DNA, 20 bp, Artificial Sequence
  Description of Artificial Sequence: Synthetic oligonucleotide
  Target: SCNA; (+) strand; PAM type: YTN; PAM sequence: CTC
ccaaatagctgagattacag

SEQ ID NO: 75265 - DNA, 20 bp, Artificial Sequence
  Description of Artificial Sequence: Synthetic oligonucleotide
  Target: SCNA; (+) strand; PAM type: YTN; PAM sequence: CTG
agattacaggcacgcgccac

SEQ ID NO: 75266 - DNA, 20 bp, Artificial Sequence
  Description of Artificial Sequence: Synthetic oligonucleotide
  Target: SCNA; (+) strand; PAM type: YTN; PAM sequence: TTA
caggcacgcgccaccaggcc

SEQ ID NO: 75267 - DNA, 20 bp, Artificial Sequence
  Description of Artificial Sequence: Synthetic oligonucleotide
  Target: SCNA; (+) strand; PAM type: YTN; PAM sequence: CTA
atttttgtatttttagtaga

SEQ ID NO: 75268 - DNA, 20 bp, Artificial Sequence
  Description of Artificial Sequence: Synthetic oligonucleotide
  Target: SCNA; (+) strand; PAM type: YTN; PAM sequence: TTT
ttgtatttttagtagagaca

SEQ ID NO: 75269 - DNA, 20 bp, Artificial Sequence
  Description of Artificial Sequence: Synthetic oligonucleotide
  Target: SCNA; (+) strand; PAM type: YTN; PAM sequence: TTT
tgtatttttagtagagacag

SEQ ID NO: 75270 - DNA, 20 bp, Artificial Sequence
  Description of Artificial Sequence: Synthetic oligonucleotide
  Target: SCNA; (+) strand; PAM type: YTN; PAM sequence: TTT
gtatttttagtagagacagc

SEQ ID NO: 75271 - DNA, 20 bp, Artificial Sequence
  Description of Artificial Sequence: Synthetic oligonucleotide
  Target: SCNA; (+) strand; PAM type: YTN; PAM sequence: TTG
tatttttagtagagacagcg

SEQ ID NO: 75272 - DNA, 20 bp, Artificial Sequence
  Description of Artificial Sequence: Synthetic oligonucleotide
  Target: SCNA; (+) strand; PAM type: YTN; PAM sequence: TTT
ttagtagagacagcgtttca

SEQ ID NO: 75273 - DNA, 20 bp, Artificial Sequence
  Description of Artificial Sequence: Synthetic oligonucleotide
  Target: SCNA; (+) strand; PAM type: YTN; PAM sequence: TTT
tagtagagacagcgtttcac

SEQ ID NO: 75274 - DNA, 20 bp, Artificial Sequence
  Description of Artificial Sequence: Synthetic oligonucleotide
  Target: SCNA; (+) strand; PAM type: YTN; PAM sequence: TTT
agtagagacagcgtttcacc

SEQ ID NO: 75275 - DNA, 20 bp, Artificial Sequence
  Description of Artificial Sequence: Synthetic oligonucleotide
  Target: SCNA; (+) strand; PAM type: YTN; PAM sequence: TTA
gtagagacagcgtttcacca

SEQ ID NO: 75276 - DNA, 20 bp, Artificial Sequence
  Description of Artificial Sequence: Synthetic oligonucleotide
  Target: SCNA; (+) strand; PAM type: YTN; PAM sequence: TTT
caccatgttggccaggatgg

SEQ ID NO: 75277 - DNA, 20 bp, Artificial Sequence
  Description of Artificial Sequence: Synthetic oligonucleotide
  Target: SCNA; (+) strand; PAM type: YTN; PAM sequence: TTC
accatgttggccaggatggt

SEQ ID NO: 75278 - DNA, 20 bp, Artificial Sequence
  Description of Artificial Sequence: Synthetic oligonucleotide
  Target: SCNA; (+) strand; PAM type: YTN; PAM sequence: TTG
gccaggatggtctcgatctc

SEQ ID NO: 75279 - DNA, 20 bp, Artificial Sequence
  Description of Artificial Sequence: Synthetic oligonucleotide
  Target: SCNA; (+) strand; PAM type: YTN; PAM sequence: CTC
gatctcctgacctcgtgatc

SEQ ID NO: 75280 - DNA, 20 bp, Artificial Sequence
  Description of Artificial Sequence: Synthetic oligonucleotide
  Target: SCNA; (+) strand; PAM type: YTN; PAM sequence: CTC
ctgacctcgtgatccaccca

SEQ ID NO: 75281 - DNA, 20 bp, Artificial Sequence
  Description of Artificial Sequence: Synthetic oligonucleotide
  Target: SCNA; (+) strand; PAM type: YTN; PAM sequence: CTG
acctcgtgatccacccacct

SEQ ID NO: 75282 - DNA, 20 bp, Artificial Sequence
  Description of Artificial Sequence: Synthetic oligonucleotide
  Target: SCNA; (+) strand; PAM type: YTN; PAM sequence: CTC
gtgatccacccacctcagcc

SEQ ID NO: 75283 - DNA, 20 bp, Artificial Sequence
  Description of Artificial Sequence: Synthetic oligonucleotide
  Target: SCNA; (+) strand; PAM type: YTN; PAM sequence: CTC
agccttccaaagtgctggga

SEQ ID NO: 75284 - DNA, 20 bp, Artificial Sequence
  Description of Artificial Sequence: Synthetic oligonucleotide
  Target: SCNA; (+) strand; PAM type: YTN; PAM sequence: CTT
ccaaagtgctgggattatag

SEQ ID NO: 75285 - DNA, 20 bp, Artificial Sequence
  Description of Artificial Sequence: Synthetic oligonucleotide
  Target: SCNA; (+) strand; PAM type: YTN; PAM sequence: TTC
caaagtgctgggattatagg

SEQ ID NO: 75286 - DNA, 20 bp, Artificial Sequence
  Description of Artificial Sequence: Synthetic oligonucleotide
  Target: SCNA; (+) strand; PAM type: YTN; PAM sequence: CTG
ggattataggcgtgagccac

SEQ ID NO: 75287 - DNA, 20 bp, Artificial Sequence
  Description of Artificial Sequence: Synthetic oligonucleotide
  Target: SCNA; (+) strand; PAM type: YTN; PAM sequence: TTA
taggcgtgagccaccgcgcc

SEQ ID NO: 75288 - DNA, 20 bp, Artificial Sequence
  Description of Artificial Sequence: Synthetic oligonucleotide
  Target: SCNA; (+) strand; PAM type: YTN; PAM sequence: CTC
ttgtagtttttaaaattaaa

SEQ ID NO: 75289 - DNA, 20 bp, Artificial Sequence
  Description of Artificial Sequence: Synthetic oligonucleotide
  Target: SCNA; (+) strand; PAM type: YTN; PAM sequence: CTT
gtagtttttaaaattaaatt

SEQ ID NO: 75290 - DNA, 20 bp, Artificial Sequence
  Description of Artificial Sequence: Synthetic oligonucleotide
  Target: SCNA; (+) strand; PAM type: YTN; PAM sequence: TTG
tagtttttaaaattaaattt

SEQ ID NO: 75291 - DNA, 20 bp, Artificial Sequence
  Description of Artificial Sequence: Synthetic oligonucleotide
  Target: SCNA; (+) strand; PAM type: YTN; PAM sequence: TTT
ttaaaattaaatttaatcca

SEQ ID NO: 75292 - DNA, 20 bp, Artificial Sequence
  Description of Artificial Sequence: Synthetic oligonucleotide
  Target: SCNA; (+) strand; PAM type: YTN; PAM sequence: TTT
taaaattaaatttaatccaa

SEQ ID NO: 75293 - DNA, 20 bp, Artificial Sequence
  Description of Artificial Sequence: Synthetic oligonucleotide
  Target: SCNA; (+) strand; PAM type: YTN; PAM sequence: TTT
aaaattaaatttaatccaat

SEQ ID NO: 75294 - DNA, 20 bp, Artificial Sequence
  Description of Artificial Sequence: Synthetic oligonucleotide
  Target: SCNA; (+) strand; PAM type: YTN; PAM sequence: TTA
aaattaaatttaatccaata

SEQ ID NO: 75295 - DNA, 20 bp, Artificial Sequence
  Description of Artificial Sequence: Synthetic oligonucleotide
  Target: SCNA; (+) strand; PAM type: YTN; PAM sequence: TTA
aatttaatccaataaaacat

SEQ ID NO: 75296 - DNA, 20 bp, Artificial Sequence
  Description of Artificial Sequence: Synthetic oligonucleotide
  Target: SCNA; (+) strand; PAM type: YTN; PAM sequence: TTT
aatccaataaaacatttagt

SEQ ID NO: 75297 - DNA, 20 bp, Artificial Sequence
  Description of Artificial Sequence: Synthetic oligonucleotide
  Target: SCNA; (+) strand; PAM type: YTN; PAM sequence: TTA
atccaataaaacatttagtt

SEQ ID NO: 75298 - DNA, 20 bp, Artificial Sequence
  Description of Artificial Sequence: Synthetic oligonucleotide
  Target: SCNA; (+) strand; PAM type: YTN; PAM sequence: TTT
agtttgcctttatttggaat

SEQ ID NO: 75299 - DNA, 20 bp, Artificial Sequence
  Description of Artificial Sequence: Synthetic oligonucleotide
  Target: SCNA; (+) strand; PAM type: YTN; PAM sequence: TTA
gtttgcctttatttggaatt

SEQ ID NO: 75300 - DNA, 20 bp, Artificial Sequence
  Description of Artificial Sequence: Synthetic oligonucleotide
  Target: SCNA; (+) strand; PAM type: YTN; PAM sequence: TTT
gcctttatttggaatttgtt

SEQ ID NO: 75301 - DNA, 20 bp, Artificial Sequence
  Description of Artificial Sequence: Synthetic oligonucleotide
  Target: SCNA; (+) strand; PAM type: YTN; PAM sequence: TTG
cctttatttggaatttgtta

SEQ ID NO: 75302 - DNA, 20 bp, Artificial Sequence
  Description of Artificial Sequence: Synthetic oligonucleotide
  Target: SCNA; (+) strand; PAM type: YTN; PAM sequence: CTT
tatttggaatttgttatcta

SEQ ID NO: 75303 - DNA, 20 bp, Artificial Sequence
  Description of Artificial Sequence: Synthetic oligonucleotide
  Target: SCNA; (+) strand; PAM type: YTN; PAM sequence: TTT
atttggaatttgttatctat

SEQ ID NO: 75304 - DNA, 20 bp, Artificial Sequence
  Description of Artificial Sequence: Synthetic oligonucleotide
  Target: SCNA; (+) strand; PAM type: YTN; PAM sequence: TTA
tttggaatttgttatctatt

SEQ ID NO: 75305 - DNA, 20 bp, Artificial Sequence
  Description of Artificial Sequence: Synthetic oligonucleotide
  Target: SCNA; (+) strand; PAM type: YTN; PAM sequence: TTT
ggaatttgttatctattgtt

SEQ ID NO: 75306 - DNA, 20 bp, Artificial Sequence
  Description of Artificial Sequence: Synthetic oligonucleotide
  Target: SCNA; (+) strand; PAM type: YTN; PAM sequence: TTG
gaatttgttatctattgtta

SEQ ID NO: 75307 - DNA, 20 bp, Artificial Sequence
  Description of Artificial Sequence: Synthetic oligonucleotide
  Target: SCNA; (+) strand; PAM type: YTN; PAM sequence: TTT
gttatctattgttatatact

SEQ ID NO: 75308 - DNA, 20 bp, Artificial Sequence
  Description of Artificial Sequence: Synthetic oligonucleotide
  Target: SCNA; (+) strand; PAM type: YTN; PAM sequence: TTG
ttatctattgttatatactc

SEQ ID NO: 75309 - DNA, 20 bp, Artificial Sequence
  Description of Artificial Sequence: Synthetic oligonucleotide
  Target: SCNA; (+) strand; PAM type: YTN; PAM sequence: TTA
tctattgttatatactctat

SEQ ID NO: 75310 - DNA, 20 bp, Artificial Sequence
  Description of Artificial Sequence: Synthetic oligonucleotide
  Target: SCNA; (+) strand; PAM type: YTN; PAM sequence: CTA
ttgttatatactctattaat

SEQ ID NO: 75311 - DNA, 20 bp, Artificial Sequence
  Description of Artificial Sequence: Synthetic oligonucleotide
  Target: SCNA; (+) strand; PAM type: YTN; PAM sequence: TTG
ttatatactctattaatacc

SEQ ID NO: 75312 - DNA, 20 bp, Artificial Sequence
  Description of Artificial Sequence: Synthetic oligonucleotide
  Target: SCNA; (+) strand; PAM type: YTN; PAM sequence: TTA
tatactctattaatacctcc

SEQ ID NO: 75313 - DNA, 20 bp, Artificial Sequence
  Description of Artificial Sequence: Synthetic oligonucleotide
  Target: SCNA; (+) strand; PAM type: YTN; PAM sequence: CTC
tattaatacctcctcttcag

SEQ ID NO: 75314 - DNA, 20 bp, Artificial Sequence
  Description of Artificial Sequence: Synthetic oligonucleotide
  Target: SCNA; (+) strand; PAM type: YTN; PAM sequence: CTA
ttaatacctcctcttcagca

SEQ ID NO: 75315 - DNA, 20 bp, Artificial Sequence
  Description of Artificial Sequence: Synthetic oligonucleotide
  Target: SCNA; (+) strand; PAM type: YTN; PAM sequence: TTA
atacctcctcttcagcaagg

SEQ ID NO: 75316 - DNA, 20 bp, Artificial Sequence
  Description of Artificial Sequence: Synthetic oligonucleotide
  Target: SCNA; (+) strand; PAM type: YTN; PAM sequence: CTC
ctcttcagcaaggaaatttt

SEQ ID NO: 75317 - DNA, 20 bp, Artificial Sequence
  Description of Artificial Sequence: Synthetic oligonucleotide
  Target: SCNA; (+) strand; PAM type: YTN; PAM sequence: CTC
ttcagcaaggaaattttctt

SEQ ID NO: 75318 - DNA, 20 bp, Artificial Sequence
  Description of Artificial Sequence: Synthetic oligonucleotide
  Target: SCNA; (+) strand; PAM type: YTN; PAM sequence: CTT
cagcaaggaaattttcttac

SEQ ID NO: 75319 - DNA, 20 bp, Artificial Sequence
  Description of Artificial Sequence: Synthetic oligonucleotide
  Target: SCNA; (+) strand; PAM type: YTN; PAM sequence: TTC
agcaaggaaattttcttaca

SEQ ID NO: 75320 - DNA, 20 bp, Artificial Sequence
  Description of Artificial Sequence: Synthetic oligonucleotide
  Target: SCNA; (+) strand; PAM type: YTN; PAM sequence: TTT
tcttacatctgcttacacgt

SEQ ID NO: 75321 - DNA, 20 bp, Artificial Sequence
  Description of Artificial Sequence: Synthetic oligonucleotide
  Target: SCNA; (+) strand; PAM type: YTN; PAM sequence: TTT
cttacatctgcttacacgta

SEQ ID NO: 75322 - DNA, 20 bp, Artificial Sequence
  Description of Artificial Sequence: Synthetic oligonucleotide
  Target: SCNA; (+) strand; PAM type: YTN; PAM sequence: TTC
ttacatctgcttacacgtac

SEQ ID NO: 75323 - DNA, 20 bp, Artificial Sequence
  Description of Artificial Sequence: Synthetic oligonucleotide
  Target: SCNA; (+) strand; PAM type: YTN; PAM sequence: CTT
acatctgcttacacgtacat

SEQ ID NO: 75324 - DNA, 20 bp, Artificial Sequence
  Description of Artificial Sequence: Synthetic oligonucleotide
  Target: SCNA; (+) strand; PAM type: YTN; PAM sequence: TTA
catctgcttacacgtacatc

SEQ ID NO: 75325 - DNA, 20 bp, Artificial Sequence
  Description of Artificial Sequence: Synthetic oligonucleotide
  Target: SCNA; (+) strand; PAM type: YTN; PAM sequence: CTG
cttacacgtacatcatttgt

SEQ ID NO: 75326 - DNA, 20 bp, Artificial Sequence
  Description of Artificial Sequence: Synthetic oligonucleotide
  Target: SCNA; (+) strand; PAM type: YTN; PAM sequence: CTT
acacgtacatcatttgttag

SEQ ID NO: 75327 - DNA, 20 bp, Artificial Sequence
  Description of Artificial Sequence: Synthetic oligonucleotide
  Target: SCNA; (+) strand; PAM type: YTN; PAM sequence: TTA
cacgtacatcatttgttaga

SEQ ID NO: 75328 - DNA, 20 bp, Artificial Sequence
  Description of Artificial Sequence: Synthetic oligonucleotide
  Target: SCNA; (+) strand; PAM type: YTN; PAM sequence: TTT
gttagagcccctaaatattg

SEQ ID NO: 75329 - DNA, 20 bp, Artificial Sequence
  Description of Artificial Sequence: Synthetic oligonucleotide
  Target: SCNA; (+) strand; PAM type: YTN; PAM sequence: TTG
ttagagcccctaaatattgg

SEQ ID NO: 75330 - DNA, 20 bp, Artificial Sequence
  Description of Artificial Sequence: Synthetic oligonucleotide
  Target: SCNA; (+) strand; PAM type: YTN; PAM sequence: TTA
gagcccctaaatattggtaa

SEQ ID NO: 75331 - DNA, 20 bp, Artificial Sequence
  Description of Artificial Sequence: Synthetic oligonucleotide
  Target: SCNA; (+) strand; PAM type: YTN; PAM sequence: CTA
aatattggtaatgatgatga

SEQ ID NO: 75332 - DNA, 20 bp, Artificial Sequence
  Description of Artificial Sequence: Synthetic oligonucleotide
  Target: SCNA; (+) strand; PAM type: YTN; PAM sequence: TTG
gtaatgatgatgatgatatt

SEQ ID NO: 75333 - DNA, 20 bp, Artificial Sequence
  Description of Artificial Sequence: Synthetic oligonucleotide
  Target: SCNA; (+) strand; PAM type: YTN; PAM sequence: TTA
tagcatgaattactttacgt

SEQ ID NO: 75334 - DNA, 20 bp, Artificial Sequence
  Description of Artificial Sequence: Synthetic oligonucleotide
  Target: SCNA; (+) strand; PAM type: YTN; PAM sequence: TTA
ctttacgttgaacattggcc

SEQ ID NO: 75335 - DNA, 20 bp, Artificial Sequence
  Description of Artificial Sequence: Synthetic oligonucleotide
  Target: SCNA; (+) strand; PAM type: YTN; PAM sequence: CTT
tacgttgaacattggcctaa

SEQ ID NO: 75336 - DNA, 20 bp, Artificial Sequence
  Description of Artificial Sequence: Synthetic oligonucleotide
  Target: SCNA; (+) strand; PAM type: YTN; PAM sequence: TTT
acgttgaacattggcctaag

SEQ ID NO: 75337 - DNA, 20 bp, Artificial Sequence
  Description of Artificial Sequence: Synthetic oligonucleotide
  Target: SCNA; (+) strand; PAM type: YTN; PAM sequence: TTA
cgttgaacattggcctaagt

SEQ ID NO: 75338 - DNA, 20 bp, Artificial Sequence
  Description of Artificial Sequence: Synthetic oligonucleotide
  Target: SCNA; (+) strand; PAM type: YTN; PAM sequence: TTG
aacattggcctaagtgcttt

SEQ ID NO: 75339 - DNA, 20 bp, Artificial Sequence
  Description of Artificial Sequence: Synthetic oligonucleotide
  Target: SCNA; (+) strand; PAM type: YTN; PAM sequence: TTG
gcctaagtgctttaaacaca

SEQ ID NO: 75340 - DNA, 20 bp, Artificial Sequence
  Description of Artificial Sequence: Synthetic oligonucleotide
  Target: SCNA; (+) strand; PAM type: YTN; PAM sequence: CTA
agtgctttaaacacattatt

SEQ ID NO: 75341 - DNA, 20 bp, Artificial Sequence
  Description of Artificial Sequence: Synthetic oligonucleotide
  Target: SCNA; (+) strand; PAM type: YTN; PAM sequence: CTT
taaacacattatttgcctag

SEQ ID NO: 75342 - DNA, 20 bp, Artificial Sequence
  Description of Artificial Sequence: Synthetic oligonucleotide
  Target: SCNA; (+) strand; PAM type: YTN; PAM sequence: TTT
aaacacattatttgcctagc

SEQ ID NO: 75343 - DNA, 20 bp, Artificial Sequence
  Description of Artificial Sequence: Synthetic oligonucleotide
  Target: SCNA; (+) strand; PAM type: YTN; PAM sequence: TTA
aacacattatttgcctagca

SEQ ID NO: 75344 - DNA, 20 bp, Artificial Sequence
  Description of Artificial Sequence: Synthetic oligonucleotide
  Target: SCNA; (+) strand; PAM type: YTN; PAM sequence: TTA
tttgcctagcatttacaaca

SEQ ID NO: 75345 - DNA, 20 bp, Artificial Sequence
  Description of Artificial Sequence: Synthetic oligonucleotide
  Target: SCNA; (+) strand; PAM type: YTN; PAM sequence: TTT
gcctagcatttacaacattt

SEQ ID NO: 75346 - DNA, 20 bp, Artificial Sequence
  Description of Artificial Sequence: Synthetic oligonucleotide
  Target: SCNA; (+) strand; PAM type: YTN; PAM sequence: TTG
cctagcatttacaacatttt

SEQ ID NO: 75347 - DNA, 20 bp, Artificial Sequence
  Description of Artificial Sequence: Synthetic oligonucleotide
  Target: SCNA; (+) strand; PAM type: YTN; PAM sequence: CTA
gcatttacaacatttttgta

SEQ ID NO: 75348 - DNA, 20 bp, Artificial Sequence
  Description of Artificial Sequence: Synthetic oligonucleotide
  Target: SCNA; (+) strand; PAM type: YTN; PAM sequence: TTT
acaacatttttgtaggtatt

SEQ ID NO: 75349 - DNA, 20 bp, Artificial Sequence
  Description of Artificial Sequence: Synthetic oligonucleotide
  Target: SCNA; (+) strand; PAM type: YTN; PAM sequence: TTA
caacatttttgtaggtatta

SEQ ID NO: 75350 - DNA, 20 bp, Artificial Sequence
  Description of Artificial Sequence: Synthetic oligonucleotide
  Target: SCNA; (+) strand; PAM type: YTN; PAM sequence: TTT
ttgtaggtattatttgtcac

SEQ ID NO: 75351 - DNA, 20 bp, Artificial Sequence
  Description of Artificial Sequence: Synthetic oligonucleotide
  Target: SCNA; (+) strand; PAM type: YTN; PAM sequence: TTT
tgtaggtattatttgtcaca

SEQ ID NO: 75352 - DNA, 20 bp, Artificial Sequence
  Description of Artificial Sequence: Synthetic oligonucleotide
  Target: SCNA; (+) strand; PAM type: YTN; PAM sequence: TTT
gtaggtattatttgtcacaa

SEQ ID NO: 75353 - DNA, 20 bp, Artificial Sequence
  Description of Artificial Sequence: Synthetic oligonucleotide
  Target: SCNA; (+) strand; PAM type: YTN; PAM sequence: TTG
taggtattatttgtcacaat

SEQ ID NO: 75354 - DNA, 20 bp, Artificial Sequence
  Description of Artificial Sequence: Synthetic oligonucleotide
  Target: SCNA; (+) strand; PAM type: YTN; PAM sequence: TTA
tttgtcacaattacattttc

SEQ ID NO: 75355 - DNA, 20 bp, Artificial Sequence
  Description of Artificial Sequence: Synthetic oligonucleotide
  Target: SCNA; (+) strand; PAM type: YTN; PAM sequence: TTT
gtcacaattacattttcttg

SEQ ID NO: 75356 - DNA, 20 bp, Artificial Sequence
  Description of Artificial Sequence: Synthetic oligonucleotide
  Target: SCNA; (+) strand; PAM type: YTN; PAM sequence: TTG
tcacaattacattttcttgt

SEQ ID NO: 75357 - DNA, 20 bp, Artificial Sequence
  Description of Artificial Sequence: Synthetic oligonucleotide
  Target: SCNA; (+) strand; PAM type: YTN; PAM sequence: TTA
cattttcttgttctatgata

SEQ ID NO: 75358 - DNA, 20 bp, Artificial Sequence
  Description of Artificial Sequence: Synthetic oligonucleotide
  Target: SCNA; (+) strand; PAM type: YTN; PAM sequence: TTT
tcttgttctatgatataatt

SEQ ID NO: 75359 - DNA, 20 bp, Artificial Sequence
  Description of Artificial Sequence: Synthetic oligonucleotide
  Target: SCNA; (+) strand; PAM type: YTN; PAM sequence: TTT
cttgttctatgatataattt

SEQ ID NO: 75360 - DNA, 20 bp, Artificial Sequence
  Description of Artificial Sequence: Synthetic oligonucleotide
  Target: SCNA; (+) strand; PAM type: YTN; PAM sequence: TTC
ttgttctatgatataatttg

SEQ ID NO: 75361 - DNA, 20 bp, Artificial Sequence
  Description of Artificial Sequence: Synthetic oligonucleotide
  Target: SCNA; (+) strand; PAM type: YTN; PAM sequence: CTT
gttctatgatataatttgtt

SEQ ID NO: 75362 - DNA, 20 bp, Artificial Sequence
  Description of Artificial Sequence: Synthetic oligonucleotide
  Target: SCNA; (+) strand; PAM type: YTN; PAM sequence: TTG
ttctatgatataatttgttt

SEQ ID NO: 75363 - DNA, 20 bp, Artificial Sequence
  Description of Artificial Sequence: Synthetic oligonucleotide
  Target: SCNA; (+) strand; PAM type: YTN; PAM sequence: TTC
tatgatataatttgttttga

SEQ ID NO: 75364 - DNA, 20 bp, Artificial Sequence
  Description of Artificial Sequence: Synthetic oligonucleotide
  Target: SCNA; (+) strand; PAM type: YTN; PAM sequence: CTA
tgatataatttgttttgata

SEQ ID NO: 75365 - DNA, 20 bp, Artificial Sequence
  Description of Artificial Sequence: Synthetic oligonucleotide
  Target: SCNA; (+) strand; PAM type: YTN; PAM sequence: TTT
gttttgatatcgtattagtt

SEQ ID NO: 75366 - DNA, 20 bp, Artificial Sequence
  Description of Artificial Sequence: Synthetic oligonucleotide
  Target: SCNA; (+) strand; PAM type: YTN; PAM sequence: TTG
ttttgatatcgtattagttt

SEQ ID NO: 75367 - DNA, 20 bp, Artificial Sequence
  Description of Artificial Sequence: Synthetic oligonucleotide
  Target: SCNA; (+) strand; PAM type: YTN; PAM sequence: TTT
tgatatcgtattagttttct

SEQ ID NO: 75368 - DNA, 20 bp, Artificial Sequence
  Description of Artificial Sequence: Synthetic oligonucleotide
  Target: SCNA; (+) strand; PAM type: YTN; PAM sequence: TTT
gatatcgtattagttttcta

SEQ ID NO: 75369 - DNA, 20 bp, Artificial Sequence
  Description of Artificial Sequence: Synthetic oligonucleotide
  Target: SCNA; (+) strand; PAM type: YTN; PAM sequence: TTG
atatcgtattagttttctat

SEQ ID NO: 75370 - DNA, 20 bp, Artificial Sequence
  Description of Artificial Sequence: Synthetic oligonucleotide
  Target: SCNA; (+) strand; PAM type: YTN; PAM sequence: TTA
gttttctattgttcccctac

SEQ ID NO: 75371 - DNA, 20 bp, Artificial Sequence
  Description of Artificial Sequence: Synthetic oligonucleotide
  Target: SCNA; (+) strand; PAM type: YTN; PAM sequence: TTT
tctattgttcccctactgaa

SEQ ID NO: 75372 - DNA, 20 bp, Artificial Sequence
  Description of Artificial Sequence: Synthetic oligonucleotide
  Target: SCNA; (+) strand; PAM type: YTN; PAM sequence: TTT
ctattgttcccctactgaat

SEQ ID NO: 75373 - DNA, 20 bp, Artificial Sequence
  Description of Artificial Sequence: Synthetic oligonucleotide
  Target: SCNA; (+) strand; PAM type: YTN; PAM sequence: TTC
tattgttcccctactgaatt

SEQ ID NO: 75374 - DNA, 20 bp, Artificial Sequence
  Description of Artificial Sequence: Synthetic oligonucleotide
  Target: SCNA; (+) strand; PAM type: YTN; PAM sequence: CTA
ttgttcccctactgaattac

SEQ ID NO: 75375 - DNA, 20 bp, Artificial Sequence
  Description of Artificial Sequence: Synthetic oligonucleotide
  Target: SCNA; (+) strand; PAM type: YTN; PAM sequence: TTG
ttcccctactgaattaccac

SEQ ID NO: 75376 - DNA, 20 bp, Artificial Sequence
  Description of Artificial Sequence: Synthetic oligonucleotide
  Target: SCNA; (+) strand; PAM type: YTN; PAM sequence: TTC
ccctactgaattaccacaaa

SEQ ID NO: 75377 - DNA, 20 bp, Artificial Sequence
  Description of Artificial Sequence: Synthetic oligonucleotide
  Target: SCNA; (+) strand; PAM type: YTN; PAM sequence: CTA
ctgaattaccacaaatttat

SEQ ID NO: 75378 - DNA, 20 bp, Artificial Sequence
  Description of Artificial Sequence: Synthetic oligonucleotide
  Target: SCNA; (+) strand; PAM type: YTN; PAM sequence: CTG
aattaccacaaatttattac

SEQ ID NO: 75379 - DNA, 20 bp, Artificial Sequence
  Description of Artificial Sequence: Synthetic oligonucleotide
  Target: SCNA; (+) strand; PAM type: YTN; PAM sequence: TTA
ccacaaatttattacattgt

SEQ ID NO: 75380 - DNA, 20 bp, Artificial Sequence
  Description of Artificial Sequence: Synthetic oligonucleotide
  Target: SCNA; (+) strand; PAM type: YTN; PAM sequence: TTT
attacattgtgggattgtaa

SEQ ID NO: 75381 - DNA, 20 bp, Artificial Sequence
  Description of Artificial Sequence: Synthetic oligonucleotide
  Target: SCNA; (+) strand; PAM type: YTN; PAM sequence: TTA
ttacattgtgggattgtaag

SEQ ID NO: 75382 - DNA, 20 bp, Artificial Sequence
  Description of Artificial Sequence: Synthetic oligonucleotide
  Target: SCNA; (+) strand; PAM type: YTN; PAM sequence: TTA
cattgtgggattgtaagtct

SEQ ID NO: 75383 - DNA, 20 bp, Artificial Sequence
  Description of Artificial Sequence: Synthetic oligonucleotide
  Target: SCNA; (+) strand; PAM type: YTN; PAM sequence: TTG
tgggattgtaagtctgaagt

SEQ ID NO: 75384 - DNA, 20 bp, Artificial Sequence
  Description of Artificial Sequence: Synthetic oligonucleotide
  Target: SCNA; (+) strand; PAM type: YTN; PAM sequence: TTG
taagtctgaagtccaatagg

SEQ ID NO: 75385 - DNA, 20 bp, Artificial Sequence
  Description of Artificial Sequence: Synthetic oligonucleotide
  Target: SCNA; (+) strand; PAM type: YTN; PAM sequence: CTG
aagtccaataggggtctcac

SEQ ID NO: 75386 - DNA, 20 bp, Artificial Sequence
  Description of Artificial Sequence: Synthetic oligonucleotide
  Target: SCNA; (+) strand; PAM type: YTN; PAM sequence: CTC
actagcctaaagttaaggtg

SEQ ID NO: 75387 - DNA, 20 bp, Artificial Sequence
  Description of Artificial Sequence: Synthetic oligonucleotide
  Target: SCNA; (+) strand; PAM type: YTN; PAM sequence: CTA
gcctaaagttaaggtgtcgg

SEQ ID NO: 75388 - DNA, 20 bp, Artificial Sequence
  Description of Artificial Sequence: Synthetic oligonucleotide
  Target: SCNA; (+) strand; PAM type: YTN; PAM sequence: CTA
aagttaaggtgtcggcagga

SEQ ID NO: 75389 - DNA, 20 bp, Artificial Sequence
  Description of Artificial Sequence: Synthetic oligonucleotide
  Target: SCNA; (+) strand; PAM type: YTN; PAM sequence: TTA
aggtgtcggcaggactgtgt

SEQ ID NO: 75390 - DNA, 20 bp, Artificial Sequence
  Description of Artificial Sequence: Synthetic oligonucleotide
  Target: SCNA; (+) strand; PAM type: YTN; PAM sequence: CTG
tgttctgttttggagactct

SEQ ID NO: 75391 - DNA, 20 bp, Artificial Sequence
  Description of Artificial Sequence: Synthetic oligonucleotide
  Target: SCNA; (+) strand; PAM type: YTN; PAM sequence: TTC
tgttttggagactctaggag

SEQ ID NO: 75392 - DNA, 20 bp, Artificial Sequence
  Description of Artificial Sequence: Synthetic oligonucleotide
  Target: SCNA; (+) strand; PAM type: YTN; PAM sequence: CTG
ttttggagactctaggagaa

SEQ ID NO: 75393 - DNA, 20 bp, Artificial Sequence
  Description of Artificial Sequence: Synthetic oligonucleotide
  Target: SCNA; (+) strand; PAM type: YTN; PAM sequence: TTT
tggagactctaggagaaaat

SEQ ID NO: 75394 - DNA, 20 bp, Artificial Sequence
  Description of Artificial Sequence: Synthetic oligonucleotide
  Target: SCNA; (+) strand; PAM type: YTN; PAM sequence: TTT
ggagactctaggagaaaatc

SEQ ID NO: 75395 - DNA, 20 bp, Artificial Sequence
  Description of Artificial Sequence: Synthetic oligonucleotide
  Target: SCNA; (+) strand; PAM type: YTN; PAM sequence: TTG
gagactctaggagaaaatct

SEQ ID NO: 75396 - DNA, 20 bp, Artificial Sequence
  Description of Artificial Sequence: Synthetic oligonucleotide
  Target: SCNA; (+) strand; PAM type: YTN; PAM sequence: CTC
taggagaaaatctgtctcct

SEQ ID NO: 75397 - DNA, 20 bp, Artificial Sequence
  Description of Artificial Sequence: Synthetic oligonucleotide
  Target: SCNA; (+) strand; PAM type: YTN; PAM sequence: CTA
ggagaaaatctgtctccttg

SEQ ID NO: 75398 - DNA, 20 bp, Artificial Sequence
  Description of Artificial Sequence: Synthetic oligonucleotide
  Target: SCNA; (+) strand; PAM type: YTN; PAM sequence: CTG
tctccttgccttttccagct

SEQ ID NO: 75399 - DNA, 20 bp, Artificial Sequence
  Description of Artificial Sequence: Synthetic oligonucleotide
  Target: SCNA; (+) strand; PAM type: YTN; PAM sequence: CTC
cttgccttttccagcttctt

SEQ ID NO: 75400 - DNA, 20 bp, Artificial Sequence
  Description of Artificial Sequence: Synthetic oligonucleotide
  Target: SCNA; (+) strand; PAM type: YTN; PAM sequence: CTT
gccttttccagcttcttgat

SEQ ID NO: 75401 - DNA, 20 bp, Artificial Sequence
  Description of Artificial Sequence: Synthetic oligonucleotide
  Target: SCNA; (+) strand; PAM type: YTN; PAM sequence: TTG
ccttttccagcttcttgatg

SEQ ID NO: 75402 - DNA, 20 bp, Artificial Sequence
  Description of Artificial Sequence: Synthetic oligonucleotide
  Target: SCNA; (+) strand; PAM type: YTN; PAM sequence: CTT
ttccagcttcttgatgccat

SEQ ID NO: 75403 - DNA, 20 bp, Artificial Sequence
  Description of Artificial Sequence: Synthetic oligonucleotide
  Target: SCNA; (+) strand; PAM type: YTN; PAM sequence: TTT
tccagcttcttgatgccatt

SEQ ID NO: 75404 - DNA, 20 bp, Artificial Sequence
  Description of Artificial Sequence: Synthetic oligonucleotide
  Target: SCNA; (+) strand; PAM type: YTN; PAM sequence: TTT
ccagcttcttgatgccattc

SEQ ID NO: 75405 - DNA, 20 bp, Artificial Sequence
  Description of Artificial Sequence: Synthetic oligonucleotide
  Target: SCNA; (+) strand; PAM type: YTN; PAM sequence: TTC
cagcttcttgatgccattca

SEQ ID NO: 75406 - DNA, 20 bp, Artificial Sequence
  Description of Artificial Sequence: Synthetic oligonucleotide
  Target: SCNA; (+) strand; PAM type: YTN; PAM sequence: CTT
cttgatgccattcatagctt

SEQ ID NO: 75407 - DNA, 20 bp, Artificial Sequence
  Description of Artificial Sequence: Synthetic oligonucleotide
  Target: SCNA; (+) strand; PAM type: YTN; PAM sequence: TTC
ttgatgccattcatagcttc

SEQ ID NO: 75408 - DNA, 20 bp, Artificial Sequence
  Description of Artificial Sequence: Synthetic oligonucleotide
  Target: SCNA; (+) strand; PAM type: YTN; PAM sequence: CTT
gatgccattcatagcttctt

SEQ ID NO: 75409 - DNA, 20 bp, Artificial Sequence
  Description of Artificial Sequence: Synthetic oligonucleotide
  Target: SCNA; (+) strand; PAM type: YTN; PAM sequence: TTG
atgccattcatagcttcttt

SEQ ID NO: 75410 - DNA, 20 bp, Artificial Sequence
  Description of Artificial Sequence: Synthetic oligonucleotide
  Target: SCNA; (+) strand; PAM type: YTN; PAM sequence: TTC
atagcttctttcatgatctg

SEQ ID NO: 75411 - DNA, 20 bp, Artificial Sequence
  Description of Artificial Sequence: Synthetic oligonucleotide
  Target: SCNA; (+) strand; PAM type: YTN; PAM sequence: CTT
ctttcatgatctggcatcct

SEQ ID NO: 75412 - DNA, 20 bp, Artificial Sequence
  Description of Artificial Sequence: Synthetic oligonucleotide
  Target: SCNA; (+) strand; PAM type: YTN; PAM sequence: TTC
tttcatgatctggcatccta

SEQ ID NO: 75413 - DNA, 20 bp, Artificial Sequence
  Description of Artificial Sequence: Synthetic oligonucleotide
  Target: SCNA; (+) strand; PAM type: YTN; PAM sequence: CTT
tcatgatctggcatcctata

SEQ ID NO: 75414 - DNA, 20 bp, Artificial Sequence
  Description of Artificial Sequence: Synthetic oligonucleotide
  Target: SCNA; (+) strand; PAM type: YTN; PAM sequence: TTT
catgatctggcatcctatac

SEQ ID NO: 75415 - DNA, 20 bp, Artificial Sequence
  Description of Artificial Sequence: Synthetic oligonucleotide
  Target: SCNA; (+) strand; PAM type: YTN; PAM sequence: TTC
atgatctggcatcctatacg

SEQ ID NO: 75416 - DNA, 20 bp, Artificial Sequence
  Description of Artificial Sequence: Synthetic oligonucleotide
  Target: SCNA; (+) strand; PAM type: YTN; PAM sequence: CTG
gcatcctatacgttatactt

SEQ ID NO: 75417 - DNA, 20 bp, Artificial Sequence
  Description of Artificial Sequence: Synthetic oligonucleotide
  Target: SCNA; (+) strand; PAM type: YTN; PAM sequence: CTA
tacgttatacttattttctg

SEQ ID NO: 75418 - DNA, 20 bp, Artificial Sequence
  Description of Artificial Sequence: Synthetic oligonucleotide
  Target: SCNA; (+) strand; PAM type: YTN; PAM sequence: TTA
tacttattttctgattatat

SEQ ID NO: 75419 - DNA, 20 bp, Artificial Sequence
  Description of Artificial Sequence: Synthetic oligonucleotide
  Target: SCNA; (+) strand; PAM type: YTN; PAM sequence: CTT
attttctgattatattttgc

SEQ ID NO: 75420 - DNA, 20 bp, Artificial Sequence
  Description of Artificial Sequence: Synthetic oligonucleotide
  Target: SCNA; (+) strand; PAM type: YTN; PAM sequence: TTA
ttttctgattatattttgcc

SEQ ID NO: 75421 - DNA, 20 bp, Artificial Sequence
  Description of Artificial Sequence: Synthetic oligonucleotide
  Target: SCNA; (+) strand; PAM type: YTN; PAM sequence: TTT
tctgattatattttgcctaa

SEQ ID NO: 75422 - DNA, 20 bp, Artificial Sequence
  Description of Artificial Sequence: Synthetic oligonucleotide
  Target: SCNA; (+) strand; PAM type: YTN; PAM sequence: TTT
ctgattatattttgcctaac

SEQ ID NO: 75423 - DNA, 20 bp, Artificial Sequence
  Description of Artificial Sequence: Synthetic oligonucleotide
  Target: SCNA; (+) strand; PAM type: YTN; PAM sequence: TTC
tgattatattttgcctaacc

SEQ ID NO: 75424 - DNA, 20 bp, Artificial Sequence
  Description of Artificial Sequence: Synthetic oligonucleotide
  Target: SCNA; (+) strand; PAM type: YTN; PAM sequence: CTG
attatattttgcctaacctc

SEQ ID NO: 75425 - DNA, 20 bp, Artificial Sequence
  Description of Artificial Sequence: Synthetic oligonucleotide
  Target: SCNA; (+) strand; PAM type: YTN; PAM sequence: TTA
tattttgcctaacctctgtg

SEQ ID NO: 75426 - DNA, 20 bp, Artificial Sequence
  Description of Artificial Sequence: Synthetic oligonucleotide
  Target: SCNA; (+) strand; PAM type: YTN; PAM sequence: TTT
tgcctaacctctgtgagata

SEQ ID NO: 75427 - DNA, 20 bp, Artificial Sequence
  Description of Artificial Sequence: Synthetic oligonucleotide
  Target: SCNA; (+) strand; PAM type: YTN; PAM sequence: TTT
gcctaacctctgtgagatat

SEQ ID NO: 75428 - DNA, 20 bp, Artificial Sequence
  Description of Artificial Sequence: Synthetic oligonucleotide
  Target: SCNA; (+) strand; PAM type: YTN; PAM sequence: TTG
cctaacctctgtgagatatt

SEQ ID NO: 75429 - DNA, 20 bp, Artificial Sequence
  Description of Artificial Sequence: Synthetic oligonucleotide
  Target: SCNA; (+) strand; PAM type: YTN; PAM sequence: CTA
acctctgtgagatattaatt

SEQ ID NO: 75430 - DNA, 20 bp, Artificial Sequence
  Description of Artificial Sequence: Synthetic oligonucleotide
  Target: SCNA; (+) strand; PAM type: YTN; PAM sequence: CTC
tgtgagatattaattatttg

SEQ ID NO: 75431 - DNA, 20 bp, Artificial Sequence
  Description of Artificial Sequence: Synthetic oligonucleotide
  Target: SCNA; (+) strand; PAM type: YTN; PAM sequence: CTG
tgagatattaattatttgag

SEQ ID NO: 75432 - DNA, 20 bp, Artificial Sequence
  Description of Artificial Sequence: Synthetic oligonucleotide
  Target: SCNA; (+) strand; PAM type: YTN; PAM sequence: TTA
attatttgagggcagagatt

SEQ ID NO: 75433 - DNA, 20 bp, Artificial Sequence
  Description of Artificial Sequence: Synthetic oligonucleotide
  Target: SCNA; (+) strand; PAM type: YTN; PAM sequence: TTA
tttgagggcagagattttta

SEQ ID NO: 75434 - DNA, 20 bp, Artificial Sequence
  Description of Artificial Sequence: Synthetic oligonucleotide
  Target: SCNA; (+) strand; PAM type: YTN; PAM sequence: TTT
gagggcagagatttttattt

SEQ ID NO: 75435 - DNA, 20 bp, Artificial Sequence
  Description of Artificial Sequence: Synthetic oligonucleotide
  Target: SCNA; (+) strand; PAM type: YTN; PAM sequence: TTG
agggcagagatttttatttg

SEQ ID NO: 75436 - DNA, 20 bp, Artificial Sequence
  Description of Artificial Sequence: Synthetic oligonucleotide
  Target: SCNA; (+) strand; PAM type: YTN; PAM sequence: TTT
ttatttgtttgttcataact

SEQ ID NO: 75437 - DNA, 20 bp, Artificial Sequence
  Description of Artificial Sequence: Synthetic oligonucleotide
  Target: SCNA; (+) strand; PAM type: YTN; PAM sequence: TTT
tatttgtttgttcataacta

SEQ ID NO: 75438 - DNA, 20 bp, Artificial Sequence
  Description of Artificial Sequence: Synthetic oligonucleotide
  Target: SCNA; (+) strand; PAM type: YTN; PAM sequence: TTT
atttgtttgttcataactat

SEQ ID NO: 75439 - DNA, 20 bp, Artificial Sequence
  Description of Artificial Sequence: Synthetic oligonucleotide
  Target: SCNA; (+) strand; PAM type: YTN; PAM sequence: TTA
tttgtttgttcataactata

SEQ ID NO: 75440 - DNA, 20 bp, Artificial Sequence
  Description of Artificial Sequence: Synthetic oligonucleotide
  Target: SCNA; (+) strand; PAM type: YTN; PAM sequence: TTT
gtttgttcataactatatcc

SEQ ID NO: 75441 - DNA, 20 bp, Artificial Sequence
  Description of Artificial Sequence: Synthetic oligonucleotide
  Target: SCNA; (+) strand; PAM type: YTN; PAM sequence: TTG
tttgttcataactatatcca

SEQ ID NO: 75442 - DNA, 20 bp, Artificial Sequence
  Description of Artificial Sequence: Synthetic oligonucleotide
  Target: SCNA; (+) strand; PAM type: YTN; PAM sequence: TTT
gttcataactatatccaggt

SEQ ID NO: 75443 - DNA, 20 bp, Artificial Sequence
  Description of Artificial Sequence: Synthetic oligonucleotide
  Target: SCNA; (+) strand; PAM type: YTN; PAM sequence: TTG
ttcataactatatccaggtg

SEQ ID NO: 75444 - DNA, 20 bp, Artificial Sequence
  Description of Artificial Sequence: Synthetic oligonucleotide
  Target: SCNA; (+) strand; PAM type: YTN; PAM sequence: TTC
ataactatatccaggtgcct

SEQ ID NO: 75445 - DNA, 20 bp, Artificial Sequence
  Description of Artificial Sequence: Synthetic oligonucleotide
  Target: SCNA; (+) strand; PAM type: YTN; PAM sequence: CTA
tatccaggtgccttaaaatg

SEQ ID NO: 75446 - DNA, 20 bp, Artificial Sequence
  Description of Artificial Sequence: Synthetic oligonucleotide
  Target: SCNA; (+) strand; PAM type: YTN; PAM sequence: CTT
aaaatgatgcctgacacaaa

SEQ ID NO: 75447 - DNA, 20 bp, Artificial Sequence
  Description of Artificial Sequence: Synthetic oligonucleotide
  Target: SCNA; (+) strand; PAM type: YTN; PAM sequence: TTA
aaatgatgcctgacacaaaa

SEQ ID NO: 75448 - DNA, 20 bp, Artificial Sequence
  Description of Artificial Sequence: Synthetic oligonucleotide
  Target: SCNA; (+) strand; PAM type: YTN; PAM sequence: CTG
acacaaaataggtactcaat

SEQ ID NO: 75449 - DNA, 20 bp, Artificial Sequence
  Description of Artificial Sequence: Synthetic oligonucleotide
  Target: SCNA; (+) strand; PAM type: YTN; PAM sequence: CTC
aatcaacataggttaataaa

SEQ ID NO: 75450 - DNA, 20 bp, Artificial Sequence
  Description of Artificial Sequence: Synthetic oligonucleotide
  Target: SCNA; (+) strand; PAM type: YTN; PAM sequence: TTA
ataaatgaatgagcaaaaag

SEQ ID NO: 75451 - DNA, 20 bp, Artificial Sequence
  Description of Artificial Sequence: Synthetic oligonucleotide
  Target: SCNA; (+) strand; PAM type: YTN; PAM sequence: TTT
tattgtgcatattaattgtt

SEQ ID NO: 75452 - DNA, 20 bp, Artificial Sequence
  Description of Artificial Sequence: Synthetic oligonucleotide
  Target: SCNA; (+) strand; PAM type: YTN; PAM sequence: TTT
attgtgcatattaattgtta

SEQ ID NO: 75453 - DNA, 20 bp, Artificial Sequence
  Description of Artificial Sequence: Synthetic oligonucleotide
  Target: SCNA; (+) strand; PAM type: YTN; PAM sequence: TTA
ttgtgcatattaattgttac

SEQ ID NO: 75454 - DNA, 20 bp, Artificial Sequence
  Description of Artificial Sequence: Synthetic oligonucleotide
  Target: SCNA; (+) strand; PAM type: YTN; PAM sequence: TTG
tgcatattaattgttacctg

SEQ ID NO: 75455 - DNA, 20 bp, Artificial Sequence
  Description of Artificial Sequence: Synthetic oligonucleotide
  Target: SCNA; (+) strand; PAM type: YTN; PAM sequence: TTA
attgttacctgggggaatat

SEQ ID NO: 75456 - DNA, 20 bp, Artificial Sequence
  Description of Artificial Sequence: Synthetic oligonucleotide
  Target: SCNA; (+) strand; PAM type: YTN; PAM sequence: TTG
ttacctgggggaatatactc

SEQ ID NO: 75457 - DNA, 20 bp, Artificial Sequence
  Description of Artificial Sequence: Synthetic oligonucleotide
  Target: SCNA; (+) strand; PAM type: YTN; PAM sequence: TTA
cctgggggaatatactcaga

SEQ ID NO: 75458 - DNA, 20 bp, Artificial Sequence
  Description of Artificial Sequence: Synthetic oligonucleotide
  Target: SCNA; (+) strand; PAM type: YTN; PAM sequence: CTG
ggggaatatactcagacatc

SEQ ID NO: 75459 - DNA, 20 bp, Artificial Sequence
  Description of Artificial Sequence: Synthetic oligonucleotide
  Target: SCNA; (+) strand; PAM type: YTN; PAM sequence: CTC
agacatcttaagtctcatat

SEQ ID NO: 75460 - DNA, 20 bp, Artificial Sequence
  Description of Artificial Sequence: Synthetic oligonucleotide
  Target: SCNA; (+) strand; PAM type: YTN; PAM sequence: CTT
aagtctcatatgtaaacttg

SEQ ID NO: 75461 - DNA, 20 bp, Artificial Sequence
  Description of Artificial Sequence: Synthetic oligonucleotide
  Target: SCNA; (+) strand; PAM type: YTN; PAM sequence: TTA
agtctcatatgtaaacttgg

SEQ ID NO: 75462 - DNA, 20 bp, Artificial Sequence
  Description of Artificial Sequence: Synthetic oligonucleotide
  Target: SCNA; (+) strand; PAM type: YTN; PAM sequence: CTC
atatgtaaacttggggtatt

SEQ ID NO: 75463 - DNA, 20 bp, Artificial Sequence
  Description of Artificial Sequence: Synthetic oligonucleotide
  Target: SCNA; (+) strand; PAM type: YTN; PAM sequence: CTT
ggggtattgatatcaacatg

SEQ ID NO: 75464 - DNA, 20 bp, Artificial Sequence
  Description of Artificial Sequence: Synthetic oligonucleotide
  Target: SCNA; (+) strand; PAM type: YTN; PAM sequence: TTG
gggtattgatatcaacatgc

SEQ ID NO: 75465 - DNA, 20 bp, Artificial Sequence
  Description of Artificial Sequence: Synthetic oligonucleotide
  Target: SCNA; (+) strand; PAM type: YTN; PAM sequence: TTG
atatcaacatgccattttga

SEQ ID NO: 75466 - DNA, 20 bp, Artificial Sequence
  Description of Artificial Sequence: Synthetic oligonucleotide
  Target: SCNA; (+) strand; PAM type: YTN; PAM sequence: TTT
tgaggattaattgaggttat

SEQ ID NO: 75467 - DNA, 20 bp, Artificial Sequence
  Description of Artificial Sequence: Synthetic oligonucleotide
  Target: SCNA; (+) strand; PAM type: YTN; PAM sequence: TTT
gaggattaattgaggttatg

SEQ ID NO: 75468 - DNA, 20 bp, Artificial Sequence
  Description of Artificial Sequence: Synthetic oligonucleotide
  Target: SCNA; (+) strand; PAM type: YTN; PAM sequence: TTG
aggattaattgaggttatgt

SEQ ID NO: 75469 - DNA, 20 bp, Artificial Sequence
  Description of Artificial Sequence: Synthetic oligonucleotide
  Target: SCNA; (+) strand; PAM type: YTN; PAM sequence: TTA
attgaggttatgtctataaa

SEQ ID NO: 75470 - DNA, 20 bp, Artificial Sequence
  Description of Artificial Sequence: Synthetic oligonucleotide
  Target: SCNA; (+) strand; PAM type: YTN; PAM sequence: TTG
aggttatgtctataaatacc

SEQ ID NO: 75471 - DNA, 20 bp, Artificial Sequence
  Description of Artificial Sequence: Synthetic oligonucleotide
  Target: SCNA; (+) strand; PAM type: YTN; PAM sequence: TTA
tgtctataaatacctactag

SEQ ID NO: 75472 - DNA, 20 bp, Artificial Sequence
  Description of Artificial Sequence: Synthetic oligonucleotide
  Target: SCNA; (+) strand; PAM type: YTN; PAM sequence: CTA
taaatacctactagcatagt

SEQ ID NO: 75473 - DNA, 20 bp, Artificial Sequence
  Description of Artificial Sequence: Synthetic oligonucleotide
  Target: SCNA; (+) strand; PAM type: YTN; PAM sequence: CTA
ctagcatagtgtctagcaca

SEQ ID NO: 75474 - DNA, 20 bp, Artificial Sequence
  Description of Artificial Sequence: Synthetic oligonucleotide
  Target: SCNA; (+) strand; PAM type: YTN; PAM sequence: CTA
gcatagtgtctagcacatag

SEQ ID NO: 75475 - DNA, 20 bp, Artificial Sequence
  Description of Artificial Sequence: Synthetic oligonucleotide
  Target: SCNA; (+) strand; PAM type: YTN; PAM sequence: CTA
gcacatagtatgaaaacatt

SEQ ID NO: 75476 - DNA, 20 bp, Artificial Sequence
  Description of Artificial Sequence: Synthetic oligonucleotide
  Target: SCNA; (+) strand; PAM type: YTN; PAM sequence: TTG
tattattattatttattaaa

SEQ ID NO: 75477 - DNA, 20 bp, Artificial Sequence
  Description of Artificial Sequence: Synthetic oligonucleotide
  Target: SCNA; (+) strand; PAM type: YTN; PAM sequence: TTA
ttattatttattaaaatggc

SEQ ID NO: 75478 - DNA, 20 bp, Artificial Sequence
  Description of Artificial Sequence: Synthetic oligonucleotide
  Target: SCNA; (+) strand; PAM type: YTN; PAM sequence: TTA
ttatttattaaaatggcatt

SEQ ID NO: 75479 - DNA, 20 bp, Artificial Sequence
  Description of Artificial Sequence: Synthetic oligonucleotide
  Target: SCNA; (+) strand; PAM type: YTN; PAM sequence: TTA
tttattaaaatggcattttg

SEQ ID NO: 75480 - DNA, 20 bp, Artificial Sequence
  Description of Artificial Sequence: Synthetic oligonucleotide
  Target: SCNA; (+) strand; PAM type: YTN; PAM sequence: TTT
attaaaatggcattttgttt

SEQ ID NO: 75481 - DNA, 20 bp, Artificial Sequence
  Description of Artificial Sequence: Synthetic oligonucleotide
  Target: SCNA; (+) strand; PAM type: YTN; PAM sequence: TTA
ttaaaatggcattttgtttt

SEQ ID NO: 75482 - DNA, 20 bp, Artificial Sequence
  Description of Artificial Sequence: Synthetic oligonucleotide
  Target: SCNA; (+) strand; PAM type: YTN; PAM sequence: TTA
aaatggcattttgttttctt

SEQ ID NO: 75483 - DNA, 20 bp, Artificial Sequence
  Description of Artificial Sequence: Synthetic oligonucleotide
  Target: SCNA; (+) strand; PAM type: YTN; PAM sequence: TTT
tgttttctttatagcacctg

SEQ ID NO: 75484 - DNA, 20 bp, Artificial Sequence
  Description of Artificial Sequence: Synthetic oligonucleotide
  Target: SCNA; (+) strand; PAM type: YTN; PAM sequence: TTT
gttttctttatagcacctga

SEQ ID NO: 75485 - DNA, 20 bp, Artificial Sequence
  Description of Artificial Sequence: Synthetic oligonucleotide
  Target: SCNA; (+) strand; PAM type: YTN; PAM sequence: TTG
ttttctttatagcacctgac

SEQ ID NO: 75486 - DNA, 20 bp, Artificial Sequence
  Description of Artificial Sequence: Synthetic oligonucleotide
  Target: SCNA; (+) strand; PAM type: YTN; PAM sequence: TTT
tctttatagcacctgacact

SEQ ID NO: 75487 - DNA, 20 bp, Artificial Sequence
  Description of Artificial Sequence: Synthetic oligonucleotide
  Target: SCNA; (+) strand; PAM type: YTN; PAM sequence: TTT
ctttatagcacctgacacta

SEQ ID NO: 75488 - DNA, 20 bp, Artificial Sequence
  Description of Artificial Sequence: Synthetic oligonucleotide
  Target: SCNA; (+) strand; PAM type: YTN; PAM sequence: TTC
tttatagcacctgacactat

SEQ ID NO: 75489 - DNA, 20 bp, Artificial Sequence
  Description of Artificial Sequence: Synthetic oligonucleotide
  Target: SCNA; (+) strand; PAM type: YTN; PAM sequence: CTT
tatagcacctgacactatcc

SEQ ID NO: 75490 - DNA, 20 bp, Artificial Sequence
  Description of Artificial Sequence: Synthetic oligonucleotide
  Target: SCNA; (+) strand; PAM type: YTN; PAM sequence: TTT
atagcacctgacactatcca

SEQ ID NO: 75491 - DNA, 20 bp, Artificial Sequence
  Description of Artificial Sequence: Synthetic oligonucleotide
  Target: SCNA; (+) strand; PAM type: YTN; PAM sequence: TTA
tagcacctgacactatccaa

SEQ ID NO: 75492 - DNA, 20 bp, Artificial Sequence
  Description of Artificial Sequence: Synthetic oligonucleotide
  Target: SCNA; (+) strand; PAM type: YTN; PAM sequence: CTG
acactatccaaattgccttt

SEQ ID NO: 75493 - DNA, 20 bp, Artificial Sequence
  Description of Artificial Sequence: Synthetic oligonucleotide
  Target: SCNA; (+) strand; PAM type: YTN; PAM sequence: CTA
tccaaattgccttttctgtt

SEQ ID NO: 75494 - DNA, 20 bp, Artificial Sequence
  Description of Artificial Sequence: Synthetic oligonucleotide
  Target: SCNA; (+) strand; PAM type: YTN; PAM sequence: TTG
ccttttctgtttcttttctt

SEQ ID NO: 75495 - DNA, 20 bp, Artificial Sequence
  Description of Artificial Sequence: Synthetic oligonucleotide
  Target: SCNA; (+) strand; PAM type: YTN; PAM sequence: CTT
ttctgtttcttttcttttta

SEQ ID NO: 75496 - DNA, 20 bp, Artificial Sequence
  Description of Artificial Sequence: Synthetic oligonucleotide
  Target: SCNA; (+) strand; PAM type: YTN; PAM sequence: TTT
tctgtttcttttctttttac

SEQ ID NO: 75497 - DNA, 20 bp, Artificial Sequence
  Description of Artificial Sequence: Synthetic oligonucleotide
  Target: SCNA; (+) strand; PAM type: YTN; PAM sequence: TTT
ctgtttcttttctttttact

SEQ ID NO: 75498 - DNA, 20 bp, Artificial Sequence
  Description of Artificial Sequence: Synthetic oligonucleotide
  Target: SCNA; (+) strand; PAM type: YTN; PAM sequence: TTC
tgtttcttttctttttactt

SEQ ID NO: 75499 - DNA, 20 bp, Artificial Sequence
  Description of Artificial Sequence: Synthetic oligonucleotide
  Target: SCNA; (+) strand; PAM type: YTN; PAM sequence: CTG
tttcttttctttttacttat

SEQ ID NO: 75500 - DNA, 20 bp, Artificial Sequence
  Description of Artificial Sequence: Synthetic oligonucleotide
  Target: SCNA; (+) strand; PAM type: YTN; PAM sequence: TTT
cttttctttttacttatttc

SEQ ID NO: 75501 - DNA, 20 bp, Artificial Sequence
  Description of Artificial Sequence: Synthetic oligonucleotide
  Target: SCNA; (+) strand; PAM type: YTN; PAM sequence: TTC
ttttctttttacttatttct

SEQ ID NO: 75502 - DNA, 20 bp, Artificial Sequence
  Description of Artificial Sequence: Synthetic oligonucleotide
  Target: SCNA; (+) strand; PAM type: YTN; PAM sequence: CTT
ttctttttacttatttctta

SEQ ID NO: 75503 - DNA, 20 bp, Artificial Sequence
  Description of Artificial Sequence: Synthetic oligonucleotide
  Target: SCNA; (+) strand; PAM type: YTN; PAM sequence: TTT
tctttttacttatttcttaa

SEQ ID NO: 75504 - DNA, 20 bp, Artificial Sequence
  Description of Artificial Sequence: Synthetic oligonucleotide
  Target: SCNA; (+) strand; PAM type: YTN; PAM sequence: TTT
ctttttacttatttcttaat

SEQ ID NO: 75505 - DNA, 20 bp, Artificial Sequence
  Description of Artificial Sequence: Synthetic oligonucleotide
  Target: SCNA; (+) strand; PAM type: YTN; PAM sequence: TTC
tttttacttatttcttaatt

SEQ ID NO: 75506 - DNA, 20 bp, Artificial Sequence
  Description of Artificial Sequence: Synthetic oligonucleotide
  Target: SCNA; (+) strand; PAM type: YTN; PAM sequence: CTT
tttacttatttcttaattgt

SEQ ID NO: 75507 - DNA, 20 bp, Artificial Sequence
  Description of Artificial Sequence: Synthetic oligonucleotide
  Target: SCNA; (+) strand; PAM type: YTN; PAM sequence: TTT
ttacttatttcttaattgtt

SEQ ID NO: 75508 - DNA, 20 bp, Artificial Sequence
  Description of Artificial Sequence: Synthetic oligonucleotide
  Target: SCNA; (+) strand; PAM type: YTN; PAM sequence: TTT
tacttatttcttaattgttt

SEQ ID NO: 75509 - DNA, 20 bp, Artificial Sequence
  Description of Artificial Sequence: Synthetic oligonucleotide
  Target: SCNA; (+) strand; PAM type: YTN; PAM sequence: TTT
acttatttcttaattgtttc

SEQ ID NO: 75510 - DNA, 20 bp, Artificial Sequence
  Description of Artificial Sequence: Synthetic oligonucleotide
  Target: SCNA; (+) strand; PAM type: YTN; PAM sequence: TTA
cttatttcttaattgtttca

SEQ ID NO: 75511 - DNA, 20 bp, Artificial Sequence
  Description of Artificial Sequence: Synthetic oligonucleotide
  Target: SCNA; (+) strand; PAM type: YTN; PAM sequence: CTT
atttcttaattgtttcacaa

SEQ ID NO: 75512 - DNA, 20 bp, Artificial Sequence
  Description of Artificial Sequence: Synthetic oligonucleotide
  Target: SCNA; (+) strand; PAM type: YTN; PAM sequence: TTA
tttcttaattgtttcacaaa

SEQ ID NO: 75513 - DNA, 20 bp, Artificial Sequence
  Description of Artificial Sequence: Synthetic oligonucleotide
  Target: SCNA; (+) strand; PAM type: YTN; PAM sequence: TTT
cttaattgtttcacaaaggc

SEQ ID NO: 75514 - DNA, 20 bp, Artificial Sequence
  Description of Artificial Sequence: Synthetic oligonucleotide
  Target: SCNA; (+) strand; PAM type: YTN; PAM sequence: TTC
ttaattgtttcacaaaggca

SEQ ID NO: 75515 - DNA, 20 bp, Artificial Sequence
  Description of Artificial Sequence: Synthetic oligonucleotide
  Target: SCNA; (+) strand; PAM type: YTN; PAM sequence: CTT
aattgtttcacaaaggcaga

SEQ ID NO: 75516 - DNA, 20 bp, Artificial Sequence
  Description of Artificial Sequence: Synthetic oligonucleotide
  Target: SCNA; (+) strand; PAM type: YTN; PAM sequence: TTA
attgtttcacaaaggcagag

SEQ ID NO: 75517 - DNA, 20 bp, Artificial Sequence
  Description of Artificial Sequence: Synthetic oligonucleotide
  Target: SCNA; (+) strand; PAM type: YTN; PAM sequence: TTG
tttcacaaaggcagagtctt

SEQ ID NO: 75518 - DNA, 20 bp, Artificial Sequence
  Description of Artificial Sequence: Synthetic oligonucleotide
  Target: SCNA; (+) strand; PAM type: YTN; PAM sequence: TTT
cacaaaggcagagtcttgta

SEQ ID NO: 75519 - DNA, 20 bp, Artificial Sequence
  Description of Artificial Sequence: Synthetic oligonucleotide
  Target: SCNA; (+) strand; PAM type: YTN; PAM sequence: TTC
acaaaggcagagtcttgtat

SEQ ID NO: 75520 - DNA, 20 bp, Artificial Sequence
  Description of Artificial Sequence: Synthetic oligonucleotide
  Target: SCNA; (+) strand; PAM type: YTN; PAM sequence: CTT
gtatgctttgcctctatgtc

SEQ ID NO: 75521 - DNA, 20 bp, Artificial Sequence
  Description of Artificial Sequence: Synthetic oligonucleotide
  Target: SCNA; (+) strand; PAM type: YTN; PAM sequence: TTG
tatgctttgcctctatgtct

SEQ ID NO: 75522 - DNA, 20 bp, Artificial Sequence
  Description of Artificial Sequence: Synthetic oligonucleotide
  Target: SCNA; (+) strand; PAM type: YTN; PAM sequence: CTT
tgcctctatgtctttagtac

SEQ ID NO: 75523 - DNA, 20 bp, Artificial Sequence
  Description of Artificial Sequence: Synthetic oligonucleotide
  Target: SCNA; (+) strand; PAM type: YTN; PAM sequence: TTT
gcctctatgtctttagtacc

SEQ ID NO: 75524 - DNA, 20 bp, Artificial Sequence
  Description of Artificial Sequence: Synthetic oligonucleotide
  Target: SCNA; (+) strand; PAM type: YTN; PAM sequence: TTG
cctctatgtctttagtacct

SEQ ID NO: 75525 - DNA, 20 bp, Artificial Sequence
  Description of Artificial Sequence: Synthetic oligonucleotide
  Target: SCNA; (+) strand; PAM type: YTN; PAM sequence: CTC
tatgtctttagtacctagaa

SEQ ID NO: 75526 - DNA, 20 bp, Artificial Sequence
  Description of Artificial Sequence: Synthetic oligonucleotide
  Target: SCNA; (+) strand; PAM type: YTN; PAM sequence: CTA
tgtctttagtacctagaata

SEQ ID NO: 75527 - DNA, 20 bp, Artificial Sequence
  Description of Artificial Sequence: Synthetic oligonucleotide
  Target: SCNA; (+) strand; PAM type: YTN; PAM sequence: CTT
tagtacctagaatagtgcct

SEQ ID NO: 75528 - DNA, 20 bp, Artificial Sequence
  Description of Artificial Sequence: Synthetic oligonucleotide
  Target: SCNA; (+) strand; PAM type: YTN; PAM sequence: TTT
agtacctagaatagtgcctg

SEQ ID NO: 75529 - DNA, 20 bp, Artificial Sequence
  Description of Artificial Sequence: Synthetic oligonucleotide
  Target: SCNA; (+) strand; PAM type: YTN; PAM sequence: TTA
gtacctagaatagtgcctgt

SEQ ID NO: 75530 - DNA, 20 bp, Artificial Sequence
  Description of Artificial Sequence: Synthetic oligonucleotide
  Target: SCNA; (+) strand; PAM type: YTN; PAM sequence: CTA
gaatagtgcctgtttaaaag

SEQ ID NO: 75531 - DNA, 20 bp, Artificial Sequence
  Description of Artificial Sequence: Synthetic oligonucleotide
  Target: SCNA; (+) strand; PAM type: YTN; PAM sequence: CTG
tttaaaagtaggagctgaat

SEQ ID NO: 75532 - DNA, 20 bp, Artificial Sequence
  Description of Artificial Sequence: Synthetic oligonucleotide
  Target: SCNA; (+) strand; PAM type: YTN; PAM sequence: TTT
aaaagtaggagctgaataaa

SEQ ID NO: 75533 - DNA, 20 bp, Artificial Sequence
  Description of Artificial Sequence: Synthetic oligonucleotide
  Target: SCNA; (+) strand; PAM type: YTN; PAM sequence: TTA
aaagtaggagctgaataaat

SEQ ID NO: 75534 - DNA, 20 bp, Artificial Sequence
  Description of Artificial Sequence: Synthetic oligonucleotide
  Target: SCNA; (+) strand; PAM type: YTN; PAM sequence: CTG
aataaatgtttgctgaatta

SEQ ID NO: 75535 - DNA, 20 bp, Artificial Sequence
  Description of Artificial Sequence: Synthetic oligonucleotide
  Target: SCNA; (+) strand; PAM type: YTN; PAM sequence: TTT
gctgaattaatattaatcat

SEQ ID NO: 75536 - DNA, 20 bp, Artificial Sequence
  Description of Artificial Sequence: Synthetic oligonucleotide
  Target: SCNA; (+) strand; PAM type: YTN; PAM sequence: TTG
ctgaattaatattaatcatg

SEQ ID NO: 75537 - DNA, 20 bp, Artificial Sequence
  Description of Artificial Sequence: Synthetic oligonucleotide
  Target: SCNA; (+) strand; PAM type: YTN; PAM sequence: CTG
aattaatattaatcatgtgt

SEQ ID NO: 75538 - DNA, 20 bp, Artificial Sequence
  Description of Artificial Sequence: Synthetic oligonucleotide
  Target: SCNA; (+) strand; PAM type: YTN; PAM sequence: TTA
atattaatcatgtgtaggaa

SEQ ID NO: 75539 - DNA, 20 bp, Artificial Sequence
  Description of Artificial Sequence: Synthetic oligonucleotide
  Target: SCNA; (+) strand; PAM type: YTN; PAM sequence: TTA
atcatgtgtaggaaaagaag

SEQ ID NO: 75540 - DNA, 20 bp, Artificial Sequence
  Description of Artificial Sequence: Synthetic oligonucleotide
  Target: SCNA; (+) strand; PAM type: YTN; PAM sequence: CTT
gggaatgttattctaccacc

SEQ ID NO: 75541 - DNA, 20 bp, Artificial Sequence
  Description of Artificial Sequence: Synthetic oligonucleotide
  Target: SCNA; (+) strand; PAM type: YTN; PAM sequence: TTG
ggaatgttattctaccaccc

SEQ ID NO: 75542 - DNA, 20 bp, Artificial Sequence
  Description of Artificial Sequence: Synthetic oligonucleotide
  Target: SCNA; (+) strand; PAM type: YTN; PAM sequence: TTA
ttctaccacccacagctgtg

SEQ ID NO: 75543 - DNA, 20 bp, Artificial Sequence
  Description of Artificial Sequence: Synthetic oligonucleotide
  Target: SCNA; (+) strand; PAM type: YTN; PAM sequence: TTC
taccacccacagctgtgccc

SEQ ID NO: 75544 - DNA, 20 bp, Artificial Sequence
  Description of Artificial Sequence: Synthetic oligonucleotide
  Target: SCNA; (+) strand; PAM type: YTN; PAM sequence: CTA
ccacccacagctgtgcccac

SEQ ID NO: 75545 - DNA, 20 bp, Artificial Sequence
  Description of Artificial Sequence: Synthetic oligonucleotide
  Target: SCNA; (+) strand; PAM type: YTN; PAM sequence: CTG
tgcccactattatgatggtt

SEQ ID NO: 75546 - DNA, 20 bp, Artificial Sequence
  Description of Artificial Sequence: Synthetic oligonucleotide
  Target: SCNA; (+) strand; PAM type: YTN; PAM sequence: CTA
ttatgatggttgttttgtgt

SEQ ID NO: 75547 - DNA, 20 bp, Artificial Sequence
  Description of Artificial Sequence: Synthetic oligonucleotide
  Target: SCNA; (+) strand; PAM type: YTN; PAM sequence: TTA
tgatggttgttttgtgtgtt

SEQ ID NO: 75548 - DNA, 20 bp, Artificial Sequence
  Description of Artificial Sequence: Synthetic oligonucleotide
  Target: SCNA; (+) strand; PAM type: YTN; PAM sequence: TTG
ttttgtgtgttctttctcaa

SEQ ID NO: 75549 - DNA, 20 bp, Artificial Sequence
  Description of Artificial Sequence: Synthetic oligonucleotide
  Target: SCNA; (+) strand; PAM type: YTN; PAM sequence: TTT
tgtgtgttctttctcaagga

SEQ ID NO: 75550 - DNA, 20 bp, Artificial Sequence
  Description of Artificial Sequence: Synthetic oligonucleotide
  Target: SCNA; (+) strand; PAM type: YTN; PAM sequence: TTT
gtgtgttctttctcaaggat

SEQ ID NO: 75551 - DNA, 20 bp, Artificial Sequence
  Description of Artificial Sequence: Synthetic oligonucleotide
  Target: SCNA; (+) strand; PAM type: YTN; PAM sequence: TTG
tgtgttctttctcaaggatt

SEQ ID NO: 75552 - DNA, 20 bp, Artificial Sequence
  Description of Artificial Sequence: Synthetic oligonucleotide
  Target: SCNA; (+) strand; PAM type: YTN; PAM sequence: TTC
tttctcaaggattcactttc

SEQ ID NO: 75553 - DNA, 20 bp, Artificial Sequence
  Description of Artificial Sequence: Synthetic oligonucleotide
  Target: SCNA; (+) strand; PAM type: YTN; PAM sequence: CTT
tctcaaggattcactttcag

SEQ ID NO: 75554 - DNA, 20 bp, Artificial Sequence
  Description of Artificial Sequence: Synthetic oligonucleotide
  Target: SCNA; (+) strand; PAM type: YTN; PAM sequence: TTT
ctcaaggattcactttcaga

SEQ ID NO: 75555 - DNA, 20 bp, Artificial Sequence
  Description of Artificial Sequence: Synthetic oligonucleotide
  Target: SCNA; (+) strand; PAM type: YTN; PAM sequence: TTC
tcaaggattcactttcagaa

SEQ ID NO: 75556 - DNA, 20 bp, Artificial Sequence
  Description of Artificial Sequence: Synthetic oligonucleotide
  Target: SCNA; (+) strand; PAM type: YTN; PAM sequence: CTC
aaggattcactttcagaact

SEQ ID NO: 75557 - DNA, 20 bp, Artificial Sequence
  Description of Artificial Sequence: Synthetic oligonucleotide
  Target: SCNA; (+) strand; PAM type: YTN; PAM sequence: TTC
actttcagaactcaaaatgg

SEQ ID NO: 75558 - DNA, 20 bp, Artificial Sequence
  Description of Artificial Sequence: Synthetic oligonucleotide
  Target: SCNA; (+) strand; PAM type: YTN; PAM sequence: CTT
tcagaactcaaaatggggtg

SEQ ID NO: 75559 - DNA, 20 bp, Artificial Sequence
  Description of Artificial Sequence: Synthetic oligonucleotide
  Target: SCNA; (+) strand; PAM type: YTN; PAM sequence: TTT
cagaactcaaaatggggtgt

SEQ ID NO: 75560 - DNA, 20 bp, Artificial Sequence
  Description of Artificial Sequence: Synthetic oligonucleotide
  Target: SCNA; (+) strand; PAM type: YTN; PAM sequence: TTC
agaactcaaaatggggtgta

SEQ ID NO: 75561 - DNA, 20 bp, Artificial Sequence
  Description of Artificial Sequence: Synthetic oligonucleotide
  Target: SCNA; (+) strand; PAM type: YTN; PAM sequence: CTC
aaaatggggtgtagggtggt

SEQ ID NO: 75562 - DNA, 20 bp, Artificial Sequence
  Description of Artificial Sequence: Synthetic oligonucleotide
  Target: SCNA; (+) strand; PAM type: YTN; PAM sequence: CTC
gatctctccctacagtagaa

SEQ ID NO: 75563 - DNA, 20 bp, Artificial Sequence
  Description of Artificial Sequence: Synthetic oligonucleotide
  Target: SCNA; (+) strand; PAM type: YTN; PAM sequence: CTC
tccctacagtagaagtgctt

SEQ ID NO: 75564 - DNA, 20 bp, Artificial Sequence
  Description of Artificial Sequence: Synthetic oligonucleotide
  Target: SCNA; (+) strand; PAM type: YTN; PAM sequence: CTC
cctacagtagaagtgcttac

SEQ ID NO: 75565 - DNA, 20 bp, Artificial Sequence
  Description of Artificial Sequence: Synthetic oligonucleotide
  Target: SCNA; (+) strand; PAM type: YTN; PAM sequence: CTA
cagtagaagtgcttactgct

SEQ ID NO: 75566 - DNA, 20 bp, Artificial Sequence
  Description of Artificial Sequence: Synthetic oligonucleotide
  Target: SCNA; (+) strand; PAM type: YTN; PAM sequence: CTT
actgctctatgtgttcttca

SEQ ID NO: 75567 - DNA, 20 bp, Artificial Sequence
  Description of Artificial Sequence: Synthetic oligonucleotide
  Target: SCNA; (+) strand; PAM type: YTN; PAM sequence: TTA
ctgctctatgtgttcttcag

SEQ ID NO: 75568 - DNA, 20 bp, Artificial Sequence
  Description of Artificial Sequence: Synthetic oligonucleotide
  Target: SCNA; (+) strand; PAM type: YTN; PAM sequence: CTG
ctctatgtgttcttcagccc

SEQ ID NO: 75569 - DNA, 20 bp, Artificial Sequence
  Description of Artificial Sequence: Synthetic oligonucleotide
  Target: SCNA; (+) strand; PAM type: YTN; PAM sequence: CTC
tatgtgttcttcagccctat

SEQ ID NO: 75570 - DNA, 20 bp, Artificial Sequence
  Description of Artificial Sequence: Synthetic oligonucleotide
  Target: SCNA; (+) strand; PAM type: YTN; PAM sequence: CTA
tgtgttcttcagccctataa

SEQ ID NO: 75571 - DNA, 20 bp, Artificial Sequence
  Description of Artificial Sequence: Synthetic oligonucleotide
  Target: SCNA; (+) strand; PAM type: YTN; PAM sequence: TTC
ttcagccctataagaaccaa

SEQ ID NO: 75572 - DNA, 20 bp, Artificial Sequence
  Description of Artificial Sequence: Synthetic oligonucleotide
  Target: SCNA; (+) strand; PAM type: YTN; PAM sequence: CTT
cagccctataagaaccaatg

SEQ ID NO: 75573 - DNA, 20 bp, Artificial Sequence
  Description of Artificial Sequence: Synthetic oligonucleotide
  Target: SCNA; (+) strand; PAM type: YTN; PAM sequence: TTC
agccctataagaaccaatga

SEQ ID NO: 75574 - DNA, 20 bp, Artificial Sequence
  Description of Artificial Sequence: Synthetic oligonucleotide
  Target: SCNA; (+) strand; PAM type: YTN; PAM sequence: CTA
taagaaccaatgaaagccat

SEQ ID NO: 75575 - DNA, 20 bp, Artificial Sequence
  Description of Artificial Sequence: Synthetic oligonucleotide
  Target: SCNA; (+) strand; PAM type: YTN; PAM sequence: CTT
ccctcgatactggacatccc

SEQ ID NO: 75576 - DNA, 20 bp, Artificial Sequence
  Description of Artificial Sequence: Synthetic oligonucleotide
  Target: SCNA; (+) strand; PAM type: YTN; PAM sequence: TTC
cctcgatactggacatccct

SEQ ID NO: 75577 - DNA, 20 bp, Artificial Sequence
  Description of Artificial Sequence: Synthetic oligonucleotide
  Target: SCNA; (+) strand; PAM type: YTN; PAM sequence: CTC
gatactggacatccctacat

SEQ ID NO: 75578 - DNA, 20 bp, Artificial Sequence
  Description of Artificial Sequence: Synthetic oligonucleotide
  Target: SCNA; (+) strand; PAM type: YTN; PAM sequence: CTG
gacatccctacatactcaca

SEQ ID NO: 75579 - DNA, 20 bp, Artificial Sequence
  Description of Artificial Sequence: Synthetic oligonucleotide
  Target: SCNA; (+) strand; PAM type: YTN; PAM sequence: CTA
catactcacagcagtctgca

SEQ ID NO: 75580 - DNA, 20 bp, Artificial Sequence
  Description of Artificial Sequence: Synthetic oligonucleotide
  Target: SCNA; (+) strand; PAM type: YTN; PAM sequence: CTC
acagcagtctgcaaaacata

SEQ ID NO: 75581 - DNA, 20 bp, Artificial Sequence
  Description of Artificial Sequence: Synthetic oligonucleotide
  Target: SCNA; (+) strand; PAM type: YTN; PAM sequence: CTG
caaaacatatccaagggccc

SEQ ID NO: 75582 - DNA, 20 bp, Artificial Sequence
  Description of Artificial Sequence: Synthetic oligonucleotide
  Target: SCNA; (+) strand; PAM type: YTN; PAM sequence: CTG
agacactgaagatgacccat

SEQ ID NO: 75583 - DNA, 20 bp, Artificial Sequence
  Description of Artificial Sequence: Synthetic oligonucleotide
  Target: SCNA; (+) strand; PAM type: YTN; PAM sequence: CTG
aagatgacccattgatttaa

SEQ ID NO: 75584 - DNA, 20 bp, Artificial Sequence
  Description of Artificial Sequence: Synthetic oligonucleotide
  Target: SCNA; (+) strand; PAM type: YTN; PAM sequence: TTG
atttaatacatatttgcaag

SEQ ID NO: 75585 - DNA, 20 bp, Artificial Sequence
  Description of Artificial Sequence: Synthetic oligonucleotide
  Target: SCNA; (+) strand; PAM type: YTN; PAM sequence: TTT
aatacatatttgcaaggctc

SEQ ID NO: 75586 - DNA, 20 bp, Artificial Sequence
  Description of Artificial Sequence: Synthetic oligonucleotide
  Target: SCNA; (+) strand; PAM type: YTN; PAM sequence: TTA
atacatatttgcaaggctct

SEQ ID NO: 75587 - DNA, 20 bp, Artificial Sequence
  Description of Artificial Sequence: Synthetic oligonucleotide
  Target: SCNA; (+) strand; PAM type: YTN; PAM sequence: TTT
gcaaggctctgattgagaac

SEQ ID NO: 75588 - DNA, 20 bp, Artificial Sequence
  Description of Artificial Sequence: Synthetic oligonucleotide
  Target: SCNA; (+) strand; PAM type: YTN; PAM sequence: TTG
caaggctctgattgagaacc

SEQ ID NO: 75589 - DNA, 20 bp, Artificial Sequence
  Description of Artificial Sequence: Synthetic oligonucleotide
  Target: SCNA; (+) strand; PAM type: YTN; PAM sequence: CTC
tgattgagaacctctggaca

SEQ ID NO: 75590 - DNA, 20 bp, Artificial Sequence
  Description of Artificial Sequence: Synthetic oligonucleotide
  Target: SCNA; (+) strand; PAM type: YTN; PAM sequence: CTG
attgagaacctctggacagg

SEQ ID NO: 75591 - DNA, 20 bp, Artificial Sequence
  Description of Artificial Sequence: Synthetic oligonucleotide
  Target: SCNA; (+) strand; PAM type: YTN; PAM sequence: TTG
agaacctctggacaggcgct

SEQ ID NO: 75592 - DNA, 20 bp, Artificial Sequence
  Description of Artificial Sequence: Synthetic oligonucleotide
  Target: SCNA; (+) strand; PAM type: YTN; PAM sequence: CTC
tggacaggcgcttatctaga

SEQ ID NO: 75593 - DNA, 20 bp, Artificial Sequence
  Description of Artificial Sequence: Synthetic oligonucleotide
  Target: SCNA; (+) strand; PAM type: YTN; PAM sequence: CTG
gacaggcgcttatctagagg

SEQ ID NO: 75594 - DNA, 20 bp, Artificial Sequence
  Description of Artificial Sequence: Synthetic oligonucleotide
  Target: SCNA; (+) strand; PAM type: YTN; PAM sequence: CTT
atctagaggttacagtgtgt

SEQ ID NO: 75595 - DNA, 20 bp, Artificial Sequence
  Description of Artificial Sequence: Synthetic oligonucleotide
  Target: SCNA; (+) strand; PAM type: YTN; PAM sequence: TTA
tctagaggttacagtgtgtg

SEQ ID NO: 75596 - DNA, 20 bp, Artificial Sequence
  Description of Artificial Sequence: Synthetic oligonucleotide
  Target: SCNA; (+) strand; PAM type: YTN; PAM sequence: CTA
gaggttacagtgtgtgacta

SEQ ID NO: 75597 - DNA, 20 bp, Artificial Sequence
  Description of Artificial Sequence: Synthetic oligonucleotide
  Target: SCNA; (+) strand; PAM type: YTN; PAM sequence: TTA
cagtgtgtgactaacacgac

SEQ ID NO: 75598 - DNA, 20 bp, Artificial Sequence
  Description of Artificial Sequence: Synthetic oligonucleotide
  Target: SCNA; (+) strand; PAM type: YTN; PAM sequence: CTA
acacgacacagtttaggatt

SEQ ID NO: 75599 - DNA, 20 bp, Artificial Sequence
  Description of Artificial Sequence: Synthetic oligonucleotide
  Target: SCNA; (+) strand; PAM type: YTN; PAM sequence: TTT
aggatttatgtaacaggaat

SEQ ID NO: 75600 - DNA, 20 bp, Artificial Sequence
  Description of Artificial Sequence: Synthetic oligonucleotide
  Target: SCNA; (+) strand; PAM type: YTN; PAM sequence: TTA
ggatttatgtaacaggaata

SEQ ID NO: 75601 - DNA, 20 bp, Artificial Sequence
  Description of Artificial Sequence: Synthetic oligonucleotide
  Target: SCNA; (+) strand; PAM type: YTN; PAM sequence: TTT
atgtaacaggaatatgctat

SEQ ID NO: 75602 - DNA, 20 bp, Artificial Sequence
  Description of Artificial Sequence: Synthetic oligonucleotide
  Target: SCNA; (+) strand; PAM type: YTN; PAM sequence: TTA
tgtaacaggaatatgctata

SEQ ID NO: 75603 - DNA, 20 bp, Artificial Sequence
  Description of Artificial Sequence: Synthetic oligonucleotide
  Target: SCNA; (+) strand; PAM type: YTN; PAM sequence: CTA
tagggagagaaagaacagaa

SEQ ID NO: 75604 - DNA, 20 bp, Artificial Sequence
  Description of Artificial Sequence: Synthetic oligonucleotide
  Target: SCNA; (+) strand; PAM type: YTN; PAM sequence: CTC
agttgacacggtggaattgg

SEQ ID NO: 75605 - DNA, 20 bp, Artificial Sequence
  Description of Artificial Sequence: Synthetic oligonucleotide
  Target: SCNA; (+) strand; PAM type: YTN; PAM sequence: TTG
acacggtggaattggagtga

SEQ ID NO: 75606 - DNA, 20 bp, Artificial Sequence
  Description of Artificial Sequence: Synthetic oligonucleotide
  Target: SCNA; (+) strand; PAM type: YTN; PAM sequence: TTG
gagtgagagagatttccatg

SEQ ID NO: 75607 - DNA, 20 bp, Artificial Sequence
  Description of Artificial Sequence: Synthetic oligonucleotide
  Target: SCNA; (+) strand; PAM type: YTN; PAM sequence: TTT
ccatgaagccaagtaaatag

SEQ ID NO: 75608 - DNA, 20 bp, Artificial Sequence
  Description of Artificial Sequence: Synthetic oligonucleotide
  Target: SCNA; (+) strand; PAM type: YTN; PAM sequence: TTC
catgaagccaagtaaatagt

SEQ ID NO: 75609 - DNA, 20 bp, Artificial Sequence
  Description of Artificial Sequence: Synthetic oligonucleotide
  Target: SCNA; (+) strand; PAM type: YTN; PAM sequence: TTT
tggagagtgaaggaggagac

SEQ ID NO: 75610 - DNA, 20 bp, Artificial Sequence
  Description of Artificial Sequence: Synthetic oligonucleotide
  Target: SCNA; (+) strand; PAM type: YTN; PAM sequence: TTT
ggagagtgaaggaggagaca

SEQ ID NO: 75611 - DNA, 20 bp, Artificial Sequence
  Description of Artificial Sequence: Synthetic oligonucleotide
  Target: SCNA; (+) strand; PAM type: YTN; PAM sequence: TTG
gagagtgaaggaggagacat

SEQ ID NO: 75612 - DNA, 20 bp, Artificial Sequence
  Description of Artificial Sequence: Synthetic oligonucleotide
  Target: SCNA; (+) strand; PAM type: YTN; PAM sequence: CTT
aacttcaatattattatcct

SEQ ID NO: 75613 - DNA, 20 bp, Artificial Sequence
  Description of Artificial Sequence: Synthetic oligonucleotide
  Target: SCNA; (+) strand; PAM type: YTN; PAM sequence: TTA
acttcaatattattatcctg

SEQ ID NO: 75614 - DNA, 20 bp, Artificial Sequence
  Description of Artificial Sequence: Synthetic oligonucleotide
  Target: SCNA; (+) strand; PAM type: YTN; PAM sequence: CTT
caatattattatcctgtgta

SEQ ID NO: 75615 - DNA, 20 bp, Artificial Sequence
  Description of Artificial Sequence: Synthetic oligonucleotide
  Target: SCNA; (+) strand; PAM type: YTN; PAM sequence: TTC
aatattattatcctgtgtag

SEQ ID NO: 75616 - DNA, 20 bp, Artificial Sequence
  Description of Artificial Sequence: Synthetic oligonucleotide
  Target: SCNA; (+) strand; PAM type: YTN; PAM sequence: TTA
ttatcctgtgtagattcata

SEQ ID NO: 75617 - DNA, 20 bp, Artificial Sequence
  Description of Artificial Sequence: Synthetic oligonucleotide
  Target: SCNA; (+) strand; PAM type: YTN; PAM sequence: TTA
tcctgtgtagattcatactt

SEQ ID NO: 75618 - DNA, 20 bp, Artificial Sequence
  Description of Artificial Sequence: Synthetic oligonucleotide
  Target: SCNA; (+) strand; PAM type: YTN; PAM sequence: CTG
tgtagattcatactttgtgt

SEQ ID NO: 75619 - DNA, 20 bp, Artificial Sequence
  Description of Artificial Sequence: Synthetic oligonucleotide
  Target: SCNA; (+) strand; PAM type: YTN; PAM sequence: TTC
atactttgtgtattttttac

SEQ ID NO: 75620 - DNA, 20 bp, Artificial Sequence
  Description of Artificial Sequence: Synthetic oligonucleotide
  Target: SCNA; (+) strand; PAM type: YTN; PAM sequence: CTT
tgtgtattttttacttaaga

SEQ ID NO: 75621 - DNA, 20 bp, Artificial Sequence
  Description of Artificial Sequence: Synthetic oligonucleotide
  Target: SCNA; (+) strand; PAM type: YTN; PAM sequence: TTT
gtgtattttttacttaagag

SEQ ID NO: 75622 - DNA, 20 bp, Artificial Sequence
  Description of Artificial Sequence: Synthetic oligonucleotide
  Target: SCNA; (+) strand; PAM type: YTN; PAM sequence: TTG
tgtattttttacttaagaga

SEQ ID NO: 75623 - DNA, 20 bp, Artificial Sequence
  Description of Artificial Sequence: Synthetic oligonucleotide
  Target: SCNA; (+) strand; PAM type: YTN; PAM sequence: TTT
tttacttaagagaaaaaata

SEQ ID NO: 75624 - DNA, 20 bp, Artificial Sequence
  Description of Artificial Sequence: Synthetic oligonucleotide
  Target: SCNA; (+) strand; PAM type: YTN; PAM sequence: TTT
ttacttaagagaaaaaatag

SEQ ID NO: 75625 - DNA, 20 bp, Artificial Sequence
  Description of Artificial Sequence: Synthetic oligonucleotide
  Target: SCNA; (+) strand; PAM type: YTN; PAM sequence: TTT
tacttaagagaaaaaatagt

SEQ ID NO: 75626 - DNA, 20 bp, Artificial Sequence
  Description of Artificial Sequence: Synthetic oligonucleotide
  Target: SCNA; (+) strand; PAM type: YTN; PAM sequence: TTT
acttaagagaaaaaatagta

SEQ ID NO: 75627 - DNA, 20 bp, Artificial Sequence
  Description of Artificial Sequence: Synthetic oligonucleotide
  Target: SCNA; (+) strand; PAM type: YTN; PAM sequence: TTA
cttaagagaaaaaatagtaa

SEQ ID NO: 75628 - DNA, 20 bp, Artificial Sequence
  Description of Artificial Sequence: Synthetic oligonucleotide
  Target: SCNA; (+) strand; PAM type: YTN; PAM sequence: CTT
aagagaaaaaatagtaataa

SEQ ID NO: 75629 - DNA, 20 bp, Artificial Sequence
  Description of Artificial Sequence: Synthetic oligonucleotide
  Target: SCNA; (+) strand; PAM type: YTN; PAM sequence: TTA
agagaaaaaatagtaataat

SEQ ID NO: 75630 - DNA, 20 bp, Artificial Sequence
  Description of Artificial Sequence: Synthetic oligonucleotide
  Target: SCNA; (+) strand; PAM type: YTN; PAM sequence: TTC
gctaggagaaacactttgaa

SEQ ID NO: 75631 - DNA, 20 bp, Artificial Sequence
  Description of Artificial Sequence: Synthetic oligonucleotide
  Target: SCNA; (+) strand; PAM type: YTN; PAM sequence: CTA
ggagaaacactttgaagaaa

SEQ ID NO: 75632 - DNA, 20 bp, Artificial Sequence
  Description of Artificial Sequence: Synthetic oligonucleotide
  Target: SCNA; (+) strand; PAM type: YTN; PAM sequence: CTT
tgaagaaagaaataagtcca

SEQ ID NO: 75633 - DNA, 20 bp, Artificial Sequence
  Description of Artificial Sequence: Synthetic oligonucleotide
  Target: SCNA; (+) strand; PAM type: YTN; PAM sequence: TTT
gaagaaagaaataagtccag

SEQ ID NO: 75634 - DNA, 20 bp, Artificial Sequence
  Description of Artificial Sequence: Synthetic oligonucleotide
  Target: SCNA; (+) strand; PAM type: YTN; PAM sequence: TTG
aagaaagaaataagtccagg

SEQ ID NO: 75635 - DNA, 20 bp, Artificial Sequence
  Description of Artificial Sequence: Synthetic oligonucleotide
  Target: SCNA; (+) strand; PAM type: YTN; PAM sequence: CTG
taatgtacttttcctctatt

SEQ ID NO: 75636 - DNA, 20 bp, Artificial Sequence
  Description of Artificial Sequence: Synthetic oligonucleotide
  Target: SCNA; (+) strand; PAM type: YTN; PAM sequence: CTT
ttcctctatttatttcccac

SEQ ID NO: 75637 - DNA, 20 bp, Artificial Sequence
  Description of Artificial Sequence: Synthetic oligonucleotide
  Target: SCNA; (+) strand; PAM type: YTN; PAM sequence: TTT
tcctctatttatttcccaca

SEQ ID NO: 75638 - DNA, 20 bp, Artificial Sequence
  Description of Artificial Sequence: Synthetic oligonucleotide
  Target: SCNA; (+) strand; PAM type: YTN; PAM sequence: TTT
cctctatttatttcccacat

SEQ ID NO: 75639 - DNA, 20 bp, Artificial Sequence
  Description of Artificial Sequence: Synthetic oligonucleotide
  Target: SCNA; (+) strand; PAM type: YTN; PAM sequence: TTC
ctctatttatttcccacata

SEQ ID NO: 75640 - DNA, 20 bp, Artificial Sequence
  Description of Artificial Sequence: Synthetic oligonucleotide
  Target: SCNA; (+) strand; PAM type: YTN; PAM sequence: CTC
tatttatttcccacataaaa

SEQ ID NO: 75641 - DNA, 20 bp, Artificial Sequence
  Description of Artificial Sequence: Synthetic oligonucleotide
  Target: SCNA; (+) strand; PAM type: YTN; PAM sequence: CTA
tttatttcccacataaaatt

SEQ ID NO: 75642 - DNA, 20 bp, Artificial Sequence
  Description of Artificial Sequence: Synthetic oligonucleotide
  Target: SCNA; (+) strand; PAM type: YTN; PAM sequence: TTT
atttcccacataaaattaaa

SEQ ID NO: 75643 - DNA, 20 bp, Artificial Sequence
  Description of Artificial Sequence: Synthetic oligonucleotide
  Target: SCNA; (+) strand; PAM type: YTN; PAM sequence: TTA
tttcccacataaaattaaag

SEQ ID NO: 75644 - DNA, 20 bp, Artificial Sequence
  Description of Artificial Sequence: Synthetic oligonucleotide
  Target: SCNA; (+) strand; PAM type: YTN; PAM sequence: TTT
cccacataaaattaaagctg

SEQ ID NO: 75645 - DNA, 20 bp, Artificial Sequence
  Description of Artificial Sequence: Synthetic oligonucleotide
  Target: SCNA; (+) strand; PAM type: YTN; PAM sequence: TTC
ccacataaaattaaagctgt

SEQ ID NO: 75646 - DNA, 20 bp, Artificial Sequence
  Description of Artificial Sequence: Synthetic oligonucleotide
  Target: SCNA; (+) strand; PAM type: YTN; PAM sequence: TTA
aagctgttttagttctcatc

SEQ ID NO: 75647 - DNA, 20 bp, Artificial Sequence
  Description of Artificial Sequence: Synthetic oligonucleotide
  Target: SCNA; (+) strand; PAM type: YTN; PAM sequence: CTG
ttttagttctcatcgcattt

SEQ ID NO: 75648 - DNA, 20 bp, Artificial Sequence
  Description of Artificial Sequence: Synthetic oligonucleotide
  Target: SCNA; (+) strand; PAM type: YTN; PAM sequence: TTT
tagttctcatcgcatttatc

SEQ ID NO: 75649 - DNA, 20 bp, Artificial Sequence
  Description of Artificial Sequence: Synthetic oligonucleotide
  Target: SCNA; (+) strand; PAM type: YTN; PAM sequence: TTT
agttctcatcgcatttatca

SEQ ID NO: 75650 - DNA, 20 bp, Artificial Sequence
  Description of Artificial Sequence: Synthetic oligonucleotide
  Target: SCNA; (+) strand; PAM type: YTN; PAM sequence: TTA
gttctcatcgcatttatcat

SEQ ID NO: 75651 - DNA, 20 bp, Artificial Sequence
  Description of Artificial Sequence: Synthetic oligonucleotide
  Target: SCNA; (+) strand; PAM type: YTN; PAM sequence: TTC
tcatcgcatttatcatcttg

SEQ ID NO: 75652 - DNA, 20 bp, Artificial Sequence
  Description of Artificial Sequence: Synthetic oligonucleotide
  Target: SCNA; (+) strand; PAM type: YTN; PAM sequence: CTC
atcgcatttatcatcttgaa

SEQ ID NO: 75653 - DNA, 20 bp, Artificial Sequence
  Description of Artificial Sequence: Synthetic oligonucleotide
  Target: SCNA; (+) strand; PAM type: YTN; PAM sequence: TTT
atcatcttgaactcatttgc

SEQ ID NO: 75654 - DNA, 20 bp, Artificial Sequence
  Description of Artificial Sequence: Synthetic oligonucleotide
  Target: SCNA; (+) strand; PAM type: YTN; PAM sequence: TTA
tcatcttgaactcatttgcc

SEQ ID NO: 75655 - DNA, 20 bp, Artificial Sequence
  Description of Artificial Sequence: Synthetic oligonucleotide
  Target: SCNA; (+) strand; PAM type: YTN; PAM sequence: CTT
gaactcatttgccacattat

SEQ ID NO: 75656 - DNA, 20 bp, Artificial Sequence
  Description of Artificial Sequence: Synthetic oligonucleotide
  Target: SCNA; (+) strand; PAM type: YTN; PAM sequence: TTG
aactcatttgccacattatt

SEQ ID NO: 75657 - DNA, 20 bp, Artificial Sequence
  Description of Artificial Sequence: Synthetic oligonucleotide
  Target: SCNA; (+) strand; PAM type: YTN; PAM sequence: CTC
atttgccacattattttatt

SEQ ID NO: 75658 - DNA, 20 bp, Artificial Sequence
  Description of Artificial Sequence: Synthetic oligonucleotide
  Target: SCNA; (+) strand; PAM type: YTN; PAM sequence: TTT
gccacattattttatttaaa

SEQ ID NO: 75659 - DNA, 20 bp, Artificial Sequence
  Description of Artificial Sequence: Synthetic oligonucleotide
  Target: SCNA; (+) strand; PAM type: YTN; PAM sequence: TTG
ccacattattttatttaaat

SEQ ID NO: 75660 - DNA, 20 bp, Artificial Sequence
  Description of Artificial Sequence: Synthetic oligonucleotide
  Target: SCNA; (+) strand; PAM type: YTN; PAM sequence: TTA
ttttatttaaatattcctta

SEQ ID NO: 75661 - DNA, 20 bp, Artificial Sequence
  Description of Artificial Sequence: Synthetic oligonucleotide
  Target: SCNA; (+) strand; PAM type: YTN; PAM sequence: TTT
tatttaaatattccttaacc

SEQ ID NO: 75662 - DNA, 20 bp, Artificial Sequence
  Description of Artificial Sequence: Synthetic oligonucleotide
  Target: SCNA; (+) strand; PAM type: YTN; PAM sequence: TTT
atttaaatattccttaacct

SEQ ID NO: 75663 - DNA, 20 bp, Artificial Sequence
  Description of Artificial Sequence: Synthetic oligonucleotide
  Target: SCNA; (+) strand; PAM type: YTN; PAM sequence: TTA
tttaaatattccttaaccta

SEQ ID NO: 75664 - DNA, 20 bp, Artificial Sequence
  Description of Artificial Sequence: Synthetic oligonucleotide
  Target: SCNA; (+) strand; PAM type: YTN; PAM sequence: TTT
aaatattccttaacctacag

SEQ ID NO: 75665 - DNA, 20 bp, Artificial Sequence
  Description of Artificial Sequence: Synthetic oligonucleotide
  Target: SCNA; (+) strand; PAM type: YTN; PAM sequence: TTA
aatattccttaacctacaga

SEQ ID NO: 75666 - DNA, 20 bp, Artificial Sequence
  Description of Artificial Sequence: Synthetic oligonucleotide
  Target: SCNA; (+) strand; PAM type: YTN; PAM sequence: TTC
cttaacctacagagagtgga

SEQ ID NO: 75667 - DNA, 20 bp, Artificial Sequence
  Description of Artificial Sequence: Synthetic oligonucleotide
  Target: SCNA; (+) strand; PAM type: YTN; PAM sequence: CTT
aacctacagagagtggactt

SEQ ID NO: 75668 - DNA, 20 bp, Artificial Sequence
  Description of Artificial Sequence: Synthetic oligonucleotide
  Target: SCNA; (+) strand; PAM type: YTN; PAM sequence: TTA
acctacagagagtggactta

SEQ ID NO: 75669 - DNA, 20 bp, Artificial Sequence
  Description of Artificial Sequence: Synthetic oligonucleotide
  Target: SCNA; (+) strand; PAM type: YTN; PAM sequence: CTA
cagagagtggacttaactgc

SEQ ID NO: 75670 - DNA, 20 bp, Artificial Sequence
  Description of Artificial Sequence: Synthetic oligonucleotide
  Target: SCNA; (+) strand; PAM type: YTN; PAM sequence: CTT
aactgctaaaaagtacttaa

SEQ ID NO: 75671 - DNA, 20 bp, Artificial Sequence
  Description of Artificial Sequence: Synthetic oligonucleotide
  Target: SCNA; (+) strand; PAM type: YTN; PAM sequence: TTA
actgctaaaaagtacttaat

SEQ ID NO: 75672 - DNA, 20 bp, Artificial Sequence
  Description of Artificial Sequence: Synthetic oligonucleotide
  Target: SCNA; (+) strand; PAM type: YTN; PAM sequence: CTG
ctaaaaagtacttaatacat

SEQ ID NO: 75673 - DNA, 20 bp, Artificial Sequence
  Description of Artificial Sequence: Synthetic oligonucleotide
  Target: SCNA; (+) strand; PAM type: YTN; PAM sequence: CTA
aaaagtacttaatacatgtt

SEQ ID NO: 75674 - DNA, 20 bp, Artificial Sequence
  Description of Artificial Sequence: Synthetic oligonucleotide
  Target: SCNA; (+) strand; PAM type: YTN; PAM sequence: CTT
aatacatgttcccaaggaac

SEQ ID NO: 75675 - DNA, 20 bp, Artificial Sequence
  Description of Artificial Sequence: Synthetic oligonucleotide
  Target: SCNA; (+) strand; PAM type: YTN; PAM sequence: TTA
atacatgttcccaaggaact

SEQ ID NO: 75676 - DNA, 20 bp, Artificial Sequence
  Description of Artificial Sequence: Synthetic oligonucleotide
  Target: SCNA; (+) strand; PAM type: YTN; PAM sequence: TTC
ccaaggaactgcttcaatta

SEQ ID NO: 75677 - DNA, 20 bp, Artificial Sequence
  Description of Artificial Sequence: Synthetic oligonucleotide
  Target: SCNA; (+) strand; PAM type: YTN; PAM sequence: CTG
cttcaattaccactgcacaa

SEQ ID NO: 75678 - DNA, 20 bp, Artificial Sequence
  Description of Artificial Sequence: Synthetic oligonucleotide
  Target: SCNA; (+) strand; PAM type: YTN; PAM sequence: CTT
caattaccactgcacaaagg

SEQ ID NO: 75679 - DNA, 20 bp, Artificial Sequence
  Description of Artificial Sequence: Synthetic oligonucleotide
  Target: SCNA; (+) strand; PAM type: YTN; PAM sequence: TTC
aattaccactgcacaaaggt

SEQ ID NO: 75680 - DNA, 20 bp, Artificial Sequence
  Description of Artificial Sequence: Synthetic oligonucleotide
  Target: SCNA; (+) strand; PAM type: YTN; PAM sequence: TTA
ccactgcacaaaggtttgtt

SEQ ID NO: 75681 - DNA, 20 bp, Artificial Sequence
  Description of Artificial Sequence: Synthetic oligonucleotide
  Target: SCNA; (+) strand; PAM type: YTN; PAM sequence: CTG
cacaaaggtttgtttgtttt

SEQ ID NO: 75682 - DNA, 20 bp, Artificial Sequence
  Description of Artificial Sequence: Synthetic oligonucleotide
  Target: SCNA; (+) strand; PAM type: YTN; PAM sequence: TTT
gtttgtttttaataatacag

SEQ ID NO: 75683 - DNA, 20 bp, Artificial Sequence
  Description of Artificial Sequence: Synthetic oligonucleotide
  Target: SCNA; (+) strand; PAM type: YTN; PAM sequence: TTG
tttgtttttaataatacagt

SEQ ID NO: 75684 - DNA, 20 bp, Artificial Sequence
  Description of Artificial Sequence: Synthetic oligonucleotide
  Target: SCNA; (+) strand; PAM type: YTN; PAM sequence: TTT
gtttttaataatacagtatt

SEQ ID NO: 75685 - DNA, 20 bp, Artificial Sequence
  Description of Artificial Sequence: Synthetic oligonucleotide
  Target: SCNA; (+) strand; PAM type: YTN; PAM sequence: TTG
tttttaataatacagtatta

SEQ ID NO: 75686 - DNA, 20 bp, Artificial Sequence
  Description of Artificial Sequence: Synthetic oligonucleotide
  Target: SCNA; (+) strand; PAM type: YTN; PAM sequence: TTT
ttaataatacagtattatta

SEQ ID NO: 75687 - DNA, 20 bp, Artificial Sequence
  Description of Artificial Sequence: Synthetic oligonucleotide
  Target: SCNA; (+) strand; PAM type: YTN; PAM sequence: TTT
taataatacagtattattac

SEQ ID NO: 75688 - DNA, 20 bp, Artificial Sequence
  Description of Artificial Sequence: Synthetic oligonucleotide
  Target: SCNA; (+) strand; PAM type: YTN; PAM sequence: TTT
aataatacagtattattact

SEQ ID NO: 75689 - DNA, 20 bp, Artificial Sequence
  Description of Artificial Sequence: Synthetic oligonucleotide
  Target: SCNA; (+) strand; PAM type: YTN; PAM sequence: TTA
ataatacagtattattacta

SEQ ID NO: 75690 - DNA, 20 bp, Artificial Sequence
  Description of Artificial Sequence: Synthetic oligonucleotide
  Target: SCNA; (+) strand; PAM type: YTN; PAM sequence: TTA
ttactagaagtatcatcaag

SEQ ID NO: 75691 - DNA, 20 bp, Artificial Sequence
  Description of Artificial Sequence: Synthetic oligonucleotide
  Target: SCNA; (+) strand; PAM type: YTN; PAM sequence: TTA
ctagaagtatcatcaagtca

SEQ ID NO: 75692 - DNA, 20 bp, Artificial Sequence
  Description of Artificial Sequence: Synthetic oligonucleotide
  Target: SCNA; (+) strand; PAM type: YTN; PAM sequence: CTA
gaagtatcatcaagtcatgg

SEQ ID NO: 75693 - DNA, 20 bp, Artificial Sequence
  Description of Artificial Sequence: Synthetic oligonucleotide
  Target: SCNA; (+) strand; PAM type: YTN; PAM sequence: TTC
ttacttctattgctagggtg

SEQ ID NO: 75694 - DNA, 20 bp, Artificial Sequence
  Description of Artificial Sequence: Synthetic oligonucleotide
  Target: SCNA; (+) strand; PAM type: YTN; PAM sequence: CTT
acttctattgctagggtgtt

SEQ ID NO: 75695 - DNA, 20 bp, Artificial Sequence
  Description of Artificial Sequence: Synthetic oligonucleotide
  Target: SCNA; (+) strand; PAM type: YTN; PAM sequence: TTA
cttctattgctagggtgtta

SEQ ID NO: 75696 - DNA, 20 bp, Artificial Sequence
  Description of Artificial Sequence: Synthetic oligonucleotide
  Target: SCNA; (+) strand; PAM type: YTN; PAM sequence: CTT
ctattgctagggtgttagaa

SEQ ID NO: 75697 - DNA, 20 bp, Artificial Sequence
  Description of Artificial Sequence: Synthetic oligonucleotide
  Target: SCNA; (+) strand; PAM type: YTN; PAM sequence: TTC
tattgctagggtgttagaaa

SEQ ID NO: 75698 - DNA, 20 bp, Artificial Sequence
  Description of Artificial Sequence: Synthetic oligonucleotide
  Target: SCNA; (+) strand; PAM type: YTN; PAM sequence: CTA
ttgctagggtgttagaaagg

SEQ ID NO: 75699 - DNA, 20 bp, Artificial Sequence
  Description of Artificial Sequence: Synthetic oligonucleotide
  Target: SCNA; (+) strand; PAM type: YTN; PAM sequence: TTG
ctagggtgttagaaaggact

SEQ ID NO: 75700 - DNA, 20 bp, Artificial Sequence
  Description of Artificial Sequence: Synthetic oligonucleotide
  Target: SCNA; (+) strand; PAM type: YTN; PAM sequence: CTA
gggtgttagaaaggactctg

SEQ ID NO: 75701 - DNA, 20 bp, Artificial Sequence
  Description of Artificial Sequence: Synthetic oligonucleotide
  Target: SCNA; (+) strand; PAM type: YTN; PAM sequence: TTA
gaaaggactctggactactt

SEQ ID NO: 75702 - DNA, 20 bp, Artificial Sequence
  Description of Artificial Sequence: Synthetic oligonucleotide
  Target: SCNA; (+) strand; PAM type: YTN; PAM sequence: CTC
tggactacttgatgtctaga

SEQ ID NO: 75703 - DNA, 20 bp, Artificial Sequence
  Description of Artificial Sequence: Synthetic oligonucleotide
  Target: SCNA; (+) strand; PAM type: YTN; PAM sequence: CTG
gactacttgatgtctagatg

SEQ ID NO: 75704 - DNA, 20 bp, Artificial Sequence
  Description of Artificial Sequence: Synthetic oligonucleotide
  Target: SCNA; (+) strand; PAM type: YTN; PAM sequence: CTA
cttgatgtctagatgcagat

SEQ ID NO: 75705 - DNA, 20 bp, Artificial Sequence
  Description of Artificial Sequence: Synthetic oligonucleotide
  Target: SCNA; (+) strand; PAM type: YTN; PAM sequence: CTT
gatgtctagatgcagataaa

SEQ ID NO: 75706 - DNA, 20 bp, Artificial Sequence
  Description of Artificial Sequence: Synthetic oligonucleotide
  Target: SCNA; (+) strand; PAM type: YTN; PAM sequence: TTG
atgtctagatgcagataaaa

SEQ ID NO: 75707 - DNA, 20 bp, Artificial Sequence
  Description of Artificial Sequence: Synthetic oligonucleotide
  Target: SCNA; (+) strand; PAM type: YTN; PAM sequence: CTA
gatgcagataaaaaaagcag

SEQ ID NO: 75708 - DNA, 20 bp, Artificial Sequence
  Description of Artificial Sequence: Synthetic oligonucleotide
  Target: SCNA; (+) strand; PAM type: YTN; PAM sequence: CTG
ttcacttcacataaagtagc

SEQ ID NO: 75709 - DNA, 20 bp, Artificial Sequence
  Description of Artificial Sequence: Synthetic oligonucleotide
  Target: SCNA; (+) strand; PAM type: YTN; PAM sequence: TTC
acttcacataaagtagccgc

SEQ ID NO: 75710 - DNA, 20 bp, Artificial Sequence
  Description of Artificial Sequence: Synthetic oligonucleotide
  Target: SCNA; (+) strand; PAM type: YTN; PAM sequence: CTT
cacataaagtagccgctact

SEQ ID NO: 75711 - DNA, 20 bp, Artificial Sequence
  Description of Artificial Sequence: Synthetic oligonucleotide
  Target: SCNA; (+) strand; PAM type: YTN; PAM sequence: TTC
acataaagtagccgctactg

SEQ ID NO: 75712 - DNA, 20 bp, Artificial Sequence
  Description of Artificial Sequence: Synthetic oligonucleotide
  Target: SCNA; (+) strand; PAM type: YTN; PAM sequence: CTA
ctgcttaaaggtaagggtaa

SEQ ID NO: 75713 - DNA, 20 bp, Artificial Sequence
  Description of Artificial Sequence: Synthetic oligonucleotide
  Target: SCNA; (+) strand; PAM type: YTN; PAM sequence: CTG
cttaaaggtaagggtaaatc

SEQ ID NO: 75714 - DNA, 20 bp, Artificial Sequence
  Description of Artificial Sequence: Synthetic oligonucleotide
  Target: SCNA; (+) strand; PAM type: YTN; PAM sequence: CTT
aaaggtaagggtaaatcttg

SEQ ID NO: 75715 - DNA, 20 bp, Artificial Sequence
  Description of Artificial Sequence: Synthetic oligonucleotide
  Target: SCNA; (+) strand; PAM type: YTN; PAM sequence: TTA
aaggtaagggtaaatcttgt

SEQ ID NO: 75716 - DNA, 20 bp, Artificial Sequence
  Description of Artificial Sequence: Synthetic oligonucleotide
  Target: SCNA; (+) strand; PAM type: YTN; PAM sequence: CTT
gttcactgtggatgaaggtt

SEQ ID NO: 75717 - DNA, 20 bp, Artificial Sequence
  Description of Artificial Sequence: Synthetic oligonucleotide
  Target: SCNA; (+) strand; PAM type: YTN; PAM sequence: TTG
ttcactgtggatgaaggtta

SEQ ID NO: 75718 - DNA, 20 bp, Artificial Sequence
  Description of Artificial Sequence: Synthetic oligonucleotide
  Target: SCNA; (+) strand; PAM type: YTN; PAM sequence: TTC
actgtggatgaaggttacta

SEQ ID NO: 75719 - DNA, 20 bp, Artificial Sequence
  Description of Artificial Sequence: Synthetic oligonucleotide
  Target: SCNA; (+) strand; PAM type: YTN; PAM sequence: CTG
tggatgaaggttactaaaga

SEQ ID NO: 75720 - DNA, 20 bp, Artificial Sequence
  Description of Artificial Sequence: Synthetic oligonucleotide
  Target: SCNA; (+) strand; PAM type: YTN; PAM sequence: TTA
ctaaagagaaggactaacat

SEQ ID NO: 75721 - DNA, 20 bp, Artificial Sequence
  Description of Artificial Sequence: Synthetic oligonucleotide
  Target: SCNA; (+) strand; PAM type: YTN; PAM sequence: CTA
aagagaaggactaacatata

SEQ ID NO: 75722 - DNA, 20 bp, Artificial Sequence
  Description of Artificial Sequence: Synthetic oligonucleotide
  Target: SCNA; (+) strand; PAM type: YTN; PAM sequence: CTA
acatataaaataggttcaaa

SEQ ID NO: 75723 - DNA, 20 bp, Artificial Sequence
  Description of Artificial Sequence: Synthetic oligonucleotide
  Target: SCNA; (+) strand; PAM type: YTN; PAM sequence: TTC
aaatatatacggagatatag

SEQ ID NO: 75724 - DNA, 20 bp, Artificial Sequence
  Description of Artificial Sequence: Synthetic oligonucleotide
  Target: SCNA; (+) strand; PAM type: YTN; PAM sequence: CTT
aaaaaattaagacttctcct

SEQ ID NO: 75725 - DNA, 20 bp, Artificial Sequence
  Description of Artificial Sequence: Synthetic oligonucleotide
  Target: SCNA; (+) strand; PAM type: YTN; PAM sequence: TTA
aaaaattaagacttctcctt

SEQ ID NO: 75726 - DNA, 20 bp, Artificial Sequence
  Description of Artificial Sequence: Synthetic oligonucleotide
  Target: SCNA; (+) strand; PAM type: YTN; PAM sequence: TTA
agacttctccttcaattaat

SEQ ID NO: 75727 - DNA, 20 bp, Artificial Sequence
  Description of Artificial Sequence: Synthetic oligonucleotide
  Target: SCNA; (+) strand; PAM type: YTN; PAM sequence: CTT
ctccttcaattaatattcca

SEQ ID NO: 75728 - DNA, 20 bp, Artificial Sequence
  Description of Artificial Sequence: Synthetic oligonucleotide
  Target: SCNA; (+) strand; PAM type: YTN; PAM sequence: TTC
tccttcaattaatattccaa

SEQ ID NO: 75729 - DNA, 20 bp, Artificial Sequence
  Description of Artificial Sequence: Synthetic oligonucleotide
  Target: SCNA; (+) strand; PAM type: YTN; PAM sequence: CTC
cttcaattaatattccaaga

SEQ ID NO: 75730 - DNA, 20 bp, Artificial Sequence
  Description of Artificial Sequence: Synthetic oligonucleotide
  Target: SCNA; (+) strand; PAM type: YTN; PAM sequence: CTT
caattaatattccaagaaaa

SEQ ID NO: 75731 - DNA, 20 bp, Artificial Sequence
  Description of Artificial Sequence: Synthetic oligonucleotide
  Target: SCNA; (+) strand; PAM type: YTN; PAM sequence: TTC
aattaatattccaagaaaag

SEQ ID NO: 75732 - DNA, 20 bp, Artificial Sequence
  Description of Artificial Sequence: Synthetic oligonucleotide
  Target: SCNA; (+) strand; PAM type: YTN; PAM sequence: TTA
atattccaagaaaagaaact

SEQ ID NO: 75733 - DNA, 20 bp, Artificial Sequence
  Description of Artificial Sequence: Synthetic oligonucleotide
  Target: SCNA; (+) strand; PAM type: YTN; PAM sequence: TTC
caagaaaagaaactccatat

SEQ ID NO: 75734 - DNA, 20 bp, Artificial Sequence
  Description of Artificial Sequence: Synthetic oligonucleotide
  Target: SCNA; (+) strand; PAM type: YTN; PAM sequence: CTC
catattgccatctaaacaca

SEQ ID NO: 75735 - DNA, 20 bp, Artificial Sequence
  Description of Artificial Sequence: Synthetic oligonucleotide
  Target: SCNA; (+) strand; PAM type: YTN; PAM sequence: TTG
ccatctaaacacagaagctt

SEQ ID NO: 75736 - DNA, 20 bp, Artificial Sequence
  Description of Artificial Sequence: Synthetic oligonucleotide
  Target: SCNA; (+) strand; PAM type: YTN; PAM sequence: CTA
aacacagaagcttttctgta

SEQ ID NO: 75737 - DNA, 20 bp, Artificial Sequence
  Description of Artificial Sequence: Synthetic oligonucleotide
  Target: SCNA; (+) strand; PAM type: YTN; PAM sequence: CTT
ttctgtaatggtattccagt

SEQ ID NO: 75738 - DNA, 20 bp, Artificial Sequence
  Description of Artificial Sequence: Synthetic oligonucleotide
  Target: SCNA; (+) strand; PAM type: YTN; PAM sequence: TTT
tctgtaatggtattccagtg

SEQ ID NO: 75739 - DNA, 20 bp, Artificial Sequence
  Description of Artificial Sequence: Synthetic oligonucleotide
  Target: SCNA; (+) strand; PAM type: YTN; PAM sequence: TTT
ctgtaatggtattccagtga

SEQ ID NO: 75740 - DNA, 20 bp, Artificial Sequence
  Description of Artificial Sequence: Synthetic oligonucleotide
  Target: SCNA; (+) strand; PAM type: YTN; PAM sequence: TTC
tgtaatggtattccagtgaa

SEQ ID NO: 75741 - DNA, 20 bp, Artificial Sequence
  Description of Artificial Sequence: Synthetic oligonucleotide
  Target: SCNA; (+) strand; PAM type: YTN; PAM sequence: CTG
taatggtattccagtgaaag

SEQ ID NO: 75742 - DNA, 20 bp, Artificial Sequence
  Description of Artificial Sequence: Synthetic oligonucleotide
  Target: SCNA; (+) strand; PAM type: YTN; PAM sequence: TTC
cagtgaaagtcatttaaatt

SEQ ID NO: 75743 - DNA, 20 bp, Artificial Sequence
  Description of Artificial Sequence: Synthetic oligonucleotide
  Target: SCNA; (+) strand; PAM type: YTN; PAM sequence: TTT
aaattcgaatagaaaaattt

SEQ ID NO: 75744 - DNA, 20 bp, Artificial Sequence
  Description of Artificial Sequence: Synthetic oligonucleotide
  Target: SCNA; (+) strand; PAM type: YTN; PAM sequence: TTA
aattcgaatagaaaaattta

SEQ ID NO: 75745 - DNA, 20 bp, Artificial Sequence
  Description of Artificial Sequence: Synthetic oligonucleotide
  Target: SCNA; (+) strand; PAM type: YTN; PAM sequence: TTC
gaatagaaaaatttaacttg

SEQ ID NO: 75746 - DNA, 20 bp, Artificial Sequence
  Description of Artificial Sequence: Synthetic oligonucleotide
  Target: SCNA; (+) strand; PAM type: YTN; PAM sequence: TTT
aacttgagatctgcccttat

SEQ ID NO: 75747 - DNA, 20 bp, Artificial Sequence
  Description of Artificial Sequence: Synthetic oligonucleotide
  Target: SCNA; (+) strand; PAM type: YTN; PAM sequence: TTA
acttgagatctgcccttatg

SEQ ID NO: 75748 - DNA, 20 bp, Artificial Sequence
  Description of Artificial Sequence: Synthetic oligonucleotide
  Target: SCNA; (+) strand; PAM type: YTN; PAM sequence: CTT
gagatctgcccttatgaaaa

SEQ ID NO: 75749 - DNA, 20 bp, Artificial Sequence
  Description of Artificial Sequence: Synthetic oligonucleotide
  Target: SCNA; (+) strand; PAM type: YTN; PAM sequence: TTG
agatctgcccttatgaaaag

SEQ ID NO: 75750 - DNA, 20 bp, Artificial Sequence
  Description of Artificial Sequence: Synthetic oligonucleotide
  Target: SCNA; (+) strand; PAM type: YTN; PAM sequence: CTG
cccttatgaaaagtggtgag

SEQ ID NO: 75751 - DNA, 20 bp, Artificial Sequence
  Description of Artificial Sequence: Synthetic oligonucleotide
  Target: SCNA; (+) strand; PAM type: YTN; PAM sequence: CTT
atgaaaagtggtgagaattc

SEQ ID NO: 75752 - DNA, 20 bp, Artificial Sequence
  Description of Artificial Sequence: Synthetic oligonucleotide
  Target: SCNA; (+) strand; PAM type: YTN; PAM sequence: TTA
tgaaaagtggtgagaattca

SEQ ID NO: 75753 - DNA, 20 bp, Artificial Sequence
  Description of Artificial Sequence: Synthetic oligonucleotide
  Target: SCNA; (+) strand; PAM type: YTN; PAM sequence: TTC
aaatagttctcgaaccctat

SEQ ID NO: 75754 - DNA, 20 bp, Artificial Sequence
  Description of Artificial Sequence: Synthetic oligonucleotide
  Target: SCNA; (+) strand; PAM type: YTN; PAM sequence: TTC
tcgaaccctatttgtcatat

SEQ ID NO: 75755 - DNA, 20 bp, Artificial Sequence
  Description of Artificial Sequence: Synthetic oligonucleotide
  Target: SCNA; (+) strand; PAM type: YTN; PAM sequence: CTC
gaaccctatttgtcatatca

SEQ ID NO: 75756 - DNA, 20 bp, Artificial Sequence
  Description of Artificial Sequence: Synthetic oligonucleotide
  Target: SCNA; (+) strand; PAM type: YTN; PAM sequence: CTA
tttgtcatatcacttcctga

SEQ ID NO: 75757 - DNA, 20 bp, Artificial Sequence
  Description of Artificial Sequence: Synthetic oligonucleotide
  Target: SCNA; (+) strand; PAM type: YTN; PAM sequence: TTT
gtcatatcacttcctgaaag

SEQ ID NO: 75758 - DNA, 20 bp, Artificial Sequence
  Description of Artificial Sequence: Synthetic oligonucleotide
  Target: SCNA; (+) strand; PAM type: YTN; PAM sequence: TTG
tcatatcacttcctgaaagg

SEQ ID NO: 75759 - DNA, 20 bp, Artificial Sequence
  Description of Artificial Sequence: Synthetic oligonucleotide
  Target: SCNA; (+) strand; PAM type: YTN; PAM sequence: CTT
cctgaaaggatactcaatct

SEQ ID NO: 75760 - DNA, 20 bp, Artificial Sequence
  Description of Artificial Sequence: Synthetic oligonucleotide
  Target: SCNA; (+) strand; PAM type: YTN; PAM sequence: TTC
ctgaaaggatactcaatctc

SEQ ID NO: 75761 - DNA, 20 bp, Artificial Sequence
  Description of Artificial Sequence: Synthetic oligonucleotide
  Target: SCNA; (+) strand; PAM type: YTN; PAM sequence: CTG
aaaggatactcaatctctta

SEQ ID NO: 75762 - DNA, 20 bp, Artificial Sequence
  Description of Artificial Sequence: Synthetic oligonucleotide
  Target: SCNA; (+) strand; PAM type: YTN; PAM sequence: CTC
aatctcttaatttttttcta

SEQ ID NO: 75763 - DNA, 20 bp, Artificial Sequence
  Description of Artificial Sequence: Synthetic oligonucleotide
  Target: SCNA; (+) strand; PAM type: YTN; PAM sequence: CTC
ttaatttttttctattattt

SEQ ID NO: 75764 - DNA, 20 bp, Artificial Sequence
  Description of Artificial Sequence: Synthetic oligonucleotide
  Target: SCNA; (+) strand; PAM type: YTN; PAM sequence: CTT
aatttttttctattattttg

SEQ ID NO: 75765 - DNA, 20 bp, Artificial Sequence
  Description of Artificial Sequence: Synthetic oligonucleotide
  Target: SCNA; (+) strand; PAM type: YTN; PAM sequence: TTA
atttttttctattattttgt

SEQ ID NO: 75766 - DNA, 20 bp, Artificial Sequence
  Description of Artificial Sequence: Synthetic oligonucleotide
  Target: SCNA; (+) strand; PAM type: YTN; PAM sequence: TTT
ttttctattattttgtactt

SEQ ID NO: 75767 - DNA, 20 bp, Artificial Sequence
  Description of Artificial Sequence: Synthetic oligonucleotide
  Target: SCNA; (+) strand; PAM type: YTN; PAM sequence: TTT
tttctattattttgtacttt

SEQ ID NO: 75768 - DNA, 20 bp, Artificial Sequence
  Description of Artificial Sequence: Synthetic oligonucleotide
  Target: SCNA; (+) strand; PAM type: YTN; PAM sequence: TTT
ttctattattttgtacttta

SEQ ID NO: 75769 - DNA, 20 bp, Artificial Sequence
  Description of Artificial Sequence: Synthetic oligonucleotide
  Target: SCNA; (+) strand; PAM type: YTN; PAM sequence: TTT
tctattattttgtactttat

SEQ ID NO: 75770 - DNA, 20 bp, Artificial Sequence
  Description of Artificial Sequence: Synthetic oligonucleotide
  Target: SCNA; (+) strand; PAM type: YTN; PAM sequence: TTT
ctattattttgtactttatg

SEQ ID NO: 75771 - DNA, 20 bp, Artificial Sequence
  Description of Artificial Sequence: Synthetic oligonucleotide
  Target: SCNA; (+) strand; PAM type: YTN; PAM sequence: TTC
tattattttgtactttatgg

SEQ ID NO: 75772 - DNA, 20 bp, Artificial Sequence
  Description of Artificial Sequence: Synthetic oligonucleotide
  Target: SCNA; (+) strand; PAM type: YTN; PAM sequence: CTA
ttattttgtactttatggaa

SEQ ID NO: 75773 - DNA, 20 bp, Artificial Sequence
  Description of Artificial Sequence: Synthetic oligonucleotide
  Target: SCNA; (+) strand; PAM type: YTN; PAM sequence: TTA
ttttgtactttatggaaaaa

SEQ ID NO: 75774 - DNA, 20 bp, Artificial Sequence
  Description of Artificial Sequence: Synthetic oligonucleotide
  Target: SCNA; (+) strand; PAM type: YTN; PAM sequence: TTT
tgtactttatggaaaaatat

SEQ ID NO: 75775 - DNA, 20 bp, Artificial Sequence
  Description of Artificial Sequence: Synthetic oligonucleotide
  Target: SCNA; (+) strand; PAM type: YTN; PAM sequence: TTT
gtactttatggaaaaatatt

SEQ ID NO: 75776 - DNA, 20 bp, Artificial Sequence
  Description of Artificial Sequence: Synthetic oligonucleotide
  Target: SCNA; (+) strand; PAM type: YTN; PAM sequence: TTG
tactttatggaaaaatattt

SEQ ID NO: 75777 - DNA, 20 bp, Artificial Sequence
  Description of Artificial Sequence: Synthetic oligonucleotide
  Target: SCNA; (+) strand; PAM type: YTN; PAM sequence: CTT
tatggaaaaatatttaggaa

SEQ ID NO: 75778 - DNA, 20 bp, Artificial Sequence
  Description of Artificial Sequence: Synthetic oligonucleotide
  Target: SCNA; (+) strand; PAM type: YTN; PAM sequence: TTT
atggaaaaatatttaggaag

SEQ ID NO: 75779 - DNA, 20 bp, Artificial Sequence
  Description of Artificial Sequence: Synthetic oligonucleotide
  Target: SCNA; (+) strand; PAM type: YTN; PAM sequence: TTA
tggaaaaatatttaggaaga

SEQ ID NO: 75780 - DNA, 20 bp, Artificial Sequence
  Description of Artificial Sequence: Synthetic oligonucleotide
  Target: SCNA; (+) strand; PAM type: YTN; PAM sequence: TTT
aggaagattatagaaagaaa

SEQ ID NO: 75781 - DNA, 20 bp, Artificial Sequence
  Description of Artificial Sequence: Synthetic oligonucleotide
  Target: SCNA; (+) strand; PAM type: YTN; PAM sequence: TTA
ggaagattatagaaagaaaa

SEQ ID NO: 75782 - DNA, 20 bp, Artificial Sequence
  Description of Artificial Sequence: Synthetic oligonucleotide
  Target: SCNA; (+) strand; PAM type: YTN; PAM sequence: TTA
tagaaagaaaatttttagga

SEQ ID NO: 75783 - DNA, 20 bp, Artificial Sequence
  Description of Artificial Sequence: Synthetic oligonucleotide
  Target: SCNA; (+) strand; PAM type: YTN; PAM sequence: TTT
ttaggaagtagcgtctctag

SEQ ID NO: 75784 - DNA, 20 bp, Artificial Sequence
  Description of Artificial Sequence: Synthetic oligonucleotide
  Target: SCNA; (+) strand; PAM type: YTN; PAM sequence: TTT
taggaagtagcgtctctagt

SEQ ID NO: 75785 - DNA, 20 bp, Artificial Sequence
  Description of Artificial Sequence: Synthetic oligonucleotide
  Target: SCNA; (+) strand; PAM type: YTN; PAM sequence: TTT
aggaagtagcgtctctagtt

SEQ ID NO: 75786 - DNA, 20 bp, Artificial Sequence
  Description of Artificial Sequence: Synthetic oligonucleotide
  Target: SCNA; (+) strand; PAM type: YTN; PAM sequence: TTA
ggaagtagcgtctctagttt

SEQ ID NO: 75787 - DNA, 20 bp, Artificial Sequence
  Description of Artificial Sequence: Synthetic oligonucleotide
  Target: SCNA; (+) strand; PAM type: YTN; PAM sequence: CTC
tagttttcctaaaatttatg

SEQ ID NO: 75788 - DNA, 20 bp, Artificial Sequence
  Description of Artificial Sequence: Synthetic oligonucleotide
  Target: SCNA; (+) strand; PAM type: YTN; PAM sequence: CTA
gttttcctaaaatttatgtc

SEQ ID NO: 75789 - DNA, 20 bp, Artificial Sequence
  Description of Artificial Sequence: Synthetic oligonucleotide
  Target: SCNA; (+) strand; PAM type: YTN; PAM sequence: TTT
tcctaaaatttatgtcaaac

SEQ ID NO: 75790 - DNA, 20 bp, Artificial Sequence
  Description of Artificial Sequence: Synthetic oligonucleotide
  Target: SCNA; (+) strand; PAM type: YTN; PAM sequence: TTT
cctaaaatttatgtcaaacc

SEQ ID NO: 75791 - DNA, 20 bp, Artificial Sequence
  Description of Artificial Sequence: Synthetic oligonucleotide
  Target: SCNA; (+) strand; PAM type: YTN; PAM sequence: TTC
ctaaaatttatgtcaaaccc

SEQ ID NO: 75792 - DNA, 20 bp, Artificial Sequence
  Description of Artificial Sequence: Synthetic oligonucleotide
  Target: SCNA; (+) strand; PAM type: YTN; PAM sequence: CTA
aaatttatgtcaaacccggc

SEQ ID NO: 75793 - DNA, 20 bp, Artificial Sequence
  Description of Artificial Sequence: Synthetic oligonucleotide
  Target: SCNA; (+) strand; PAM type: YTN; PAM sequence: TTT
atgtcaaacccggcattatt

SEQ ID NO: 75794 - DNA, 20 bp, Artificial Sequence
  Description of Artificial Sequence: Synthetic oligonucleotide
  Target: SCNA; (+) strand; PAM type: YTN; PAM sequence: TTA
tgtcaaacccggcattattt

SEQ ID NO: 75795 - DNA, 20 bp, Artificial Sequence
  Description of Artificial Sequence: Synthetic oligonucleotide
  Target: SCNA; (+) strand; PAM type: YTN; PAM sequence: TTA
tttattttacatataaaaag

SEQ ID NO: 75796 - DNA, 20 bp, Artificial Sequence
  Description of Artificial Sequence: Synthetic oligonucleotide
  Target: SCNA; (+) strand; PAM type: YTN; PAM sequence: TTT
attttacatataaaaagatc

SEQ ID NO: 75797 - DNA, 20 bp, Artificial Sequence
  Description of Artificial Sequence: Synthetic oligonucleotide
  Target: SCNA; (+) strand; PAM type: YTN; PAM sequence: TTA
ttttacatataaaaagatca

SEQ ID NO: 75798 - DNA, 20 bp, Artificial Sequence
  Description of Artificial Sequence: Synthetic oligonucleotide
  Target: SCNA; (+) strand; PAM type: YTN; PAM sequence: TTT
tacatataaaaagatcataa

SEQ ID NO: 75799 - DNA, 20 bp, Artificial Sequence
  Description of Artificial Sequence: Synthetic oligonucleotide
  Target: SCNA; (+) strand; PAM type: YTN; PAM sequence: TTT
acatataaaaagatcataac

SEQ ID NO: 75800 - DNA, 20 bp, Artificial Sequence
  Description of Artificial Sequence: Synthetic oligonucleotide
  Target: SCNA; (+) strand; PAM type: YTN; PAM sequence: TTA
catataaaaagatcataact

SEQ ID NO: 75801 - DNA, 20 bp, Artificial Sequence
  Description of Artificial Sequence: Synthetic oligonucleotide
  Target: SCNA; (+) strand; PAM type: YTN; PAM sequence: CTT
ttactctttgttaaaactat

SEQ ID NO: 75802 - DNA, 20 bp, Artificial Sequence
  Description of Artificial Sequence: Synthetic oligonucleotide
  Target: SCNA; (+) strand; PAM type: YTN; PAM sequence: TTT
tactctttgttaaaactata

SEQ ID NO: 75803 - DNA, 20 bp, Artificial Sequence
  Description of Artificial Sequence: Synthetic oligonucleotide
  Target: SCNA; (+) strand; PAM type: YTN; PAM sequence: TTT
actctttgttaaaactatat

SEQ ID NO: 75804 - DNA, 20 bp, Artificial Sequence
  Description of Artificial Sequence: Synthetic oligonucleotide
  Target: SCNA; (+) strand; PAM type: YTN; PAM sequence: TTA
ctctttgttaaaactatatt

SEQ ID NO: 75805 - DNA, 20 bp, Artificial Sequence
  Description of Artificial Sequence: Synthetic oligonucleotide
  Target: SCNA; (+) strand; PAM type: YTN; PAM sequence: CTC
tttgttaaaactatattaaa

SEQ ID NO: 75806 - DNA, 20 bp, Artificial Sequence
  Description of Artificial Sequence: Synthetic oligonucleotide
  Target: SCNA; (+) strand; PAM type: YTN; PAM sequence: CTT
tgttaaaactatattaaaac

SEQ ID NO: 75807 - DNA, 20 bp, Artificial Sequence
  Description of Artificial Sequence: Synthetic oligonucleotide
  Target: SCNA; (+) strand; PAM type: YTN; PAM sequence: TTT
gttaaaactatattaaaaca

SEQ ID NO: 75808 - DNA, 20 bp, Artificial Sequence
  Description of Artificial Sequence: Synthetic oligonucleotide
  Target: SCNA; (+) strand; PAM type: YTN; PAM sequence: TTG
ttaaaactatattaaaacaa

SEQ ID NO: 75809 - DNA, 20 bp, Artificial Sequence
  Description of Artificial Sequence: Synthetic oligonucleotide
  Target: SCNA; (+) strand; PAM type: YTN; PAM sequence: TTA
aaactatattaaaacaaaag

SEQ ID NO: 75810 - DNA, 20 bp, Artificial Sequence
  Description of Artificial Sequence: Synthetic oligonucleotide
  Target: SCNA; (+) strand; PAM type: YTN; PAM sequence: CTA
tattaaaacaaaagagaagc

SEQ ID NO: 75811 - DNA, 20 bp, Artificial Sequence
  Description of Artificial Sequence: Synthetic oligonucleotide
  Target: SCNA; (+) strand; PAM type: YTN; PAM sequence: TTA
aaacaaaagagaagcaaccc

SEQ ID NO: 75812 - DNA, 20 bp, Artificial Sequence
  Description of Artificial Sequence: Synthetic oligonucleotide
  Target: SCNA; (+) strand; PAM type: YTN; PAM sequence: CTA
aataataattgattaatttc

SEQ ID NO: 75813 - DNA, 20 bp, Artificial Sequence
  Description of Artificial Sequence: Synthetic oligonucleotide
  Target: SCNA; (+) strand; PAM type: YTN; PAM sequence: TTG
attaatttcatttggaggtc

SEQ ID NO: 75814 - DNA, 20 bp, Artificial Sequence
  Description of Artificial Sequence: Synthetic oligonucleotide
  Target: SCNA; (+) strand; PAM type: YTN; PAM sequence: TTA
atttcatttggaggtcttct

SEQ ID NO: 75815 - DNA, 20 bp, Artificial Sequence
  Description of Artificial Sequence: Synthetic oligonucleotide
  Target: SCNA; (+) strand; PAM type: YTN; PAM sequence: TTT
catttggaggtcttctatgt

SEQ ID NO: 75816 - DNA, 20 bp, Artificial Sequence
  Description of Artificial Sequence: Synthetic oligonucleotide
  Target: SCNA; (+) strand; PAM type: YTN; PAM sequence: TTC
atttggaggtcttctatgtt

SEQ ID NO: 75817 - DNA, 20 bp, Artificial Sequence
  Description of Artificial Sequence: Synthetic oligonucleotide
  Target: SCNA; (+) strand; PAM type: YTN; PAM sequence: TTT
ggaggtcttctatgtttagt

SEQ ID NO: 75818 - DNA, 20 bp, Artificial Sequence
  Description of Artificial Sequence: Synthetic oligonucleotide
  Target: SCNA; (+) strand; PAM type: YTN; PAM sequence: TTG
gaggtcttctatgtttagta

SEQ ID NO: 75819 - DNA, 20 bp, Artificial Sequence
  Description of Artificial Sequence: Synthetic oligonucleotide
  Target: SCNA; (+) strand; PAM type: YTN; PAM sequence: CTT
ctatgtttagtatgtttatg

SEQ ID NO: 75820 - DNA, 20 bp, Artificial Sequence
  Description of Artificial Sequence: Synthetic oligonucleotide
  Target: SCNA; (+) strand; PAM type: YTN; PAM sequence: TTC
tatgtttagtatgtttatgg

SEQ ID NO: 75821 - DNA, 20 bp, Artificial Sequence
  Description of Artificial Sequence: Synthetic oligonucleotide
  Target: SCNA; (+) strand; PAM type: YTN; PAM sequence: CTA
tgtttagtatgtttatggac

SEQ ID NO: 75822 - DNA, 20 bp, Artificial Sequence
  Description of Artificial Sequence: Synthetic oligonucleotide
  Target: SCNA; (+) strand; PAM type: YTN; PAM sequence: TTT
agtatgtttatggacttttt

SEQ ID NO: 75823 - DNA, 20 bp, Artificial Sequence
  Description of Artificial Sequence: Synthetic oligonucleotide
  Target: SCNA; (+) strand; PAM type: YTN; PAM sequence: TTA
gtatgtttatggacttttta

SEQ ID NO: 75824 - DNA, 20 bp, Artificial Sequence
  Description of Artificial Sequence: Synthetic oligonucleotide
  Target: SCNA; (+) strand; PAM type: YTN; PAM sequence: TTT
atggactttttaaacactga

SEQ ID NO: 75825 - DNA, 20 bp, Artificial Sequence
  Description of Artificial Sequence: Synthetic oligonucleotide
  Target: SCNA; (+) strand; PAM type: YTN; PAM sequence: TTA
tggactttttaaacactgag

SEQ ID NO: 75826 - DNA, 20 bp, Artificial Sequence
  Description of Artificial Sequence: Synthetic oligonucleotide
  Target: SCNA; (+) strand; PAM type: YTN; PAM sequence: CTT
tttaaacactgaggattcac

SEQ ID NO: 75827 - DNA, 20 bp, Artificial Sequence
  Description of Artificial Sequence: Synthetic oligonucleotide
  Target: SCNA; (+) strand; PAM type: YTN; PAM sequence: TTT
ttaaacactgaggattcact

SEQ ID NO: 75828 - DNA, 20 bp, Artificial Sequence
  Description of Artificial Sequence: Synthetic oligonucleotide
  Target: SCNA; (+) strand; PAM type: YTN; PAM sequence: TTT
taaacactgaggattcacta

SEQ ID NO: 75829 - DNA, 20 bp, Artificial Sequence
  Description of Artificial Sequence: Synthetic oligonucleotide
  Target: SCNA; (+) strand; PAM type: YTN; PAM sequence: TTT
aaacactgaggattcactaa

SEQ ID NO: 75830 - DNA, 20 bp, Artificial Sequence
  Description of Artificial Sequence: Synthetic oligonucleotide
  Target: SCNA; (+) strand; PAM type: YTN; PAM sequence: TTA
aacactgaggattcactaat

SEQ ID NO: 75831 - DNA, 20 bp, Artificial Sequence
  Description of Artificial Sequence: Synthetic oligonucleotide
  Target: SCNA; (+) strand; PAM type: YTN; PAM sequence: CTG
aggattcactaatttttttt

SEQ ID NO: 75832 - DNA, 20 bp, Artificial Sequence
  Description of Artificial Sequence: Synthetic oligonucleotide
  Target: SCNA; (+) strand; PAM type: YTN; PAM sequence: TTC
actaattttttttttttttt

SEQ ID NO: 75833 - DNA, 20 bp, Artificial Sequence
  Description of Artificial Sequence: Synthetic oligonucleotide
  Target: SCNA; (+) strand; PAM type: YTN; PAM sequence: CTA
attttttttttttttttttt

SEQ ID NO: 75834 - DNA, 20 bp, Artificial Sequence
  Description of Artificial Sequence: Synthetic oligonucleotide
  Target: SCNA; (+) strand; PAM type: YTN; PAM sequence: TTT
tttttttttttttttttgag

SEQ ID NO: 75835 - DNA, 20 bp, Artificial Sequence
  Description of Artificial Sequence: Synthetic oligonucleotide
  Target: SCNA; (+) strand; PAM type: YTN; PAM sequence: TTT
ttttttttttttttttgaga

SEQ ID NO: 75836 - DNA, 20 bp, Artificial Sequence
  Description of Artificial Sequence: Synthetic oligonucleotide
  Target: SCNA; (+) strand; PAM type: YTN; PAM sequence: TTT
tttttttttttttttgagac

SEQ ID NO: 75837 - DNA, 20 bp, Artificial Sequence
  Description of Artificial Sequence: Synthetic oligonucleotide
  Target: SCNA; (+) strand; PAM type: YTN; PAM sequence: TTT
ttttttttttttttgagaca

SEQ ID NO: 75838 - DNA, 20 bp, Artificial Sequence
  Description of Artificial Sequence: Synthetic oligonucleotide
  Target: SCNA; (+) strand; PAM type: YTN; PAM sequence: TTT
tttttttttttttgagacag

SEQ ID NO: 75839 - DNA, 20 bp, Artificial Sequence
  Description of Artificial Sequence: Synthetic oligonucleotide
  Target: SCNA; (+) strand; PAM type: YTN; PAM sequence: TTT
ttttttttttttgagacagg

SEQ ID NO: 75840 - DNA, 20 bp, Artificial Sequence
  Description of Artificial Sequence: Synthetic oligonucleotide
  Target: SCNA; (+) strand; PAM type: YTN; PAM sequence: TTT
tttttttttttgagacagga

SEQ ID NO: 75841 - DNA, 20 bp, Artificial Sequence
  Description of Artificial Sequence: Synthetic oligonucleotide
  Target: SCNA; (+) strand; PAM type: YTN; PAM sequence: TTT
ttttttttttgagacaggat

SEQ ID NO: 75842 - DNA, 20 bp, Artificial Sequence
  Description of Artificial Sequence: Synthetic oligonucleotide
  Target: SCNA; (+) strand; PAM type: YTN; PAM sequence: TTT
tttttttttgagacaggatc

SEQ ID NO: 75843 - DNA, 20 bp, Artificial Sequence
  Description of Artificial Sequence: Synthetic oligonucleotide
  Target: SCNA; (+) strand; PAM type: YTN; PAM sequence: TTT
ttttttttgagacaggatct

SEQ ID NO: 75844 - DNA, 20 bp, Artificial Sequence
  Description of Artificial Sequence: Synthetic oligonucleotide
  Target: SCNA; (+) strand; PAM type: YTN; PAM sequence: TTT
tttttttgagacaggatctt

SEQ ID NO: 75845 - DNA, 20 bp, Artificial Sequence
  Description of Artificial Sequence: Synthetic oligonucleotide
  Target: SCNA; (+) strand; PAM type: YTN; PAM sequence: TTT
ttttttgagacaggatctta

SEQ ID NO: 75846 - DNA, 20 bp, Artificial Sequence
  Description of Artificial Sequence: Synthetic oligonucleotide
  Target: SCNA; (+) strand; PAM type: YTN; PAM sequence: TTT
tttttgagacaggatcttac

SEQ ID NO: 75847 - DNA, 20 bp, Artificial Sequence
  Description of Artificial Sequence: Synthetic oligonucleotide
  Target: SCNA; (+) strand; PAM type: YTN; PAM sequence: TTT
ttttgagacaggatcttact

SEQ ID NO: 75848 - DNA, 20 bp, Artificial Sequence
  Description of Artificial Sequence: Synthetic oligonucleotide
  Target: SCNA; (+) strand; PAM type: YTN; PAM sequence: TTT
tttgagacaggatcttactt

SEQ ID NO: 75849 - DNA, 20 bp, Artificial Sequence
  Description of Artificial Sequence: Synthetic oligonucleotide
  Target: SCNA; (+) strand; PAM type: YTN; PAM sequence: TTT
ttgagacaggatcttacttt

SEQ ID NO: 75850 - DNA, 20 bp, Artificial Sequence
  Description of Artificial Sequence: Synthetic oligonucleotide
  Target: SCNA; (+) strand; PAM type: YTN; PAM sequence: TTT
tgagacaggatcttactttt

SEQ ID NO: 75851 - DNA, 20 bp, Artificial Sequence
  Description of Artificial Sequence: Synthetic oligonucleotide
  Target: SCNA; (+) strand; PAM type: YTN; PAM sequence: TTT
gagacaggatcttacttttt

SEQ ID NO: 75852 - DNA, 20 bp, Artificial Sequence
  Description of Artificial Sequence: Synthetic oligonucleotide
  Target: SCNA; (+) strand; PAM type: YTN; PAM sequence: TTG
agacaggatcttactttttt

SEQ ID NO: 75853 - DNA, 20 bp, Artificial Sequence
  Description of Artificial Sequence: Synthetic oligonucleotide
  Target: SCNA; (+) strand; PAM type: YTN; PAM sequence: CTT
acttttttgcccaggctgga

SEQ ID NO: 75854 - DNA, 20 bp, Artificial Sequence
  Description of Artificial Sequence: Synthetic oligonucleotide
  Target: SCNA; (+) strand; PAM type: YTN; PAM sequence: TTA
cttttttgcccaggctggag

SEQ ID NO: 75855 - DNA, 20 bp, Artificial Sequence
  Description of Artificial Sequence: Synthetic oligonucleotide
  Target: SCNA; (+) strand; PAM type: YTN; PAM sequence: CTT
ttttgcccaggctggagtgc

SEQ ID NO: 75856 - DNA, 20 bp, Artificial Sequence
  Description of Artificial Sequence: Synthetic oligonucleotide
  Target: SCNA; (+) strand; PAM type: YTN; PAM sequence: TTT
tttgcccaggctggagtgca

SEQ ID NO: 75857 - DNA, 20 bp, Artificial Sequence
  Description of Artificial Sequence: Synthetic oligonucleotide
  Target: SCNA; (+) strand; PAM type: YTN; PAM sequence: TTT
ttgcccaggctggagtgcag

SEQ ID NO: 75858 - DNA, 20 bp, Artificial Sequence
  Description of Artificial Sequence: Synthetic oligonucleotide
  Target: SCNA; (+) strand; PAM type: YTN; PAM sequence: TTT
tgcccaggctggagtgcagt

SEQ ID NO: 75859 - DNA, 20 bp, Artificial Sequence
  Description of Artificial Sequence: Synthetic oligonucleotide
  Target: SCNA; (+) strand; PAM type: YTN; PAM sequence: TTT
gcccaggctggagtgcagtg

SEQ ID NO: 75860 - DNA, 20 bp, Artificial Sequence
  Description of Artificial Sequence: Synthetic oligonucleotide
  Target: SCNA; (+) strand; PAM type: YTN; PAM sequence: TTG
cccaggctggagtgcagtga

SEQ ID NO: 75861 - DNA, 20 bp, Artificial Sequence
  Description of Artificial Sequence: Synthetic oligonucleotide
  Target: SCNA; (+) strand; PAM type: YTN; PAM sequence: CTG
gagtgcagtgatacaatcac

SEQ ID NO: 75862 - DNA, 20 bp, Artificial Sequence
  Description of Artificial Sequence: Synthetic oligonucleotide
  Target: SCNA; (+) strand; PAM type: YTN; PAM sequence: CTC
actgcaacctcaaccatcca

SEQ ID NO: 75863 - DNA, 20 bp, Artificial Sequence
  Description of Artificial Sequence: Synthetic oligonucleotide
  Target: SCNA; (+) strand; PAM type: YTN; PAM sequence: CTG
caacctcaaccatccaggct

SEQ ID NO: 75864 - DNA, 20 bp, Artificial Sequence
  Description of Artificial Sequence: Synthetic oligonucleotide
  Target: SCNA; (+) strand; PAM type: YTN; PAM sequence: CTC
aaccatccaggctcaagtga

SEQ ID NO: 75865 - DNA, 20 bp, Artificial Sequence
  Description of Artificial Sequence: Synthetic oligonucleotide
  Target: SCNA; (+) strand; PAM type: YTN; PAM sequence: CTC
aagtgatcctctcacctcag

SEQ ID NO: 75866 - DNA, 20 bp, Artificial Sequence
  Description of Artificial Sequence: Synthetic oligonucleotide
  Target: SCNA; (+) strand; PAM type: YTN; PAM sequence: CTC
tcacctcagctaccagacta

SEQ ID NO: 75867 - DNA, 20 bp, Artificial Sequence
  Description of Artificial Sequence: Synthetic oligonucleotide
  Target: SCNA; (+) strand; PAM type: YTN; PAM sequence: CTC
acctcagctaccagactagc

SEQ ID NO: 75868 - DNA, 20 bp, Artificial Sequence
  Description of Artificial Sequence: Synthetic oligonucleotide
  Target: SCNA; (+) strand; PAM type: YTN; PAM sequence: CTC
agctaccagactagctgaga

SEQ ID NO: 75869 - DNA, 20 bp, Artificial Sequence
  Description of Artificial Sequence: Synthetic oligonucleotide
  Target: SCNA; (+) strand; PAM type: YTN; PAM sequence: CTA
ccagactagctgagactacg

SEQ ID NO: 75870 - DNA, 20 bp, Artificial Sequence
  Description of Artificial Sequence: Synthetic oligonucleotide
  Target: SCNA; (+) strand; PAM type: YTN; PAM sequence: CTA
gctgagactacgggggtgtg

SEQ ID NO: 75871 - DNA, 20 bp, Artificial Sequence
  Description of Artificial Sequence: Synthetic oligonucleotide
  Target: SCNA; (+) strand; PAM type: YTN; PAM sequence: CTG
agactacgggggtgtgccac

SEQ ID NO: 75872 - DNA, 20 bp, Artificial Sequence
  Description of Artificial Sequence: Synthetic oligonucleotide
  Target: SCNA; (+) strand; PAM type: YTN; PAM sequence: CTA
cgggggtgtgccaccatgcc

SEQ ID NO: 75873 - DNA, 20 bp, Artificial Sequence
  Description of Artificial Sequence: Synthetic oligonucleotide
  Target: SCNA; (+) strand; PAM type: YTN; PAM sequence: CTA
attttcgtatatattttttt

SEQ ID NO: 75874 - DNA, 20 bp, Artificial Sequence
  Description of Artificial Sequence: Synthetic oligonucleotide
  Target: SCNA; (+) strand; PAM type: YTN; PAM sequence: TTT
tcgtatatattttttttttg

SEQ ID NO: 75875 - DNA, 20 bp, Artificial Sequence
  Description of Artificial Sequence: Synthetic oligonucleotide
  Target: SCNA; (+) strand; PAM type: YTN; PAM sequence: TTT
cgtatatattttttttttgg

SEQ ID NO: 75876 - DNA, 20 bp, Artificial Sequence
  Description of Artificial Sequence: Synthetic oligonucleotide
  Target: SCNA; (+) strand; PAM type: YTN; PAM sequence: TTC
gtatatattttttttttggt

SEQ ID NO: 75877 - DNA, 20 bp, Artificial Sequence
  Description of Artificial Sequence: Synthetic oligonucleotide
  Target: SCNA; (+) strand; PAM type: YTN; PAM sequence: TTT
tttttttggtctaactgtgt

SEQ ID NO: 75878 - DNA, 20 bp, Artificial Sequence
  Description of Artificial Sequence: Synthetic oligonucleotide
  Target: SCNA; (+) strand; PAM type: YTN; PAM sequence: TTT
ttttttggtctaactgtgtt

SEQ ID NO: 75879 - DNA, 20 bp, Artificial Sequence
  Description of Artificial Sequence: Synthetic oligonucleotide
  Target: SCNA; (+) strand; PAM type: YTN; PAM sequence: TTT
tttttggtctaactgtgttg

SEQ ID NO: 75880 - DNA, 20 bp, Artificial Sequence
  Description of Artificial Sequence: Synthetic oligonucleotide
  Target: SCNA; (+) strand; PAM type: YTN; PAM sequence: TTT
ttttggtctaactgtgttgc

SEQ ID NO: 75881 - DNA, 20 bp, Artificial Sequence
  Description of Artificial Sequence: Synthetic oligonucleotide
  Target: SCNA; (+) strand; PAM type: YTN; PAM sequence: TTT
tttggtctaactgtgttgcc

SEQ ID NO: 75882 - DNA, 20 bp, Artificial Sequence
  Description of Artificial Sequence: Synthetic oligonucleotide
  Target: SCNA; (+) strand; PAM type: YTN; PAM sequence: TTT
ttggtctaactgtgttgccc

SEQ ID NO: 75883 - DNA, 20 bp, Artificial Sequence
  Description of Artificial Sequence: Synthetic oligonucleotide
  Target: SCNA; (+) strand; PAM type: YTN; PAM sequence: TTT
tggtctaactgtgttgccca

SEQ ID NO: 75884 - DNA, 20 bp, Artificial Sequence
  Description of Artificial Sequence: Synthetic oligonucleotide
  Target: SCNA; (+) strand; PAM type: YTN; PAM sequence: TTT
ggtctaactgtgttgcccag

SEQ ID NO: 75885 - DNA, 20 bp, Artificial Sequence
  Description of Artificial Sequence: Synthetic oligonucleotide
  Target: SCNA; (+) strand; PAM type: YTN; PAM sequence: TTG
gtctaactgtgttgcccagg

SEQ ID NO: 75886 - DNA, 20 bp, Artificial Sequence
  Description of Artificial Sequence: Synthetic oligonucleotide
  Target: SCNA; (+) strand; PAM type: YTN; PAM sequence: CTA
actgtgttgcccaggctggt

SEQ ID NO: 75887 - DNA, 20 bp, Artificial Sequence
  Description of Artificial Sequence: Synthetic oligonucleotide
  Target: SCNA; (+) strand; PAM type: YTN; PAM sequence: CTG
tgttgcccaggctggtcatg

SEQ ID NO: 75888 - DNA, 20 bp, Artificial Sequence
  Description of Artificial Sequence: Synthetic oligonucleotide
  Target: SCNA; (+) strand; PAM type: YTN; PAM sequence: TTG
cccaggctggtcatgaactc

SEQ ID NO: 75889 - DNA, 20 bp, Artificial Sequence
  Description of Artificial Sequence: Synthetic oligonucleotide
  Target: SCNA; (+) strand; PAM type: YTN; PAM sequence: CTG
gtcatgaactcctaggctca

SEQ ID NO: 75890 - DNA, 20 bp, Artificial Sequence
  Description of Artificial Sequence: Synthetic oligonucleotide
  Target: SCNA; (+) strand; PAM type: YTN; PAM sequence: CTC
ctaggctcaagtgatctgtc

SEQ ID NO: 75891 - DNA, 20 bp, Artificial Sequence
  Description of Artificial Sequence: Synthetic oligonucleotide
  Target: SCNA; (+) strand; PAM type: YTN; PAM sequence: CTA
ggctcaagtgatctgtccac

SEQ ID NO: 75892 - DNA, 20 bp, Artificial Sequence
  Description of Artificial Sequence: Synthetic oligonucleotide
  Target: SCNA; (+) strand; PAM type: YTN; PAM sequence: CTC
aagtgatctgtccaccttag

SEQ ID NO: 75893 - DNA, 20 bp, Artificial Sequence
  Description of Artificial Sequence: Synthetic oligonucleotide
  Target: SCNA; (+) strand; PAM type: YTN; PAM sequence: CTG
tccaccttagcctcccaaag

SEQ ID NO: 75894 - DNA, 20 bp, Artificial Sequence
  Description of Artificial Sequence: Synthetic oligonucleotide
  Target: SCNA; (+) strand; PAM type: YTN; PAM sequence: CTT
agcctcccaaagtgtgggat

SEQ ID NO: 75895 - DNA, 20 bp, Artificial Sequence
  Description of Artificial Sequence: Synthetic oligonucleotide
  Target: SCNA; (+) strand; PAM type: YTN; PAM sequence: TTA
gcctcccaaagtgtgggatt

SEQ ID NO: 75896 - DNA, 20 bp, Artificial Sequence
  Description of Artificial Sequence: Synthetic oligonucleotide
  Target: SCNA; (+) strand; PAM type: YTN; PAM sequence: CTC
ccaaagtgtgggattacagg

SEQ ID NO: 75897 - DNA, 20 bp, Artificial Sequence
  Description of Artificial Sequence: Synthetic oligonucleotide
  Target: SCNA; (+) strand; PAM type: YTN; PAM sequence: TTA
caggcatgagccaccatgcc

SEQ ID NO: 75898 - DNA, 20 bp, Artificial Sequence
  Description of Artificial Sequence: Synthetic oligonucleotide
  Target: SCNA; (+) strand; PAM type: YTN; PAM sequence: TTT
gcttttaaatgagaaagaca

SEQ ID NO: 75899 - DNA, 20 bp, Artificial Sequence
  Description of Artificial Sequence: Synthetic oligonucleotide
  Target: SCNA; (+) strand; PAM type: YTN; PAM sequence: TTG
cttttaaatgagaaagacac

SEQ ID NO: 75900 - DNA, 20 bp, Artificial Sequence
  Description of Artificial Sequence: Synthetic oligonucleotide
  Target: SCNA; (+) strand; PAM type: YTN; PAM sequence: CTT
ttaaatgagaaagacacaat

SEQ ID NO: 75901 - DNA, 20 bp, Artificial Sequence
  Description of Artificial Sequence: Synthetic oligonucleotide
  Target: SCNA; (+) strand; PAM type: YTN; PAM sequence: TTT
taaatgagaaagacacaata

SEQ ID NO: 75902 - DNA, 20 bp, Artificial Sequence
  Description of Artificial Sequence: Synthetic oligonucleotide
  Target: SCNA; (+) strand; PAM type: YTN; PAM sequence: TTT
aaatgagaaagacacaatac

SEQ ID NO: 75903 - DNA, 20 bp, Artificial Sequence
  Description of Artificial Sequence: Synthetic oligonucleotide
  Target: SCNA; (+) strand; PAM type: YTN; PAM sequence: TTA
aatgagaaagacacaatacc

SEQ ID NO: 75904 - DNA, 20 bp, Artificial Sequence
  Description of Artificial Sequence: Synthetic oligonucleotide
  Target: SCNA; (+) strand; PAM type: YTN; PAM sequence: CTG
ccttcggaaagttccctgtc

SEQ ID NO: 75905 - DNA, 20 bp, Artificial Sequence
  Description of Artificial Sequence: Synthetic oligonucleotide
  Target: SCNA; (+) strand; PAM type: YTN; PAM sequence: CTT
cggaaagttccctgtcaaat

SEQ ID NO: 75906 - DNA, 20 bp, Artificial Sequence
  Description of Artificial Sequence: Synthetic oligonucleotide
  Target: SCNA; (+) strand; PAM type: YTN; PAM sequence: TTC
ggaaagttccctgtcaaatt

SEQ ID NO: 75907 - DNA, 20 bp, Artificial Sequence
  Description of Artificial Sequence: Synthetic oligonucleotide
  Target: SCNA; (+) strand; PAM type: YTN; PAM sequence: TTC
cctgtcaaattttagaaata

SEQ ID NO: 75908 - DNA, 20 bp, Artificial Sequence
  Description of Artificial Sequence: Synthetic oligonucleotide
  Target: SCNA; (+) strand; PAM type: YTN; PAM sequence: CTG
tcaaattttagaaataaata

SEQ ID NO: 75909 - DNA, 20 bp, Artificial Sequence
  Description of Artificial Sequence: Synthetic oligonucleotide
  Target: SCNA; (+) strand; PAM type: YTN; PAM sequence: TTT
tagaaataaataattaaaca

SEQ ID NO: 75910 - DNA, 20 bp, Artificial Sequence
  Description of Artificial Sequence: Synthetic oligonucleotide
  Target: SCNA; (+) strand; PAM type: YTN; PAM sequence: TTT
agaaataaataattaaacaa

SEQ ID NO: 75911 - DNA, 20 bp, Artificial Sequence
  Description of Artificial Sequence: Synthetic oligonucleotide
  Target: SCNA; (+) strand; PAM type: YTN; PAM sequence: TTA
gaaataaataattaaacaaa

SEQ ID NO: 75912 - DNA, 20 bp, Artificial Sequence
  Description of Artificial Sequence: Synthetic oligonucleotide
  Target: SCNA; (+) strand; PAM type: YTN; PAM sequence: TTA
aacaaagtttataggcataa

SEQ ID NO: 75913 - DNA, 20 bp, Artificial Sequence
  Description of Artificial Sequence: Synthetic oligonucleotide
  Target: SCNA; (+) strand; PAM type: YTN; PAM sequence: TTT
ataggcataataagtcataa

SEQ ID NO: 75914 - DNA, 20 bp, Artificial Sequence
  Description of Artificial Sequence: Synthetic oligonucleotide
  Target: SCNA; (+) strand; PAM type: YTN; PAM sequence: TTA
taggcataataagtcataat

SEQ ID NO: 75915 - DNA, 20 bp, Artificial Sequence
  Description of Artificial Sequence: Synthetic oligonucleotide
  Target: SCNA; (+) strand; PAM type: YTN; PAM sequence: TTC
ttgaaaagatatgcagaggg

SEQ ID NO: 75916 - DNA, 20 bp, Artificial Sequence
  Description of Artificial Sequence: Synthetic oligonucleotide
  Target: SCNA; (+) strand; PAM type: YTN; PAM sequence: CTT
gaaaagatatgcagagggtt

SEQ ID NO: 75917 - DNA, 20 bp, Artificial Sequence
  Description of Artificial Sequence: Synthetic oligonucleotide
  Target: SCNA; (+) strand; PAM type: YTN; PAM sequence: TTG
aaaagatatgcagagggttc

SEQ ID NO: 75918 - DNA, 20 bp, Artificial Sequence
  Description of Artificial Sequence: Synthetic oligonucleotide
  Target: SCNA; (+) strand; PAM type: YTN; PAM sequence: TTC
caaaggagcaccaaccaacc

SEQ ID NO: 75919 - DNA, 20 bp, Artificial Sequence
  Description of Artificial Sequence: Synthetic oligonucleotide
  Target: SCNA; (+) strand; PAM type: YTN; PAM sequence: CTG
agctagaacacagagccagg

SEQ ID NO: 75920 - DNA, 20 bp, Artificial Sequence
  Description of Artificial Sequence: Synthetic oligonucleotide
  Target: SCNA; (+) strand; PAM type: YTN; PAM sequence: CTA
gaacacagagccaggtcatg

SEQ ID NO: 75921 - DNA, 20 bp, Artificial Sequence
  Description of Artificial Sequence: Synthetic oligonucleotide
  Target: SCNA; (+) strand; PAM type: YTN; PAM sequence: CTG
aaggcaggaacaactctgtc

SEQ ID NO: 75922 - DNA, 20 bp, Artificial Sequence
  Description of Artificial Sequence: Synthetic oligonucleotide
  Target: SCNA; (+) strand; PAM type: YTN; PAM sequence: CTC
tgtcagctgtgagacatgaa

SEQ ID NO: 75923 - DNA, 20 bp, Artificial Sequence
  Description of Artificial Sequence: Synthetic oligonucleotide
  Target: SCNA; (+) strand; PAM type: YTN; PAM sequence: CTG
tcagctgtgagacatgaatt

SEQ ID NO: 75924 - DNA, 20 bp, Artificial Sequence
  Description of Artificial Sequence: Synthetic oligonucleotide
  Target: SCNA; (+) strand; PAM type: YTN; PAM sequence: CTG
tgagacatgaatttggaagg

SEQ ID NO: 75925 - DNA, 20 bp, Artificial Sequence
  Description of Artificial Sequence: Synthetic oligonucleotide
  Target: SCNA; (+) strand; PAM type: YTN; PAM sequence: TTT
ggaaggctgctgggagagaa

SEQ ID NO: 75926 - DNA, 20 bp, Artificial Sequence
  Description of Artificial Sequence: Synthetic oligonucleotide
  Target: SCNA; (+) strand; PAM type: YTN; PAM sequence: TTG
gaaggctgctgggagagaaa

SEQ ID NO: 75927 - DNA, 20 bp, Artificial Sequence
  Description of Artificial Sequence: Synthetic oligonucleotide
  Target: SCNA; (+) strand; PAM type: YTN; PAM sequence: CTG
ctgggagagaaaagcagaga

SEQ ID NO: 75928 - DNA, 20 bp, Artificial Sequence
  Description of Artificial Sequence: Synthetic oligonucleotide
  Target: SCNA; (+) strand; PAM type: YTN; PAM sequence: CTG
ggagagaaaagcagagatta

SEQ ID NO: 75929 - DNA, 20 bp, Artificial Sequence
  Description of Artificial Sequence: Synthetic oligonucleotide
  Target: SCNA; (+) strand; PAM type: YTN; PAM sequence: TTA
gtcgtgcaattatctactta

SEQ ID NO: 75930 - DNA, 20 bp, Artificial Sequence
  Description of Artificial Sequence: Synthetic oligonucleotide
  Target: SCNA; (+) strand; PAM type: YTN; PAM sequence: TTA
tctacttaagatattttggg

SEQ ID NO: 75931 - DNA, 20 bp, Artificial Sequence
  Description of Artificial Sequence: Synthetic oligonucleotide
  Target: SCNA; (+) strand; PAM type: YTN; PAM sequence: CTA
cttaagatattttgggctgg

SEQ ID NO: 75932 - DNA, 20 bp, Artificial Sequence
  Description of Artificial Sequence: Synthetic oligonucleotide
  Target: SCNA; (+) strand; PAM type: YTN; PAM sequence: CTT
aagatattttgggctggaag

SEQ ID NO: 75933 - DNA, 20 bp, Artificial Sequence
  Description of Artificial Sequence: Synthetic oligonucleotide
  Target: SCNA; (+) strand; PAM type: YTN; PAM sequence: TTA
agatattttgggctggaagc

SEQ ID NO: 75934 - DNA, 20 bp, Artificial Sequence
  Description of Artificial Sequence: Synthetic oligonucleotide
  Target: SCNA; (+) strand; PAM type: YTN; PAM sequence: TTT
tgggctggaagcagtggctc

SEQ ID NO: 75935 - DNA, 20 bp, Artificial Sequence
  Description of Artificial Sequence: Synthetic oligonucleotide
  Target: SCNA; (+) strand; PAM type: YTN; PAM sequence: TTT
gggctggaagcagtggctca

SEQ ID NO: 75936 - DNA, 20 bp, Artificial Sequence
  Description of Artificial Sequence: Synthetic oligonucleotide
  Target: SCNA; (+) strand; PAM type: YTN; PAM sequence: TTG
ggctggaagcagtggctcac

SEQ ID NO: 75937 - DNA, 20 bp, Artificial Sequence
  Description of Artificial Sequence: Synthetic oligonucleotide
  Target: SCNA; (+) strand; PAM type: YTN; PAM sequence: CTG
gaagcagtggctcacacctg

SEQ ID NO: 75938 - DNA, 20 bp, Artificial Sequence
  Description of Artificial Sequence: Synthetic oligonucleotide
  Target: SCNA; (+) strand; PAM type: YTN; PAM sequence: CTC
acacctgtaattccagcact

SEQ ID NO: 75939 - DNA, 20 bp, Artificial Sequence
  Description of Artificial Sequence: Synthetic oligonucleotide
  Target: SCNA; (+) strand; PAM type: YTN; PAM sequence: CTG
taattccagcactttgggag

SEQ ID NO: 75940 - DNA, 20 bp, Artificial Sequence
  Description of Artificial Sequence: Synthetic oligonucleotide
  Target: SCNA; (+) strand; PAM type: YTN; PAM sequence: TTC
cagcactttgggaggctgac

SEQ ID NO: 75941 - DNA, 20 bp, Artificial Sequence
  Description of Artificial Sequence: Synthetic oligonucleotide
  Target: SCNA; (+) strand; PAM type: YTN; PAM sequence: CTT
tgggaggctgacgcgggtgg

SEQ ID NO: 75942 - DNA, 20 bp, Artificial Sequence
  Description of Artificial Sequence: Synthetic oligonucleotide
  Target: SCNA; (+) strand; PAM type: YTN; PAM sequence: TTT
gggaggctgacgcgggtgga

SEQ ID NO: 75943 - DNA, 20 bp, Artificial Sequence
  Description of Artificial Sequence: Synthetic oligonucleotide
  Target: SCNA; (+) strand; PAM type: YTN; PAM sequence: TTG
ggaggctgacgcgggtggat

SEQ ID NO: 75944 - DNA, 20 bp, Artificial Sequence
  Description of Artificial Sequence: Synthetic oligonucleotide
  Target: SCNA; (+) strand; PAM type: YTN; PAM sequence: CTG
acgcgggtggatcacctgag

SEQ ID NO: 75945 - DNA, 20 bp, Artificial Sequence
  Description of Artificial Sequence: Synthetic oligonucleotide
  Target: SCNA; (+) strand; PAM type: YTN; PAM sequence: CTG
aggtcaggagttcgagatca

SEQ ID NO: 75946 - DNA, 20 bp, Artificial Sequence
  Description of Artificial Sequence: Synthetic oligonucleotide
  Target: SCNA; (+) strand; PAM type: YTN; PAM sequence: TTC
gagatcagcctggccaacat

SEQ ID NO: 75947 - DNA, 20 bp, Artificial Sequence
  Description of Artificial Sequence: Synthetic oligonucleotide
  Target: SCNA; (+) strand; PAM type: YTN; PAM sequence: CTG
gccaacatggcgaaacccca

SEQ ID NO: 75948 - DNA, 20 bp, Artificial Sequence
  Description of Artificial Sequence: Synthetic oligonucleotide
  Target: SCNA; (+) strand; PAM type: YTN; PAM sequence: CTC
tactgaaaatacaaaaatta

SEQ ID NO: 75949 - DNA, 20 bp, Artificial Sequence
  Description of Artificial Sequence: Synthetic oligonucleotide
  Target: SCNA; (+) strand; PAM type: YTN; PAM sequence: CTA
ctgaaaatacaaaaattaac

SEQ ID NO: 75950 - DNA, 20 bp, Artificial Sequence
  Description of Artificial Sequence: Synthetic oligonucleotide
  Target: SCNA; (+) strand; PAM type: YTN; PAM sequence: CTG
aaaatacaaaaattaaccag

SEQ ID NO: 75951 - DNA, 20 bp, Artificial Sequence
  Description of Artificial Sequence: Synthetic oligonucleotide
  Target: SCNA; (+) strand; PAM type: YTN; PAM sequence: TTA
accaggcgtggtggcagatg

SEQ ID NO: 75952 - DNA, 20 bp, Artificial Sequence
  Description of Artificial Sequence: Synthetic oligonucleotide
  Target: SCNA; (+) strand; PAM type: YTN; PAM sequence: CTG
taatcccagctactcaggag

SEQ ID NO: 75953 - DNA, 20 bp, Artificial Sequence
  Description of Artificial Sequence: Synthetic oligonucleotide
  Target: SCNA; (+) strand; PAM type: YTN; PAM sequence: CTA
ctcaggaggctgaactagga

SEQ ID NO: 75954 - DNA, 20 bp, Artificial Sequence
  Description of Artificial Sequence: Synthetic oligonucleotide
  Target: SCNA; (+) strand; PAM type: YTN; PAM sequence: CTC
aggaggctgaactaggagaa

SEQ ID NO: 75955 - DNA, 20 bp, Artificial Sequence
  Description of Artificial Sequence: Synthetic oligonucleotide
  Target: SCNA; (+) strand; PAM type: YTN; PAM sequence: CTG
aactaggagaatcgcttgaa

SEQ ID NO: 75956 - DNA, 20 bp, Artificial Sequence
  Description of Artificial Sequence: Synthetic oligonucleotide
  Target: SCNA; (+) strand; PAM type: YTN; PAM sequence: CTA
ggagaatcgcttgaacctgg

SEQ ID NO: 75957 - DNA, 20 bp, Artificial Sequence
  Description of Artificial Sequence: Synthetic oligonucleotide
  Target: SCNA; (+) strand; PAM type: YTN; PAM sequence: CTT
gaacctgggtggcagaggct

SEQ ID NO: 75958 - DNA, 20 bp, Artificial Sequence
  Description of Artificial Sequence: Synthetic oligonucleotide
  Target: SCNA; (+) strand; PAM type: YTN; PAM sequence: TTG
aacctgggtggcagaggctg

SEQ ID NO: 75959 - DNA, 20 bp, Artificial Sequence
  Description of Artificial Sequence: Synthetic oligonucleotide
  Target: SCNA; (+) strand; PAM type: YTN; PAM sequence: CTG
ggtggcagaggctgctgtga

SEQ ID NO: 75960 - DNA, 20 bp, Artificial Sequence
  Description of Artificial Sequence: Synthetic oligonucleotide
  Target: SCNA; (+) strand; PAM type: YTN; PAM sequence: CTG
ctgtgagctgagattgcacc

SEQ ID NO: 75961 - DNA, 20 bp, Artificial Sequence
  Description of Artificial Sequence: Synthetic oligonucleotide
  Target: SCNA; (+) strand; PAM type: YTN; PAM sequence: CTG
tgagctgagattgcaccacg

SEQ ID NO: 75962 - DNA, 20 bp, Artificial Sequence
  Description of Artificial Sequence: Synthetic oligonucleotide
  Target: SCNA; (+) strand; PAM type: YTN; PAM sequence: CTG
agattgcaccacggcactcc

SEQ ID NO: 75963 - DNA, 20 bp, Artificial Sequence
  Description of Artificial Sequence: Synthetic oligonucleotide
  Target: SCNA; (+) strand; PAM type: YTN; PAM sequence: TTG
caccacggcactccagcctg

SEQ ID NO: 75964 - DNA, 20 bp, Artificial Sequence
  Description of Artificial Sequence: Synthetic oligonucleotide
  Target: SCNA; (+) strand; PAM type: YTN; PAM sequence: CTC
cagcctgggcaacagagcga

SEQ ID NO: 75965 - DNA, 20 bp, Artificial Sequence
  Description of Artificial Sequence: Synthetic oligonucleotide
  Target: SCNA; (+) strand; PAM type: YTN; PAM sequence: CTG
ggcaacagagcgagactcca

SEQ ID NO: 75966 - DNA, 20 bp, Artificial Sequence
  Description of Artificial Sequence: Synthetic oligonucleotide
  Target: SCNA; (+) strand; PAM type: YTN; PAM sequence: CTC
catctcaaaaaaaaaaatat

SEQ ID NO: 75967 - DNA, 20 bp, Artificial Sequence
  Description of Artificial Sequence: Synthetic oligonucleotide
  Target: SCNA; (+) strand; PAM type: YTN; PAM sequence: CTC
aaaaaaaaaaatatatatat

SEQ ID NO: 75968 - DNA, 20 bp, Artificial Sequence
  Description of Artificial Sequence: Synthetic oligonucleotide
  Target: SCNA; (+) strand; PAM type: YTN; PAM sequence: TTT
tgaagtctagagatgaattc

SEQ ID NO: 75969 - DNA, 20 bp, Artificial Sequence
  Description of Artificial Sequence: Synthetic oligonucleotide
  Target: SCNA; (+) strand; PAM type: YTN; PAM sequence: TTT
gaagtctagagatgaattcc

SEQ ID NO: 75970 - DNA, 20 bp, Artificial Sequence
  Description of Artificial Sequence: Synthetic oligonucleotide
  Target: SCNA; (+) strand; PAM type: YTN; PAM sequence: TTG
aagtctagagatgaattcca

SEQ ID NO: 75971 - DNA, 20 bp, Artificial Sequence
  Description of Artificial Sequence: Synthetic oligonucleotide
  Target: SCNA; (+) strand; PAM type: YTN; PAM sequence: CTA
gagatgaattccagaaataa

SEQ ID NO: 75972 - DNA, 20 bp, Artificial Sequence
  Description of Artificial Sequence: Synthetic oligonucleotide
  Target: SCNA; (+) strand; PAM type: YTN; PAM sequence: TTC
cagaaataaggtatacagaa

SEQ ID NO: 75973 - DNA, 20 bp, Artificial Sequence
  Description of Artificial Sequence: Synthetic oligonucleotide
  Target: SCNA; (+) strand; PAM type: YTN; PAM sequence: CTG
taggactttgtgattgacta

SEQ ID NO: 75974 - DNA, 20 bp, Artificial Sequence
  Description of Artificial Sequence: Synthetic oligonucleotide
  Target: SCNA; (+) strand; PAM type: YTN; PAM sequence: CTT
tgtgattgactagaactgag

SEQ ID NO: 75975 - DNA, 20 bp, Artificial Sequence
  Description of Artificial Sequence: Synthetic oligonucleotide
  Target: SCNA; (+) strand; PAM type: YTN; PAM sequence: TTT
gtgattgactagaactgagg

SEQ ID NO: 75976 - DNA, 20 bp, Artificial Sequence
  Description of Artificial Sequence: Synthetic oligonucleotide
  Target: SCNA; (+) strand; PAM type: YTN; PAM sequence: TTG
tgattgactagaactgaggg

SEQ ID NO: 75977 - DNA, 20 bp, Artificial Sequence
  Description of Artificial Sequence: Synthetic oligonucleotide
  Target: SCNA; (+) strand; PAM type: YTN; PAM sequence: TTG
actagaactgagggacaagg

SEQ ID NO: 75978 - DNA, 20 bp, Artificial Sequence
  Description of Artificial Sequence: Synthetic oligonucleotide
  Target: SCNA; (+) strand; PAM type: YTN; PAM sequence: CTA
gaactgagggacaagggaga

SEQ ID NO: 75979 - DNA, 20 bp, Artificial Sequence
  Description of Artificial Sequence: Synthetic oligonucleotide
  Target: SCNA; (+) strand; PAM type: YTN; PAM sequence: CTG
agggacaagggagagggaaa

SEQ ID NO: 75980 - DNA, 20 bp, Artificial Sequence
  Description of Artificial Sequence: Synthetic oligonucleotide
  Target: SCNA; (+) strand; PAM type: YTN; PAM sequence: TTG
aagatgatggaaacaataga

SEQ ID NO: 75981 - DNA, 20 bp, Artificial Sequence
  Description of Artificial Sequence: Synthetic oligonucleotide
  Target: SCNA; (+) strand; PAM type: YTN; PAM sequence: TTA
caggaagaggatcaaattta

SEQ ID NO: 75982 - DNA, 20 bp, Artificial Sequence
  Description of Artificial Sequence: Synthetic oligonucleotide
  Target: SCNA; (+) strand; PAM type: YTN; PAM sequence: TTT
agggggaagaagatcagatc

SEQ ID NO: 75983 - DNA, 20 bp, Artificial Sequence
  Description of Artificial Sequence: Synthetic oligonucleotide
  Target: SCNA; (+) strand; PAM type: YTN; PAM sequence: TTA
gggggaagaagatcagatca

SEQ ID NO: 75984 - DNA, 20 bp, Artificial Sequence
  Description of Artificial Sequence: Synthetic oligonucleotide
  Target: SCNA; (+) strand; PAM type: YTN; PAM sequence: CTT
aattccacatgttctgaaag

SEQ ID NO: 75985 - DNA, 20 bp, Artificial Sequence
  Description of Artificial Sequence: Synthetic oligonucleotide
  Target: SCNA; (+) strand; PAM type: YTN; PAM sequence: TTA
attccacatgttctgaaagt

SEQ ID NO: 75986 - DNA, 20 bp, Artificial Sequence
  Description of Artificial Sequence: Synthetic oligonucleotide
  Target: SCNA; (+) strand; PAM type: YTN; PAM sequence: TTC
cacatgttctgaaagttaaa

SEQ ID NO: 75987 - DNA, 20 bp, Artificial Sequence
  Description of Artificial Sequence: Synthetic oligonucleotide
  Target: SCNA; (+) strand; PAM type: YTN; PAM sequence: TTC
tgaaagttaaatatctcctc

SEQ ID NO: 75988 - DNA, 20 bp, Artificial Sequence
  Description of Artificial Sequence: Synthetic oligonucleotide
  Target: SCNA; (+) strand; PAM type: YTN; PAM sequence: CTG
aaagttaaatatctcctcta

SEQ ID NO: 75989 - DNA, 20 bp, Artificial Sequence
  Description of Artificial Sequence: Synthetic oligonucleotide
  Target: SCNA; (+) strand; PAM type: YTN; PAM sequence: TTA
aatatctcctctagccaaaa

SEQ ID NO: 75990 - DNA, 20 bp, Artificial Sequence
  Description of Artificial Sequence: Synthetic oligonucleotide
  Target: SCNA; (+) strand; PAM type: YTN; PAM sequence: CTC
ctctagccaaaagacccttc

SEQ ID NO: 75991 - DNA, 20 bp, Artificial Sequence
  Description of Artificial Sequence: Synthetic oligonucleotide
  Target: SCNA; (+) strand; PAM type: YTN; PAM sequence: CTC
tagccaaaagacccttccta

SEQ ID NO: 75992 - DNA, 20 bp, Artificial Sequence
  Description of Artificial Sequence: Synthetic oligonucleotide
  Target: SCNA; (+) strand; PAM type: YTN; PAM sequence: CTA
gccaaaagacccttcctatt

SEQ ID NO: 75993 - DNA, 20 bp, Artificial Sequence
  Description of Artificial Sequence: Synthetic oligonucleotide
  Target: SCNA; (+) strand; PAM type: YTN; PAM sequence: CTT
cctattttacttctctggac

SEQ ID NO: 75994 - DNA, 20 bp, Artificial Sequence
  Description of Artificial Sequence: Synthetic oligonucleotide
  Target: SCNA; (+) strand; PAM type: YTN; PAM sequence: TTC
ctattttacttctctggacc

SEQ ID NO: 75995 - DNA, 20 bp, Artificial Sequence
  Description of Artificial Sequence: Synthetic oligonucleotide
  Target: SCNA; (+) strand; PAM type: YTN; PAM sequence: CTA
ttttacttctctggacctct

SEQ ID NO: 75996 - DNA, 20 bp, Artificial Sequence
  Description of Artificial Sequence: Synthetic oligonucleotide
  Target: SCNA; (+) strand; PAM type: YTN; PAM sequence: TTT
tacttctctggacctcttaa

SEQ ID NO: 75997 - DNA, 20 bp, Artificial Sequence
  Description of Artificial Sequence: Synthetic oligonucleotide
  Target: SCNA; (+) strand; PAM type: YTN; PAM sequence: TTT
acttctctggacctcttaat

SEQ ID NO: 75998 - DNA, 20 bp, Artificial Sequence
  Description of Artificial Sequence: Synthetic oligonucleotide
  Target: SCNA; (+) strand; PAM type: YTN; PAM sequence: TTA
cttctctggacctcttaatg

SEQ ID NO: 75999 - DNA, 20 bp, Artificial Sequence
  Description of Artificial Sequence: Synthetic oligonucleotide
  Target: SCNA; (+) strand; PAM type: YTN; PAM sequence: CTT
ctctggacctcttaatgttt

SEQ ID NO: 76000 - DNA, 20 bp, Artificial Sequence
  Description of Artificial Sequence: Synthetic oligonucleotide
  Target: SCNA; (+) strand; PAM type: YTN; PAM sequence: TTC
tctggacctcttaatgtttc

SEQ ID NO: 76001 - DNA, 20 bp, Artificial Sequence
  Description of Artificial Sequence: Synthetic oligonucleotide
  Target: SCNA; (+) strand; PAM type: YTN; PAM sequence: CTC
tggacctcttaatgtttctt

SEQ ID NO: 76002 - DNA, 20 bp, Artificial Sequence
  Description of Artificial Sequence: Synthetic oligonucleotide
  Target: SCNA; (+) strand; PAM type: YTN; PAM sequence: CTG
gacctcttaatgtttctttg

SEQ ID NO: 76003 - DNA, 20 bp, Artificial Sequence
  Description of Artificial Sequence: Synthetic oligonucleotide
  Target: SCNA; (+) strand; PAM type: YTN; PAM sequence: CTC
ttaatgtttctttgatgttt

SEQ ID NO: 76004 - DNA, 20 bp, Artificial Sequence
  Description of Artificial Sequence: Synthetic oligonucleotide
  Target: SCNA; (+) strand; PAM type: YTN; PAM sequence: CTT
aatgtttctttgatgtttat

SEQ ID NO: 76005 - DNA, 20 bp, Artificial Sequence
  Description of Artificial Sequence: Synthetic oligonucleotide
  Target: SCNA; (+) strand; PAM type: YTN; PAM sequence: TTA
atgtttctttgatgtttatt

SEQ ID NO: 76006 - DNA, 20 bp, Artificial Sequence
  Description of Artificial Sequence: Synthetic oligonucleotide
  Target: SCNA; (+) strand; PAM type: YTN; PAM sequence: TTT
ctttgatgtttattcccctg

SEQ ID NO: 76007 - DNA, 20 bp, Artificial Sequence
  Description of Artificial Sequence: Synthetic oligonucleotide
  Target: SCNA; (+) strand; PAM type: YTN; PAM sequence: TTC
tttgatgtttattcccctgc

SEQ ID NO: 76008 - DNA, 20 bp, Artificial Sequence
  Description of Artificial Sequence: Synthetic oligonucleotide
  Target: SCNA; (+) strand; PAM type: YTN; PAM sequence: CTT
tgatgtttattcccctgcac

SEQ ID NO: 76009 - DNA, 20 bp, Artificial Sequence
  Description of Artificial Sequence: Synthetic oligonucleotide
  Target: SCNA; (+) strand; PAM type: YTN; PAM sequence: TTT
gatgtttattcccctgcaca

SEQ ID NO: 76010 - DNA, 20 bp, Artificial Sequence
  Description of Artificial Sequence: Synthetic oligonucleotide
  Target: SCNA; (+) strand; PAM type: YTN; PAM sequence: TTG
atgtttattcccctgcacaa

SEQ ID NO: 76011 - DNA, 20 bp, Artificial Sequence
  Description of Artificial Sequence: Synthetic oligonucleotide
  Target: SCNA; (+) strand; PAM type: YTN; PAM sequence: TTT
attcccctgcacaaataatt

SEQ ID NO: 76012 - DNA, 20 bp, Artificial Sequence
  Description of Artificial Sequence: Synthetic oligonucleotide
  Target: SCNA; (+) strand; PAM type: YTN; PAM sequence: TTA
ttcccctgcacaaataattt

SEQ ID NO: 76013 - DNA, 20 bp, Artificial Sequence
  Description of Artificial Sequence: Synthetic oligonucleotide
  Target: SCNA; (+) strand; PAM type: YTN; PAM sequence: TTC
ccctgcacaaataatttaac

SEQ ID NO: 76014 - DNA, 20 bp, Artificial Sequence
  Description of Artificial Sequence: Synthetic oligonucleotide
  Target: SCNA; (+) strand; PAM type: YTN; PAM sequence: CTG
cacaaataatttaacccctt

SEQ ID NO: 76015 - DNA, 20 bp, Artificial Sequence
  Description of Artificial Sequence: Synthetic oligonucleotide
  Target: SCNA; (+) strand; PAM type: YTN; PAM sequence: TTT
aacccctttacagatccaaa

SEQ ID NO: 76016 - DNA, 20 bp, Artificial Sequence
  Description of Artificial Sequence: Synthetic oligonucleotide
  Target: SCNA; (+) strand; PAM type: YTN; PAM sequence: TTA
acccctttacagatccaaaa

SEQ ID NO: 76017 - DNA, 20 bp, Artificial Sequence
  Description of Artificial Sequence: Synthetic oligonucleotide
  Target: SCNA; (+) strand; PAM type: YTN; PAM sequence: CTT
tacagatccaaaattttata

SEQ ID NO: 76018 - DNA, 20 bp, Artificial Sequence
  Description of Artificial Sequence: Synthetic oligonucleotide
  Target: SCNA; (+) strand; PAM type: YTN; PAM sequence: TTT
acagatccaaaattttatag

SEQ ID NO: 76019 - DNA, 20 bp, Artificial Sequence
  Description of Artificial Sequence: Synthetic oligonucleotide
  Target: SCNA; (+) strand; PAM type: YTN; PAM sequence: TTA
cagatccaaaattttatagt

SEQ ID NO: 76020 - DNA, 20 bp, Artificial Sequence
  Description of Artificial Sequence: Synthetic oligonucleotide
  Target: SCNA; (+) strand; PAM type: YTN; PAM sequence: TTT
tatagtaggcaaatattgta

SEQ ID NO: 76021 - DNA, 20 bp, Artificial Sequence
  Description of Artificial Sequence: Synthetic oligonucleotide
  Target: SCNA; (+) strand; PAM type: YTN; PAM sequence: TTT
atagtaggcaaatattgtaa

SEQ ID NO: 76022 - DNA, 20 bp, Artificial Sequence
  Description of Artificial Sequence: Synthetic oligonucleotide
  Target: SCNA; (+) strand; PAM type: YTN; PAM sequence: TTA
tagtaggcaaatattgtaac

SEQ ID NO: 76023 - DNA, 20 bp, Artificial Sequence
  Description of Artificial Sequence: Synthetic oligonucleotide
  Target: SCNA; (+) strand; PAM type: YTN; PAM sequence: TTG
taacccccttgaaaatgtat

SEQ ID NO: 76024 - DNA, 20 bp, Artificial Sequence
  Description of Artificial Sequence: Synthetic oligonucleotide
  Target: SCNA; (+) strand; PAM type: YTN; PAM sequence: CTT
gaaaatgtatgttatgaata

SEQ ID NO: 76025 - DNA, 20 bp, Artificial Sequence
  Description of Artificial Sequence: Synthetic oligonucleotide
  Target: SCNA; (+) strand; PAM type: YTN; PAM sequence: TTG
aaaatgtatgttatgaatag

SEQ ID NO: 76026 - DNA, 20 bp, Artificial Sequence
  Description of Artificial Sequence: Synthetic oligonucleotide
  Target: SCNA; (+) strand; PAM type: YTN; PAM sequence: TTA
tgaatagcctttgtaggtga

SEQ ID NO: 76027 - DNA, 20 bp, Artificial Sequence
  Description of Artificial Sequence: Synthetic oligonucleotide
  Target: SCNA; (+) strand; PAM type: YTN; PAM sequence: CTT
tgtaggtgatatttttgcag

SEQ ID NO: 76028 - DNA, 20 bp, Artificial Sequence
  Description of Artificial Sequence: Synthetic oligonucleotide
  Target: SCNA; (+) strand; PAM type: YTN; PAM sequence: TTT
gtaggtgatatttttgcagt

SEQ ID NO: 76029 - DNA, 20 bp, Artificial Sequence
  Description of Artificial Sequence: Synthetic oligonucleotide
  Target: SCNA; (+) strand; PAM type: YTN; PAM sequence: TTG
taggtgatatttttgcagtt

SEQ ID NO: 76030 - DNA, 20 bp, Artificial Sequence
  Description of Artificial Sequence: Synthetic oligonucleotide
  Target: SCNA; (+) strand; PAM type: YTN; PAM sequence: TTT
ttgcagtttggtaacttagg

SEQ ID NO: 76031 - DNA, 20 bp, Artificial Sequence
  Description of Artificial Sequence: Synthetic oligonucleotide
  Target: SCNA; (+) strand; PAM type: YTN; PAM sequence: TTT
tgcagtttggtaacttagga

SEQ ID NO: 76032 - DNA, 20 bp, Artificial Sequence
  Description of Artificial Sequence: Synthetic oligonucleotide
  Target: SCNA; (+) strand; PAM type: YTN; PAM sequence: TTT
gcagtttggtaacttaggac

SEQ ID NO: 76033 - DNA, 20 bp, Artificial Sequence
  Description of Artificial Sequence: Synthetic oligonucleotide
  Target: SCNA; (+) strand; PAM type: YTN; PAM sequence: TTG
cagtttggtaacttaggaca

SEQ ID NO: 76034 - DNA, 20 bp, Artificial Sequence
  Description of Artificial Sequence: Synthetic oligonucleotide
  Target: SCNA; (+) strand; PAM type: YTN; PAM sequence: TTT
ggtaacttaggacaaggtcc

SEQ ID NO: 76035 - DNA, 20 bp, Artificial Sequence
  Description of Artificial Sequence: Synthetic oligonucleotide
  Target: SCNA; (+) strand; PAM type: YTN; PAM sequence: TTG
gtaacttaggacaaggtcca

SEQ ID NO: 76036 - DNA, 20 bp, Artificial Sequence
  Description of Artificial Sequence: Synthetic oligonucleotide
  Target: SCNA; (+) strand; PAM type: YTN; PAM sequence: CTT
aggacaaggtccattttcct

SEQ ID NO: 76037 - DNA, 20 bp, Artificial Sequence
  Description of Artificial Sequence: Synthetic oligonucleotide
  Target: SCNA; (+) strand; PAM type: YTN; PAM sequence: TTA
ggacaaggtccattttcctg

SEQ ID NO: 76038 - DNA, 20 bp, Artificial Sequence
  Description of Artificial Sequence: Synthetic oligonucleotide
  Target: SCNA; (+) strand; PAM type: YTN; PAM sequence: TTT
tcctgtcccttgttaaatgt

SEQ ID NO: 76039 - DNA, 20 bp, Artificial Sequence
  Description of Artificial Sequence: Synthetic oligonucleotide
  Target: SCNA; (+) strand; PAM type: YTN; PAM sequence: TTT
cctgtcccttgttaaatgtc

SEQ ID NO: 76040 - DNA, 20 bp, Artificial Sequence
  Description of Artificial Sequence: Synthetic oligonucleotide
  Target: SCNA; (+) strand; PAM type: YTN; PAM sequence: TTC
ctgtcccttgttaaatgtca

SEQ ID NO: 76041 - DNA, 20 bp, Artificial Sequence
  Description of Artificial Sequence: Synthetic oligonucleotide
  Target: SCNA; (+) strand; PAM type: YTN; PAM sequence: CTG
tcccttgttaaatgtcacaa

SEQ ID NO: 76042 - DNA, 20 bp, Artificial Sequence
  Description of Artificial Sequence: Synthetic oligonucleotide
  Target: SCNA; (+) strand; PAM type: YTN; PAM sequence: CTT
gttaaatgtcacaagacttc

SEQ ID NO: 76043 - DNA, 20 bp, Artificial Sequence
  Description of Artificial Sequence: Synthetic oligonucleotide
  Target: SCNA; (+) strand; PAM type: YTN; PAM sequence: TTG
ttaaatgtcacaagacttca

SEQ ID NO: 76044 - DNA, 20 bp, Artificial Sequence
  Description of Artificial Sequence: Synthetic oligonucleotide
  Target: SCNA; (+) strand; PAM type: YTN; PAM sequence: TTA
aatgtcacaagacttcatct

SEQ ID NO: 76045 - DNA, 20 bp, Artificial Sequence
  Description of Artificial Sequence: Synthetic oligonucleotide
  Target: SCNA; (+) strand; PAM type: YTN; PAM sequence: CTT
catcttctctacctatatat

SEQ ID NO: 76046 - DNA, 20 bp, Artificial Sequence
  Description of Artificial Sequence: Synthetic oligonucleotide
  Target: SCNA; (+) strand; PAM type: YTN; PAM sequence: TTC
atcttctctacctatatatc

SEQ ID NO: 76047 - DNA, 20 bp, Artificial Sequence
  Description of Artificial Sequence: Synthetic oligonucleotide
  Target: SCNA; (+) strand; PAM type: YTN; PAM sequence: CTT
ctctacctatatatcacaaa

SEQ ID NO: 76048 - DNA, 20 bp, Artificial Sequence
  Description of Artificial Sequence: Synthetic oligonucleotide
  Target: SCNA; (+) strand; PAM type: YTN; PAM sequence: TTC
tctacctatatatcacaaag

SEQ ID NO: 76049 - DNA, 20 bp, Artificial Sequence
  Description of Artificial Sequence: Synthetic oligonucleotide
  Target: SCNA; (+) strand; PAM type: YTN; PAM sequence: CTC
tacctatatatcacaaagta

SEQ ID NO: 76050 - DNA, 20 bp, Artificial Sequence
  Description of Artificial Sequence: Synthetic oligonucleotide
  Target: SCNA; (+) strand; PAM type: YTN; PAM sequence: CTA
cctatatatcacaaagtacc

SEQ ID NO: 76051 - DNA, 20 bp, Artificial Sequence
  Description of Artificial Sequence: Synthetic oligonucleotide
  Target: SCNA; (+) strand; PAM type: YTN; PAM sequence: CTA
tatatcacaaagtaccttct

SEQ ID NO: 76052 - DNA, 20 bp, Artificial Sequence
  Description of Artificial Sequence: Synthetic oligonucleotide
  Target: SCNA; (+) strand; PAM type: YTN; PAM sequence: CTT
ctgctctgctgatcacaagg

SEQ ID NO: 76053 - DNA, 20 bp, Artificial Sequence
  Description of Artificial Sequence: Synthetic oligonucleotide
  Target: SCNA; (+) strand; PAM type: YTN; PAM sequence: TTC
tgctctgctgatcacaaggt

SEQ ID NO: 76054 - DNA, 20 bp, Artificial Sequence
  Description of Artificial Sequence: Synthetic oligonucleotide
  Target: SCNA; (+) strand; PAM type: YTN; PAM sequence: CTG
ctctgctgatcacaaggtaa

SEQ ID NO: 76055 - DNA, 20 bp, Artificial Sequence
  Description of Artificial Sequence: Synthetic oligonucleotide
  Target: SCNA; (+) strand; PAM type: YTN; PAM sequence: CTC
tgctgatcacaaggtaatta

SEQ ID NO: 76056 - DNA, 20 bp, Artificial Sequence
  Description of Artificial Sequence: Synthetic oligonucleotide
  Target: SCNA; (+) strand; PAM type: YTN; PAM sequence: CTG
ctgatcacaaggtaattaag

SEQ ID NO: 76057 - DNA, 20 bp, Artificial Sequence
  Description of Artificial Sequence: Synthetic oligonucleotide
  Target: SCNA; (+) strand; PAM type: YTN; PAM sequence: CTG
atcacaaggtaattaagttt

SEQ ID NO: 76058 - DNA, 20 bp, Artificial Sequence
  Description of Artificial Sequence: Synthetic oligonucleotide
  Target: SCNA; (+) strand; PAM type: YTN; PAM sequence: TTA
agttttggagtggaggagtg

SEQ ID NO: 76059 - DNA, 20 bp, Artificial Sequence
  Description of Artificial Sequence: Synthetic oligonucleotide
  Target: SCNA; (+) strand; PAM type: YTN; PAM sequence: TTT
tggagtggaggagtgtctta

SEQ ID NO: 76060 - DNA, 20 bp, Artificial Sequence
  Description of Artificial Sequence: Synthetic oligonucleotide
  Target: SCNA; (+) strand; PAM type: YTN; PAM sequence: TTT
ggagtggaggagtgtcttag

SEQ ID NO: 76061 - DNA, 20 bp, Artificial Sequence
  Description of Artificial Sequence: Synthetic oligonucleotide
  Target: SCNA; (+) strand; PAM type: YTN; PAM sequence: TTG
gagtggaggagtgtcttagg

SEQ ID NO: 76062 - DNA, 20 bp, Artificial Sequence
  Description of Artificial Sequence: Synthetic oligonucleotide
  Target: SCNA; (+) strand; PAM type: YTN; PAM sequence: CTT
aggtttatgttcatgcatta

SEQ ID NO: 76063 - DNA, 20 bp, Artificial Sequence
  Description of Artificial Sequence: Synthetic oligonucleotide
  Target: SCNA; (+) strand; PAM type: YTN; PAM sequence: TTA
ggtttatgttcatgcattaa

SEQ ID NO: 76064 - DNA, 20 bp, Artificial Sequence
  Description of Artificial Sequence: Synthetic oligonucleotide
  Target: SCNA; (+) strand; PAM type: YTN; PAM sequence: TTT
atgttcatgcattaaatata

SEQ ID NO: 76065 - DNA, 20 bp, Artificial Sequence
  Description of Artificial Sequence: Synthetic oligonucleotide
  Target: SCNA; (+) strand; PAM type: YTN; PAM sequence: TTA
tgttcatgcattaaatataa

SEQ ID NO: 76066 - DNA, 20 bp, Artificial Sequence
  Description of Artificial Sequence: Synthetic oligonucleotide
  Target: SCNA; (+) strand; PAM type: YTN; PAM sequence: TTC
atgcattaaatataaagaaa

SEQ ID NO: 76067 - DNA, 20 bp, Artificial Sequence
  Description of Artificial Sequence: Synthetic oligonucleotide
  Target: SCNA; (+) strand; PAM type: YTN; PAM sequence: TTA
aatataaagaaatctatgat

SEQ ID NO: 76068 - DNA, 20 bp, Artificial Sequence
  Description of Artificial Sequence: Synthetic oligonucleotide
  Target: SCNA; (+) strand; PAM type: YTN; PAM sequence: CTA
tgatttttaaaaaattaact

SEQ ID NO: 76069 - DNA, 20 bp, Artificial Sequence
  Description of Artificial Sequence: Synthetic oligonucleotide
  Target: SCNA; (+) strand; PAM type: YTN; PAM sequence: TTT
ttaaaaaattaactatattg

SEQ ID NO: 76070 - DNA, 20 bp, Artificial Sequence
  Description of Artificial Sequence: Synthetic oligonucleotide
  Target: SCNA; (+) strand; PAM type: YTN; PAM sequence: TTT
taaaaaattaactatattga

SEQ ID NO: 76071 - DNA, 20 bp, Artificial Sequence
  Description of Artificial Sequence: Synthetic oligonucleotide
  Target: SCNA; (+) strand; PAM type: YTN; PAM sequence: TTT
aaaaaattaactatattgag

SEQ ID NO: 76072 - DNA, 20 bp, Artificial Sequence
  Description of Artificial Sequence: Synthetic oligonucleotide
  Target: SCNA; (+) strand; PAM type: YTN; PAM sequence: TTA
aaaaattaactatattgagg

SEQ ID NO: 76073 - DNA, 20 bp, Artificial Sequence
  Description of Artificial Sequence: Synthetic oligonucleotide
  Target: SCNA; (+) strand; PAM type: YTN; PAM sequence: TTA
actatattgaggtataattc

SEQ ID NO: 76074 - DNA, 20 bp, Artificial Sequence
  Description of Artificial Sequence: Synthetic oligonucleotide
  Target: SCNA; (+) strand; PAM type: YTN; PAM sequence: CTA
tattgaggtataattcactt

SEQ ID NO: 76075 - DNA, 20 bp, Artificial Sequence
  Description of Artificial Sequence: Synthetic oligonucleotide
  Target: SCNA; (+) strand; PAM type: YTN; PAM sequence: TTG
aggtataattcacttacaat

SEQ ID NO: 76076 - DNA, 20 bp, Artificial Sequence
  Description of Artificial Sequence: Synthetic oligonucleotide
  Target: SCNA; (+) strand; PAM type: YTN; PAM sequence: TTC
acttacaatcatatgcactc

SEQ ID NO: 76077 - DNA, 20 bp, Artificial Sequence
  Description of Artificial Sequence: Synthetic oligonucleotide
  Target: SCNA; (+) strand; PAM type: YTN; PAM sequence: CTT
acaatcatatgcactcattt

SEQ ID NO: 76078 - DNA, 20 bp, Artificial Sequence
  Description of Artificial Sequence: Synthetic oligonucleotide
  Target: SCNA; (+) strand; PAM type: YTN; PAM sequence: TTA
caatcatatgcactcatttt

SEQ ID NO: 76079 - DNA, 20 bp, Artificial Sequence
  Description of Artificial Sequence: Synthetic oligonucleotide
  Target: SCNA; (+) strand; PAM type: YTN; PAM sequence: CTC
attttaaatgtacatttctt

SEQ ID NO: 76080 - DNA, 20 bp, Artificial Sequence
  Description of Artificial Sequence: Synthetic oligonucleotide
  Target: SCNA; (+) strand; PAM type: YTN; PAM sequence: TTT
taaatgtacatttcttgagt

SEQ ID NO: 76081 - DNA, 20 bp, Artificial Sequence
  Description of Artificial Sequence: Synthetic oligonucleotide
  Target: SCNA; (+) strand; PAM type: YTN; PAM sequence: TTT
aaatgtacatttcttgagtt

SEQ ID NO: 76082 - DNA, 20 bp, Artificial Sequence
  Description of Artificial Sequence: Synthetic oligonucleotide
  Target: SCNA; (+) strand; PAM type: YTN; PAM sequence: TTA
aatgtacatttcttgagttt

SEQ ID NO: 76083 - DNA, 20 bp, Artificial Sequence
  Description of Artificial Sequence: Synthetic oligonucleotide
  Target: SCNA; (+) strand; PAM type: YTN; PAM sequence: TTT
cttgagttttgatgcattaa

SEQ ID NO: 76084 - DNA, 20 bp, Artificial Sequence
  Description of Artificial Sequence: Synthetic oligonucleotide
  Target: SCNA; (+) strand; PAM type: YTN; PAM sequence: TTC
ttgagttttgatgcattaat

SEQ ID NO: 76085 - DNA, 20 bp, Artificial Sequence
  Description of Artificial Sequence: Synthetic oligonucleotide
  Target: SCNA; (+) strand; PAM type: YTN; PAM sequence: CTT
gagttttgatgcattaataa

SEQ ID NO: 76086 - DNA, 20 bp, Artificial Sequence
  Description of Artificial Sequence: Synthetic oligonucleotide
  Target: SCNA; (+) strand; PAM type: YTN; PAM sequence: TTG
agttttgatgcattaataaa

SEQ ID NO: 76087 - DNA, 20 bp, Artificial Sequence
  Description of Artificial Sequence: Synthetic oligonucleotide
  Target: SCNA; (+) strand; PAM type: YTN; PAM sequence: TTT
tgatgcattaataaacccat

SEQ ID NO: 76088 - DNA, 20 bp, Artificial Sequence
  Description of Artificial Sequence: Synthetic oligonucleotide
  Target: SCNA; (+) strand; PAM type: YTN; PAM sequence: TTT
gatgcattaataaacccatg

SEQ ID NO: 76089 - DNA, 20 bp, Artificial Sequence
  Description of Artificial Sequence: Synthetic oligonucleotide
  Target: SCNA; (+) strand; PAM type: YTN; PAM sequence: TTG
atgcattaataaacccatgt

SEQ ID NO: 76090 - DNA, 20 bp, Artificial Sequence
  Description of Artificial Sequence: Synthetic oligonucleotide
  Target: SCNA; (+) strand; PAM type: YTN; PAM sequence: TTA
ataaacccatgtaacgacca

SEQ ID NO: 76091 - DNA, 20 bp, Artificial Sequence
  Description of Artificial Sequence: Synthetic oligonucleotide
  Target: SCNA; (+) strand; PAM type: YTN; PAM sequence: TTG
agaaatcatatatcttcatt

SEQ ID NO: 76092 - DNA, 20 bp, Artificial Sequence
  Description of Artificial Sequence: Synthetic oligonucleotide
  Target: SCNA; (+) strand; PAM type: YTN; PAM sequence: CTT
cattattttccccaattttc

SEQ ID NO: 76093 - DNA, 20 bp, Artificial Sequence
  Description of Artificial Sequence: Synthetic oligonucleotide
  Target: SCNA; (+) strand; PAM type: YTN; PAM sequence: TTC
attattttccccaattttcc

SEQ ID NO: 76094 - DNA, 20 bp, Artificial Sequence
  Description of Artificial Sequence: Synthetic oligonucleotide
  Target: SCNA; (+) strand; PAM type: YTN; PAM sequence: TTA
ttttccccaattttcctttg

SEQ ID NO: 76095 - DNA, 20 bp, Artificial Sequence
  Description of Artificial Sequence: Synthetic oligonucleotide
  Target: SCNA; (+) strand; PAM type: YTN; PAM sequence: TTT
tccccaattttcctttgtgc

SEQ ID NO: 76096 - DNA, 20 bp, Artificial Sequence
  Description of Artificial Sequence: Synthetic oligonucleotide
  Target: SCNA; (+) strand; PAM type: YTN; PAM sequence: TTT
ccccaattttcctttgtgcc

SEQ ID NO: 76097 - DNA, 20 bp, Artificial Sequence
  Description of Artificial Sequence: Synthetic oligonucleotide
  Target: SCNA; (+) strand; PAM type: YTN; PAM sequence: TTC
cccaattttcctttgtgcct

SEQ ID NO: 76098 - DNA, 20 bp, Artificial Sequence
  Description of Artificial Sequence: Synthetic oligonucleotide
  Target: SCNA; (+) strand; PAM type: YTN; PAM sequence: TTT
tcctttgtgcctttttctag

SEQ ID NO: 76099 - DNA, 20 bp, Artificial Sequence
  Description of Artificial Sequence: Synthetic oligonucleotide
  Target: SCNA; (+) strand; PAM type: YTN; PAM sequence: TTT
cctttgtgcctttttctagt

SEQ ID NO: 76100 - DNA, 20 bp, Artificial Sequence
  Description of Artificial Sequence: Synthetic oligonucleotide
  Target: SCNA; (+) strand; PAM type: YTN; PAM sequence: TTC
ctttgtgcctttttctagtt

SEQ ID NO: 76101 - DNA, 20 bp, Artificial Sequence
  Description of Artificial Sequence: Synthetic oligonucleotide
  Target: SCNA; (+) strand; PAM type: YTN; PAM sequence: CTT
tgtgcctttttctagttaat

SEQ ID NO: 76102 - DNA, 20 bp, Artificial Sequence
  Description of Artificial Sequence: Synthetic oligonucleotide
  Target: SCNA; (+) strand; PAM type: YTN; PAM sequence: TTT
gtgcctttttctagttaatt

SEQ ID NO: 76103 - DNA, 20 bp, Artificial Sequence
  Description of Artificial Sequence: Synthetic oligonucleotide
  Target: SCNA; (+) strand; PAM type: YTN; PAM sequence: TTG
tgcctttttctagttaattc

SEQ ID NO: 76104 - DNA, 20 bp, Artificial Sequence
  Description of Artificial Sequence: Synthetic oligonucleotide
  Target: SCNA; (+) strand; PAM type: YTN; PAM sequence: CTT
tttctagttaattccttctc

SEQ ID NO: 76105 - DNA, 20 bp, Artificial Sequence
  Description of Artificial Sequence: Synthetic oligonucleotide
  Target: SCNA; (+) strand; PAM type: YTN; PAM sequence: TTT
ttctagttaattccttctcc

SEQ ID NO: 76106 - DNA, 20 bp, Artificial Sequence
  Description of Artificial Sequence: Synthetic oligonucleotide
  Target: SCNA; (+) strand; PAM type: YTN; PAM sequence: TTT
tctagttaattccttctcct

SEQ ID NO: 76107 - DNA, 20 bp, Artificial Sequence
  Description of Artificial Sequence: Synthetic oligonucleotide
  Target: SCNA; (+) strand; PAM type: YTN; PAM sequence: TTT
ctagttaattccttctcctt

SEQ ID NO: 76108 - DNA, 20 bp, Artificial Sequence
  Description of Artificial Sequence: Synthetic oligonucleotide
  Target: SCNA; (+) strand; PAM type: YTN; PAM sequence: TTC
tagttaattccttctccttc

SEQ ID NO: 76109 - DNA, 20 bp, Artificial Sequence
  Description of Artificial Sequence: Synthetic oligonucleotide
  Target: SCNA; (+) strand; PAM type: YTN; PAM sequence: CTA
gttaattccttctccttctc

SEQ ID NO: 76110 - DNA, 20 bp, Artificial Sequence
  Description of Artificial Sequence: Synthetic oligonucleotide
  Target: SCNA; (+) strand; PAM type: YTN; PAM sequence: TTA
attccttctccttctcctcc

SEQ ID NO: 76111 - DNA, 20 bp, Artificial Sequence
  Description of Artificial Sequence: Synthetic oligonucleotide
  Target: SCNA; (+) strand; PAM type: YTN; PAM sequence: TTC
cttctccttctcctccacct

SEQ ID NO: 76112 - DNA, 20 bp, Artificial Sequence
  Description of Artificial Sequence: Synthetic oligonucleotide
  Target: SCNA; (+) strand; PAM type: YTN; PAM sequence: CTT
ctccttctcctccacctcca

SEQ ID NO: 76113 - DNA, 20 bp, Artificial Sequence
  Description of Artificial Sequence: Synthetic oligonucleotide
  Target: SCNA; (+) strand; PAM type: YTN; PAM sequence: TTC
tccttctcctccacctccac

SEQ ID NO: 76114 - DNA, 20 bp, Artificial Sequence
  Description of Artificial Sequence: Synthetic oligonucleotide
  Target: SCNA; (+) strand; PAM type: YTN; PAM sequence: CTC
cttctcctccacctccaccc

SEQ ID NO: 76115 - DNA, 20 bp, Artificial Sequence
  Description of Artificial Sequence: Synthetic oligonucleotide
  Target: SCNA; (+) strand; PAM type: YTN; PAM sequence: CTT
ctcctccacctccaccccag

SEQ ID NO: 76116 - DNA, 20 bp, Artificial Sequence
  Description of Artificial Sequence: Synthetic oligonucleotide
  Target: SCNA; (+) strand; PAM type: YTN; PAM sequence: TTC
tcctccacctccaccccagc

SEQ ID NO: 76117 - DNA, 20 bp, Artificial Sequence
  Description of Artificial Sequence: Synthetic oligonucleotide
  Target: SCNA; (+) strand; PAM type: YTN; PAM sequence: CTC
ctccacctccaccccagccc

SEQ ID NO: 76118 - DNA, 20 bp, Artificial Sequence
  Description of Artificial Sequence: Synthetic oligonucleotide
  Target: SCNA; (+) strand; PAM type: YTN; PAM sequence: CTC
cacctccaccccagccccat

SEQ ID NO: 76119 - DNA, 20 bp, Artificial Sequence
  Description of Artificial Sequence: Synthetic oligonucleotide
  Target: SCNA; (+) strand; PAM type: YTN; PAM sequence: CTC
caccccagccccatgggggt

SEQ ID NO: 76120 - DNA, 20 bp, Artificial Sequence
  Description of Artificial Sequence: Synthetic oligonucleotide
  Target: SCNA; (+) strand; PAM type: YTN; PAM sequence: CTC
ttggatcttttctctccaat

SEQ ID NO: 76121 - DNA, 20 bp, Artificial Sequence
  Description of Artificial Sequence: Synthetic oligonucleotide
  Target: SCNA; (+) strand; PAM type: YTN; PAM sequence: CTT
ggatcttttctctccaatta

SEQ ID NO: 76122 - DNA, 20 bp, Artificial Sequence
  Description of Artificial Sequence: Synthetic oligonucleotide
  Target: SCNA; (+) strand; PAM type: YTN; PAM sequence: TTG
gatcttttctctccaattag

SEQ ID NO: 76123 - DNA, 20 bp, Artificial Sequence
  Description of Artificial Sequence: Synthetic oligonucleotide
  Target: SCNA; (+) strand; PAM type: YTN; PAM sequence: CTT
ttctctccaattagctgcca

SEQ ID NO: 76124 - DNA, 20 bp, Artificial Sequence
  Description of Artificial Sequence: Synthetic oligonucleotide
  Target: SCNA; (+) strand; PAM type: YTN; PAM sequence: TTT
tctctccaattagctgccag

SEQ ID NO: 76125 - DNA, 20 bp, Artificial Sequence
  Description of Artificial Sequence: Synthetic oligonucleotide
  Target: SCNA; (+) strand; PAM type: YTN; PAM sequence: TTT
ctctccaattagctgccagg

SEQ ID NO: 76126 - DNA, 20 bp, Artificial Sequence
  Description of Artificial Sequence: Synthetic oligonucleotide
  Target: SCNA; (+) strand; PAM type: YTN; PAM sequence: TTC
tctccaattagctgccagga

SEQ ID NO: 76127 - DNA, 20 bp, Artificial Sequence
  Description of Artificial Sequence: Synthetic oligonucleotide
  Target: SCNA; (+) strand; PAM type: YTN; PAM sequence: CTC
tccaattagctgccaggagt

SEQ ID NO: 76128 - DNA, 20 bp, Artificial Sequence
  Description of Artificial Sequence: Synthetic oligonucleotide
  Target: SCNA; (+) strand; PAM type: YTN; PAM sequence: CTC
caattagctgccaggagtgc

SEQ ID NO: 76129 - DNA, 20 bp, Artificial Sequence
  Description of Artificial Sequence: Synthetic oligonucleotide
  Target: SCNA; (+) strand; PAM type: YTN; PAM sequence: TTA
gctgccaggagtgctattgg

SEQ ID NO: 76130 - DNA, 20 bp, Artificial Sequence
  Description of Artificial Sequence: Synthetic oligonucleotide
  Target: SCNA; (+) strand; PAM type: YTN; PAM sequence: CTG
ccaggagtgctattggcctc

SEQ ID NO: 76131 - DNA, 20 bp, Artificial Sequence
  Description of Artificial Sequence: Synthetic oligonucleotide
  Target: SCNA; (+) strand; PAM type: YTN; PAM sequence: CTA
ttggcctcctgctgcagcag

SEQ ID NO: 76132 - DNA, 20 bp, Artificial Sequence
  Description of Artificial Sequence: Synthetic oligonucleotide
  Target: SCNA; (+) strand; PAM type: YTN; PAM sequence: TTG
gcctcctgctgcagcagcaa

SEQ ID NO: 76133 - DNA, 20 bp, Artificial Sequence
  Description of Artificial Sequence: Synthetic oligonucleotide
  Target: SCNA; (+) strand; PAM type: YTN; PAM sequence: CTC
ctgctgcagcagcaatggga

SEQ ID NO: 76134 - DNA, 20 bp, Artificial Sequence
  Description of Artificial Sequence: Synthetic oligonucleotide
  Target: SCNA; (+) strand; PAM type: YTN; PAM sequence: CTG
ctgcagcagcaatgggatcc

SEQ ID NO: 76135 - DNA, 20 bp, Artificial Sequence
  Description of Artificial Sequence: Synthetic oligonucleotide
  Target: SCNA; (+) strand; PAM type: YTN; PAM sequence: CTG
cagcagcaatgggatccacc

SEQ ID NO: 76136 - DNA, 20 bp, Artificial Sequence
  Description of Artificial Sequence: Synthetic oligonucleotide
  Target: SCNA; (+) strand; PAM type: YTN; PAM sequence: CTG
gcctccagccaatgactggg

SEQ ID NO: 76137 - DNA, 20 bp, Artificial Sequence
  Description of Artificial Sequence: Synthetic oligonucleotide
  Target: SCNA; (+) strand; PAM type: YTN; PAM sequence: CTC
cagccaatgactgggagcag

SEQ ID NO: 76138 - DNA, 20 bp, Artificial Sequence
  Description of Artificial Sequence: Synthetic oligonucleotide
  Target: SCNA; (+) strand; PAM type: YTN; PAM sequence: CTG
ggagcagcaaggaaactaca

SEQ ID NO: 76139 - DNA, 20 bp, Artificial Sequence
  Description of Artificial Sequence: Synthetic oligonucleotide
  Target: SCNA; (+) strand; PAM type: YTN; PAM sequence: CTA
cagcccagacatgtctgcct

SEQ ID NO: 76140 - DNA, 20 bp, Artificial Sequence
  Description of Artificial Sequence: Synthetic oligonucleotide
  Target: SCNA; (+) strand; PAM type: YTN; PAM sequence: CTG
cctaatgcatgactcctcaa

SEQ ID NO: 76141 - DNA, 20 bp, Artificial Sequence
  Description of Artificial Sequence: Synthetic oligonucleotide
  Target: SCNA; (+) strand; PAM type: YTN; PAM sequence: CTA
atgcatgactcctcaacaag

SEQ ID NO: 76142 - DNA, 20 bp, Artificial Sequence
  Description of Artificial Sequence: Synthetic oligonucleotide
  Target: SCNA; (+) strand; PAM type: YTN; PAM sequence: CTC
ctcaacaagtaacctttgtt

SEQ ID NO: 76143 - DNA, 20 bp, Artificial Sequence
  Description of Artificial Sequence: Synthetic oligonucleotide
  Target: SCNA; (+) strand; PAM type: YTN; PAM sequence: CTC
aacaagtaacctttgttgga

SEQ ID NO: 76144 - DNA, 20 bp, Artificial Sequence
  Description of Artificial Sequence: Synthetic oligonucleotide
  Target: SCNA; (+) strand; PAM type: YTN; PAM sequence: CTT
tgttggaagccaagactttc

SEQ ID NO: 76145 - DNA, 20 bp, Artificial Sequence
  Description of Artificial Sequence: Synthetic oligonucleotide
  Target: SCNA; (+) strand; PAM type: YTN; PAM sequence: TTT
gttggaagccaagactttct

SEQ ID NO: 76146 - DNA, 20 bp, Artificial Sequence
  Description of Artificial Sequence: Synthetic oligonucleotide
  Target: SCNA; (+) strand; PAM type: YTN; PAM sequence: TTG
ttggaagccaagactttctt

SEQ ID NO: 76147 - DNA, 20 bp, Artificial Sequence
  Description of Artificial Sequence: Synthetic oligonucleotide
  Target: SCNA; (+) strand; PAM type: YTN; PAM sequence: TTG
gaagccaagactttcttgta

SEQ ID NO: 76148 - DNA, 20 bp, Artificial Sequence
  Description of Artificial Sequence: Synthetic oligonucleotide
  Target: SCNA; (+) strand; PAM type: YTN; PAM sequence: CTT
tcttgtaactgcactgtaat

SEQ ID NO: 76149 - DNA, 20 bp, Artificial Sequence
  Description of Artificial Sequence: Synthetic oligonucleotide
  Target: SCNA; (+) strand; PAM type: YTN; PAM sequence: TTT
cttgtaactgcactgtaatc

SEQ ID NO: 76150 - DNA, 20 bp, Artificial Sequence
  Description of Artificial Sequence: Synthetic oligonucleotide
  Target: SCNA; (+) strand; PAM type: YTN; PAM sequence: TTC
ttgtaactgcactgtaatct

SEQ ID NO: 76151 - DNA, 20 bp, Artificial Sequence
  Description of Artificial Sequence: Synthetic oligonucleotide
  Target: SCNA; (+) strand; PAM type: YTN; PAM sequence: CTT
gtaactgcactgtaatctgt

SEQ ID NO: 76152 - DNA, 20 bp, Artificial Sequence
  Description of Artificial Sequence: Synthetic oligonucleotide
  Target: SCNA; (+) strand; PAM type: YTN; PAM sequence: TTG
taactgcactgtaatctgtg

SEQ ID NO: 76153 - DNA, 20 bp, Artificial Sequence
  Description of Artificial Sequence: Synthetic oligonucleotide
  Target: SCNA; (+) strand; PAM type: YTN; PAM sequence: CTG
cactgtaatctgtggctatt

SEQ ID NO: 76154 - DNA, 20 bp, Artificial Sequence
  Description of Artificial Sequence: Synthetic oligonucleotide
  Target: SCNA; (+) strand; PAM type: YTN; PAM sequence: CTG
taatctgtggctattcctac

SEQ ID NO: 76155 - DNA, 20 bp, Artificial Sequence
  Description of Artificial Sequence: Synthetic oligonucleotide
  Target: SCNA; (+) strand; PAM type: YTN; PAM sequence: CTG
tggctattcctacccaattc

SEQ ID NO: 76156 - DNA, 20 bp, Artificial Sequence
  Description of Artificial Sequence: Synthetic oligonucleotide
  Target: SCNA; (+) strand; PAM type: YTN; PAM sequence: CTA
ttcctacccaattctccttc

SEQ ID NO: 76157 - DNA, 20 bp, Artificial Sequence
  Description of Artificial Sequence: Synthetic oligonucleotide
  Target: SCNA; (+) strand; PAM type: YTN; PAM sequence: TTC
ctacccaattctccttcctt

SEQ ID NO: 76158 - DNA, 20 bp, Artificial Sequence
  Description of Artificial Sequence: Synthetic oligonucleotide
  Target: SCNA; (+) strand; PAM type: YTN; PAM sequence: CTA
cccaattctccttccttctg

SEQ ID NO: 76159 - DNA, 20 bp, Artificial Sequence
  Description of Artificial Sequence: Synthetic oligonucleotide
  Target: SCNA; (+) strand; PAM type: YTN; PAM sequence: TTC
tccttccttctgcctccctt

SEQ ID NO: 76160 - DNA, 20 bp, Artificial Sequence
  Description of Artificial Sequence: Synthetic oligonucleotide
  Target: SCNA; (+) strand; PAM type: YTN; PAM sequence: CTC
cttccttctgcctccctttg

SEQ ID NO: 76161 - DNA, 20 bp, Artificial Sequence
  Description of Artificial Sequence: Synthetic oligonucleotide
  Target: SCNA; (+) strand; PAM type: YTN; PAM sequence: CTT
ccttctgcctccctttgaag

SEQ ID NO: 76162 - DNA, 20 bp, Artificial Sequence
  Description of Artificial Sequence: Synthetic oligonucleotide
  Target: SCNA; (+) strand; PAM type: YTN; PAM sequence: TTC
cttctgcctccctttgaagt

SEQ ID NO: 76163 - DNA, 20 bp, Artificial Sequence
  Description of Artificial Sequence: Synthetic oligonucleotide
  Target: SCNA; (+) strand; PAM type: YTN; PAM sequence: CTT
ctgcctccctttgaagtgat

SEQ ID NO: 76164 - DNA, 20 bp, Artificial Sequence
  Description of Artificial Sequence: Synthetic oligonucleotide
  Target: SCNA; (+) strand; PAM type: YTN; PAM sequence: TTC
tgcctccctttgaagtgata

SEQ ID NO: 76165 - DNA, 20 bp, Artificial Sequence
  Description of Artificial Sequence: Synthetic oligonucleotide
  Target: SCNA; (+) strand; PAM type: YTN; PAM sequence: CTG
cctccctttgaagtgatatc

SEQ ID NO: 76166 - DNA, 20 bp, Artificial Sequence
  Description of Artificial Sequence: Synthetic oligonucleotide
  Target: SCNA; (+) strand; PAM type: YTN; PAM sequence: CTC
cctttgaagtgatatcacaa

SEQ ID NO: 76167 - DNA, 20 bp, Artificial Sequence
  Description of Artificial Sequence: Synthetic oligonucleotide
  Target: SCNA; (+) strand; PAM type: YTN; PAM sequence: CTT
tgaagtgatatcacaactac

SEQ ID NO: 76168 - DNA, 20 bp, Artificial Sequence
  Description of Artificial Sequence: Synthetic oligonucleotide
  Target: SCNA; (+) strand; PAM type: YTN; PAM sequence: TTT
gaagtgatatcacaactaca

SEQ ID NO: 76169 - DNA, 20 bp, Artificial Sequence
  Description of Artificial Sequence: Synthetic oligonucleotide
  Target: SCNA; (+) strand; PAM type: YTN; PAM sequence: TTG
aagtgatatcacaactacat

SEQ ID NO: 76170 - DNA, 20 bp, Artificial Sequence
  Description of Artificial Sequence: Synthetic oligonucleotide
  Target: SCNA; (+) strand; PAM type: YTN; PAM sequence: CTA
cattgtggtttttccttgcc

SEQ ID NO: 76171 - DNA, 20 bp, Artificial Sequence
  Description of Artificial Sequence: Synthetic oligonucleotide
  Target: SCNA; (+) strand; PAM type: YTN; PAM sequence: TTG
tggtttttccttgcctggtt

SEQ ID NO: 76172 - DNA, 20 bp, Artificial Sequence
  Description of Artificial Sequence: Synthetic oligonucleotide
  Target: SCNA; (+) strand; PAM type: YTN; PAM sequence: TTT
ttccttgcctggtttttctc

SEQ ID NO: 76173 - DNA, 20 bp, Artificial Sequence
  Description of Artificial Sequence: Synthetic oligonucleotide
  Target: SCNA; (+) strand; PAM type: YTN; PAM sequence: TTT
tccttgcctggtttttctcc

SEQ ID NO: 76174 - DNA, 20 bp, Artificial Sequence
  Description of Artificial Sequence: Synthetic oligonucleotide
  Target: SCNA; (+) strand; PAM type: YTN; PAM sequence: TTT
ccttgcctggtttttctcct

SEQ ID NO: 76175 - DNA, 20 bp, Artificial Sequence
  Description of Artificial Sequence: Synthetic oligonucleotide
  Target: SCNA; (+) strand; PAM type: YTN; PAM sequence: TTC
cttgcctggtttttctcctg

SEQ ID NO: 76176 - DNA, 20 bp, Artificial Sequence
  Description of Artificial Sequence: Synthetic oligonucleotide
  Target: SCNA; (+) strand; PAM type: YTN; PAM sequence: CTT
gcctggtttttctcctgttc

SEQ ID NO: 76177 - DNA, 20 bp, Artificial Sequence
  Description of Artificial Sequence: Synthetic oligonucleotide
  Target: SCNA; (+) strand; PAM type: YTN; PAM sequence: TTG
cctggtttttctcctgttct

SEQ ID NO: 76178 - DNA, 20 bp, Artificial Sequence
  Description of Artificial Sequence: Synthetic oligonucleotide
  Target: SCNA; (+) strand; PAM type: YTN; PAM sequence: CTG
gtttttctcctgttctcttt

SEQ ID NO: 76179 - DNA, 20 bp, Artificial Sequence
  Description of Artificial Sequence: Synthetic oligonucleotide
  Target: SCNA; (+) strand; PAM type: YTN; PAM sequence: TTT
ttctcctgttctctttctac

SEQ ID NO: 76180 - DNA, 20 bp, Artificial Sequence
  Description of Artificial Sequence: Synthetic oligonucleotide
  Target: SCNA; (+) strand; PAM type: YTN; PAM sequence: TTT
tctcctgttctctttctacc

SEQ ID NO: 76181 - DNA, 20 bp, Artificial Sequence
  Description of Artificial Sequence: Synthetic oligonucleotide
  Target: SCNA; (+) strand; PAM type: YTN; PAM sequence: TTT
ctcctgttctctttctacct

SEQ ID NO: 76182 - DNA, 20 bp, Artificial Sequence
  Description of Artificial Sequence: Synthetic oligonucleotide
  Target: SCNA; (+) strand; PAM type: YTN; PAM sequence: TTC
tcctgttctctttctacctt

SEQ ID NO: 76183 - DNA, 20 bp, Artificial Sequence
  Description of Artificial Sequence: Synthetic oligonucleotide
  Target: SCNA; (+) strand; PAM type: YTN; PAM sequence: CTC
ctgttctctttctacctttc

SEQ ID NO: 76184 - DNA, 20 bp, Artificial Sequence
  Description of Artificial Sequence: Synthetic oligonucleotide
  Target: SCNA; (+) strand; PAM type: YTN; PAM sequence: CTG
ttctctttctacctttcata

SEQ ID NO: 76185 - DNA, 20 bp, Artificial Sequence
  Description of Artificial Sequence: Synthetic oligonucleotide
  Target: SCNA; (+) strand; PAM type: YTN; PAM sequence: TTC
tctttctacctttcatagct

SEQ ID NO: 76186 - DNA, 20 bp, Artificial Sequence
  Description of Artificial Sequence: Synthetic oligonucleotide
  Target: SCNA; (+) strand; PAM type: YTN; PAM sequence: CTC
tttctacctttcatagctat

SEQ ID NO: 76187 - DNA, 20 bp, Artificial Sequence
  Description of Artificial Sequence: Synthetic oligonucleotide
  Target: SCNA; (+) strand; PAM type: YTN; PAM sequence: CTT
tctacctttcatagctattg

SEQ ID NO: 76188 - DNA, 20 bp, Artificial Sequence
  Description of Artificial Sequence: Synthetic oligonucleotide
  Target: SCNA; (+) strand; PAM type: YTN; PAM sequence: TTT
ctacctttcatagctattgc

SEQ ID NO: 76189 - DNA, 20 bp, Artificial Sequence
  Description of Artificial Sequence: Synthetic oligonucleotide
  Target: SCNA; (+) strand; PAM type: YTN; PAM sequence: TTC
tacctttcatagctattgcc

SEQ ID NO: 76190 - DNA, 20 bp, Artificial Sequence
  Description of Artificial Sequence: Synthetic oligonucleotide
  Target: SCNA; (+) strand; PAM type: YTN; PAM sequence: CTA
cctttcatagctattgcctg

SEQ ID NO: 76191 - DNA, 20 bp, Artificial Sequence
  Description of Artificial Sequence: Synthetic oligonucleotide
  Target: SCNA; (+) strand; PAM type: YTN; PAM sequence: CTT
tcatagctattgcctgcaat

SEQ ID NO: 76192 - DNA, 20 bp, Artificial Sequence
  Description of Artificial Sequence: Synthetic oligonucleotide
  Target: SCNA; (+) strand; PAM type: YTN; PAM sequence: TTT
catagctattgcctgcaata

SEQ ID NO: 76193 - DNA, 20 bp, Artificial Sequence
  Description of Artificial Sequence: Synthetic oligonucleotide
  Target: SCNA; (+) strand; PAM type: YTN; PAM sequence: TTC
atagctattgcctgcaataa

SEQ ID NO: 76194 - DNA, 20 bp, Artificial Sequence
  Description of Artificial Sequence: Synthetic oligonucleotide
  Target: SCNA; (+) strand; PAM type: YTN; PAM sequence: CTA
ttgcctgcaataaatctctt

SEQ ID NO: 76195 - DNA, 20 bp, Artificial Sequence
  Description of Artificial Sequence: Synthetic oligonucleotide
  Target: SCNA; (+) strand; PAM type: YTN; PAM sequence: TTG
cctgcaataaatctcttgtg

SEQ ID NO: 76196 - DNA, 20 bp, Artificial Sequence
  Description of Artificial Sequence: Synthetic oligonucleotide
  Target: SCNA; (+) strand; PAM type: YTN; PAM sequence: CTG
caataaatctcttgtggatg

SEQ ID NO: 76197 - DNA, 20 bp, Artificial Sequence
  Description of Artificial Sequence: Synthetic oligonucleotide
  Target: SCNA; (+) strand; PAM type: YTN; PAM sequence: CTC
ttgtggatggttgtaattct

SEQ ID NO: 76198 - DNA, 20 bp, Artificial Sequence
  Description of Artificial Sequence: Synthetic oligonucleotide
  Target: SCNA; (+) strand; PAM type: YTN; PAM sequence: CTT
gtggatggttgtaattctaa

SEQ ID NO: 76199 - DNA, 20 bp, Artificial Sequence
  Description of Artificial Sequence: Synthetic oligonucleotide
  Target: SCNA; (+) strand; PAM type: YTN; PAM sequence: TTG
tggatggttgtaattctaac

SEQ ID NO: 76200 - DNA, 20 bp, Artificial Sequence
  Description of Artificial Sequence: Synthetic oligonucleotide
  Target: SCNA; (+) strand; PAM type: YTN; PAM sequence: TTG
taattctaacaccatcttgg

SEQ ID NO: 76201 - DNA, 20 bp, Artificial Sequence
  Description of Artificial Sequence: Synthetic oligonucleotide
  Target: SCNA; (+) strand; PAM type: YTN; PAM sequence: TTC
taacaccatcttggaatcag

SEQ ID NO: 76202 - DNA, 20 bp, Artificial Sequence
  Description of Artificial Sequence: Synthetic oligonucleotide
  Target: SCNA; (+) strand; PAM type: YTN; PAM sequence: CTA
acaccatcttggaatcagct

SEQ ID NO: 76203 - DNA, 20 bp, Artificial Sequence
  Description of Artificial Sequence: Synthetic oligonucleotide
  Target: SCNA; (+) strand; PAM type: YTN; PAM sequence: CTT
ggaatcagcttcctgaatga

SEQ ID NO: 76204 - DNA, 20 bp, Artificial Sequence
  Description of Artificial Sequence: Synthetic oligonucleotide
  Target: SCNA; (+) strand; PAM type: YTN; PAM sequence: TTG
gaatcagcttcctgaatgac

SEQ ID NO: 76205 - DNA, 20 bp, Artificial Sequence
  Description of Artificial Sequence: Synthetic oligonucleotide
  Target: SCNA; (+) strand; PAM type: YTN; PAM sequence: CTT
cctgaatgactgaactgatg

SEQ ID NO: 76206 - DNA, 20 bp, Artificial Sequence
  Description of Artificial Sequence: Synthetic oligonucleotide
  Target: SCNA; (+) strand; PAM type: YTN; PAM sequence: TTC
ctgaatgactgaactgatgc

SEQ ID NO: 76207 - DNA, 20 bp, Artificial Sequence
  Description of Artificial Sequence: Synthetic oligonucleotide
  Target: SCNA; (+) strand; PAM type: YTN; PAM sequence: CTG
aatgactgaactgatgcctc

SEQ ID NO: 76208 - DNA, 20 bp, Artificial Sequence
  Description of Artificial Sequence: Synthetic oligonucleotide
  Target: SCNA; (+) strand; PAM type: YTN; PAM sequence: CTG
aactgatgcctctacctcca

SEQ ID NO: 76209 - DNA, 20 bp, Artificial Sequence
  Description of Artificial Sequence: Synthetic oligonucleotide
  Target: SCNA; (+) strand; PAM type: YTN; PAM sequence: CTG
atgcctctacctccagcaag

SEQ ID NO: 76210 - DNA, 20 bp, Artificial Sequence
  Description of Artificial Sequence: Synthetic oligonucleotide
  Target: SCNA; (+) strand; PAM type: YTN; PAM sequence: CTC
tacctccagcaagcatggat

SEQ ID NO: 76211 - DNA, 20 bp, Artificial Sequence
  Description of Artificial Sequence: Synthetic oligonucleotide
  Target: SCNA; (+) strand; PAM type: YTN; PAM sequence: CTA
cctccagcaagcatggatct

SEQ ID NO: 76212 - DNA, 20 bp, Artificial Sequence
  Description of Artificial Sequence: Synthetic oligonucleotide
  Target: SCNA; (+) strand; PAM type: YTN; PAM sequence: CTC
cagcaagcatggatcttgtt

SEQ ID NO: 76213 - DNA, 20 bp, Artificial Sequence
  Description of Artificial Sequence: Synthetic oligonucleotide
  Target: SCNA; (+) strand; PAM type: YTN; PAM sequence: CTT
gttgttaccatggatgacat

SEQ ID NO: 76214 - DNA, 20 bp, Artificial Sequence
  Description of Artificial Sequence: Synthetic oligonucleotide
  Target: SCNA; (+) strand; PAM type: YTN; PAM sequence: TTG
ttgttaccatggatgacatt

SEQ ID NO: 76215 - DNA, 20 bp, Artificial Sequence
  Description of Artificial Sequence: Synthetic oligonucleotide
  Target: SCNA; (+) strand; PAM type: YTN; PAM sequence: TTG
ttaccatggatgacatttgt

SEQ ID NO: 76216 - DNA, 20 bp, Artificial Sequence
  Description of Artificial Sequence: Synthetic oligonucleotide
  Target: SCNA; (+) strand; PAM type: YTN; PAM sequence: TTA
ccatggatgacatttgtctt

SEQ ID NO: 76217 - DNA, 20 bp, Artificial Sequence
  Description of Artificial Sequence: Synthetic oligonucleotide
  Target: SCNA; (+) strand; PAM type: YTN; PAM sequence: TTT
gtcttttctggaattatagt

SEQ ID NO: 76218 - DNA, 20 bp, Artificial Sequence
  Description of Artificial Sequence: Synthetic oligonucleotide
  Target: SCNA; (+) strand; PAM type: YTN; PAM sequence: TTG
tcttttctggaattatagta

SEQ ID NO: 76219 - DNA, 20 bp, Artificial Sequence
  Description of Artificial Sequence: Synthetic oligonucleotide
  Target: SCNA; (+) strand; PAM type: YTN; PAM sequence: CTT
ttctggaattatagtatgta

SEQ ID NO: 76220 - DNA, 20 bp, Artificial Sequence
  Description of Artificial Sequence: Synthetic oligonucleotide
  Target: SCNA; (+) strand; PAM type: YTN; PAM sequence: TTT
tctggaattatagtatgtac

SEQ ID NO: 76221 - DNA, 20 bp, Artificial Sequence
  Description of Artificial Sequence: Synthetic oligonucleotide
  Target: SCNA; (+) strand; PAM type: YTN; PAM sequence: TTT
ctggaattatagtatgtact

SEQ ID NO: 76222 - DNA, 20 bp, Artificial Sequence
  Description of Artificial Sequence: Synthetic oligonucleotide
  Target: SCNA; (+) strand; PAM type: YTN; PAM sequence: TTC
tggaattatagtatgtactg

SEQ ID NO: 76223 - DNA, 20 bp, Artificial Sequence
  Description of Artificial Sequence: Synthetic oligonucleotide
  Target: SCNA; (+) strand; PAM type: YTN; PAM sequence: CTG
gaattatagtatgtactgat

SEQ ID NO: 76224 - DNA, 20 bp, Artificial Sequence
  Description of Artificial Sequence: Synthetic oligonucleotide
  Target: SCNA; (+) strand; PAM type: YTN; PAM sequence: TTA
tagtatgtactgatttgtgc

SEQ ID NO: 76225 - DNA, 20 bp, Artificial Sequence
  Description of Artificial Sequence: Synthetic oligonucleotide
  Target: SCNA; (+) strand; PAM type: YTN; PAM sequence: CTG
atttgtgcctggcatcacac

SEQ ID NO: 76226 - DNA, 20 bp, Artificial Sequence
  Description of Artificial Sequence: Synthetic oligonucleotide
  Target: SCNA; (+) strand; PAM type: YTN; PAM sequence: TTT
gtgcctggcatcacacagca

SEQ ID NO: 76227 - DNA, 20 bp, Artificial Sequence
  Description of Artificial Sequence: Synthetic oligonucleotide
  Target: SCNA; (+) strand; PAM type: YTN; PAM sequence: TTG
tgcctggcatcacacagcat

SEQ ID NO: 76228 - DNA, 20 bp, Artificial Sequence
  Description of Artificial Sequence: Synthetic oligonucleotide
  Target: SCNA; (+) strand; PAM type: YTN; PAM sequence: CTG
gcatcacacagcatgatagt

SEQ ID NO: 76229 - DNA, 20 bp, Artificial Sequence
  Description of Artificial Sequence: Synthetic oligonucleotide
  Target: SCNA; (+) strand; PAM type: YTN; PAM sequence: TTT
tgagattcatccatgttgtt

SEQ ID NO: 76230 - DNA, 20 bp, Artificial Sequence
  Description of Artificial Sequence: Synthetic oligonucleotide
  Target: SCNA; (+) strand; PAM type: YTN; PAM sequence: TTT
gagattcatccatgttgttg

SEQ ID NO: 76231 - DNA, 20 bp, Artificial Sequence
  Description of Artificial Sequence: Synthetic oligonucleotide
  Target: SCNA; (+) strand; PAM type: YTN; PAM sequence: TTG
agattcatccatgttgttga

SEQ ID NO: 76232 - DNA, 20 bp, Artificial Sequence
  Description of Artificial Sequence: Synthetic oligonucleotide
  Target: SCNA; (+) strand; PAM type: YTN; PAM sequence: TTC
atccatgttgttgaggttat

SEQ ID NO: 76233 - DNA, 20 bp, Artificial Sequence
  Description of Artificial Sequence: Synthetic oligonucleotide
  Target: SCNA; (+) strand; PAM type: YTN; PAM sequence: TTG
ttgaggttatcagtagtcca

SEQ ID NO: 76234 - DNA, 20 bp, Artificial Sequence
  Description of Artificial Sequence: Synthetic oligonucleotide
  Target: SCNA; (+) strand; PAM type: YTN; PAM sequence: TTG
aggttatcagtagtccattc

SEQ ID NO: 76235 - DNA, 20 bp, Artificial Sequence
  Description of Artificial Sequence: Synthetic oligonucleotide
  Target: SCNA; (+) strand; PAM type: YTN; PAM sequence: TTA
tcagtagtccattccatttt

SEQ ID NO: 76236 - DNA, 20 bp, Artificial Sequence
  Description of Artificial Sequence: Synthetic oligonucleotide
  Target: SCNA; (+) strand; PAM type: YTN; PAM sequence: TTC
catttttgttgctaagtagt

SEQ ID NO: 76237 - DNA, 20 bp, Artificial Sequence
  Description of Artificial Sequence: Synthetic oligonucleotide
  Target: SCNA; (+) strand; PAM type: YTN; PAM sequence: TTT
ttgttgctaagtagtattct

SEQ ID NO: 76238 - DNA, 20 bp, Artificial Sequence
  Description of Artificial Sequence: Synthetic oligonucleotide
  Target: SCNA; (+) strand; PAM type: YTN; PAM sequence: TTT
tgttgctaagtagtattctg

SEQ ID NO: 76239 - DNA, 20 bp, Artificial Sequence
  Description of Artificial Sequence: Synthetic oligonucleotide
  Target: SCNA; (+) strand; PAM type: YTN; PAM sequence: TTT
gttgctaagtagtattctgc

SEQ ID NO: 76240 - DNA, 20 bp, Artificial Sequence
  Description of Artificial Sequence: Synthetic oligonucleotide
  Target: SCNA; (+) strand; PAM type: YTN; PAM sequence: TTG
ttgctaagtagtattctgct

SEQ ID NO: 76241 - DNA, 20 bp, Artificial Sequence
  Description of Artificial Sequence: Synthetic oligonucleotide
  Target: SCNA; (+) strand; PAM type: YTN; PAM sequence: TTG
ctaagtagtattctgctgta

SEQ ID NO: 76242 - DNA, 20 bp, Artificial Sequence
  Description of Artificial Sequence: Synthetic oligonucleotide
  Target: SCNA; (+) strand; PAM type: YTN; PAM sequence: CTA
agtagtattctgctgtatga

SEQ ID NO: 76243 - DNA, 20 bp, Artificial Sequence
  Description of Artificial Sequence: Synthetic oligonucleotide
  Target: SCNA; (+) strand; PAM type: YTN; PAM sequence: TTC
tgctgtatgaatacagcaca

SEQ ID NO: 76244 - DNA, 20 bp, Artificial Sequence
  Description of Artificial Sequence: Synthetic oligonucleotide
  Target: SCNA; (+) strand; PAM type: YTN; PAM sequence: CTG
ctgtatgaatacagcacaat

SEQ ID NO: 76245 - DNA, 20 bp, Artificial Sequence
  Description of Artificial Sequence: Synthetic oligonucleotide
  Target: SCNA; (+) strand; PAM type: YTN; PAM sequence: CTG
tatgaatacagcacaattgt

SEQ ID NO: 76246 - DNA, 20 bp, Artificial Sequence
  Description of Artificial Sequence: Synthetic oligonucleotide
  Target: SCNA; (+) strand; PAM type: YTN; PAM sequence: TTG
ttgattgattattgtgttgt

SEQ ID NO: 76247 - DNA, 20 bp, Artificial Sequence
  Description of Artificial Sequence: Synthetic oligonucleotide
  Target: SCNA; (+) strand; PAM type: YTN; PAM sequence: TTG
attgattattgtgttgttac

SEQ ID NO: 76248 - DNA, 20 bp, Artificial Sequence
  Description of Artificial Sequence: Synthetic oligonucleotide
  Target: SCNA; (+) strand; PAM type: YTN; PAM sequence: TTG
attattgtgttgttaccagt

SEQ ID NO: 76249 - DNA, 20 bp, Artificial Sequence
  Description of Artificial Sequence: Synthetic oligonucleotide
  Target: SCNA; (+) strand; PAM type: YTN; PAM sequence: TTA
ttgtgttgttaccagttaga

SEQ ID NO: 76250 - DNA, 20 bp, Artificial Sequence
  Description of Artificial Sequence: Synthetic oligonucleotide
  Target: SCNA; (+) strand; PAM type: YTN; PAM sequence: TTG
tgttgttaccagttagagct

SEQ ID NO: 76251 - DNA, 20 bp, Artificial Sequence
  Description of Artificial Sequence: Synthetic oligonucleotide
  Target: SCNA; (+) strand; PAM type: YTN; PAM sequence: TTG
ttaccagttagagctattaa

SEQ ID NO: 76252 - DNA, 20 bp, Artificial Sequence
  Description of Artificial Sequence: Synthetic oligonucleotide
  Target: SCNA; (+) strand; PAM type: YTN; PAM sequence: TTA
ccagttagagctattaagag

SEQ ID NO: 76253 - DNA, 20 bp, Artificial Sequence
  Description of Artificial Sequence: Synthetic oligonucleotide
  Target: SCNA; (+) strand; PAM type: YTN; PAM sequence: TTA
gagctattaagagtaatgct

SEQ ID NO: 76254 - DNA, 20 bp, Artificial Sequence
  Description of Artificial Sequence: Synthetic oligonucleotide
  Target: SCNA; (+) strand; PAM type: YTN; PAM sequence: CTA
ttaagagtaatgctatcgtg

SEQ ID NO: 76255 - DNA, 20 bp, Artificial Sequence
  Description of Artificial Sequence: Synthetic oligonucleotide
  Target: SCNA; (+) strand; PAM type: YTN; PAM sequence: TTA
agagtaatgctatcgtgaat

SEQ ID NO: 76256 - DNA, 20 bp, Artificial Sequence
  Description of Artificial Sequence: Synthetic oligonucleotide
  Target: SCNA; (+) strand; PAM type: YTN; PAM sequence: CTA
tcgtgaataattctgtacaa

SEQ ID NO: 76257 - DNA, 20 bp, Artificial Sequence
  Description of Artificial Sequence: Synthetic oligonucleotide
  Target: SCNA; (+) strand; PAM type: YTN; PAM sequence: TTC
tgtacaagtcattgtatgaa

SEQ ID NO: 76258 - DNA, 20 bp, Artificial Sequence
  Description of Artificial Sequence: Synthetic oligonucleotide
  Target: SCNA; (+) strand; PAM type: YTN; PAM sequence: CTG
tacaagtcattgtatgaaca

SEQ ID NO: 76259 - DNA, 20 bp, Artificial Sequence
  Description of Artificial Sequence: Synthetic oligonucleotide
  Target: SCNA; (+) strand; PAM type: YTN; PAM sequence: TTG
tatgaacatatgcttccatt

SEQ ID NO: 76260 - DNA, 20 bp, Artificial Sequence
  Description of Artificial Sequence: Synthetic oligonucleotide
  Target: SCNA; (+) strand; PAM type: YTN; PAM sequence: CTT
ccattaatcttaagtaaata

SEQ ID NO: 76261 - DNA, 20 bp, Artificial Sequence
  Description of Artificial Sequence: Synthetic oligonucleotide
  Target: SCNA; (+) strand; PAM type: YTN; PAM sequence: TTC
cattaatcttaagtaaatac

SEQ ID NO: 76262 - DNA, 20 bp, Artificial Sequence
  Description of Artificial Sequence: Synthetic oligonucleotide
  Target: SCNA; (+) strand; PAM type: YTN; PAM sequence: TTA
atcttaagtaaatacctagg

SEQ ID NO: 76263 - DNA, 20 bp, Artificial Sequence
  Description of Artificial Sequence: Synthetic oligonucleotide
  Target: SCNA; (+) strand; PAM type: YTN; PAM sequence: CTT
aagtaaatacctaggggtag

SEQ ID NO: 76264 - DNA, 20 bp, Artificial Sequence
  Description of Artificial Sequence: Synthetic oligonucleotide
  Target: SCNA; (+) strand; PAM type: YTN; PAM sequence: TTA
agtaaatacctaggggtaga

SEQ ID NO: 76265 - DNA, 20 bp, Artificial Sequence
  Description of Artificial Sequence: Synthetic oligonucleotide
  Target: SCNA; (+) strand; PAM type: YTN; PAM sequence: CTA
ggggtagaacttacagatga

SEQ ID NO: 76266 - DNA, 20 bp, Artificial Sequence
  Description of Artificial Sequence: Synthetic oligonucleotide
  Target: SCNA; (+) strand; PAM type: YTN; PAM sequence: CTT
acagatgaagaaacagaagt

SEQ ID NO: 76267 - DNA, 20 bp, Artificial Sequence
  Description of Artificial Sequence: Synthetic oligonucleotide
  Target: SCNA; (+) strand; PAM type: YTN; PAM sequence: TTA
cagatgaagaaacagaagta

SEQ ID NO: 76268 - DNA, 20 bp, Artificial Sequence
  Description of Artificial Sequence: Synthetic oligonucleotide
  Target: SCNA; (+) strand; PAM type: YTN; PAM sequence: CTT
tgcacaagtaggcagcacag

SEQ ID NO: 76269 - DNA, 20 bp, Artificial Sequence
  Description of Artificial Sequence: Synthetic oligonucleotide
  Target: SCNA; (+) strand; PAM type: YTN; PAM sequence: TTT
gcacaagtaggcagcacagg

SEQ ID NO: 76270 - DNA, 20 bp, Artificial Sequence
  Description of Artificial Sequence: Synthetic oligonucleotide
  Target: SCNA; (+) strand; PAM type: YTN; PAM sequence: TTG
cacaagtaggcagcacaggt

SEQ ID NO: 76271 - DNA, 20 bp, Artificial Sequence
  Description of Artificial Sequence: Synthetic oligonucleotide
  Target: SCNA; (+) strand; PAM type: YTN; PAM sequence: TTT
tctgactttaaatctatgct

SEQ ID NO: 76272 - DNA, 20 bp, Artificial Sequence
  Description of Artificial Sequence: Synthetic oligonucleotide
  Target: SCNA; (+) strand; PAM type: YTN; PAM sequence: TTT
ctgactttaaatctatgctc

SEQ ID NO: 76273 - DNA, 20 bp, Artificial Sequence
  Description of Artificial Sequence: Synthetic oligonucleotide
  Target: SCNA; (+) strand; PAM type: YTN; PAM sequence: TTC
tgactttaaatctatgctct

SEQ ID NO: 76274 - DNA, 20 bp, Artificial Sequence
  Description of Artificial Sequence: Synthetic oligonucleotide
  Target: SCNA; (+) strand; PAM type: YTN; PAM sequence: CTG
actttaaatctatgctctta

SEQ ID NO: 76275 - DNA, 20 bp, Artificial Sequence
  Description of Artificial Sequence: Synthetic oligonucleotide
  Target: SCNA; (+) strand; PAM type: YTN; PAM sequence: CTT
taaatctatgctcttaactc

SEQ ID NO: 76276 - DNA, 20 bp, Artificial Sequence
  Description of Artificial Sequence: Synthetic oligonucleotide
  Target: SCNA; (+) strand; PAM type: YTN; PAM sequence: TTT
aaatctatgctcttaactcc

SEQ ID NO: 76277 - DNA, 20 bp, Artificial Sequence
  Description of Artificial Sequence: Synthetic oligonucleotide
  Target: SCNA; (+) strand; PAM type: YTN; PAM sequence: TTA
aatctatgctcttaactcct

SEQ ID NO: 76278 - DNA, 20 bp, Artificial Sequence
  Description of Artificial Sequence: Synthetic oligonucleotide
  Target: SCNA; (+) strand; PAM type: YTN; PAM sequence: CTA
tgctcttaactcctatgccg

SEQ ID NO: 76279 - DNA, 20 bp, Artificial Sequence
  Description of Artificial Sequence: Synthetic oligonucleotide
  Target: SCNA; (+) strand; PAM type: YTN; PAM sequence: CTC
ttaactcctatgccgtattg

SEQ ID NO: 76280 - DNA, 20 bp, Artificial Sequence
  Description of Artificial Sequence: Synthetic oligonucleotide
  Target: SCNA; (+) strand; PAM type: YTN; PAM sequence: CTT
aactcctatgccgtattgtt

SEQ ID NO: 76281 - DNA, 20 bp, Artificial Sequence
  Description of Artificial Sequence: Synthetic oligonucleotide
  Target: SCNA; (+) strand; PAM type: YTN; PAM sequence: TTA
actcctatgccgtattgttc

SEQ ID NO: 76282 - DNA, 20 bp, Artificial Sequence
  Description of Artificial Sequence: Synthetic oligonucleotide
  Target: SCNA; (+) strand; PAM type: YTN; PAM sequence: CTC
ctatgccgtattgttcttca

SEQ ID NO: 76283 - DNA, 20 bp, Artificial Sequence
  Description of Artificial Sequence: Synthetic oligonucleotide
  Target: SCNA; (+) strand; PAM type: YTN; PAM sequence: CTA
tgccgtattgttcttcatgg

SEQ ID NO: 76284 - DNA, 20 bp, Artificial Sequence
  Description of Artificial Sequence: Synthetic oligonucleotide
  Target: SCNA; (+) strand; PAM type: YTN; PAM sequence: TTG
ttcttcatgggaagaaaagc

SEQ ID NO: 76285 - DNA, 20 bp, Artificial Sequence
  Description of Artificial Sequence: Synthetic oligonucleotide
  Target: SCNA; (+) strand; PAM type: YTN; PAM sequence: TTC
ttcatgggaagaaaagctat

SEQ ID NO: 76286 - DNA, 20 bp, Artificial Sequence
  Description of Artificial Sequence: Synthetic oligonucleotide
  Target: SCNA; (+) strand; PAM type: YTN; PAM sequence: CTT
catgggaagaaaagctattt

SEQ ID NO: 76287 - DNA, 20 bp, Artificial Sequence
  Description of Artificial Sequence: Synthetic oligonucleotide
  Target: SCNA; (+) strand; PAM type: YTN; PAM sequence: TTC
atgggaagaaaagctatttt

SEQ ID NO: 76288 - DNA, 20 bp, Artificial Sequence
  Description of Artificial Sequence: Synthetic oligonucleotide
  Target: SCNA; (+) strand; PAM type: YTN; PAM sequence: CTA
tttttcttgacccatttaaa

SEQ ID NO: 76289 - DNA, 20 bp, Artificial Sequence
  Description of Artificial Sequence: Synthetic oligonucleotide
  Target: SCNA; (+) strand; PAM type: YTN; PAM sequence: TTT
ttcttgacccatttaaactt

SEQ ID NO: 76290 - DNA, 20 bp, Artificial Sequence
  Description of Artificial Sequence: Synthetic oligonucleotide
  Target: SCNA; (+) strand; PAM type: YTN; PAM sequence: TTT
tcttgacccatttaaacttt

SEQ ID NO: 76291 - DNA, 20 bp, Artificial Sequence
  Description of Artificial Sequence: Synthetic oligonucleotide
  Target: SCNA; (+) strand; PAM type: YTN; PAM sequence: TTT
cttgacccatttaaactttc

SEQ ID NO: 76292 - DNA, 20 bp, Artificial Sequence
  Description of Artificial Sequence: Synthetic oligonucleotide
  Target: SCNA; (+) strand; PAM type: YTN; PAM sequence: TTC
ttgacccatttaaactttcc

SEQ ID NO: 76293 - DNA, 20 bp, Artificial Sequence
  Description of Artificial Sequence: Synthetic oligonucleotide
  Target: SCNA; (+) strand; PAM type: YTN; PAM sequence: CTT
gacccatttaaactttccat

SEQ ID NO: 76294 - DNA, 20 bp, Artificial Sequence
  Description of Artificial Sequence: Synthetic oligonucleotide
  Target: SCNA; (+) strand; PAM type: YTN; PAM sequence: TTG
acccatttaaactttccata

SEQ ID NO: 76295 - DNA, 20 bp, Artificial Sequence
  Description of Artificial Sequence: Synthetic oligonucleotide
  Target: SCNA; (+) strand; PAM type: YTN; PAM sequence: TTT
aaactttccataatgtttaa

SEQ ID NO: 76296 - DNA, 20 bp, Artificial Sequence
  Description of Artificial Sequence: Synthetic oligonucleotide
  Target: SCNA; (+) strand; PAM type: YTN; PAM sequence: TTA
aactttccataatgtttaat

SEQ ID NO: 76297 - DNA, 20 bp, Artificial Sequence
  Description of Artificial Sequence: Synthetic oligonucleotide
  Target: SCNA; (+) strand; PAM type: YTN; PAM sequence: CTT
tccataatgtttaatcaaaa

SEQ ID NO: 76298 - DNA, 20 bp, Artificial Sequence
  Description of Artificial Sequence: Synthetic oligonucleotide
  Target: SCNA; (+) strand; PAM type: YTN; PAM sequence: TTT
ccataatgtttaatcaaaat

SEQ ID NO: 76299 - DNA, 20 bp, Artificial Sequence
  Description of Artificial Sequence: Synthetic oligonucleotide
  Target: SCNA; (+) strand; PAM type: YTN; PAM sequence: TTC
cataatgtttaatcaaaata

SEQ ID NO: 76300 - DNA, 20 bp, Artificial Sequence
  Description of Artificial Sequence: Synthetic oligonucleotide
  Target: SCNA; (+) strand; PAM type: YTN; PAM sequence: TTT
aatcaaaatattcaatattt

SEQ ID NO: 76301 - DNA, 20 bp, Artificial Sequence
  Description of Artificial Sequence: Synthetic oligonucleotide
  Target: SCNA; (+) strand; PAM type: YTN; PAM sequence: TTA
atcaaaatattcaatattta

SEQ ID NO: 76302 - DNA, 20 bp, Artificial Sequence
  Description of Artificial Sequence: Synthetic oligonucleotide
  Target: SCNA; (+) strand; PAM type: YTN; PAM sequence: TTC
aatatttaagttaaaaacag

SEQ ID NO: 76303 - DNA, 20 bp, Artificial Sequence
  Description of Artificial Sequence: Synthetic oligonucleotide
  Target: SCNA; (+) strand; PAM type: YTN; PAM sequence: TTT
aagttaaaaacagcaaaatc

SEQ ID NO: 76304 - DNA, 20 bp, Artificial Sequence
  Description of Artificial Sequence: Synthetic oligonucleotide
  Target: SCNA; (+) strand; PAM type: YTN; PAM sequence: TTA
agttaaaaacagcaaaatct

SEQ ID NO: 76305 - DNA, 20 bp, Artificial Sequence
  Description of Artificial Sequence: Synthetic oligonucleotide
  Target: SCNA; (+) strand; PAM type: YTN; PAM sequence: TTA
aaaacagcaaaatctgggat

SEQ ID NO: 76306 - DNA, 20 bp, Artificial Sequence
  Description of Artificial Sequence: Synthetic oligonucleotide
  Target: SCNA; (+) strand; PAM type: YTN; PAM sequence: CTG
ggatacaaggtgtaccaacc

SEQ ID NO: 76307 - DNA, 20 bp, Artificial Sequence
  Description of Artificial Sequence: Synthetic oligonucleotide
  Target: SCNA; (+) strand; PAM type: YTN; PAM sequence: CTC
aagtaaacatgccaggtgtt

SEQ ID NO: 76308 - DNA, 20 bp, Artificial Sequence
  Description of Artificial Sequence: Synthetic oligonucleotide
  Target: SCNA; (+) strand; PAM type: YTN; PAM sequence: TTT
ggaaaagtagaagaataatg

SEQ ID NO: 76309 - DNA, 20 bp, Artificial Sequence
  Description of Artificial Sequence: Synthetic oligonucleotide
  Target: SCNA; (+) strand; PAM type: YTN; PAM sequence: TTG
gaaaagtagaagaataatga

SEQ ID NO: 76310 - DNA, 20 bp, Artificial Sequence
  Description of Artificial Sequence: Synthetic oligonucleotide
  Target: SCNA; (+) strand; PAM type: YTN; PAM sequence: CTT
actacatgcaaactgtgcaa

SEQ ID NO: 76311 - DNA, 20 bp, Artificial Sequence
  Description of Artificial Sequence: Synthetic oligonucleotide
  Target: SCNA; (+) strand; PAM type: YTN; PAM sequence: TTA
ctacatgcaaactgtgcaat

SEQ ID NO: 76312 - DNA, 20 bp, Artificial Sequence
  Description of Artificial Sequence: Synthetic oligonucleotide
  Target: SCNA; (+) strand; PAM type: YTN; PAM sequence: CTA
catgcaaactgtgcaatagt

SEQ ID NO: 76313 - DNA, 20 bp, Artificial Sequence
  Description of Artificial Sequence: Synthetic oligonucleotide
  Target: SCNA; (+) strand; PAM type: YTN; PAM sequence: CTG
tgcaatagttacatgtagaa

SEQ ID NO: 76314 - DNA, 20 bp, Artificial Sequence
  Description of Artificial Sequence: Synthetic oligonucleotide
  Target: SCNA; (+) strand; PAM type: YTN; PAM sequence: TTA
catgtagaatgcatctcaaa

SEQ ID NO: 76315 - DNA, 20 bp, Artificial Sequence
  Description of Artificial Sequence: Synthetic oligonucleotide
  Target: SCNA; (+) strand; PAM type: YTN; PAM sequence: CTC
aaaaaaaaaaaggttcctgg

SEQ ID NO: 76316 - DNA, 20 bp, Artificial Sequence
  Description of Artificial Sequence: Synthetic oligonucleotide
  Target: SCNA; (+) strand; PAM type: YTN; PAM sequence: TTC
ctggaaaccacagtgctatg

SEQ ID NO: 76317 - DNA, 20 bp, Artificial Sequence
  Description of Artificial Sequence: Synthetic oligonucleotide
  Target: SCNA; (+) strand; PAM type: YTN; PAM sequence: CTG
gaaaccacagtgctatgaaa

SEQ ID NO: 76318 - DNA, 20 bp, Artificial Sequence
  Description of Artificial Sequence: Synthetic oligonucleotide
  Target: SCNA; (+) strand; PAM type: YTN; PAM sequence: CTA
tgaaaagataatcatagaaa

SEQ ID NO: 76319 - DNA, 20 bp, Artificial Sequence
  Description of Artificial Sequence: Synthetic oligonucleotide
  Target: SCNA; (+) strand; PAM type: YTN; PAM sequence: TTT
gaataccacatactcatttt

SEQ ID NO: 76320 - DNA, 20 bp, Artificial Sequence
  Description of Artificial Sequence: Synthetic oligonucleotide
  Target: SCNA; (+) strand; PAM type: YTN; PAM sequence: TTG
aataccacatactcatttta

SEQ ID NO: 76321 - DNA, 20 bp, Artificial Sequence
  Description of Artificial Sequence: Synthetic oligonucleotide
  Target: SCNA; (+) strand; PAM type: YTN; PAM sequence: CTC
attttaagaaaaattttcac

SEQ ID NO: 76322 - DNA, 20 bp, Artificial Sequence
  Description of Artificial Sequence: Synthetic oligonucleotide
  Target: SCNA; (+) strand; PAM type: YTN; PAM sequence: TTT
taagaaaaattttcactgag

SEQ ID NO: 76323 - DNA, 20 bp, Artificial Sequence
  Description of Artificial Sequence: Synthetic oligonucleotide
  Target: SCNA; (+) strand; PAM type: YTN; PAM sequence: TTT
aagaaaaattttcactgaga

SEQ ID NO: 76324 - DNA, 20 bp, Artificial Sequence
  Description of Artificial Sequence: Synthetic oligonucleotide
  Target: SCNA; (+) strand; PAM type: YTN; PAM sequence: TTA
agaaaaattttcactgagag

SEQ ID NO: 76325 - DNA, 20 bp, Artificial Sequence
  Description of Artificial Sequence: Synthetic oligonucleotide
  Target: SCNA; (+) strand; PAM type: YTN; PAM sequence: TTT
tcactgagagaaaaaattta

SEQ ID NO: 76326 - DNA, 20 bp, Artificial Sequence
  Description of Artificial Sequence: Synthetic oligonucleotide
  Target: SCNA; (+) strand; PAM type: YTN; PAM sequence: TTT
cactgagagaaaaaatttaa

SEQ ID NO: 76327 - DNA, 20 bp, Artificial Sequence
  Description of Artificial Sequence: Synthetic oligonucleotide
  Target: SCNA; (+) strand; PAM type: YTN; PAM sequence: TTC
actgagagaaaaaatttaaa

SEQ ID NO: 76328 - DNA, 20 bp, Artificial Sequence
  Description of Artificial Sequence: Synthetic oligonucleotide
  Target: SCNA; (+) strand; PAM type: YTN; PAM sequence: CTG
agagaaaaaatttaaagcaa

SEQ ID NO: 76329 - DNA, 20 bp, Artificial Sequence
  Description of Artificial Sequence: Synthetic oligonucleotide
  Target: SCNA; (+) strand; PAM type: YTN; PAM sequence: TTT
aaagcaagttgatggcatat

SEQ ID NO: 76330 - DNA, 20 bp, Artificial Sequence
  Description of Artificial Sequence: Synthetic oligonucleotide
  Target: SCNA; (+) strand; PAM type: YTN; PAM sequence: TTA
aagcaagttgatggcatata

SEQ ID NO: 76331 - DNA, 20 bp, Artificial Sequence
  Description of Artificial Sequence: Synthetic oligonucleotide
  Target: SCNA; (+) strand; PAM type: YTN; PAM sequence: TTG
atggcatataaacatccttg

SEQ ID NO: 76332 - DNA, 20 bp, Artificial Sequence
  Description of Artificial Sequence: Synthetic oligonucleotide
  Target: SCNA; (+) strand; PAM type: YTN; PAM sequence: CTT
gaaattcttcaagtgaatac

SEQ ID NO: 76333 - DNA, 20 bp, Artificial Sequence
  Description of Artificial Sequence: Synthetic oligonucleotide
  Target: SCNA; (+) strand; PAM type: YTN; PAM sequence: TTG
aaattcttcaagtgaataca

SEQ ID NO: 76334 - DNA, 20 bp, Artificial Sequence
  Description of Artificial Sequence: Synthetic oligonucleotide
  Target: SCNA; (+) strand; PAM type: YTN; PAM sequence: TTC
ttcaagtgaatacaaattag

SEQ ID NO: 76335 - DNA, 20 bp, Artificial Sequence
  Description of Artificial Sequence: Synthetic oligonucleotide
  Target: SCNA; (+) strand; PAM type: YTN; PAM sequence: CTT
caagtgaatacaaattagtt

SEQ ID NO: 76336 - DNA, 20 bp, Artificial Sequence
  Description of Artificial Sequence: Synthetic oligonucleotide
  Target: SCNA; (+) strand; PAM type: YTN; PAM sequence: TTC
aagtgaatacaaattagttg

SEQ ID NO: 76337 - DNA, 20 bp, Artificial Sequence
  Description of Artificial Sequence: Synthetic oligonucleotide
  Target: SCNA; (+) strand; PAM type: YTN; PAM sequence: TTA
gttgagttaagcattcagat

SEQ ID NO: 76338 - DNA, 20 bp, Artificial Sequence
  Description of Artificial Sequence: Synthetic oligonucleotide
  Target: SCNA; (+) strand; PAM type: YTN; PAM sequence: TTG
agttaagcattcagataatt

SEQ ID NO: 76339 - DNA, 20 bp, Artificial Sequence
  Description of Artificial Sequence: Synthetic oligonucleotide
  Target: SCNA; (+) strand; PAM type: YTN; PAM sequence: TTA
agcattcagataatttgggt

SEQ ID NO: 76340 - DNA, 20 bp, Artificial Sequence
  Description of Artificial Sequence: Synthetic oligonucleotide
  Target: SCNA; (+) strand; PAM type: YTN; PAM sequence: TTC
agataatttgggtccttctc

SEQ ID NO: 76341 - DNA, 20 bp, Artificial Sequence
  Description of Artificial Sequence: Synthetic oligonucleotide
  Target: SCNA; (+) strand; PAM type: YTN; PAM sequence: TTT
gggtccttctcaggtggcct

SEQ ID NO: 76342 - DNA, 20 bp, Artificial Sequence
  Description of Artificial Sequence: Synthetic oligonucleotide
  Target: SCNA; (+) strand; PAM type: YTN; PAM sequence: TTG
ggtccttctcaggtggccta

SEQ ID NO: 76343 - DNA, 20 bp, Artificial Sequence
  Description of Artificial Sequence: Synthetic oligonucleotide
  Target: SCNA; (+) strand; PAM type: YTN; PAM sequence: CTT
ctcaggtggcctagcaagtt

SEQ ID NO: 76344 - DNA, 20 bp, Artificial Sequence
  Description of Artificial Sequence: Synthetic oligonucleotide
  Target: SCNA; (+) strand; PAM type: YTN; PAM sequence: TTC
tcaggtggcctagcaagtta

SEQ ID NO: 76345 - DNA, 20 bp, Artificial Sequence
  Description of Artificial Sequence: Synthetic oligonucleotide
  Target: SCNA; (+) strand; PAM type: YTN; PAM sequence: CTC
aggtggcctagcaagttagt

SEQ ID NO: 76346 - DNA, 20 bp, Artificial Sequence
  Description of Artificial Sequence: Synthetic oligonucleotide
  Target: SCNA; (+) strand; PAM type: YTN; PAM sequence: CTA
gcaagttagtcaaaagataa

SEQ ID NO: 76347 - DNA, 20 bp, Artificial Sequence
  Description of Artificial Sequence: Synthetic oligonucleotide
  Target: SCNA; (+) strand; PAM type: YTN; PAM sequence: TTA
gtcaaaagataagacctgta

SEQ ID NO: 76348 - DNA, 20 bp, Artificial Sequence
  Description of Artificial Sequence: Synthetic oligonucleotide
  Target: SCNA; (+) strand; PAM type: YTN; PAM sequence: CTG
taatcaagctgccctctctc

SEQ ID NO: 76349 - DNA, 20 bp, Artificial Sequence
  Description of Artificial Sequence: Synthetic oligonucleotide
  Target: SCNA; (+) strand; PAM type: YTN; PAM sequence: CTG
ccctctctcattaccgtcgt

SEQ ID NO: 76350 - DNA, 20 bp, Artificial Sequence
  Description of Artificial Sequence: Synthetic oligonucleotide
  Target: SCNA; (+) strand; PAM type: YTN; PAM sequence: CTC
tctcattaccgtcgttaaac

SEQ ID NO: 76351 - DNA, 20 bp, Artificial Sequence
  Description of Artificial Sequence: Synthetic oligonucleotide
  Target: SCNA; (+) strand; PAM type: YTN; PAM sequence: CTC
tcattaccgtcgttaaactg

SEQ ID NO: 76352 - DNA, 20 bp, Artificial Sequence
  Description of Artificial Sequence: Synthetic oligonucleotide
  Target: SCNA; (+) strand; PAM type: YTN; PAM sequence: CTC
attaccgtcgttaaactgca

SEQ ID NO: 76353 - DNA, 20 bp, Artificial Sequence
  Description of Artificial Sequence: Synthetic oligonucleotide
  Target: SCNA; (+) strand; PAM type: YTN; PAM sequence: TTA
ccgtcgttaaactgcatagg

SEQ ID NO: 76354 - DNA, 20 bp, Artificial Sequence
  Description of Artificial Sequence: Synthetic oligonucleotide
  Target: SCNA; (+) strand; PAM type: YTN; PAM sequence: TTA
aactgcataggtagacataa

SEQ ID NO: 76355 - DNA, 20 bp, Artificial Sequence
  Description of Artificial Sequence: Synthetic oligonucleotide
  Target: SCNA; (+) strand; PAM type: YTN; PAM sequence: CTG
cataggtagacataataatc

SEQ ID NO: 76356 - DNA, 20 bp, Artificial Sequence
  Description of Artificial Sequence: Synthetic oligonucleotide
  Target: SCNA; (+) strand; PAM type: YTN; PAM sequence: CTT
gaataatgtaccatcaaaca

SEQ ID NO: 76357 - DNA, 20 bp, Artificial Sequence
  Description of Artificial Sequence: Synthetic oligonucleotide
  Target: SCNA; (+) strand; PAM type: YTN; PAM sequence: TTG
aataatgtaccatcaaacaa

SEQ ID NO: 76358 - DNA, 20 bp, Artificial Sequence
  Description of Artificial Sequence: Synthetic oligonucleotide
  Target: SCNA; (+) strand; PAM type: YTN; PAM sequence: TTA
aatagtctatcagatcacac

SEQ ID NO: 76359 - DNA, 20 bp, Artificial Sequence
  Description of Artificial Sequence: Synthetic oligonucleotide
  Target: SCNA; (+) strand; PAM type: YTN; PAM sequence: CTA
tcagatcacactgcttatag

SEQ ID NO: 76360 - DNA, 20 bp, Artificial Sequence
  Description of Artificial Sequence: Synthetic oligonucleotide
  Target: SCNA; (+) strand; PAM type: YTN; PAM sequence: CTG
cttatagtacacattaacta

SEQ ID NO: 76361 - DNA, 20 bp, Artificial Sequence
  Description of Artificial Sequence: Synthetic oligonucleotide
  Target: SCNA; (+) strand; PAM type: YTN; PAM sequence: CTT
atagtacacattaactactc

SEQ ID NO: 76362 - DNA, 20 bp, Artificial Sequence
  Description of Artificial Sequence: Synthetic oligonucleotide
  Target: SCNA; (+) strand; PAM type: YTN; PAM sequence: TTA
tagtacacattaactactca

SEQ ID NO: 76363 - DNA, 20 bp, Artificial Sequence
  Description of Artificial Sequence: Synthetic oligonucleotide
  Target: SCNA; (+) strand; PAM type: YTN; PAM sequence: TTA
actactcatatgctttacta

SEQ ID NO: 76364 - DNA, 20 bp, Artificial Sequence
  Description of Artificial Sequence: Synthetic oligonucleotide
  Target: SCNA; (+) strand; PAM type: YTN; PAM sequence: CTA
ctcatatgctttactatcta

SEQ ID NO: 76365 - DNA, 20 bp, Artificial Sequence
  Description of Artificial Sequence: Synthetic oligonucleotide
  Target: SCNA; (+) strand; PAM type: YTN; PAM sequence: CTC
atatgctttactatctaaag

SEQ ID NO: 76366 - DNA, 20 bp, Artificial Sequence
  Description of Artificial Sequence: Synthetic oligonucleotide
  Target: SCNA; (+) strand; PAM type: YTN; PAM sequence: CTT
tactatctaaagcagggttg

SEQ ID NO: 76367 - DNA, 20 bp, Artificial Sequence
  Description of Artificial Sequence: Synthetic oligonucleotide
  Target: SCNA; (+) strand; PAM type: YTN; PAM sequence: TTT
actatctaaagcagggttgt

SEQ ID NO: 76368 - DNA, 20 bp, Artificial Sequence
  Description of Artificial Sequence: Synthetic oligonucleotide
  Target: SCNA; (+) strand; PAM type: YTN; PAM sequence: TTA
ctatctaaagcagggttgtc

SEQ ID NO: 76369 - DNA, 20 bp, Artificial Sequence
  Description of Artificial Sequence: Synthetic oligonucleotide
  Target: SCNA; (+) strand; PAM type: YTN; PAM sequence: CTA
tctaaagcagggttgtccag

SEQ ID NO: 76370 - DNA, 20 bp, Artificial Sequence
  Description of Artificial Sequence: Synthetic oligonucleotide
  Target: SCNA; (+) strand; PAM type: YTN; PAM sequence: CTA
aagcagggttgtccagtctt

SEQ ID NO: 76371 - DNA, 20 bp, Artificial Sequence
  Description of Artificial Sequence: Synthetic oligonucleotide
  Target: SCNA; (+) strand; PAM type: YTN; PAM sequence: TTG
tccagtcttttggcttccct

SEQ ID NO: 76372 - DNA, 20 bp, Artificial Sequence
  Description of Artificial Sequence: Synthetic oligonucleotide
  Target: SCNA; (+) strand; PAM type: YTN; PAM sequence: CTT
ttggcttccctgggccatat

SEQ ID NO: 76373 - DNA, 20 bp, Artificial Sequence
  Description of Artificial Sequence: Synthetic oligonucleotide
  Target: SCNA; (+) strand; PAM type: YTN; PAM sequence: TTT
tggcttccctgggccatatt

SEQ ID NO: 76374 - DNA, 20 bp, Artificial Sequence
  Description of Artificial Sequence: Synthetic oligonucleotide
  Target: SCNA; (+) strand; PAM type: YTN; PAM sequence: TTT
ggcttccctgggccatattt

SEQ ID NO: 76375 - DNA, 20 bp, Artificial Sequence
  Description of Artificial Sequence: Synthetic oligonucleotide
  Target: SCNA; (+) strand; PAM type: YTN; PAM sequence: TTG
gcttccctgggccatatttg

SEQ ID NO: 76376 - DNA, 20 bp, Artificial Sequence
  Description of Artificial Sequence: Synthetic oligonucleotide
  Target: SCNA; (+) strand; PAM type: YTN; PAM sequence: CTT
ccctgggccatatttgaaga

SEQ ID NO: 76377 - DNA, 20 bp, Artificial Sequence
  Description of Artificial Sequence: Synthetic oligonucleotide
  Target: SCNA; (+) strand; PAM type: YTN; PAM sequence: TTC
cctgggccatatttgaagaa

SEQ ID NO: 76378 - DNA, 20 bp, Artificial Sequence
  Description of Artificial Sequence: Synthetic oligonucleotide
  Target: SCNA; (+) strand; PAM type: YTN; PAM sequence: CTG
ggccatatttgaagaagaat

SEQ ID NO: 76379 - DNA, 20 bp, Artificial Sequence
  Description of Artificial Sequence: Synthetic oligonucleotide
  Target: SCNA; (+) strand; PAM type: YTN; PAM sequence: TTT
gaagaagaattaattgtctt

SEQ ID NO: 76380 - DNA, 20 bp, Artificial Sequence
  Description of Artificial Sequence: Synthetic oligonucleotide
  Target: SCNA; (+) strand; PAM type: YTN; PAM sequence: TTG
aagaagaattaattgtcttg

SEQ ID NO: 76381 - DNA, 20 bp, Artificial Sequence
  Description of Artificial Sequence: Synthetic oligonucleotide
  Target: SCNA; (+) strand; PAM type: YTN; PAM sequence: TTA
attgtcttgagccatgcata

SEQ ID NO: 76382 - DNA, 20 bp, Artificial Sequence
  Description of Artificial Sequence: Synthetic oligonucleotide
  Target: SCNA; (+) strand; PAM type: YTN; PAM sequence: TTG
tcttgagccatgcataaaat

SEQ ID NO: 76383 - DNA, 20 bp, Artificial Sequence
  Description of Artificial Sequence: Synthetic oligonucleotide
  Target: SCNA; (+) strand; PAM type: YTN; PAM sequence: CTT
gagccatgcataaaatacac

SEQ ID NO: 76384 - DNA, 20 bp, Artificial Sequence
  Description of Artificial Sequence: Synthetic oligonucleotide
  Target: SCNA; (+) strand; PAM type: YTN; PAM sequence: TTG
agccatgcataaaatacact

SEQ ID NO: 76385 - DNA, 20 bp, Artificial Sequence
  Description of Artificial Sequence: Synthetic oligonucleotide
  Target: SCNA; (+) strand; PAM type: YTN; PAM sequence: CTA
acactcatgatagctgatga

SEQ ID NO: 76386 - DNA, 20 bp, Artificial Sequence
  Description of Artificial Sequence: Synthetic oligonucleotide
  Target: SCNA; (+) strand; PAM type: YTN; PAM sequence: CTC
atgatagctgatgagaaaaa

SEQ ID NO: 76387 - DNA, 20 bp, Artificial Sequence
  Description of Artificial Sequence: Synthetic oligonucleotide
  Target: SCNA; (+) strand; PAM type: YTN; PAM sequence: CTG
atgagaaaaaaacaaaaaca

SEQ ID NO: 76388 - DNA, 20 bp, Artificial Sequence
  Description of Artificial Sequence: Synthetic oligonucleotide
  Target: SCNA; (+) strand; PAM type: YTN; PAM sequence: TTC
ataatgttttaaggaagttc

SEQ ID NO: 76389 - DNA, 20 bp, Artificial Sequence
  Description of Artificial Sequence: Synthetic oligonucleotide
  Target: SCNA; (+) strand; PAM type: YTN; PAM sequence: TTT
taaggaagttcacacatttg

SEQ ID NO: 76390 - DNA, 20 bp, Artificial Sequence
  Description of Artificial Sequence: Synthetic oligonucleotide
  Target: SCNA; (+) strand; PAM type: YTN; PAM sequence: TTT
aaggaagttcacacatttgt

SEQ ID NO: 76391 - DNA, 20 bp, Artificial Sequence
  Description of Artificial Sequence: Synthetic oligonucleotide
  Target: SCNA; (+) strand; PAM type: YTN; PAM sequence: TTA
aggaagttcacacatttgtg

SEQ ID NO: 76392 - DNA, 20 bp, Artificial Sequence
  Description of Artificial Sequence: Synthetic oligonucleotide
  Target: SCNA; (+) strand; PAM type: YTN; PAM sequence: TTC
acacatttgtgttggatctc

SEQ ID NO: 76393 - DNA, 20 bp, Artificial Sequence
  Description of Artificial Sequence: Synthetic oligonucleotide
  Target: SCNA; (+) strand; PAM type: YTN; PAM sequence: TTT
gtgttggatctcattcaaaa

SEQ ID NO: 76394 - DNA, 20 bp, Artificial Sequence
  Description of Artificial Sequence: Synthetic oligonucleotide
  Target: SCNA; (+) strand; PAM type: YTN; PAM sequence: TTG
tgttggatctcattcaaaac

SEQ ID NO: 76395 - DNA, 20 bp, Artificial Sequence
  Description of Artificial Sequence: Synthetic oligonucleotide
  Target: SCNA; (+) strand; PAM type: YTN; PAM sequence: TTG
gatctcattcaaaaccatcc

SEQ ID NO: 76396 - DNA, 20 bp, Artificial Sequence
  Description of Artificial Sequence: Synthetic oligonucleotide
  Target: SCNA; (+) strand; PAM type: YTN; PAM sequence: CTC
attcaaaaccatcctgggcc

SEQ ID NO: 76397 - DNA, 20 bp, Artificial Sequence
  Description of Artificial Sequence: Synthetic oligonucleotide
  Target: SCNA; (+) strand; PAM type: YTN; PAM sequence: TTC
aaaaccatcctgggccgctt

SEQ ID NO: 76398 - DNA, 20 bp, Artificial Sequence
  Description of Artificial Sequence: Synthetic oligonucleotide
  Target: SCNA; (+) strand; PAM type: YTN; PAM sequence: CTG
ggccgcttgtggcccatggg

SEQ ID NO: 76399 - DNA, 20 bp, Artificial Sequence
  Description of Artificial Sequence: Synthetic oligonucleotide
  Target: SCNA; (+) strand; PAM type: YTN; PAM sequence: CTT
gtggcccatgggccacgggt

SEQ ID NO: 76400 - DNA, 20 bp, Artificial Sequence
  Description of Artificial Sequence: Synthetic oligonucleotide
  Target: SCNA; (+) strand; PAM type: YTN; PAM sequence: TTG
tggcccatgggccacgggtt

SEQ ID NO: 76401 - DNA, 20 bp, Artificial Sequence
  Description of Artificial Sequence: Synthetic oligonucleotide
  Target: SCNA; (+) strand; PAM type: YTN; PAM sequence: TTA
gacaaacttgatctaaagca

SEQ ID NO: 76402 - DNA, 20 bp, Artificial Sequence
  Description of Artificial Sequence: Synthetic oligonucleotide
  Target: SCNA; (+) strand; PAM type: YTN; PAM sequence: CTT
gatctaaagcaataccatcc

SEQ ID NO: 76403 - DNA, 20 bp, Artificial Sequence
  Description of Artificial Sequence: Synthetic oligonucleotide
  Target: SCNA; (+) strand; PAM type: YTN; PAM sequence: TTG
atctaaagcaataccatcca

SEQ ID NO: 76404 - DNA, 20 bp, Artificial Sequence
  Description of Artificial Sequence: Synthetic oligonucleotide
  Target: SCNA; (+) strand; PAM type: YTN; PAM sequence: CTA
aagcaataccatccattata

SEQ ID NO: 76405 - DNA, 20 bp, Artificial Sequence
  Description of Artificial Sequence: Synthetic oligonucleotide
  Target: SCNA; (+) strand; PAM type: YTN; PAM sequence: TTA
taattattctgtgagccaat

SEQ ID NO: 76406 - DNA, 20 bp, Artificial Sequence
  Description of Artificial Sequence: Synthetic oligonucleotide
  Target: SCNA; (+) strand; PAM type: YTN; PAM sequence: TTA
ttctgtgagccaattatgta

SEQ ID NO: 76407 - DNA, 20 bp, Artificial Sequence
  Description of Artificial Sequence: Synthetic oligonucleotide
  Target: SCNA; (+) strand; PAM type: YTN; PAM sequence: TTC
tgtgagccaattatgtaatt

SEQ ID NO: 76408 - DNA, 20 bp, Artificial Sequence
  Description of Artificial Sequence: Synthetic oligonucleotide
  Target: SCNA; (+) strand; PAM type: YTN; PAM sequence: CTG
tgagccaattatgtaatttt

SEQ ID NO: 76409 - DNA, 20 bp, Artificial Sequence
  Description of Artificial Sequence: Synthetic oligonucleotide
  Target: SCNA; (+) strand; PAM type: YTN; PAM sequence: TTA
tgtaattttaaattttctag

SEQ ID NO: 76410 - DNA, 20 bp, Artificial Sequence
  Description of Artificial Sequence: Synthetic oligonucleotide
  Target: SCNA; (+) strand; PAM type: YTN; PAM sequence: TTT
taaattttctagccaccaca

SEQ ID NO: 76411 - DNA, 20 bp, Artificial Sequence
  Description of Artificial Sequence: Synthetic oligonucleotide
  Target: SCNA; (+) strand; PAM type: YTN; PAM sequence: TTT
aaattttctagccaccacat

SEQ ID NO: 76412 - DNA, 20 bp, Artificial Sequence
  Description of Artificial Sequence: Synthetic oligonucleotide
  Target: SCNA; (+) strand; PAM type: YTN; PAM sequence: TTA
aattttctagccaccacatt

SEQ ID NO: 76413 - DNA, 20 bp, Artificial Sequence
  Description of Artificial Sequence: Synthetic oligonucleotide
  Target: SCNA; (+) strand; PAM type: YTN; PAM sequence: TTT
tctagccaccacatttaaca

SEQ ID NO: 76414 - DNA, 20 bp, Artificial Sequence
  Description of Artificial Sequence: Synthetic oligonucleotide
  Target: SCNA; (+) strand; PAM type: YTN; PAM sequence: TTT
ctagccaccacatttaacaa

SEQ ID NO: 76415 - DNA, 20 bp, Artificial Sequence
  Description of Artificial Sequence: Synthetic oligonucleotide
  Target: SCNA; (+) strand; PAM type: YTN; PAM sequence: TTC
tagccaccacatttaacaaa

SEQ ID NO: 76416 - DNA, 20 bp, Artificial Sequence
  Description of Artificial Sequence: Synthetic oligonucleotide
  Target: SCNA; (+) strand; PAM type: YTN; PAM sequence: CTA
gccaccacatttaacaaatt

SEQ ID NO: 76417 - DNA, 20 bp, Artificial Sequence
  Description of Artificial Sequence: Synthetic oligonucleotide
  Target: SCNA; (+) strand; PAM type: YTN; PAM sequence: TTT
aacaaattaaaaagaaccgg

SEQ ID NO: 76418 - DNA, 20 bp, Artificial Sequence
  Description of Artificial Sequence: Synthetic oligonucleotide
  Target: SCNA; (+) strand; PAM type: YTN; PAM sequence: TTA
acaaattaaaaagaaccggg

SEQ ID NO: 76419 - DNA, 20 bp, Artificial Sequence
  Description of Artificial Sequence: Synthetic oligonucleotide
  Target: SCNA; (+) strand; PAM type: YTN; PAM sequence: TTA
aaaagaaccgggtgaatttt

SEQ ID NO: 76420 - DNA, 20 bp, Artificial Sequence
  Description of Artificial Sequence: Synthetic oligonucleotide
  Target: SCNA; (+) strand; PAM type: YTN; PAM sequence: TTT
tatattttatttgatacaac

SEQ ID NO: 76421 - DNA, 20 bp, Artificial Sequence
  Description of Artificial Sequence: Synthetic oligonucleotide
  Target: SCNA; (+) strand; PAM type: YTN; PAM sequence: TTT
atattttatttgatacaact

SEQ ID NO: 76422 - DNA, 20 bp, Artificial Sequence
  Description of Artificial Sequence: Synthetic oligonucleotide
  Target: SCNA; (+) strand; PAM type: YTN; PAM sequence: TTA
tattttatttgatacaactt

SEQ ID NO: 76423 - DNA, 20 bp, Artificial Sequence
  Description of Artificial Sequence: Synthetic oligonucleotide
  Target: SCNA; (+) strand; PAM type: YTN; PAM sequence: TTT
tatttgatacaacttattca

SEQ ID NO: 76424 - DNA, 20 bp, Artificial Sequence
  Description of Artificial Sequence: Synthetic oligonucleotide
  Target: SCNA; (+) strand; PAM type: YTN; PAM sequence: TTT
atttgatacaacttattcaa

SEQ ID NO: 76425 - DNA, 20 bp, Artificial Sequence
  Description of Artificial Sequence: Synthetic oligonucleotide
  Target: SCNA; (+) strand; PAM type: YTN; PAM sequence: TTA
tttgatacaacttattcaaa

SEQ ID NO: 76426 - DNA, 20 bp, Artificial Sequence
  Description of Artificial Sequence: Synthetic oligonucleotide
  Target: SCNA; (+) strand; PAM type: YTN; PAM sequence: TTT
gatacaacttattcaaaatg

SEQ ID NO: 76427 - DNA, 20 bp, Artificial Sequence
  Description of Artificial Sequence: Synthetic oligonucleotide
  Target: SCNA; (+) strand; PAM type: YTN; PAM sequence: TTG
atacaacttattcaaaatgt

SEQ ID NO: 76428 - DNA, 20 bp, Artificial Sequence
  Description of Artificial Sequence: Synthetic oligonucleotide
  Target: SCNA; (+) strand; PAM type: YTN; PAM sequence: CTT
attcaaaatgttatagtttc

SEQ ID NO: 76429 - DNA, 20 bp, Artificial Sequence
  Description of Artificial Sequence: Synthetic oligonucleotide
  Target: SCNA; (+) strand; PAM type: YTN; PAM sequence: TTA
ttcaaaatgttatagtttct

SEQ ID NO: 76430 - DNA, 20 bp, Artificial Sequence
  Description of Artificial Sequence: Synthetic oligonucleotide
  Target: SCNA; (+) strand; PAM type: YTN; PAM sequence: TTC
aaaatgttatagtttctaca

SEQ ID NO: 76431 - DNA, 20 bp, Artificial Sequence
  Description of Artificial Sequence: Synthetic oligonucleotide
  Target: SCNA; (+) strand; PAM type: YTN; PAM sequence: TTA
tagtttctacatgtaatcta

SEQ ID NO: 76432 - DNA, 20 bp, Artificial Sequence
  Description of Artificial Sequence: Synthetic oligonucleotide
  Target: SCNA; (+) strand; PAM type: YTN; PAM sequence: TTT
ctacatgtaatctataaaaa

SEQ ID NO: 76433 - DNA, 20 bp, Artificial Sequence
  Description of Artificial Sequence: Synthetic oligonucleotide
  Target: SCNA; (+) strand; PAM type: YTN; PAM sequence: TTC
tacatgtaatctataaaaaa

SEQ ID NO: 76434 - DNA, 20 bp, Artificial Sequence
  Description of Artificial Sequence: Synthetic oligonucleotide
  Target: SCNA; (+) strand; PAM type: YTN; PAM sequence: CTA
catgtaatctataaaaaaat

SEQ ID NO: 76435 - DNA, 20 bp, Artificial Sequence
  Description of Artificial Sequence: Synthetic oligonucleotide
  Target: SCNA; (+) strand; PAM type: YTN; PAM sequence: CTA
taaaaaaattactgagaaat

SEQ ID NO: 76436 - DNA, 20 bp, Artificial Sequence
  Description of Artificial Sequence: Synthetic oligonucleotide
  Target: SCNA; (+) strand; PAM type: YTN; PAM sequence: TTA
ctgagaaattttatgggttt

SEQ ID NO: 76437 - DNA, 20 bp, Artificial Sequence
  Description of Artificial Sequence: Synthetic oligonucleotide
  Target: SCNA; (+) strand; PAM type: YTN; PAM sequence: CTG
agaaattttatgggtttttt

SEQ ID NO: 76438 - DNA, 20 bp, Artificial Sequence
  Description of Artificial Sequence: Synthetic oligonucleotide
  Target: SCNA; (+) strand; PAM type: YTN; PAM sequence: TTT
tatgggtttttttcataata

SEQ ID NO: 76439 - DNA, 20 bp, Artificial Sequence
  Description of Artificial Sequence: Synthetic oligonucleotide
  Target: SCNA; (+) strand; PAM type: YTN; PAM sequence: TTT
atgggtttttttcataatat

SEQ ID NO: 76440 - DNA, 20 bp, Artificial Sequence
  Description of Artificial Sequence: Synthetic oligonucleotide
  Target: SCNA; (+) strand; PAM type: YTN; PAM sequence: TTA
tgggtttttttcataatatg

SEQ ID NO: 76441 - DNA, 20 bp, Artificial Sequence
  Description of Artificial Sequence: Synthetic oligonucleotide
  Target: SCNA; (+) strand; PAM type: YTN; PAM sequence: TTT
ttttcataatatgtcttgaa

SEQ ID NO: 76442 - DNA, 20 bp, Artificial Sequence
  Description of Artificial Sequence: Synthetic oligonucleotide
  Target: SCNA; (+) strand; PAM type: YTN; PAM sequence: TTT
tttcataatatgtcttgaaa

SEQ ID NO: 76443 - DNA, 20 bp, Artificial Sequence
  Description of Artificial Sequence: Synthetic oligonucleotide
  Target: SCNA; (+) strand; PAM type: YTN; PAM sequence: TTT
ttcataatatgtcttgaaat

SEQ ID NO: 76444 - DNA, 20 bp, Artificial Sequence
  Description of Artificial Sequence: Synthetic oligonucleotide
  Target: SCNA; (+) strand; PAM type: YTN; PAM sequence: TTT
tcataatatgtcttgaaatc

SEQ ID NO: 76445 - DNA, 20 bp, Artificial Sequence
  Description of Artificial Sequence: Synthetic oligonucleotide
  Target: SCNA; (+) strand; PAM type: YTN; PAM sequence: TTT
cataatatgtcttgaaatct

SEQ ID NO: 76446 - DNA, 20 bp, Artificial Sequence
  Description of Artificial Sequence: Synthetic oligonucleotide
  Target: SCNA; (+) strand; PAM type: YTN; PAM sequence: TTC
ataatatgtcttgaaatctg

SEQ ID NO: 76447 - DNA, 20 bp, Artificial Sequence
  Description of Artificial Sequence: Synthetic oligonucleotide
  Target: SCNA; (+) strand; PAM type: YTN; PAM sequence: CTT
gaaatctgttgtgtatttta

SEQ ID NO: 76448 - DNA, 20 bp, Artificial Sequence
  Description of Artificial Sequence: Synthetic oligonucleotide
  Target: SCNA; (+) strand; PAM type: YTN; PAM sequence: TTG
aaatctgttgtgtattttac

SEQ ID NO: 76449 - DNA, 20 bp, Artificial Sequence
  Description of Artificial Sequence: Synthetic oligonucleotide
  Target: SCNA; (+) strand; PAM type: YTN; PAM sequence: CTG
ttgtgtattttacccctata

SEQ ID NO: 76450 - DNA, 20 bp, Artificial Sequence
  Description of Artificial Sequence: Synthetic oligonucleotide
  Target: SCNA; (+) strand; PAM type: YTN; PAM sequence: TTG
tgtattttacccctatatct

SEQ ID NO: 76451 - DNA, 20 bp, Artificial Sequence
  Description of Artificial Sequence: Synthetic oligonucleotide
  Target: SCNA; (+) strand; PAM type: YTN; PAM sequence: TTT
tacccctatatctcaactca

SEQ ID NO: 76452 - DNA, 20 bp, Artificial Sequence
  Description of Artificial Sequence: Synthetic oligonucleotide
  Target: SCNA; (+) strand; PAM type: YTN; PAM sequence: TTT
acccctatatctcaactcag

SEQ ID NO: 76453 - DNA, 20 bp, Artificial Sequence
  Description of Artificial Sequence: Synthetic oligonucleotide
  Target: SCNA; (+) strand; PAM type: YTN; PAM sequence: TTA
cccctatatctcaactcagg

SEQ ID NO: 76454 - DNA, 20 bp, Artificial Sequence
  Description of Artificial Sequence: Synthetic oligonucleotide
  Target: SCNA; (+) strand; PAM type: YTN; PAM sequence: CTA
tatctcaactcaggctagct

SEQ ID NO: 76455 - DNA, 20 bp, Artificial Sequence
  Description of Artificial Sequence: Synthetic oligonucleotide
  Target: SCNA; (+) strand; PAM type: YTN; PAM sequence: CTC
aactcaggctagctactttt

SEQ ID NO: 76456 - DNA, 20 bp, Artificial Sequence
  Description of Artificial Sequence: Synthetic oligonucleotide
  Target: SCNA; (+) strand; PAM type: YTN; PAM sequence: CTC
aggctagctacttttgaaat

SEQ ID NO: 76457 - DNA, 20 bp, Artificial Sequence
  Description of Artificial Sequence: Synthetic oligonucleotide
  Target: SCNA; (+) strand; PAM type: YTN; PAM sequence: CTA
gctacttttgaaatgcttga

SEQ ID NO: 76458 - DNA, 20 bp, Artificial Sequence
  Description of Artificial Sequence: Synthetic oligonucleotide
  Target: SCNA; (+) strand; PAM type: YTN; PAM sequence: CTA
cttttgaaatgcttgatagc

SEQ ID NO: 76459 - DNA, 20 bp, Artificial Sequence
  Description of Artificial Sequence: Synthetic oligonucleotide
  Target: SCNA; (+) strand; PAM type: YTN; PAM sequence: CTT
ttgaaatgcttgatagcaac

SEQ ID NO: 76460 - DNA, 20 bp, Artificial Sequence
  Description of Artificial Sequence: Synthetic oligonucleotide
  Target: SCNA; (+) strand; PAM type: YTN; PAM sequence: TTT
tgaaatgcttgatagcaaca

SEQ ID NO: 76461 - DNA, 20 bp, Artificial Sequence
  Description of Artificial Sequence: Synthetic oligonucleotide
  Target: SCNA; (+) strand; PAM type: YTN; PAM sequence: TTT
gaaatgcttgatagcaacat

SEQ ID NO: 76462 - DNA, 20 bp, Artificial Sequence
  Description of Artificial Sequence: Synthetic oligonucleotide
  Target: SCNA; (+) strand; PAM type: YTN; PAM sequence: TTG
aaatgcttgatagcaacatg

SEQ ID NO: 76463 - DNA, 20 bp, Artificial Sequence
  Description of Artificial Sequence: Synthetic oligonucleotide
  Target: SCNA; (+) strand; PAM type: YTN; PAM sequence: CTT
gatagcaacatgtgtctagt

SEQ ID NO: 76464 - DNA, 20 bp, Artificial Sequence
  Description of Artificial Sequence: Synthetic oligonucleotide
  Target: SCNA; (+) strand; PAM type: YTN; PAM sequence: TTG
atagcaacatgtgtctagtc

SEQ ID NO: 76465 - DNA, 20 bp, Artificial Sequence
  Description of Artificial Sequence: Synthetic oligonucleotide
  Target: SCNA; (+) strand; PAM type: YTN; PAM sequence: CTA
gtcactatggtattgtacag

SEQ ID NO: 76466 - DNA, 20 bp, Artificial Sequence
  Description of Artificial Sequence: Synthetic oligonucleotide
  Target: SCNA; (+) strand; PAM type: YTN; PAM sequence: CTA
tggtattgtacagagtaggt

SEQ ID NO: 76467 - DNA, 20 bp, Artificial Sequence
  Description of Artificial Sequence: Synthetic oligonucleotide
  Target: SCNA; (+) strand; PAM type: YTN; PAM sequence: TTG
tacagagtaggtgtagagat

SEQ ID NO: 76468 - DNA, 20 bp, Artificial Sequence
  Description of Artificial Sequence: Synthetic oligonucleotide
  Target: SCNA; (+) strand; PAM type: YTN; PAM sequence: TTT
attgagtacctatataagaa

SEQ ID NO: 76469 - DNA, 20 bp, Artificial Sequence
  Description of Artificial Sequence: Synthetic oligonucleotide
  Target: SCNA; (+) strand; PAM type: YTN; PAM sequence: TTA
ttgagtacctatataagaaa

SEQ ID NO: 76470 - DNA, 20 bp, Artificial Sequence
  Description of Artificial Sequence: Synthetic oligonucleotide
  Target: SCNA; (+) strand; PAM type: YTN; PAM sequence: TTG
agtacctatataagaaatta

SEQ ID NO: 76471 - DNA, 20 bp, Artificial Sequence
  Description of Artificial Sequence: Synthetic oligonucleotide
  Target: SCNA; (+) strand; PAM type: YTN; PAM sequence: CTA
tataagaaattatactagat

SEQ ID NO: 76472 - DNA, 20 bp, Artificial Sequence
  Description of Artificial Sequence: Synthetic oligonucleotide
  Target: SCNA; (+) strand; PAM type: YTN; PAM sequence: TTA
tactagataccagggaaacc

SEQ ID NO: 76473 - DNA, 20 bp, Artificial Sequence
  Description of Artificial Sequence: Synthetic oligonucleotide
  Target: SCNA; (+) strand; PAM type: YTN; PAM sequence: CTA
gataccagggaaaccaaaaa

SEQ ID NO: 76474 - DNA, 20 bp, Artificial Sequence
  Description of Artificial Sequence: Synthetic oligonucleotide
  Target: SCNA; (+) strand; PAM type: YTN; PAM sequence: CTG
taagaagtttagcaggagca

SEQ ID NO: 76475 - DNA, 20 bp, Artificial Sequence
  Description of Artificial Sequence: Synthetic oligonucleotide
  Target: SCNA; (+) strand; PAM type: YTN; PAM sequence: TTT
agcaggagcaacacagtgaa

SEQ ID NO: 76476 - DNA, 20 bp, Artificial Sequence
  Description of Artificial Sequence: Synthetic oligonucleotide
  Target: SCNA; (+) strand; PAM type: YTN; PAM sequence: TTA
gcaggagcaacacagtgaac

SEQ ID NO: 76477 - DNA, 20 bp, Artificial Sequence
  Description of Artificial Sequence: Synthetic oligonucleotide
  Target: SCNA; (+) strand; PAM type: YTN; PAM sequence: TTC
cagcagagattatggcagag

SEQ ID NO: 76478 - DNA, 20 bp, Artificial Sequence
  Description of Artificial Sequence: Synthetic oligonucleotide
  Target: SCNA; (+) strand; PAM type: YTN; PAM sequence: TTA
tggcagagattactgtgatc

SEQ ID NO: 76479 - DNA, 20 bp, Artificial Sequence
  Description of Artificial Sequence: Synthetic oligonucleotide
  Target: SCNA; (+) strand; PAM type: YTN; PAM sequence: TTA
ctgtgatcttgggcaaaagt

SEQ ID NO: 76480 - DNA, 20 bp, Artificial Sequence
  Description of Artificial Sequence: Synthetic oligonucleotide
  Target: SCNA; (+) strand; PAM type: YTN; PAM sequence: CTG
tgatcttgggcaaaagtgtg

SEQ ID NO: 76481 - DNA, 20 bp, Artificial Sequence
  Description of Artificial Sequence: Synthetic oligonucleotide
  Target: SCNA; (+) strand; PAM type: YTN; PAM sequence: CTT
gggcaaaagtgtgtatctta

SEQ ID NO: 76482 - DNA, 20 bp, Artificial Sequence
  Description of Artificial Sequence: Synthetic oligonucleotide
  Target: SCNA; (+) strand; PAM type: YTN; PAM sequence: TTG
ggcaaaagtgtgtatcttag

SEQ ID NO: 76483 - DNA, 20 bp, Artificial Sequence
  Description of Artificial Sequence: Synthetic oligonucleotide
  Target: SCNA; (+) strand; PAM type: YTN; PAM sequence: CTT
aggaatttaagatttaagaa

SEQ ID NO: 76484 - DNA, 20 bp, Artificial Sequence
  Description of Artificial Sequence: Synthetic oligonucleotide
  Target: SCNA; (+) strand; PAM type: YTN; PAM sequence: TTA
ggaatttaagatttaagaaa

SEQ ID NO: 76485 - DNA, 20 bp, Artificial Sequence
  Description of Artificial Sequence: Synthetic oligonucleotide
  Target: SCNA; (+) strand; PAM type: YTN; PAM sequence: TTT
aagatttaagaaagaatttt

SEQ ID NO: 76486 - DNA, 20 bp, Artificial Sequence
  Description of Artificial Sequence: Synthetic oligonucleotide
  Target: SCNA; (+) strand; PAM type: YTN; PAM sequence: TTA
agatttaagaaagaatttta

SEQ ID NO: 76487 - DNA, 20 bp, Artificial Sequence
  Description of Artificial Sequence: Synthetic oligonucleotide
  Target: SCNA; (+) strand; PAM type: YTN; PAM sequence: TTT
aagaaagaattttaggcatg

SEQ ID NO: 76488 - DNA, 20 bp, Artificial Sequence
  Description of Artificial Sequence: Synthetic oligonucleotide
  Target: SCNA; (+) strand; PAM type: YTN; PAM sequence: TTA
agaaagaattttaggcatga

SEQ ID NO: 76489 - DNA, 20 bp, Artificial Sequence
  Description of Artificial Sequence: Synthetic oligonucleotide
  Target: SCNA; (+) strand; PAM type: YTN; PAM sequence: TTT
taggcatgaactatatgaca

SEQ ID NO: 76490 - DNA, 20 bp, Artificial Sequence
  Description of Artificial Sequence: Synthetic oligonucleotide
  Target: SCNA; (+) strand; PAM type: YTN; PAM sequence: TTT
aggcatgaactatatgacaa

SEQ ID NO: 76491 - DNA, 20 bp, Artificial Sequence
  Description of Artificial Sequence: Synthetic oligonucleotide
  Target: SCNA; (+) strand; PAM type: YTN; PAM sequence: TTA
ggcatgaactatatgacaaa

SEQ ID NO: 76492 - DNA, 20 bp, Artificial Sequence
  Description of Artificial Sequence: Synthetic oligonucleotide
  Target: SCNA; (+) strand; PAM type: YTN; PAM sequence: CTA
tatgacaaacatacataaag

SEQ ID NO: 76493 - DNA, 20 bp, Artificial Sequence
  Description of Artificial Sequence: Synthetic oligonucleotide
  Target: SCNA; (+) strand; PAM type: YTN; PAM sequence: CTG
ctatgctctggtgacaatgg

SEQ ID NO: 76494 - DNA, 20 bp, Artificial Sequence
  Description of Artificial Sequence: Synthetic oligonucleotide
  Target: SCNA; (+) strand; PAM type: YTN; PAM sequence: CTA
tgctctggtgacaatggatc

SEQ ID NO: 76495 - DNA, 20 bp, Artificial Sequence
  Description of Artificial Sequence: Synthetic oligonucleotide
  Target: SCNA; (+) strand; PAM type: YTN; PAM sequence: CTC
tggtgacaatggatcaacca

SEQ ID NO: 76496 - DNA, 20 bp, Artificial Sequence
  Description of Artificial Sequence: Synthetic oligonucleotide
  Target: SCNA; (+) strand; PAM type: YTN; PAM sequence: CTG
gtgacaatggatcaaccagt

SEQ ID NO: 76497 - DNA, 20 bp, Artificial Sequence
  Description of Artificial Sequence: Synthetic oligonucleotide
  Target: SCNA; (+) strand; PAM type: YTN; PAM sequence: TTA
gagaattcacatgatagata

SEQ ID NO: 76498 - DNA, 20 bp, Artificial Sequence
  Description of Artificial Sequence: Synthetic oligonucleotide
  Target: SCNA; (+) strand; PAM type: YTN; PAM sequence: TTC
acatgatagatactgaattt

SEQ ID NO: 76499 - DNA, 20 bp, Artificial Sequence
  Description of Artificial Sequence: Synthetic oligonucleotide
  Target: SCNA; (+) strand; PAM type: YTN; PAM sequence: CTG
aatttcctggatgctcagtg

SEQ ID NO: 76500 - DNA, 20 bp, Artificial Sequence
  Description of Artificial Sequence: Synthetic oligonucleotide
  Target: SCNA; (+) strand; PAM type: YTN; PAM sequence: TTT
cctggatgctcagtggttag

SEQ ID NO: 76501 - DNA, 20 bp, Artificial Sequence
  Description of Artificial Sequence: Synthetic oligonucleotide
  Target: SCNA; (+) strand; PAM type: YTN; PAM sequence: TTC
ctggatgctcagtggttagc

SEQ ID NO: 76502 - DNA, 20 bp, Artificial Sequence
  Description of Artificial Sequence: Synthetic oligonucleotide
  Target: SCNA; (+) strand; PAM type: YTN; PAM sequence: CTG
gatgctcagtggttagctaa

SEQ ID NO: 76503 - DNA, 20 bp, Artificial Sequence
  Description of Artificial Sequence: Synthetic oligonucleotide
  Target: SCNA; (+) strand; PAM type: YTN; PAM sequence: CTC
agtggttagctaagtcttaa

SEQ ID NO: 76504 - DNA, 20 bp, Artificial Sequence
  Description of Artificial Sequence: Synthetic oligonucleotide
  Target: SCNA; (+) strand; PAM type: YTN; PAM sequence: TTA
gctaagtcttaagtttatga

SEQ ID NO: 76505 - DNA, 20 bp, Artificial Sequence
  Description of Artificial Sequence: Synthetic oligonucleotide
  Target: SCNA; (+) strand; PAM type: YTN; PAM sequence: CTA
agtcttaagtttatgaatga

SEQ ID NO: 76506 - DNA, 20 bp, Artificial Sequence
  Description of Artificial Sequence: Synthetic oligonucleotide
  Target: SCNA; (+) strand; PAM type: YTN; PAM sequence: CTT
aagtttatgaatgaacaaat

SEQ ID NO: 76507 - DNA, 20 bp, Artificial Sequence
  Description of Artificial Sequence: Synthetic oligonucleotide
  Target: SCNA; (+) strand; PAM type: YTN; PAM sequence: TTA
agtttatgaatgaacaaatg

SEQ ID NO: 76508 - DNA, 20 bp, Artificial Sequence
  Description of Artificial Sequence: Synthetic oligonucleotide
  Target: SCNA; (+) strand; PAM type: YTN; PAM sequence: TTT
atgaatgaacaaatgacaca

SEQ ID NO: 76509 - DNA, 20 bp, Artificial Sequence
  Description of Artificial Sequence: Synthetic oligonucleotide
  Target: SCNA; (+) strand; PAM type: YTN; PAM sequence: TTA
tgaatgaacaaatgacacaa

SEQ ID NO: 76510 - DNA, 20 bp, Artificial Sequence
  Description of Artificial Sequence: Synthetic oligonucleotide
  Target: SCNA; (+) strand; PAM type: YTN; PAM sequence: TTA
gaacgaggatggagaaaaaa

SEQ ID NO: 76511 - DNA, 20 bp, Artificial Sequence
  Description of Artificial Sequence: Synthetic oligonucleotide
  Target: SCNA; (+) strand; PAM type: YTN; PAM sequence: CTT
taaaatatcagtcaaacgac

SEQ ID NO: 76512 - DNA, 20 bp, Artificial Sequence
  Description of Artificial Sequence: Synthetic oligonucleotide
  Target: SCNA; (+) strand; PAM type: YTN; PAM sequence: TTT
aaaatatcagtcaaacgaca

SEQ ID NO: 76513 - DNA, 20 bp, Artificial Sequence
  Description of Artificial Sequence: Synthetic oligonucleotide
  Target: SCNA; (+) strand; PAM type: YTN; PAM sequence: TTA
aaatatcagtcaaacgacaa

SEQ ID NO: 76514 - DNA, 20 bp, Artificial Sequence
  Description of Artificial Sequence: Synthetic oligonucleotide
  Target: SCNA; (+) strand; PAM type: YTN; PAM sequence: TTC
cagcttcttatgaatgaaga

SEQ ID NO: 76515 - DNA, 20 bp, Artificial Sequence
  Description of Artificial Sequence: Synthetic oligonucleotide
  Target: SCNA; (+) strand; PAM type: YTN; PAM sequence: CTT
cttatgaatgaagagccagt

SEQ ID NO: 76516 - DNA, 20 bp, Artificial Sequence
  Description of Artificial Sequence: Synthetic oligonucleotide
  Target: SCNA; (+) strand; PAM type: YTN; PAM sequence: TTC
ttatgaatgaagagccagtt

SEQ ID NO: 76517 - DNA, 20 bp, Artificial Sequence
  Description of Artificial Sequence: Synthetic oligonucleotide
  Target: SCNA; (+) strand; PAM type: YTN; PAM sequence: CTT
atgaatgaagagccagttaa

SEQ ID NO: 76518 - DNA, 20 bp, Artificial Sequence
  Description of Artificial Sequence: Synthetic oligonucleotide
  Target: SCNA; (+) strand; PAM type: YTN; PAM sequence: TTA
tgaatgaagagccagttaaa

SEQ ID NO: 76519 - DNA, 20 bp, Artificial Sequence
  Description of Artificial Sequence: Synthetic oligonucleotide
  Target: SCNA; (+) strand; PAM type: YTN; PAM sequence: TTA
aatacgtttgaatgaaaaat

SEQ ID NO: 76520 - DNA, 20 bp, Artificial Sequence
  Description of Artificial Sequence: Synthetic oligonucleotide
  Target: SCNA; (+) strand; PAM type: YTN; PAM sequence: TTT
gaatgaaaaatgacgtgtga

SEQ ID NO: 76521 - DNA, 20 bp, Artificial Sequence
  Description of Artificial Sequence: Synthetic oligonucleotide
  Target: SCNA; (+) strand; PAM type: YTN; PAM sequence: TTG
aatgaaaaatgacgtgtgaa

SEQ ID NO: 76522 - DNA, 20 bp, Artificial Sequence
  Description of Artificial Sequence: Synthetic oligonucleotide
  Target: SCNA; (+) strand; PAM type: YTN; PAM sequence: TTA
aagttaaccaggagagaaag

SEQ ID NO: 76523 - DNA, 20 bp, Artificial Sequence
  Description of Artificial Sequence: Synthetic oligonucleotide
  Target: SCNA; (+) strand; PAM type: YTN; PAM sequence: TTA
accaggagagaaagctaaac

SEQ ID NO: 76524 - DNA, 20 bp, Artificial Sequence
  Description of Artificial Sequence: Synthetic oligonucleotide
  Target: SCNA; (+) strand; PAM type: YTN; PAM sequence: CTA
aactaccgctgcacaggctc

SEQ ID NO: 76525 - DNA, 20 bp, Artificial Sequence
  Description of Artificial Sequence: Synthetic oligonucleotide
  Target: SCNA; (+) strand; PAM type: YTN; PAM sequence: CTA
ccgctgcacaggctcagcat

SEQ ID NO: 76526 - DNA, 20 bp, Artificial Sequence
  Description of Artificial Sequence: Synthetic oligonucleotide
  Target: SCNA; (+) strand; PAM type: YTN; PAM sequence: CTG
cacaggctcagcatctattg

SEQ ID NO: 76527 - DNA, 20 bp, Artificial Sequence
  Description of Artificial Sequence: Synthetic oligonucleotide
  Target: SCNA; (+) strand; PAM type: YTN; PAM sequence: CTC
agcatctattgcactaatct

SEQ ID NO: 76528 - DNA, 20 bp, Artificial Sequence
  Description of Artificial Sequence: Synthetic oligonucleotide
  Target: SCNA; (+) strand; PAM type: YTN; PAM sequence: CTA
ttgcactaatctaggcatga

SEQ ID NO: 76529 - DNA, 20 bp, Artificial Sequence
  Description of Artificial Sequence: Synthetic oligonucleotide
  Target: SCNA; (+) strand; PAM type: YTN; PAM sequence: TTG
cactaatctaggcatgagtt

SEQ ID NO: 76530 - DNA, 20 bp, Artificial Sequence
  Description of Artificial Sequence: Synthetic oligonucleotide
  Target: SCNA; (+) strand; PAM type: YTN; PAM sequence: CTA
atctaggcatgagttgtgtc

SEQ ID NO: 76531 - DNA, 20 bp, Artificial Sequence
  Description of Artificial Sequence: Synthetic oligonucleotide
  Target: SCNA; (+) strand; PAM type: YTN; PAM sequence: CTA
ggcatgagttgtgtcctatc

SEQ ID NO: 76532 - DNA, 20 bp, Artificial Sequence
  Description of Artificial Sequence: Synthetic oligonucleotide
  Target: SCNA; (+) strand; PAM type: YTN; PAM sequence: TTG
tgtcctatccaaaccttcat

SEQ ID NO: 76533 - DNA, 20 bp, Artificial Sequence
  Description of Artificial Sequence: Synthetic oligonucleotide
  Target: SCNA; (+) strand; PAM type: YTN; PAM sequence: CTA
tccaaaccttcataatggaa

SEQ ID NO: 76534 - DNA, 20 bp, Artificial Sequence
  Description of Artificial Sequence: Synthetic oligonucleotide
  Target: SCNA; (+) strand; PAM type: YTN; PAM sequence: CTT
cataatggaagagatggggg

SEQ ID NO: 76535 - DNA, 20 bp, Artificial Sequence
  Description of Artificial Sequence: Synthetic oligonucleotide
  Target: SCNA; (+) strand; PAM type: YTN; PAM sequence: TTC
ataatggaagagatggggga

SEQ ID NO: 76536 - DNA, 20 bp, Artificial Sequence
  Description of Artificial Sequence: Synthetic oligonucleotide
  Target: SCNA; (+) strand; PAM type: YTN; PAM sequence: TTG
gaaaaaacaaggatcctaaa

SEQ ID NO: 76537 - DNA, 20 bp, Artificial Sequence
  Description of Artificial Sequence: Synthetic oligonucleotide
  Target: SCNA; (+) strand; PAM type: YTN; PAM sequence: CTA
aaatcatcttatggctaaat

SEQ ID NO: 76538 - DNA, 20 bp, Artificial Sequence
  Description of Artificial Sequence: Synthetic oligonucleotide
  Target: SCNA; (+) strand; PAM type: YTN; PAM sequence: CTT
atggctaaatttgagaggga

SEQ ID NO: 76539 - DNA, 20 bp, Artificial Sequence
  Description of Artificial Sequence: Synthetic oligonucleotide
  Target: SCNA; (+) strand; PAM type: YTN; PAM sequence: TTA
tggctaaatttgagagggag

SEQ ID NO: 76540 - DNA, 20 bp, Artificial Sequence
  Description of Artificial Sequence: Synthetic oligonucleotide
  Target: SCNA; (+) strand; PAM type: YTN; PAM sequence: CTA
aatttgagagggagggaact

SEQ ID NO: 76541 - DNA, 20 bp, Artificial Sequence
  Description of Artificial Sequence: Synthetic oligonucleotide
  Target: SCNA; (+) strand; PAM type: YTN; PAM sequence: TTT
gagagggagggaactatgga

SEQ ID NO: 76542 - DNA, 20 bp, Artificial Sequence
  Description of Artificial Sequence: Synthetic oligonucleotide
  Target: SCNA; (+) strand; PAM type: YTN; PAM sequence: TTG
agagggagggaactatggag

SEQ ID NO: 76543 - DNA, 20 bp, Artificial Sequence
  Description of Artificial Sequence: Synthetic oligonucleotide
  Target: SCNA; (+) strand; PAM type: YTN; PAM sequence: CTA
tggaggcatcagtgatttat

SEQ ID NO: 76544 - DNA, 20 bp, Artificial Sequence
  Description of Artificial Sequence: Synthetic oligonucleotide
  Target: SCNA; (+) strand; PAM type: YTN; PAM sequence: TTT
atatggtttatattgtaggt

SEQ ID NO: 76545 - DNA, 20 bp, Artificial Sequence
  Description of Artificial Sequence: Synthetic oligonucleotide
  Target: SCNA; (+) strand; PAM type: YTN; PAM sequence: TTA
tatggtttatattgtaggtc

SEQ ID NO: 76546 - DNA, 20 bp, Artificial Sequence
  Description of Artificial Sequence: Synthetic oligonucleotide
  Target: SCNA; (+) strand; PAM type: YTN; PAM sequence: TTT
atattgtaggtcatgggaag

SEQ ID NO: 76547 - DNA, 20 bp, Artificial Sequence
  Description of Artificial Sequence: Synthetic oligonucleotide
  Target: SCNA; (+) strand; PAM type: YTN; PAM sequence: TTA
tattgtaggtcatgggaagt

SEQ ID NO: 76548 - DNA, 20 bp, Artificial Sequence
  Description of Artificial Sequence: Synthetic oligonucleotide
  Target: SCNA; (+) strand; PAM type: YTN; PAM sequence: TTG
taggtcatgggaagtcataa

SEQ ID NO: 76549 - DNA, 20 bp, Artificial Sequence
  Description of Artificial Sequence: Synthetic oligonucleotide
  Target: SCNA; (+) strand; PAM type: YTN; PAM sequence: TTC
tggtgccaatggtgataact

SEQ ID NO: 76550 - DNA, 20 bp, Artificial Sequence
  Description of Artificial Sequence: Synthetic oligonucleotide
  Target: SCNA; (+) strand; PAM type: YTN; PAM sequence: CTG
gtgccaatggtgataactga

SEQ ID NO: 76551 - DNA, 20 bp, Artificial Sequence
  Description of Artificial Sequence: Synthetic oligonucleotide
  Target: SCNA; (+) strand; PAM type: YTN; PAM sequence: CTG
atatgaagggactccttgct

SEQ ID NO: 76552 - DNA, 20 bp, Artificial Sequence
  Description of Artificial Sequence: Synthetic oligonucleotide
  Target: SCNA; (+) strand; PAM type: YTN; PAM sequence: CTC
cttgcttgaaggaaaaatta

SEQ ID NO: 76553 - DNA, 20 bp, Artificial Sequence
  Description of Artificial Sequence: Synthetic oligonucleotide
  Target: SCNA; (+) strand; PAM type: YTN; PAM sequence: CTT
gcttgaaggaaaaattaagt

SEQ ID NO: 76554 - DNA, 20 bp, Artificial Sequence
  Description of Artificial Sequence: Synthetic oligonucleotide
  Target: SCNA; (+) strand; PAM type: YTN; PAM sequence: TTG
cttgaaggaaaaattaagtt

SEQ ID NO: 76555 - DNA, 20 bp, Artificial Sequence
  Description of Artificial Sequence: Synthetic oligonucleotide
  Target: SCNA; (+) strand; PAM type: YTN; PAM sequence: CTT
gaaggaaaaattaagttaaa

SEQ ID NO: 76556 - DNA, 20 bp, Artificial Sequence
  Description of Artificial Sequence: Synthetic oligonucleotide
  Target: SCNA; (+) strand; PAM type: YTN; PAM sequence: TTG
aaggaaaaattaagttaaac

SEQ ID NO: 76557 - DNA, 20 bp, Artificial Sequence
  Description of Artificial Sequence: Synthetic oligonucleotide
  Target: SCNA; (+) strand; PAM type: YTN; PAM sequence: TTA
agttaaactgagacctgttg

SEQ ID NO: 76558 - DNA, 20 bp, Artificial Sequence
  Description of Artificial Sequence: Synthetic oligonucleotide
  Target: SCNA; (+) strand; PAM type: YTN; PAM sequence: TTA
aactgagacctgttgaaatc

SEQ ID NO: 76559 - DNA, 20 bp, Artificial Sequence
  Description of Artificial Sequence: Synthetic oligonucleotide
  Target: SCNA; (+) strand; PAM type: YTN; PAM sequence: CTG
agacctgttgaaatcaaagt

SEQ ID NO: 76560 - DNA, 20 bp, Artificial Sequence
  Description of Artificial Sequence: Synthetic oligonucleotide
  Target: SCNA; (+) strand; PAM type: YTN; PAM sequence: CTG
ttgaaatcaaagtagtagtg

SEQ ID NO: 76561 - DNA, 20 bp, Artificial Sequence
  Description of Artificial Sequence: Synthetic oligonucleotide
  Target: SCNA; (+) strand; PAM type: YTN; PAM sequence: TTG
aaatcaaagtagtagtgtga

SEQ ID NO: 76562 - DNA, 20 bp, Artificial Sequence
  Description of Artificial Sequence: Synthetic oligonucleotide
  Target: SCNA; (+) strand; PAM type: YTN; PAM sequence: CTA
aataaaaatgtgtagcgtgc

SEQ ID NO: 76563 - DNA, 20 bp, Artificial Sequence
  Description of Artificial Sequence: Synthetic oligonucleotide
  Target: SCNA; (+) strand; PAM type: YTN; PAM sequence: CTG
gctagaaatgtaggcaaagg

SEQ ID NO: 76564 - DNA, 20 bp, Artificial Sequence
  Description of Artificial Sequence: Synthetic oligonucleotide
  Target: SCNA; (+) strand; PAM type: YTN; PAM sequence: CTA
gaaatgtaggcaaagggata

SEQ ID NO: 76565 - DNA, 20 bp, Artificial Sequence
  Description of Artificial Sequence: Synthetic oligonucleotide
  Target: SCNA; (+) strand; PAM type: YTN; PAM sequence: CTA
taaggcattgcggagggaag

SEQ ID NO: 76566 - DNA, 20 bp, Artificial Sequence
  Description of Artificial Sequence: Synthetic oligonucleotide
  Target: SCNA; (+) strand; PAM type: YTN; PAM sequence: TTG
cggagggaagaggaaaagct

SEQ ID NO: 76567 - DNA, 20 bp, Artificial Sequence
  Description of Artificial Sequence: Synthetic oligonucleotide
  Target: SCNA; (+) strand; PAM type: YTN; PAM sequence: CTT
ggagaatgagtcagaaatcc

SEQ ID NO: 76568 - DNA, 20 bp, Artificial Sequence
  Description of Artificial Sequence: Synthetic oligonucleotide
  Target: SCNA; (+) strand; PAM type: YTN; PAM sequence: TTG
gagaatgagtcagaaatcca

SEQ ID NO: 76569 - DNA, 20 bp, Artificial Sequence
  Description of Artificial Sequence: Synthetic oligonucleotide
  Target: SCNA; (+) strand; PAM type: YTN; PAM sequence: TTA
aagatttaagttgtgagaaa

SEQ ID NO: 76570 - DNA, 20 bp, Artificial Sequence
  Description of Artificial Sequence: Synthetic oligonucleotide
  Target: SCNA; (+) strand; PAM type: YTN; PAM sequence: TTT
aagttgtgagaaagttttta

SEQ ID NO: 76571 - DNA, 20 bp, Artificial Sequence
  Description of Artificial Sequence: Synthetic oligonucleotide
  Target: SCNA; (+) strand; PAM type: YTN; PAM sequence: TTA
agttgtgagaaagtttttat

SEQ ID NO: 76572 - DNA, 20 bp, Artificial Sequence
  Description of Artificial Sequence: Synthetic oligonucleotide
  Target: SCNA; (+) strand; PAM type: YTN; PAM sequence: TTG
tgagaaagtttttatggaga

SEQ ID NO: 76573 - DNA, 20 bp, Artificial Sequence
  Description of Artificial Sequence: Synthetic oligonucleotide
  Target: SCNA; (+) strand; PAM type: YTN; PAM sequence: TTT
ttatggagagtgttctgggg

SEQ ID NO: 76574 - DNA, 20 bp, Artificial Sequence
  Description of Artificial Sequence: Synthetic oligonucleotide
  Target: SCNA; (+) strand; PAM type: YTN; PAM sequence: TTT
tatggagagtgttctgggga

SEQ ID NO: 76575 - DNA, 20 bp, Artificial Sequence
  Description of Artificial Sequence: Synthetic oligonucleotide
  Target: SCNA; (+) strand; PAM type: YTN; PAM sequence: TTT
atggagagtgttctggggaa

SEQ ID NO: 76576 - DNA, 20 bp, Artificial Sequence
  Description of Artificial Sequence: Synthetic oligonucleotide
  Target: SCNA; (+) strand; PAM type: YTN; PAM sequence: TTA
tggagagtgttctggggaat

SEQ ID NO: 76577 - DNA, 20 bp, Artificial Sequence
  Description of Artificial Sequence: Synthetic oligonucleotide
  Target: SCNA; (+) strand; PAM type: YTN; PAM sequence: TTC
tggggaataaattagagatt

SEQ ID NO: 76578 - DNA, 20 bp, Artificial Sequence
  Description of Artificial Sequence: Synthetic oligonucleotide
  Target: SCNA; (+) strand; PAM type: YTN; PAM sequence: CTG
gggaataaattagagattaa

SEQ ID NO: 76579 - DNA, 20 bp, Artificial Sequence
  Description of Artificial Sequence: Synthetic oligonucleotide
  Target: SCNA; (+) strand; PAM type: YTN; PAM sequence: TTA
gagattaataaaagaataaa

SEQ ID NO: 76580 - DNA, 20 bp, Artificial Sequence
  Description of Artificial Sequence: Synthetic oligonucleotide
  Target: SCNA; (+) strand; PAM type: YTN; PAM sequence: TTA
ataaaagaataaaaaatcaa

SEQ ID NO: 76581 - DNA, 20 bp, Artificial Sequence
  Description of Artificial Sequence: Synthetic oligonucleotide
  Target: SCNA; (+) strand; PAM type: YTN; PAM sequence: CTG
gtgtgtgcaaacatgtatag

SEQ ID NO: 76582 - DNA, 20 bp, Artificial Sequence
  Description of Artificial Sequence: Synthetic oligonucleotide
  Target: SCNA; (+) strand; PAM type: YTN; PAM sequence: CTG
catgaatgtcaagtttacta

SEQ ID NO: 76583 - DNA, 20 bp, Artificial Sequence
  Description of Artificial Sequence: Synthetic oligonucleotide
  Target: SCNA; (+) strand; PAM type: YTN; PAM sequence: TTT
actatcttacgtggctatat

SEQ ID NO: 76584 - DNA, 20 bp, Artificial Sequence
  Description of Artificial Sequence: Synthetic oligonucleotide
  Target: SCNA; (+) strand; PAM type: YTN; PAM sequence: TTA
ctatcttacgtggctatatc

SEQ ID NO: 76585 - DNA, 20 bp, Artificial Sequence
  Description of Artificial Sequence: Synthetic oligonucleotide
  Target: SCNA; (+) strand; PAM type: YTN; PAM sequence: CTA
tcttacgtggctatatcact

SEQ ID NO: 76586 - DNA, 20 bp, Artificial Sequence
  Description of Artificial Sequence: Synthetic oligonucleotide
  Target: SCNA; (+) strand; PAM type: YTN; PAM sequence: CTT
acgtggctatatcactatgc

SEQ ID NO: 76587 - DNA, 20 bp, Artificial Sequence
  Description of Artificial Sequence: Synthetic oligonucleotide
  Target: SCNA; (+) strand; PAM type: YTN; PAM sequence: TTA
cgtggctatatcactatgca

SEQ ID NO: 76588 - DNA, 20 bp, Artificial Sequence
  Description of Artificial Sequence: Synthetic oligonucleotide
  Target: SCNA; (+) strand; PAM type: YTN; PAM sequence: CTA
tatcactatgcaaactatag

SEQ ID NO: 76589 - DNA, 20 bp, Artificial Sequence
  Description of Artificial Sequence: Synthetic oligonucleotide
  Target: SCNA; (+) strand; PAM type: YTN; PAM sequence: CTA
tgcaaactatagcctttcat

SEQ ID NO: 76590 - DNA, 20 bp, Artificial Sequence
  Description of Artificial Sequence: Synthetic oligonucleotide
  Target: SCNA; (+) strand; PAM type: YTN; PAM sequence: CTA
tagcctttcatagtacgtaa

SEQ ID NO: 76591 - DNA, 20 bp, Artificial Sequence
  Description of Artificial Sequence: Synthetic oligonucleotide
  Target: SCNA; (+) strand; PAM type: YTN; PAM sequence: CTT
tcatagtacgtaagtgaaag

SEQ ID NO: 76592 - DNA, 20 bp, Artificial Sequence
  Description of Artificial Sequence: Synthetic oligonucleotide
  Target: SCNA; (+) strand; PAM type: YTN; PAM sequence: TTT
catagtacgtaagtgaaagc

SEQ ID NO: 76593 - DNA, 20 bp, Artificial Sequence
  Description of Artificial Sequence: Synthetic oligonucleotide
  Target: SCNA; (+) strand; PAM type: YTN; PAM sequence: TTC
atagtacgtaagtgaaagca

SEQ ID NO: 76594 - DNA, 20 bp, Artificial Sequence
  Description of Artificial Sequence: Synthetic oligonucleotide
  Target: SCNA; (+) strand; PAM type: YTN; PAM sequence: TTA
gaggattatctgtgtagtcc

SEQ ID NO: 76595 - DNA, 20 bp, Artificial Sequence
  Description of Artificial Sequence: Synthetic oligonucleotide
  Target: SCNA; (+) strand; PAM type: YTN; PAM sequence: TTA
tctgtgtagtcctaaaatcc

SEQ ID NO: 76596 - DNA, 20 bp, Artificial Sequence
  Description of Artificial Sequence: Synthetic oligonucleotide
  Target: SCNA; (+) strand; PAM type: YTN; PAM sequence: CTG
tgtagtcctaaaatcctttg

SEQ ID NO: 76597 - DNA, 20 bp, Artificial Sequence
  Description of Artificial Sequence: Synthetic oligonucleotide
  Target: SCNA; (+) strand; PAM type: YTN; PAM sequence: CTA
aaatcctttgtgaatacatc

SEQ ID NO: 76598 - DNA, 20 bp, Artificial Sequence
  Description of Artificial Sequence: Synthetic oligonucleotide
  Target: SCNA; (+) strand; PAM type: YTN; PAM sequence: CTT
tgtgaatacatcacattgtc

SEQ ID NO: 76599 - DNA, 20 bp, Artificial Sequence
  Description of Artificial Sequence: Synthetic oligonucleotide
  Target: SCNA; (+) strand; PAM type: YTN; PAM sequence: TTT
gtgaatacatcacattgtcc

SEQ ID NO: 76600 - DNA, 20 bp, Artificial Sequence
  Description of Artificial Sequence: Synthetic oligonucleotide
  Target: SCNA; (+) strand; PAM type: YTN; PAM sequence: TTG
tgaatacatcacattgtcct

SEQ ID NO: 76601 - DNA, 20 bp, Artificial Sequence
  Description of Artificial Sequence: Synthetic oligonucleotide
  Target: SCNA; (+) strand; PAM type: YTN; PAM sequence: TTG
tcctattacattcttgccca

SEQ ID NO: 76602 - DNA, 20 bp, Artificial Sequence
  Description of Artificial Sequence: Synthetic oligonucleotide
  Target: SCNA; (+) strand; PAM type: YTN; PAM sequence: CTA
ttacattcttgcccatgttt

SEQ ID NO: 76603 - DNA, 20 bp, Artificial Sequence
  Description of Artificial Sequence: Synthetic oligonucleotide
  Target: SCNA; (+) strand; PAM type: YTN; PAM sequence: TTA
cattcttgcccatgttttac

SEQ ID NO: 76604 - DNA, 20 bp, Artificial Sequence
  Description of Artificial Sequence: Synthetic oligonucleotide
  Target: SCNA; (+) strand; PAM type: YTN; PAM sequence: TTC
ttgcccatgttttacataac

SEQ ID NO: 76605 - DNA, 20 bp, Artificial Sequence
  Description of Artificial Sequence: Synthetic oligonucleotide
  Target: SCNA; (+) strand; PAM type: YTN; PAM sequence: CTT
gcccatgttttacataacca

SEQ ID NO: 76606 - DNA, 20 bp, Artificial Sequence
  Description of Artificial Sequence: Synthetic oligonucleotide
  Target: SCNA; (+) strand; PAM type: YTN; PAM sequence: TTG
cccatgttttacataaccag

SEQ ID NO: 76607 - DNA, 20 bp, Artificial Sequence
  Description of Artificial Sequence: Synthetic oligonucleotide
  Target: SCNA; (+) strand; PAM type: YTN; PAM sequence: TTT
tacataaccagactgactgt

SEQ ID NO: 76608 - DNA, 20 bp, Artificial Sequence
  Description of Artificial Sequence: Synthetic oligonucleotide
  Target: SCNA; (+) strand; PAM type: YTN; PAM sequence: TTT
acataaccagactgactgta

SEQ ID NO: 76609 - DNA, 20 bp, Artificial Sequence
  Description of Artificial Sequence: Synthetic oligonucleotide
  Target: SCNA; (+) strand; PAM type: YTN; PAM sequence: TTA
cataaccagactgactgtaa

SEQ ID NO: 76610 - DNA, 20 bp, Artificial Sequence
  Description of Artificial Sequence: Synthetic oligonucleotide
  Target: SCNA; (+) strand; PAM type: YTN; PAM sequence: CTG
actgtaatatgagtattgtg

SEQ ID NO: 76611 - DNA, 20 bp, Artificial Sequence
  Description of Artificial Sequence: Synthetic oligonucleotide
  Target: SCNA; (+) strand; PAM type: YTN; PAM sequence: CTG
taatatgagtattgtgtgtg

SEQ ID NO: 76612 - DNA, 20 bp, Artificial Sequence
  Description of Artificial Sequence: Synthetic oligonucleotide
  Target: SCNA; (+) strand; PAM type: YTN; PAM sequence: TTG
tgtgtgccctttgttaataa

SEQ ID NO: 76613 - DNA, 20 bp, Artificial Sequence
  Description of Artificial Sequence: Synthetic oligonucleotide
  Target: SCNA; (+) strand; PAM type: YTN; PAM sequence: CTT
tgttaataaatccttgtata

SEQ ID NO: 76614 - DNA, 20 bp, Artificial Sequence
  Description of Artificial Sequence: Synthetic oligonucleotide
  Target: SCNA; (+) strand; PAM type: YTN; PAM sequence: TTT
gttaataaatccttgtataa

SEQ ID NO: 76615 - DNA, 20 bp, Artificial Sequence
  Description of Artificial Sequence: Synthetic oligonucleotide
  Target: SCNA; (+) strand; PAM type: YTN; PAM sequence: TTG
ttaataaatccttgtataaa

SEQ ID NO: 76616 - DNA, 20 bp, Artificial Sequence
  Description of Artificial Sequence: Synthetic oligonucleotide
  Target: SCNA; (+) strand; PAM type: YTN; PAM sequence: TTA
ataaatccttgtataaaccc

SEQ ID NO: 76617 - DNA, 20 bp, Artificial Sequence
  Description of Artificial Sequence: Synthetic oligonucleotide
  Target: SCNA; (+) strand; PAM type: YTN; PAM sequence: CTT
gtataaaccccacaaggatt

SEQ ID NO: 76618 - DNA, 20 bp, Artificial Sequence
  Description of Artificial Sequence: Synthetic oligonucleotide
  Target: SCNA; (+) strand; PAM type: YTN; PAM sequence: TTG
tataaaccccacaaggattt

SEQ ID NO: 76619 - DNA, 20 bp, Artificial Sequence
  Description of Artificial Sequence: Synthetic oligonucleotide
  Target: SCNA; (+) strand; PAM type: YTN; PAM sequence: TTT
ctctaaagacaaacctggct

SEQ ID NO: 76620 - DNA, 20 bp, Artificial Sequence
  Description of Artificial Sequence: Synthetic oligonucleotide
  Target: SCNA; (+) strand; PAM type: YTN; PAM sequence: TTC
tctaaagacaaacctggctt

SEQ ID NO: 76621 - DNA, 20 bp, Artificial Sequence
  Description of Artificial Sequence: Synthetic oligonucleotide
  Target: SCNA; (+) strand; PAM type: YTN; PAM sequence: CTC
taaagacaaacctggcttgc

SEQ ID NO: 76622 - DNA, 20 bp, Artificial Sequence
  Description of Artificial Sequence: Synthetic oligonucleotide
  Target: SCNA; (+) strand; PAM type: YTN; PAM sequence: CTA
aagacaaacctggcttgcta

SEQ ID NO: 76623 - DNA, 20 bp, Artificial Sequence
  Description of Artificial Sequence: Synthetic oligonucleotide
  Target: SCNA; (+) strand; PAM type: YTN; PAM sequence: CTG
gcttgctaaatattactcac

SEQ ID NO: 76624 - DNA, 20 bp, Artificial Sequence
  Description of Artificial Sequence: Synthetic oligonucleotide
  Target: SCNA; (+) strand; PAM type: YTN; PAM sequence: CTT
gctaaatattactcactcca

SEQ ID NO: 76625 - DNA, 20 bp, Artificial Sequence
  Description of Artificial Sequence: Synthetic oligonucleotide
  Target: SCNA; (+) strand; PAM type: YTN; PAM sequence: TTG
ctaaatattactcactccag

SEQ ID NO: 76626 - DNA, 20 bp, Artificial Sequence
  Description of Artificial Sequence: Synthetic oligonucleotide
  Target: SCNA; (+) strand; PAM type: YTN; PAM sequence: CTA
aatattactcactccaggct

SEQ ID NO: 76627 - DNA, 20 bp, Artificial Sequence
  Description of Artificial Sequence: Synthetic oligonucleotide
  Target: SCNA; (+) strand; PAM type: YTN; PAM sequence: TTA
ctcactccaggctaaatttt

SEQ ID NO: 76628 - DNA, 20 bp, Artificial Sequence
  Description of Artificial Sequence: Synthetic oligonucleotide
  Target: SCNA; (+) strand; PAM type: YTN; PAM sequence: CTC
actccaggctaaattttaat

SEQ ID NO: 76629 - DNA, 20 bp, Artificial Sequence
  Description of Artificial Sequence: Synthetic oligonucleotide
  Target: SCNA; (+) strand; PAM type: YTN; PAM sequence: CTC
caggctaaattttaataaat

SEQ ID NO: 76630 - DNA, 20 bp, Artificial Sequence
  Description of Artificial Sequence: Synthetic oligonucleotide
  Target: SCNA; (+) strand; PAM type: YTN; PAM sequence: CTA
aattttaataaattccataa

SEQ ID NO: 76631 - DNA, 20 bp, Artificial Sequence
  Description of Artificial Sequence: Synthetic oligonucleotide
  Target: SCNA; (+) strand; PAM type: YTN; PAM sequence: TTT
taataaattccataaaacac

SEQ ID NO: 76632 - DNA, 20 bp, Artificial Sequence
  Description of Artificial Sequence: Synthetic oligonucleotide
  Target: SCNA; (+) strand; PAM type: YTN; PAM sequence: TTT
aataaattccataaaacact

SEQ ID NO: 76633 - DNA, 20 bp, Artificial Sequence
  Description of Artificial Sequence: Synthetic oligonucleotide
  Target: SCNA; (+) strand; PAM type: YTN; PAM sequence: TTA
ataaattccataaaacacta

SEQ ID NO: 76634 - DNA, 20 bp, Artificial Sequence
  Description of Artificial Sequence: Synthetic oligonucleotide
  Target: SCNA; (+) strand; PAM type: YTN; PAM sequence: TTC
cataaaacactatcagatat

SEQ ID NO: 76635 - DNA, 20 bp, Artificial Sequence
  Description of Artificial Sequence: Synthetic oligonucleotide
  Target: SCNA; (+) strand; PAM type: YTN; PAM sequence: CTA
tcagatatattcctgagact

SEQ ID NO: 76636 - DNA, 20 bp, Artificial Sequence
  Description of Artificial Sequence: Synthetic oligonucleotide
  Target: SCNA; (+) strand; PAM type: YTN; PAM sequence: TTC
ctgagacttttgtattttaa

SEQ ID NO: 76637 - DNA, 20 bp, Artificial Sequence
  Description of Artificial Sequence: Synthetic oligonucleotide
  Target: SCNA; (+) strand; PAM type: YTN; PAM sequence: CTG
agacttttgtattttaagtg

SEQ ID NO: 76638 - DNA, 20 bp, Artificial Sequence
  Description of Artificial Sequence: Synthetic oligonucleotide
  Target: SCNA; (+) strand; PAM type: YTN; PAM sequence: CTT
ttgtattttaagtgctgtct

SEQ ID NO: 76639 - DNA, 20 bp, Artificial Sequence
  Description of Artificial Sequence: Synthetic oligonucleotide
  Target: SCNA; (+) strand; PAM type: YTN; PAM sequence: TTT
tgtattttaagtgctgtctt

SEQ ID NO: 76640 - DNA, 20 bp, Artificial Sequence
  Description of Artificial Sequence: Synthetic oligonucleotide
  Target: SCNA; (+) strand; PAM type: YTN; PAM sequence: TTT
gtattttaagtgctgtcttt

SEQ ID NO: 76641 - DNA, 20 bp, Artificial Sequence
  Description of Artificial Sequence: Synthetic oligonucleotide
  Target: SCNA; (+) strand; PAM type: YTN; PAM sequence: TTG
tattttaagtgctgtctttt

SEQ ID NO: 76642 - DNA, 20 bp, Artificial Sequence
  Description of Artificial Sequence: Synthetic oligonucleotide
  Target: SCNA; (+) strand; PAM type: YTN; PAM sequence: TTT
taagtgctgtcttttcctat

SEQ ID NO: 76643 - DNA, 20 bp, Artificial Sequence
  Description of Artificial Sequence: Synthetic oligonucleotide
  Target: SCNA; (+) strand; PAM type: YTN; PAM sequence: TTT
aagtgctgtcttttcctatt

SEQ ID NO: 76644 - DNA, 20 bp, Artificial Sequence
  Description of Artificial Sequence: Synthetic oligonucleotide
  Target: SCNA; (+) strand; PAM type: YTN; PAM sequence: TTA
agtgctgtcttttcctattt

SEQ ID NO: 76645 - DNA, 20 bp, Artificial Sequence
  Description of Artificial Sequence: Synthetic oligonucleotide
  Target: SCNA; (+) strand; PAM type: YTN; PAM sequence: CTG
tcttttcctatttggtattt

SEQ ID NO: 76646 - DNA, 20 bp, Artificial Sequence
  Description of Artificial Sequence: Synthetic oligonucleotide
  Target: SCNA; (+) strand; PAM type: YTN; PAM sequence: CTT
ttcctatttggtatttgcat

SEQ ID NO: 76647 - DNA, 20 bp, Artificial Sequence
  Description of Artificial Sequence: Synthetic oligonucleotide
  Target: SCNA; (+) strand; PAM type: YTN; PAM sequence: TTT
tcctatttggtatttgcatt

SEQ ID NO: 76648 - DNA, 20 bp, Artificial Sequence
  Description of Artificial Sequence: Synthetic oligonucleotide
  Target: SCNA; (+) strand; PAM type: YTN; PAM sequence: TTT
cctatttggtatttgcattg

SEQ ID NO: 76649 - DNA, 20 bp, Artificial Sequence
  Description of Artificial Sequence: Synthetic oligonucleotide
  Target: SCNA; (+) strand; PAM type: YTN; PAM sequence: TTC
ctatttggtatttgcattgg

SEQ ID NO: 76650 - DNA, 20 bp, Artificial Sequence
  Description of Artificial Sequence: Synthetic oligonucleotide
  Target: SCNA; (+) strand; PAM type: YTN; PAM sequence: CTA
tttggtatttgcattggtta

SEQ ID NO: 76651 - DNA, 20 bp, Artificial Sequence
  Description of Artificial Sequence: Synthetic oligonucleotide
  Target: SCNA; (+) strand; PAM type: YTN; PAM sequence: TTT
ggtatttgcattggttactt

SEQ ID NO: 76652 - DNA, 20 bp, Artificial Sequence
  Description of Artificial Sequence: Synthetic oligonucleotide
  Target: SCNA; (+) strand; PAM type: YTN; PAM sequence: TTG
gtatttgcattggttacttt

SEQ ID NO: 76653 - DNA, 20 bp, Artificial Sequence
  Description of Artificial Sequence: Synthetic oligonucleotide
  Target: SCNA; (+) strand; PAM type: YTN; PAM sequence: TTT
gcattggttacttttgtggg

SEQ ID NO: 76654 - DNA, 20 bp, Artificial Sequence
  Description of Artificial Sequence: Synthetic oligonucleotide
  Target: SCNA; (+) strand; PAM type: YTN; PAM sequence: TTG
cattggttacttttgtgggg

SEQ ID NO: 76655 - DNA, 20 bp, Artificial Sequence
  Description of Artificial Sequence: Synthetic oligonucleotide
  Target: SCNA; (+) strand; PAM type: YTN; PAM sequence: TTG
gttacttttgtggggtgtgc

SEQ ID NO: 76656 - DNA, 20 bp, Artificial Sequence
  Description of Artificial Sequence: Synthetic oligonucleotide
  Target: SCNA; (+) strand; PAM type: YTN; PAM sequence: TTA
cttttgtggggtgtgctggt

SEQ ID NO: 76657 - DNA, 20 bp, Artificial Sequence
  Description of Artificial Sequence: Synthetic oligonucleotide
  Target: SCNA; (+) strand; PAM type: YTN; PAM sequence: CTT
ttgtggggtgtgctggtttc

SEQ ID NO: 76658 - DNA, 20 bp, Artificial Sequence
  Description of Artificial Sequence: Synthetic oligonucleotide
  Target: SCNA; (+) strand; PAM type: YTN; PAM sequence: TTT
tgtggggtgtgctggtttct

SEQ ID NO: 76659 - DNA, 20 bp, Artificial Sequence
  Description of Artificial Sequence: Synthetic oligonucleotide
  Target: SCNA; (+) strand; PAM type: YTN; PAM sequence: TTT
gtggggtgtgctggtttctt

SEQ ID NO: 76660 - DNA, 20 bp, Artificial Sequence
  Description of Artificial Sequence: Synthetic oligonucleotide
  Target: SCNA; (+) strand; PAM type: YTN; PAM sequence: TTG
tggggtgtgctggtttcttc

SEQ ID NO: 76661 - DNA, 20 bp, Artificial Sequence
  Description of Artificial Sequence: Synthetic oligonucleotide
  Target: SCNA; (+) strand; PAM type: YTN; PAM sequence: CTG
gtttcttccttcttcccctt

SEQ ID NO: 76662 - DNA, 20 bp, Artificial Sequence
  Description of Artificial Sequence: Synthetic oligonucleotide
  Target: SCNA; (+) strand; PAM type: YTN; PAM sequence: TTT
cttccttcttccccttcaga

SEQ ID NO: 76663 - DNA, 20 bp, Artificial Sequence
  Description of Artificial Sequence: Synthetic oligonucleotide
  Target: SCNA; (+) strand; PAM type: YTN; PAM sequence: TTC
ttccttcttccccttcagac

SEQ ID NO: 76664 - DNA, 20 bp, Artificial Sequence
  Description of Artificial Sequence: Synthetic oligonucleotide
  Target: SCNA; (+) strand; PAM type: YTN; PAM sequence: CTT
ccttcttccccttcagacac

SEQ ID NO: 76665 - DNA, 20 bp, Artificial Sequence
  Description of Artificial Sequence: Synthetic oligonucleotide
  Target: SCNA; (+) strand; PAM type: YTN; PAM sequence: TTC
cttcttccccttcagacact

SEQ ID NO: 76666 - DNA, 20 bp, Artificial Sequence
  Description of Artificial Sequence: Synthetic oligonucleotide
  Target: SCNA; (+) strand; PAM type: YTN; PAM sequence: CTT
cttccccttcagacactcca

SEQ ID NO: 76667 - DNA, 20 bp, Artificial Sequence
  Description of Artificial Sequence: Synthetic oligonucleotide
  Target: SCNA; (+) strand; PAM type: YTN; PAM sequence: TTC
ttccccttcagacactccac

SEQ ID NO: 76668 - DNA, 20 bp, Artificial Sequence
  Description of Artificial Sequence: Synthetic oligonucleotide
  Target: SCNA; (+) strand; PAM type: YTN; PAM sequence: CTT
ccccttcagacactccaccc

SEQ ID NO: 76669 - DNA, 20 bp, Artificial Sequence
  Description of Artificial Sequence: Synthetic oligonucleotide
  Target: SCNA; (+) strand; PAM type: YTN; PAM sequence: TTC
cccttcagacactccacccc

SEQ ID NO: 76670 - DNA, 20 bp, Artificial Sequence
  Description of Artificial Sequence: Synthetic oligonucleotide
  Target: SCNA; (+) strand; PAM type: YTN; PAM sequence: CTT
cagacactccaccccactcc

SEQ ID NO: 76671 - DNA, 20 bp, Artificial Sequence
  Description of Artificial Sequence: Synthetic oligonucleotide
  Target: SCNA; (+) strand; PAM type: YTN; PAM sequence: TTC
agacactccaccccactcct

SEQ ID NO: 76672 - DNA, 20 bp, Artificial Sequence
  Description of Artificial Sequence: Synthetic oligonucleotide
  Target: SCNA; (+) strand; PAM type: YTN; PAM sequence: CTC
caccccactcctgcactgtg

SEQ ID NO: 76673 - DNA, 20 bp, Artificial Sequence
  Description of Artificial Sequence: Synthetic oligonucleotide
  Target: SCNA; (+) strand; PAM type: YTN; PAM sequence: CTC
ctgcactgtgcctggagaag

SEQ ID NO: 76674 - DNA, 20 bp, Artificial Sequence
  Description of Artificial Sequence: Synthetic oligonucleotide
  Target: SCNA; (+) strand; PAM type: YTN; PAM sequence: CTG
cactgtgcctggagaagatg

SEQ ID NO: 76675 - DNA, 20 bp, Artificial Sequence
  Description of Artificial Sequence: Synthetic oligonucleotide
  Target: SCNA; (+) strand; PAM type: YTN; PAM sequence: CTG
tgcctggagaagatgaattg

SEQ ID NO: 76676 - DNA, 20 bp, Artificial Sequence
  Description of Artificial Sequence: Synthetic oligonucleotide
  Target: SCNA; (+) strand; PAM type: YTN; PAM sequence: CTG
gagaagatgaattgtactga

SEQ ID NO: 76677 - DNA, 20 bp, Artificial Sequence
  Description of Artificial Sequence: Synthetic oligonucleotide
  Target: SCNA; (+) strand; PAM type: YTN; PAM sequence: TTG
tactgactacaccacggttt

SEQ ID NO: 76678 - DNA, 20 bp, Artificial Sequence
  Description of Artificial Sequence: Synthetic oligonucleotide
  Target: SCNA; (+) strand; PAM type: YTN; PAM sequence: CTG
actacaccacggtttttcaa

SEQ ID NO: 76679 - DNA, 20 bp, Artificial Sequence
  Description of Artificial Sequence: Synthetic oligonucleotide
  Target: SCNA; (+) strand; PAM type: YTN; PAM sequence: CTA
caccacggtttttcaacctt

SEQ ID NO: 76680 - DNA, 20 bp, Artificial Sequence
  Description of Artificial Sequence: Synthetic oligonucleotide
  Target: SCNA; (+) strand; PAM type: YTN; PAM sequence: TTT
ttcaaccttggcagtaatga

SEQ ID NO: 76681 - DNA, 20 bp, Artificial Sequence
  Description of Artificial Sequence: Synthetic oligonucleotide
  Target: SCNA; (+) strand; PAM type: YTN; PAM sequence: TTT
tcaaccttggcagtaatgac

SEQ ID NO: 76682 - DNA, 20 bp, Artificial Sequence
  Description of Artificial Sequence: Synthetic oligonucleotide
  Target: SCNA; (+) strand; PAM type: YTN; PAM sequence: TTT
caaccttggcagtaatgaca

SEQ ID NO: 76683 - DNA, 20 bp, Artificial Sequence
  Description of Artificial Sequence: Synthetic oligonucleotide
  Target: SCNA; (+) strand; PAM type: YTN; PAM sequence: TTC
aaccttggcagtaatgacat

SEQ ID NO: 76684 - DNA, 20 bp, Artificial Sequence
  Description of Artificial Sequence: Synthetic oligonucleotide
  Target: SCNA; (+) strand; PAM type: YTN; PAM sequence: CTT
ggcagtaatgacatttttta

SEQ ID NO: 76685 - DNA, 20 bp, Artificial Sequence
  Description of Artificial Sequence: Synthetic oligonucleotide
  Target: SCNA; (+) strand; PAM type: YTN; PAM sequence: TTG
gcagtaatgacattttttaa

SEQ ID NO: 76686 - DNA, 20 bp, Artificial Sequence
  Description of Artificial Sequence: Synthetic oligonucleotide
  Target: SCNA; (+) strand; PAM type: YTN; PAM sequence: TTT
tttaactggatactttgttg

SEQ ID NO: 76687 - DNA, 20 bp, Artificial Sequence
  Description of Artificial Sequence: Synthetic oligonucleotide
  Target: SCNA; (+) strand; PAM type: YTN; PAM sequence: TTT
ttaactggatactttgttgt

SEQ ID NO: 76688 - DNA, 20 bp, Artificial Sequence
  Description of Artificial Sequence: Synthetic oligonucleotide
  Target: SCNA; (+) strand; PAM type: YTN; PAM sequence: TTT
taactggatactttgttgtg

SEQ ID NO: 76689 - DNA, 20 bp, Artificial Sequence
  Description of Artificial Sequence: Synthetic oligonucleotide
  Target: SCNA; (+) strand; PAM type: YTN; PAM sequence: TTT
aactggatactttgttgtgg

SEQ ID NO: 76690 - DNA, 20 bp, Artificial Sequence
  Description of Artificial Sequence: Synthetic oligonucleotide
  Target: SCNA; (+) strand; PAM type: YTN; PAM sequence: TTA
actggatactttgttgtgga

SEQ ID NO: 76691 - DNA, 20 bp, Artificial Sequence
  Description of Artificial Sequence: Synthetic oligonucleotide
  Target: SCNA; (+) strand; PAM type: YTN; PAM sequence: CTG
gatactttgttgtggaagga

SEQ ID NO: 76692 - DNA, 20 bp, Artificial Sequence
  Description of Artificial Sequence: Synthetic oligonucleotide
  Target: SCNA; (+) strand; PAM type: YTN; PAM sequence: CTT
tgttgtggaaggatgtcctg

SEQ ID NO: 76693 - DNA, 20 bp, Artificial Sequence
  Description of Artificial Sequence: Synthetic oligonucleotide
  Target: SCNA; (+) strand; PAM type: YTN; PAM sequence: TTT
gttgtggaaggatgtcctgt

SEQ ID NO: 76694 - DNA, 20 bp, Artificial Sequence
  Description of Artificial Sequence: Synthetic oligonucleotide
  Target: SCNA; (+) strand; PAM type: YTN; PAM sequence: TTG
ttgtggaaggatgtcctgtg

SEQ ID NO: 76695 - DNA, 20 bp, Artificial Sequence
  Description of Artificial Sequence: Synthetic oligonucleotide
  Target: SCNA; (+) strand; PAM type: YTN; PAM sequence: TTG
tggaaggatgtcctgtgcat

SEQ ID NO: 76696 - DNA, 20 bp, Artificial Sequence
  Description of Artificial Sequence: Synthetic oligonucleotide
  Target: SCNA; (+) strand; PAM type: YTN; PAM sequence: CTG
tgcattgtagatgtttaaaa

SEQ ID NO: 76697 - DNA, 20 bp, Artificial Sequence
  Description of Artificial Sequence: Synthetic oligonucleotide
  Target: SCNA; (+) strand; PAM type: YTN; PAM sequence: TTG
tagatgtttaaaaaaatccc

SEQ ID NO: 76698 - DNA, 20 bp, Artificial Sequence
  Description of Artificial Sequence: Synthetic oligonucleotide
  Target: SCNA; (+) strand; PAM type: YTN; PAM sequence: TTT
aaaaaaatccctcagtgaat

SEQ ID NO: 76699 - DNA, 20 bp, Artificial Sequence
  Description of Artificial Sequence: Synthetic oligonucleotide
  Target: SCNA; (+) strand; PAM type: YTN; PAM sequence: TTA
aaaaaatccctcagtgaatc

SEQ ID NO: 76700 - DNA, 20 bp, Artificial Sequence
  Description of Artificial Sequence: Synthetic oligonucleotide
  Target: SCNA; (+) strand; PAM type: YTN; PAM sequence: CTC
agtgaatcatagtagcactc

SEQ ID NO: 76701 - DNA, 20 bp, Artificial Sequence
  Description of Artificial Sequence: Synthetic oligonucleotide
  Target: SCNA; (+) strand; PAM type: YTN; PAM sequence: CTC
cactcctctcccttcctccc

SEQ ID NO: 76702 - DNA, 20 bp, Artificial Sequence
  Description of Artificial Sequence: Synthetic oligonucleotide
  Target: SCNA; (+) strand; PAM type: YTN; PAM sequence: CTC
ctctcccttcctcccctgag

SEQ ID NO: 76703 - DNA, 20 bp, Artificial Sequence
  Description of Artificial Sequence: Synthetic oligonucleotide
  Target: SCNA; (+) strand; PAM type: YTN; PAM sequence: CTC
tcccttcctcccctgagctg

SEQ ID NO: 76704 - DNA, 20 bp, Artificial Sequence
  Description of Artificial Sequence: Synthetic oligonucleotide
  Target: SCNA; (+) strand; PAM type: YTN; PAM sequence: CTC
ccttcctcccctgagctgtg

SEQ ID NO: 76705 - DNA, 20 bp, Artificial Sequence
  Description of Artificial Sequence: Synthetic oligonucleotide
  Target: SCNA; (+) strand; PAM type: YTN; PAM sequence: CTT
cctcccctgagctgtgataa

SEQ ID NO: 76706 - DNA, 20 bp, Artificial Sequence
  Description of Artificial Sequence: Synthetic oligonucleotide
  Target: SCNA; (+) strand; PAM type: YTN; PAM sequence: TTC
ctcccctgagctgtgataac

SEQ ID NO: 76707 - DNA, 20 bp, Artificial Sequence
  Description of Artificial Sequence: Synthetic oligonucleotide
  Target: SCNA; (+) strand; PAM type: YTN; PAM sequence: CTC
ccctgagctgtgataaccac

SEQ ID NO: 76708 - DNA, 20 bp, Artificial Sequence
  Description of Artificial Sequence: Synthetic oligonucleotide
  Target: SCNA; (+) strand; PAM type: YTN; PAM sequence: CTG
agctgtgataaccactaatg

SEQ ID NO: 76709 - DNA, 20 bp, Artificial Sequence
  Description of Artificial Sequence: Synthetic oligonucleotide
  Target: SCNA; (+) strand; PAM type: YTN; PAM sequence: CTG
tgataaccactaatgttccc

SEQ ID NO: 76710 - DNA, 20 bp, Artificial Sequence
  Description of Artificial Sequence: Synthetic oligonucleotide
  Target: SCNA; (+) strand; PAM type: YTN; PAM sequence: CTA
atgttccctgggagcacaat

SEQ ID NO: 76711 - DNA, 20 bp, Artificial Sequence
  Description of Artificial Sequence: Synthetic oligonucleotide
  Target: SCNA; (+) strand; PAM type: YTN; PAM sequence: TTC
cctgggagcacaattggccc

SEQ ID NO: 76712 - DNA, 20 bp, Artificial Sequence
  Description of Artificial Sequence: Synthetic oligonucleotide
  Target: SCNA; (+) strand; PAM type: YTN; PAM sequence: CTG
ggagcacaattggccctgga

SEQ ID NO: 76713 - DNA, 20 bp, Artificial Sequence
  Description of Artificial Sequence: Synthetic oligonucleotide
  Target: SCNA; (+) strand; PAM type: YTN; PAM sequence: TTG
gccctggattagaaccactg

SEQ ID NO: 76714 - DNA, 20 bp, Artificial Sequence
  Description of Artificial Sequence: Synthetic oligonucleotide
  Target: SCNA; (+) strand; PAM type: YTN; PAM sequence: CTG
gattagaaccactgctacat

SEQ ID NO: 76715 - DNA, 20 bp, Artificial Sequence
  Description of Artificial Sequence: Synthetic oligonucleotide
  Target: SCNA; (+) strand; PAM type: YTN; PAM sequence: TTA
gaaccactgctacatcaatg

SEQ ID NO: 76716 - DNA, 20 bp, Artificial Sequence
  Description of Artificial Sequence: Synthetic oligonucleotide
  Target: SCNA; (+) strand; PAM type: YTN; PAM sequence: CTG
ctacatcaatgcactccttt

SEQ ID NO: 76717 - DNA, 20 bp, Artificial Sequence
  Description of Artificial Sequence: Synthetic oligonucleotide
  Target: SCNA; (+) strand; PAM type: YTN; PAM sequence: CTA
catcaatgcactccttttgt

SEQ ID NO: 76718 - DNA, 20 bp, Artificial Sequence
  Description of Artificial Sequence: Synthetic oligonucleotide
  Target: SCNA; (+) strand; PAM type: YTN; PAM sequence: CTC
cttttgtctacgctgtgagt

SEQ ID NO: 76719 - DNA, 20 bp, Artificial Sequence
  Description of Artificial Sequence: Synthetic oligonucleotide
  Target: SCNA; (+) strand; PAM type: YTN; PAM sequence: CTT
ttgtctacgctgtgagtttg

SEQ ID NO: 76720 - DNA, 20 bp, Artificial Sequence
  Description of Artificial Sequence: Synthetic oligonucleotide
  Target: SCNA; (+) strand; PAM type: YTN; PAM sequence: TTT
tgtctacgctgtgagtttgg

SEQ ID NO: 76721 - DNA, 20 bp, Artificial Sequence
  Description of Artificial Sequence: Synthetic oligonucleotide
  Target: SCNA; (+) strand; PAM type: YTN; PAM sequence: TTT
gtctacgctgtgagtttggc

SEQ ID NO: 76722 - DNA, 20 bp, Artificial Sequence
  Description of Artificial Sequence: Synthetic oligonucleotide
  Target: SCNA; (+) strand; PAM type: YTN; PAM sequence: TTG
tctacgctgtgagtttggcc

SEQ ID NO: 76723 - DNA, 20 bp, Artificial Sequence
  Description of Artificial Sequence: Synthetic oligonucleotide
  Target: SCNA; (+) strand; PAM type: YTN; PAM sequence: CTA
cgctgtgagtttggccagtg

SEQ ID NO: 76724 - DNA, 20 bp, Artificial Sequence
  Description of Artificial Sequence: Synthetic oligonucleotide
  Target: SCNA; (+) strand; PAM type: YTN; PAM sequence: CTG
tgagtttggccagtggaaac

SEQ ID NO: 76725 - DNA, 20 bp, Artificial Sequence
  Description of Artificial Sequence: Synthetic oligonucleotide
  Target: SCNA; (+) strand; PAM type: YTN; PAM sequence: TTT
ggccagtggaaacaccacaa

SEQ ID NO: 76726 - DNA, 20 bp, Artificial Sequence
  Description of Artificial Sequence: Synthetic oligonucleotide
  Target: SCNA; (+) strand; PAM type: YTN; PAM sequence: TTG
gccagtggaaacaccacaaa

SEQ ID NO: 76727 - DNA, 20 bp, Artificial Sequence
  Description of Artificial Sequence: Synthetic oligonucleotide
  Target: SCNA; (+) strand; PAM type: YTN; PAM sequence: TTT
tccagatattgactattctc

SEQ ID NO: 76728 - DNA, 20 bp, Artificial Sequence
  Description of Artificial Sequence: Synthetic oligonucleotide
  Target: SCNA; (+) strand; PAM type: YTN; PAM sequence: TTT
ccagatattgactattctcg

SEQ ID NO: 76729 - DNA, 20 bp, Artificial Sequence
  Description of Artificial Sequence: Synthetic oligonucleotide
  Target: SCNA; (+) strand; PAM type: YTN; PAM sequence: TTC
cagatattgactattctcgc

SEQ ID NO: 76730 - DNA, 20 bp, Artificial Sequence
  Description of Artificial Sequence: Synthetic oligonucleotide
  Target: SCNA; (+) strand; PAM type: YTN; PAM sequence: TTG
actattctcgccctgctagg

SEQ ID NO: 76731 - DNA, 20 bp, Artificial Sequence
  Description of Artificial Sequence: Synthetic oligonucleotide
  Target: SCNA; (+) strand; PAM type: YTN; PAM sequence: CTA
ttctcgccctgctaggccag

SEQ ID NO: 76732 - DNA, 20 bp, Artificial Sequence
  Description of Artificial Sequence: Synthetic oligonucleotide
  Target: SCNA; (+) strand; PAM type: YTN; PAM sequence: TTC
tcgccctgctaggccagtgc

SEQ ID NO: 76733 - DNA, 20 bp, Artificial Sequence
  Description of Artificial Sequence: Synthetic oligonucleotide
  Target: SCNA; (+) strand; PAM type: YTN; PAM sequence: CTC
gccctgctaggccagtgcag

SEQ ID NO: 76734 - DNA, 20 bp, Artificial Sequence
  Description of Artificial Sequence: Synthetic oligonucleotide
  Target: SCNA; (+) strand; PAM type: YTN; PAM sequence: CTG
ctaggccagtgcaggcaggt

SEQ ID NO: 76735 - DNA, 20 bp, Artificial Sequence
  Description of Artificial Sequence: Synthetic oligonucleotide
  Target: SCNA; (+) strand; PAM type: YTN; PAM sequence: CTA
ggccagtgcaggcaggtggt

SEQ ID NO: 76736 - DNA, 20 bp, Artificial Sequence
  Description of Artificial Sequence: Synthetic oligonucleotide
  Target: SCNA; (+) strand; PAM type: YTN; PAM sequence: CTC
aagtcaggcagccgtcttca

SEQ ID NO: 76737 - DNA, 20 bp, Artificial Sequence
  Description of Artificial Sequence: Synthetic oligonucleotide
  Target: SCNA; (+) strand; PAM type: YTN; PAM sequence: CTT
cacataggacttgcttggtc

SEQ ID NO: 76738 - DNA, 20 bp, Artificial Sequence
  Description of Artificial Sequence: Synthetic oligonucleotide
  Target: SCNA; (+) strand; PAM type: YTN; PAM sequence: TTC
acataggacttgcttggtca

SEQ ID NO: 76739 - DNA, 20 bp, Artificial Sequence
  Description of Artificial Sequence: Synthetic oligonucleotide
  Target: SCNA; (+) strand; PAM type: YTN; PAM sequence: CTT
gcttggtcatctctccttcc

SEQ ID NO: 76740 - DNA, 20 bp, Artificial Sequence
  Description of Artificial Sequence: Synthetic oligonucleotide
  Target: SCNA; (+) strand; PAM type: YTN; PAM sequence: TTG
cttggtcatctctccttcct

SEQ ID NO: 76741 - DNA, 20 bp, Artificial Sequence
  Description of Artificial Sequence: Synthetic oligonucleotide
  Target: SCNA; (+) strand; PAM type: YTN; PAM sequence: CTT
ggtcatctctccttcctttc

SEQ ID NO: 76742 - DNA, 20 bp, Artificial Sequence
  Description of Artificial Sequence: Synthetic oligonucleotide
  Target: SCNA; (+) strand; PAM type: YTN; PAM sequence: TTG
gtcatctctccttcctttct

SEQ ID NO: 76743 - DNA, 20 bp, Artificial Sequence
  Description of Artificial Sequence: Synthetic oligonucleotide
  Target: SCNA; (+) strand; PAM type: YTN; PAM sequence: CTC
tccttcctttctccctcttt

SEQ ID NO: 76744 - DNA, 20 bp, Artificial Sequence
  Description of Artificial Sequence: Synthetic oligonucleotide
  Target: SCNA; (+) strand; PAM type: YTN; PAM sequence: CTC
cttcctttctccctcttttt

SEQ ID NO: 76745 - DNA, 20 bp, Artificial Sequence
  Description of Artificial Sequence: Synthetic oligonucleotide
  Target: SCNA; (+) strand; PAM type: YTN; PAM sequence: CTT
cctttctccctctttttctg

SEQ ID NO: 76746 - DNA, 20 bp, Artificial Sequence
  Description of Artificial Sequence: Synthetic oligonucleotide
  Target: SCNA; (+) strand; PAM type: YTN; PAM sequence: TTC
ctttctccctctttttctga

SEQ ID NO: 76747 - DNA, 20 bp, Artificial Sequence
  Description of Artificial Sequence: Synthetic oligonucleotide
  Target: SCNA; (+) strand; PAM type: YTN; PAM sequence: CTT
tctccctctttttctgataa

SEQ ID NO: 76748 - DNA, 20 bp, Artificial Sequence
  Description of Artificial Sequence: Synthetic oligonucleotide
  Target: SCNA; (+) strand; PAM type: YTN; PAM sequence: TTT
ctccctctttttctgataaa

SEQ ID NO: 76749 - DNA, 20 bp, Artificial Sequence
  Description of Artificial Sequence: Synthetic oligonucleotide
  Target: SCNA; (+) strand; PAM type: YTN; PAM sequence: TTC
tccctctttttctgataaat

SEQ ID NO: 76750 - DNA, 20 bp, Artificial Sequence
  Description of Artificial Sequence: Synthetic oligonucleotide
  Target: SCNA; (+) strand; PAM type: YTN; PAM sequence: CTC
cctctttttctgataaatgg

SEQ ID NO: 76751 - DNA, 20 bp, Artificial Sequence
  Description of Artificial Sequence: Synthetic oligonucleotide
  Target: SCNA; (+) strand; PAM type: YTN; PAM sequence: CTC
tttttctgataaatggtaat

SEQ ID NO: 76752 - DNA, 20 bp, Artificial Sequence
  Description of Artificial Sequence: Synthetic oligonucleotide
  Target: SCNA; (+) strand; PAM type: YTN; PAM sequence: CTT
tttctgataaatggtaatct

SEQ ID NO: 76753 - DNA, 20 bp, Artificial Sequence
  Description of Artificial Sequence: Synthetic oligonucleotide
  Target: SCNA; (+) strand; PAM type: YTN; PAM sequence: TTT
ttctgataaatggtaatctc

SEQ ID NO: 76754 - DNA, 20 bp, Artificial Sequence
  Description of Artificial Sequence: Synthetic oligonucleotide
  Target: SCNA; (+) strand; PAM type: YTN; PAM sequence: TTT
tctgataaatggtaatctcc

SEQ ID NO: 76755 - DNA, 20 bp, Artificial Sequence
  Description of Artificial Sequence: Synthetic oligonucleotide
  Target: SCNA; (+) strand; PAM type: YTN; PAM sequence: TTT
ctgataaatggtaatctccc

SEQ ID NO: 76756 - DNA, 20 bp, Artificial Sequence
  Description of Artificial Sequence: Synthetic oligonucleotide
  Target: SCNA; (+) strand; PAM type: YTN; PAM sequence: TTC
tgataaatggtaatctccct

SEQ ID NO: 76757 - DNA, 20 bp, Artificial Sequence
  Description of Artificial Sequence: Synthetic oligonucleotide
  Target: SCNA; (+) strand; PAM type: YTN; PAM sequence: CTG
ataaatggtaatctccctgt

SEQ ID NO: 76758 - DNA, 20 bp, Artificial Sequence
  Description of Artificial Sequence: Synthetic oligonucleotide
  Target: SCNA; (+) strand; PAM type: YTN; PAM sequence: CTC
cctgttcatttagttcattt

SEQ ID NO: 76759 - DNA, 20 bp, Artificial Sequence
  Description of Artificial Sequence: Synthetic oligonucleotide
  Target: SCNA; (+) strand; PAM type: YTN; PAM sequence: CTG
ttcatttagttcattttggc

SEQ ID NO: 76760 - DNA, 20 bp, Artificial Sequence
  Description of Artificial Sequence: Synthetic oligonucleotide
  Target: SCNA; (+) strand; PAM type: YTN; PAM sequence: TTC
atttagttcattttggccta

SEQ ID NO: 76761 - DNA, 20 bp, Artificial Sequence
  Description of Artificial Sequence: Synthetic oligonucleotide
  Target: SCNA; (+) strand; PAM type: YTN; PAM sequence: TTT
agttcattttggcctagtgg

SEQ ID NO: 76762 - DNA, 20 bp, Artificial Sequence
  Description of Artificial Sequence: Synthetic oligonucleotide
  Target: SCNA; (+) strand; PAM type: YTN; PAM sequence: TTA
gttcattttggcctagtggt

SEQ ID NO: 76763 - DNA, 20 bp, Artificial Sequence
  Description of Artificial Sequence: Synthetic oligonucleotide
  Target: SCNA; (+) strand; PAM type: YTN; PAM sequence: TTC
attttggcctagtggttata

SEQ ID NO: 76764 - DNA, 20 bp, Artificial Sequence
  Description of Artificial Sequence: Synthetic oligonucleotide
  Target: SCNA; (+) strand; PAM type: YTN; PAM sequence: TTT
tggcctagtggttataacgg

SEQ ID NO: 76765 - DNA, 20 bp, Artificial Sequence
  Description of Artificial Sequence: Synthetic oligonucleotide
  Target: SCNA; (+) strand; PAM type: YTN; PAM sequence: TTT
ggcctagtggttataacggt

SEQ ID NO: 76766 - DNA, 20 bp, Artificial Sequence
  Description of Artificial Sequence: Synthetic oligonucleotide
  Target: SCNA; (+) strand; PAM type: YTN; PAM sequence: TTG
gcctagtggttataacggtg

SEQ ID NO: 76767 - DNA, 20 bp, Artificial Sequence
  Description of Artificial Sequence: Synthetic oligonucleotide
  Target: SCNA; (+) strand; PAM type: YTN; PAM sequence: CTA
gtggttataacggtgctcgc

SEQ ID NO: 76768 - DNA, 20 bp, Artificial Sequence
  Description of Artificial Sequence: Synthetic oligonucleotide
  Target: SCNA; (+) strand; PAM type: YTN; PAM sequence: TTA
taacggtgctcgctgttgcc

SEQ ID NO: 76769 - DNA, 20 bp, Artificial Sequence
  Description of Artificial Sequence: Synthetic oligonucleotide
  Target: SCNA; (+) strand; PAM type: YTN; PAM sequence: CTC
gctgttgccatcctaaagta

SEQ ID NO: 76770 - DNA, 20 bp, Artificial Sequence
  Description of Artificial Sequence: Synthetic oligonucleotide
  Target: SCNA; (+) strand; PAM type: YTN; PAM sequence: CTG
ttgccatcctaaagtattgc

SEQ ID NO: 76771 - DNA, 20 bp, Artificial Sequence
  Description of Artificial Sequence: Synthetic oligonucleotide
  Target: SCNA; (+) strand; PAM type: YTN; PAM sequence: TTG
ccatcctaaagtattgcact

SEQ ID NO: 76772 - DNA, 20 bp, Artificial Sequence
  Description of Artificial Sequence: Synthetic oligonucleotide
  Target: SCNA; (+) strand; PAM type: YTN; PAM sequence: CTA
aagtattgcactattccgtg

SEQ ID NO: 76773 - DNA, 20 bp, Artificial Sequence
  Description of Artificial Sequence: Synthetic oligonucleotide
  Target: SCNA; (+) strand; PAM type: YTN; PAM sequence: TTG
cactattccgtgtgtttttc

SEQ ID NO: 76774 - DNA, 20 bp, Artificial Sequence
  Description of Artificial Sequence: Synthetic oligonucleotide
  Target: SCNA; (+) strand; PAM type: YTN; PAM sequence: CTA
ttccgtgtgtttttcctaac

SEQ ID NO: 76775 - DNA, 20 bp, Artificial Sequence
  Description of Artificial Sequence: Synthetic oligonucleotide
  Target: SCNA; (+) strand; PAM type: YTN; PAM sequence: TTC
cgtgtgtttttcctaacccg

SEQ ID NO: 76776 - DNA, 20 bp, Artificial Sequence
  Description of Artificial Sequence: Synthetic oligonucleotide
  Target: SCNA; (+) strand; PAM type: YTN; PAM sequence: TTT
ttcctaacccggtctaaacc

SEQ ID NO: 76777 - DNA, 20 bp, Artificial Sequence
  Description of Artificial Sequence: Synthetic oligonucleotide
  Target: SCNA; (+) strand; PAM type: YTN; PAM sequence: TTT
tcctaacccggtctaaacct

SEQ ID NO: 76778 - DNA, 20 bp, Artificial Sequence
  Description of Artificial Sequence: Synthetic oligonucleotide
  Target: SCNA; (+) strand; PAM type: YTN; PAM sequence: TTT
cctaacccggtctaaacctt

SEQ ID NO: 76779 - DNA, 20 bp, Artificial Sequence
  Description of Artificial Sequence: Synthetic oligonucleotide
  Target: SCNA; (+) strand; PAM type: YTN; PAM sequence: TTC
ctaacccggtctaaaccttc

SEQ ID NO: 76780 - DNA, 20 bp, Artificial Sequence
  Description of Artificial Sequence: Synthetic oligonucleotide
  Target: SCNA; (+) strand; PAM type: YTN; PAM sequence: CTA
acccggtctaaaccttcgta

SEQ ID NO: 76781 - DNA, 20 bp, Artificial Sequence
  Description of Artificial Sequence: Synthetic oligonucleotide
  Target: SCNA; (+) strand; PAM type: YTN; PAM sequence: CTA
aaccttcgtaattagtccct

SEQ ID NO: 76782 - DNA, 20 bp, Artificial Sequence
  Description of Artificial Sequence: Synthetic oligonucleotide
  Target: SCNA; (+) strand; PAM type: YTN; PAM sequence: CTT
cgtaattagtccctttataa

SEQ ID NO: 76783 - DNA, 20 bp, Artificial Sequence
  Description of Artificial Sequence: Synthetic oligonucleotide
  Target: SCNA; (+) strand; PAM type: YTN; PAM sequence: TTC
gtaattagtccctttataaa

SEQ ID NO: 76784 - DNA, 20 bp, Artificial Sequence
  Description of Artificial Sequence: Synthetic oligonucleotide
  Target: SCNA; (+) strand; PAM type: YTN; PAM sequence: TTA
gtccctttataaagtctcct

SEQ ID NO: 76785 - DNA, 20 bp, Artificial Sequence
  Description of Artificial Sequence: Synthetic oligonucleotide
  Target: SCNA; (+) strand; PAM type: YTN; PAM sequence: CTT
tataaagtctcctccaacta

SEQ ID NO: 76786 - DNA, 20 bp, Artificial Sequence
  Description of Artificial Sequence: Synthetic oligonucleotide
  Target: SCNA; (+) strand; PAM type: YTN; PAM sequence: TTT
ataaagtctcctccaactac

SEQ ID NO: 76787 - DNA, 20 bp, Artificial Sequence
  Description of Artificial Sequence: Synthetic oligonucleotide
  Target: SCNA; (+) strand; PAM type: YTN; PAM sequence: TTA
taaagtctcctccaactacc

SEQ ID NO: 76788 - DNA, 20 bp, Artificial Sequence
  Description of Artificial Sequence: Synthetic oligonucleotide
  Target: SCNA; (+) strand; PAM type: YTN; PAM sequence: CTC
ctccaactaccaaatttgtg

SEQ ID NO: 76789 - DNA, 20 bp, Artificial Sequence
  Description of Artificial Sequence: Synthetic oligonucleotide
  Target: SCNA; (+) strand; PAM type: YTN; PAM sequence: CTC
caactaccaaatttgtgtgc

SEQ ID NO: 76790 - DNA, 20 bp, Artificial Sequence
  Description of Artificial Sequence: Synthetic oligonucleotide
  Target: SCNA; (+) strand; PAM type: YTN; PAM sequence: CTA
ccaaatttgtgtgcactgtt

SEQ ID NO: 76791 - DNA, 20 bp, Artificial Sequence
  Description of Artificial Sequence: Synthetic oligonucleotide
  Target: SCNA; (+) strand; PAM type: YTN; PAM sequence: TTT
gtgtgcactgtttgttttca

SEQ ID NO: 76792 - DNA, 20 bp, Artificial Sequence
  Description of Artificial Sequence: Synthetic oligonucleotide
  Target: SCNA; (+) strand; PAM type: YTN; PAM sequence: TTG
tgtgcactgtttgttttcag

SEQ ID NO: 76793 - DNA, 20 bp, Artificial Sequence
  Description of Artificial Sequence: Synthetic oligonucleotide
  Target: SCNA; (+) strand; PAM type: YTN; PAM sequence: CTG
tttgttttcagcaggagtta

SEQ ID NO: 76794 - DNA, 20 bp, Artificial Sequence
  Description of Artificial Sequence: Synthetic oligonucleotide
  Target: SCNA; (+) strand; PAM type: YTN; PAM sequence: TTT
gttttcagcaggagttataa

SEQ ID NO: 76795 - DNA, 20 bp, Artificial Sequence
  Description of Artificial Sequence: Synthetic oligonucleotide
  Target: SCNA; (+) strand; PAM type: YTN; PAM sequence: TTG
ttttcagcaggagttataat

SEQ ID NO: 76796 - DNA, 20 bp, Artificial Sequence
  Description of Artificial Sequence: Synthetic oligonucleotide
  Target: SCNA; (+) strand; PAM type: YTN; PAM sequence: TTT
tcagcaggagttataattga

SEQ ID NO: 76797 - DNA, 20 bp, Artificial Sequence
  Description of Artificial Sequence: Synthetic oligonucleotide
  Target: SCNA; (+) strand; PAM type: YTN; PAM sequence: TTT
cagcaggagttataattgat

SEQ ID NO: 76798 - DNA, 20 bp, Artificial Sequence
  Description of Artificial Sequence: Synthetic oligonucleotide
  Target: SCNA; (+) strand; PAM type: YTN; PAM sequence: TTC
agcaggagttataattgata

SEQ ID NO: 76799 - DNA, 20 bp, Artificial Sequence
  Description of Artificial Sequence: Synthetic oligonucleotide
  Target: SCNA; (+) strand; PAM type: YTN; PAM sequence: TTA
taattgatatgatgtaagta

SEQ ID NO: 76800 - DNA, 20 bp, Artificial Sequence
  Description of Artificial Sequence: Synthetic oligonucleotide
  Target: SCNA; (+) strand; PAM type: YTN; PAM sequence: TTG
atatgatgtaagtacatatc

SEQ ID NO: 76801 - DNA, 20 bp, Artificial Sequence
  Description of Artificial Sequence: Synthetic oligonucleotide
  Target: SCNA; (+) strand; PAM type: YTN; PAM sequence: TTT
acagaaaagcaaaattccaa

SEQ ID NO: 76802 - DNA, 20 bp, Artificial Sequence
  Description of Artificial Sequence: Synthetic oligonucleotide
  Target: SCNA; (+) strand; PAM type: YTN; PAM sequence: TTA
cagaaaagcaaaattccaaa

SEQ ID NO: 76803 - DNA, 20 bp, Artificial Sequence
  Description of Artificial Sequence: Synthetic oligonucleotide
  Target: SCNA; (+) strand; PAM type: YTN; PAM sequence: TTC
caaatattgagatgttttct

SEQ ID NO: 76804 - DNA, 20 bp, Artificial Sequence
  Description of Artificial Sequence: Synthetic oligonucleotide
  Target: SCNA; (+) strand; PAM type: YTN; PAM sequence: TTG
agatgttttctctgtattgg

SEQ ID NO: 76805 - DNA, 20 bp, Artificial Sequence
  Description of Artificial Sequence: Synthetic oligonucleotide
  Target: SCNA; (+) strand; PAM type: YTN; PAM sequence: TTT
tctctgtattggccccaatc

SEQ ID NO: 76806 - DNA, 20 bp, Artificial Sequence
  Description of Artificial Sequence: Synthetic oligonucleotide
  Target: SCNA; (+) strand; PAM type: YTN; PAM sequence: TTT
ctctgtattggccccaatca

SEQ ID NO: 76807 - DNA, 20 bp, Artificial Sequence
  Description of Artificial Sequence: Synthetic oligonucleotide
  Target: SCNA; (+) strand; PAM type: YTN; PAM sequence: TTC
tctgtattggccccaatcat

SEQ ID NO: 76808 - DNA, 20 bp, Artificial Sequence
  Description of Artificial Sequence: Synthetic oligonucleotide
  Target: SCNA; (+) strand; PAM type: YTN; PAM sequence: CTC
tgtattggccccaatcattg

SEQ ID NO: 76809 - DNA, 20 bp, Artificial Sequence
  Description of Artificial Sequence: Synthetic oligonucleotide
  Target: SCNA; (+) strand; PAM type: YTN; PAM sequence: CTG
tattggccccaatcattgga

SEQ ID NO: 76810 - DNA, 20 bp, Artificial Sequence
  Description of Artificial Sequence: Synthetic oligonucleotide
  Target: SCNA; (+) strand; PAM type: YTN; PAM sequence: TTG
gccccaatcattggaatgtt

SEQ ID NO: 76811 - DNA, 20 bp, Artificial Sequence
  Description of Artificial Sequence: Synthetic oligonucleotide
  Target: SCNA; (+) strand; PAM type: YTN; PAM sequence: TTG
gaatgttttgtgcatacaac

SEQ ID NO: 76812 - DNA, 20 bp, Artificial Sequence
  Description of Artificial Sequence: Synthetic oligonucleotide
  Target: SCNA; (+) strand; PAM type: YTN; PAM sequence: TTT
tgtgcatacaactttataat

SEQ ID NO: 76813 - DNA, 20 bp, Artificial Sequence
  Description of Artificial Sequence: Synthetic oligonucleotide
  Target: SCNA; (+) strand; PAM type: YTN; PAM sequence: TTT
gtgcatacaactttataata

SEQ ID NO: 76814 - DNA, 20 bp, Artificial Sequence
  Description of Artificial Sequence: Synthetic oligonucleotide
  Target: SCNA; (+) strand; PAM type: YTN; PAM sequence: TTG
tgcatacaactttataataa

SEQ ID NO: 76815 - DNA, 20 bp, Artificial Sequence
  Description of Artificial Sequence: Synthetic oligonucleotide
  Target: SCNA; (+) strand; PAM type: YTN; PAM sequence: CTT
tataataatcactgacacct

SEQ ID NO: 76816 - DNA, 20 bp, Artificial Sequence
  Description of Artificial Sequence: Synthetic oligonucleotide
  Target: SCNA; (+) strand; PAM type: YTN; PAM sequence: TTT
ataataatcactgacaccta

SEQ ID NO: 76817 - DNA, 20 bp, Artificial Sequence
  Description of Artificial Sequence: Synthetic oligonucleotide
  Target: SCNA; (+) strand; PAM type: YTN; PAM sequence: TTA
taataatcactgacacctat

SEQ ID NO: 76818 - DNA, 20 bp, Artificial Sequence
  Description of Artificial Sequence: Synthetic oligonucleotide
  Target: SCNA; (+) strand; PAM type: YTN; PAM sequence: CTG
acacctatattattttcata

SEQ ID NO: 76819 - DNA, 20 bp, Artificial Sequence
  Description of Artificial Sequence: Synthetic oligonucleotide
  Target: SCNA; (+) strand; PAM type: YTN; PAM sequence: CTA
tattattttcatactttgat

SEQ ID NO: 76820 - DNA, 20 bp, Artificial Sequence
  Description of Artificial Sequence: Synthetic oligonucleotide
  Target: SCNA; (+) strand; PAM type: YTN; PAM sequence: TTA
ttttcatactttgatttgct

SEQ ID NO: 76821 - DNA, 20 bp, Artificial Sequence
  Description of Artificial Sequence: Synthetic oligonucleotide
  Target: SCNA; (+) strand; PAM type: YTN; PAM sequence: TTT
tcatactttgatttgctcaa

SEQ ID NO: 76822 - DNA, 20 bp, Artificial Sequence
  Description of Artificial Sequence: Synthetic oligonucleotide
  Target: SCNA; (+) strand; PAM type: YTN; PAM sequence: TTT
catactttgatttgctcaat

SEQ ID NO: 76823 - DNA, 20 bp, Artificial Sequence
  Description of Artificial Sequence: Synthetic oligonucleotide
  Target: SCNA; (+) strand; PAM type: YTN; PAM sequence: TTC
atactttgatttgctcaatg

SEQ ID NO: 76824 - DNA, 20 bp, Artificial Sequence
  Description of Artificial Sequence: Synthetic oligonucleotide
  Target: SCNA; (+) strand; PAM type: YTN; PAM sequence: CTT
tgatttgctcaatgaatgct

SEQ ID NO: 76825 - DNA, 20 bp, Artificial Sequence
  Description of Artificial Sequence: Synthetic oligonucleotide
  Target: SCNA; (+) strand; PAM type: YTN; PAM sequence: TTT
gatttgctcaatgaatgcta

SEQ ID NO: 76826 - DNA, 20 bp, Artificial Sequence
  Description of Artificial Sequence: Synthetic oligonucleotide
  Target: SCNA; (+) strand; PAM type: YTN; PAM sequence: TTG
atttgctcaatgaatgctag

SEQ ID NO: 76827 - DNA, 20 bp, Artificial Sequence
  Description of Artificial Sequence: Synthetic oligonucleotide
  Target: SCNA; (+) strand; PAM type: YTN; PAM sequence: TTT
gctcaatgaatgctagttat

SEQ ID NO: 76828 - DNA, 20 bp, Artificial Sequence
  Description of Artificial Sequence: Synthetic oligonucleotide
  Target: SCNA; (+) strand; PAM type: YTN; PAM sequence: TTG
ctcaatgaatgctagttata

SEQ ID NO: 76829 - DNA, 20 bp, Artificial Sequence
  Description of Artificial Sequence: Synthetic oligonucleotide
  Target: SCNA; (+) strand; PAM type: YTN; PAM sequence: CTC
aatgaatgctagttataaaa

SEQ ID NO: 76830 - DNA, 20 bp, Artificial Sequence
  Description of Artificial Sequence: Synthetic oligonucleotide
  Target: SCNA; (+) strand; PAM type: YTN; PAM sequence: CTA
gttataaaaaacaagatcat

SEQ ID NO: 76831 - DNA, 20 bp, Artificial Sequence
  Description of Artificial Sequence: Synthetic oligonucleotide
  Target: SCNA; (+) strand; PAM type: YTN; PAM sequence: TTA
taaaaaacaagatcatttaa

SEQ ID NO: 76832 - DNA, 20 bp, Artificial Sequence
  Description of Artificial Sequence: Synthetic oligonucleotide
  Target: SCNA; (+) strand; PAM type: YTN; PAM sequence: TTT
aaaatacttccttgccttta

SEQ ID NO: 76833 - DNA, 20 bp, Artificial Sequence
  Description of Artificial Sequence: Synthetic oligonucleotide
  Target: SCNA; (+) strand; PAM type: YTN; PAM sequence: TTA
aaatacttccttgcctttat

SEQ ID NO: 76834 - DNA, 20 bp, Artificial Sequence
  Description of Artificial Sequence: Synthetic oligonucleotide
  Target: SCNA; (+) strand; PAM type: YTN; PAM sequence: CTT
ccttgcctttattattctca

SEQ ID NO: 76835 - DNA, 20 bp, Artificial Sequence
  Description of Artificial Sequence: Synthetic oligonucleotide
  Target: SCNA; (+) strand; PAM type: YTN; PAM sequence: TTC
cttgcctttattattctcag

SEQ ID NO: 76836 - DNA, 20 bp, Artificial Sequence
  Description of Artificial Sequence: Synthetic oligonucleotide
  Target: SCNA; (+) strand; PAM type: YTN; PAM sequence: CTT
gcctttattattctcaggtg

SEQ ID NO: 76837 - DNA, 20 bp, Artificial Sequence
  Description of Artificial Sequence: Synthetic oligonucleotide
  Target: SCNA; (+) strand; PAM type: YTN; PAM sequence: TTG
cctttattattctcaggtga

SEQ ID NO: 76838 - DNA, 20 bp, Artificial Sequence
  Description of Artificial Sequence: Synthetic oligonucleotide
  Target: SCNA; (+) strand; PAM type: YTN; PAM sequence: CTT
tattattctcaggtgaaatg

SEQ ID NO: 76839 - DNA, 20 bp, Artificial Sequence
  Description of Artificial Sequence: Synthetic oligonucleotide
  Target: SCNA; (+) strand; PAM type: YTN; PAM sequence: TTT
attattctcaggtgaaatgg

SEQ ID NO: 76840 - DNA, 20 bp, Artificial Sequence
  Description of Artificial Sequence: Synthetic oligonucleotide
  Target: SCNA; (+) strand; PAM type: YTN; PAM sequence: TTA
ttattctcaggtgaaatgga

SEQ ID NO: 76841 - DNA, 20 bp, Artificial Sequence
  Description of Artificial Sequence: Synthetic oligonucleotide
  Target: SCNA; (+) strand; PAM type: YTN; PAM sequence: TTA
ttctcaggtgaaatggagat

SEQ ID NO: 76842 - DNA, 20 bp, Artificial Sequence
  Description of Artificial Sequence: Synthetic oligonucleotide
  Target: SCNA; (+) strand; PAM type: YTN; PAM sequence: TTC
tcaggtgaaatggagatatg

SEQ ID NO: 76843 - DNA, 20 bp, Artificial Sequence
  Description of Artificial Sequence: Synthetic oligonucleotide
  Target: SCNA; (+) strand; PAM type: YTN; PAM sequence: CTC
aggtgaaatggagatatgaa

SEQ ID NO: 76844 - DNA, 20 bp, Artificial Sequence
  Description of Artificial Sequence: Synthetic oligonucleotide
  Target: SCNA; (+) strand; PAM type: YTN; PAM sequence: TTT
ataataaagagtgacaagtt

SEQ ID NO: 76845 - DNA, 20 bp, Artificial Sequence
  Description of Artificial Sequence: Synthetic oligonucleotide
  Target: SCNA; (+) strand; PAM type: YTN; PAM sequence: TTA
taataaagagtgacaagtta

SEQ ID NO: 76846 - DNA, 20 bp, Artificial Sequence
  Description of Artificial Sequence: Synthetic oligonucleotide
  Target: SCNA; (+) strand; PAM type: YTN; PAM sequence: TTA
gtggaattgtaaaataacat

SEQ ID NO: 76847 - DNA, 20 bp, Artificial Sequence
  Description of Artificial Sequence: Synthetic oligonucleotide
  Target: SCNA; (+) strand; PAM type: YTN; PAM sequence: TTG
taaaataacattatactcaa

SEQ ID NO: 76848 - DNA, 20 bp, Artificial Sequence
  Description of Artificial Sequence: Synthetic oligonucleotide
  Target: SCNA; (+) strand; PAM type: YTN; PAM sequence: TTA
tactcaaaaaagaagaatag

SEQ ID NO: 76849 - DNA, 20 bp, Artificial Sequence
  Description of Artificial Sequence: Synthetic oligonucleotide
  Target: SCNA; (+) strand; PAM type: YTN; PAM sequence: CTC
aaaaaagaagaatagagatt

SEQ ID NO: 76850 - DNA, 20 bp, Artificial Sequence
  Description of Artificial Sequence: Synthetic oligonucleotide
  Target: SCNA; (+) strand; PAM type: YTN; PAM sequence: TTG
taaagaaatgagattgagtc

SEQ ID NO: 76851 - DNA, 20 bp, Artificial Sequence
  Description of Artificial Sequence: Synthetic oligonucleotide
  Target: SCNA; (+) strand; PAM type: YTN; PAM sequence: TTG
agtccgtaagtaatgtataa

SEQ ID NO: 76852 - DNA, 20 bp, Artificial Sequence
  Description of Artificial Sequence: Synthetic oligonucleotide
  Target: SCNA; (+) strand; PAM type: YTN; PAM sequence: CTG
tctcagtatttcattgtcat

SEQ ID NO: 76853 - DNA, 20 bp, Artificial Sequence
  Description of Artificial Sequence: Synthetic oligonucleotide
  Target: SCNA; (+) strand; PAM type: YTN; PAM sequence: CTC
agtatttcattgtcatacct

SEQ ID NO: 76854 - DNA, 20 bp, Artificial Sequence
  Description of Artificial Sequence: Synthetic oligonucleotide
  Target: SCNA; (+) strand; PAM type: YTN; PAM sequence: TTT
cattgtcataccttataagt

SEQ ID NO: 76855 - DNA, 20 bp, Artificial Sequence
  Description of Artificial Sequence: Synthetic oligonucleotide
  Target: SCNA; (+) strand; PAM type: YTN; PAM sequence: TTC
attgtcataccttataagta

SEQ ID NO: 76856 - DNA, 20 bp, Artificial Sequence
  Description of Artificial Sequence: Synthetic oligonucleotide
  Target: SCNA; (+) strand; PAM type: YTN; PAM sequence: TTG
tcataccttataagtaagca

SEQ ID NO: 76857 - DNA, 20 bp, Artificial Sequence
  Description of Artificial Sequence: Synthetic oligonucleotide
  Target: SCNA; (+) strand; PAM type: YTN; PAM sequence: CTT
ataagtaagcagggaagtac

SEQ ID NO: 76858 - DNA, 20 bp, Artificial Sequence
  Description of Artificial Sequence: Synthetic oligonucleotide
  Target: SCNA; (+) strand; PAM type: YTN; PAM sequence: TTA
taagtaagcagggaagtaca

SEQ ID NO: 76859 - DNA, 20 bp, Artificial Sequence
  Description of Artificial Sequence: Synthetic oligonucleotide
  Target: SCNA; (+) strand; PAM type: YTN; PAM sequence: CTT
attaatttagtctttcagtc

SEQ ID NO: 76860 - DNA, 20 bp, Artificial Sequence
  Description of Artificial Sequence: Synthetic oligonucleotide
  Target: SCNA; (+) strand; PAM type: YTN; PAM sequence: TTA
ttaatttagtctttcagtca

SEQ ID NO: 76861 - DNA, 20 bp, Artificial Sequence
  Description of Artificial Sequence: Synthetic oligonucleotide
  Target: SCNA; (+) strand; PAM type: YTN; PAM sequence: TTA
atttagtctttcagtcactc

SEQ ID NO: 76862 - DNA, 20 bp, Artificial Sequence
  Description of Artificial Sequence: Synthetic oligonucleotide
  Target: SCNA; (+) strand; PAM type: YTN; PAM sequence: TTT
agtctttcagtcactcattg

SEQ ID NO: 76863 - DNA, 20 bp, Artificial Sequence
  Description of Artificial Sequence: Synthetic oligonucleotide
  Target: SCNA; (+) strand; PAM type: YTN; PAM sequence: TTA
gtctttcagtcactcattga

SEQ ID NO: 76864 - DNA, 20 bp, Artificial Sequence
  Description of Artificial Sequence: Synthetic oligonucleotide
  Target: SCNA; (+) strand; PAM type: YTN; PAM sequence: CTT
tcagtcactcattgagtcaa

SEQ ID NO: 76865 - DNA, 20 bp, Artificial Sequence
  Description of Artificial Sequence: Synthetic oligonucleotide
  Target: SCNA; (+) strand; PAM type: YTN; PAM sequence: TTT
cagtcactcattgagtcaat

SEQ ID NO: 76866 - DNA, 20 bp, Artificial Sequence
  Description of Artificial Sequence: Synthetic oligonucleotide
  Target: SCNA; (+) strand; PAM type: YTN; PAM sequence: TTC
agtcactcattgagtcaatc

SEQ ID NO: 76867 - DNA, 20 bp, Artificial Sequence
  Description of Artificial Sequence: Synthetic oligonucleotide
  Target: SCNA; (+) strand; PAM type: YTN; PAM sequence: CTC
attgagtcaatcaattcttg

SEQ ID NO: 76868 - DNA, 20 bp, Artificial Sequence
  Description of Artificial Sequence: Synthetic oligonucleotide
  Target: SCNA; (+) strand; PAM type: YTN; PAM sequence: TTG
agtcaatcaattcttgaggc

SEQ ID NO: 76869 - DNA, 20 bp, Artificial Sequence
  Description of Artificial Sequence: Synthetic oligonucleotide
  Target: SCNA; (+) strand; PAM type: YTN; PAM sequence: TTC
ttgaggccaattgtttttga

SEQ ID NO: 76870 - DNA, 20 bp, Artificial Sequence
  Description of Artificial Sequence: Synthetic oligonucleotide
  Target: SCNA; (+) strand; PAM type: YTN; PAM sequence: CTT
gaggccaattgtttttgaag

SEQ ID NO: 76871 - DNA, 20 bp, Artificial Sequence
  Description of Artificial Sequence: Synthetic oligonucleotide
  Target: SCNA; (+) strand; PAM type: YTN; PAM sequence: TTG
aggccaattgtttttgaagg

SEQ ID NO: 76872 - DNA, 20 bp, Artificial Sequence
  Description of Artificial Sequence: Synthetic oligonucleotide
  Target: SCNA; (+) strand; PAM type: YTN; PAM sequence: TTG
tttttgaaggcactgattgt

SEQ ID NO: 76873 - DNA, 20 bp, Artificial Sequence
  Description of Artificial Sequence: Synthetic oligonucleotide
  Target: SCNA; (+) strand; PAM type: YTN; PAM sequence: TTT
ttgaaggcactgattgtgct

SEQ ID NO: 76874 - DNA, 20 bp, Artificial Sequence
  Description of Artificial Sequence: Synthetic oligonucleotide
  Target: SCNA; (+) strand; PAM type: YTN; PAM sequence: TTT
tgaaggcactgattgtgcta

SEQ ID NO: 76875 - DNA, 20 bp, Artificial Sequence
  Description of Artificial Sequence: Synthetic oligonucleotide
  Target: SCNA; (+) strand; PAM type: YTN; PAM sequence: TTT
gaaggcactgattgtgctag

SEQ ID NO: 76876 - DNA, 20 bp, Artificial Sequence
  Description of Artificial Sequence: Synthetic oligonucleotide
  Target: SCNA; (+) strand; PAM type: YTN; PAM sequence: TTG
aaggcactgattgtgctaga

SEQ ID NO: 76877 - DNA, 20 bp, Artificial Sequence
  Description of Artificial Sequence: Synthetic oligonucleotide
  Target: SCNA; (+) strand; PAM type: YTN; PAM sequence: CTG
attgtgctagatactgtgga

SEQ ID NO: 76878 - DNA, 20 bp, Artificial Sequence
  Description of Artificial Sequence: Synthetic oligonucleotide
  Target: SCNA; (+) strand; PAM type: YTN; PAM sequence: TTG
tgctagatactgtggatgtt

SEQ ID NO: 76879 - DNA, 20 bp, Artificial Sequence
  Description of Artificial Sequence: Synthetic oligonucleotide
  Target: SCNA; (+) strand; PAM type: YTN; PAM sequence: CTA
gatactgtggatgttacaaa

SEQ ID NO: 76880 - DNA, 20 bp, Artificial Sequence
  Description of Artificial Sequence: Synthetic oligonucleotide
  Target: SCNA; (+) strand; PAM type: YTN; PAM sequence: CTG
tggatgttacaaaggtgaat

SEQ ID NO: 76881 - DNA, 20 bp, Artificial Sequence
  Description of Artificial Sequence: Synthetic oligonucleotide
  Target: SCNA; (+) strand; PAM type: YTN; PAM sequence: TTA
caaaggtgaataaaatgtct

SEQ ID NO: 76882 - DNA, 20 bp, Artificial Sequence
  Description of Artificial Sequence: Synthetic oligonucleotide
  Target: SCNA; (+) strand; PAM type: YTN; PAM sequence: CTT
aatctgaggaagaatttaca

SEQ ID NO: 76883 - DNA, 20 bp, Artificial Sequence
  Description of Artificial Sequence: Synthetic oligonucleotide
  Target: SCNA; (+) strand; PAM type: YTN; PAM sequence: TTA
atctgaggaagaatttacaa

SEQ ID NO: 76884 - DNA, 20 bp, Artificial Sequence
  Description of Artificial Sequence: Synthetic oligonucleotide
  Target: SCNA; (+) strand; PAM type: YTN; PAM sequence: CTG
aggaagaatttacaatctac

SEQ ID NO: 76885 - DNA, 20 bp, Artificial Sequence
  Description of Artificial Sequence: Synthetic oligonucleotide
  Target: SCNA; (+) strand; PAM type: YTN; PAM sequence: TTT
acaatctacacaggcatgaa

SEQ ID NO: 76886 - DNA, 20 bp, Artificial Sequence
  Description of Artificial Sequence: Synthetic oligonucleotide
  Target: SCNA; (+) strand; PAM type: YTN; PAM sequence: TTA
caatctacacaggcatgaaa

SEQ ID NO: 76887 - DNA, 20 bp, Artificial Sequence
  Description of Artificial Sequence: Synthetic oligonucleotide
  Target: SCNA; (+) strand; PAM type: YTN; PAM sequence: CTA
cacaggcatgaaaaaacaag

SEQ ID NO: 76888 - DNA, 20 bp, Artificial Sequence
  Description of Artificial Sequence: Synthetic oligonucleotide
  Target: SCNA; (+) strand; PAM type: YTN; PAM sequence: TTT
gaatgtgaaatcaccaaggt

SEQ ID NO: 76889 - DNA, 20 bp, Artificial Sequence
  Description of Artificial Sequence: Synthetic oligonucleotide
  Target: SCNA; (+) strand; PAM type: YTN; PAM sequence: TTG
aatgtgaaatcaccaaggtc

SEQ ID NO: 76890 - DNA, 20 bp, Artificial Sequence
  Description of Artificial Sequence: Synthetic oligonucleotide
  Target: SCNA; (+) strand; PAM type: YTN; PAM sequence: CTC
ctcagtgctagcgaaggact

SEQ ID NO: 76891 - DNA, 20 bp, Artificial Sequence
  Description of Artificial Sequence: Synthetic oligonucleotide
  Target: SCNA; (+) strand; PAM type: YTN; PAM sequence: CTC
agtgctagcgaaggactata

SEQ ID NO: 76892 - DNA, 20 bp, Artificial Sequence
  Description of Artificial Sequence: Synthetic oligonucleotide
  Target: SCNA; (+) strand; PAM type: YTN; PAM sequence: CTA
gcgaaggactatataatagg

SEQ ID NO: 76893 - DNA, 20 bp, Artificial Sequence
  Description of Artificial Sequence: Synthetic oligonucleotide
  Target: SCNA; (+) strand; PAM type: YTN; PAM sequence: CTA
tataataggctcacaaaaat

SEQ ID NO: 76894 - DNA, 20 bp, Artificial Sequence
  Description of Artificial Sequence: Synthetic oligonucleotide
  Target: SCNA; (+) strand; PAM type: YTN; PAM sequence: CTC
acaaaaatatttgtttaaaa

SEQ ID NO: 76895 - DNA, 20 bp, Artificial Sequence
  Description of Artificial Sequence: Synthetic oligonucleotide
  Target: SCNA; (+) strand; PAM type: YTN; PAM sequence: TTT
gtttaaaatgtaattaaatg

SEQ ID NO: 76896 - DNA, 20 bp, Artificial Sequence
  Description of Artificial Sequence: Synthetic oligonucleotide
  Target: SCNA; (+) strand; PAM type: YTN; PAM sequence: TTG
tttaaaatgtaattaaatga

SEQ ID NO: 76897 - DNA, 20 bp, Artificial Sequence
  Description of Artificial Sequence: Synthetic oligonucleotide
  Target: SCNA; (+) strand; PAM type: YTN; PAM sequence: TTT
aaaatgtaattaaatgaaat

SEQ ID NO: 76898 - DNA, 20 bp, Artificial Sequence
  Description of Artificial Sequence: Synthetic oligonucleotide
  Target: SCNA; (+) strand; PAM type: YTN; PAM sequence: TTA
aaatgtaattaaatgaaatt

SEQ ID NO: 76899 - DNA, 20 bp, Artificial Sequence
  Description of Artificial Sequence: Synthetic oligonucleotide
  Target: SCNA; (+) strand; PAM type: YTN; PAM sequence: TTA
aatgaaatttgaagaaagca

SEQ ID NO: 76900 - DNA, 20 bp, Artificial Sequence
  Description of Artificial Sequence: Synthetic oligonucleotide
  Target: SCNA; (+) strand; PAM type: YTN; PAM sequence: TTT
gaagaaagcagaaaatgtct

SEQ ID NO: 76901 - DNA, 20 bp, Artificial Sequence
  Description of Artificial Sequence: Synthetic oligonucleotide
  Target: SCNA; (+) strand; PAM type: YTN; PAM sequence: TTG
aagaaagcagaaaatgtctc

SEQ ID NO: 76902 - DNA, 20 bp, Artificial Sequence
  Description of Artificial Sequence: Synthetic oligonucleotide
  Target: SCNA; (+) strand; PAM type: YTN; PAM sequence: CTC
acaatgctatgtggaagtta

SEQ ID NO: 76903 - DNA, 20 bp, Artificial Sequence
  Description of Artificial Sequence: Synthetic oligonucleotide
  Target: SCNA; (+) strand; PAM type: YTN; PAM sequence: CTA
tgtggaagttattagaataa

SEQ ID NO: 76904 - DNA, 20 bp, Artificial Sequence
  Description of Artificial Sequence: Synthetic oligonucleotide
  Target: SCNA; (+) strand; PAM type: YTN; PAM sequence: TTA
ttagaataacacccccttcc

SEQ ID NO: 76905 - DNA, 20 bp, Artificial Sequence
  Description of Artificial Sequence: Synthetic oligonucleotide
  Target: SCNA; (+) strand; PAM type: YTN; PAM sequence: TTA
gaataacacccccttcccag

SEQ ID NO: 76906 - DNA, 20 bp, Artificial Sequence
  Description of Artificial Sequence: Synthetic oligonucleotide
  Target: SCNA; (+) strand; PAM type: YTN; PAM sequence: CTT
cccagttcctaattgcattc

SEQ ID NO: 76907 - DNA, 20 bp, Artificial Sequence
  Description of Artificial Sequence: Synthetic oligonucleotide
  Target: SCNA; (+) strand; PAM type: YTN; PAM sequence: TTC
ccagttcctaattgcattcc

SEQ ID NO: 76908 - DNA, 20 bp, Artificial Sequence
  Description of Artificial Sequence: Synthetic oligonucleotide
  Target: SCNA; (+) strand; PAM type: YTN; PAM sequence: TTC
ctaattgcattcctggcata

SEQ ID NO: 76909 - DNA, 20 bp, Artificial Sequence
  Description of Artificial Sequence: Synthetic oligonucleotide
  Target: SCNA; (+) strand; PAM type: YTN; PAM sequence: CTA
attgcattcctggcatatct

SEQ ID NO: 76910 - DNA, 20 bp, Artificial Sequence
  Description of Artificial Sequence: Synthetic oligonucleotide
  Target: SCNA; (+) strand; PAM type: YTN; PAM sequence: TTG
cattcctggcatatcttatg

SEQ ID NO: 76911 - DNA, 20 bp, Artificial Sequence
  Description of Artificial Sequence: Synthetic oligonucleotide
  Target: SCNA; (+) strand; PAM type: YTN; PAM sequence: TTC
ctggcatatcttatgtacat

SEQ ID NO: 76912 - DNA, 20 bp, Artificial Sequence
  Description of Artificial Sequence: Synthetic oligonucleotide
  Target: SCNA; (+) strand; PAM type: YTN; PAM sequence: CTG
gcatatcttatgtacattaa

SEQ ID NO: 76913 - DNA, 20 bp, Artificial Sequence
  Description of Artificial Sequence: Synthetic oligonucleotide
  Target: SCNA; (+) strand; PAM type: YTN; PAM sequence: CTT
atgtacattaatctataatt

SEQ ID NO: 76914 - DNA, 20 bp, Artificial Sequence
  Description of Artificial Sequence: Synthetic oligonucleotide
  Target: SCNA; (+) strand; PAM type: YTN; PAM sequence: TTA
tgtacattaatctataatta

SEQ ID NO: 76915 - DNA, 20 bp, Artificial Sequence
  Description of Artificial Sequence: Synthetic oligonucleotide
  Target: SCNA; (+) strand; PAM type: YTN; PAM sequence: TTA
atctataattaaatgaaaca

SEQ ID NO: 76916 - DNA, 20 bp, Artificial Sequence
  Description of Artificial Sequence: Synthetic oligonucleotide
  Target: SCNA; (+) strand; PAM type: YTN; PAM sequence: CTA
taattaaatgaaacattaac

SEQ ID NO: 76917 - DNA, 20 bp, Artificial Sequence
  Description of Artificial Sequence: Synthetic oligonucleotide
  Target: SCNA; (+) strand; PAM type: YTN; PAM sequence: TTA
aatgaaacattaactgcttt

SEQ ID NO: 76918 - DNA, 20 bp, Artificial Sequence
  Description of Artificial Sequence: Synthetic oligonucleotide
  Target: SCNA; (+) strand; PAM type: YTN; PAM sequence: TTA
actgctttattaatggctac

SEQ ID NO: 76919 - DNA, 20 bp, Artificial Sequence
  Description of Artificial Sequence: Synthetic oligonucleotide
  Target: SCNA; (+) strand; PAM type: YTN; PAM sequence: CTG
ctttattaatggctacttta

SEQ ID NO: 76920 - DNA, 20 bp, Artificial Sequence
  Description of Artificial Sequence: Synthetic oligonucleotide
  Target: SCNA; (+) strand; PAM type: YTN; PAM sequence: CTT
tattaatggctactttagaa

SEQ ID NO: 76921 - DNA, 20 bp, Artificial Sequence
  Description of Artificial Sequence: Synthetic oligonucleotide
  Target: SCNA; (+) strand; PAM type: YTN; PAM sequence: TTT
attaatggctactttagaag

SEQ ID NO: 76922 - DNA, 20 bp, Artificial Sequence
  Description of Artificial Sequence: Synthetic oligonucleotide
  Target: SCNA; (+) strand; PAM type: YTN; PAM sequence: TTA
ttaatggctactttagaagg

SEQ ID NO: 76923 - DNA, 20 bp, Artificial Sequence
  Description of Artificial Sequence: Synthetic oligonucleotide
  Target: SCNA; (+) strand; PAM type: YTN; PAM sequence: TTA
atggctactttagaaggagt

SEQ ID NO: 76924 - DNA, 20 bp, Artificial Sequence
  Description of Artificial Sequence: Synthetic oligonucleotide
  Target: SCNA; (+) strand; PAM type: YTN; PAM sequence: CTA
ctttagaaggagtgcattca

SEQ ID NO: 76925 - DNA, 20 bp, Artificial Sequence
  Description of Artificial Sequence: Synthetic oligonucleotide
  Target: SCNA; (+) strand; PAM type: YTN; PAM sequence: CTT
tagaaggagtgcattcatta

SEQ ID NO: 76926 - DNA, 20 bp, Artificial Sequence
  Description of Artificial Sequence: Synthetic oligonucleotide
  Target: SCNA; (+) strand; PAM type: YTN; PAM sequence: TTT
agaaggagtgcattcattaa

SEQ ID NO: 76927 - DNA, 20 bp, Artificial Sequence
  Description of Artificial Sequence: Synthetic oligonucleotide
  Target: SCNA; (+) strand; PAM type: YTN; PAM sequence: TTA
gaaggagtgcattcattaag

SEQ ID NO: 76928 - DNA, 20 bp, Artificial Sequence
  Description of Artificial Sequence: Synthetic oligonucleotide
  Target: SCNA; (+) strand; PAM type: YTN; PAM sequence: TTC
attaaggattattttgaaat

SEQ ID NO: 76929 - DNA, 20 bp, Artificial Sequence
  Description of Artificial Sequence: Synthetic oligonucleotide
  Target: SCNA; (+) strand; PAM type: YTN; PAM sequence: TTA
aggattattttgaaatacaa

SEQ ID NO: 76930 - DNA, 20 bp, Artificial Sequence
  Description of Artificial Sequence: Synthetic oligonucleotide
  Target: SCNA; (+) strand; PAM type: YTN; PAM sequence: TTA
ttttgaaatacaaataattt

SEQ ID NO: 76931 - DNA, 20 bp, Artificial Sequence
  Description of Artificial Sequence: Synthetic oligonucleotide
  Target: SCNA; (+) strand; PAM type: YTN; PAM sequence: TTT
tgaaatacaaataatttccc

SEQ ID NO: 76932 - DNA, 20 bp, Artificial Sequence
  Description of Artificial Sequence: Synthetic oligonucleotide
  Target: SCNA; (+) strand; PAM type: YTN; PAM sequence: TTT
gaaatacaaataatttcccc

SEQ ID NO: 76933 - DNA, 20 bp, Artificial Sequence
  Description of Artificial Sequence: Synthetic oligonucleotide
  Target: SCNA; (+) strand; PAM type: YTN; PAM sequence: TTG
aaatacaaataatttcccca

SEQ ID NO: 76934 - DNA, 20 bp, Artificial Sequence
  Description of Artificial Sequence: Synthetic oligonucleotide
  Target: SCNA; (+) strand; PAM type: YTN; PAM sequence: TTT
ccccataaatcttacattca

SEQ ID NO: 76935 - DNA, 20 bp, Artificial Sequence
  Description of Artificial Sequence: Synthetic oligonucleotide
  Target: SCNA; (+) strand; PAM type: YTN; PAM sequence: TTC
cccataaatcttacattcac

SEQ ID NO: 76936 - DNA, 20 bp, Artificial Sequence
  Description of Artificial Sequence: Synthetic oligonucleotide
  Target: SCNA; (+) strand; PAM type: YTN; PAM sequence: CTT
acattcacatatttggattc

SEQ ID NO: 76937 - DNA, 20 bp, Artificial Sequence
  Description of Artificial Sequence: Synthetic oligonucleotide
  Target: SCNA; (+) strand; PAM type: YTN; PAM sequence: TTA
cattcacatatttggattct

SEQ ID NO: 76938 - DNA, 20 bp, Artificial Sequence
  Description of Artificial Sequence: Synthetic oligonucleotide
  Target: SCNA; (+) strand; PAM type: YTN; PAM sequence: TTC
acatatttggattctgagtt

SEQ ID NO: 76939 - DNA, 20 bp, Artificial Sequence
  Description of Artificial Sequence: Synthetic oligonucleotide
  Target: SCNA; (+) strand; PAM type: YTN; PAM sequence: TTT
ggattctgagttttacccaa

SEQ ID NO: 76940 - DNA, 20 bp, Artificial Sequence
  Description of Artificial Sequence: Synthetic oligonucleotide
  Target: SCNA; (+) strand; PAM type: YTN; PAM sequence: TTG
gattctgagttttacccaag

SEQ ID NO: 76941 - DNA, 20 bp, Artificial Sequence
  Description of Artificial Sequence: Synthetic oligonucleotide
  Target: SCNA; (+) strand; PAM type: YTN; PAM sequence: TTC
tgagttttacccaagtggca

SEQ ID NO: 76942 - DNA, 20 bp, Artificial Sequence
  Description of Artificial Sequence: Synthetic oligonucleotide
  Target: SCNA; (+) strand; PAM type: YTN; PAM sequence: CTG
agttttacccaagtggcaca

SEQ ID NO: 76943 - DNA, 20 bp, Artificial Sequence
  Description of Artificial Sequence: Synthetic oligonucleotide
  Target: SCNA; (+) strand; PAM type: YTN; PAM sequence: TTT
tacccaagtggcacacaacc

SEQ ID NO: 76944 - DNA, 20 bp, Artificial Sequence
  Description of Artificial Sequence: Synthetic oligonucleotide
  Target: SCNA; (+) strand; PAM type: YTN; PAM sequence: TTT
acccaagtggcacacaacca

SEQ ID NO: 76945 - DNA, 20 bp, Artificial Sequence
  Description of Artificial Sequence: Synthetic oligonucleotide
  Target: SCNA; (+) strand; PAM type: YTN; PAM sequence: TTA
cccaagtggcacacaaccat

SEQ ID NO: 76946 - DNA, 20 bp, Artificial Sequence
  Description of Artificial Sequence: Synthetic oligonucleotide
  Target: SCNA; (+) strand; PAM type: YTN; PAM sequence: TTT
gtaggacaggtgaaataaag

SEQ ID NO: 76947 - DNA, 20 bp, Artificial Sequence
  Description of Artificial Sequence: Synthetic oligonucleotide
  Target: SCNA; (+) strand; PAM type: YTN; PAM sequence: TTG
taggacaggtgaaataaagt

SEQ ID NO: 76948 - DNA, 20 bp, Artificial Sequence
  Description of Artificial Sequence: Synthetic oligonucleotide
  Target: SCNA; (+) strand; PAM type: YTN; PAM sequence: TTC
ctactattctggtactgtat

SEQ ID NO: 76949 - DNA, 20 bp, Artificial Sequence
  Description of Artificial Sequence: Synthetic oligonucleotide
  Target: SCNA; (+) strand; PAM type: YTN; PAM sequence: CTA
ctattctggtactgtatcta

SEQ ID NO: 76950 - DNA, 20 bp, Artificial Sequence
  Description of Artificial Sequence: Synthetic oligonucleotide
  Target: SCNA; (+) strand; PAM type: YTN; PAM sequence: CTA
ttctggtactgtatctagac

SEQ ID NO: 76951 - DNA, 20 bp, Artificial Sequence
  Description of Artificial Sequence: Synthetic oligonucleotide
  Target: SCNA; (+) strand; PAM type: YTN; PAM sequence: TTC
tggtactgtatctagactga

SEQ ID NO: 76952 - DNA, 20 bp, Artificial Sequence
  Description of Artificial Sequence: Synthetic oligonucleotide
  Target: SCNA; (+) strand; PAM type: YTN; PAM sequence: CTG
gtactgtatctagactgagc

SEQ ID NO: 76953 - DNA, 20 bp, Artificial Sequence
  Description of Artificial Sequence: Synthetic oligonucleotide
  Target: SCNA; (+) strand; PAM type: YTN; PAM sequence: CTG
tatctagactgagctttaca

SEQ ID NO: 76954 - DNA, 20 bp, Artificial Sequence
  Description of Artificial Sequence: Synthetic oligonucleotide
  Target: SCNA; (+) strand; PAM type: YTN; PAM sequence: CTA
gactgagctttacatatttt

SEQ ID NO: 76955 - DNA, 20 bp, Artificial Sequence
  Description of Artificial Sequence: Synthetic oligonucleotide
  Target: SCNA; (+) strand; PAM type: YTN; PAM sequence: CTG
agctttacatatttttaata

SEQ ID NO: 76956 - DNA, 20 bp, Artificial Sequence
  Description of Artificial Sequence: Synthetic oligonucleotide
  Target: SCNA; (+) strand; PAM type: YTN; PAM sequence: CTT
tacatatttttaatagcttt

SEQ ID NO: 76957 - DNA, 20 bp, Artificial Sequence
  Description of Artificial Sequence: Synthetic oligonucleotide
  Target: SCNA; (+) strand; PAM type: YTN; PAM sequence: TTT
acatatttttaatagctttt

SEQ ID NO: 76958 - DNA, 20 bp, Artificial Sequence
  Description of Artificial Sequence: Synthetic oligonucleotide
  Target: SCNA; (+) strand; PAM type: YTN; PAM sequence: TTA
catatttttaatagcttttt

SEQ ID NO: 76959 - DNA, 20 bp, Artificial Sequence
  Description of Artificial Sequence: Synthetic oligonucleotide
  Target: SCNA; (+) strand; PAM type: YTN; PAM sequence: TTT
ttaatagctttttttttttt

SEQ ID NO: 76960 - DNA, 20 bp, Artificial Sequence
  Description of Artificial Sequence: Synthetic oligonucleotide
  Target: SCNA; (+) strand; PAM type: YTN; PAM sequence: TTT
taatagcttttttttttttt

SEQ ID NO: 76961 - DNA, 20 bp, Artificial Sequence
  Description of Artificial Sequence: Synthetic oligonucleotide
  Target: SCNA; (+) strand; PAM type: YTN; PAM sequence: TTT
aatagctttttttttttttt

SEQ ID NO: 76962 - DNA, 20 bp, Artificial Sequence
  Description of Artificial Sequence: Synthetic oligonucleotide
  Target: SCNA; (+) strand; PAM type: YTN; PAM sequence: TTA
atagcttttttttttttttt

SEQ ID NO: 76963 - DNA, 20 bp, Artificial Sequence
  Description of Artificial Sequence: Synthetic oligonucleotide
  Target: SCNA; (+) strand; PAM type: YTN; PAM sequence: CTT
tttttttttttttttgagac

SEQ ID NO: 76964 - DNA, 20 bp, Artificial Sequence
  Description of Artificial Sequence: Synthetic oligonucleotide
  Target: SCNA; (+) strand; PAM type: YTN; PAM sequence: TTT
ttttttttttttttgagaca

SEQ ID NO: 76965 - DNA, 20 bp, Artificial Sequence
  Description of Artificial Sequence: Synthetic oligonucleotide
  Target: SCNA; (+) strand; PAM type: YTN; PAM sequence: TTT
tttttttttttttgagacag

SEQ ID NO: 76966 - DNA, 20 bp, Artificial Sequence
  Description of Artificial Sequence: Synthetic oligonucleotide
  Target: SCNA; (+) strand; PAM type: YTN; PAM sequence: TTT
ttttttttttttgagacaga

SEQ ID NO: 76967 - DNA, 20 bp, Artificial Sequence
  Description of Artificial Sequence: Synthetic oligonucleotide
  Target: SCNA; (+) strand; PAM type: YTN; PAM sequence: TTT
tttttttttttgagacagag

SEQ ID NO: 76968 - DNA, 20 bp, Artificial Sequence
  Description of Artificial Sequence: Synthetic oligonucleotide
  Target: SCNA; (+) strand; PAM type: YTN; PAM sequence: TTT
ttttttttttgagacagagc

SEQ ID NO: 76969 - DNA, 20 bp, Artificial Sequence
  Description of Artificial Sequence: Synthetic oligonucleotide
  Target: SCNA; (+) strand; PAM type: YTN; PAM sequence: TTT
tttttttttgagacagagcc

SEQ ID NO: 76970 - DNA, 20 bp, Artificial Sequence
  Description of Artificial Sequence: Synthetic oligonucleotide
  Target: SCNA; (+) strand; PAM type: YTN; PAM sequence: TTT
ttttttttgagacagagcct

SEQ ID NO: 76971 - DNA, 20 bp, Artificial Sequence
  Description of Artificial Sequence: Synthetic oligonucleotide
  Target: SCNA; (+) strand; PAM type: YTN; PAM sequence: TTT
tttttttgagacagagcctt

SEQ ID NO: 76972 - DNA, 20 bp, Artificial Sequence
  Description of Artificial Sequence: Synthetic oligonucleotide
  Target: SCNA; (+) strand; PAM type: YTN; PAM sequence: TTT
ttttttgagacagagccttg

SEQ ID NO: 76973 - DNA, 20 bp, Artificial Sequence
  Description of Artificial Sequence: Synthetic oligonucleotide
  Target: SCNA; (+) strand; PAM type: YTN; PAM sequence: TTT
tttttgagacagagccttgc

SEQ ID NO: 76974 - DNA, 20 bp, Artificial Sequence
  Description of Artificial Sequence: Synthetic oligonucleotide
  Target: SCNA; (+) strand; PAM type: YTN; PAM sequence: TTT
ttttgagacagagccttgct

SEQ ID NO: 76975 - DNA, 20 bp, Artificial Sequence
  Description of Artificial Sequence: Synthetic oligonucleotide
  Target: SCNA; (+) strand; PAM type: YTN; PAM sequence: TTT
tttgagacagagccttgctc

SEQ ID NO: 76976 - DNA, 20 bp, Artificial Sequence
  Description of Artificial Sequence: Synthetic oligonucleotide
  Target: SCNA; (+) strand; PAM type: YTN; PAM sequence: TTT
ttgagacagagccttgctct

SEQ ID NO: 76977 - DNA, 20 bp, Artificial Sequence
  Description of Artificial Sequence: Synthetic oligonucleotide
  Target: SCNA; (+) strand; PAM type: YTN; PAM sequence: TTT
tgagacagagccttgctctg

SEQ ID NO: 76978 - DNA, 20 bp, Artificial Sequence
  Description of Artificial Sequence: Synthetic oligonucleotide
  Target: SCNA; (+) strand; PAM type: YTN; PAM sequence: TTT
gagacagagccttgctctgt

SEQ ID NO: 76979 - DNA, 20 bp, Artificial Sequence
  Description of Artificial Sequence: Synthetic oligonucleotide
  Target: SCNA; (+) strand; PAM type: YTN; PAM sequence: TTG
agacagagccttgctctgtc

SEQ ID NO: 76980 - DNA, 20 bp, Artificial Sequence
  Description of Artificial Sequence: Synthetic oligonucleotide
  Target: SCNA; (+) strand; PAM type: YTN; PAM sequence: CTT
gctctgtcacccaggctgga

SEQ ID NO: 76981 - DNA, 20 bp, Artificial Sequence
  Description of Artificial Sequence: Synthetic oligonucleotide
  Target: SCNA; (+) strand; PAM type: YTN; PAM sequence: TTG
ctctgtcacccaggctggag

SEQ ID NO: 76982 - DNA, 20 bp, Artificial Sequence
  Description of Artificial Sequence: Synthetic oligonucleotide
  Target: SCNA; (+) strand; PAM type: YTN; PAM sequence: CTC
tgtcacccaggctggagtgc

SEQ ID NO: 76983 - DNA, 20 bp, Artificial Sequence
  Description of Artificial Sequence: Synthetic oligonucleotide
  Target: SCNA; (+) strand; PAM type: YTN; PAM sequence: CTG
tcacccaggctggagtgcag

SEQ ID NO: 76984 - DNA, 20 bp, Artificial Sequence
  Description of Artificial Sequence: Synthetic oligonucleotide
  Target: SCNA; (+) strand; PAM type: YTN; PAM sequence: CTG
gagtgcagtggcgtaatctc

SEQ ID NO: 76985 - DNA, 20 bp, Artificial Sequence
  Description of Artificial Sequence: Synthetic oligonucleotide
  Target: SCNA; (+) strand; PAM type: YTN; PAM sequence: CTC
accctactgcaacctccacc

SEQ ID NO: 76986 - DNA, 20 bp, Artificial Sequence
  Description of Artificial Sequence: Synthetic oligonucleotide
  Target: SCNA; (+) strand; PAM type: YTN; PAM sequence: CTA
ctgcaacctccaccttctga

SEQ ID NO: 76987 - DNA, 20 bp, Artificial Sequence
  Description of Artificial Sequence: Synthetic oligonucleotide
  Target: SCNA; (+) strand; PAM type: YTN; PAM sequence: CTG
caacctccaccttctgagtt

SEQ ID NO: 76988 - DNA, 20 bp, Artificial Sequence
  Description of Artificial Sequence: Synthetic oligonucleotide
  Target: SCNA; (+) strand; PAM type: YTN; PAM sequence: CTC
caccttctgagttcaggcga

SEQ ID NO: 76989 - DNA, 20 bp, Artificial Sequence
  Description of Artificial Sequence: Synthetic oligonucleotide
  Target: SCNA; (+) strand; PAM type: YTN; PAM sequence: CTT
ctgagttcaggcgattctca

SEQ ID NO: 76990 - DNA, 20 bp, Artificial Sequence
  Description of Artificial Sequence: Synthetic oligonucleotide
  Target: SCNA; (+) strand; PAM type: YTN; PAM sequence: TTC
tgagttcaggcgattctcat

SEQ ID NO: 76991 - DNA, 20 bp, Artificial Sequence
  Description of Artificial Sequence: Synthetic oligonucleotide
  Target: SCNA; (+) strand; PAM type: YTN; PAM sequence: CTG
agttcaggcgattctcatgc

SEQ ID NO: 76992 - DNA, 20 bp, Artificial Sequence
  Description of Artificial Sequence: Synthetic oligonucleotide
  Target: SCNA; (+) strand; PAM type: YTN; PAM sequence: TTC
aggcgattctcatgcctcag

SEQ ID NO: 76993 - DNA, 20 bp, Artificial Sequence
  Description of Artificial Sequence: Synthetic oligonucleotide
  Target: SCNA; (+) strand; PAM type: YTN; PAM sequence: TTC
tcatgcctcagtctcccgag

SEQ ID NO: 76994 - DNA, 20 bp, Artificial Sequence
  Description of Artificial Sequence: Synthetic oligonucleotide
  Target: SCNA; (+) strand; PAM type: YTN; PAM sequence: CTC
atgcctcagtctcccgagta

SEQ ID NO: 76995 - DNA, 20 bp, Artificial Sequence
  Description of Artificial Sequence: Synthetic oligonucleotide
  Target: SCNA; (+) strand; PAM type: YTN; PAM sequence: CTC
agtctcccgagtagttgtga

SEQ ID NO: 76996 - DNA, 20 bp, Artificial Sequence
  Description of Artificial Sequence: Synthetic oligonucleotide
  Target: SCNA; (+) strand; PAM type: YTN; PAM sequence: CTC
ccgagtagttgtgattacaa

SEQ ID NO: 76997 - DNA, 20 bp, Artificial Sequence
  Description of Artificial Sequence: Synthetic oligonucleotide
  Target: SCNA; (+) strand; PAM type: YTN; PAM sequence: TTG
tgattacaagcatgagcaac

SEQ ID NO: 76998 - DNA, 20 bp, Artificial Sequence
  Description of Artificial Sequence: Synthetic oligonucleotide
  Target: SCNA; (+) strand; PAM type: YTN; PAM sequence: TTA
caagcatgagcaaccgcatc

SEQ ID NO: 76999 - DNA, 20 bp, Artificial Sequence
  Description of Artificial Sequence: Synthetic oligonucleotide
  Target: SCNA; (+) strand; PAM type: YTN; PAM sequence: CTG
tctttcttttctttctttct

SEQ ID NO: 77000 - DNA, 20 bp, Artificial Sequence
  Description of Artificial Sequence: Synthetic oligonucleotide
  Target: SCNA; (+) strand; PAM type: YTN; PAM sequence: CTT
tcttttctttctttctttct

SEQ ID NO: 77001 - DNA, 20 bp, Artificial Sequence
  Description of Artificial Sequence: Synthetic oligonucleotide
  Target: SCNA; (+) strand; PAM type: YTN; PAM sequence: TTT
cttttctttctttctttctt

SEQ ID NO: 77002 - DNA, 20 bp, Artificial Sequence
  Description of Artificial Sequence: Synthetic oligonucleotide
  Target: SCNA; (+) strand; PAM type: YTN; PAM sequence: TTC
ttttctttctttctttcttt

SEQ ID NO: 77003 - DNA, 20 bp, Artificial Sequence
  Description of Artificial Sequence: Synthetic oligonucleotide
  Target: SCNA; (+) strand; PAM type: YTN; PAM sequence: CTT
ttctttctttctttctttct

SEQ ID NO: 77004 - DNA, 20 bp, Artificial Sequence
  Description of Artificial Sequence: Synthetic oligonucleotide
  Target: SCNA; (+) strand; PAM type: YTN; PAM sequence: TTT
tctttctttctttctttctt

SEQ ID NO: 77005 - DNA, 20 bp, Artificial Sequence
  Description of Artificial Sequence: Synthetic oligonucleotide
  Target: SCNA; (+) strand; PAM type: YTN; PAM sequence: TTT
ctttctttctttctttcttt

SEQ ID NO: 77006 - DNA, 20 bp, Artificial Sequence
  Description of Artificial Sequence: Synthetic oligonucleotide
  Target: SCNA; (+) strand; PAM type: YTN; PAM sequence: TTC
tttctttctttctttctttc

SEQ ID NO: 77007 - DNA, 20 bp, Artificial Sequence
  Description of Artificial Sequence: Synthetic oligonucleotide
  Target: SCNA; (+) strand; PAM type: YTN; PAM sequence: CTT
tctttctttctttctttctt

SEQ ID NO: 77008 - DNA, 20 bp, Artificial Sequence
  Description of Artificial Sequence: Synthetic oligonucleotide
  Target: SCNA; (+) strand; PAM type: YTN; PAM sequence: TTT
ctttctttctttctttcttt

SEQ ID NO: 77009 - DNA, 20 bp, Artificial Sequence
  Description of Artificial Sequence: Synthetic oligonucleotide
  Target: SCNA; (+) strand; PAM type: YTN; PAM sequence: TTC
tttctttctttctttctttt

SEQ ID NO: 77010 - DNA, 20 bp, Artificial Sequence
  Description of Artificial Sequence: Synthetic oligonucleotide
  Target: SCNA; (+) strand; PAM type: YTN; PAM sequence: CTT
tctttctttctttctttttc

SEQ ID NO: 77011 - DNA, 20 bp, Artificial Sequence
  Description of Artificial Sequence: Synthetic oligonucleotide
  Target: SCNA; (+) strand; PAM type: YTN; PAM sequence: TTT
ctttctttctttctttttct

SEQ ID NO: 77012 - DNA, 20 bp, Artificial Sequence
  Description of Artificial Sequence: Synthetic oligonucleotide
  Target: SCNA; (+) strand; PAM type: YTN; PAM sequence: TTC
tttctttctttctttttctt

SEQ ID NO: 77013 - DNA, 20 bp, Artificial Sequence
  Description of Artificial Sequence: Synthetic oligonucleotide
  Target: SCNA; (+) strand; PAM type: YTN; PAM sequence: CTT
tctttctttctttttctttc

SEQ ID NO: 77014 - DNA, 20 bp, Artificial Sequence
  Description of Artificial Sequence: Synthetic oligonucleotide
  Target: SCNA; (+) strand; PAM type: YTN; PAM sequence: TTT
ctttctttctttttctttct

SEQ ID NO: 77015 - DNA, 20 bp, Artificial Sequence
  Description of Artificial Sequence: Synthetic oligonucleotide
  Target: SCNA; (+) strand; PAM type: YTN; PAM sequence: TTC
tttctttctttttctttctt

SEQ ID NO: 77016 - DNA, 20 bp, Artificial Sequence
  Description of Artificial Sequence: Synthetic oligonucleotide
  Target: SCNA; (+) strand; PAM type: YTN; PAM sequence: CTT
tctttctttttctttctttc

SEQ ID NO: 77017 - DNA, 20 bp, Artificial Sequence
  Description of Artificial Sequence: Synthetic oligonucleotide
  Target: SCNA; (+) strand; PAM type: YTN; PAM sequence: TTT
ctttctttttctttctttct

SEQ ID NO: 77018 - DNA, 20 bp, Artificial Sequence
  Description of Artificial Sequence: Synthetic oligonucleotide
  Target: SCNA; (+) strand; PAM type: YTN; PAM sequence: TTC
tttctttttctttctttctt

SEQ ID NO: 77019 - DNA, 20 bp, Artificial Sequence
  Description of Artificial Sequence: Synthetic oligonucleotide
  Target: SCNA; (+) strand; PAM type: YTN; PAM sequence: CTT
tctttttctttctttctttc

SEQ ID NO: 77020 - DNA, 20 bp, Artificial Sequence
  Description of Artificial Sequence: Synthetic oligonucleotide
  Target: SCNA; (+) strand; PAM type: YTN; PAM sequence: TTT
ctttttctttctttctttct

SEQ ID NO: 77021 - DNA, 20 bp, Artificial Sequence
  Description of Artificial Sequence: Synthetic oligonucleotide
  Target: SCNA; (+) strand; PAM type: YTN; PAM sequence: TTC
tttttctttctttctttctc

SEQ ID NO: 77022 - DNA, 20 bp, Artificial Sequence
  Description of Artificial Sequence: Synthetic oligonucleotide
  Target: SCNA; (+) strand; PAM type: YTN; PAM sequence: CTT
tttctttctttctttctctc

SEQ ID NO: 77023 - DNA, 20 bp, Artificial Sequence
  Description of Artificial Sequence: Synthetic oligonucleotide
  Target: SCNA; (+) strand; PAM type: YTN; PAM sequence: TTT
ttctttctttctttctctct

SEQ ID NO: 77024 - DNA, 20 bp, Artificial Sequence
  Description of Artificial Sequence: Synthetic oligonucleotide
  Target: SCNA; (+) strand; PAM type: YTN; PAM sequence: TTT
tctttctttctttctctctt

SEQ ID NO: 77025 - DNA, 20 bp, Artificial Sequence
  Description of Artificial Sequence: Synthetic oligonucleotide
  Target: SCNA; (+) strand; PAM type: YTN; PAM sequence: TTT
ctttctttctttctctcttt

SEQ ID NO: 77026 - DNA, 20 bp, Artificial Sequence
  Description of Artificial Sequence: Synthetic oligonucleotide
  Target: SCNA; (+) strand; PAM type: YTN; PAM sequence: TTC
tttctttctttctctctttc

SEQ ID NO: 77027 - DNA, 20 bp, Artificial Sequence
  Description of Artificial Sequence: Synthetic oligonucleotide
  Target: SCNA; (+) strand; PAM type: YTN; PAM sequence: CTT
tctttctttctctctttctg

SEQ ID NO: 77028 - DNA, 20 bp, Artificial Sequence
  Description of Artificial Sequence: Synthetic oligonucleotide
  Target: SCNA; (+) strand; PAM type: YTN; PAM sequence: TTT
ctttctttctctctttctgt

SEQ ID NO: 77029 - DNA, 20 bp, Artificial Sequence
  Description of Artificial Sequence: Synthetic oligonucleotide
  Target: SCNA; (+) strand; PAM type: YTN; PAM sequence: TTC
tttctttctctctttctgtt

SEQ ID NO: 77030 - DNA, 20 bp, Artificial Sequence
  Description of Artificial Sequence: Synthetic oligonucleotide
  Target: SCNA; (+) strand; PAM type: YTN; PAM sequence: CTT
tctttctctctttctgtttc

SEQ ID NO: 77031 - DNA, 20 bp, Artificial Sequence
  Description of Artificial Sequence: Synthetic oligonucleotide
  Target: SCNA; (+) strand; PAM type: YTN; PAM sequence: TTT
ctttctctctttctgtttct

SEQ ID NO: 77032 - DNA, 20 bp, Artificial Sequence
  Description of Artificial Sequence: Synthetic oligonucleotide
  Target: SCNA; (+) strand; PAM type: YTN; PAM sequence: TTC
tttctctctttctgtttctt

SEQ ID NO: 77033 - DNA, 20 bp, Artificial Sequence
  Description of Artificial Sequence: Synthetic oligonucleotide
  Target: SCNA; (+) strand; PAM type: YTN; PAM sequence: CTT
tctctctttctgtttctttc

SEQ ID NO: 77034 - DNA, 20 bp, Artificial Sequence
  Description of Artificial Sequence: Synthetic oligonucleotide
  Target: SCNA; (+) strand; PAM type: YTN; PAM sequence: TTT
ctctctttctgtttctttct

SEQ ID NO: 77035 - DNA, 20 bp, Artificial Sequence
  Description of Artificial Sequence: Synthetic oligonucleotide
  Target: SCNA; (+) strand; PAM type: YTN; PAM sequence: TTC
tctctttctgtttctttctt

SEQ ID NO: 77036 - DNA, 20 bp, Artificial Sequence
  Description of Artificial Sequence: Synthetic oligonucleotide
  Target: SCNA; (+) strand; PAM type: YTN; PAM sequence: CTC
tctttctgtttctttctttc

SEQ ID NO: 77037 - DNA, 20 bp, Artificial Sequence
  Description of Artificial Sequence: Synthetic oligonucleotide
  Target: SCNA; (+) strand; PAM type: YTN; PAM sequence: CTC
tttctgtttctttctttcct

SEQ ID NO: 77038 - DNA, 20 bp, Artificial Sequence
  Description of Artificial Sequence: Synthetic oligonucleotide
  Target: SCNA; (+) strand; PAM type: YTN; PAM sequence: CTT
tctgtttctttctttccttc

SEQ ID NO: 77039 - DNA, 20 bp, Artificial Sequence
  Description of Artificial Sequence: Synthetic oligonucleotide
  Target: SCNA; (+) strand; PAM type: YTN; PAM sequence: TTT
ctgtttctttctttccttct

SEQ ID NO: 77040 - DNA, 20 bp, Artificial Sequence
  Description of Artificial Sequence: Synthetic oligonucleotide
  Target: SCNA; (+) strand; PAM type: YTN; PAM sequence: TTC
tgtttctttctttccttctt

SEQ ID NO: 77041 - DNA, 20 bp, Artificial Sequence
  Description of Artificial Sequence: Synthetic oligonucleotide
  Target: SCNA; (+) strand; PAM type: YTN; PAM sequence: CTG
tttctttctttccttctttc

SEQ ID NO: 77042 - DNA, 20 bp, Artificial Sequence
  Description of Artificial Sequence: Synthetic oligonucleotide
  Target: SCNA; (+) strand; PAM type: YTN; PAM sequence: TTT
ctttctttccttctttcttt

SEQ ID NO: 77043 - DNA, 20 bp, Artificial Sequence
  Description of Artificial Sequence: Synthetic oligonucleotide
  Target: SCNA; (+) strand; PAM type: YTN; PAM sequence: TTC
tttctttccttctttctttc

SEQ ID NO: 77044 - DNA, 20 bp, Artificial Sequence
  Description of Artificial Sequence: Synthetic oligonucleotide
  Target: SCNA; (+) strand; PAM type: YTN; PAM sequence: CTT
tctttccttctttctttctc

SEQ ID NO: 77045 - DNA, 20 bp, Artificial Sequence
  Description of Artificial Sequence: Synthetic oligonucleotide
  Target: SCNA; (+) strand; PAM type: YTN; PAM sequence: TTT
ctttccttctttctttctct

SEQ ID NO: 77046 - DNA, 20 bp, Artificial Sequence
  Description of Artificial Sequence: Synthetic oligonucleotide
  Target: SCNA; (+) strand; PAM type: YTN; PAM sequence: TTC
tttccttctttctttctctc

SEQ ID NO: 77047 - DNA, 20 bp, Artificial Sequence
  Description of Artificial Sequence: Synthetic oligonucleotide
  Target: SCNA; (+) strand; PAM type: YTN; PAM sequence: CTT
tccttctttctttctctctt

SEQ ID NO: 77048 - DNA, 20 bp, Artificial Sequence
  Description of Artificial Sequence: Synthetic oligonucleotide
  Target: SCNA; (+) strand; PAM type: YTN; PAM sequence: TTT
ccttctttctttctctcttt

SEQ ID NO: 77049 - DNA, 20 bp, Artificial Sequence
  Description of Artificial Sequence: Synthetic oligonucleotide
  Target: SCNA; (+) strand; PAM type: YTN; PAM sequence: TTC
cttctttctttctctctttc

SEQ ID NO: 77050 - DNA, 20 bp, Artificial Sequence
  Description of Artificial Sequence: Synthetic oligonucleotide
  Target: SCNA; (+) strand; PAM type: YTN; PAM sequence: CTT
ctttctttctctctttctct

SEQ ID NO: 77051 - DNA, 20 bp, Artificial Sequence
  Description of Artificial Sequence: Synthetic oligonucleotide
  Target: SCNA; (+) strand; PAM type: YTN; PAM sequence: TTC
tttctttctctctttctctt

SEQ ID NO: 77052 - DNA, 20 bp, Artificial Sequence
  Description of Artificial Sequence: Synthetic oligonucleotide
  Target: SCNA; (+) strand; PAM type: YTN; PAM sequence: CTT
tctttctctctttctctttc

SEQ ID NO: 77053 - DNA, 20 bp, Artificial Sequence
  Description of Artificial Sequence: Synthetic oligonucleotide
  Target: SCNA; (+) strand; PAM type: YTN; PAM sequence: TTT
ctttctctctttctctttct

SEQ ID NO: 77054 - DNA, 20 bp, Artificial Sequence
  Description of Artificial Sequence: Synthetic oligonucleotide
  Target: SCNA; (+) strand; PAM type: YTN; PAM sequence: TTC
tttctctctttctctttctt

SEQ ID NO: 77055 - DNA, 20 bp, Artificial Sequence
  Description of Artificial Sequence: Synthetic oligonucleotide
  Target: SCNA; (+) strand; PAM type: YTN; PAM sequence: CTT
tctctctttctctttctttc

SEQ ID NO: 77056 - DNA, 20 bp, Artificial Sequence
  Description of Artificial Sequence: Synthetic oligonucleotide
  Target: SCNA; (+) strand; PAM type: YTN; PAM sequence: TTT
ctctctttctctttctttct

SEQ ID NO: 77057 - DNA, 20 bp, Artificial Sequence
  Description of Artificial Sequence: Synthetic oligonucleotide
  Target: SCNA; (+) strand; PAM type: YTN; PAM sequence: TTC
tctctttctctttctttctt

SEQ ID NO: 77058 - DNA, 20 bp, Artificial Sequence
  Description of Artificial Sequence: Synthetic oligonucleotide
  Target: SCNA; (+) strand; PAM type: YTN; PAM sequence: CTC
tctttctctttctttctttt

SEQ ID NO: 77059 - DNA, 20 bp, Artificial Sequence
  Description of Artificial Sequence: Synthetic oligonucleotide
  Target: SCNA; (+) strand; PAM type: YTN; PAM sequence: CTC
tttctctttctttcttttct

SEQ ID NO: 77060 - DNA, 20 bp, Artificial Sequence
  Description of Artificial Sequence: Synthetic oligonucleotide
  Target: SCNA; (+) strand; PAM type: YTN; PAM sequence: CTT
tctctttctttcttttcttc

SEQ ID NO: 77061 - DNA, 20 bp, Artificial Sequence
  Description of Artificial Sequence: Synthetic oligonucleotide
  Target: SCNA; (+) strand; PAM type: YTN; PAM sequence: TTT
ctctttctttcttttcttct

SEQ ID NO: 77062 - DNA, 20 bp, Artificial Sequence
  Description of Artificial Sequence: Synthetic oligonucleotide
  Target: SCNA; (+) strand; PAM type: YTN; PAM sequence: TTC
tctttctttcttttcttctt

SEQ ID NO: 77063 - DNA, 20 bp, Artificial Sequence
  Description of Artificial Sequence: Synthetic oligonucleotide
  Target: SCNA; (+) strand; PAM type: YTN; PAM sequence: CTC
tttctttcttttcttctttc

SEQ ID NO: 77064 - DNA, 20 bp, Artificial Sequence
  Description of Artificial Sequence: Synthetic oligonucleotide
  Target: SCNA; (+) strand; PAM type: YTN; PAM sequence: CTT
tctttcttttcttctttctt

SEQ ID NO: 77065 - DNA, 20 bp, Artificial Sequence
  Description of Artificial Sequence: Synthetic oligonucleotide
  Target: SCNA; (+) strand; PAM type: YTN; PAM sequence: TTT
ctttcttttcttctttcttt

SEQ ID NO: 77066 - DNA, 20 bp, Artificial Sequence
  Description of Artificial Sequence: Synthetic oligonucleotide
  Target: SCNA; (+) strand; PAM type: YTN; PAM sequence: TTC
tttcttttcttctttctttc

SEQ ID NO: 77067 - DNA, 20 bp, Artificial Sequence
  Description of Artificial Sequence: Synthetic oligonucleotide
  Target: SCNA; (+) strand; PAM type: YTN; PAM sequence: CTT
tcttttcttctttctttctt

SEQ ID NO: 77068 - DNA, 20 bp, Artificial Sequence
  Description of Artificial Sequence: Synthetic oligonucleotide
  Target: SCNA; (+) strand; PAM type: YTN; PAM sequence: TTT
cttttcttctttctttcttt

SEQ ID NO: 77069 - DNA, 20 bp, Artificial Sequence
  Description of Artificial Sequence: Synthetic oligonucleotide
  Target: SCNA; (+) strand; PAM type: YTN; PAM sequence: TTC
ttttcttctttctttctttc

SEQ ID NO: 77070 - DNA, 20 bp, Artificial Sequence
  Description of Artificial Sequence: Synthetic oligonucleotide
  Target: SCNA; (+) strand; PAM type: YTN; PAM sequence: CTT
ttcttctttctttctttcct

SEQ ID NO: 77071 - DNA, 20 bp, Artificial Sequence
  Description of Artificial Sequence: Synthetic oligonucleotide
  Target: SCNA; (+) strand; PAM type: YTN; PAM sequence: TTT
tcttctttctttctttcctt

SEQ ID NO: 77072 - DNA, 20 bp, Artificial Sequence
  Description of Artificial Sequence: Synthetic oligonucleotide
  Target: SCNA; (+) strand; PAM type: YTN; PAM sequence: TTT
cttctttctttctttccttt

SEQ ID NO: 77073 - DNA, 20 bp, Artificial Sequence
  Description of Artificial Sequence: Synthetic oligonucleotide
  Target: SCNA; (+) strand; PAM type: YTN; PAM sequence: TTC
ttctttctttctttcctttc

SEQ ID NO: 77074 - DNA, 20 bp, Artificial Sequence
  Description of Artificial Sequence: Synthetic oligonucleotide
  Target: SCNA; (+) strand; PAM type: YTN; PAM sequence: CTT
ctttctttctttcctttctt

SEQ ID NO: 77075 - DNA, 20 bp, Artificial Sequence
  Description of Artificial Sequence: Synthetic oligonucleotide
  Target: SCNA; (+) strand; PAM type: YTN; PAM sequence: TTC
tttctttctttcctttcttt

SEQ ID NO: 77076 - DNA, 20 bp, Artificial Sequence
  Description of Artificial Sequence: Synthetic oligonucleotide
  Target: SCNA; (+) strand; PAM type: YTN; PAM sequence: CTT
tctttctttcctttctttct

SEQ ID NO: 77077 - DNA, 20 bp, Artificial Sequence
  Description of Artificial Sequence: Synthetic oligonucleotide
  Target: SCNA; (+) strand; PAM type: YTN; PAM sequence: TTT
ctttctttcctttctttctt

SEQ ID NO: 77078 - DNA, 20 bp, Artificial Sequence
  Description of Artificial Sequence: Synthetic oligonucleotide
  Target: SCNA; (+) strand; PAM type: YTN; PAM sequence: TTC
tttctttcctttctttcttt

SEQ ID NO: 77079 - DNA, 20 bp, Artificial Sequence
  Description of Artificial Sequence: Synthetic oligonucleotide
  Target: SCNA; (+) strand; PAM type: YTN; PAM sequence: CTT
tctttcctttctttctttta

SEQ ID NO: 77080 - DNA, 20 bp, Artificial Sequence
  Description of Artificial Sequence: Synthetic oligonucleotide
  Target: SCNA; (+) strand; PAM type: YTN; PAM sequence: TTT
ctttcctttctttcttttat

SEQ ID NO: 77081 - DNA, 20 bp, Artificial Sequence
  Description of Artificial Sequence: Synthetic oligonucleotide
  Target: SCNA; (+) strand; PAM type: YTN; PAM sequence: TTC
tttcctttctttcttttatt

SEQ ID NO: 77082 - DNA, 20 bp, Artificial Sequence
  Description of Artificial Sequence: Synthetic oligonucleotide
  Target: SCNA; (+) strand; PAM type: YTN; PAM sequence: CTT
tcctttctttcttttatttc

SEQ ID NO: 77083 - DNA, 20 bp, Artificial Sequence
  Description of Artificial Sequence: Synthetic oligonucleotide
  Target: SCNA; (+) strand; PAM type: YTN; PAM sequence: TTT
cctttctttcttttatttct

SEQ ID NO: 77084 - DNA, 20 bp, Artificial Sequence
  Description of Artificial Sequence: Synthetic oligonucleotide
  Target: SCNA; (+) strand; PAM type: YTN; PAM sequence: TTC
ctttctttcttttatttctt

SEQ ID NO: 77085 - DNA, 20 bp, Artificial Sequence
  Description of Artificial Sequence: Synthetic oligonucleotide
  Target: SCNA; (+) strand; PAM type: YTN; PAM sequence: CTT
tctttcttttatttcttctg

SEQ ID NO: 77086 - DNA, 20 bp, Artificial Sequence
  Description of Artificial Sequence: Synthetic oligonucleotide
  Target: SCNA; (+) strand; PAM type: YTN; PAM sequence: TTT
ctttcttttatttcttctgt

SEQ ID NO: 77087 - DNA, 20 bp, Artificial Sequence
  Description of Artificial Sequence: Synthetic oligonucleotide
  Target: SCNA; (+) strand; PAM type: YTN; PAM sequence: TTC
tttcttttatttcttctgtt

SEQ ID NO: 77088 - DNA, 20 bp, Artificial Sequence
  Description of Artificial Sequence: Synthetic oligonucleotide
  Target: SCNA; (+) strand; PAM type: YTN; PAM sequence: CTT
tcttttatttcttctgttct

SEQ ID NO: 77089 - DNA, 20 bp, Artificial Sequence
  Description of Artificial Sequence: Synthetic oligonucleotide
  Target: SCNA; (+) strand; PAM type: YTN; PAM sequence: TTT
cttttatttcttctgttctt

SEQ ID NO: 77090 - DNA, 20 bp, Artificial Sequence
  Description of Artificial Sequence: Synthetic oligonucleotide
  Target: SCNA; (+) strand; PAM type: YTN; PAM sequence: TTC
ttttatttcttctgttcttt

SEQ ID NO: 77091 - DNA, 20 bp, Artificial Sequence
  Description of Artificial Sequence: Synthetic oligonucleotide
  Target: SCNA; (+) strand; PAM type: YTN; PAM sequence: CTT
ttatttcttctgttctttct

SEQ ID NO: 77092 - DNA, 20 bp, Artificial Sequence
  Description of Artificial Sequence: Synthetic oligonucleotide
  Target: SCNA; (+) strand; PAM type: YTN; PAM sequence: TTT
tatttcttctgttctttctt

SEQ ID NO: 77093 - DNA, 20 bp, Artificial Sequence
  Description of Artificial Sequence: Synthetic oligonucleotide
  Target: SCNA; (+) strand; PAM type: YTN; PAM sequence: TTT
atttcttctgttctttcttt

SEQ ID NO: 77094 - DNA, 20 bp, Artificial Sequence
  Description of Artificial Sequence: Synthetic oligonucleotide
  Target: SCNA; (+) strand; PAM type: YTN; PAM sequence: TTA
tttcttctgttctttctttc

SEQ ID NO: 77095 - DNA, 20 bp, Artificial Sequence
  Description of Artificial Sequence: Synthetic oligonucleotide
  Target: SCNA; (+) strand; PAM type: YTN; PAM sequence: TTT
cttctgttctttctttcttt

SEQ ID NO: 77096 - DNA, 20 bp, Artificial Sequence
  Description of Artificial Sequence: Synthetic oligonucleotide
  Target: SCNA; (+) strand; PAM type: YTN; PAM sequence: TTC
ttctgttctttctttctttt

SEQ ID NO: 77097 - DNA, 20 bp, Artificial Sequence
  Description of Artificial Sequence: Synthetic oligonucleotide
  Target: SCNA; (+) strand; PAM type: YTN; PAM sequence: CTT
ctgttctttctttcttttct

SEQ ID NO: 77098 - DNA, 20 bp, Artificial Sequence
  Description of Artificial Sequence: Synthetic oligonucleotide
  Target: SCNA; (+) strand; PAM type: YTN; PAM sequence: TTC
tgttctttctttcttttctt

SEQ ID NO: 77099 - DNA, 20 bp, Artificial Sequence
  Description of Artificial Sequence: Synthetic oligonucleotide
  Target: SCNA; (+) strand; PAM type: YTN; PAM sequence: CTG
ttctttctttcttttctttc

SEQ ID NO: 77100 - DNA, 20 bp, Artificial Sequence
  Description of Artificial Sequence: Synthetic oligonucleotide
  Target: SCNA; (+) strand; PAM type: YTN; PAM sequence: TTC
tttctttcttttctttcttt

SEQ ID NO: 77101 - DNA, 20 bp, Artificial Sequence
  Description of Artificial Sequence: Synthetic oligonucleotide
  Target: SCNA; (+) strand; PAM type: YTN; PAM sequence: CTT
tctttcttttctttctttct

SEQ ID NO: 77102 - DNA, 20 bp, Artificial Sequence
  Description of Artificial Sequence: Synthetic oligonucleotide
  Target: SCNA; (+) strand; PAM type: YTN; PAM sequence: TTT
ctttcttttctttctttctt

SEQ ID NO: 77103 - DNA, 20 bp, Artificial Sequence
  Description of Artificial Sequence: Synthetic oligonucleotide
  Target: SCNA; (+) strand; PAM type: YTN; PAM sequence: TTC
tttcttttctttctttcttt

SEQ ID NO: 77104 - DNA, 20 bp, Artificial Sequence
  Description of Artificial Sequence: Synthetic oligonucleotide
  Target: SCNA; (+) strand; PAM type: YTN; PAM sequence: CTT
tcttttctttctttcttttt

SEQ ID NO: 77105 - DNA, 20 bp, Artificial Sequence
  Description of Artificial Sequence: Synthetic oligonucleotide
  Target: SCNA; (+) strand; PAM type: YTN; PAM sequence: TTT
cttttctttctttctttttt

SEQ ID NO: 77106 - DNA, 20 bp, Artificial Sequence
  Description of Artificial Sequence: Synthetic oligonucleotide
  Target: SCNA; (+) strand; PAM type: YTN; PAM sequence: TTC
ttttctttctttcttttttt

SEQ ID NO: 77107 - DNA, 20 bp, Artificial Sequence
  Description of Artificial Sequence: Synthetic oligonucleotide
  Target: SCNA; (+) strand; PAM type: YTN; PAM sequence: CTT
ttctttctttcttttttttt

SEQ ID NO: 77108 - DNA, 20 bp, Artificial Sequence
  Description of Artificial Sequence: Synthetic oligonucleotide
  Target: SCNA; (+) strand; PAM type: YTN; PAM sequence: TTT
tctttctttctttttttttt

SEQ ID NO: 77109 - DNA, 20 bp, Artificial Sequence
  Description of Artificial Sequence: Synthetic oligonucleotide
  Target: SCNA; (+) strand; PAM type: YTN; PAM sequence: TTT
ctttctttcttttttttttt

SEQ ID NO: 77110 - DNA, 20 bp, Artificial Sequence
  Description of Artificial Sequence: Synthetic oligonucleotide
  Target: SCNA; (+) strand; PAM type: YTN; PAM sequence: TTC
tttctttctttttttttttt

SEQ ID NO: 77111 - DNA, 20 bp, Artificial Sequence
  Description of Artificial Sequence: Synthetic oligonucleotide
  Target: SCNA; (+) strand; PAM type: YTN; PAM sequence: CTT
tctttctttttttttttttg

SEQ ID NO: 77112 - DNA, 20 bp, Artificial Sequence
  Description of Artificial Sequence: Synthetic oligonucleotide
  Target: SCNA; (+) strand; PAM type: YTN; PAM sequence: TTT
ctttctttttttttttttgt

SEQ ID NO: 77113 - DNA, 20 bp, Artificial Sequence
  Description of Artificial Sequence: Synthetic oligonucleotide
  Target: SCNA; (+) strand; PAM type: YTN; PAM sequence: TTC
tttctttttttttttttgta

SEQ ID NO: 77114 - DNA, 20 bp, Artificial Sequence
  Description of Artificial Sequence: Synthetic oligonucleotide
  Target: SCNA; (+) strand; PAM type: YTN; PAM sequence: CTT
tctttttttttttttgtatt

SEQ ID NO: 77115 - DNA, 20 bp, Artificial Sequence
  Description of Artificial Sequence: Synthetic oligonucleotide
  Target: SCNA; (+) strand; PAM type: YTN; PAM sequence: TTT
ctttttttttttttgtattt

SEQ ID NO: 77116 - DNA, 20 bp, Artificial Sequence
  Description of Artificial Sequence: Synthetic oligonucleotide
  Target: SCNA; (+) strand; PAM type: YTN; PAM sequence: TTC
tttttttttttttgtatttt

SEQ ID NO: 77117 - DNA, 20 bp, Artificial Sequence
  Description of Artificial Sequence: Synthetic oligonucleotide
  Target: SCNA; (+) strand; PAM type: YTN; PAM sequence: CTT
tttttttttttgtattttta

SEQ ID NO: 77118 - DNA, 20 bp, Artificial Sequence
  Description of Artificial Sequence: Synthetic oligonucleotide
  Target: SCNA; (+) strand; PAM type: YTN; PAM sequence: TTT
ttttttttttgtatttttag

SEQ ID NO: 77119 - DNA, 20 bp, Artificial Sequence
  Description of Artificial Sequence: Synthetic oligonucleotide
  Target: SCNA; (+) strand; PAM type: YTN; PAM sequence: TTT
tttttttttgtatttttagt

SEQ ID NO: 77120 - DNA, 20 bp, Artificial Sequence
  Description of Artificial Sequence: Synthetic oligonucleotide
  Target: SCNA; (+) strand; PAM type: YTN; PAM sequence: TTT
ttttttttgtatttttagta

SEQ ID NO: 77121 - DNA, 20 bp, Artificial Sequence
  Description of Artificial Sequence: Synthetic oligonucleotide
  Target: SCNA; (+) strand; PAM type: YTN; PAM sequence: TTT
tttttttgtatttttagtag

SEQ ID NO: 77122 - DNA, 20 bp, Artificial Sequence
  Description of Artificial Sequence: Synthetic oligonucleotide
  Target: SCNA; (+) strand; PAM type: YTN; PAM sequence: TTT
ttttttgtatttttagtaga

SEQ ID NO: 77123 - DNA, 20 bp, Artificial Sequence
  Description of Artificial Sequence: Synthetic oligonucleotide
  Target: SCNA; (+) strand; PAM type: YTN; PAM sequence: TTT
tttttgtatttttagtagag

SEQ ID NO: 77124 - DNA, 20 bp, Artificial Sequence
  Description of Artificial Sequence: Synthetic oligonucleotide
  Target: SCNA; (+) strand; PAM type: YTN; PAM sequence: TTT
ttttgtatttttagtagaga

SEQ ID NO: 77125 - DNA, 20 bp, Artificial Sequence
  Description of Artificial Sequence: Synthetic oligonucleotide
  Target: SCNA; (+) strand; PAM type: YTN; PAM sequence: TTT
tttgtatttttagtagagac

SEQ ID NO: 77126 - DNA, 20 bp, Artificial Sequence
  Description of Artificial Sequence: Synthetic oligonucleotide
  Target: SCNA; (+) strand; PAM type: YTN; PAM sequence: TTT
ttgtatttttagtagagaca

SEQ ID NO: 77127 - DNA, 20 bp, Artificial Sequence
  Description of Artificial Sequence: Synthetic oligonucleotide
  Target: SCNA; (+) strand; PAM type: YTN; PAM sequence: TTT
tgtatttttagtagagacag

SEQ ID NO: 77128 - DNA, 20 bp, Artificial Sequence
  Description of Artificial Sequence: Synthetic oligonucleotide
  Target: SCNA; (+) strand; PAM type: YTN; PAM sequence: TTT
gtatttttagtagagacagg

SEQ ID NO: 77129 - DNA, 20 bp, Artificial Sequence
  Description of Artificial Sequence: Synthetic oligonucleotide
  Target: SCNA; (+) strand; PAM type: YTN; PAM sequence: TTG
tatttttagtagagacagga

SEQ ID NO: 77130 - DNA, 20 bp, Artificial Sequence
  Description of Artificial Sequence: Synthetic oligonucleotide
  Target: SCNA; (+) strand; PAM type: YTN; PAM sequence: TTT
ttagtagagacaggatttca

SEQ ID NO: 77131 - DNA, 20 bp, Artificial Sequence
  Description of Artificial Sequence: Synthetic oligonucleotide
  Target: SCNA; (+) strand; PAM type: YTN; PAM sequence: TTT
tagtagagacaggatttcac

SEQ ID NO: 77132 - DNA, 20 bp, Artificial Sequence
  Description of Artificial Sequence: Synthetic oligonucleotide
  Target: SCNA; (+) strand; PAM type: YTN; PAM sequence: TTT
agtagagacaggatttcacc

SEQ ID NO: 77133 - DNA, 20 bp, Artificial Sequence
  Description of Artificial Sequence: Synthetic oligonucleotide
  Target: SCNA; (+) strand; PAM type: YTN; PAM sequence: TTA
gtagagacaggatttcacca

SEQ ID NO: 77134 - DNA, 20 bp, Artificial Sequence
  Description of Artificial Sequence: Synthetic oligonucleotide
  Target: SCNA; (+) strand; PAM type: YTN; PAM sequence: TTT
caccatgttggccaggctgg

SEQ ID NO: 77135 - DNA, 20 bp, Artificial Sequence
  Description of Artificial Sequence: Synthetic oligonucleotide
  Target: SCNA; (+) strand; PAM type: YTN; PAM sequence: TTC
accatgttggccaggctggt

SEQ ID NO: 77136 - DNA, 20 bp, Artificial Sequence
  Description of Artificial Sequence: Synthetic oligonucleotide
  Target: SCNA; (+) strand; PAM type: YTN; PAM sequence: TTG
gccaggctggtctcgaactc

SEQ ID NO: 77137 - DNA, 20 bp, Artificial Sequence
  Description of Artificial Sequence: Synthetic oligonucleotide
  Target: SCNA; (+) strand; PAM type: YTN; PAM sequence: CTG
gtctcgaactcctggcctca

SEQ ID NO: 77138 - DNA, 20 bp, Artificial Sequence
  Description of Artificial Sequence: Synthetic oligonucleotide
  Target: SCNA; (+) strand; PAM type: YTN; PAM sequence: CTC
gaactcctggcctcaagtga

SEQ ID NO: 77139 - DNA, 20 bp, Artificial Sequence
  Description of Artificial Sequence: Synthetic oligonucleotide
  Target: SCNA; (+) strand; PAM type: YTN; PAM sequence: CTC
ctggcctcaagtgatctgag

SEQ ID NO: 77140 - DNA, 20 bp, Artificial Sequence
  Description of Artificial Sequence: Synthetic oligonucleotide
  Target: SCNA; (+) strand; PAM type: YTN; PAM sequence: CTG
gcctcaagtgatctgagggt

SEQ ID NO: 77141 - DNA, 20 bp, Artificial Sequence
  Description of Artificial Sequence: Synthetic oligonucleotide
  Target: SCNA; (+) strand; PAM type: YTN; PAM sequence: CTC
aagtgatctgagggtcttga

SEQ ID NO: 77142 - DNA, 20 bp, Artificial Sequence
  Description of Artificial Sequence: Synthetic oligonucleotide
  Target: SCNA; (+) strand; PAM type: YTN; PAM sequence: CTG
agggtcttgacttcccaaag

SEQ ID NO: 77143 - DNA, 20 bp, Artificial Sequence
  Description of Artificial Sequence: Synthetic oligonucleotide
  Target: SCNA; (+) strand; PAM type: YTN; PAM sequence: CTT
gacttcccaaagtgctgaga

SEQ ID NO: 77144 - DNA, 20 bp, Artificial Sequence
  Description of Artificial Sequence: Synthetic oligonucleotide
  Target: SCNA; (+) strand; PAM type: YTN; PAM sequence: TTG
acttcccaaagtgctgagat

SEQ ID NO: 77145 - DNA, 20 bp, Artificial Sequence
  Description of Artificial Sequence: Synthetic oligonucleotide
  Target: SCNA; (+) strand; PAM type: YTN; PAM sequence: CTT
cccaaagtgctgagattact

SEQ ID NO: 77146 - DNA, 20 bp, Artificial Sequence
  Description of Artificial Sequence: Synthetic oligonucleotide
  Target: SCNA; (+) strand; PAM type: YTN; PAM sequence: TTC
ccaaagtgctgagattactg

SEQ ID NO: 77147 - DNA, 20 bp, Artificial Sequence
  Description of Artificial Sequence: Synthetic oligonucleotide
  Target: SCNA; (+) strand; PAM type: YTN; PAM sequence: CTG
agattactggtataagccat

SEQ ID NO: 77148 - DNA, 20 bp, Artificial Sequence
  Description of Artificial Sequence: Synthetic oligonucleotide
  Target: SCNA; (+) strand; PAM type: YTN; PAM sequence: TTA
ctggtataagccatcacacc

SEQ ID NO: 77149 - DNA, 20 bp, Artificial Sequence
  Description of Artificial Sequence: Synthetic oligonucleotide
  Target: SCNA; (+) strand; PAM type: YTN; PAM sequence: CTG
gtataagccatcacacctga

SEQ ID NO: 77150 - DNA, 20 bp, Artificial Sequence
  Description of Artificial Sequence: Synthetic oligonucleotide
  Target: SCNA; (+) strand; PAM type: YTN; PAM sequence: CTG
accaatagcttgtatttttg

SEQ ID NO: 77151 - DNA, 20 bp, Artificial Sequence
  Description of Artificial Sequence: Synthetic oligonucleotide
  Target: SCNA; (+) strand; PAM type: YTN; PAM sequence: CTT
gtatttttgaaagaagtttt

SEQ ID NO: 77152 - DNA, 20 bp, Artificial Sequence
  Description of Artificial Sequence: Synthetic oligonucleotide
  Target: SCNA; (+) strand; PAM type: YTN; PAM sequence: TTG
tatttttgaaagaagtttta

SEQ ID NO: 77153 - DNA, 20 bp, Artificial Sequence
  Description of Artificial Sequence: Synthetic oligonucleotide
  Target: SCNA; (+) strand; PAM type: YTN; PAM sequence: TTT
ttgaaagaagttttaggttt

SEQ ID NO: 77154 - DNA, 20 bp, Artificial Sequence
  Description of Artificial Sequence: Synthetic oligonucleotide
  Target: SCNA; (+) strand; PAM type: YTN; PAM sequence: TTT
tgaaagaagttttaggtttg

SEQ ID NO: 77155 - DNA, 20 bp, Artificial Sequence
  Description of Artificial Sequence: Synthetic oligonucleotide
  Target: SCNA; (+) strand; PAM type: YTN; PAM sequence: TTT
gaaagaagttttaggtttgt

SEQ ID NO: 77156 - DNA, 20 bp, Artificial Sequence
  Description of Artificial Sequence: Synthetic oligonucleotide
  Target: SCNA; (+) strand; PAM type: YTN; PAM sequence: TTG
aaagaagttttaggtttgtg

SEQ ID NO: 77157 - DNA, 20 bp, Artificial Sequence
  Description of Artificial Sequence: Synthetic oligonucleotide
  Target: SCNA; (+) strand; PAM type: YTN; PAM sequence: TTT
taggtttgtggaataattgt

SEQ ID NO: 77158 - DNA, 20 bp, Artificial Sequence
  Description of Artificial Sequence: Synthetic oligonucleotide
  Target: SCNA; (+) strand; PAM type: YTN; PAM sequence: TTT
aggtttgtggaataattgta

SEQ ID NO: 77159 - DNA, 20 bp, Artificial Sequence
  Description of Artificial Sequence: Synthetic oligonucleotide
  Target: SCNA; (+) strand; PAM type: YTN; PAM sequence: TTA
ggtttgtggaataattgtac

SEQ ID NO: 77160 - DNA, 20 bp, Artificial Sequence
  Description of Artificial Sequence: Synthetic oligonucleotide
  Target: SCNA; (+) strand; PAM type: YTN; PAM sequence: TTT
gtggaataattgtactgaga

SEQ ID NO: 77161 - DNA, 20 bp, Artificial Sequence
  Description of Artificial Sequence: Synthetic oligonucleotide
  Target: SCNA; (+) strand; PAM type: YTN; PAM sequence: TTG
tggaataattgtactgagat

SEQ ID NO: 77162 - DNA, 20 bp, Artificial Sequence
  Description of Artificial Sequence: Synthetic oligonucleotide
  Target: SCNA; (+) strand; PAM type: YTN; PAM sequence: TTG
tactgagattacagtgcatt

SEQ ID NO: 77163 - DNA, 20 bp, Artificial Sequence
  Description of Artificial Sequence: Synthetic oligonucleotide
  Target: SCNA; (+) strand; PAM type: YTN; PAM sequence: CTG
agattacagtgcattcccat

SEQ ID NO: 77164 - DNA, 20 bp, Artificial Sequence
  Description of Artificial Sequence: Synthetic oligonucleotide
  Target: SCNA; (+) strand; PAM type: YTN; PAM sequence: TTA
cagtgcattcccatatactc

SEQ ID NO: 77165 - DNA, 20 bp, Artificial Sequence
  Description of Artificial Sequence: Synthetic oligonucleotide
  Target: SCNA; (+) strand; PAM type: YTN; PAM sequence: TTC
ccatatactccattaccctt

SEQ ID NO: 77166 - DNA, 20 bp, Artificial Sequence
  Description of Artificial Sequence: Synthetic oligonucleotide
  Target: SCNA; (+) strand; PAM type: YTN; PAM sequence: CTC
cattacccttcccccaattc

SEQ ID NO: 77167 - DNA, 20 bp, Artificial Sequence
  Description of Artificial Sequence: Synthetic oligonucleotide
  Target: SCNA; (+) strand; PAM type: YTN; PAM sequence: TTA
cccttcccccaattccccta

SEQ ID NO: 77168 - DNA, 20 bp, Artificial Sequence
  Description of Artificial Sequence: Synthetic oligonucleotide
  Target: SCNA; (+) strand; PAM type: YTN; PAM sequence: CTT
cccccaattcccctattatt

SEQ ID NO: 77169 - DNA, 20 bp, Artificial Sequence
  Description of Artificial Sequence: Synthetic oligonucleotide
  Target: SCNA; (+) strand; PAM type: YTN; PAM sequence: TTC
ccccaattcccctattatta

SEQ ID NO: 77170 - DNA, 20 bp, Artificial Sequence
  Description of Artificial Sequence: Synthetic oligonucleotide
  Target: SCNA; (+) strand; PAM type: YTN; PAM sequence: TTC
ccctattattataattttgc

SEQ ID NO: 77171 - DNA, 20 bp, Artificial Sequence
  Description of Artificial Sequence: Synthetic oligonucleotide
  Target: SCNA; (+) strand; PAM type: YTN; PAM sequence: CTA
ttattataattttgcattag

SEQ ID NO: 77172 - DNA, 20 bp, Artificial Sequence
  Description of Artificial Sequence: Synthetic oligonucleotide
  Target: SCNA; (+) strand; PAM type: YTN; PAM sequence: TTA
ttataattttgcattagtgt

SEQ ID NO: 77173 - DNA, 20 bp, Artificial Sequence
  Description of Artificial Sequence: Synthetic oligonucleotide
  Target: SCNA; (+) strand; PAM type: YTN; PAM sequence: TTA
taattttgcattagtgtggt

SEQ ID NO: 77174 - DNA, 20 bp, Artificial Sequence
  Description of Artificial Sequence: Synthetic oligonucleotide
  Target: SCNA; (+) strand; PAM type: YTN; PAM sequence: TTT
tgcattagtgtggtacatta

SEQ ID NO: 77175 - DNA, 20 bp, Artificial Sequence
  Description of Artificial Sequence: Synthetic oligonucleotide
  Target: SCNA; (+) strand; PAM type: YTN; PAM sequence: TTT
gcattagtgtggtacattat

SEQ ID NO: 77176 - DNA, 20 bp, Artificial Sequence
  Description of Artificial Sequence: Synthetic oligonucleotide
  Target: SCNA; (+) strand; PAM type: YTN; PAM sequence: TTG
cattagtgtggtacattatt

SEQ ID NO: 77177 - DNA, 20 bp, Artificial Sequence
  Description of Artificial Sequence: Synthetic oligonucleotide
  Target: SCNA; (+) strand; PAM type: YTN; PAM sequence: TTA
gtgtggtacattattaaaac

SEQ ID NO: 77178 - DNA, 20 bp, Artificial Sequence
  Description of Artificial Sequence: Synthetic oligonucleotide
  Target: SCNA; (+) strand; PAM type: YTN; PAM sequence: TTA
ttaaaacttatgaaataaca

SEQ ID NO: 77179 - DNA, 20 bp, Artificial Sequence
  Description of Artificial Sequence: Synthetic oligonucleotide
  Target: SCNA; (+) strand; PAM type: YTN; PAM sequence: TTA
aaacttatgaaataacattg

SEQ ID NO: 77180 - DNA, 20 bp, Artificial Sequence
  Description of Artificial Sequence: Synthetic oligonucleotide
  Target: SCNA; (+) strand; PAM type: YTN; PAM sequence: CTT
atgaaataacattgatacct

SEQ ID NO: 77181 - DNA, 20 bp, Artificial Sequence
  Description of Artificial Sequence: Synthetic oligonucleotide
  Target: SCNA; (+) strand; PAM type: YTN; PAM sequence: TTA
tgaaataacattgatacctt

SEQ ID NO: 77182 - DNA, 20 bp, Artificial Sequence
  Description of Artificial Sequence: Synthetic oligonucleotide
  Target: SCNA; (+) strand; PAM type: YTN; PAM sequence: TTG
ataccttattacaactaaag

SEQ ID NO: 77183 - DNA, 20 bp, Artificial Sequence
  Description of Artificial Sequence: Synthetic oligonucleotide
  Target: SCNA; (+) strand; PAM type: YTN; PAM sequence: CTT
attacaactaaagtccatag

SEQ ID NO: 77184 - DNA, 20 bp, Artificial Sequence
  Description of Artificial Sequence: Synthetic oligonucleotide
  Target: SCNA; (+) strand; PAM type: YTN; PAM sequence: TTA
ttacaactaaagtccatagt

SEQ ID NO: 77185 - DNA, 20 bp, Artificial Sequence
  Description of Artificial Sequence: Synthetic oligonucleotide
  Target: SCNA; (+) strand; PAM type: YTN; PAM sequence: TTA
caactaaagtccatagttta

SEQ ID NO: 77186 - DNA, 20 bp, Artificial Sequence
  Description of Artificial Sequence: Synthetic oligonucleotide
  Target: SCNA; (+) strand; PAM type: YTN; PAM sequence: CTA
aagtccatagtttatattag

SEQ ID NO: 77187 - DNA, 20 bp, Artificial Sequence
  Description of Artificial Sequence: Synthetic oligonucleotide
  Target: SCNA; (+) strand; PAM type: YTN; PAM sequence: TTT
atattagaattcactctgta

SEQ ID NO: 77188 - DNA, 20 bp, Artificial Sequence
  Description of Artificial Sequence: Synthetic oligonucleotide
  Target: SCNA; (+) strand; PAM type: YTN; PAM sequence: TTA
tattagaattcactctgtat

SEQ ID NO: 77189 - DNA, 20 bp, Artificial Sequence
  Description of Artificial Sequence: Synthetic oligonucleotide
  Target: SCNA; (+) strand; PAM type: YTN; PAM sequence: TTA
gaattcactctgtattgtaa

SEQ ID NO: 77190 - DNA, 20 bp, Artificial Sequence
  Description of Artificial Sequence: Synthetic oligonucleotide
  Target: SCNA; (+) strand; PAM type: YTN; PAM sequence: TTC
actctgtattgtaaaattct

SEQ ID NO: 77191 - DNA, 20 bp, Artificial Sequence
  Description of Artificial Sequence: Synthetic oligonucleotide
  Target: SCNA; (+) strand; PAM type: YTN; PAM sequence: CTC
tgtattgtaaaattctgagt

SEQ ID NO: 77192 - DNA, 20 bp, Artificial Sequence
  Description of Artificial Sequence: Synthetic oligonucleotide
  Target: SCNA; (+) strand; PAM type: YTN; PAM sequence: CTG
tattgtaaaattctgagttt

SEQ ID NO: 77193 - DNA, 20 bp, Artificial Sequence
  Description of Artificial Sequence: Synthetic oligonucleotide
  Target: SCNA; (+) strand; PAM type: YTN; PAM sequence: TTG
taaaattctgagttttaaca

SEQ ID NO: 77194 - DNA, 20 bp, Artificial Sequence
  Description of Artificial Sequence: Synthetic oligonucleotide
  Target: SCNA; (+) strand; PAM type: YTN; PAM sequence: TTC
tgagttttaacaaaggtata

SEQ ID NO: 77195 - DNA, 20 bp, Artificial Sequence
  Description of Artificial Sequence: Synthetic oligonucleotide
  Target: SCNA; (+) strand; PAM type: YTN; PAM sequence: CTG
agttttaacaaaggtataag

SEQ ID NO: 77196 - DNA, 20 bp, Artificial Sequence
  Description of Artificial Sequence: Synthetic oligonucleotide
  Target: SCNA; (+) strand; PAM type: YTN; PAM sequence: TTT
taacaaaggtataaggtcat

SEQ ID NO: 77197 - DNA, 20 bp, Artificial Sequence
  Description of Artificial Sequence: Synthetic oligonucleotide
  Target: SCNA; (+) strand; PAM type: YTN; PAM sequence: TTT
aacaaaggtataaggtcatg

SEQ ID NO: 77198 - DNA, 20 bp, Artificial Sequence
  Description of Artificial Sequence: Synthetic oligonucleotide
  Target: SCNA; (+) strand; PAM type: YTN; PAM sequence: TTA
acaaaggtataaggtcatgt

SEQ ID NO: 77199 - DNA, 20 bp, Artificial Sequence
  Description of Artificial Sequence: Synthetic oligonucleotide
  Target: SCNA; (+) strand; PAM type: YTN; PAM sequence: TTT
cactgtcctaaacatgccat

SEQ ID NO: 77200 - DNA, 20 bp, Artificial Sequence
  Description of Artificial Sequence: Synthetic oligonucleotide
  Target: SCNA; (+) strand; PAM type: YTN; PAM sequence: TTC
actgtcctaaacatgccatg

SEQ ID NO: 77201 - DNA, 20 bp, Artificial Sequence
  Description of Artificial Sequence: Synthetic oligonucleotide
  Target: SCNA; (+) strand; PAM type: YTN; PAM sequence: CTG
tcctaaacatgccatgtgct

SEQ ID NO: 77202 - DNA, 20 bp, Artificial Sequence
  Description of Artificial Sequence: Synthetic oligonucleotide
  Target: SCNA; (+) strand; PAM type: YTN; PAM sequence: CTA
aacatgccatgtgcttcacc

SEQ ID NO: 77203 - DNA, 20 bp, Artificial Sequence
  Description of Artificial Sequence: Synthetic oligonucleotide
  Target: SCNA; (+) strand; PAM type: YTN; PAM sequence: CTT
cacccattcatccctctgca

SEQ ID NO: 77204 - DNA, 20 bp, Artificial Sequence
  Description of Artificial Sequence: Synthetic oligonucleotide
  Target: SCNA; (+) strand; PAM type: YTN; PAM sequence: TTC
acccattcatccctctgcac

SEQ ID NO: 77205 - DNA, 20 bp, Artificial Sequence
  Description of Artificial Sequence: Synthetic oligonucleotide
  Target: SCNA; (+) strand; PAM type: YTN; PAM sequence: TTC
atccctctgcactttctcag

SEQ ID NO: 77206 - DNA, 20 bp, Artificial Sequence
  Description of Artificial Sequence: Synthetic oligonucleotide
  Target: SCNA; (+) strand; PAM type: YTN; PAM sequence: CTC
tgcactttctcagagcccca

SEQ ID NO: 77207 - DNA, 20 bp, Artificial Sequence
  Description of Artificial Sequence: Synthetic oligonucleotide
  Target: SCNA; (+) strand; PAM type: YTN; PAM sequence: CTG
cactttctcagagccccagg

SEQ ID NO: 77208 - DNA, 20 bp, Artificial Sequence
  Description of Artificial Sequence: Synthetic oligonucleotide
  Target: SCNA; (+) strand; PAM type: YTN; PAM sequence: CTT
tctcagagccccaggcaatc

SEQ ID NO: 77209 - DNA, 20 bp, Artificial Sequence
  Description of Artificial Sequence: Synthetic oligonucleotide
  Target: SCNA; (+) strand; PAM type: YTN; PAM sequence: TTT
ctcagagccccaggcaatca

SEQ ID NO: 77210 - DNA, 20 bp, Artificial Sequence
  Description of Artificial Sequence: Synthetic oligonucleotide
  Target: SCNA; (+) strand; PAM type: YTN; PAM sequence: TTC
tcagagccccaggcaatcac

SEQ ID NO: 77211 - DNA, 20 bp, Artificial Sequence
  Description of Artificial Sequence: Synthetic oligonucleotide
  Target: SCNA; (+) strand; PAM type: YTN; PAM sequence: CTC
agagccccaggcaatcactg

SEQ ID NO: 77212 - DNA, 20 bp, Artificial Sequence
  Description of Artificial Sequence: Synthetic oligonucleotide
  Target: SCNA; (+) strand; PAM type: YTN; PAM sequence: CTG
atctttttactgtctccaga

SEQ ID NO: 77213 - DNA, 20 bp, Artificial Sequence
  Description of Artificial Sequence: Synthetic oligonucleotide
  Target: SCNA; (+) strand; PAM type: YTN; PAM sequence: CTT
tttactgtctccagaatttt

SEQ ID NO: 77214 - DNA, 20 bp, Artificial Sequence
  Description of Artificial Sequence: Synthetic oligonucleotide
  Target: SCNA; (+) strand; PAM type: YTN; PAM sequence: TTT
ttactgtctccagaattttg

SEQ ID NO: 77215 - DNA, 20 bp, Artificial Sequence
  Description of Artificial Sequence: Synthetic oligonucleotide
  Target: SCNA; (+) strand; PAM type: YTN; PAM sequence: TTT
tactgtctccagaattttgt

SEQ ID NO: 77216 - DNA, 20 bp, Artificial Sequence
  Description of Artificial Sequence: Synthetic oligonucleotide
  Target: SCNA; (+) strand; PAM type: YTN; PAM sequence: TTT
actgtctccagaattttgtc

SEQ ID NO: 77217 - DNA, 20 bp, Artificial Sequence
  Description of Artificial Sequence: Synthetic oligonucleotide
  Target: SCNA; (+) strand; PAM type: YTN; PAM sequence: TTA
ctgtctccagaattttgtct

SEQ ID NO: 77218 - DNA, 20 bp, Artificial Sequence
  Description of Artificial Sequence: Synthetic oligonucleotide
  Target: SCNA; (+) strand; PAM type: YTN; PAM sequence: CTG
tctccagaattttgtctctt

SEQ ID NO: 77219 - DNA, 20 bp, Artificial Sequence
  Description of Artificial Sequence: Synthetic oligonucleotide
  Target: SCNA; (+) strand; PAM type: YTN; PAM sequence: CTC
cagaattttgtctctttcag

SEQ ID NO: 77220 - DNA, 20 bp, Artificial Sequence
  Description of Artificial Sequence: Synthetic oligonucleotide
  Target: SCNA; (+) strand; PAM type: YTN; PAM sequence: TTT
tgtctctttcagaatgtcat

SEQ ID NO: 77221 - DNA, 20 bp, Artificial Sequence
  Description of Artificial Sequence: Synthetic oligonucleotide
  Target: SCNA; (+) strand; PAM type: YTN; PAM sequence: TTT
gtctctttcagaatgtcata

SEQ ID NO: 77222 - DNA, 20 bp, Artificial Sequence
  Description of Artificial Sequence: Synthetic oligonucleotide
  Target: SCNA; (+) strand; PAM type: YTN; PAM sequence: TTG
tctctttcagaatgtcatat

SEQ ID NO: 77223 - DNA, 20 bp, Artificial Sequence
  Description of Artificial Sequence: Synthetic oligonucleotide
  Target: SCNA; (+) strand; PAM type: YTN; PAM sequence: CTC
tttcagaatgtcatatattg

SEQ ID NO: 77224 - DNA, 20 bp, Artificial Sequence
  Description of Artificial Sequence: Synthetic oligonucleotide
  Target: SCNA; (+) strand; PAM type: YTN; PAM sequence: CTT
tcagaatgtcatatattgga

SEQ ID NO: 77225 - DNA, 20 bp, Artificial Sequence
  Description of Artificial Sequence: Synthetic oligonucleotide
  Target: SCNA; (+) strand; PAM type: YTN; PAM sequence: TTT
cagaatgtcatatattggaa

SEQ ID NO: 77226 - DNA, 20 bp, Artificial Sequence
  Description of Artificial Sequence: Synthetic oligonucleotide
  Target: SCNA; (+) strand; PAM type: YTN; PAM sequence: TTC
agaatgtcatatattggaat

SEQ ID NO: 77227 - DNA, 20 bp, Artificial Sequence
  Description of Artificial Sequence: Synthetic oligonucleotide
  Target: SCNA; (+) strand; PAM type: YTN; PAM sequence: TTG
gaatcatatagaatgcaacc

SEQ ID NO: 77228 - DNA, 20 bp, Artificial Sequence
  Description of Artificial Sequence: Synthetic oligonucleotide
  Target: SCNA; (+) strand; PAM type: YTN; PAM sequence: CTT
tcaaactggcttacgtacct

SEQ ID NO: 77229 - DNA, 20 bp, Artificial Sequence
  Description of Artificial Sequence: Synthetic oligonucleotide
  Target: SCNA; (+) strand; PAM type: YTN; PAM sequence: TTT
caaactggcttacgtaccta

SEQ ID NO: 77230 - DNA, 20 bp, Artificial Sequence
  Description of Artificial Sequence: Synthetic oligonucleotide
  Target: SCNA; (+) strand; PAM type: YTN; PAM sequence: TTC
aaactggcttacgtacctaa

SEQ ID NO: 77231 - DNA, 20 bp, Artificial Sequence
  Description of Artificial Sequence: Synthetic oligonucleotide
  Target: SCNA; (+) strand; PAM type: YTN; PAM sequence: CTG
gcttacgtacctaagttttc

SEQ ID NO: 77232 - DNA, 20 bp, Artificial Sequence
  Description of Artificial Sequence: Synthetic oligonucleotide
  Target: SCNA; (+) strand; PAM type: YTN; PAM sequence: CTT
acgtacctaagttttctcca

SEQ ID NO: 77233 - DNA, 20 bp, Artificial Sequence
  Description of Artificial Sequence: Synthetic oligonucleotide
  Target: SCNA; (+) strand; PAM type: YTN; PAM sequence: TTA
cgtacctaagttttctccat

SEQ ID NO: 77234 - DNA, 20 bp, Artificial Sequence
  Description of Artificial Sequence: Synthetic oligonucleotide
  Target: SCNA; (+) strand; PAM type: YTN; PAM sequence: CTA
agttttctccatgtgttttt

SEQ ID NO: 77235 - DNA, 20 bp, Artificial Sequence
  Description of Artificial Sequence: Synthetic oligonucleotide
  Target: SCNA; (+) strand; PAM type: YTN; PAM sequence: TTT
tctccatgtgtttttgtggc

SEQ ID NO: 77236 - DNA, 20 bp, Artificial Sequence
  Description of Artificial Sequence: Synthetic oligonucleotide
  Target: SCNA; (+) strand; PAM type: YTN; PAM sequence: TTT
ctccatgtgtttttgtggct

SEQ ID NO: 77237 - DNA, 20 bp, Artificial Sequence
  Description of Artificial Sequence: Synthetic oligonucleotide
  Target: SCNA; (+) strand; PAM type: YTN; PAM sequence: TTC
tccatgtgtttttgtggctt

SEQ ID NO: 77238 - DNA, 20 bp, Artificial Sequence
  Description of Artificial Sequence: Synthetic oligonucleotide
  Target: SCNA; (+) strand; PAM type: YTN; PAM sequence: CTC
catgtgtttttgtggcttga

SEQ ID NO: 77239 - DNA, 20 bp, Artificial Sequence
  Description of Artificial Sequence: Synthetic oligonucleotide
  Target: SCNA; (+) strand; PAM type: YTN; PAM sequence: TTT
ttgtggcttgatagctcatt

SEQ ID NO: 77240 - DNA, 20 bp, Artificial Sequence
  Description of Artificial Sequence: Synthetic oligonucleotide
  Target: SCNA; (+) strand; PAM type: YTN; PAM sequence: TTT
tgtggcttgatagctcattt

SEQ ID NO: 77241 - DNA, 20 bp, Artificial Sequence
  Description of Artificial Sequence: Synthetic oligonucleotide
  Target: SCNA; (+) strand; PAM type: YTN; PAM sequence: TTT
gtggcttgatagctcatttc

SEQ ID NO: 77242 - DNA, 20 bp, Artificial Sequence
  Description of Artificial Sequence: Synthetic oligonucleotide
  Target: SCNA; (+) strand; PAM type: YTN; PAM sequence: TTG
tggcttgatagctcatttct

SEQ ID NO: 77243 - DNA, 20 bp, Artificial Sequence
  Description of Artificial Sequence: Synthetic oligonucleotide
  Target: SCNA; (+) strand; PAM type: YTN; PAM sequence: CTT
gatagctcatttctttttat

SEQ ID NO: 77244 - DNA, 20 bp, Artificial Sequence
  Description of Artificial Sequence: Synthetic oligonucleotide
  Target: SCNA; (+) strand; PAM type: YTN; PAM sequence: TTG
atagctcatttctttttatc

SEQ ID NO: 77245 - DNA, 20 bp, Artificial Sequence
  Description of Artificial Sequence: Synthetic oligonucleotide
  Target: SCNA; (+) strand; PAM type: YTN; PAM sequence: CTC
atttctttttatcactgaat

SEQ ID NO: 77246 - DNA, 20 bp, Artificial Sequence
  Description of Artificial Sequence: Synthetic oligonucleotide
  Target: SCNA; (+) strand; PAM type: YTN; PAM sequence: TTT
ctttttatcactgaataata

SEQ ID NO: 77247 - DNA, 20 bp, Artificial Sequence
  Description of Artificial Sequence: Synthetic oligonucleotide
  Target: SCNA; (+) strand; PAM type: YTN; PAM sequence: TTC
tttttatcactgaataatat

SEQ ID NO: 77248 - DNA, 20 bp, Artificial Sequence
  Description of Artificial Sequence: Synthetic oligonucleotide
  Target: SCNA; (+) strand; PAM type: YTN; PAM sequence: CTT
tttatcactgaataatattc

SEQ ID NO: 77249 - DNA, 20 bp, Artificial Sequence
  Description of Artificial Sequence: Synthetic oligonucleotide
  Target: SCNA; (+) strand; PAM type: YTN; PAM sequence: TTT
ttatcactgaataatattcc

SEQ ID NO: 77250 - DNA, 20 bp, Artificial Sequence
  Description of Artificial Sequence: Synthetic oligonucleotide
  Target: SCNA; (+) strand; PAM type: YTN; PAM sequence: TTT
tatcactgaataatattcca

SEQ ID NO: 77251 - DNA, 20 bp, Artificial Sequence
  Description of Artificial Sequence: Synthetic oligonucleotide
  Target: SCNA; (+) strand; PAM type: YTN; PAM sequence: TTT
atcactgaataatattccat

SEQ ID NO: 77252 - DNA, 20 bp, Artificial Sequence
  Description of Artificial Sequence: Synthetic oligonucleotide
  Target: SCNA; (+) strand; PAM type: YTN; PAM sequence: TTA
tcactgaataatattccatt

SEQ ID NO: 77253 - DNA, 20 bp, Artificial Sequence
  Description of Artificial Sequence: Synthetic oligonucleotide
  Target: SCNA; (+) strand; PAM type: YTN; PAM sequence: CTG
aataatattccattgagtac

SEQ ID NO: 77254 - DNA, 20 bp, Artificial Sequence
  Description of Artificial Sequence: Synthetic oligonucleotide
  Target: SCNA; (+) strand; PAM type: YTN; PAM sequence: TTC
cattgagtacatgtgccagt

SEQ ID NO: 77255 - DNA, 20 bp, Artificial Sequence
  Description of Artificial Sequence: Synthetic oligonucleotide
  Target: SCNA; (+) strand; PAM type: YTN; PAM sequence: TTG
agtacatgtgccagtctttt

SEQ ID NO: 77256 - DNA, 20 bp, Artificial Sequence
  Description of Artificial Sequence: Synthetic oligonucleotide
  Target: SCNA; (+) strand; PAM type: YTN; PAM sequence: CTT
tttgttcattcacctattga

SEQ ID NO: 77257 - DNA, 20 bp, Artificial Sequence
  Description of Artificial Sequence: Synthetic oligonucleotide
  Target: SCNA; (+) strand; PAM type: YTN; PAM sequence: TTT
ttgttcattcacctattgag

SEQ ID NO: 77258 - DNA, 20 bp, Artificial Sequence
  Description of Artificial Sequence: Synthetic oligonucleotide
  Target: SCNA; (+) strand; PAM type: YTN; PAM sequence: TTT
tgttcattcacctattgagg

SEQ ID NO: 77259 - DNA, 20 bp, Artificial Sequence
  Description of Artificial Sequence: Synthetic oligonucleotide
  Target: SCNA; (+) strand; PAM type: YTN; PAM sequence: TTT
gttcattcacctattgagga

SEQ ID NO: 77260 - DNA, 20 bp, Artificial Sequence
  Description of Artificial Sequence: Synthetic oligonucleotide
  Target: SCNA; (+) strand; PAM type: YTN; PAM sequence: TTG
ttcattcacctattgaggaa

SEQ ID NO: 77261 - DNA, 20 bp, Artificial Sequence
  Description of Artificial Sequence: Synthetic oligonucleotide
  Target: SCNA; (+) strand; PAM type: YTN; PAM sequence: TTC
attcacctattgaggaacat

SEQ ID NO: 77262 - DNA, 20 bp, Artificial Sequence
  Description of Artificial Sequence: Synthetic oligonucleotide
  Target: SCNA; (+) strand; PAM type: YTN; PAM sequence: TTC
acctattgaggaacatcttg

SEQ ID NO: 77263 - DNA, 20 bp, Artificial Sequence
  Description of Artificial Sequence: Synthetic oligonucleotide
  Target: SCNA; (+) strand; PAM type: YTN; PAM sequence: CTA
ttgaggaacatcttggttgc

SEQ ID NO: 77264 - DNA, 20 bp, Artificial Sequence
  Description of Artificial Sequence: Synthetic oligonucleotide
  Target: SCNA; (+) strand; PAM type: YTN; PAM sequence: TTG
aggaacatcttggttgcttc

SEQ ID NO: 77265 - DNA, 20 bp, Artificial Sequence
  Description of Artificial Sequence: Synthetic oligonucleotide
  Target: SCNA; (+) strand; PAM type: YTN; PAM sequence: CTT
ggttgcttccaagttttggc

SEQ ID NO: 77266 - DNA, 20 bp, Artificial Sequence
  Description of Artificial Sequence: Synthetic oligonucleotide
  Target: SCNA; (+) strand; PAM type: YTN; PAM sequence: TTG
gttgcttccaagttttggca

SEQ ID NO: 77267 - DNA, 20 bp, Artificial Sequence
  Description of Artificial Sequence: Synthetic oligonucleotide
  Target: SCNA; (+) strand; PAM type: YTN; PAM sequence: TTG
cttccaagttttggcaatta

SEQ ID NO: 77268 - DNA, 20 bp, Artificial Sequence
  Description of Artificial Sequence: Synthetic oligonucleotide
  Target: SCNA; (+) strand; PAM type: YTN; PAM sequence: CTT
ccaagttttggcaattatga

SEQ ID NO: 77269 - DNA, 20 bp, Artificial Sequence
  Description of Artificial Sequence: Synthetic oligonucleotide
  Target: SCNA; (+) strand; PAM type: YTN; PAM sequence: TTC
caagttttggcaattatgaa

SEQ ID NO: 77270 - DNA, 20 bp, Artificial Sequence
  Description of Artificial Sequence: Synthetic oligonucleotide
  Target: SCNA; (+) strand; PAM type: YTN; PAM sequence: TTT
tggcaattatgaataaagct

SEQ ID NO: 77271 - DNA, 20 bp, Artificial Sequence
  Description of Artificial Sequence: Synthetic oligonucleotide
  Target: SCNA; (+) strand; PAM type: YTN; PAM sequence: TTT
ggcaattatgaataaagctg

SEQ ID NO: 77272 - DNA, 20 bp, Artificial Sequence
  Description of Artificial Sequence: Synthetic oligonucleotide
  Target: SCNA; (+) strand; PAM type: YTN; PAM sequence: TTG
gcaattatgaataaagctgc

SEQ ID NO: 77273 - DNA, 20 bp, Artificial Sequence
  Description of Artificial Sequence: Synthetic oligonucleotide
  Target: SCNA; (+) strand; PAM type: YTN; PAM sequence: TTA
tgaataaagctgctataaac

SEQ ID NO: 77274 - DNA, 20 bp, Artificial Sequence
  Description of Artificial Sequence: Synthetic oligonucleotide
  Target: SCNA; (+) strand; PAM type: YTN; PAM sequence: CTG
ctataaacgtgcatgtgcag

SEQ ID NO: 77275 - DNA, 20 bp, Artificial Sequence
  Description of Artificial Sequence: Synthetic oligonucleotide
  Target: SCNA; (+) strand; PAM type: YTN; PAM sequence: CTA
taaacgtgcatgtgcaggtt

SEQ ID NO: 77276 - DNA, 20 bp, Artificial Sequence
  Description of Artificial Sequence: Synthetic oligonucleotide
  Target: SCNA; (+) strand; PAM type: YTN; PAM sequence: TTT
tggtgtggacacagtttaca

SEQ ID NO: 77277 - DNA, 20 bp, Artificial Sequence
  Description of Artificial Sequence: Synthetic oligonucleotide
  Target: SCNA; (+) strand; PAM type: YTN; PAM sequence: TTT
ggtgtggacacagtttacat

SEQ ID NO: 77278 - DNA, 20 bp, Artificial Sequence
  Description of Artificial Sequence: Synthetic oligonucleotide
  Target: SCNA; (+) strand; PAM type: YTN; PAM sequence: TTG
gtgtggacacagtttacatt

SEQ ID NO: 77279 - DNA, 20 bp, Artificial Sequence
  Description of Artificial Sequence: Synthetic oligonucleotide
  Target: SCNA; (+) strand; PAM type: YTN; PAM sequence: TTT
acatttcctttgggtgaata

SEQ ID NO: 77280 - DNA, 20 bp, Artificial Sequence
  Description of Artificial Sequence: Synthetic oligonucleotide
  Target: SCNA; (+) strand; PAM type: YTN; PAM sequence: TTA
catttcctttgggtgaatat

SEQ ID NO: 77281 - DNA, 20 bp, Artificial Sequence
  Description of Artificial Sequence: Synthetic oligonucleotide
  Target: SCNA; (+) strand; PAM type: YTN; PAM sequence: TTT
cctttgggtgaatatcatgt

SEQ ID NO: 77282 - DNA, 20 bp, Artificial Sequence
  Description of Artificial Sequence: Synthetic oligonucleotide
  Target: SCNA; (+) strand; PAM type: YTN; PAM sequence: TTC
ctttgggtgaatatcatgta

SEQ ID NO: 77283 - DNA, 20 bp, Artificial Sequence
  Description of Artificial Sequence: Synthetic oligonucleotide
  Target: SCNA; (+) strand; PAM type: YTN; PAM sequence: CTT
tgggtgaatatcatgtagca

SEQ ID NO: 77284 - DNA, 20 bp, Artificial Sequence
  Description of Artificial Sequence: Synthetic oligonucleotide
  Target: SCNA; (+) strand; PAM type: YTN; PAM sequence: TTT
gggtgaatatcatgtagcat

SEQ ID NO: 77285 - DNA, 20 bp, Artificial Sequence
  Description of Artificial Sequence: Synthetic oligonucleotide
  Target: SCNA; (+) strand; PAM type: YTN; PAM sequence: TTG
ggtgaatatcatgtagcatg

SEQ ID NO: 77286 - DNA, 20 bp, Artificial Sequence
  Description of Artificial Sequence: Synthetic oligonucleotide
  Target: SCNA; (+) strand; PAM type: YTN; PAM sequence: TTT
tggatcatatggtgatatgg

SEQ ID NO: 77287 - DNA, 20 bp, Artificial Sequence
  Description of Artificial Sequence: Synthetic oligonucleotide
  Target: SCNA; (+) strand; PAM type: YTN; PAM sequence: TTT
ggatcatatggtgatatggt

SEQ ID NO: 77288 - DNA, 20 bp, Artificial Sequence
  Description of Artificial Sequence: Synthetic oligonucleotide
  Target: SCNA; (+) strand; PAM type: YTN; PAM sequence: TTG
gatcatatggtgatatggtt

SEQ ID NO: 77289 - DNA, 20 bp, Artificial Sequence
  Description of Artificial Sequence: Synthetic oligonucleotide
  Target: SCNA; (+) strand; PAM type: YTN; PAM sequence: TTA
ggctttgtgtccccacccaa

SEQ ID NO: 77290 - DNA, 20 bp, Artificial Sequence
  Description of Artificial Sequence: Synthetic oligonucleotide
  Target: SCNA; (+) strand; PAM type: YTN; PAM sequence: CTT
tgtgtccccacccaaatctc

SEQ ID NO: 77291 - DNA, 20 bp, Artificial Sequence
  Description of Artificial Sequence: Synthetic oligonucleotide
  Target: SCNA; (+) strand; PAM type: YTN; PAM sequence: TTT
gtgtccccacccaaatctca

SEQ ID NO: 77292 - DNA, 20 bp, Artificial Sequence
  Description of Artificial Sequence: Synthetic oligonucleotide
  Target: SCNA; (+) strand; PAM type: YTN; PAM sequence: TTG
tgtccccacccaaatctcat

SEQ ID NO: 77293 - DNA, 20 bp, Artificial Sequence
  Description of Artificial Sequence: Synthetic oligonucleotide
  Target: SCNA; (+) strand; PAM type: YTN; PAM sequence: CTC
atcttgaattataatcccca

SEQ ID NO: 77294 - DNA, 20 bp, Artificial Sequence
  Description of Artificial Sequence: Synthetic oligonucleotide
  Target: SCNA; (+) strand; PAM type: YTN; PAM sequence: CTT
gaattataatccccataatc

SEQ ID NO: 77295 - DNA, 20 bp, Artificial Sequence
  Description of Artificial Sequence: Synthetic oligonucleotide
  Target: SCNA; (+) strand; PAM type: YTN; PAM sequence: TTG
aattataatccccataatcc

SEQ ID NO: 77296 - DNA, 20 bp, Artificial Sequence
  Description of Artificial Sequence: Synthetic oligonucleotide
  Target: SCNA; (+) strand; PAM type: YTN; PAM sequence: TTA
taatccccataatccccaca

SEQ ID NO: 77297 - DNA, 20 bp, Artificial Sequence
  Description of Artificial Sequence: Synthetic oligonucleotide
  Target: SCNA; (+) strand; PAM type: YTN; PAM sequence: CTA
gatcatgagagctgtttccc

SEQ ID NO: 77298 - DNA, 20 bp, Artificial Sequence
  Description of Artificial Sequence: Synthetic oligonucleotide
  Target: SCNA; (+) strand; PAM type: YTN; PAM sequence: CTG
tttcccccatgctgttctca

SEQ ID NO: 77299 - DNA, 20 bp, Artificial Sequence
  Description of Artificial Sequence: Synthetic oligonucleotide
  Target: SCNA; (+) strand; PAM type: YTN; PAM sequence: TTT
cccccatgctgttctcatga

SEQ ID NO: 77300 - DNA, 20 bp, Artificial Sequence
  Description of Artificial Sequence: Synthetic oligonucleotide
  Target: SCNA; (+) strand; PAM type: YTN; PAM sequence: TTC
ccccatgctgttctcatgat

SEQ ID NO: 77301 - DNA, 20 bp, Artificial Sequence
  Description of Artificial Sequence: Synthetic oligonucleotide
  Target: SCNA; (+) strand; PAM type: YTN; PAM sequence: CTG
ttctcatgatagcgagtgag

SEQ ID NO: 77302 - DNA, 20 bp, Artificial Sequence
  Description of Artificial Sequence: Synthetic oligonucleotide
  Target: SCNA; (+) strand; PAM type: YTN; PAM sequence: TTC
tcatgatagcgagtgagttc

SEQ ID NO: 77303 - DNA, 20 bp, Artificial Sequence
  Description of Artificial Sequence: Synthetic oligonucleotide
  Target: SCNA; (+) strand; PAM type: YTN; PAM sequence: CTC
atgatagcgagtgagttctc

SEQ ID NO: 77304 - DNA, 20 bp, Artificial Sequence
  Description of Artificial Sequence: Synthetic oligonucleotide
  Target: SCNA; (+) strand; PAM type: YTN; PAM sequence: TTC
tcacgagagctaatggtttt

SEQ ID NO: 77305 - DNA, 20 bp, Artificial Sequence
  Description of Artificial Sequence: Synthetic oligonucleotide
  Target: SCNA; (+) strand; PAM type: YTN; PAM sequence: CTC
acgagagctaatggttttat

SEQ ID NO: 77306 - DNA, 20 bp, Artificial Sequence
  Description of Artificial Sequence: Synthetic oligonucleotide
  Target: SCNA; (+) strand; PAM type: YTN; PAM sequence: CTA
atggttttatgtgtttggta

SEQ ID NO: 77307 - DNA, 20 bp, Artificial Sequence
  Description of Artificial Sequence: Synthetic oligonucleotide
  Target: SCNA; (+) strand; PAM type: YTN; PAM sequence: TTT
tatgtgtttggtagttcctc

SEQ ID NO: 77308 - DNA, 20 bp, Artificial Sequence
  Description of Artificial Sequence: Synthetic oligonucleotide
  Target: SCNA; (+) strand; PAM type: YTN; PAM sequence: TTT
atgtgtttggtagttcctcc

SEQ ID NO: 77309 - DNA, 20 bp, Artificial Sequence
  Description of Artificial Sequence: Synthetic oligonucleotide
  Target: SCNA; (+) strand; PAM type: YTN; PAM sequence: TTA
tgtgtttggtagttcctcct

SEQ ID NO: 77310 - DNA, 20 bp, Artificial Sequence
  Description of Artificial Sequence: Synthetic oligonucleotide
  Target: SCNA; (+) strand; PAM type: YTN; PAM sequence: TTT
ggtagttcctcctgcattca

SEQ ID NO: 77311 - DNA, 20 bp, Artificial Sequence
  Description of Artificial Sequence: Synthetic oligonucleotide
  Target: SCNA; (+) strand; PAM type: YTN; PAM sequence: TTG
gtagttcctcctgcattcat

SEQ ID NO: 77312 - DNA, 20 bp, Artificial Sequence
  Description of Artificial Sequence: Synthetic oligonucleotide
  Target: SCNA; (+) strand; PAM type: YTN; PAM sequence: TTC
ctcctgcattcattctcctt

SEQ ID NO: 77313 - DNA, 20 bp, Artificial Sequence
  Description of Artificial Sequence: Synthetic oligonucleotide
  Target: SCNA; (+) strand; PAM type: YTN; PAM sequence: CTC
ctgcattcattctccttcct

SEQ ID NO: 77314 - DNA, 20 bp, Artificial Sequence
  Description of Artificial Sequence: Synthetic oligonucleotide
  Target: SCNA; (+) strand; PAM type: YTN; PAM sequence: CTG
cattcattctccttcctgtc

SEQ ID NO: 77315 - DNA, 20 bp, Artificial Sequence
  Description of Artificial Sequence: Synthetic oligonucleotide
  Target: SCNA; (+) strand; PAM type: YTN; PAM sequence: TTC
attctccttcctgtcacctt

SEQ ID NO: 77316 - DNA, 20 bp, Artificial Sequence
  Description of Artificial Sequence: Synthetic oligonucleotide
  Target: SCNA; (+) strand; PAM type: YTN; PAM sequence: TTC
tccttcctgtcaccttgtga

SEQ ID NO: 77317 - DNA, 20 bp, Artificial Sequence
  Description of Artificial Sequence: Synthetic oligonucleotide
  Target: SCNA; (+) strand; PAM type: YTN; PAM sequence: CTC
cttcctgtcaccttgtgaag

SEQ ID NO: 77318 - DNA, 20 bp, Artificial Sequence
  Description of Artificial Sequence: Synthetic oligonucleotide
  Target: SCNA; (+) strand; PAM type: YTN; PAM sequence: CTT
cctgtcaccttgtgaagtag

SEQ ID NO: 77319 - DNA, 20 bp, Artificial Sequence
  Description of Artificial Sequence: Synthetic oligonucleotide
  Target: SCNA; (+) strand; PAM type: YTN; PAM sequence: TTC
ctgtcaccttgtgaagtagg

SEQ ID NO: 77320 - DNA, 20 bp, Artificial Sequence
  Description of Artificial Sequence: Synthetic oligonucleotide
  Target: SCNA; (+) strand; PAM type: YTN; PAM sequence: CTG
tcaccttgtgaagtaggtgc

SEQ ID NO: 77321 - DNA, 20 bp, Artificial Sequence
  Description of Artificial Sequence: Synthetic oligonucleotide
  Target: SCNA; (+) strand; PAM type: YTN; PAM sequence: CTT
gtgaagtaggtgccttgctt

SEQ ID NO: 77322 - DNA, 20 bp, Artificial Sequence
  Description of Artificial Sequence: Synthetic oligonucleotide
  Target: SCNA; (+) strand; PAM type: YTN; PAM sequence: TTG
tgaagtaggtgccttgcttc

SEQ ID NO: 77323 - DNA, 20 bp, Artificial Sequence
  Description of Artificial Sequence: Synthetic oligonucleotide
  Target: SCNA; (+) strand; PAM type: YTN; PAM sequence: CTT
gcttccccttctccttccac

SEQ ID NO: 77324 - DNA, 20 bp, Artificial Sequence
  Description of Artificial Sequence: Synthetic oligonucleotide
  Target: SCNA; (+) strand; PAM type: YTN; PAM sequence: TTG
cttccccttctccttccacc

SEQ ID NO: 77325 - DNA, 20 bp, Artificial Sequence
  Description of Artificial Sequence: Synthetic oligonucleotide
  Target: SCNA; (+) strand; PAM type: YTN; PAM sequence: CTT
ccccttctccttccaccatg

SEQ ID NO: 77326 - DNA, 20 bp, Artificial Sequence
  Description of Artificial Sequence: Synthetic oligonucleotide
  Target: SCNA; (+) strand; PAM type: YTN; PAM sequence: TTC
cccttctccttccaccatga

SEQ ID NO: 77327 - DNA, 20 bp, Artificial Sequence
  Description of Artificial Sequence: Synthetic oligonucleotide
  Target: SCNA; (+) strand; PAM type: YTN; PAM sequence: CTT
ctccttccaccatgattata

SEQ ID NO: 77328 - DNA, 20 bp, Artificial Sequence
  Description of Artificial Sequence: Synthetic oligonucleotide
  Target: SCNA; (+) strand; PAM type: YTN; PAM sequence: TTC
tccttccaccatgattataa

SEQ ID NO: 77329 - DNA, 20 bp, Artificial Sequence
  Description of Artificial Sequence: Synthetic oligonucleotide
  Target: SCNA; (+) strand; PAM type: YTN; PAM sequence: CTC
cttccaccatgattataagc

SEQ ID NO: 77330 - DNA, 20 bp, Artificial Sequence
  Description of Artificial Sequence: Synthetic oligonucleotide
  Target: SCNA; (+) strand; PAM type: YTN; PAM sequence: CTT
ccaccatgattataagcttt

SEQ ID NO: 77331 - DNA, 20 bp, Artificial Sequence
  Description of Artificial Sequence: Synthetic oligonucleotide
  Target: SCNA; (+) strand; PAM type: YTN; PAM sequence: TTC
caccatgattataagctttc

SEQ ID NO: 77332 - DNA, 20 bp, Artificial Sequence
  Description of Artificial Sequence: Synthetic oligonucleotide
  Target: SCNA; (+) strand; PAM type: YTN; PAM sequence: TTA
taagctttctgaggcctcct

SEQ ID NO: 77333 - DNA, 20 bp, Artificial Sequence
  Description of Artificial Sequence: Synthetic oligonucleotide
  Target: SCNA; (+) strand; PAM type: YTN; PAM sequence: CTT
tctgaggcctcctcagccat

SEQ ID NO: 77334 - DNA, 20 bp, Artificial Sequence
  Description of Artificial Sequence: Synthetic oligonucleotide
  Target: SCNA; (+) strand; PAM type: YTN; PAM sequence: TTT
ctgaggcctcctcagccatg

SEQ ID NO: 77335 - DNA, 20 bp, Artificial Sequence
  Description of Artificial Sequence: Synthetic oligonucleotide
  Target: SCNA; (+) strand; PAM type: YTN; PAM sequence: TTC
tgaggcctcctcagccatgc

SEQ ID NO: 77336 - DNA, 20 bp, Artificial Sequence
  Description of Artificial Sequence: Synthetic oligonucleotide
  Target: SCNA; (+) strand; PAM type: YTN; PAM sequence: CTG
aggcctcctcagccatgctg

SEQ ID NO: 77337 - DNA, 20 bp, Artificial Sequence
  Description of Artificial Sequence: Synthetic oligonucleotide
  Target: SCNA; (+) strand; PAM type: YTN; PAM sequence: CTC
ctcagccatgctgagctgtg

SEQ ID NO: 77338 - DNA, 20 bp, Artificial Sequence
  Description of Artificial Sequence: Synthetic oligonucleotide
  Target: SCNA; (+) strand; PAM type: YTN; PAM sequence: CTC
agccatgctgagctgtgagt

SEQ ID NO: 77339 - DNA, 20 bp, Artificial Sequence
  Description of Artificial Sequence: Synthetic oligonucleotide
  Target: SCNA; (+) strand; PAM type: YTN; PAM sequence: CTG
agctgtgagtcaattaaata

SEQ ID NO: 77340 - DNA, 20 bp, Artificial Sequence
  Description of Artificial Sequence: Synthetic oligonucleotide
  Target: SCNA; (+) strand; PAM type: YTN; PAM sequence: CTG
tgagtcaattaaataaacct

SEQ ID NO: 77341 - DNA, 20 bp, Artificial Sequence
  Description of Artificial Sequence: Synthetic oligonucleotide
  Target: SCNA; (+) strand; PAM type: YTN; PAM sequence: TTA
aataaacctctttcctttat

SEQ ID NO: 77342 - DNA, 20 bp, Artificial Sequence
  Description of Artificial Sequence: Synthetic oligonucleotide
  Target: SCNA; (+) strand; PAM type: YTN; PAM sequence: CTC
tttcctttataaatttccca

SEQ ID NO: 77343 - DNA, 20 bp, Artificial Sequence
  Description of Artificial Sequence: Synthetic oligonucleotide
  Target: SCNA; (+) strand; PAM type: YTN; PAM sequence: CTT
tcctttataaatttcccagt

SEQ ID NO: 77344 - DNA, 20 bp, Artificial Sequence
  Description of Artificial Sequence: Synthetic oligonucleotide
  Target: SCNA; (+) strand; PAM type: YTN; PAM sequence: TTT
cctttataaatttcccagtc

SEQ ID NO: 77345 - DNA, 20 bp, Artificial Sequence
  Description of Artificial Sequence: Synthetic oligonucleotide
  Target: SCNA; (+) strand; PAM type: YTN; PAM sequence: TTC
ctttataaatttcccagtct

SEQ ID NO: 77346 - DNA, 20 bp, Artificial Sequence
  Description of Artificial Sequence: Synthetic oligonucleotide
  Target: SCNA; (+) strand; PAM type: YTN; PAM sequence: CTT
tataaatttcccagtctcgg

SEQ ID NO: 77347 - DNA, 20 bp, Artificial Sequence
  Description of Artificial Sequence: Synthetic oligonucleotide
  Target: SCNA; (+) strand; PAM type: YTN; PAM sequence: TTT
ataaatttcccagtctcggg

SEQ ID NO: 77348 - DNA, 20 bp, Artificial Sequence
  Description of Artificial Sequence: Synthetic oligonucleotide
  Target: SCNA; (+) strand; PAM type: YTN; PAM sequence: TTA
taaatttcccagtctcggga

SEQ ID NO: 77349 - DNA, 20 bp, Artificial Sequence
  Description of Artificial Sequence: Synthetic oligonucleotide
  Target: SCNA; (+) strand; PAM type: YTN; PAM sequence: TTT
cccagtctcgggaacttctt

SEQ ID NO: 77350 - DNA, 20 bp, Artificial Sequence
  Description of Artificial Sequence: Synthetic oligonucleotide
  Target: SCNA; (+) strand; PAM type: YTN; PAM sequence: TTC
ccagtctcgggaacttcttt

SEQ ID NO: 77351 - DNA, 20 bp, Artificial Sequence
  Description of Artificial Sequence: Synthetic oligonucleotide
  Target: SCNA; (+) strand; PAM type: YTN; PAM sequence: CTC
gggaacttctttttagcact

SEQ ID NO: 77352 - DNA, 20 bp, Artificial Sequence
  Description of Artificial Sequence: Synthetic oligonucleotide
  Target: SCNA; (+) strand; PAM type: YTN; PAM sequence: CTT
ctttttagcactgtgaaaat

SEQ ID NO: 77353 - DNA, 20 bp, Artificial Sequence
  Description of Artificial Sequence: Synthetic oligonucleotide
  Target: SCNA; (+) strand; PAM type: YTN; PAM sequence: TTC
tttttagcactgtgaaaatg

SEQ ID NO: 77354 - DNA, 20 bp, Artificial Sequence
  Description of Artificial Sequence: Synthetic oligonucleotide
  Target: SCNA; (+) strand; PAM type: YTN; PAM sequence: CTT
tttagcactgtgaaaatgga

SEQ ID NO: 77355 - DNA, 20 bp, Artificial Sequence
  Description of Artificial Sequence: Synthetic oligonucleotide
  Target: SCNA; (+) strand; PAM type: YTN; PAM sequence: TTT
ttagcactgtgaaaatggac

SEQ ID NO: 77356 - DNA, 20 bp, Artificial Sequence
  Description of Artificial Sequence: Synthetic oligonucleotide
  Target: SCNA; (+) strand; PAM type: YTN; PAM sequence: TTT
tagcactgtgaaaatggaca

SEQ ID NO: 77357 - DNA, 20 bp, Artificial Sequence
  Description of Artificial Sequence: Synthetic oligonucleotide
  Target: SCNA; (+) strand; PAM type: YTN; PAM sequence: TTT
agcactgtgaaaatggacaa

SEQ ID NO: 77358 - DNA, 20 bp, Artificial Sequence
  Description of Artificial Sequence: Synthetic oligonucleotide
  Target: SCNA; (+) strand; PAM type: YTN; PAM sequence: TTA
gcactgtgaaaatggacaaa

SEQ ID NO: 77359 - DNA, 20 bp, Artificial Sequence
  Description of Artificial Sequence: Synthetic oligonucleotide
  Target: SCNA; (+) strand; PAM type: YTN; PAM sequence: CTG
tgaaaatggacaaatatata

SEQ ID NO: 77360 - DNA, 20 bp, Artificial Sequence
  Description of Artificial Sequence: Synthetic oligonucleotide
  Target: SCNA; (+) strand; PAM type: YTN; PAM sequence: TTA
agtatagtttagcttcgtaa

SEQ ID NO: 77361 - DNA, 20 bp, Artificial Sequence
  Description of Artificial Sequence: Synthetic oligonucleotide
  Target: SCNA; (+) strand; PAM type: YTN; PAM sequence: TTT
agcttcgtaagaaattgtca

SEQ ID NO: 77362 - DNA, 20 bp, Artificial Sequence
  Description of Artificial Sequence: Synthetic oligonucleotide
  Target: SCNA; (+) strand; PAM type: YTN; PAM sequence: TTA
gcttcgtaagaaattgtcaa

SEQ ID NO: 77363 - DNA, 20 bp, Artificial Sequence
  Description of Artificial Sequence: Synthetic oligonucleotide
  Target: SCNA; (+) strand; PAM type: YTN; PAM sequence: CTT
cgtaagaaattgtcaaccta

SEQ ID NO: 77364 - DNA, 20 bp, Artificial Sequence
  Description of Artificial Sequence: Synthetic oligonucleotide
  Target: SCNA; (+) strand; PAM type: YTN; PAM sequence: TTC
gtaagaaattgtcaacctat

SEQ ID NO: 77365 - DNA, 20 bp, Artificial Sequence
  Description of Artificial Sequence: Synthetic oligonucleotide
  Target: SCNA; (+) strand; PAM type: YTN; PAM sequence: TTG
tcaacctatcttccaaagtt

SEQ ID NO: 77366 - DNA, 20 bp, Artificial Sequence
  Description of Artificial Sequence: Synthetic oligonucleotide
  Target: SCNA; (+) strand; PAM type: YTN; PAM sequence: CTA
tcttccaaagttactgtacc

SEQ ID NO: 77367 - DNA, 20 bp, Artificial Sequence
  Description of Artificial Sequence: Synthetic oligonucleotide
  Target: SCNA; (+) strand; PAM type: YTN; PAM sequence: CTT
ccaaagttactgtaccattt

SEQ ID NO: 77368 - DNA, 20 bp, Artificial Sequence
  Description of Artificial Sequence: Synthetic oligonucleotide
  Target: SCNA; (+) strand; PAM type: YTN; PAM sequence: TTC
caaagttactgtaccatttt

SEQ ID NO: 77369 - DNA, 20 bp, Artificial Sequence
  Description of Artificial Sequence: Synthetic oligonucleotide
  Target: SCNA; (+) strand; PAM type: YTN; PAM sequence: TTA
ctgtaccattttgtattgcc

SEQ ID NO: 77370 - DNA, 20 bp, Artificial Sequence
  Description of Artificial Sequence: Synthetic oligonucleotide
  Target: SCNA; (+) strand; PAM type: YTN; PAM sequence: CTG
taccattttgtattgccagc

SEQ ID NO: 77371 - DNA, 20 bp, Artificial Sequence
  Description of Artificial Sequence: Synthetic oligonucleotide
  Target: SCNA; (+) strand; PAM type: YTN; PAM sequence: TTT
tgtattgccagcattagtga

SEQ ID NO: 77372 - DNA, 20 bp, Artificial Sequence
  Description of Artificial Sequence: Synthetic oligonucleotide
  Target: SCNA; (+) strand; PAM type: YTN; PAM sequence: TTT
gtattgccagcattagtgaa

SEQ ID NO: 77373 - DNA, 20 bp, Artificial Sequence
  Description of Artificial Sequence: Synthetic oligonucleotide
  Target: SCNA; (+) strand; PAM type: YTN; PAM sequence: TTG
tattgccagcattagtgaat

SEQ ID NO: 77374 - DNA, 20 bp, Artificial Sequence
  Description of Artificial Sequence: Synthetic oligonucleotide
  Target: SCNA; (+) strand; PAM type: YTN; PAM sequence: TTG
ccagcattagtgaatgaatg

SEQ ID NO: 77375 - DNA, 20 bp, Artificial Sequence
  Description of Artificial Sequence: Synthetic oligonucleotide
  Target: SCNA; (+) strand; PAM type: YTN; PAM sequence: TTA
gtgaatgaatgaaagttctt

SEQ ID NO: 77376 - DNA, 20 bp, Artificial Sequence
  Description of Artificial Sequence: Synthetic oligonucleotide
  Target: SCNA; (+) strand; PAM type: YTN; PAM sequence: TTC
ttgttgctccacatctcacc

SEQ ID NO: 77377 - DNA, 20 bp, Artificial Sequence
  Description of Artificial Sequence: Synthetic oligonucleotide
  Target: SCNA; (+) strand; PAM type: YTN; PAM sequence: CTT
gttgctccacatctcaccag

SEQ ID NO: 77378 - DNA, 20 bp, Artificial Sequence
  Description of Artificial Sequence: Synthetic oligonucleotide
  Target: SCNA; (+) strand; PAM type: YTN; PAM sequence: TTG
ttgctccacatctcaccagc

SEQ ID NO: 77379 - DNA, 20 bp, Artificial Sequence
  Description of Artificial Sequence: Synthetic oligonucleotide
  Target: SCNA; (+) strand; PAM type: YTN; PAM sequence: TTG
ctccacatctcaccagcatg

SEQ ID NO: 77380 - DNA, 20 bp, Artificial Sequence
  Description of Artificial Sequence: Synthetic oligonucleotide
  Target: SCNA; (+) strand; PAM type: YTN; PAM sequence: CTC
cacatctcaccagcatgctg

SEQ ID NO: 77381 - DNA, 20 bp, Artificial Sequence
  Description of Artificial Sequence: Synthetic oligonucleotide
  Target: SCNA; (+) strand; PAM type: YTN; PAM sequence: CTC
accagcatgctgtgctcttg

SEQ ID NO: 77382 - DNA, 20 bp, Artificial Sequence
  Description of Artificial Sequence: Synthetic oligonucleotide
  Target: SCNA; (+) strand; PAM type: YTN; PAM sequence: CTG
tgctcttggtgttttggatt

SEQ ID NO: 77383 - DNA, 20 bp, Artificial Sequence
  Description of Artificial Sequence: Synthetic oligonucleotide
  Target: SCNA; (+) strand; PAM type: YTN; PAM sequence: CTC
ttggtgttttggattttagt

SEQ ID NO: 77384 - DNA, 20 bp, Artificial Sequence
  Description of Artificial Sequence: Synthetic oligonucleotide
  Target: SCNA; (+) strand; PAM type: YTN; PAM sequence: CTT
ggtgttttggattttagtca

SEQ ID NO: 77385 - DNA, 20 bp, Artificial Sequence
  Description of Artificial Sequence: Synthetic oligonucleotide
  Target: SCNA; (+) strand; PAM type: YTN; PAM sequence: TTG
gtgttttggattttagtcat

SEQ ID NO: 77386 - DNA, 20 bp, Artificial Sequence
  Description of Artificial Sequence: Synthetic oligonucleotide
  Target: SCNA; (+) strand; PAM type: YTN; PAM sequence: TTT
tggattttagtcattttaat

SEQ ID NO: 77387 - DNA, 20 bp, Artificial Sequence
  Description of Artificial Sequence: Synthetic oligonucleotide
  Target: SCNA; (+) strand; PAM type: YTN; PAM sequence: TTT
ggattttagtcattttaata

SEQ ID NO: 77388 - DNA, 20 bp, Artificial Sequence
  Description of Artificial Sequence: Synthetic oligonucleotide
  Target: SCNA; (+) strand; PAM type: YTN; PAM sequence: TTG
gattttagtcattttaataa

SEQ ID NO: 77389 - DNA, 20 bp, Artificial Sequence
  Description of Artificial Sequence: Synthetic oligonucleotide
  Target: SCNA; (+) strand; PAM type: YTN; PAM sequence: TTT
tagtcattttaataagtgtt

SEQ ID NO: 77390 - DNA, 20 bp, Artificial Sequence
  Description of Artificial Sequence: Synthetic oligonucleotide
  Target: SCNA; (+) strand; PAM type: YTN; PAM sequence: TTT
agtcattttaataagtgttt

SEQ ID NO: 77391 - DNA, 20 bp, Artificial Sequence
  Description of Artificial Sequence: Synthetic oligonucleotide
  Target: SCNA; (+) strand; PAM type: YTN; PAM sequence: TTA
gtcattttaataagtgtttt

SEQ ID NO: 77392 - DNA, 20 bp, Artificial Sequence
  Description of Artificial Sequence: Synthetic oligonucleotide
  Target: SCNA; (+) strand; PAM type: YTN; PAM sequence: TTT
taataagtgttttgtgagct

SEQ ID NO: 77393 - DNA, 20 bp, Artificial Sequence
  Description of Artificial Sequence: Synthetic oligonucleotide
  Target: SCNA; (+) strand; PAM type: YTN; PAM sequence: TTT
aataagtgttttgtgagctt

SEQ ID NO: 77394 - DNA, 20 bp, Artificial Sequence
  Description of Artificial Sequence: Synthetic oligonucleotide
  Target: SCNA; (+) strand; PAM type: YTN; PAM sequence: TTA
ataagtgttttgtgagcttt

SEQ ID NO: 77395 - DNA, 20 bp, Artificial Sequence
  Description of Artificial Sequence: Synthetic oligonucleotide
  Target: SCNA; (+) strand; PAM type: YTN; PAM sequence: TTT
tgtgagctttactgtttgat

SEQ ID NO: 77396 - DNA, 20 bp, Artificial Sequence
  Description of Artificial Sequence: Synthetic oligonucleotide
  Target: SCNA; (+) strand; PAM type: YTN; PAM sequence: TTT
gtgagctttactgtttgata

SEQ ID NO: 77397 - DNA, 20 bp, Artificial Sequence
  Description of Artificial Sequence: Synthetic oligonucleotide
  Target: SCNA; (+) strand; PAM type: YTN; PAM sequence: TTG
tgagctttactgtttgatag

SEQ ID NO: 77398 - DNA, 20 bp, Artificial Sequence
  Description of Artificial Sequence: Synthetic oligonucleotide
  Target: SCNA; (+) strand; PAM type: YTN; PAM sequence: CTT
tactgtttgatagctgagtt

SEQ ID NO: 77399 - DNA, 20 bp, Artificial Sequence
  Description of Artificial Sequence: Synthetic oligonucleotide
  Target: SCNA; (+) strand; PAM type: YTN; PAM sequence: TTT
actgtttgatagctgagtta

SEQ ID NO: 77400 - DNA, 20 bp, Artificial Sequence
  Description of Artificial Sequence: Synthetic oligonucleotide
  Target: SCNA; (+) strand; PAM type: YTN; PAM sequence: TTA
ctgtttgatagctgagttac

SEQ ID NO: 77401 - DNA, 20 bp, Artificial Sequence
  Description of Artificial Sequence: Synthetic oligonucleotide
  Target: SCNA; (+) strand; PAM type: YTN; PAM sequence: CTG
tttgatagctgagttacaaa

SEQ ID NO: 77402 - DNA, 20 bp, Artificial Sequence
  Description of Artificial Sequence: Synthetic oligonucleotide
  Target: SCNA; (+) strand; PAM type: YTN; PAM sequence: TTT
gatagctgagttacaaactg

SEQ ID NO: 77403 - DNA, 20 bp, Artificial Sequence
  Description of Artificial Sequence: Synthetic oligonucleotide
  Target: SCNA; (+) strand; PAM type: YTN; PAM sequence: TTG
atagctgagttacaaactgg

SEQ ID NO: 77404 - DNA, 20 bp, Artificial Sequence
  Description of Artificial Sequence: Synthetic oligonucleotide
  Target: SCNA; (+) strand; PAM type: YTN; PAM sequence: CTG
agttacaaactggcaagtat

SEQ ID NO: 77405 - DNA, 20 bp, Artificial Sequence
  Description of Artificial Sequence: Synthetic oligonucleotide
  Target: SCNA; (+) strand; PAM type: YTN; PAM sequence: TTA
caaactggcaagtatccaag

SEQ ID NO: 77406 - DNA, 20 bp, Artificial Sequence
  Description of Artificial Sequence: Synthetic oligonucleotide
  Target: SCNA; (+) strand; PAM type: YTN; PAM sequence: CTG
gcaagtatccaagcaaagaa

SEQ ID NO: 77407 - DNA, 20 bp, Artificial Sequence
  Description of Artificial Sequence: Synthetic oligonucleotide
  Target: SCNA; (+) strand; PAM type: YTN; PAM sequence: CTG
gaggtttgcttttctaccga

SEQ ID NO: 77408 - DNA, 20 bp, Artificial Sequence
  Description of Artificial Sequence: Synthetic oligonucleotide
  Target: SCNA; (+) strand; PAM type: YTN; PAM sequence: TTT
gcttttctaccgaaggaaat

SEQ ID NO: 77409 - DNA, 20 bp, Artificial Sequence
  Description of Artificial Sequence: Synthetic oligonucleotide
  Target: SCNA; (+) strand; PAM type: YTN; PAM sequence: TTG
cttttctaccgaaggaaata

SEQ ID NO: 77410 - DNA, 20 bp, Artificial Sequence
  Description of Artificial Sequence: Synthetic oligonucleotide
  Target: SCNA; (+) strand; PAM type: YTN; PAM sequence: CTT
ttctaccgaaggaaatatgt

SEQ ID NO: 77411 - DNA, 20 bp, Artificial Sequence
  Description of Artificial Sequence: Synthetic oligonucleotide
  Target: SCNA; (+) strand; PAM type: YTN; PAM sequence: TTT
tctaccgaaggaaatatgtt

SEQ ID NO: 77412 - DNA, 20 bp, Artificial Sequence
  Description of Artificial Sequence: Synthetic oligonucleotide
  Target: SCNA; (+) strand; PAM type: YTN; PAM sequence: TTT
ctaccgaaggaaatatgttg

SEQ ID NO: 77413 - DNA, 20 bp, Artificial Sequence
  Description of Artificial Sequence: Synthetic oligonucleotide
  Target: SCNA; (+) strand; PAM type: YTN; PAM sequence: TTC
taccgaaggaaatatgttga

SEQ ID NO: 77414 - DNA, 20 bp, Artificial Sequence
  Description of Artificial Sequence: Synthetic oligonucleotide
  Target: SCNA; (+) strand; PAM type: YTN; PAM sequence: CTA
ccgaaggaaatatgttgaga

SEQ ID NO: 77415 - DNA, 20 bp, Artificial Sequence
  Description of Artificial Sequence: Synthetic oligonucleotide
  Target: SCNA; (+) strand; PAM type: YTN; PAM sequence: TTG
agaatacaggaaagtttcac

SEQ ID NO: 77416 - DNA, 20 bp, Artificial Sequence
  Description of Artificial Sequence: Synthetic oligonucleotide
  Target: SCNA; (+) strand; PAM type: YTN; PAM sequence: TTT
cacgctaaatgtaaataatt

SEQ ID NO: 77417 - DNA, 20 bp, Artificial Sequence
  Description of Artificial Sequence: Synthetic oligonucleotide
  Target: SCNA; (+) strand; PAM type: YTN; PAM sequence: TTC
acgctaaatgtaaataattt

SEQ ID NO: 77418 - DNA, 20 bp, Artificial Sequence
  Description of Artificial Sequence: Synthetic oligonucleotide
  Target: SCNA; (+) strand; PAM type: YTN; PAM sequence: CTA
aatgtaaataattttttaca

SEQ ID NO: 77419 - DNA, 20 bp, Artificial Sequence
  Description of Artificial Sequence: Synthetic oligonucleotide
  Target: SCNA; (+) strand; PAM type: YTN; PAM sequence: TTT
tttacagttaaactaataat

SEQ ID NO: 77420 - DNA, 20 bp, Artificial Sequence
  Description of Artificial Sequence: Synthetic oligonucleotide
  Target: SCNA; (+) strand; PAM type: YTN; PAM sequence: TTT
ttacagttaaactaataatg

SEQ ID NO: 77421 - DNA, 20 bp, Artificial Sequence
  Description of Artificial Sequence: Synthetic oligonucleotide
  Target: SCNA; (+) strand; PAM type: YTN; PAM sequence: TTT
tacagttaaactaataatga

SEQ ID NO: 77422 - DNA, 20 bp, Artificial Sequence
  Description of Artificial Sequence: Synthetic oligonucleotide
  Target: SCNA; (+) strand; PAM type: YTN; PAM sequence: TTT
acagttaaactaataatgag

SEQ ID NO: 77423 - DNA, 20 bp, Artificial Sequence
  Description of Artificial Sequence: Synthetic oligonucleotide
  Target: SCNA; (+) strand; PAM type: YTN; PAM sequence: TTA
cagttaaactaataatgagt

SEQ ID NO: 77424 - DNA, 20 bp, Artificial Sequence
  Description of Artificial Sequence: Synthetic oligonucleotide
  Target: SCNA; (+) strand; PAM type: YTN; PAM sequence: TTA
aactaataatgagtgattga

SEQ ID NO: 77425 - DNA, 20 bp, Artificial Sequence
  Description of Artificial Sequence: Synthetic oligonucleotide
  Target: SCNA; (+) strand; PAM type: YTN; PAM sequence: CTA
ataatgagtgattgaaaaaa

SEQ ID NO: 77426 - DNA, 20 bp, Artificial Sequence
  Description of Artificial Sequence: Synthetic oligonucleotide
  Target: SCNA; (+) strand; PAM type: YTN; PAM sequence: TTG
aaaaaagttgacttgtgaca

SEQ ID NO: 77427 - DNA, 20 bp, Artificial Sequence
  Description of Artificial Sequence: Synthetic oligonucleotide
  Target: SCNA; (+) strand; PAM type: YTN; PAM sequence: TTG
acttgtgacatacaaatgat

SEQ ID NO: 77428 - DNA, 20 bp, Artificial Sequence
  Description of Artificial Sequence: Synthetic oligonucleotide
  Target: SCNA; (+) strand; PAM type: YTN; PAM sequence: CTT
gtgacatacaaatgatacaa

SEQ ID NO: 77429 - DNA, 20 bp, Artificial Sequence
  Description of Artificial Sequence: Synthetic oligonucleotide
  Target: SCNA; (+) strand; PAM type: YTN; PAM sequence: TTG
tgacatacaaatgatacaaa

SEQ ID NO: 77430 - DNA, 20 bp, Artificial Sequence
  Description of Artificial Sequence: Synthetic oligonucleotide
  Target: SCNA; (+) strand; PAM type: YTN; PAM sequence: CTT
tcattgtcctctctttcatg

SEQ ID NO: 77431 - DNA, 20 bp, Artificial Sequence
  Description of Artificial Sequence: Synthetic oligonucleotide
  Target: SCNA; (+) strand; PAM type: YTN; PAM sequence: TTT
cattgtcctctctttcatgg

SEQ ID NO: 77432 - DNA, 20 bp, Artificial Sequence
  Description of Artificial Sequence: Synthetic oligonucleotide
  Target: SCNA; (+) strand; PAM type: YTN; PAM sequence: TTC
attgtcctctctttcatggg

SEQ ID NO: 77433 - DNA, 20 bp, Artificial Sequence
  Description of Artificial Sequence: Synthetic oligonucleotide
  Target: SCNA; (+) strand; PAM type: YTN; PAM sequence: TTG
tcctctctttcatgggtatt

SEQ ID NO: 77434 - DNA, 20 bp, Artificial Sequence
  Description of Artificial Sequence: Synthetic oligonucleotide
  Target: SCNA; (+) strand; PAM type: YTN; PAM sequence: CTC
tctttcatgggtattaatat

SEQ ID NO: 77435 - DNA, 20 bp, Artificial Sequence
  Description of Artificial Sequence: Synthetic oligonucleotide
  Target: SCNA; (+) strand; PAM type: YTN; PAM sequence: CTC
tttcatgggtattaatattt

SEQ ID NO: 77436 - DNA, 20 bp, Artificial Sequence
  Description of Artificial Sequence: Synthetic oligonucleotide
  Target: SCNA; (+) strand; PAM type: YTN; PAM sequence: CTT
tcatgggtattaatatttca

SEQ ID NO: 77437 - DNA, 20 bp, Artificial Sequence
  Description of Artificial Sequence: Synthetic oligonucleotide
  Target: SCNA; (+) strand; PAM type: YTN; PAM sequence: TTT
catgggtattaatatttcat

SEQ ID NO: 77438 - DNA, 20 bp, Artificial Sequence
  Description of Artificial Sequence: Synthetic oligonucleotide
  Target: SCNA; (+) strand; PAM type: YTN; PAM sequence: TTC
atgggtattaatatttcatt

SEQ ID NO: 77439 - DNA, 20 bp, Artificial Sequence
  Description of Artificial Sequence: Synthetic oligonucleotide
  Target: SCNA; (+) strand; PAM type: YTN; PAM sequence: TTA
atatttcatttgataaagat

SEQ ID NO: 77440 - DNA, 20 bp, Artificial Sequence
  Description of Artificial Sequence: Synthetic oligonucleotide
  Target: SCNA; (+) strand; PAM type: YTN; PAM sequence: TTT
catttgataaagatttaagt

SEQ ID NO: 77441 - DNA, 20 bp, Artificial Sequence
  Description of Artificial Sequence: Synthetic oligonucleotide
  Target: SCNA; (+) strand; PAM type: YTN; PAM sequence: TTC
atttgataaagatttaagta

SEQ ID NO: 77442 - DNA, 20 bp, Artificial Sequence
  Description of Artificial Sequence: Synthetic oligonucleotide
  Target: SCNA; (+) strand; PAM type: YTN; PAM sequence: TTT
gataaagatttaagtactaa

SEQ ID NO: 77443 - DNA, 20 bp, Artificial Sequence
  Description of Artificial Sequence: Synthetic oligonucleotide
  Target: SCNA; (+) strand; PAM type: YTN; PAM sequence: TTG
ataaagatttaagtactaat

SEQ ID NO: 77444 - DNA, 20 bp, Artificial Sequence
  Description of Artificial Sequence: Synthetic oligonucleotide
  Target: SCNA; (+) strand; PAM type: YTN; PAM sequence: TTT
aagtactaatgactatcagt

SEQ ID NO: 77445 - DNA, 20 bp, Artificial Sequence
  Description of Artificial Sequence: Synthetic oligonucleotide
  Target: SCNA; (+) strand; PAM type: YTN; PAM sequence: TTA
agtactaatgactatcagta

SEQ ID NO: 77446 - DNA, 20 bp, Artificial Sequence
  Description of Artificial Sequence: Synthetic oligonucleotide
  Target: SCNA; (+) strand; PAM type: YTN; PAM sequence: CTA
atgactatcagtatctgttg

SEQ ID NO: 77447 - DNA, 20 bp, Artificial Sequence
  Description of Artificial Sequence: Synthetic oligonucleotide
  Target: SCNA; (+) strand; PAM type: YTN; PAM sequence: CTA
tcagtatctgttgattgcta

SEQ ID NO: 77448 - DNA, 20 bp, Artificial Sequence
  Description of Artificial Sequence: Synthetic oligonucleotide
  Target: SCNA; (+) strand; PAM type: YTN; PAM sequence: CTG
ttgattgctagcaattttga

SEQ ID NO: 77449 - DNA, 20 bp, Artificial Sequence
  Description of Artificial Sequence: Synthetic oligonucleotide
  Target: SCNA; (+) strand; PAM type: YTN; PAM sequence: TTG
attgctagcaattttgagta

SEQ ID NO: 77450 - DNA, 20 bp, Artificial Sequence
  Description of Artificial Sequence: Synthetic oligonucleotide
  Target: SCNA; (+) strand; PAM type: YTN; PAM sequence: TTG
ctagcaattttgagtagaac

SEQ ID NO: 77451 - DNA, 20 bp, Artificial Sequence
  Description of Artificial Sequence: Synthetic oligonucleotide
  Target: SCNA; (+) strand; PAM type: YTN; PAM sequence: CTA
gcaattttgagtagaacact

SEQ ID NO: 77452 - DNA, 20 bp, Artificial Sequence
  Description of Artificial Sequence: Synthetic oligonucleotide
  Target: SCNA; (+) strand; PAM type: YTN; PAM sequence: TTT
tgagtagaacactttttctg

SEQ ID NO: 77453 - DNA, 20 bp, Artificial Sequence
  Description of Artificial Sequence: Synthetic oligonucleotide
  Target: SCNA; (+) strand; PAM type: YTN; PAM sequence: TTT
gagtagaacactttttctga

SEQ ID NO: 77454 - DNA, 20 bp, Artificial Sequence
  Description of Artificial Sequence: Synthetic oligonucleotide
  Target: SCNA; (+) strand; PAM type: YTN; PAM sequence: TTG
agtagaacactttttctgat

SEQ ID NO: 77455 - DNA, 20 bp, Artificial Sequence
  Description of Artificial Sequence: Synthetic oligonucleotide
  Target: SCNA; (+) strand; PAM type: YTN; PAM sequence: CTT
tttctgatatgtatgaatat

SEQ ID NO: 77456 - DNA, 20 bp, Artificial Sequence
  Description of Artificial Sequence: Synthetic oligonucleotide
  Target: SCNA; (+) strand; PAM type: YTN; PAM sequence: TTT
ttctgatatgtatgaatata

SEQ ID NO: 77457 - DNA, 20 bp, Artificial Sequence
  Description of Artificial Sequence: Synthetic oligonucleotide
  Target: SCNA; (+) strand; PAM type: YTN; PAM sequence: TTT
tctgatatgtatgaatatat

SEQ ID NO: 77458 - DNA, 20 bp, Artificial Sequence
  Description of Artificial Sequence: Synthetic oligonucleotide
  Target: SCNA; (+) strand; PAM type: YTN; PAM sequence: TTT
ctgatatgtatgaatatata

SEQ ID NO: 77459 - DNA, 20 bp, Artificial Sequence
  Description of Artificial Sequence: Synthetic oligonucleotide
  Target: SCNA; (+) strand; PAM type: YTN; PAM sequence: TTC
tgatatgtatgaatatatag

SEQ ID NO: 77460 - DNA, 20 bp, Artificial Sequence
  Description of Artificial Sequence: Synthetic oligonucleotide
  Target: SCNA; (+) strand; PAM type: YTN; PAM sequence: CTG
atatgtatgaatatatagac

SEQ ID NO: 77461 - DNA, 20 bp, Artificial Sequence
  Description of Artificial Sequence: Synthetic oligonucleotide
  Target: SCNA; (+) strand; PAM type: YTN; PAM sequence: CTG
gattgtgtaatagcctttat

SEQ ID NO: 77462 - DNA, 20 bp, Artificial Sequence
  Description of Artificial Sequence: Synthetic oligonucleotide
  Target: SCNA; (+) strand; PAM type: YTN; PAM sequence: TTG
tgtaatagcctttatgatgc

SEQ ID NO: 77463 - DNA, 20 bp, Artificial Sequence
  Description of Artificial Sequence: Synthetic oligonucleotide
  Target: SCNA; (+) strand; PAM type: YTN; PAM sequence: CTT
tatgatgcagtaaggcaacc

SEQ ID NO: 77464 - DNA, 20 bp, Artificial Sequence
  Description of Artificial Sequence: Synthetic oligonucleotide
  Target: SCNA; (+) strand; PAM type: YTN; PAM sequence: TTT
atgatgcagtaaggcaacca

SEQ ID NO: 77465 - DNA, 20 bp, Artificial Sequence
  Description of Artificial Sequence: Synthetic oligonucleotide
  Target: SCNA; (+) strand; PAM type: YTN; PAM sequence: TTA
tgatgcagtaaggcaaccac

SEQ ID NO: 77466 - DNA, 20 bp, Artificial Sequence
  Description of Artificial Sequence: Synthetic oligonucleotide
  Target: SCNA; (+) strand; PAM type: YTN; PAM sequence: CTG
aacttggaatcagtgaatta

SEQ ID NO: 77467 - DNA, 20 bp, Artificial Sequence
  Description of Artificial Sequence: Synthetic oligonucleotide
  Target: SCNA; (+) strand; PAM type: YTN; PAM sequence: CTT
ggaatcagtgaattacaatt

SEQ ID NO: 77468 - DNA, 20 bp, Artificial Sequence
  Description of Artificial Sequence: Synthetic oligonucleotide
  Target: SCNA; (+) strand; PAM type: YTN; PAM sequence: TTG
gaatcagtgaattacaattt

SEQ ID NO: 77469 - DNA, 20 bp, Artificial Sequence
  Description of Artificial Sequence: Synthetic oligonucleotide
  Target: SCNA; (+) strand; PAM type: YTN; PAM sequence: TTA
caatttgtttcttctgggtc

SEQ ID NO: 77470 - DNA, 20 bp, Artificial Sequence
  Description of Artificial Sequence: Synthetic oligonucleotide
  Target: SCNA; (+) strand; PAM type: YTN; PAM sequence: TTT
gtttcttctgggtccctcac

SEQ ID NO: 77471 - DNA, 20 bp, Artificial Sequence
  Description of Artificial Sequence: Synthetic oligonucleotide
  Target: SCNA; (+) strand; PAM type: YTN; PAM sequence: TTG
tttcttctgggtccctcact

SEQ ID NO: 77472 - DNA, 20 bp, Artificial Sequence
  Description of Artificial Sequence: Synthetic oligonucleotide
  Target: SCNA; (+) strand; PAM type: YTN; PAM sequence: TTT
cttctgggtccctcactagc

SEQ ID NO: 77473 - DNA, 20 bp, Artificial Sequence
  Description of Artificial Sequence: Synthetic oligonucleotide
  Target: SCNA; (+) strand; PAM type: YTN; PAM sequence: TTC
ttctgggtccctcactagcc

SEQ ID NO: 77474 - DNA, 20 bp, Artificial Sequence
  Description of Artificial Sequence: Synthetic oligonucleotide
  Target: SCNA; (+) strand; PAM type: YTN; PAM sequence: CTT
ctgggtccctcactagccct

SEQ ID NO: 77475 - DNA, 20 bp, Artificial Sequence
  Description of Artificial Sequence: Synthetic oligonucleotide
  Target: SCNA; (+) strand; PAM type: YTN; PAM sequence: TTC
tgggtccctcactagccctg

SEQ ID NO: 77476 - DNA, 20 bp, Artificial Sequence
  Description of Artificial Sequence: Synthetic oligonucleotide
  Target: SCNA; (+) strand; PAM type: YTN; PAM sequence: CTG
ggtccctcactagccctgtg

SEQ ID NO: 77477 - DNA, 20 bp, Artificial Sequence
  Description of Artificial Sequence: Synthetic oligonucleotide
  Target: SCNA; (+) strand; PAM type: YTN; PAM sequence: CTC
actagccctgtgactttggt

SEQ ID NO: 77478 - DNA, 20 bp, Artificial Sequence
  Description of Artificial Sequence: Synthetic oligonucleotide
  Target: SCNA; (+) strand; PAM type: YTN; PAM sequence: CTA
gccctgtgactttggtctat

SEQ ID NO: 77479 - DNA, 20 bp, Artificial Sequence
  Description of Artificial Sequence: Synthetic oligonucleotide
  Target: SCNA; (+) strand; PAM type: YTN; PAM sequence: CTG
tgactttggtctatttgact

SEQ ID NO: 77480 - DNA, 20 bp, Artificial Sequence
  Description of Artificial Sequence: Synthetic oligonucleotide
  Target: SCNA; (+) strand; PAM type: YTN; PAM sequence: CTT
tggtctatttgacttctgtg

SEQ ID NO: 77481 - DNA, 20 bp, Artificial Sequence
  Description of Artificial Sequence: Synthetic oligonucleotide
  Target: SCNA; (+) strand; PAM type: YTN; PAM sequence: TTT
ggtctatttgacttctgtga

SEQ ID NO: 77482 - DNA, 20 bp, Artificial Sequence
  Description of Artificial Sequence: Synthetic oligonucleotide
  Target: SCNA; (+) strand; PAM type: YTN; PAM sequence: TTG
gtctatttgacttctgtgag

SEQ ID NO: 77483 - DNA, 20 bp, Artificial Sequence
  Description of Artificial Sequence: Synthetic oligonucleotide
  Target: SCNA; (+) strand; PAM type: YTN; PAM sequence: CTA
tttgacttctgtgagcctca

SEQ ID NO: 77484 - DNA, 20 bp, Artificial Sequence
  Description of Artificial Sequence: Synthetic oligonucleotide
  Target: SCNA; (+) strand; PAM type: YTN; PAM sequence: TTT
gacttctgtgagcctcaaaa

SEQ ID NO: 77485 - DNA, 20 bp, Artificial Sequence
  Description of Artificial Sequence: Synthetic oligonucleotide
  Target: SCNA; (+) strand; PAM type: YTN; PAM sequence: TTG
acttctgtgagcctcaaaag

SEQ ID NO: 77486 - DNA, 20 bp, Artificial Sequence
  Description of Artificial Sequence: Synthetic oligonucleotide
  Target: SCNA; (+) strand; PAM type: YTN; PAM sequence: CTT
ctgtgagcctcaaaagtgca

SEQ ID NO: 77487 - DNA, 20 bp, Artificial Sequence
  Description of Artificial Sequence: Synthetic oligonucleotide
  Target: SCNA; (+) strand; PAM type: YTN; PAM sequence: TTC
tgtgagcctcaaaagtgcat

SEQ ID NO: 77488 - DNA, 20 bp, Artificial Sequence
  Description of Artificial Sequence: Synthetic oligonucleotide
  Target: SCNA; (+) strand; PAM type: YTN; PAM sequence: CTG
tgagcctcaaaagtgcattt

SEQ ID NO: 77489 - DNA, 20 bp, Artificial Sequence
  Description of Artificial Sequence: Synthetic oligonucleotide
  Target: SCNA; (+) strand; PAM type: YTN; PAM sequence: CTC
aaaagtgcatttgtaaaatg

SEQ ID NO: 77490 - DNA, 20 bp, Artificial Sequence
  Description of Artificial Sequence: Synthetic oligonucleotide
  Target: SCNA; (+) strand; PAM type: YTN; PAM sequence: TTT
gtaaaatggaaattaaattt

SEQ ID NO: 77491 - DNA, 20 bp, Artificial Sequence
  Description of Artificial Sequence: Synthetic oligonucleotide
  Target: SCNA; (+) strand; PAM type: YTN; PAM sequence: TTG
taaaatggaaattaaatttt

SEQ ID NO: 77492 - DNA, 20 bp, Artificial Sequence
  Description of Artificial Sequence: Synthetic oligonucleotide
  Target: SCNA; (+) strand; PAM type: YTN; PAM sequence: TTA
aatttttttctgcccatctt

SEQ ID NO: 77493 - DNA, 20 bp, Artificial Sequence
  Description of Artificial Sequence: Synthetic oligonucleotide
  Target: SCNA; (+) strand; PAM type: YTN; PAM sequence: TTT
ttttctgcccatcttactgt

SEQ ID NO: 77494 - DNA, 20 bp, Artificial Sequence
  Description of Artificial Sequence: Synthetic oligonucleotide
  Target: SCNA; (+) strand; PAM type: YTN; PAM sequence: TTT
tttctgcccatcttactgtg

SEQ ID NO: 77495 - DNA, 20 bp, Artificial Sequence
  Description of Artificial Sequence: Synthetic oligonucleotide
  Target: SCNA; (+) strand; PAM type: YTN; PAM sequence: TTT
ttctgcccatcttactgtga

SEQ ID NO: 77496 - DNA, 20 bp, Artificial Sequence
  Description of Artificial Sequence: Synthetic oligonucleotide
  Target: SCNA; (+) strand; PAM type: YTN; PAM sequence: TTT
tctgcccatcttactgtgaa

SEQ ID NO: 77497 - DNA, 20 bp, Artificial Sequence
  Description of Artificial Sequence: Synthetic oligonucleotide
  Target: SCNA; (+) strand; PAM type: YTN; PAM sequence: TTT
ctgcccatcttactgtgaag

SEQ ID NO: 77498 - DNA, 20 bp, Artificial Sequence
  Description of Artificial Sequence: Synthetic oligonucleotide
  Target: SCNA; (+) strand; PAM type: YTN; PAM sequence: TTC
tgcccatcttactgtgaagc

SEQ ID NO: 77499 - DNA, 20 bp, Artificial Sequence
  Description of Artificial Sequence: Synthetic oligonucleotide
  Target: SCNA; (+) strand; PAM type: YTN; PAM sequence: CTG
cccatcttactgtgaagctg

SEQ ID NO: 77500 - DNA, 20 bp, Artificial Sequence
  Description of Artificial Sequence: Synthetic oligonucleotide
  Target: SCNA; (+) strand; PAM type: YTN; PAM sequence: CTT
actgtgaagctgttgtaata

SEQ ID NO: 77501 - DNA, 20 bp, Artificial Sequence
  Description of Artificial Sequence: Synthetic oligonucleotide
  Target: SCNA; (+) strand; PAM type: YTN; PAM sequence: TTA
ctgtgaagctgttgtaataa

SEQ ID NO: 77502 - DNA, 20 bp, Artificial Sequence
  Description of Artificial Sequence: Synthetic oligonucleotide
  Target: SCNA; (+) strand; PAM type: YTN; PAM sequence: CTG
tgaagctgttgtaataataa

SEQ ID NO: 77503 - DNA, 20 bp, Artificial Sequence
  Description of Artificial Sequence: Synthetic oligonucleotide
  Target: SCNA; (+) strand; PAM type: YTN; PAM sequence: CTG
ttgtaataataatattgaca

SEQ ID NO: 77504 - DNA, 20 bp, Artificial Sequence
  Description of Artificial Sequence: Synthetic oligonucleotide
  Target: SCNA; (+) strand; PAM type: YTN; PAM sequence: TTG
taataataatattgacaata

SEQ ID NO: 77505 - DNA, 20 bp, Artificial Sequence
  Description of Artificial Sequence: Synthetic oligonucleotide
  Target: SCNA; (+) strand; PAM type: YTN; PAM sequence: TTG
acaatagcaataattatact

SEQ ID NO: 77506 - DNA, 20 bp, Artificial Sequence
  Description of Artificial Sequence: Synthetic oligonucleotide
  Target: SCNA; (+) strand; PAM type: YTN; PAM sequence: TTA
tactaataaaaagcaattta

SEQ ID NO: 77507 - DNA, 20 bp, Artificial Sequence
  Description of Artificial Sequence: Synthetic oligonucleotide
  Target: SCNA; (+) strand; PAM type: YTN; PAM sequence: CTA
ataaaaagcaatttactgtg

SEQ ID NO: 77508 - DNA, 20 bp, Artificial Sequence
  Description of Artificial Sequence: Synthetic oligonucleotide
  Target: SCNA; (+) strand; PAM type: YTN; PAM sequence: TTT
actgtgtatttgaaattatg

SEQ ID NO: 77509 - DNA, 20 bp, Artificial Sequence
  Description of Artificial Sequence: Synthetic oligonucleotide
  Target: SCNA; (+) strand; PAM type: YTN; PAM sequence: TTA
ctgtgtatttgaaattatgc

SEQ ID NO: 77510 - DNA, 20 bp, Artificial Sequence
  Description of Artificial Sequence: Synthetic oligonucleotide
  Target: SCNA; (+) strand; PAM type: YTN; PAM sequence: CTG
tgtatttgaaattatgcaaa

SEQ ID NO: 77511 - DNA, 20 bp, Artificial Sequence
  Description of Artificial Sequence: Synthetic oligonucleotide
  Target: SCNA; (+) strand; PAM type: YTN; PAM sequence: TTT
gaaattatgcaaacaatttg

SEQ ID NO: 77512 - DNA, 20 bp, Artificial Sequence
  Description of Artificial Sequence: Synthetic oligonucleotide
  Target: SCNA; (+) strand; PAM type: YTN; PAM sequence: TTG
aaattatgcaaacaatttga

SEQ ID NO: 77513 - DNA, 20 bp, Artificial Sequence
  Description of Artificial Sequence: Synthetic oligonucleotide
  Target: SCNA; (+) strand; PAM type: YTN; PAM sequence: TTA
tgcaaacaatttgaaaatca

SEQ ID NO: 77514 - DNA, 20 bp, Artificial Sequence
  Description of Artificial Sequence: Synthetic oligonucleotide
  Target: SCNA; (+) strand; PAM type: YTN; PAM sequence: TTT
gaaaatcatagcactatata

SEQ ID NO: 77515 - DNA, 20 bp, Artificial Sequence
  Description of Artificial Sequence: Synthetic oligonucleotide
  Target: SCNA; (+) strand; PAM type: YTN; PAM sequence: TTG
aaaatcatagcactatataa

SEQ ID NO: 77516 - DNA, 20 bp, Artificial Sequence
  Description of Artificial Sequence: Synthetic oligonucleotide
  Target: SCNA; (+) strand; PAM type: YTN; PAM sequence: CTA
tataaaatgtaacgtcacat

SEQ ID NO: 77517 - DNA, 20 bp, Artificial Sequence
  Description of Artificial Sequence: Synthetic oligonucleotide
  Target: SCNA; (+) strand; PAM type: YTN; PAM sequence: TTA
gtgttggagtttacaatttg

SEQ ID NO: 77518 - DNA, 20 bp, Artificial Sequence
  Description of Artificial Sequence: Synthetic oligonucleotide
  Target: SCNA; (+) strand; PAM type: YTN; PAM sequence: TTG
gagtttacaatttggcaggg

SEQ ID NO: 77519 - DNA, 20 bp, Artificial Sequence
  Description of Artificial Sequence: Synthetic oligonucleotide
  Target: SCNA; (+) strand; PAM type: YTN; PAM sequence: TTT
acaatttggcagggaagctg

SEQ ID NO: 77520 - DNA, 20 bp, Artificial Sequence
  Description of Artificial Sequence: Synthetic oligonucleotide
  Target: SCNA; (+) strand; PAM type: YTN; PAM sequence: TTA
caatttggcagggaagctgt

SEQ ID NO: 77521 - DNA, 20 bp, Artificial Sequence
  Description of Artificial Sequence: Synthetic oligonucleotide
  Target: SCNA; (+) strand; PAM type: YTN; PAM sequence: TTT
ggcagggaagctgtacaact

SEQ ID NO: 77522 - DNA, 20 bp, Artificial Sequence
  Description of Artificial Sequence: Synthetic oligonucleotide
  Target: SCNA; (+) strand; PAM type: YTN; PAM sequence: TTG
gcagggaagctgtacaacta

SEQ ID NO: 77523 - DNA, 20 bp, Artificial Sequence
  Description of Artificial Sequence: Synthetic oligonucleotide
  Target: SCNA; (+) strand; PAM type: YTN; PAM sequence: CTG
tacaactaaccacggcacaa

SEQ ID NO: 77524 - DNA, 20 bp, Artificial Sequence
  Description of Artificial Sequence: Synthetic oligonucleotide
  Target: SCNA; (+) strand; PAM type: YTN; PAM sequence: CTA
accacggcacaatttgataa

SEQ ID NO: 77525 - DNA, 20 bp, Artificial Sequence
  Description of Artificial Sequence: Synthetic oligonucleotide
  Target: SCNA; (+) strand; PAM type: YTN; PAM sequence: TTT
gataagcaataaacttcctt

SEQ ID NO: 77526 - DNA, 20 bp, Artificial Sequence
  Description of Artificial Sequence: Synthetic oligonucleotide
  Target: SCNA; (+) strand; PAM type: YTN; PAM sequence: TTG
ataagcaataaacttccttt

SEQ ID NO: 77527 - DNA, 20 bp, Artificial Sequence
  Description of Artificial Sequence: Synthetic oligonucleotide
  Target: SCNA; (+) strand; PAM type: YTN; PAM sequence: CTT
cctttagagtatacggagaa

SEQ ID NO: 77528 - DNA, 20 bp, Artificial Sequence
  Description of Artificial Sequence: Synthetic oligonucleotide
  Target: SCNA; (+) strand; PAM type: YTN; PAM sequence: TTC
ctttagagtatacggagaaa

SEQ ID NO: 77529 - DNA, 20 bp, Artificial Sequence
  Description of Artificial Sequence: Synthetic oligonucleotide
  Target: SCNA; (+) strand; PAM type: YTN; PAM sequence: CTT
tagagtatacggagaaatgg

SEQ ID NO: 77530 - DNA, 20 bp, Artificial Sequence
  Description of Artificial Sequence: Synthetic oligonucleotide
  Target: SCNA; (+) strand; PAM type: YTN; PAM sequence: TTT
agagtatacggagaaatggg

SEQ ID NO: 77531 - DNA, 20 bp, Artificial Sequence
  Description of Artificial Sequence: Synthetic oligonucleotide
  Target: SCNA; (+) strand; PAM type: YTN; PAM sequence: TTA
gagtatacggagaaatgggg

SEQ ID NO: 77532 - DNA, 20 bp, Artificial Sequence
  Description of Artificial Sequence: Synthetic oligonucleotide
  Target: SCNA; (+) strand; PAM type: YTN; PAM sequence: TTA
taaatattaagcccttttgt

SEQ ID NO: 77533 - DNA, 20 bp, Artificial Sequence
  Description of Artificial Sequence: Synthetic oligonucleotide
  Target: SCNA; (+) strand; PAM type: YTN; PAM sequence: TTA
agcccttttgtgccaggctc

SEQ ID NO: 77534 - DNA, 20 bp, Artificial Sequence
  Description of Artificial Sequence: Synthetic oligonucleotide
  Target: SCNA; (+) strand; PAM type: YTN; PAM sequence: CTT
ttgtgccaggctctgggacc

SEQ ID NO: 77535 - DNA, 20 bp, Artificial Sequence
  Description of Artificial Sequence: Synthetic oligonucleotide
  Target: SCNA; (+) strand; PAM type: YTN; PAM sequence: TTT
tgtgccaggctctgggacca

SEQ ID NO: 77536 - DNA, 20 bp, Artificial Sequence
  Description of Artificial Sequence: Synthetic oligonucleotide
  Target: SCNA; (+) strand; PAM type: YTN; PAM sequence: TTT
gtgccaggctctgggaccac

SEQ ID NO: 77537 - DNA, 20 bp, Artificial Sequence
  Description of Artificial Sequence: Synthetic oligonucleotide
  Target: SCNA; (+) strand; PAM type: YTN; PAM sequence: TTG
tgccaggctctgggaccaca

SEQ ID NO: 77538 - DNA, 20 bp, Artificial Sequence
  Description of Artificial Sequence: Synthetic oligonucleotide
  Target: SCNA; (+) strand; PAM type: YTN; PAM sequence: CTC
tgggaccacaattatcccat

SEQ ID NO: 77539 - DNA, 20 bp, Artificial Sequence
  Description of Artificial Sequence: Synthetic oligonucleotide
  Target: SCNA; (+) strand; PAM type: YTN; PAM sequence: CTG
ggaccacaattatcccatgt

SEQ ID NO: 77540 - DNA, 20 bp, Artificial Sequence
  Description of Artificial Sequence: Synthetic oligonucleotide
  Target: SCNA; (+) strand; PAM type: YTN; PAM sequence: TTA
tcccatgtgatctccatcac

SEQ ID NO: 77541 - DNA, 20 bp, Artificial Sequence
  Description of Artificial Sequence: Synthetic oligonucleotide
  Target: SCNA; (+) strand; PAM type: YTN; PAM sequence: CTC
catcacaccttgcagatgta

SEQ ID NO: 77542 - DNA, 20 bp, Artificial Sequence
  Description of Artificial Sequence: Synthetic oligonucleotide
  Target: SCNA; (+) strand; PAM type: YTN; PAM sequence: CTT
gcagatgtaaattttcttat

SEQ ID NO: 77543 - DNA, 20 bp, Artificial Sequence
  Description of Artificial Sequence: Synthetic oligonucleotide
  Target: SCNA; (+) strand; PAM type: YTN; PAM sequence: TTG
cagatgtaaattttcttatt

SEQ ID NO: 77544 - DNA, 20 bp, Artificial Sequence
  Description of Artificial Sequence: Synthetic oligonucleotide
  Target: SCNA; (+) strand; PAM type: YTN; PAM sequence: TTT
tcttattcttattttataca

SEQ ID NO: 77545 - DNA, 20 bp, Artificial Sequence
  Description of Artificial Sequence: Synthetic oligonucleotide
  Target: SCNA; (+) strand; PAM type: YTN; PAM sequence: TTT
cttattcttattttatacag

SEQ ID NO: 77546 - DNA, 20 bp, Artificial Sequence
  Description of Artificial Sequence: Synthetic oligonucleotide
  Target: SCNA; (+) strand; PAM type: YTN; PAM sequence: TTC
ttattcttattttatacaga

SEQ ID NO: 77547 - DNA, 20 bp, Artificial Sequence
  Description of Artificial Sequence: Synthetic oligonucleotide
  Target: SCNA; (+) strand; PAM type: YTN; PAM sequence: CTT
attcttattttatacagatg

SEQ ID NO: 77548 - DNA, 20 bp, Artificial Sequence
  Description of Artificial Sequence: Synthetic oligonucleotide
  Target: SCNA; (+) strand; PAM type: YTN; PAM sequence: TTA
ttcttattttatacagatga

SEQ ID NO: 77549 - DNA, 20 bp, Artificial Sequence
  Description of Artificial Sequence: Synthetic oligonucleotide
  Target: SCNA; (+) strand; PAM type: YTN; PAM sequence: TTC
ttattttatacagatgatgc

SEQ ID NO: 77550 - DNA, 20 bp, Artificial Sequence
  Description of Artificial Sequence: Synthetic oligonucleotide
  Target: SCNA; (+) strand; PAM type: YTN; PAM sequence: CTT
attttatacagatgatgcaa

SEQ ID NO: 77551 - DNA, 20 bp, Artificial Sequence
  Description of Artificial Sequence: Synthetic oligonucleotide
  Target: SCNA; (+) strand; PAM type: YTN; PAM sequence: TTA
ttttatacagatgatgcaac

SEQ ID NO: 77552 - DNA, 20 bp, Artificial Sequence
  Description of Artificial Sequence: Synthetic oligonucleotide
  Target: SCNA; (+) strand; PAM type: YTN; PAM sequence: TTT
tatacagatgatgcaactga

SEQ ID NO: 77553 - DNA, 20 bp, Artificial Sequence
  Description of Artificial Sequence: Synthetic oligonucleotide
  Target: SCNA; (+) strand; PAM type: YTN; PAM sequence: TTT
atacagatgatgcaactgaa

SEQ ID NO: 77554 - DNA, 20 bp, Artificial Sequence
  Description of Artificial Sequence: Synthetic oligonucleotide
  Target: SCNA; (+) strand; PAM type: YTN; PAM sequence: TTA
tacagatgatgcaactgaag

SEQ ID NO: 77555 - DNA, 20 bp, Artificial Sequence
  Description of Artificial Sequence: Synthetic oligonucleotide
  Target: SCNA; (+) strand; PAM type: YTN; PAM sequence: CTG
aagaacgaagcaagttgtcc

SEQ ID NO: 77556 - DNA, 20 bp, Artificial Sequence
  Description of Artificial Sequence: Synthetic oligonucleotide
  Target: SCNA; (+) strand; PAM type: YTN; PAM sequence: TTG
tccatggtcacacagctaat

SEQ ID NO: 77557 - DNA, 20 bp, Artificial Sequence
  Description of Artificial Sequence: Synthetic oligonucleotide
  Target: SCNA; (+) strand; PAM type: YTN; PAM sequence: CTA
ataatgatagtattttccta

SEQ ID NO: 77558 - DNA, 20 bp, Artificial Sequence
  Description of Artificial Sequence: Synthetic oligonucleotide
  Target: SCNA; (+) strand; PAM type: YTN; PAM sequence: TTT
tcctattcctcatagaaaac

SEQ ID NO: 77559 - DNA, 20 bp, Artificial Sequence
  Description of Artificial Sequence: Synthetic oligonucleotide
  Target: SCNA; (+) strand; PAM type: YTN; PAM sequence: TTT
cctattcctcatagaaaact

SEQ ID NO: 77560 - DNA, 20 bp, Artificial Sequence
  Description of Artificial Sequence: Synthetic oligonucleotide
  Target: SCNA; (+) strand; PAM type: YTN; PAM sequence: TTC
ctattcctcatagaaaactg

SEQ ID NO: 77561 - DNA, 20 bp, Artificial Sequence
  Description of Artificial Sequence: Synthetic oligonucleotide
  Target: SCNA; (+) strand; PAM type: YTN; PAM sequence: CTA
ttcctcatagaaaactggag

SEQ ID NO: 77562 - DNA, 20 bp, Artificial Sequence
  Description of Artificial Sequence: Synthetic oligonucleotide
  Target: SCNA; (+) strand; PAM type: YTN; PAM sequence: TTC
ctcatagaaaactggagacg

SEQ ID NO: 77563 - DNA, 20 bp, Artificial Sequence
  Description of Artificial Sequence: Synthetic oligonucleotide
  Target: SCNA; (+) strand; PAM type: YTN; PAM sequence: CTC
atagaaaactggagacggcc

SEQ ID NO: 77564 - DNA, 20 bp, Artificial Sequence
  Description of Artificial Sequence: Synthetic oligonucleotide
  Target: SCNA; (+) strand; PAM type: YTN; PAM sequence: CTG
gagacggccacattatatat

SEQ ID NO: 77565 - DNA, 20 bp, Artificial Sequence
  Description of Artificial Sequence: Synthetic oligonucleotide
  Target: SCNA; (+) strand; PAM type: YTN; PAM sequence: TTA
tatatccttaactacaggga

SEQ ID NO: 77566 - DNA, 20 bp, Artificial Sequence
  Description of Artificial Sequence: Synthetic oligonucleotide
  Target: SCNA; (+) strand; PAM type: YTN; PAM sequence: CTT
aactacagggaccatttcta

SEQ ID NO: 77567 - DNA, 20 bp, Artificial Sequence
  Description of Artificial Sequence: Synthetic oligonucleotide
  Target: SCNA; (+) strand; PAM type: YTN; PAM sequence: TTA
actacagggaccatttctag

SEQ ID NO: 77568 - DNA, 20 bp, Artificial Sequence
  Description of Artificial Sequence: Synthetic oligonucleotide
  Target: SCNA; (+) strand; PAM type: YTN; PAM sequence: CTA
cagggaccatttctagaaat

SEQ ID NO: 77569 - DNA, 20 bp, Artificial Sequence
  Description of Artificial Sequence: Synthetic oligonucleotide
  Target: SCNA; (+) strand; PAM type: YTN; PAM sequence: TTT
ctagaaatcaaatttctaga

SEQ ID NO: 77570 - DNA, 20 bp, Artificial Sequence
  Description of Artificial Sequence: Synthetic oligonucleotide
  Target: SCNA; (+) strand; PAM type: YTN; PAM sequence: TTC
tagaaatcaaatttctagaa

SEQ ID NO: 77571 - DNA, 20 bp, Artificial Sequence
  Description of Artificial Sequence: Synthetic oligonucleotide
  Target: SCNA; (+) strand; PAM type: YTN; PAM sequence: CTA
gaaatcaaatttctagaatt

SEQ ID NO: 77572 - DNA, 20 bp, Artificial Sequence
  Description of Artificial Sequence: Synthetic oligonucleotide
  Target: SCNA; (+) strand; PAM type: YTN; PAM sequence: TTT
ctagaattcaagccacacca

SEQ ID NO: 77573 - DNA, 20 bp, Artificial Sequence
  Description of Artificial Sequence: Synthetic oligonucleotide
  Target: SCNA; (+) strand; PAM type: YTN; PAM sequence: TTC
tagaattcaagccacaccac

SEQ ID NO: 77574 - DNA, 20 bp, Artificial Sequence
  Description of Artificial Sequence: Synthetic oligonucleotide
  Target: SCNA; (+) strand; PAM type: YTN; PAM sequence: CTA
gaattcaagccacaccacat

SEQ ID NO: 77575 - DNA, 20 bp, Artificial Sequence
  Description of Artificial Sequence: Synthetic oligonucleotide
  Target: SCNA; (+) strand; PAM type: YTN; PAM sequence: TTC
aagccacaccacatacaata

SEQ ID NO: 77576 - DNA, 20 bp, Artificial Sequence
  Description of Artificial Sequence: Synthetic oligonucleotide
  Target: SCNA; (+) strand; PAM type: YTN; PAM sequence: TTA
ccccatagcttattgataat

SEQ ID NO: 77577 - DNA, 20 bp, Artificial Sequence
  Description of Artificial Sequence: Synthetic oligonucleotide
  Target: SCNA; (+) strand; PAM type: YTN; PAM sequence: CTT
attgataatgctaaaatatg

SEQ ID NO: 77578 - DNA, 20 bp, Artificial Sequence
  Description of Artificial Sequence: Synthetic oligonucleotide
  Target: SCNA; (+) strand; PAM type: YTN; PAM sequence: TTA
ttgataatgctaaaatatgg

SEQ ID NO: 77579 - DNA, 20 bp, Artificial Sequence
  Description of Artificial Sequence: Synthetic oligonucleotide
  Target: SCNA; (+) strand; PAM type: YTN; PAM sequence: TTG
ataatgctaaaatatgggat

SEQ ID NO: 77580 - DNA, 20 bp, Artificial Sequence
  Description of Artificial Sequence: Synthetic oligonucleotide
  Target: SCNA; (+) strand; PAM type: YTN; PAM sequence: CTA
aaatatgggatatctttgca

SEQ ID NO: 77581 - DNA, 20 bp, Artificial Sequence
  Description of Artificial Sequence: Synthetic oligonucleotide
  Target: SCNA; (+) strand; PAM type: YTN; PAM sequence: CTT
tgcatagagatccttaaatt

SEQ ID NO: 77582 - DNA, 20 bp, Artificial Sequence
  Description of Artificial Sequence: Synthetic oligonucleotide
  Target: SCNA; (+) strand; PAM type: YTN; PAM sequence: TTT
gcatagagatccttaaattg

SEQ ID NO: 77583 - DNA, 20 bp, Artificial Sequence
  Description of Artificial Sequence: Synthetic oligonucleotide
  Target: SCNA; (+) strand; PAM type: YTN; PAM sequence: TTG
catagagatccttaaattgt

SEQ ID NO: 77584 - DNA, 20 bp, Artificial Sequence
  Description of Artificial Sequence: Synthetic oligonucleotide
  Target: SCNA; (+) strand; PAM type: YTN; PAM sequence: CTT
aaattgtgctagaatatgag

SEQ ID NO: 77585 - DNA, 20 bp, Artificial Sequence
  Description of Artificial Sequence: Synthetic oligonucleotide
  Target: SCNA; (+) strand; PAM type: YTN; PAM sequence: TTA
aattgtgctagaatatgaga

SEQ ID NO: 77586 - DNA, 20 bp, Artificial Sequence
  Description of Artificial Sequence: Synthetic oligonucleotide
  Target: SCNA; (+) strand; PAM type: YTN; PAM sequence: TTG
tgctagaatatgagatcttt

SEQ ID NO: 77587 - DNA, 20 bp, Artificial Sequence
  Description of Artificial Sequence: Synthetic oligonucleotide
  Target: SCNA; (+) strand; PAM type: YTN; PAM sequence: CTA
gaatatgagatctttttgca

SEQ ID NO: 77588 - DNA, 20 bp, Artificial Sequence
  Description of Artificial Sequence: Synthetic oligonucleotide
  Target: SCNA; (+) strand; PAM type: YTN; PAM sequence: CTT
tttgcatagagatcctctcg

SEQ ID NO: 77589 - DNA, 20 bp, Artificial Sequence
  Description of Artificial Sequence: Synthetic oligonucleotide
  Target: SCNA; (+) strand; PAM type: YTN; PAM sequence: TTT
ttgcatagagatcctctcgc

SEQ ID NO: 77590 - DNA, 20 bp, Artificial Sequence
  Description of Artificial Sequence: Synthetic oligonucleotide
  Target: SCNA; (+) strand; PAM type: YTN; PAM sequence: TTT
tgcatagagatcctctcgca

SEQ ID NO: 77591 - DNA, 20 bp, Artificial Sequence
  Description of Artificial Sequence: Synthetic oligonucleotide
  Target: SCNA; (+) strand; PAM type: YTN; PAM sequence: TTT
gcatagagatcctctcgcat

SEQ ID NO: 77592 - DNA, 20 bp, Artificial Sequence
  Description of Artificial Sequence: Synthetic oligonucleotide
  Target: SCNA; (+) strand; PAM type: YTN; PAM sequence: TTG
catagagatcctctcgcata

SEQ ID NO: 77593 - DNA, 20 bp, Artificial Sequence
  Description of Artificial Sequence: Synthetic oligonucleotide
  Target: SCNA; (+) strand; PAM type: YTN; PAM sequence: CTC
tcgcatagagaattcctgct

SEQ ID NO: 77594 - DNA, 20 bp, Artificial Sequence
  Description of Artificial Sequence: Synthetic oligonucleotide
  Target: SCNA; (+) strand; PAM type: YTN; PAM sequence: CTC
gcatagagaattcctgctac

SEQ ID NO: 77595 - DNA, 20 bp, Artificial Sequence
  Description of Artificial Sequence: Synthetic oligonucleotide
  Target: SCNA; (+) strand; PAM type: YTN; PAM sequence: TTC
ctgctactcaagaatcaatg

SEQ ID NO: 77596 - DNA, 20 bp, Artificial Sequence
  Description of Artificial Sequence: Synthetic oligonucleotide
  Target: SCNA; (+) strand; PAM type: YTN; PAM sequence: CTG
ctactcaagaatcaatgtta

SEQ ID NO: 77597 - DNA, 20 bp, Artificial Sequence
  Description of Artificial Sequence: Synthetic oligonucleotide
  Target: SCNA; (+) strand; PAM type: YTN; PAM sequence: CTA
ctcaagaatcaatgttagac

SEQ ID NO: 77598 - DNA, 20 bp, Artificial Sequence
  Description of Artificial Sequence: Synthetic oligonucleotide
  Target: SCNA; (+) strand; PAM type: YTN; PAM sequence: CTC
aagaatcaatgttagacatt

SEQ ID NO: 77599 - DNA, 20 bp, Artificial Sequence
  Description of Artificial Sequence: Synthetic oligonucleotide
  Target: SCNA; (+) strand; PAM type: YTN; PAM sequence: TTA
gacattcactctgtgctcac

SEQ ID NO: 77600 - DNA, 20 bp, Artificial Sequence
  Description of Artificial Sequence: Synthetic oligonucleotide
  Target: SCNA; (+) strand; PAM type: YTN; PAM sequence: TTC
actctgtgctcacagtgttc

SEQ ID NO: 77601 - DNA, 20 bp, Artificial Sequence
  Description of Artificial Sequence: Synthetic oligonucleotide
  Target: SCNA; (+) strand; PAM type: YTN; PAM sequence: CTC
tgtgctcacagtgttctttt

SEQ ID NO: 77602 - DNA, 20 bp, Artificial Sequence
  Description of Artificial Sequence: Synthetic oligonucleotide
  Target: SCNA; (+) strand; PAM type: YTN; PAM sequence: CTG
tgctcacagtgttcttttct

SEQ ID NO: 77603 - DNA, 20 bp, Artificial Sequence
  Description of Artificial Sequence: Synthetic oligonucleotide
  Target: SCNA; (+) strand; PAM type: YTN; PAM sequence: CTC
acagtgttcttttctcttct

SEQ ID NO: 77604 - DNA, 20 bp, Artificial Sequence
  Description of Artificial Sequence: Synthetic oligonucleotide
  Target: SCNA; (+) strand; PAM type: YTN; PAM sequence: TTC
ttttctcttctgtcaaaaaa

SEQ ID NO: 77605 - DNA, 20 bp, Artificial Sequence
  Description of Artificial Sequence: Synthetic oligonucleotide
  Target: SCNA; (+) strand; PAM type: YTN; PAM sequence: CTT
ttctcttctgtcaaaaaaaa

SEQ ID NO: 77606 - DNA, 20 bp, Artificial Sequence
  Description of Artificial Sequence: Synthetic oligonucleotide
  Target: SCNA; (+) strand; PAM type: YTN; PAM sequence: TTT
tctcttctgtcaaaaaaaaa

SEQ ID NO: 77607 - DNA, 20 bp, Artificial Sequence
  Description of Artificial Sequence: Synthetic oligonucleotide
  Target: SCNA; (+) strand; PAM type: YTN; PAM sequence: TTT
ctcttctgtcaaaaaaaaaa

SEQ ID NO: 77608 - DNA, 20 bp, Artificial Sequence
  Description of Artificial Sequence: Synthetic oligonucleotide
  Target: SCNA; (+) strand; PAM type: YTN; PAM sequence: TTC
tcttctgtcaaaaaaaaaaa

SEQ ID NO: 77609 - DNA, 20 bp, Artificial Sequence
  Description of Artificial Sequence: Synthetic oligonucleotide
  Target: SCNA; (+) strand; PAM type: YTN; PAM sequence: CTC
ttctgtcaaaaaaaaaaaaa

SEQ ID NO: 77610 - DNA, 20 bp, Artificial Sequence
  Description of Artificial Sequence: Synthetic oligonucleotide
  Target: SCNA; (+) strand; PAM type: YTN; PAM sequence: CTT
ctgtcaaaaaaaaaaaaaca

SEQ ID NO: 77611 - DNA, 20 bp, Artificial Sequence
  Description of Artificial Sequence: Synthetic oligonucleotide
  Target: SCNA; (+) strand; PAM type: YTN; PAM sequence: TTC
tgtcaaaaaaaaaaaaacaa

SEQ ID NO: 77612 - DNA, 20 bp, Artificial Sequence
  Description of Artificial Sequence: Synthetic oligonucleotide
  Target: SCNA; (+) strand; PAM type: YTN; PAM sequence: CTG
tcaaaaaaaaaaaaacaaac

SEQ ID NO: 77613 - DNA, 20 bp, Artificial Sequence
  Description of Artificial Sequence: Synthetic oligonucleotide
  Target: SCNA; (+) strand; PAM type: YTN; PAM sequence: CTT
attttacttgtgaccttcag

SEQ ID NO: 77614 - DNA, 20 bp, Artificial Sequence
  Description of Artificial Sequence: Synthetic oligonucleotide
  Target: SCNA; (+) strand; PAM type: YTN; PAM sequence: TTA
ttttacttgtgaccttcagt
